United States Patent Application Publication US 2022/0213167 A1 - sequence listing, part 29

SEQ ID NO: 612017 - protein, 15 aa, Homo sapiens
  CDR3 for alpha chain variable domain of TCR clone 306009 (TRAV2, TRAJ22)
CAVPSRGGSARQLTL

SEQ ID NO: 612018 - protein, 14 aa, Homo sapiens
  CDR3 for beta chain variable domain of TCR clone 306009 (TRBV7-6, TRBJ2-3)
CASSLGTVTDTQYF

SEQ ID NO: 612019 - protein, 16 aa, Homo sapiens
  CDR3 for alpha chain variable domain of TCR clone 306010 (TRAV29/DV5, TRAJ28)
CAADAYSGAGSYQLTF

SEQ ID NO: 612020 - protein, 15 aa, Homo sapiens
  CDR3 for beta chain variable domain of TCR clone 306010 (TRBV24-1, TRBJ1-4)
CATSDPQGADENLFF

SEQ ID NO: 612021 - protein, 14 aa, Homo sapiens
  CDR3 for alpha chain variable domain of TCR clone 306011 (TRAV20, TRAJ29)
CAVQAWVGNTPLVF

SEQ ID NO: 612022 - protein, 15 aa, Homo sapiens
  CDR3 for beta chain variable domain of TCR clone 306011 (TRBV29-1, TRBJ2-7)
CSVEFFYRGSYEQYF

SEQ ID NO: 612023 - protein, 17 aa, Homo sapiens
  CDR3 for alpha chain variable domain of TCR clone 306012 (TRAV3, TRAJ6)
CAVRDGPRAGGSYIPTF

SEQ ID NO: 612024 - protein, 13 aa, Homo sapiens
  CDR3 for beta chain variable domain of TCR clone 306012 (TRBV28, TRBJ2-1)
CASRSGGLNEQFF

SEQ ID NO: 612025 - protein, 14 aa, Homo sapiens
  CDR3 for alpha chain variable domain of TCR clone 306013 (TRAV1-2, TRAJ16)
CAVNRFSDGQKLLF

SEQ ID NO: 612026 - protein, 15 aa, Homo sapiens
  CDR3 for beta chain variable domain of TCR clone 306013 (TRBV19, TRBJ2-1)
CARSTGTSSYNEQFF

SEQ ID NO: 612027 - protein, 14 aa, Homo sapiens
  CDR3 for alpha chain variable domain of TCR clone 306014 (TRAV12-3, TRAJ10)
SHLPLTGGGNKLTF

SEQ ID NO: 612028 - protein, 14 aa, Homo sapiens
  CDR3 for beta chain variable domain of TCR clone 306014 (TRBV29-1, TRBJ2-2)
CSGRGSGNTGELFF

SEQ ID NO: 612029 - protein, 12 aa, Homo sapiens
  CDR3 for alpha chain variable domain of TCR clone 306015 (TRAV21, TRAJ31)
CAVSPARGRLMF

SEQ ID NO: 612030 - protein, 14 aa, Homo sapiens
  CDR3 for beta chain variable domain of TCR clone 306015 (TRBV28, TRBJ2-7)
CASSLLRIYYEQYF

SEQ ID NO: 612031 - protein, 11 aa, Homo sapiens
  CDR3 for alpha chain variable domain of TCR clone 306016 (TRAV1-1, TRAJ23)
RAVRPGGKLIF

SEQ ID NO: 612032 - protein, 15 aa, Homo sapiens
  CDR3 for beta chain variable domain of TCR clone 306016 (TRBV5-7, TRBJ2-7)
CASSLGPGRGHEQYF

SEQ ID NO: 612033 - protein, 15 aa, Homo sapiens
  CDR3 for alpha chain variable domain of TCR clone 306017 (TRAV17, TRAJ22)
CAMVAPSGSARQLTF

SEQ ID NO: 612034 - protein, 16 aa, Homo sapiens
  CDR3 for beta chain variable domain of TCR clone 306017 (TRBV10-3, TRBJ2-7)
CAIRADFADRPYEQYF

SEQ ID NO: 612035 - protein, 10 aa, Homo sapiens
  CDR3 for alpha chain variable domain of TCR clone 306018 (TRAV13-2, TRAJ20)
CAENICRLQA

SEQ ID NO: 612036 - protein, 15 aa, Homo sapiens
  CDR3 for beta chain variable domain of TCR clone 306018 (TRBV18, TRBJ1-2)
CASSPGNGLGYGNTF

SEQ ID NO: 612037 - protein, 14 aa, Homo sapiens
  CDR3 for alpha chain variable domain of TCR clone 306019 (TRAV4, TRAJ9)
CLVGAGTGGCKTIF

SEQ ID NO: 612038 - protein, 15 aa, Homo sapiens
  CDR3 for beta chain variable domain of TCR clone 306019 (TRBV7-2, TRBJ2-1)
CASSLASGRVNEQFF

SEQ ID NO: 612039 - protein, 12 aa, Homo sapiens
  CDR3 for alpha chain variable domain of TCR clone 306020 (TRAV8-6, TRAJ43)
CAVSNNNNEMRF

SEQ ID NO: 612040 - protein, 15 aa, Homo sapiens
  CDR3 for beta chain variable domain of TCR clone 306020 (TRBV7-3, TRBJ2-6)
CASSLGGSGANVLTF

SEQ ID NO: 612041 - protein, 15 aa, Homo sapiens
  CDR3 for alpha chain variable domain of TCR clone 306021 (TRAV8-3, TRAJ40)
CAVGGRTSGTYKYIF

SEQ ID NO: 612042 - protein, 16 aa, Homo sapiens
  CDR3 for beta chain variable domain of TCR clone 306021 (TRBV12-5, TRBJ2-5)
CASGPRTSGNQETQYF

SEQ ID NO: 612043 - protein, 14 aa, Homo sapiens
  CDR3 for alpha chain variable domain of TCR clone 306022 (TRAV27, TRAJ37)
CRSQGSSNTGKLIF

SEQ ID NO: 612044 - protein, 14 aa, Homo sapiens
  CDR3 for beta chain variable domain of TCR clone 306022 (TRBV19, TRBJ2-1)
CASPTFVLSGEQFF

SEQ ID NO: 612045 - protein, 14 aa, Homo sapiens
  CDR3 for alpha chain variable domain of TCR clone 306023 (TRAV13-2, TRAJ43)
CAEIPTYNHNDMRF

SEQ ID NO: 612046 - protein, 15 aa, Homo sapiens
  CDR3 for beta chain variable domain of TCR clone 306023 (TRBV7-9, TRBJ2-2)
CASGPLDTFPGELFF

SEQ ID NO: 612047 - protein, 13 aa, Homo sapiens
  CDR3 for alpha chain variable domain of TCR clone 306024 (TRAV8-3, TRAJ28)
CAVVAVGSYQLTF

SEQ ID NO: 612048 - protein, 20 aa, Homo sapiens
  CDR3 for beta chain variable domain of TCR clone 306024 (TRBV7-8, TRBJ2-2)
CASSHLFPGPTIHITGELFF

SEQ ID NO: 612049 - protein, 14 aa, Homo sapiens
  CDR3 for alpha chain variable domain of TCR clone 306025 (TRAV1-2, TRAJ16)
CAVNRFSDGQKLLF

SEQ ID NO: 612050 - protein, 12 aa, Homo sapiens
  CDR3 for beta chain variable domain of TCR clone 306025 (TRBV6-1, TRBJ1-5)
CASAQVVQPQHF

SEQ ID NO: 612051 - protein, 10 aa, Homo sapiens
  CDR3 for alpha chain variable domain of TCR clone 306026 (TRAV29/DV5, TRAJ48)
CAAGGEKLTF

SEQ ID NO: 612052 - protein, 16 aa, Homo sapiens
  CDR3 for beta chain variable domain of TCR clone 306026 (TRBV12-5, TRBJ2-5)
CASGPRTSGNQETQYF

SEQ ID NO: 612053 - protein, 14 aa, Homo sapiens
  CDR3 for alpha chain variable domain of TCR clone 306027 (TRAV17, TRAJ6)
CATDASGGSYIPTF

SEQ ID NO: 612054 - protein, 18 aa, Homo sapiens
  CDR3 for beta chain variable domain of TCR clone 306027 (TRBV11-2, TRBJ2-3)
CASSLGGASRGAPNTQYF

SEQ ID NO: 612055 - protein, 14 aa, Homo sapiens
  CDR3 for alpha chain variable domain of TCR clone 306028 (TRAV8-2, TRAJ4)
CVVSPSGDYNKLIF

SEQ ID NO: 612056 - protein, 15 aa, Homo sapiens
  CDR3 for beta chain variable domain of TCR clone 306028 (TRBV4-1, TRBJ1-4)
CASSDTGGTNEELFF

SEQ ID NO: 612057 - protein, 15 aa, Homo sapiens
  CDR3 for alpha chain variable domain of TCR clone 306029 (TRAV13-1, TRAJ17)
CAASIERAAGNKLTF

SEQ ID NO: 612058 - protein, 14 aa, Homo sapiens
  CDR3 for beta chain variable domain of TCR clone 306029 (TRBV20-1, TRBJ1-1)
CSAQTRIGGTEAFF

SEQ ID NO: 612059 - protein, 14 aa, Homo sapiens
  CDR3 for alpha chain variable domain of TCR clone 306030 (TRAV8-2, TRAJ23)
CVVSDDNQGGKIIF

SEQ ID NO: 612060 - protein, 16 aa, Homo sapiens
  CDR3 for beta chain variable domain of TCR clone 306030 (TRBV4-2, TRBJ2-5)
CASSQELVGSQETQYF

SEQ ID NO: 612061 - protein, 13 aa, Homo sapiens
  CDR3 for alpha chain variable domain of TCR clone 306031 (TRAV21, TRAJ20)
CAVGVFADYKLSF

SEQ ID NO: 612062 - protein, 17 aa, Homo sapiens
  CDR3 for beta chain variable domain of TCR clone 306031 (TRBV19, TRBJ1-1)
CASSRGGQALPNTEAFF

SEQ ID NO: 612063 - protein, 17 aa, Homo sapiens
  CDR3 for alpha chain variable domain of TCR clone 306032 (TRAV35, TRAJ52)
CDGQLAAGGTSYGKLTF

SEQ ID NO: 612064 - protein, 12 aa, Homo sapiens
  CDR3 for beta chain variable domain of TCR clone 306032 (TRBV20-1, TRBJ2-7)
CSAGRRQSEQYF

SEQ ID NO: 612065 - protein, 17 aa, Homo sapiens
  CDR3 for alpha chain variable domain of TCR clone 306033 (TRAV38-1, TRAJ45)
CAFMRSHSGGGADALTF

SEQ ID NO: 612066 - protein, 15 aa, Homo sapiens
  CDR3 for beta chain variable domain of TCR clone 306033 (TRBV7-2, TRBJ2-3)
CASSLVVRGPDTQYF

SEQ ID NO: 612067 - protein, 15 aa, Homo sapiens
  CDR3 for alpha chain variable domain of TCR clone 306034 (TRAV13-2, TRAJ40)
CAENRSRQGTYKYIF

SEQ ID NO: 612068 - protein, 15 aa, Homo sapiens
  CDR3 for beta chain variable domain of TCR clone 306034 (TRBV19, TRBJ2-1)
SASSMGWNSNNEQFF

SEQ ID NO: 612069 - protein, 13 aa, Homo sapiens
  CDR3 for alpha chain variable domain of TCR clone 306035 (TRAV13-1, TRAJ6)
CAASKGGSYIPTF

SEQ ID NO: 612070 - protein, 13 aa, Homo sapiens
  CDR3 for beta chain variable domain of TCR clone 306035 (TRBV7-9, TRBJ2-5)
CASLPSGGENQYF

SEQ ID NO: 612071 - protein, 11 aa, Homo sapiens
  CDR3 for alpha chain variable domain of TCR clone 306036 (TRAV1-1, TRAJ23)
CAGRQGGKLIF

SEQ ID NO: 612072 - protein, 13 aa, Homo sapiens
  CDR3 for beta chain variable domain of TCR clone 306036 (TRBV7-9, TRBJ1-2)
CASSLKQNYGYTF

SEQ ID NO: 612073 - protein, 11 aa, Homo sapiens
  CDR3 for alpha chain variable domain of TCR clone 306037 (TRAV1-2, TRAJ31)
CASHNTARLMF

SEQ ID NO: 612074 - protein, 13 aa, Homo sapiens
  CDR3 for beta chain variable domain of TCR clone 306037 (TRBV7-9, TRBJ2-7)
CASSPCDHYEQYF

SEQ ID NO: 612075 - protein, 18 aa, Homo sapiens
  CDR3 for alpha chain variable domain of TCR clone 306038 (TRAV21, TRAJ45)
CCGGPQGGSGGSADGLTF

SEQ ID NO: 612076 - protein, 10 aa, Homo sapiens
  CDR3 for beta chain variable domain of TCR clone 306038 (TRBV4-1, TRBJ2-7)
SRGDRHEQYF

SEQ ID NO: 612077 - protein, 15 aa, Homo sapiens
  CDR3 for alpha chain variable domain of TCR clone 306039 (TRAV14/DV4, TRAJ28)
CAMSPLRAGSYQLTF

SEQ ID NO: 612078 - protein, 15 aa, Homo sapiens
  CDR3 for beta chain variable domain of TCR clone 306039 (TRBV6-5, TRBJ2-1)
CASSYDAGAGNEQFF

SEQ ID NO: 612079 - protein, 18 aa, Homo sapiens
  CDR3 for alpha chain variable domain of TCR clone 306040 (TRAV13-1, TRAJ52)
CAAQNPNAGGTSYGKLTF

SEQ ID NO: 612080 - protein, 12 aa, Homo sapiens
  CDR3 for beta chain variable domain of TCR clone 306040 (TRBV4-3, TRBJ2-1)
CASSLSGYEQFF

SEQ ID NO: 612081 - protein, 12 aa, Homo sapiens
  CDR3 for alpha chain variable domain of TCR clone 306041 (TRAV8-3, TRAJ4)
WVGSGGYNKLIF

SEQ ID NO: 612082 - protein, 14 aa, Homo sapiens
  CDR3 for beta chain variable domain of TCR clone 306041 (TRBV24-1, TRBJ1-1)
CATSIPRGDTEAFV

SEQ ID NO: 612083 - protein, 13 aa, Homo sapiens
  CDR3 for alpha chain variable domain of TCR clone 306042 (TRAV23/DV6, TRAJ39)
CAASTSCRQHAHL

SEQ ID NO: 612084 - protein, 16 aa, Homo sapiens
  CDR3 for beta chain variable domain of TCR clone 306042 (TRBV19, TRBJ2-2)
CASRSPGTGATGELFF

SEQ ID NO: 612085 - protein, 13 aa, Homo sapiens
  CDR3 for alpha chain variable domain of TCR clone 306043 (TRAV41, TRAJ45)
CAVRSGGADGLTF

SEQ ID NO: 612086 - protein, 12 aa, Homo sapiens
  CDR3 for beta chain variable domain of TCR clone 306043 (TRBV29-1, TRBJ2-3)
CSVTGGADTQYF

SEQ ID NO: 612087 - protein, 14 aa, Homo sapiens
  CDR3 for alpha chain variable domain of TCR clone 306044 (TRAV12-2, TRAJ13)
CAVKKTGGYRKVTF

SEQ ID NO: 612088 - protein, 14 aa, Homo sapiens
  CDR3 for beta chain variable domain of TCR clone 306044 (TRBV4-1, TRBJ2-2)
CASSQAVNTGELFF

SEQ ID NO: 612089 - protein, 14 aa, Homo sapiens
  CDR3 for alpha chain variable domain of TCR clone 306045 (TRAV3, TRAJ40)
CAVRDRRGTYNYIF

SEQ ID NO: 612090 - protein, 15 aa, Homo sapiens
  CDR3 for beta chain variable domain of TCR clone 306045 (TRBV11-1, TRBJ1-3)
CASTDPRAFGNTIYF

SEQ ID NO: 612091 - protein, 14 aa, Homo sapiens
  CDR3 for alpha chain variable domain of TCR clone 306046 (TRAV1-1, TRAJ37)
CAASTSSNTGKLIF

SEQ ID NO: 612092 - protein, 15 aa, Homo sapiens
  CDR3 for beta chain variable domain of TCR clone 306046 (TRBV7-9, TRBJ2-7)
CASSPGGGLTYEQYF

SEQ ID NO: 612093 - protein, 16 aa, Homo sapiens
  CDR3 for alpha chain variable domain of TCR clone 306047 (TRAV4, TRAJ22)
CLVGDLYSGSARQLTF

SEQ ID NO: 612094 - protein, 16 aa, Homo sapiens
  CDR3 for beta chain variable domain of TCR clone 306047 (TRBV7-9, TRBJ2-3)
CASSPWREVGTDKQYF

SEQ ID NO: 612095 - protein, 13 aa, Homo sapiens
  CDR3 for alpha chain variable domain of TCR clone 306048 (TRAV3, TRAJ20)
CAVRDTPRYKLSF

SEQ ID NO: 612096 - protein, 16 aa, Homo sapiens
  CDR3 for beta chain variable domain of TCR clone 306048 (TRBV20-1, TRBJ2-7)
CSSRAPGLALSYEQYF

SEQ ID NO: 612097 - protein, 16 aa, Homo sapiens
  CDR3 for alpha chain variable domain of TCR clone 306049 (TRAV30, TRAJ24)
CGTEIVDADSWGKCQF

SEQ ID NO: 612098 - protein, 13 aa, Homo sapiens
  CDR3 for beta chain variable domain of TCR clone 306049 (TRBV12-4, TRBJ2-5)
CASSPGTEETQYF

SEQ ID NO: 612099 - protein, 16 aa, Homo sapiens
  CDR3 for alpha chain variable domain of TCR clone 306050 (TRAV26-1, TRAJ37)
CIYARHGSSNTGKLIF

SEQ ID NO: 612100 - protein, 15 aa, Homo sapiens
  CDR3 for beta chain variable domain of TCR clone 306050 (TRBV28, TRBJ1-5)
CASSPNGHSNQPQHF

SEQ ID NO: 612101 - protein, 12 aa, Homo sapiens
  CDR3 for alpha chain variable domain of TCR clone 306051 (TRAV3, TRAJ39)
CAVIEWSNMLTF

SEQ ID NO: 612102 - protein, 14 aa, Homo sapiens
  CDR3 for beta chain variable domain of TCR clone 306051 (TRBV7-8, TRBJ2-3)
CASSFPDGQNTQYF

SEQ ID NO: 612103 - protein, 14 aa, Homo sapiens
  CDR3 for alpha chain variable domain of TCR clone 306052 (TRAV17, TRAJ12)
CATDGVDSSYKLIF

SEQ ID NO: 612104 - protein, 16 aa, Homo sapiens
  CDR3 for beta chain variable domain of TCR clone 306052 (TRBV7-2, TRBJ1-5)
CASSPWGPEGNQPQHF

SEQ ID NO: 612105 - protein, 14 aa, Homo sapiens
  CDR3 for alpha chain variable domain of TCR clone 306053 (TRAV12-2, TRAJ52)
CAVPGGTSYGKMTF

SEQ ID NO: 612106 - protein, 11 aa, Homo sapiens
  CDR3 for beta chain variable domain of TCR clone 306053 (TRBV18, TRBJ2-1)
CQLTGTSEGFF

SEQ ID NO: 612107 - protein, 13 aa, Homo sapiens
  CDR3 for alpha chain variable domain of TCR clone 306054 (TRAV27, TRAJ49)
CAPRPYTGNQFYF

SEQ ID NO: 612108 - protein, 14 aa, Homo sapiens
  CDR3 for beta chain variable domain of TCR clone 306054 (TRBV4-2, TRBJ1-5)
CASSQDSINQPQHF

SEQ ID NO: 612109 - protein, 12 aa, Homo sapiens
  CDR3 for alpha chain variable domain of TCR clone 306055 (TRAV12-3, TRAJ17)
CAMTLTGNKLTF

SEQ ID NO: 612110 - protein, 17 aa, Homo sapiens
  CDR3 for beta chain variable domain of TCR clone 306055 (TRBV7-9, TRBJ2-1)
CASSAGTLGRSYNEQFF

SEQ ID NO: 612111 - protein, 19 aa, Homo sapiens
  CDR3 for alpha chain variable domain of TCR clone 306056 (TRAV38-1, TRAJ53)
CAFMKHGLESGGRNYKLTF

SEQ ID NO: 612112 - protein, 13 aa, Homo sapiens
  CDR3 for beta chain variable domain of TCR clone 306056 (TRBV19, TRBJ2-7)
CASSPRQSYEQYV

SEQ ID NO: 612113 - protein, 16 aa, Homo sapiens
  CDR3 for alpha chain variable domain of TCR clone 306057 (TRAV17, TRAJ52)
CATDPMGGTSYGKLTF

SEQ ID NO: 612114 - protein, 13 aa, Homo sapiens
  CDR3 for beta chain variable domain of TCR clone 306057 (TRBV4-1, TRBJ2-2)
CASSQENTGELFF

SEQ ID NO: 612115 - protein, 14 aa, Homo sapiens
  CDR3 for alpha chain variable domain of TCR clone 306058 (TRAV17, TRAJ33)
CATDARRSNYQLIW

SEQ ID NO: 612116 - protein, 15 aa, Homo sapiens
  CDR3 for beta chain variable domain of TCR clone 306058 (TRBV20-1, TRBJ2-7)
CSAESGTSGAYEQYF

SEQ ID NO: 612117 - protein, 16 aa, Homo sapiens
  CDR3 for alpha chain variable domain of TCR clone 306059 (TRAV38-1, TRAJ32)
CSFMKGGGGATNKLIF

SEQ ID NO: 612118 - protein, 13 aa, Homo sapiens
  CDR3 for beta chain variable domain of TCR clone 306059 (TRBV20-1, TRBJ2-5)
CSAREAFQETQYF

SEQ ID NO: 612119 - protein, 11 aa, Homo sapiens
  CDR3 for alpha chain variable domain of TCR clone 306060 (TRAV13-2, TRAJ26)
CAEIPGQNFVF

SEQ ID NO: 612120 - protein, 19 aa, Homo sapiens
  CDR3 for beta chain variable domain of TCR clone 306060 (TRBV19, TRBJ2-2)
CASTRPGLAGGRVTRELFF

SEQ ID NO: 612121 - protein, 14 aa, Homo sapiens
  CDR3 for alpha chain variable domain of TCR clone 306061 (TRAV1-2, TRAJ16)
CAVNPFSDGQKLLF

SEQ ID NO: 612122 - protein, 15 aa, Homo sapiens
  CDR3 for beta chain variable domain of TCR clone 306061 (TRBV9, TRBJ1-6)
CAGSVAGTGDSPLHF

SEQ ID NO: 612123 - protein, 12 aa, Homo sapiens
  CDR3 for alpha chain variable domain of TCR clone 306062 (TRAV17, TRAJ57)
CATDGGSEKLGF

SEQ ID NO: 612124 - protein, 13 aa, Homo sapiens
  CDR3 for beta chain variable domain of TCR clone 306062 (TRBV7-9, TRBJ2-7)
LASSFAGAYEQYF

SEQ ID NO: 612125 - protein, 13 aa, Homo sapiens
  CDR3 for alpha chain variable domain of TCR clone 306063 (TRAV13-2, TRAJ8)
CAFMNTGFQKLVF

SEQ ID NO: 612126 - protein, 17 aa, Homo sapiens
  CDR3 for beta chain variable domain of TCR clone 306063 (TRBV28, TRBJ2-1)
CACSSARQALTYNEQFF

SEQ ID NO: 612127 - protein, 15 aa, Homo sapiens
  CDR3 for alpha chain variable domain of TCR clone 306064 (TRAV35, TRAJ58)
CAGRRQETSGSRLTF

SEQ ID NO: 612128 - protein, 14 aa, Homo sapiens
  CDR3 for beta chain variable domain of TCR clone 306064 (TRBV11-2, TRBJ2-3)
CASSLGGGANTQYF

SEQ ID NO: 612129 - protein, 14 aa, Homo sapiens
  CDR3 for alpha chain variable domain of TCR clone 306065 (TRAV35, TRAJ33)
CAGSSQDSNYQLIW

SEQ ID NO: 612130 - protein, 15 aa, Homo sapiens
  CDR3 for beta chain variable domain of TCR clone 306065 (TRBV5-1, TRBJ1-4)
FAPGAWKDGNEKLFF

SEQ ID NO: 612131 - protein, 14 aa, Homo sapiens
  CDR3 for alpha chain variable domain of TCR clone 306066 (TRAV8-2, TRAJ4)
CVVSPSGGFNKLIF

SEQ ID NO: 612132 - protein, 15 aa, Homo sapiens
  CDR3 for beta chain variable domain of TCR clone 306066 (TRBV4-1, TRBJ1-4)
CASSDTGGTNENLFF

SEQ ID NO: 612133 - protein, 16 aa, Homo sapiens
  CDR3 for alpha chain variable domain of TCR clone 306067 (TRAV3, TRAJ4)
CAVRPSPSGGYNKLIF

SEQ ID NO: 612134 - protein, 17 aa, Homo sapiens
  CDR3 for beta chain variable domain of TCR clone 306067 (TRBV20-1, TRBJ2-1)
CSASSSGLAGSYNEQFF

SEQ ID NO: 612135 - protein, 18 aa, Homo sapiens
  CDR3 for alpha chain variable domain of TCR clone 306068 (TRAV13-1, TRAJ52)
CAASKRSAGGTSYGKLTF

SEQ ID NO: 612136 - protein, 15 aa, Homo sapiens
  CDR3 for beta chain variable domain of TCR clone 306068 (TRBV4-2, TRBJ2-3)
CASLRDGREGDTQYF

SEQ ID NO: 612137 - protein, 13 aa, Homo sapiens
  CDR3 for alpha chain variable domain of TCR clone 306069 (TRAV26-1, TRAJ8)
CIVRSTGFQKLVF

SEQ ID NO: 612138 - protein, 14 aa, Homo sapiens
  CDR3 for beta chain variable domain of TCR clone 306069 (TRBV3-1, TRBJ2-6)
CASSQLPGANVLTF

SEQ ID NO: 612139 - protein, 11 aa, Homo sapiens
  CDR3 for alpha chain variable domain of TCR clone 306070 (TRAV35, TRAJ34)
CWARNTDKLIF

SEQ ID NO: 612140 - protein, 14 aa, Homo sapiens
  CDR3 for beta chain variable domain of TCR clone 306070 (TRBV5-1, TRBJ2-7)
CASSRGEALYEQYF

SEQ ID NO: 612141 - protein, 13 aa, Homo sapiens
  CDR3 for alpha chain variable domain of TCR clone 306071 (TRAV29/DV5, TRAJ48)
CAASSFGNEKLTF

SEQ ID NO: 612142 - protein, 14 aa, Homo sapiens
  CDR3 for beta chain variable domain of TCR clone 306071 (TRBV3-1, TRBJ2-2)
CASSQDWVQGELVF

SEQ ID NO: 612143 - protein, 12 aa, Homo sapiens
  CDR3 for alpha chain variable domain of TCR clone 306072 (TRAV27, TRAJ35)
CAGADFGNVLHC

SEQ ID NO: 612144 - protein, 16 aa, Homo sapiens
  CDR3 for beta chain variable domain of TCR clone 306072 (TRBV6-1, TRBJ2-1)
CASILRQGSSHNEQFF

SEQ ID NO: 612145 - protein, 14 aa, Homo sapiens
  CDR3 for alpha chain variable domain of TCR clone 306073 (TRAV1-2, TRAJ16)
CAVNRFSDGQKLLF

SEQ ID NO: 612146 - protein, 14 aa, Homo sapiens
  CDR3 for beta chain variable domain of TCR clone 306073 (TRBV25-1, TRBJ1-1)
CDSTHLGGNTEDFF

SEQ ID NO: 612147 - protein, 13 aa, Homo sapiens
  CDR3 for alpha chain variable domain of TCR clone 306074 (TRAV13-2, TRAJ48)
CAEMDFGNEKLTF

SEQ ID NO: 612148 - protein, 17 aa, Homo sapiens
  CDR3 for beta chain variable domain of TCR clone 306074 (TRBV7-9, TRBJ1-6)
CASSSPGRGNSPLTLGT

SEQ ID NO: 612149 - protein, 11 aa, Homo sapiens
  CDR3 for alpha chain variable domain of TCR clone 306075 (TRAV2, TRAJ33)
CAVESNYQLIW

SEQ ID NO: 612150 - protein, 17 aa, Homo sapiens
  CDR3 for beta chain variable domain of TCR clone 306075 (TRBV24-1, TRBJ2-1)
CATSDVSTSGTYNEQFF

SEQ ID NO: 612151 - protein, 12 aa, Homo sapiens
  CDR3 for alpha chain variable domain of TCR clone 306076 (TRAV12-3, TRAJ17)
CAITLTGNKLTF

SEQ ID NO: 612152 - protein, 13 aa, Homo sapiens
  CDR3 for beta chain variable domain of TCR clone 306076 (TRBV10-3, TRBJ1-1)
CAIIPEGGTEAFF

SEQ ID NO: 612153 - protein, 13 aa, Homo sapiens
  CDR3 for alpha chain variable domain of TCR clone 306077 (TRAV2, TRAJ15)
CAVASQAGTALIF

SEQ ID NO: 612154 - protein, 13 aa, Homo sapiens
  CDR3 for beta chain variable domain of TCR clone 306077 (TRBV2, TRBJ1-1)
CASSVSGYTEAFF

SEQ ID NO: 612155 - protein, 22 aa, Homo sapiens
  CDR3 for alpha chain variable domain of TCR clone 306078 (TRAV3, TRAJ38)
CAVRDCLNAGNNHIQNPDPAVY

SEQ ID NO: 612156 - protein, 15 aa, Homo sapiens
  CDR3 for beta chain variable domain of TCR clone 306078 (TRBV20-1, TRBJ2-7)
CSARDRVSGMDEQYF

SEQ ID NO: 612157 - protein, 13 aa, Homo sapiens
  CDR3 for alpha chain variable domain of TCR clone 306079 (TRAV13-2, TRAJ53)
CAENMGNNYKLTF

SEQ ID NO: 612158 - protein, 13 aa, Homo sapiens
  CDR3 for beta chain variable domain of TCR clone 306079 (TRBV4-1, TRBJ2-2)
CASSQENTGELFF

SEQ ID NO: 612159 - protein, 16 aa, Homo sapiens
  CDR3 for alpha chain variable domain of TCR clone 306080 (TRAV8-1, TRAJ39)
CAVNVPSYNAGNMLTF

SEQ ID NO: 612160 - protein, 15 aa, Homo sapiens
  CDR3 for beta chain variable domain of TCR clone 306080 (TRBV4-1, TRBJ2-3)
CASRSTSAGTDTQYF

SEQ ID NO: 612161 - protein, 15 aa, Homo sapiens
  CDR3 for alpha chain variable domain of TCR clone 306081 (TRAV8-3, TRAJ45)
CASSYSGGGADGLTF

SEQ ID NO: 612162 - protein, 13 aa, Homo sapiens
  CDR3 for beta chain variable domain of TCR clone 306081 (TRBV5-1, TRBJ1-1)
CASSADWDTEAFF

SEQ ID NO: 612163 - protein, 14 aa, Homo sapiens
  CDR3 for alpha chain variable domain of TCR clone 306082 (TRAV12-2, TRAJ8)
CSVKENTGFQKLVF

SEQ ID NO: 612164 - protein, 15 aa, Homo sapiens
  CDR3 for beta chain variable domain of TCR clone 306082 (TRBV7-9, TRBJ1-5)
CASSQGHQPNQPQHF

SEQ ID NO: 612165 - protein, 13 aa, Homo sapiens
  CDR3 for alpha chain variable domain of TCR clone 306083 (TRAV36/DV7, TRAJ21)
CAVEAYNFNTFYF

SEQ ID NO: 612166 - protein, 14 aa, Homo sapiens
  CDR3 for beta chain variable domain of TCR clone 306083 (TRBV6-1, TRBJ1-1)
CASSGTGLNTEAFF

SEQ ID NO: 612167 - protein, 14 aa, Homo sapiens
  CDR3 for alpha chain variable domain of TCR clone 306084 (TRAV16, TRAJ33)
CALSGMDSNYQLIW

SEQ ID NO: 612168 - protein, 17 aa, Homo sapiens
  CDR3 for beta chain variable domain of TCR clone 306084 (TRBV25-1, TRBJ2-7)
CASSDARVVFSSYEQYF

SEQ ID NO: 612169 - protein, 15 aa, Homo sapiens
  CDR3 for alpha chain variable domain of TCR clone 306085 (TRAV21, TRAJ13)
CAVPRSFWGLPESYL

SEQ ID NO: 612170 - protein, 13 aa, Homo sapiens
  CDR3 for beta chain variable domain of TCR clone 306085 (TRBV4-2, TRBJ1-1)
CASSQAGNTEAFF

SEQ ID NO: 612171 - protein, 13 aa, Homo sapiens
  CDR3 for alpha chain variable domain of TCR clone 306086 (TRAV23/DV6, TRAJ22)
CAPYSVSARPLTF

SEQ ID NO: 612172 - protein, 15 aa, Homo sapiens
  CDR3 for beta chain variable domain of TCR clone 306086 (TRBV11-2, TRBJ1-6)
CASSLDPWAVSPLHF

SEQ ID NO: 612173 - protein, 16 aa, Homo sapiens
  CDR3 for alpha chain variable domain of TCR clone 306087 (TRAV26-1, TRAJ33)
CIVPFWGEDSNYQLIW

SEQ ID NO: 612174 - protein, 14 aa, Homo sapiens
  CDR3 for beta chain variable domain of TCR clone 306087 (TRBV6-3, TRBJ1-1)
CDSSYHSKNTEAFF

SEQ ID NO: 612175 - protein, 15 aa, Homo sapiens
  CDR3 for alpha chain variable domain of TCR clone 306088 (TRAV8-3, TRAJ27)
CAVGTSKTNAGKSTF

SEQ ID NO: 612176 - protein, 15 aa, Homo sapiens
  CDR3 for beta chain variable domain of TCR clone 306088 (TRBV27, TRBJ2-1)
CASSNGGGSSNEQFF

SEQ ID NO: 612177 - protein, 11 aa, Homo sapiens
  CDR3 for alpha chain variable domain of TCR clone 306089 (TRAV1-1, TRAJ23)
CAVRQGGKIIF

SEQ ID NO: 612178 - protein, 15 aa, Homo sapiens
  CDR3 for beta chain variable domain of TCR clone 306089 (TRBV20-1, TRBJ2-7)
CSARDRVSGMDEQYF

SEQ ID NO: 612179 - protein, 14 aa, Homo sapiens
  CDR3 for alpha chain variable domain of TCR clone 306090 (TRAV8-2, TRAJ37)
CVASIYGNTGKLIF

SEQ ID NO: 612180 - protein, 11 aa, Homo sapiens
  CDR3 for beta chain variable domain of TCR clone 306090 (TRBV18, TRBJ2-5)
CASSPRETQYF

SEQ ID NO: 612181 - protein, 16 aa, Homo sapiens
  CDR3 for alpha chain variable domain of TCR clone 306091 (TRAV1-2, TRAJ10)
CAARGVLTGGGNKLTF

SEQ ID NO: 612182 - protein, 15 aa, Homo sapiens
  CDR3 for beta chain variable domain of TCR clone 306091 (TRBV27, TRBJ2-7)
CASSPIVTGAYEQYF

SEQ ID NO: 612183 - protein, 10 aa, Homo sapiens
  CDR3 for alpha chain variable domain of TCR clone 306092 (TRAV1-2, TRAJ20)
CALNDYKLSF

SEQ ID NO: 612184 - protein, 13 aa, Homo sapiens
  CDR3 for beta chain variable domain of TCR clone 306092 (TRBV12-4, TRBJ1-2)
CASSLRQGKGYTF

SEQ ID NO: 612185 - protein, 14 aa, Homo sapiens
  CDR3 for alpha chain variable domain of TCR clone 306093 (TRAV17, TRAJ12)
CATYEKDSSYKLIF

SEQ ID NO: 612186 - protein, 16 aa, Homo sapiens
  CDR3 for beta chain variable domain of TCR clone 306093 (TRBV11-2, TRBJ2-1)
CASSPRLAGVYNEQFF

SEQ ID NO: 612187 - protein, 14 aa, Homo sapiens
  CDR3 for alpha chain variable domain of TCR clone 306094 (TRAV12-2, TRAJ13)
CAVKKTGGDQKVTF

SEQ ID NO: 612188 - protein, 15 aa, Homo sapiens
  CDR3 for beta chain variable domain of TCR clone 306094 (TRBV28, TRBJ2-5)
CASSPPWSYQETQYF

SEQ ID NO: 612189 - protein, 12 aa, Homo sapiens
  CDR3 for alpha chain variable domain of TCR clone 306095 (TRAV25, TRAJ35)
CAGIGFGNVLHC

SEQ ID NO: 612190 - protein, 13 aa, Homo sapiens
  CDR3 for beta chain variable domain of TCR clone 306095 (TRBV25-1, TRBJ2-2)
CASRKANTGELVF

SEQ ID NO: 612191 - protein, 12 aa, Homo sapiens
  CDR3 for alpha chain variable domain of TCR clone 306096 (TRAV8-3, TRAJ27)
CAVGAEAGKSTF

SEQ ID NO: 612192 - protein, 14 aa, Homo sapiens
  CDR3 for beta chain variable domain of TCR clone 306096 (TRBV2, TRBJ2-1)
CASRLIVGNDEQFF

SEQ ID NO: 612193 - protein, 17 aa, Homo sapiens
  CDR3 for alpha chain variable domain of TCR clone 306097 (TRAV13-1, TRAJ53)
CAASWKSSGGRNNKLTF

SEQ ID NO: 612194 - protein, 19 aa, Homo sapiens
  CDR3 for beta chain variable domain of TCR clone 306097 (TRBV7-9, TRBJ2-1)
CASSHNRGALLRSYNEQFF

SEQ ID NO: 612195 - protein, 13 aa, Homo sapiens
  CDR3 for alpha chain variable domain of TCR clone 306098 (TRAV38-1, TRAJ42)
CARWGGSQGNLIF

SEQ ID NO: 612196 - protein, 17 aa, Homo sapiens
  CDR3 for beta chain variable domain of TCR clone 306098 (TRBV7-2, TRBJ2-2)
CASSPRGAGEGTGELFF

SEQ ID NO: 612197 - protein, 14 aa, Homo sapiens
  CDR3 for alpha chain variable domain of TCR clone 306099 (TRAV3, TRAJ22)
CAVSASGSARQLTF

SEQ ID NO: 612198 - protein, 12 aa, Homo sapiens
  CDR3 for beta chain variable domain of TCR clone 306099 (TRBV12-4, TRBJ1-1)
CASSFGRTEAFF

SEQ ID NO: 612199 - protein, 12 aa, Homo sapiens
  CDR3 for alpha chain variable domain of TCR clone 306100 (TRAV13-1, TRAJ49)
CAASPMGNQFYF

SEQ ID NO: 612200 - protein, 18 aa, Homo sapiens
  CDR3 for beta chain variable domain of TCR clone 306100 (TRBV11-2, TRBJ2-6)
CASSLNPFLGTGANVLTF

SEQ ID NO: 612201 - protein, 14 aa, Homo sapiens
  CDR3 for alpha chain variable domain of TCR clone 306101 (TRAV4, TRAJ9)
CLVGSGTGGFKTIF

SEQ ID NO: 612202 - protein, 14 aa, Homo sapiens
  CDR3 for beta chain variable domain of TCR clone 306101 (TRBV20-1, TRBJ2-7)
CSAKRGRSSYEQYF

SEQ ID NO: 612203 - protein, 14 aa, Homo sapiens
  CDR3 for alpha chain variable domain of TCR clone 306102 (TRAV17, TRAJ6)
CATEASGGSYIPTF

SEQ ID NO: 612204 - protein, 19 aa, Homo sapiens
  CDR3 for beta chain variable domain of TCR clone 306102 (TRBV4-3, TRBJ2-7)
CASSQEFIGWQVTPYEQYF

SEQ ID NO: 612205 - protein, 19 aa, Homo sapiens
  CDR3 for alpha chain variable domain of TCR clone 306103 (TRAV2, TRAJ20)
ILQVRDADAAVYRDCKLSF

SEQ ID NO: 612206 - protein, 18 aa, Homo sapiens
  CDR3 for beta chain variable domain of TCR clone 306103 (TRBV20-1, TRBJ2-3)
CSASGLAGGPGTTDTQYF

SEQ ID NO: 612207 - protein, 11 aa, Homo sapiens
  CDR3 for alpha chain variable domain of TCR clone 306104 (TRAV2, TRAJ13)
CASGGYQKVTF

SEQ ID NO: 612208 - protein, 12 aa, Homo sapiens
  CDR3 for beta chain variable domain of TCR clone 306104 (TRBV5-1, TRBJ2-7)
CASSFRGYEQYF

SEQ ID NO: 612209 - protein, 12 aa, Homo sapiens
  CDR3 for alpha chain variable domain of TCR clone 306105 (TRAV17, TRAJ20)
CATQSNDYKLSF

SEQ ID NO: 612210 - protein, 13 aa, Homo sapiens
  CDR3 for beta chain variable domain of TCR clone 306105 (TRBV10-3, TRBJ1-1)
CAIIPEGGTEAVF

SEQ ID NO: 612211 - protein, 14 aa, Homo sapiens
  CDR3 for alpha chain variable domain of TCR clone 306106 (TRAV26-2, TRAJ32)
CCVGYGGATNKLIF

SEQ ID NO: 612212 - protein, 14 aa, Homo sapiens
  CDR3 for beta chain variable domain of TCR clone 306106 (TRBV12-5, TRBJ2-5)
CASGSRTHQETQYF

SEQ ID NO: 612213 - protein, 14 aa, Homo sapiens
  CDR3 for alpha chain variable domain of TCR clone 306107 (TRAV20, TRAJ17)
CAVRREAAGNKPTF

SEQ ID NO: 612214 - protein, 13 aa, Homo sapiens
  CDR3 for beta chain variable domain of TCR clone 306107 (TRBV23-1, TRBJ2-1)
CASNRETYNEQFF

SEQ ID NO: 612215 - protein, 14 aa, Homo sapiens
  CDR3 for alpha chain variable domain of TCR clone 306108 (TRAV1-2, TRAJ8)
CAVREDTGFQKLVF

SEQ ID NO: 612216 - protein, 14 aa, Homo sapiens
  CDR3 for beta chain variable domain of TCR clone 306108 (TRBV12-4, TRBJ1-2)
CASSFVGTAYGYTF

SEQ ID NO: 612217 - protein, 13 aa, Homo sapiens
  CDR3 for alpha chain variable domain of TCR clone 306109 (TRAV17, TRAJ9)
CATDYTGGFKTIF

SEQ ID NO: 612218 - protein, 12 aa, Homo sapiens
  CDR3 for beta chain variable domain of TCR clone 306109 (TRBV28, TRBJ1-5)
CATDRGYQPQHF

SEQ ID NO: 612219 - protein, 14 aa, Homo sapiens
  CDR3 for alpha chain variable domain of TCR clone 306110 (TRAV1-2, TRAJ8)
CAVREDTGFQKLVF

SEQ ID NO: 612220 - protein, 14 aa, Homo sapiens
  CDR3 for beta chain variable domain of TCR clone 306110 (TRBV7-2, TRBJ2-1)
CASSLRAGGREQFF

SEQ ID NO: 612221 - protein, 13 aa, Homo sapiens
  CDR3 for alpha chain variable domain of TCR clone 306111 (TRAV12-3, TRAJ13)
CAMSSGGYQKVTF

SEQ ID NO: 612222 - protein, 14 aa, Homo sapiens
  CDR3 for beta chain variable domain of TCR clone 306111 (TRBV27, TRBJ2-5)
CASSSLKGWETQYF

SEQ ID NO: 612223 - protein, 14 aa, Homo sapiens
  CDR3 for alpha chain variable domain of TCR clone 306112 (TRAV8-6, TRAJ53)
CAALVLGSNYKLTF

SEQ ID NO: 612224 - protein, 12 aa, Homo sapiens
  CDR3 for beta chain variable domain of TCR clone 306112 (TRBV11-2, TRBJ2-2)
CASSLGGGELFF

SEQ ID NO: 612225 - protein, 17 aa, Homo sapiens
  CDR3 for alpha chain variable domain of TCR clone 306113 (TRAV3, TRAJ42)
CAVRDRDYGGSQGNLIF

SEQ ID NO: 612226 - protein, 13 aa, Homo sapiens
  CDR3 for beta chain variable domain of TCR clone 306113 (TRBV7-8, TRBJ2-1)
CASTRDAVDEQFF

SEQ ID NO: 612227 - protein, 13 aa, Homo sapiens
  CDR3 for alpha chain variable domain of TCR clone 306114 (TRAV8-6, TRAJ49)
CAVSGTTGNQFYF

SEQ ID NO: 612228 - protein, 16 aa, Homo sapiens
  CDR3 for beta chain variable domain of TCR clone 306114 (TRBV7-8, TRBJ2-6)
CASRVGDSSGANVLTF

SEQ ID NO: 612229 - protein, 10 aa, Homo sapiens
  CDR3 for alpha chain variable domain of TCR clone 306115 (TRAV36/DV7, TRAJ13)
CAAGYQKVTF

SEQ ID NO: 612230 - protein, 16 aa, Homo sapiens
  CDR3 for beta chain variable domain of TCR clone 306115 (TRBV7-3, TRBJ2-2)
CASSLKRGTLSGELFY

SEQ ID NO: 612231 - protein, 15 aa, Homo sapiens
  CDR3 for alpha chain variable domain of TCR clone 306116 (TRAV3, TRAJ3)
YAVRDMSSSASKIIF

SEQ ID NO: 612232 - protein, 14 aa, Homo sapiens
  CDR3 for beta chain variable domain of TCR clone 306116 (TRBV6-6, TRBJ2-7)
CASSIAGGVDEQYF

SEQ ID NO: 612233 - protein, 13 aa, Homo sapiens
  CDR3 for alpha chain variable domain of TCR clone 306117 (TRAV16, TRAJ22)
CVFRKGSARQLTF

SEQ ID NO: 612234 - protein, 15 aa, Homo sapiens
  CDR3 for beta chain variable domain of TCR clone 306117 (TRBV12-4, TRBJ2-5)
CASSPPTGLQETQYF

SEQ ID NO: 612235 - protein, 15 aa, Homo sapiens
  CDR3 for alpha chain variable domain of TCR clone 306118 (TRAV25, TRAJ23)
CALAQNYNQGGKLIF

SEQ ID NO: 612236 - protein, 13 aa, Homo sapiens
  CDR3 for beta chain variable domain of TCR clone 306118 (TRBV11-3, TRBJ1-1)
CASSWDGNTEAFF

SEQ ID NO: 612237 - protein, 13 aa, Homo sapiens
  CDR3 for alpha chain variable domain of TCR clone 306119 (TRAV21, TRAJ57)
CSVIEGGSEKLVF

SEQ ID NO: 612238 - protein, 14 aa, Homo sapiens
  CDR3 for beta chain variable domain of TCR clone 306119 (TRBV12-5, TRBJ2-5)
CASGSRTHQETQYF

SEQ ID NO: 612239 - protein, 12 aa, Homo sapiens
  CDR3 for alpha chain variable domain of TCR clone 306120 (TRAV12-3, TRAJ5)
CAMDTGRRALTF

SEQ ID NO: 612240 - protein, 13 aa, Homo sapiens
  CDR3 for beta chain variable domain of TCR clone 306120 (TRBV7-7, TRBJ2-2)
CASSQTSAGELFF

SEQ ID NO: 612241 - protein, 20 aa, Homo sapiens
  CDR3 for alpha chain variable domain of TCR clone 306121 (TRAV26-1, TRAJ42)
CCVLLHRRTYYGGSQGNLIF

SEQ ID NO: 612242 - protein, 16 aa, Homo sapiens
  CDR3 for beta chain variable domain of TCR clone 306121 (TRBV7-3, TRBJ2-2)
CASSLKRGTLSGELFF

SEQ ID NO: 612243 - protein, 14 aa, Homo sapiens
  CDR3 for alpha chain variable domain of TCR clone 306122 (TRAV26-1, TRAJ39)
CIVRGSRAGNMLTF

SEQ ID NO: 612244 - protein, 15 aa, Homo sapiens
  CDR3 for beta chain variable domain of TCR clone 306122 (TRBV7-2, TRBJ1-2)
CASSLVSGGDYGYTF

SEQ ID NO: 612245 - protein, 14 aa, Homo sapiens
  CDR3 for alpha chain variable domain of TCR clone 306123 (TRAV26-1, TRAJ38)
CIADNAGNNCKLIW

SEQ ID NO: 612246 - protein, 15 aa, Homo sapiens
  CDR3 for beta chain variable domain of TCR clone 306123 (TRBV7-2, TRBJ2-1)
CASSLVAGRYNEQFF

SEQ ID NO: 612247 - protein, 12 aa, Homo sapiens
  CDR3 for alpha chain variable domain of TCR clone 306124 (TRAV12-3, TRAJ40)
CAMSSGTYKYIF

SEQ ID NO: 612248 - protein, 15 aa, Homo sapiens
  CDR3 for beta chain variable domain of TCR clone 306124 (TRBV10-2, TRBJ2-6)
CASSEQGTGANVLTF

SEQ ID NO: 612249 - protein, 14 aa, Homo sapiens
  CDR3 for alpha chain variable domain of TCR clone 306125 (TRAV38-2/DV8, TRAJ30)
CAYRTLNRDDKIIF

SEQ ID NO: 612250 - protein, 20 aa, Homo sapiens
  CDR3 for beta chain variable domain of TCR clone 306125 (TRBV7-8, TRBJ2-2)
CASSHLFPGPTIHITGELFF

SEQ ID NO: 612251 - protein, 13 aa, Homo sapiens
  CDR3 for alpha chain variable domain of TCR clone 306126 (TRAV29/DV5, TRAJ31)
CAASRNNNARLMF

SEQ ID NO: 612252 - protein, 12 aa, Homo sapiens
  CDR3 for beta chain variable domain of TCR clone 306126 (TRBV14, TRBJ2-5)
CSSSHLKETQYF

SEQ ID NO: 612253 - protein, 13 aa, Homo sapiens
  CDR3 for alpha chain variable domain of TCR clone 306127 (TRAV14/DV4, TRAJ4)
CAMKAGGYNKLIF

SEQ ID NO: 612254 - protein, 15 aa, Homo sapiens
  CDR3 for beta chain variable domain of TCR clone 306127 (TRBV11-3, TRBJ1-1)
CASILGGPGDTEAFF

SEQ ID NO: 612255 - protein, 14 aa, Homo sapiens
  CDR3 for alpha chain variable domain of TCR clone 306128 (TRAV12-2, TRAJ17)
CAALFKAAGNKLTF

SEQ ID NO: 612256 - protein, 16 aa, Homo sapiens
  CDR3 for beta chain variable domain of TCR clone 306128 (TRBV7-9, TRBJ1-2)
CASSLGFSSGEDGYTF

SEQ ID NO: 612257 - protein, 15 aa, Homo sapiens
  CDR3 for alpha chain variable domain of TCR clone 306129 (TRAV16, TRAJ58)
CALKRGNQWLKVDLW

SEQ ID NO: 612258 - protein, 17 aa, Homo sapiens
  CDR3 for beta chain variable domain of TCR clone 306129 (TRBV18, TRBJ2-1)
CASSKGLSGGADNEQFL

SEQ ID NO: 612259 - protein, 15 aa, Homo sapiens
  CDR3 for alpha chain variable domain of TCR clone 306130 (TRAV25, TRAJ10)
CAGPLHTGGGNKLTF

SEQ ID NO: 612260 - protein, 15 aa, Homo sapiens
  CDR3 for beta chain variable domain of TCR clone 306130 (TRBV12-5, TRBJ2-2)
CASGRLGGNTGELFF

SEQ ID NO: 612261 - protein, 14 aa, Homo sapiens
  CDR3 for alpha chain variable domain of TCR clone 306131 (TRAV23/DV6, TRAJ40)
CAASLTSGTYKYIF

SEQ ID NO: 612262 - protein, 16 aa, Homo sapiens
  CDR3 for beta chain variable domain of TCR clone 306131 (TRBV20-1, TRBJ1-4)
CSAPGQGLLTNEKLFF

SEQ ID NO: 612263 - protein, 13 aa, Homo sapiens
  CDR3 for alpha chain variable domain of TCR clone 306132 (TRAV12-3, TRAJ13)
CAMSSGGYPEVTF

SEQ ID NO: 612264 - protein, 13 aa, Homo sapiens
  CDR3 for beta chain variable domain of TCR clone 306132 (TRBV20-1, TRBJ1-1)
CSAPPGGHTEAFF

SEQ ID NO: 612265 - protein, 15 aa, Homo sapiens
  CDR3 for alpha chain variable domain of TCR clone 306133 (TRAV13-1, TRAJ32)
CAASNGWWCCKQAHL

SEQ ID NO: 612266 - protein, 15 aa, Homo sapiens
  CDR3 for beta chain variable domain of TCR clone 306133 (TRBV20-1, TRBJ1-2)
CSAIRTGAFNYGYTV

SEQ ID NO: 612267 - protein, 12 aa, Homo sapiens
  CDR3 for alpha chain variable domain of TCR clone 306134 (TRAV17, TRAJ4)
CATDGGYNKLMF

SEQ ID NO: 612268 - protein, 11 aa, Homo sapiens
  CDR3 for beta chain variable domain of TCR clone 306134 (TRBV29-1, TRBJ2-5)
CSEDRTGTQYF

SEQ ID NO: 612269 - protein, 19 aa, Homo sapiens
  CDR3 for alpha chain variable domain of TCR clone 306135 (TRAV13-1, TRAJ52)
CAASSSPNAGGTSYGKLTF

SEQ ID NO: 612270 - protein, 15 aa, Homo sapiens
  CDR3 for beta chain variable domain of TCR clone 306135 (TRBV9, TRBJ1-6)
CASSTGGGVDSPLHV

SEQ ID NO: 612271 - protein, 14 aa, Homo sapiens
  CDR3 for alpha chain variable domain of TCR clone 306136 (TRAV8-6, TRAJ4)
CAVSGSGGYNKLIF

SEQ ID NO: 612272 - protein, 12 aa, Homo sapiens
  CDR3 for beta chain variable domain of TCR clone 306136 (TRBV12-4, TRBJ2-7)
CASSLGGYEQYF

SEQ ID NO: 612273 - protein, 16 aa, Homo sapiens
  CDR3 for alpha chain variable domain of TCR clone 306137 (TRAV12-1, TRAJ42)
CVVTPYYGGSQGNLIF

SEQ ID NO: 612274 - protein, 13 aa, Homo sapiens
  CDR3 for beta chain variable domain of TCR clone 306137 (TRBV7-3, TRBJ1-1)
CASSQDWGAEAVF

SEQ ID NO: 612275 - protein, 16 aa, Homo sapiens
  CDR3 for alpha chain variable domain of TCR clone 306138 (TRAV8-3, TRAJ13)
CAVGAYPSGRYQKVTF

SEQ ID NO: 612276 - protein, 15 aa, Homo sapiens
  CDR3 for beta chain variable domain of TCR clone 306138 (TRBV19, TRBJ1-5)
CASSIVWADNQPQHF

SEQ ID NO: 612277 - protein, 17 aa, Homo sapiens
  CDR3 for alpha chain variable domain of TCR clone 306139 (TRAV38-2/DV8, TRAJ57)
CAYRSVLTQGGSEKLVF

SEQ ID NO: 612278 - protein, 13 aa, Homo sapiens
  CDR3 for beta chain variable domain of TCR clone 306139 (TRBV7-9, TRBJ1-2)
CASSLKQNYGYTF

SEQ ID NO: 612279 - protein, 12 aa, Homo sapiens
  CDR3 for alpha chain variable domain of TCR clone 306140 (TRAV16, TRAJ10)
CSRTGGGNKLTF

SEQ ID NO: 612280 - protein, 14 aa, Homo sapiens
  CDR3 for beta chain variable domain of TCR clone 306140 (TRBV19, TRBJ2-1)
CAGPTFVLSGEQFF

SEQ ID NO: 612281 - protein, 10 aa, Homo sapiens
  CDR3 for alpha chain variable domain of TCR clone 306141 (TRAV12-2, TRAJ52)
RSTSYGKLTF

SEQ ID NO: 612282 - protein, 12 aa, Homo sapiens
  CDR3 for beta chain variable domain of TCR clone 306141 (TRBV7-9, TRBJ2-7)
CASSLEGYEQYF

SEQ ID NO: 612283 - protein, 15 aa, Homo sapiens
  CDR3 for alpha chain variable domain of TCR clone 306142 (TRAV38-2/DV8, TRAJ26)
CAYRSRDNYGQNFVF

SEQ ID NO: 612284 - protein, 14 aa, Homo sapiens
  CDR3 for beta chain variable domain of TCR clone 306142 (TRBV29-1, TRBJ1-3)
CSVADRVVGDTIYF

SEQ ID NO: 612285 - protein, 12 aa, Homo sapiens
  CDR3 for alpha chain variable domain of TCR clone 306143 (TRAV38-2/DV8, TRAJ43)
CAYTINNNDVRF

SEQ ID NO: 612286 - protein, 15 aa, Homo sapiens
  CDR3 for beta chain variable domain of TCR clone 306143 (TRBV6-1, TRBJ1-4)
CASSLLDRANEKLFF

SEQ ID NO: 612287 - protein, 14 aa, Homo sapiens
  CDR3 for alpha chain variable domain of TCR clone 306144 (TRAV29/DV5, TRAJ49)
CSASLSNTGNQFYF

SEQ ID NO: 612288 - protein, 15 aa, Homo sapiens
  CDR3 for beta chain variable domain of TCR clone 306144 (TRBV20-1, TRBJ2-1)
CSARGIGGIYNEQFF

SEQ ID NO: 612289 - protein, 14 aa, Homo sapiens
  CDR3 for alpha chain variable domain of TCR clone 306145 (TRAV12-3, TRAJ9)
CAMSPNTGGFKTIF

SEQ ID NO: 612290 - protein, 15 aa, Homo sapiens
  CDR3 for beta chain variable domain of TCR clone 306145 (TRBV9, TRBJ1-6)
RASSVAGTGDSPLHF

SEQ ID NO: 612291 - protein, 14 aa, Homo sapiens
  CDR3 for alpha chain variable domain of TCR clone 306146 (TRAV1-2, TRAJ16)
CAVNRFSAGQKLLF

SEQ ID NO: 612292 - protein, 14 aa, Homo sapiens
  CDR3 for beta chain variable domain of TCR clone 306146 (TRBV6-1, TRBJ1-3)
CASVQGGGGNTIYF

SEQ ID NO: 612293 - protein, 11 aa, Homo sapiens
  CDR3 for alpha chain variable domain of TCR clone 306147 (TRAV2, TRAJ33)
CAVESNYQLIW

SEQ ID NO: 612294 - protein, 14 aa, Homo sapiens
  CDR3 for beta chain variable domain of TCR clone 306147 (TRBV16, TRBJ1-1)
CASSQAGPNTEAFF

SEQ ID NO: 612295 - protein, 14 aa, Homo sapiens
  CDR3 for alpha chain variable domain of TCR clone 306148 (TRAV1-2, TRAJ8)
CAVGEDTGFQKLVF

SEQ ID NO: 612296 - protein, 14 aa, Homo sapiens
  CDR3 for beta chain variable domain of TCR clone 306148 (TRBV7-2, TRBJ2-7)
CASSPKTSFYEQYF

SEQ ID NO: 612297 - protein, 11 aa, Homo sapiens
  CDR3 for alpha chain variable domain of TCR clone 306149 (TRAV1-1, TRAJ23)
CAVRQGGTLIF

SEQ ID NO: 612298 - protein, 20 aa, Homo sapiens
  CDR3 for beta chain variable domain of TCR clone 306149 (TRBV7-8, TRBJ2-2)
CASSHLFLGPTIHITGELFF

SEQ ID NO: 612299 - protein, 16 aa, Homo sapiens
  CDR3 for alpha chain variable domain of TCR clone 306150 (TRAV30, TRAJ24)
CGTEIVDADSWGKFQF

SEQ ID NO: 612300 - protein, 18 aa, Homo sapiens
  CDR3 for beta chain variable domain of TCR clone 306150 (TRBV20-1, TRBJ2-6)
CSAETTTTHGSGANVLTF

SEQ ID NO: 612301 - protein, 15 aa, Homo sapiens
  CDR3 for alpha chain variable domain of TCR clone 306151 (TRAV17, TRAJ56)
CATEPFTGANSKLTF

SEQ ID NO: 612302 - protein, 15 aa, Homo sapiens
  CDR3 for beta chain variable domain of TCR clone 306151 (TRBV6-1, TRBJ1-1)
CASSEAWGQNTEAFF

SEQ ID NO: 612303 - protein, 16 aa, Homo sapiens
  CDR3 for alpha chain variable domain of TCR clone 306152 (TRAV30, TRAJ24)
CGTEVVDADSWGKFQF

SEQ ID NO: 612304 - protein, 17 aa, Homo sapiens
  CDR3 for beta chain variable domain of TCR clone 306152 (TRBV7-3, TRBJ2-3)
CASSLMKRMRGADTQYF

SEQ ID NO: 612305 - protein, 14 aa, Homo sapiens
  CDR3 for alpha chain variable domain of TCR clone 306153 (TRAV35, TRAJ42)
CCVPYGGSQGNLIF

SEQ ID NO: 612306 - protein, 16 aa, Homo sapiens
  CDR3 for beta chain variable domain of TCR clone 306153 (TRBV7-3, TRBJ2-2)
CASSLKRGTLSGELFF

SEQ ID NO: 612307 - protein, 12 aa, Homo sapiens
  CDR3 for alpha chain variable domain of TCR clone 306154 (TRAV21, TRAJ3)
CCFYSSATKIIF

SEQ ID NO: 612308 - protein, 16 aa, Homo sapiens
  CDR3 for beta chain variable domain of TCR clone 306154 (TRBV19, TRBJ2-1)
CASSKAGPSSYNEQFF

SEQ ID NO: 612309 - protein, 12 aa, Homo sapiens
  CDR3 for alpha chain variable domain of TCR clone 306155 (TRAV26-1, TRAJ26)
CIVIIYGQNFVF

SEQ ID NO: 612310 - protein, 13 aa, Homo sapiens
  CDR3 for beta chain variable domain of TCR clone 306155 (TRBV27, TRBJ1-1)
CASSLSIGAEAFF

SEQ ID NO: 612311 - protein, 15 aa, Homo sapiens
  CDR3 for alpha chain variable domain of TCR clone 306156 (TRAV12-1, TRAJ44)
CVADLPTGTASKLTF

SEQ ID NO: 612312 - protein, 15 aa, Homo sapiens
  CDR3 for beta chain variable domain of TCR clone 306156 (TRBV10-2, TRBJ2-6)
CASSEQGTGANVLTF

SEQ ID NO: 612313 - protein, 17 aa, Homo sapiens
  CDR3 for alpha chain variable domain of TCR clone 306157 (TRAV3, TRAJ38)
CAVRGCLNAGNNRKLIW

SEQ ID NO: 612314 - protein, 16 aa, Homo sapiens
  CDR3 for beta chain variable domain of TCR clone 306157 (TRBV20-1, TRBJ1-4)
CSAPGQGLLTNETLFF

SEQ ID NO: 612315 - protein, 14 aa, Homo sapiens
  CDR3 for alpha chain variable domain of TCR clone 306158 (TRAV17, TRAJ37)
CATDGSSNTSKLIF

SEQ ID NO: 612316 - protein, 13 aa, Homo sapiens
  CDR3 for beta chain variable domain of TCR clone 306158 (TRBV11-2, TRBJ2-1)
CASSLDLVNEQFF

SEQ ID NO: 612317 - protein, 14 aa, Homo sapiens
  CDR3 for alpha chain variable domain of TCR clone 306159 (TRAV26-1, TRAJ38)
CIADNAGHNRKLIW

SEQ ID NO: 612318 - protein, 13 aa, Homo sapiens
  CDR3 for beta chain variable domain of TCR clone 306159 (TRBV20-1, TRBJ1-1)
CSARGGGNTEAVF

SEQ ID NO: 612319 - protein, 14 aa, Homo sapiens
  CDR3 for alpha chain variable domain of TCR clone 306160 (TRAV12-3, TRAJ9)
CAMSVETEGFKTIF

SEQ ID NO: 612320 - protein, 14 aa, Homo sapiens
  CDR3 for beta chain variable domain of TCR clone 306160 (TRBV7-2, TRBJ2-7)
CASRSQGAAYEQYF

SEQ ID NO: 612321 - protein, 14 aa, Homo sapiens
  CDR3 for alpha chain variable domain of TCR clone 306161 (TRAV12-2, TRAJ45)
CAVNIGGGADGLTF

SEQ ID NO: 612322 - protein, 15 aa, Homo sapiens
  CDR3 for beta chain variable domain of TCR clone 306161 (TRBV7-9, TRBJ2-2)
CASGPLDTFPGELFF

SEQ ID NO: 612323 - protein, 17 aa, Homo sapiens
  CDR3 for alpha chain variable domain of TCR clone 306162 (TRAV12-2, TRAJ52)
CAVNPYGGGTSYGKLTF

SEQ ID NO: 612324 - protein, 16 aa, Homo sapiens
  CDR3 for beta chain variable domain of TCR clone 306162 (TRBV5-5, TRBJ2-2)
CASSGRREGATGELFF

SEQ ID NO: 612325 - protein, 12 aa, Homo sapiens
  CDR3 for alpha chain variable domain of TCR clone 306163 (TRAV12-2, TRAJ20)
CAVKPSDYKLSF

SEQ ID NO: 612326 - protein, 16 aa, Homo sapiens
  CDR3 for beta chain variable domain of TCR clone 306163 (TRBV7-9, TRBJ2-1)
CASSDVAGGSYNEQFF

SEQ ID NO: 612327 - protein, 23 aa, Homo sapiens
  CDR3 for alpha chain variable domain of TCR clone 306164 (TRAV8-3, TRAJ38)
CAVGASNAGNNHIQNPDPAVFQL

SEQ ID NO: 612328 - protein, 15 aa, Homo sapiens
  CDR3 for beta chain variable domain of TCR clone 306164 (TRBV11-3, TRBJ1-3)
CASSLFGPSGNTIYF

SEQ ID NO: 612329 - protein, 16 aa, Homo sapiens
  CDR3 for alpha chain variable domain of TCR clone 306165 (TRAV30, TRAJ24)
CGTEIVDADSWVKFQF

SEQ ID NO: 612330 - protein, 14 aa, Homo sapiens
  CDR3 for beta chain variable domain of TCR clone 306165 (TRBV12-5, TRBJ2-5)
CASGSRTHQGTQYF

SEQ ID NO: 612331 - protein, 14 aa, Homo sapiens
  CDR3 for alpha chain variable domain of TCR clone 306166 (TRAV12-3, TRAJ10)
SHLPLTGGGNKLTF

SEQ ID NO: 612332 - protein, 14 aa, Homo sapiens
  CDR3 for beta chain variable domain of TCR clone 306166 (TRBV12-4, TRBJ2-5)
CQQSPTGLQETQYF

SEQ ID NO: 612333 - protein, 13 aa, Homo sapiens
  CDR3 for alpha chain variable domain of TCR clone 306167 (TRAV12-2, TRAJ6)
CAVNVSRKLHTYI

SEQ ID NO: 612334 - protein, 16 aa, Homo sapiens
  CDR3 for beta chain variable domain of TCR clone 306167 (TRBV7-6, TRBJ2-1)
CASSAPGPSSYNEQFF

SEQ ID NO: 612335 - protein, 13 aa, Homo sapiens
  CDR3 for alpha chain variable domain of TCR clone 306168 (TRAV8-3, TRAJ44)
CAVVPGTASKLTF

SEQ ID NO: 612336 - protein, 12 aa, Homo sapiens
  CDR3 for beta chain variable domain of TCR clone 306168 (TRBV7-8, TRBJ2-7)
CASSLGDSEQYF

SEQ ID NO: 612337 - protein, 12 aa, Homo sapiens
  CDR3 for alpha chain variable domain of TCR clone 306169 (TRAV17, TRAJ20)
CATQANDYKLSF

SEQ ID NO: 612338 - protein, 14 aa, Homo sapiens
  CDR3 for beta chain variable domain of TCR clone 306169 (TRBV7-2, TRBJ2-5)
CASSPAGNQETQYF

SEQ ID NO: 612339 - protein, 16 aa, Homo sapiens
  CDR3 for alpha chain variable domain of TCR clone 306170 (TRAV12-3, TRAJ53)
CAMSPWSGCSNYKLTF

SEQ ID NO: 612340 - protein, 11 aa, Homo sapiens
  CDR3 for beta chain variable domain of TCR clone 306170 (TRBV29-1, TRBJ2-5)
CSEERTGTQYF

SEQ ID NO: 612341 - protein, 13 aa, Homo sapiens
  CDR3 for alpha chain variable domain of TCR clone 306171 (TRAV23/DV6, TRAJ16)
CAASISDGQKLLF

SEQ ID NO: 612342 - protein, 15 aa, Homo sapiens
  CDR3 for beta chain variable domain of TCR clone 306171 (TRBV2, TRBJ2-2)
CANSRGTVGTGELFF

SEQ ID NO: 612343 - protein, 11 aa, Homo sapiens
  CDR3 for alpha chain variable domain of TCR clone 306172 (TRAV13-1, TRAJ39)
CASHAGSMHTF

SEQ ID NO: 612344 - protein, 14 aa, Homo sapiens
  CDR3 for beta chain variable domain of TCR clone 306172 (TRBV11-2, TRBJ1-5)
CASSLDRGRQPQHF

SEQ ID NO: 612345 - protein, 13 aa, Homo sapiens
  CDR3 for alpha chain variable domain of TCR clone 306173 (TRAV35, TRAJ42)
CAGFPGSQGNLIF

SEQ ID NO: 612346 - protein, 14 aa, Homo sapiens
  CDR3 for beta chain variable domain of TCR clone 306173 (TRBV7-2, TRBJ1-1)
CASSFLTGTTEAFF

SEQ ID NO: 612347 - protein, 13 aa, Homo sapiens
  CDR3 for alpha chain variable domain of TCR clone 306174 (TRAV9-2, TRAJ12)
CARGEDSSYKLIF

SEQ ID NO: 612348 - protein, 12 aa, Homo sapiens
  CDR3 for beta chain variable domain of TCR clone 306174 (TRBV7-9, TRBJ1-4)
CASSTDREKLFF

SEQ ID NO: 612349 - protein, 16 aa, Homo sapiens
  CDR3 for alpha chain variable domain of TCR clone 306175 (TRAV30, TRAJ24)
CGTEIVDADSWGKFQF

SEQ ID NO: 612350 - protein, 15 aa, Homo sapiens
  CDR3 for beta chain variable domain of TCR clone 306175 (TRBV7-3, TRBJ2-2)
CASKANGANTGELFF

SEQ ID NO: 612351 - protein, 16 aa, Homo sapiens
  CDR3 for alpha chain variable domain of TCR clone 306176 (TRAV35, TRAJ28)
CAGQKYSGAGSYQLTF

SEQ ID NO: 612352 - protein, 13 aa, Homo sapiens
  CDR3 for beta chain variable domain of TCR clone 306176 (TRBV19, TRBJ1-2)
CASSQGQFYGYTF

SEQ ID NO: 612353 - protein, 11 aa, Homo sapiens
  CDR3 for alpha chain variable domain of TCR clone 306177 (TRAV2, TRAJ33)
CAVDSNYQLSG

SEQ ID NO: 612354 - protein, 15 aa, Homo sapiens
  CDR3 for beta chain variable domain of TCR clone 306177 (TRBV19, TRBJ1-2)
CASSVGQVLNYGYTF

SEQ ID NO: 612355 - protein, 13 aa, Homo sapiens
  CDR3 for alpha chain variable domain of TCR clone 306178 (TRAV21, TRAJ36)
CAVREAGANNLFF

SEQ ID NO: 612356 - protein, 14 aa, Homo sapiens
  CDR3 for beta chain variable domain of TCR clone 306178 (TRBV18, TRBJ1-5)
CASSRQQRNQPQHF

SEQ ID NO: 612357 - protein, 13 aa, Homo sapiens
  CDR3 for alpha chain variable domain of TCR clone 306179 (TRAV27, TRAJ29)
CAGAHSGNTPLVF

SEQ ID NO: 612358 - protein, 18 aa, Homo sapiens
  CDR3 for beta chain variable domain of TCR clone 306179 (TRBV6-6, TRBJ1-3)
CAISYSKWDSISGNTIYF

SEQ ID NO: 612359 - protein, 12 aa, Homo sapiens
  CDR3 for alpha chain variable domain of TCR clone 306180 (TRAV8-3, TRAJ26)
CAGDNYGQNVVF

SEQ ID NO: 612360 - protein, 17 aa, Homo sapiens
  CDR3 for beta chain variable domain of TCR clone 306180 (TRBV7-8, TRBJ2-6)
CASSAGTGGAGANVLTF

SEQ ID NO: 612361 - protein, 16 aa, Homo sapiens
  CDR3 for alpha chain variable domain of TCR clone 306181 (TRAV13-1, TRAJ48)
CSKYRESNFGNEKLTF

SEQ ID NO: 612362 - protein, 13 aa, Homo sapiens
  CDR3 for beta chain variable domain of TCR clone 306181 (TRBV14, TRBJ1-1)
CASSREFGTEAFF

SEQ ID NO: 612363 - protein, 11 aa, Homo sapiens
  CDR3 for alpha chain variable domain of TCR clone 306182 (TRAV3, TRAJ21)
CALGNFNKFYF

SEQ ID NO: 612364 - protein, 16 aa, Homo sapiens
  CDR3 for beta chain variable domain of TCR clone 306182 (TRBV19, TRBJ2-1)
CASSKAGPSSYNEQFV

SEQ ID NO: 612365 - protein, 14 aa, Homo sapiens
  CDR3 for alpha chain variable domain of TCR clone 306183 (TRAV8-3, TRAJ9)
CAVVYNTGGFKTIF

SEQ ID NO: 612366 - protein, 14 aa, Homo sapiens
  CDR3 for beta chain variable domain of TCR clone 306183 (TRBV9, TRBJ1-2)
CASSVSGTLYGYTF

SEQ ID NO: 612367 - protein, 14 aa, Homo sapiens
  CDR3 for alpha chain variable domain of TCR clone 306184 (TRAV4, TRAJ20)
CLVGRRSNDYKLSF

SEQ ID NO: 612368 - protein, 18 aa, Homo sapiens
  CDR3 for beta chain variable domain of TCR clone 306184 (TRBV2, TRBJ2-5)
CASRGDPQGRGAQETQYF

SEQ ID NO: 612369 - protein, 15 aa, Homo sapiens
  CDR3 for alpha chain variable domain of TCR clone 306185 (TRAV12-2, TRAJ53)
CAVNGGGGSNYKLTF

SEQ ID NO: 612370 - protein, 14 aa, Homo sapiens
  CDR3 for beta chain variable domain of TCR clone 306185 (TRBV19, TRBJ2-2)
CASSTLHRSGELFS

SEQ ID NO: 612371 - protein, 14 aa, Homo sapiens
  CDR3 for alpha chain variable domain of TCR clone 306186 (TRAV1-1, TRAJ27)
CAVIYNTNAGKSTF

SEQ ID NO: 612372 - protein, 15 aa, Homo sapiens
  CDR3 for beta chain variable domain of TCR clone 306186 (TRBV7-9, TRBJ1-6)
CAGSSPGRGNSPLHF

SEQ ID NO: 612373 - protein, 17 aa, Homo sapiens
  CDR3 for alpha chain variable domain of TCR clone 306187 (TRAV13-2, TRAJ28)
CAEEPAGSGAGSYQLTF

SEQ ID NO: 612374 - protein, 15 aa, Homo sapiens
  CDR3 for beta chain variable domain of TCR clone 306187 (TRBV7-2, TRBJ2-3)
CASSSTGLVTDTQYF

SEQ ID NO: 612375 - protein, 13 aa, Homo sapiens
  CDR3 for alpha chain variable domain of TCR clone 306188 (TRAV13-2, TRAJ21)
CAENVGQLQQILL

SEQ ID NO: 612376 - protein, 15 aa, Homo sapiens
  CDR3 for beta chain variable domain of TCR clone 306188 (TRBV25-1, TRBJ1-4)
CASSPGDSTNEKLFF

SEQ ID NO: 612377 - protein, 16 aa, Homo sapiens
  CDR3 for alpha chain variable domain of TCR clone 306189 (TRAV3, TRAJ3)
CAVRDRAKSSASKIIF

SEQ ID NO: 612378 - protein, 14 aa, Homo sapiens
  CDR3 for beta chain variable domain of TCR clone 306189 (TRBV7-8, TRBJ2-3)
CASSFPDGQDTQYF

SEQ ID NO: 612379 - protein, 13 aa, Homo sapiens
  CDR3 for alpha chain variable domain of TCR clone 306190 (TRAV12-2, TRAJ7)
CAVNLYGNNRLAF

SEQ ID NO: 612380 - protein, 16 aa, Homo sapiens
  CDR3 for beta chain variable domain of TCR clone 306190 (TRBV12-5, TRBJ2-5)
CASGPRTSGNQETQYF

SEQ ID NO: 612381 - protein, 11 aa, Homo sapiens
  CDR3 for alpha chain variable domain of TCR clone 306191 (TRAV13-1, TRAJ15)
CAATPGTALIF

SEQ ID NO: 612382 - protein, 15 aa, Homo sapiens
  CDR3 for beta chain variable domain of TCR clone 306191 (TRBV6-3, TRBJ2-7)
CASSSPGTVFYEQYF

SEQ ID NO: 612383 - protein, 15 aa, Homo sapiens
  CDR3 for alpha chain variable domain of TCR clone 306192 (TRAV25, TRAJ53)
CPTSNSGGSNYKLTF

SEQ ID NO: 612384 - protein, 15 aa, Homo sapiens
  CDR3 for beta chain variable domain of TCR clone 306192 (TRBV4-2, TRBJ2-3)
CASSPSRRPTDTQYF

SEQ ID NO: 612385 - protein, 11 aa, Homo sapiens
  CDR3 for alpha chain variable domain of TCR clone 306193 (TRAV39, TRAJ49)
CAVDISTQFYF

SEQ ID NO: 612386 - protein, 14 aa, Homo sapiens
  CDR3 for beta chain variable domain of TCR clone 306193 (TRBV7-8, TRBJ2-7)
CASSPKTSFYEQYF

SEQ ID NO: 612387 - protein, 14 aa, Homo sapiens
  CDR3 for alpha chain variable domain of TCR clone 306194 (TRAV20, TRAJ22)
CAVQVSGSARQLTF

SEQ ID NO: 612388 - protein, 13 aa, Homo sapiens
  CDR3 for beta chain variable domain of TCR clone 306194 (TRBV20-1, TRBJ2-5)
CSAREGGKETQYS

SEQ ID NO: 612389 - protein, 14 aa, Homo sapiens
  CDR3 for alpha chain variable domain of TCR clone 306195 (TRAV1-2, TRAJ16)
CAVNRFSDGQKLLF

SEQ ID NO: 612390 - protein, 13 aa, Homo sapiens
  CDR3 for beta chain variable domain of TCR clone 306195 (TRBV10-3, TRBJ2-7)
CDSKLAVNYEQYF

SEQ ID NO: 612391 - protein, 16 aa, Homo sapiens
  CDR3 for alpha chain variable domain of TCR clone 306196 (TRAV30, TRAJ24)
CGTEIVDADRWGKFQF

SEQ ID NO: 612392 - protein, 16 aa, Homo sapiens
  CDR3 for beta chain variable domain of TCR clone 306196 (TRBV13, TRBJ2-3)
CQQPLQGSGGRNTQYF

SEQ ID NO: 612393 - protein, 13 aa, Homo sapiens
  CDR3 for alpha chain variable domain of TCR clone 306197 (TRAV34, TRAJ22)
CGAGAGSARQLTF

SEQ ID NO: 612394 - protein, 16 aa, Homo sapiens
  CDR3 for beta chain variable domain of TCR clone 306197 (TRBV7-3, TRBJ2-1)
CASSKPLAGWYNEQFF

SEQ ID NO: 612395 - protein, 12 aa, Homo sapiens
  CDR3 for alpha chain variable domain of TCR clone 306198 (TRAV23/DV6, TRAJ16)
CAARGRGQKLLV

SEQ ID NO: 612396 - protein, 15 aa, Homo sapiens
  CDR3 for beta chain variable domain of TCR clone 306198 (TRBV15, TRBJ2-1)
CATSRPGQGLHEQFF

SEQ ID NO: 612397 - protein, 16 aa, Homo sapiens
  CDR3 for alpha chain variable domain of TCR clone 306199 (TRAV30, TRAJ24)
RDTEIVDADSWGKFQF

SEQ ID NO: 612398 - protein, 14 aa, Homo sapiens
  CDR3 for beta chain variable domain of TCR clone 306199 (TRBV12-5, TRBJ2-5)
CASGSRTHQETQYF

SEQ ID NO: 612399 - protein, 16 aa, Homo sapiens
  CDR3 for alpha chain variable domain of TCR clone 306200 (TRAV1-1, TRAJ29)
CAVRSTRNSGNTPLVF

SEQ ID NO: 612400 - protein, 16 aa, Homo sapiens
  CDR3 for beta chain variable domain of TCR clone 306200 (TRBV27, TRBJ1-1)
CASSSGGRTGYAEAFF

SEQ ID NO: 612401 - protein, 14 aa, Homo sapiens
  CDR3 for alpha chain variable domain of TCR clone 306201 (TRAV4, TRAJ30)
CLVGDMNRDDKIIF

SEQ ID NO: 612402 - protein, 15 aa, Homo sapiens
  CDR3 for beta chain variable domain of TCR clone 306201 (TRBV7-2, TRBJ2-7)
CASSLSSGRTYEQYC

SEQ ID NO: 612403 - protein, 14 aa, Homo sapiens
  CDR3 for alpha chain variable domain of TCR clone 306202 (TRAV17, TRAJ22)
CATSPSGSAIQLTF

SEQ ID NO: 612404 - protein, 15 aa, Homo sapiens
  CDR3 for beta chain variable domain of TCR clone 306202 (TRBV4-1, TRBJ2-5)
CASSQWDLYQETQYF

SEQ ID NO: 612405 - protein, 13 aa, Homo sapiens
  CDR3 for alpha chain variable domain of TCR clone 306203 (TRAV27, TRAJ29)
CAGAHSGNTPLVF

SEQ ID NO: 612406 - protein, 16 aa, Homo sapiens
  CDR3 for beta chain variable domain of TCR clone 306203 (TRBV7-3, TRBJ2-2)
CASSLKRGTLSGELFF

SEQ ID NO: 612407 - protein, 16 aa, Homo sapiens
  CDR3 for alpha chain variable domain of TCR clone 306204 (TRAV3, TRAJ10)
CAVRDMRAGGGNKLTF

SEQ ID NO: 612408 - protein, 15 aa, Homo sapiens
  CDR3 for beta chain variable domain of TCR clone 306204 (TRBV20-1, TRBJ2-1)
CSARGIGGTYNEQFF

SEQ ID NO: 612409 - protein, 10 aa, Homo sapiens
  CDR3 for alpha chain variable domain of TCR clone 306205 (TRAV26-2, TRAJ20)
CIQNDYKLSF

SEQ ID NO: 612410 - protein, 14 aa, Homo sapiens
  CDR3 for beta chain variable domain of TCR clone 306205 (TRBV28, TRBJ1-6)
CATVYSRGRSPLHF

SEQ ID NO: 612411 - protein, 13 aa, Homo sapiens
  CDR3 for alpha chain variable domain of TCR clone 306206 (TRAV12-1, TRAJ33)
CGDAPDSNYQLIW

SEQ ID NO: 612412 - protein, 12 aa, Homo sapiens
  CDR3 for beta chain variable domain of TCR clone 306206 (TRBV11-2, TRBJ2-2)
CVSSLGGGELFF

SEQ ID NO: 612413 - protein, 12 aa, Homo sapiens
  CDR3 for alpha chain variable domain of TCR clone 306207 (TRAV38-1, TRAJ47)
CAFETYGNKLVL

SEQ ID NO: 612414 - protein, 15 aa, Homo sapiens
  CDR3 for beta chain variable domain of TCR clone 306207 (TRBV5-7, TRBJ2-7)
CASSGGRPVPYEQYF

SEQ ID NO: 612415 - protein, 15 aa, Homo sapiens
  CDR3 for alpha chain variable domain of TCR clone 306208 (TRAV26-1, TRAJ40)
CIVRVPTSGTYKYIF

SEQ ID NO: 612416 - protein, 12 aa, Homo sapiens
  CDR3 for beta chain variable domain of TCR clone 306208 (TRBV7-9, TRBJ1-4)
CASSTDREKLFF

SEQ ID NO: 612417 - protein, 16 aa, Homo sapiens
  CDR3 for alpha chain variable domain of TCR clone 306209 (TRAV3, TRAJ37)
CAVRPHGSGNTGKRIF

SEQ ID NO: 612418 - protein, 17 aa, Homo sapiens
  CDR3 for beta chain variable domain of TCR clone 306209 (TRBV5-1, TRBJ2-5)
CASSPVALGQNKETQYF

SEQ ID NO: 612419 - protein, 12 aa, Homo sapiens
  CDR3 for alpha chain variable domain of TCR clone 306210 (TRAV8-3, TRAJ41)
CAVALSGYALNF

SEQ ID NO: 612420 - protein, 14 aa, Homo sapiens
  CDR3 for beta chain variable domain of TCR clone 306210 (TRBV7-3, TRBJ2-7)
CASSPKTSFYEQYF

SEQ ID NO: 612421 - protein, 13 aa, Homo sapiens
  CDR3 for alpha chain variable domain of TCR clone 306211 (TRAV13-2, TRAJ13)
CAERPGGYQKVTF

SEQ ID NO: 612422 - protein, 12 aa, Homo sapiens
  CDR3 for beta chain variable domain of TCR clone 306211 (TRBV6-5, TRBJ2-7)
CASSDRQNEQYF

SEQ ID NO: 612423 - protein, 22 aa, Homo sapiens
  CDR3 for alpha chain variable domain of TCR clone 306212 (TRAV26-1, )
CIASSNAGNNHIQNPDPAVYQL

SEQ ID NO: 612424 - protein, 12 aa, Homo sapiens
  CDR3 for beta chain variable domain of TCR clone 306212 (TRBV5-8, TRBJ1-2)
CASSFGVYGYTF

SEQ ID NO: 612425 - protein, 18 aa, Homo sapiens
  CDR3 for alpha chain variable domain of TCR clone 306213 (TRAV21, TRAJ52)
CAVRPSPAGGTSYGKLTF

SEQ ID NO: 612426 - protein, 13 aa, Homo sapiens
  CDR3 for beta chain variable domain of TCR clone 306213 (TRBV19, TRBJ1-2)
CASSVPGQVGYTF

SEQ ID NO: 612427 - protein, 19 aa, Homo sapiens
  CDR3 for alpha chain variable domain of TCR clone 306214 (TRAV13-1, TRAJ52)
CAASPYQNAGGTSYGKLHF

SEQ ID NO: 612428 - protein, 14 aa, Homo sapiens
  CDR3 for beta chain variable domain of TCR clone 306214 (TRBV19, TRBJ2-7)
CASTVQGRPYEQYF

SEQ ID NO: 612429 - protein, 22 aa, Homo sapiens
  CDR3 for alpha chain variable domain of TCR clone 306215 (TRAV12-3, TRAJ6)
CAMSATGGSYIPTFEEEPALLF

SEQ ID NO: 612430 - protein, 16 aa, Homo sapiens
  CDR3 for beta chain variable domain of TCR clone 306215 (TRBV4-2, TRBJ2-1)
CASSPRAGQGANEQFF

SEQ ID NO: 612431 - protein, 13 aa, Homo sapiens
  CDR3 for alpha chain variable domain of TCR clone 306216 (TRAV21, TRAJ57)
CAVTQGGSEKLVF

SEQ ID NO: 612432 - protein, 16 aa, Homo sapiens
  CDR3 for beta chain variable domain of TCR clone 306216 (TRBV27, TRBJ2-7)
CASSSERRDSAYEQYF

SEQ ID NO: 612433 - protein, 14 aa, Homo sapiens
  CDR3 for alpha chain variable domain of TCR clone 306217 (TRAV12-2, TRAJ40)
CAGKIPSGPYKYIF

SEQ ID NO: 612434 - protein, 14 aa, Homo sapiens
  CDR3 for beta chain variable domain of TCR clone 306217 (TRBV20-1, TRBJ1-1)
CSAQTRIGGTEAFF

SEQ ID NO: 612435 - protein, 11 aa, Homo sapiens
  CDR3 for alpha chain variable domain of TCR clone 306218 (TRAV12-1, TRAJ33)
CVVNMNYQLIW

SEQ ID NO: 612436 - protein, 13 aa, Homo sapiens
  CDR3 for beta chain variable domain of TCR clone 306218 (TRBV7-2, TRBJ2-7)
CASSSPSGSEQYF

SEQ ID NO: 612437 - protein, 13 aa, Homo sapiens
  CDR3 for alpha chain variable domain of TCR clone 306219 (TRAV2, TRAJ13)
CASGGYQKVTLEL

SEQ ID NO: 612438 - protein, 16 aa, Homo sapiens
  CDR3 for beta chain variable domain of TCR clone 306219 (TRBV12-5, TRBJ2-5)
CASGPRTSGNQETQYF

SEQ ID NO: 612439 - protein, 13 aa, Homo sapiens
  CDR3 for alpha chain variable domain of TCR clone 306220 (TRAV23/DV6, TRAJ47)
CAARIRNGIWKQT

SEQ ID NO: 612440 - protein, 14 aa, Homo sapiens
  CDR3 for beta chain variable domain of TCR clone 306220 (TRBV7-2, TRBJ2-7)
CASSPKTSFYEQYF

SEQ ID NO: 612441 - protein, 13 aa, Homo sapiens
  CDR3 for alpha chain variable domain of TCR clone 306221 (TRAV36/DV7, TRAJ37)
CAVFSSNTGKLIF

SEQ ID NO: 612442 - protein, 15 aa, Homo sapiens
  CDR3 for beta chain variable domain of TCR clone 306221 (TRBV5-1, TRBJ2-2)
CASSPQGGNTGELFF

SEQ ID NO: 612443 - protein, 10 aa, Homo sapiens
  CDR3 for alpha chain variable domain of TCR clone 306222 (TRAV23/DV6, TRAJ57)
CAARSSLSQG

SEQ ID NO: 612444 - protein, 14 aa, Homo sapiens
  CDR3 for beta chain variable domain of TCR clone 306222 (TRBV25-1, TRBJ1-1)
CASTHLGGNTEAFF

SEQ ID NO: 612445 - protein, 14 aa, Homo sapiens
  CDR3 for alpha chain variable domain of TCR clone 306223 (TRAV2, TRAJ9)
CAVEDRSGGFNTIF

SEQ ID NO: 612446 - protein, 15 aa, Homo sapiens
  CDR3 for beta chain variable domain of TCR clone 306223 (TRBV11-3, TRBJ2-3)
CASLKDGREGDTQYF

SEQ ID NO: 612447 - protein, 17 aa, Homo sapiens
  CDR3 for alpha chain variable domain of TCR clone 306224 (TRAV3, TRAJ42)
CAVRDRDYGGIQGNLIF

SEQ ID NO: 612448 - protein, 15 aa, Homo sapiens
  CDR3 for beta chain variable domain of TCR clone 306224 (TRBV6-6, TRBJ2-7)
WASSYSYGGSYEQYF

SEQ ID NO: 612449 - protein, 15 aa, Homo sapiens
  CDR3 for alpha chain variable domain of TCR clone 306225 (TRAV3, TRAJ20)
YAVRDIKLSDYKLSF

SEQ ID NO: 612450 - protein, 18 aa, Homo sapiens
  CDR3 for beta chain variable domain of TCR clone 306225 (TRBV20-1, TRBJ2-5)
CSQPGDSGRLGGKETQYF

SEQ ID NO: 612451 - protein, 12 aa, Homo sapiens
  CDR3 for alpha chain variable domain of TCR clone 306226 (TRAV17, TRAJ12)
CATLRSSYKLIV

SEQ ID NO: 612452 - protein, 16 aa, Homo sapiens
  CDR3 for beta chain variable domain of TCR clone 306226 (TRBV28, TRBJ2-7)
CASSLFFETGGPEQYF

SEQ ID NO: 612453 - protein, 12 aa, Homo sapiens
  CDR3 for alpha chain variable domain of TCR clone 306227 (TRAV13-2, TRAJ23)
CAERHRGGKLIF

SEQ ID NO: 612454 - protein, 16 aa, Homo sapiens
  CDR3 for beta chain variable domain of TCR clone 306227 (TRBV20-1, TRBJ1-4)
YSAPGQGLLTNERLFF

SEQ ID NO: 612455 - protein, 10 aa, Homo sapiens
  CDR3 for alpha chain variable domain of TCR clone 306228 (TRAV23/DV6, TRAJ57)
CSASSTLSQG

SEQ ID NO: 612456 - protein, 14 aa, Homo sapiens
  CDR3 for beta chain variable domain of TCR clone 306228 (TRBV25-1, TRBJ1-1)
CASTHLGGNTGAFF

SEQ ID NO: 612457 - protein, 18 aa, Homo sapiens
  CDR3 for alpha chain variable domain of TCR clone 306229 (TRAV12-3, TRAJ52)
CAMSVGGAGGTSYGKLTF

SEQ ID NO: 612458 - protein, 15 aa, Homo sapiens
  CDR3 for beta chain variable domain of TCR clone 306229 (TRBV2, TRBJ2-2)
CASSRQGPNTGELFF

SEQ ID NO: 612459 - protein, 11 aa, Homo sapiens
  CDR3 for alpha chain variable domain of TCR clone 306230 (TRAV2, TRAJ20)
CAVLNDYKLSF

SEQ ID NO: 612460 - protein, 11 aa, Homo sapiens
  CDR3 for beta chain variable domain of TCR clone 306230 (TRBV11-2, TRBJ2-2)
CASSLPGELFF

SEQ ID NO: 612461 - protein, 11 aa, Homo sapiens
  CDR3 for alpha chain variable domain of TCR clone 306231 (TRAV3, TRAJ21)
CAVGNFNNFYF

SEQ ID NO: 612462 - protein, 16 aa, Homo sapiens
  CDR3 for beta chain variable domain of TCR clone 306231 (TRBV9, TRBJ2-1)
CASSVGGGGNYNEQFF

SEQ ID NO: 612463 - protein, 12 aa, Homo sapiens
  CDR3 for alpha chain variable domain of TCR clone 306232 (TRAV12-3, TRAJ20)
CAMVRGDYKLSF

SEQ ID NO: 612464 - protein, 20 aa, Homo sapiens
  CDR3 for beta chain variable domain of TCR clone 306232 (TRBV7-8, TRBJ2-2)
WASSHLFPGPTIHITGELFF

SEQ ID NO: 612465 - protein, 13 aa, Homo sapiens
  CDR3 for alpha chain variable domain of TCR clone 306233 (TRAV8-3, TRAJ43)
CAVGPDNNNDMRF

SEQ ID NO: 612466 - protein, 13 aa, Homo sapiens
  CDR3 for beta chain variable domain of TCR clone 306233 (TRBV24-1, TRBJ2-2)
CATSDWSTGELFF

SEQ ID NO: 612467 - protein, 14 aa, Homo sapiens
  CDR3 for alpha chain variable domain of TCR clone 306234 (TRAV23/DV6, TRAJ11)
CAASLESGYSTLTF

SEQ ID NO: 612468 - protein, 14 aa, Homo sapiens
  CDR3 for beta chain variable domain of TCR clone 306234 (TRBV6-1, TRBJ1-3)
CASVQGGGGNTIYF

SEQ ID NO: 612469 - protein, 15 aa, Homo sapiens
  CDR3 for alpha chain variable domain of TCR clone 306235 (TRAV3, TRAJ3)
CAVRDGHSSSSKIIF

SEQ ID NO: 612470 - protein, 16 aa, Homo sapiens
  CDR3 for beta chain variable domain of TCR clone 306235 (TRBV28, TRBJ1-4)
CTSVPAVLTFDEKLFF

SEQ ID NO: 612471 - protein, 15 aa, Homo sapiens
  CDR3 for alpha chain variable domain of TCR clone 306236 (TRAV25, TRAJ52)
CAGRPGGTSYGKLTF

SEQ ID NO: 612472 - protein, 18 aa, Homo sapiens
  CDR3 for beta chain variable domain of TCR clone 306236 (TRBV7-9, TRBJ2-1)
CASSLAVSGTSGRNEQFF

SEQ ID NO: 612473 - protein, 12 aa, Homo sapiens
  CDR3 for alpha chain variable domain of TCR clone 306237 (TRAV16, TRAJ10)
CSRTGGGNKLTF

SEQ ID NO: 612474 - protein, 14 aa, Homo sapiens
  CDR3 for beta chain variable domain of TCR clone 306237 (TRBV6-3, TRBJ2-7)
CASSSPTVFYEQYF

SEQ ID NO: 612475 - protein, 15 aa, Homo sapiens
  CDR3 for alpha chain variable domain of TCR clone 306238 (TRAV29/DV5, TRAJ24)
CAASGATDSWGKFQF

SEQ ID NO: 612476 - protein, 16 aa, Homo sapiens
  CDR3 for beta chain variable domain of TCR clone 306238 (TRBV10-2, TRBJ2-2)
CASSEFRDRGSGELFF

SEQ ID NO: 612477 - protein, 11 aa, Homo sapiens
  CDR3 for alpha chain variable domain of TCR clone 306239 (TRAV12-1, TRAJ26)
CVVAYGQNFVF

SEQ ID NO: 612478 - protein, 15 aa, Homo sapiens
  CDR3 for beta chain variable domain of TCR clone 306239 (TRBV12-4, TRBJ2-5)
CASSGTGQAQENQYF

SEQ ID NO: 612479 - protein, 16 aa, Homo sapiens
  CDR3 for alpha chain variable domain of TCR clone 306240 (TRAV17, TRAJ22)
CPTGPISSGSARQLTF

SEQ ID NO: 612480 - protein, 13 aa, Homo sapiens
  CDR3 for beta chain variable domain of TCR clone 306240 (TRBV11-2, TRBJ2-1)
CASSLGLAGGRFF

SEQ ID NO: 612481 - protein, 15 aa, Homo sapiens
  CDR3 for alpha chain variable domain of TCR clone 306241 (TRAV8-4, TRAJ9)
CAVSDLEGGGFKTIF

SEQ ID NO: 612482 - protein, 13 aa, Homo sapiens
  CDR3 for beta chain variable domain of TCR clone 306241 (TRBV7-3, TRBJ1-1)
CASSQDWGAEAFF

SEQ ID NO: 612483 - protein, 16 aa, Homo sapiens
  CDR3 for alpha chain variable domain of TCR clone 306242 (TRAV3, TRAJ32)
CCERRNYGGATNKLIF

SEQ ID NO: 612484 - protein, 14 aa, Homo sapiens
  CDR3 for beta chain variable domain of TCR clone 306242 (TRBV19, TRBJ2-1)
CASPTFVLSGEQFF

SEQ ID NO: 612485 - protein, 16 aa, Homo sapiens
  CDR3 for alpha chain variable domain of TCR clone 306243 (TRAV26-1, TRAJ32)
CIVRTNYGGATYKLIF

SEQ ID NO: 612486 - protein, 14 aa, Homo sapiens
  CDR3 for beta chain variable domain of TCR clone 306243 (TRBV27, TRBJ1-1)
CASSLLSGLSEAFF

SEQ ID NO: 612487 - protein, 14 aa, Homo sapiens
  CDR3 for alpha chain variable domain of TCR clone 306244 (TRAV20, TRAJ20)
CAVRRGYNGYKLSF

SEQ ID NO: 612488 - protein, 13 aa, Homo sapiens
  CDR3 for beta chain variable domain of TCR clone 306244 (TRBV19, TRBJ2-5)
CASSETAPETQYF

SEQ ID NO: 612489 - protein, 14 aa, Homo sapiens
  CDR3 for alpha chain variable domain of TCR clone 306245 (TRAV17, TRAJ56)
CATVPAGANSKLTF

SEQ ID NO: 612490 - protein, 16 aa, Homo sapiens
  CDR3 for beta chain variable domain of TCR clone 306245 (TRBV28, TRBJ2-7)
CASGLFFGTGGPEQYF

SEQ ID NO: 612491 - protein, 13 aa, Homo sapiens
  CDR3 for alpha chain variable domain of TCR clone 306246 (TRAV2, TRAJ20)
CAVEDPSEYKLSF

SEQ ID NO: 612492 - protein, 13 aa, Homo sapiens
  CDR3 for beta chain variable domain of TCR clone 306246 (TRBV29-1, TRBJ2-1)
CSVEGGRVNEQFF

SEQ ID NO: 612493 - protein, 11 aa, Homo sapiens
  CDR3 for alpha chain variable domain of TCR clone 306247 (TRAV17, TRAJ9)
CATTGGFKTIF

SEQ ID NO: 612494 - protein, 15 aa, Homo sapiens
  CDR3 for beta chain variable domain of TCR clone 306247 (TRBV7-9, TRBJ2-2)
CASSQLGAAKGELFF

SEQ ID NO: 612495 - protein, 14 aa, Homo sapiens
  CDR3 for alpha chain variable domain of TCR clone 306248 (TRAV12-1, TRAJ17)
CVVSYKAAGNKITF

SEQ ID NO: 612496 - protein, 17 aa, Homo sapiens
  CDR3 for beta chain variable domain of TCR clone 306248 (TRBV20-1, TRBJ2-1)
CSASSSGLAGSYNEQFF

SEQ ID NO: 612497 - protein, 13 aa, Homo sapiens
  CDR3 for alpha chain variable domain of TCR clone 306249 (TRAV8-3, TRAJ28)
CAVGAVGCYQLIF

SEQ ID NO: 612498 - protein, 15 aa, Homo sapiens
  CDR3 for beta chain variable domain of TCR clone 306249 (TRBV7-9, TRBJ1-5)
CASSQGHQPNQPQHF

SEQ ID NO: 612499 - protein, 16 aa, Homo sapiens
  CDR3 for alpha chain variable domain of TCR clone 306250 (TRAV30, TRAJ24)
CGTEIVDADSWVKFQF

SEQ ID NO: 612500 - protein, 15 aa, Homo sapiens
  CDR3 for beta chain variable domain of TCR clone 306250 (TRBV6-3, TRBJ2-7)
CASSSPGTVFYEPYF

SEQ ID NO: 612501 - protein, 14 aa, Homo sapiens
  CDR3 for alpha chain variable domain of TCR clone 306251 (TRAV8-3, TRAJ42)
CAVGAWGSQGNLIF

SEQ ID NO: 612502 - protein, 15 aa, Homo sapiens
  CDR3 for beta chain variable domain of TCR clone 306251 (TRBV29-1, TRBJ1-2)
CSVVLEAGSNYGCTF

SEQ ID NO: 612503 - protein, 15 aa, Homo sapiens
  CDR3 for alpha chain variable domain of TCR clone 306252 (TRAV12-3, TRAJ27)
CAMRAYNTNAGKSTF

SEQ ID NO: 612504 - protein, 13 aa, Homo sapiens
  CDR3 for beta chain variable domain of TCR clone 306252 (TRBV27, TRBJ2-1)
CASRTLGVGEQFF

SEQ ID NO: 612505 - protein, 15 aa, Homo sapiens
  CDR3 for alpha chain variable domain of TCR clone 306253 (TRAV13-1, TRAJ44)
CAASRGGGTGSKLTF

SEQ ID NO: 612506 - protein, 16 aa, Homo sapiens
  CDR3 for beta chain variable domain of TCR clone 306253 (TRBV29-1, TRBJ2-7)
CSVEVVGTSGSYEQYF

SEQ ID NO: 612507 - protein, 14 aa, Homo sapiens
  CDR3 for alpha chain variable domain of TCR clone 306254 (TRAV17, TRAJ57)
CATDPQGGSEKLVF

SEQ ID NO: 612508 - protein, 15 aa, Homo sapiens
  CDR3 for beta chain variable domain of TCR clone 306254 (TRBV6-3, TRBJ2-7)
CASSSPGTVFYEQHF

SEQ ID NO: 612509 - protein, 11 aa, Homo sapiens
  CDR3 for alpha chain variable domain of TCR clone 306255 (TRAV13-1, TRAJ52)
PGGTSYGKLTF

SEQ ID NO: 612510 - protein, 16 aa, Homo sapiens
  CDR3 for beta chain variable domain of TCR clone 306255 (TRBV28, TRBJ2-7)
CASSTWVATGDLSQYF

SEQ ID NO: 612511 - protein, 13 aa, Homo sapiens
  CDR3 for alpha chain variable domain of TCR clone 306256 (TRAV8-3, TRAJ28)
CAVGAVGSYQLTF

SEQ ID NO: 612512 - protein, 13 aa, Homo sapiens
  CDR3 for beta chain variable domain of TCR clone 306256 (TRBV7-9, TRBJ1-2)
CASSVKQNYGYTF

SEQ ID NO: 612513 - protein, 16 aa, Homo sapiens
  CDR3 for alpha chain variable domain of TCR clone 306257 (TRAV3, TRAJ10)
CAVRDMRAGGGNKLTI

SEQ ID NO: 612514 - protein, 15 aa, Homo sapiens
  CDR3 for beta chain variable domain of TCR clone 306257 (TRBV9, TRBJ1-6)
CASSVAGTGDSPLHF

SEQ ID NO: 612515 - protein, 17 aa, Homo sapiens
  CDR3 for alpha chain variable domain of TCR clone 306258 (TRAV36/DV7, TRAJ52)
CAVAQRAGGTSYGKLTF

SEQ ID NO: 612516 - protein, 14 aa, Homo sapiens
  CDR3 for beta chain variable domain of TCR clone 306258 (TRBV6-1, TRBJ1-3)
CASVQGGGGNTVYF

SEQ ID NO: 612517 - protein, 16 aa, Homo sapiens
  CDR3 for alpha chain variable domain of TCR clone 306259 (TRAV8-6, TRAJ53)
CAVTSNSGGSNYKLTF

SEQ ID NO: 612518 - protein, 14 aa, Homo sapiens
  CDR3 for beta chain variable domain of TCR clone 306259 (TRBV19, TRBJ2-1)
CASPTFVLSGEQFF

SEQ ID NO: 612519 - protein, 14 aa, Homo sapiens
  CDR3 for alpha chain variable domain of TCR clone 306260 (TRAV13-1, TRAJ44)
CAAKATGTASKLTF

SEQ ID NO: 612520 - protein, 16 aa, Homo sapiens
  CDR3 for beta chain variable domain of TCR clone 306260 (TRBV19, TRBJ2-1)
CASSKAGPSSYNEQSF

SEQ ID NO: 612521 - protein, 16 aa, Homo sapiens
  CDR3 for alpha chain variable domain of TCR clone 306261 (TRAV23/DV6, TRAJ9)
CAASIGGNSGGFKTIF

SEQ ID NO: 612522 - protein, 12 aa, Homo sapiens
  CDR3 for beta chain variable domain of TCR clone 306261 (TRBV11-2, TRBJ2-1)
CASSVQREGQFF

SEQ ID NO: 612523 - protein, 14 aa, Homo sapiens
  CDR3 for alpha chain variable domain of TCR clone 306262 (TRAV8-6, TRAJ53)
CAALVLGSNYKLTF

SEQ ID NO: 612524 - protein, 19 aa, Homo sapiens
  CDR3 for beta chain variable domain of TCR clone 306262 (TRBV20-1, TRBJ2-3)
CSAEPLAGHGDTQYWPRHP

SEQ ID NO: 612525 - protein, 16 aa, Homo sapiens
  CDR3 for alpha chain variable domain of TCR clone 306263 (TRAV3, TRAJ21)
CAVRDIERGNFNKFYF

SEQ ID NO: 612526 - protein, 13 aa, Homo sapiens
  CDR3 for beta chain variable domain of TCR clone 306263 (TRBV10-3, TRBJ2-7)
CASKLAVNCEQYF

SEQ ID NO: 612527 - protein, 16 aa, Homo sapiens
  CDR3 for alpha chain variable domain of TCR clone 306264 (TRAV27, TRAJ52)
CAGAPAGGTSYGKLTF

SEQ ID NO: 612528 - protein, 12 aa, Homo sapiens
  CDR3 for beta chain variable domain of TCR clone 306264 (TRBV27, TRBJ2-1)
CASRGFYHEQFF

SEQ ID NO: 612529 - protein, 12 aa, Homo sapiens
  CDR3 for alpha chain variable domain of TCR clone 306265 (TRAV2, TRAJ5)
CALDTGRRALTF

SEQ ID NO: 612530 - protein, 15 aa, Homo sapiens
  CDR3 for beta chain variable domain of TCR clone 306265 (TRBV10-3, TRBJ2-1)
CGISDVQDRAYGQFF

SEQ ID NO: 612531 - protein, 16 aa, Homo sapiens
  CDR3 for alpha chain variable domain of TCR clone 306266 (TRAV3, TRAJ10)
CAVRDMRAGGGNKLTF

SEQ ID NO: 612532 - protein, 19 aa, Homo sapiens
  CDR3 for beta chain variable domain of TCR clone 306266 (TRBV6-3, TRBJ1-2)
CASSYSEGRTGPPNYGYTF

SEQ ID NO: 612533 - protein, 13 aa, Homo sapiens
  CDR3 for alpha chain variable domain of TCR clone 306267 (TRAV35, TRAJ33)
CAGQLYGVYQLIW

SEQ ID NO: 612534 - protein, 16 aa, Homo sapiens
  CDR3 for beta chain variable domain of TCR clone 306267 (TRBV7-2, TRBJ1-1)
CASSLGGPALKLSVDR

SEQ ID NO: 612535 - protein, 17 aa, Homo sapiens
  CDR3 for alpha chain variable domain of TCR clone 306268 (TRAV14/DV4, TRAJ42)
CAMRARLNGGSQGNLIF

SEQ ID NO: 612536 - protein, 11 aa, Homo sapiens
  CDR3 for beta chain variable domain of TCR clone 306268 (TRBV11-2, TRBJ2-2)
CASSLPGELLF

SEQ ID NO: 612537 - protein, 14 aa, Homo sapiens
  CDR3 for alpha chain variable domain of TCR clone 306269 (TRAV12-3, TRAJ10)
SHLPLTGGGNKLTF

SEQ ID NO: 612538 - protein, 12 aa, Homo sapiens
  CDR3 for beta chain variable domain of TCR clone 306269 (TRBV7-6, TRBJ2-5)
CASSLSQETQYF

SEQ ID NO: 612539 - protein, 14 aa, Homo sapiens
  CDR3 for alpha chain variable domain of TCR clone 306270 (TRAV12-2, TRAJ13)
CAVKKTGGYKKVTF

SEQ ID NO: 612540 - protein, 11 aa, Homo sapiens
  CDR3 for beta chain variable domain of TCR clone 306270 (TRBV29-1, TRBJ2-5)
CSEDRTGTQYS

SEQ ID NO: 612541 - protein, 14 aa, Homo sapiens
  CDR3 for alpha chain variable domain of TCR clone 306271 (TRAV35, TRAJ33)
CAGSSQDSKYQLIW

SEQ ID NO: 612542 - protein, 14 aa, Homo sapiens
  CDR3 for beta chain variable domain of TCR clone 306271 (TRBV20-1, TRBJ2-1)
CSAQIGGSANEQFF

SEQ ID NO: 612543 - protein, 14 aa, Homo sapiens
  CDR3 for alpha chain variable domain of TCR clone 306272 (TRAV9-2, TRAJ39)
CALYIYNAGNMLTF

SEQ ID NO: 612544 - protein, 12 aa, Homo sapiens
  CDR3 for beta chain variable domain of TCR clone 306272 (TRBV24-1, TRBJ1-1)
CATLYPDTEAFF

SEQ ID NO: 612545 - protein, 17 aa, Homo sapiens
  CDR3 for alpha chain variable domain of TCR clone 306273 (TRAV38-2/DV8, TRAJ23)
CALSRKLIFGQGTELSV

SEQ ID NO: 612546 - protein, 14 aa, Homo sapiens
  CDR3 for beta chain variable domain of TCR clone 306273 (TRBV7-6, TRBJ2-3)
CASSLGTVTDTQYF

SEQ ID NO: 612547 - protein, 12 aa, Homo sapiens
  CDR3 for alpha chain variable domain of TCR clone 306274 (TRAV3, TRAJ20)
CALRDPDYKLSF

SEQ ID NO: 612548 - protein, 14 aa, Homo sapiens
  CDR3 for beta chain variable domain of TCR clone 306274 (TRBV4-3, TRBJ1-4)
CASSPLQRNEKLFF

SEQ ID NO: 612549 - protein, 14 aa, Homo sapiens
  CDR3 for alpha chain variable domain of TCR clone 306275 (TRAV1-2, TRAJ16)
CAVNPFSDGQKLLF

SEQ ID NO: 612550 - protein, 12 aa, Homo sapiens
  CDR3 for beta chain variable domain of TCR clone 306275 (TRBV6-5, TRBJ2-5)
CASSEGSETQYF

SEQ ID NO: 612551 - protein, 11 aa, Homo sapiens
  CDR3 for alpha chain variable domain of TCR clone 306276 (TRAV35, TRAJ30)
CAGPGDDKIIF

SEQ ID NO: 612552 - protein, 15 aa, Homo sapiens
  CDR3 for beta chain variable domain of TCR clone 306276 (TRBV10-2, TRBJ2-6)
CASSEQGTGANVLTF

SEQ ID NO: 612553 - protein, 14 aa, Homo sapiens
  CDR3 for alpha chain variable domain of TCR clone 306277 (TRAV36/DV7, TRAJ44)
CCGANTGTASKLTF

SEQ ID NO: 612554 - protein, 16 aa, Homo sapiens
  CDR3 for beta chain variable domain of TCR clone 306277 (TRBV7-9, TRBJ1-2)
CASSVGFSAGEDGYTF

SEQ ID NO: 612555 - protein, 10 aa, Homo sapiens
  CDR3 for alpha chain variable domain of TCR clone 306278 (TRAV8-1, TRAJ21)
CAVNGTKFYF

SEQ ID NO: 612556 - protein, 14 aa, Homo sapiens
  CDR3 for beta chain variable domain of TCR clone 306278 (TRBV7-2, TRBJ2-7)
CASSLPPGQGPQYF

SEQ ID NO: 612557 - protein, 18 aa, Homo sapiens
  CDR3 for alpha chain variable domain of TCR clone 306279 (TRAV13-1, TRAJ52)
GAAKNPNAGGTSYGKLTF

SEQ ID NO: 612558 - protein, 15 aa, Homo sapiens
  CDR3 for beta chain variable domain of TCR clone 306279 (TRBV28, TRBJ2-5)
CASSSGRTIQETQYF

SEQ ID NO: 612559 - protein, 12 aa, Homo sapiens
  CDR3 for alpha chain variable domain of TCR clone 306280 (TRAV2, TRAJ13)
TSASGGYQKVTF

SEQ ID NO: 612560 - protein, 13 aa, Homo sapiens
  CDR3 for beta chain variable domain of TCR clone 306280 (TRBV19, TRBJ2-7)
CASRKAGGSEQYF

SEQ ID NO: 612561 - protein, 14 aa, Homo sapiens
  CDR3 for alpha chain variable domain of TCR clone 306281 (TRAV1-1, TRAJ30)
CAVRSLNRDDKIIF

SEQ ID NO: 612562 - protein, 18 aa, Homo sapiens
  CDR3 for beta chain variable domain of TCR clone 306281 (TRBV20-1, TRBJ2-6)
CSAETTPTHGSGANVLTF

SEQ ID NO: 612563 - protein, 11 aa, Homo sapiens
  CDR3 for alpha chain variable domain of TCR clone 306282 (TRAV3, TRAJ21)
CAVGNCNKFYF

SEQ ID NO: 612564 - protein, 15 aa, Homo sapiens
  CDR3 for beta chain variable domain of TCR clone 306282 (TRBV29-1, TRBJ2-1)
CSVEGGPASYNEQIF

SEQ ID NO: 612565 - protein, 12 aa, Homo sapiens
  CDR3 for alpha chain variable domain of TCR clone 306283 (TRAV1-1, TRAJ8)
CAGGTGLQKLVF

SEQ ID NO: 612566 - protein, 15 aa, Homo sapiens
  CDR3 for beta chain variable domain of TCR clone 306283 (TRBV7-9, TRBJ1-4)
CASSRTGGFNERLFF

SEQ ID NO: 612567 - protein, 12 aa, Homo sapiens
  CDR3 for alpha chain variable domain of TCR clone 306284 (TRAV26-1, TRAJ48)
CIAVFGNEKLTF

SEQ ID NO: 612568 - protein, 17 aa, Homo sapiens
  CDR3 for beta chain variable domain of TCR clone 306284 (TRBV7-6, TRBJ2-1)
CASSFGLAGGNYNEQFF

SEQ ID NO: 612569 - protein, 16 aa, Homo sapiens
  CDR3 for alpha chain variable domain of TCR clone 306285 (TRAV26-1, TRAJ28)
CIVRVGLWGCELPTHF

SEQ ID NO: 612570 - protein, 16 aa, Homo sapiens
  CDR3 for beta chain variable domain of TCR clone 306285 (TRBV20-1, TRBJ1-2)
CSASMGQGVANYGYTF

SEQ ID NO: 612571 - protein, 11 aa, Homo sapiens
  CDR3 for alpha chain variable domain of TCR clone 306286 (TRAV1-2, TRAJ31)
CAVNNNARLMF

SEQ ID NO: 612572 - protein, 15 aa, Homo sapiens
  CDR3 for beta chain variable domain of TCR clone 306286 (TRBV28, TRBJ2-1)
CDSSIIAGGRSEQFF

SEQ ID NO: 612573 - protein, 13 aa, Homo sapiens
  CDR3 for alpha chain variable domain of TCR clone 306287 (TRAV21, TRAJ27)
CAARPGNAGKSTF

SEQ ID NO: 612574 - protein, 15 aa, Homo sapiens
  CDR3 for beta chain variable domain of TCR clone 306287 (TRBV4-2, TRBJ2-7)
CASSQASGGNLRAVL

SEQ ID NO: 612575 - protein, 14 aa, Homo sapiens
  CDR3 for alpha chain variable domain of TCR clone 306288 (TRAV4, TRAJ9)
CLVGSGTGGFKTIF

SEQ ID NO: 612576 - protein, 15 aa, Homo sapiens
  CDR3 for beta chain variable domain of TCR clone 306288 (TRBV28, TRBJ2-5)
CASSSGRTIQETQYF

SEQ ID NO: 612577 - protein, 16 aa, Homo sapiens
  CDR3 for alpha chain variable domain of TCR clone 306289 (TRAV26-2, TRAJ52)
FIRGPAGGTSYGKLTF

SEQ ID NO: 612578 - protein, 15 aa, Homo sapiens
  CDR3 for beta chain variable domain of TCR clone 306289 (TRBV20-1, TRBJ1-1)
CSASRGVTGNTEAFF

SEQ ID NO: 612579 - protein, 15 aa, Homo sapiens
  CDR3 for alpha chain variable domain of TCR clone 306290 (TRAV8-3, TRAJ11)
CAVGLLNSGYSILTF

SEQ ID NO: 612580 - protein, 14 aa, Homo sapiens
  CDR3 for beta chain variable domain of TCR clone 306290 (TRBV4-1, TRBJ2-5)
CASSRSGSGETQYF

SEQ ID NO: 612581 - protein, 10 aa, Homo sapiens
  CDR3 for alpha chain variable domain of TCR clone 306291 (TRAV13-1, TRAJ27)
CAPLARHINL

SEQ ID NO: 612582 - protein, 13 aa, Homo sapiens
  CDR3 for beta chain variable domain of TCR clone 306291 (TRBV7-3, TRBJ1-1)
CASSQDWGAEAFF

SEQ ID NO: 612583 - protein, 14 aa, Homo sapiens
  CDR3 for alpha chain variable domain of TCR clone 306292 (TRAV17, TRAJ40)
CATALTSGTYKYIF

SEQ ID NO: 612584 - protein, 16 aa, Homo sapiens
  CDR3 for beta chain variable domain of TCR clone 306292 (TRBV2, TRBJ1-4)
CASNLLQGATNEKLFF

SEQ ID NO: 612585 - protein, 13 aa, Homo sapiens
  CDR3 for alpha chain variable domain of TCR clone 306293 (TRAV27, TRAJ45)
CRSSGGGADGLTF

SEQ ID NO: 612586 - protein, 13 aa, Homo sapiens
  CDR3 for beta chain variable domain of TCR clone 306293 (TRBV7-7, TRBJ2-7)
CASSRSGQETQYF

SEQ ID NO: 612587 - protein, 18 aa, Homo sapiens
  CDR3 for alpha chain variable domain of TCR clone 306294 (TRAV21, TRAJ53)
CAVKRGENSGGSNYKLTF

SEQ ID NO: 612588 - protein, 14 aa, Homo sapiens
  CDR3 for beta chain variable domain of TCR clone 306294 (TRBV6-1, TRBJ1-5)
CASSAGAGSQPQHF

SEQ ID NO: 612589 - protein, 13 aa, Homo sapiens
  CDR3 for alpha chain variable domain of TCR clone 306295 (TRAV27, TRAJ45)
CRSSGGGADGLTF

SEQ ID NO: 612590 - protein, 13 aa, Homo sapiens
  CDR3 for beta chain variable domain of TCR clone 306295 (TRBV7-7, TRBJ2-1)
CASSRSGQETQYF

SEQ ID NO: 612591 - protein, 14 aa, Homo sapiens
  CDR3 for alpha chain variable domain of TCR clone 306296 (TRAV26-1, TRAJ21)
CIVRPPYNFTKFYF

SEQ ID NO: 612592 - protein, 14 aa, Homo sapiens
  CDR3 for beta chain variable domain of TCR clone 306296 (TRBV11-3, TRBJ2-1)
CASSATTSGSIQFF

SEQ ID NO: 612593 - protein, 15 aa, Homo sapiens
  CDR3 for alpha chain variable domain of TCR clone 306297 (TRAV26-1, TRAJ42)
CIVRVKGGSQGNLIF

SEQ ID NO: 612594 - protein, 13 aa, Homo sapiens
  CDR3 for beta chain variable domain of TCR clone 306297 (TRBV7-3, TRBJ1-1)
CASSQDWVAEAFF

SEQ ID NO: 612595 - protein, 21 aa, Homo sapiens
  CDR3 for alpha chain variable domain of TCR clone 306298 (TRAV1-1, TRAJ6)
CLLLLRCERLERTGGSYISTF

SEQ ID NO: 612596 - protein, 13 aa, Homo sapiens
  CDR3 for beta chain variable domain of TCR clone 306298 (TRBV10-2, TRBJ2-7)
CASGASGGYEQYF

SEQ ID NO: 612597 - protein, 17 aa, Homo sapiens
  CDR3 for alpha chain variable domain of TCR clone 306299 (TRAV26-1, TRAJ57)
FIVRPRFTQGGSEKLVF

SEQ ID NO: 612598 - protein, 16 aa, Homo sapiens
  CDR3 for beta chain variable domain of TCR clone 306299 (TRBV13, TRBJ2-2)
CASSEVFGANTGELFF

SEQ ID NO: 612599 - protein, 17 aa, Homo sapiens
  CDR3 for alpha chain variable domain of TCR clone 306300 (TRAV13-1, TRAJ52)
CAAGRNAGGTSYGKLTF

SEQ ID NO: 612600 - protein, 15 aa, Homo sapiens
  CDR3 for beta chain variable domain of TCR clone 306300 (TRBV7-9, TRBJ2-2)
CASGPLDTFPGELFF

SEQ ID NO: 612601 - protein, 15 aa, Homo sapiens
  CDR3 for alpha chain variable domain of TCR clone 306301 (TRAV30, TRAJ24)
CGTEIVDADSWKFQF

SEQ ID NO: 612602 - protein, 14 aa, Homo sapiens
  CDR3 for beta chain variable domain of TCR clone 306301 (TRBV12-5, TRBJ2-5)
CASGSRTHQETQYF

SEQ ID NO: 612603 - protein, 12 aa, Homo sapiens
  CDR3 for alpha chain variable domain of TCR clone 306302 (TRAV8-1, TRAJ26)
CAVNNYGKNFVF

SEQ ID NO: 612604 - protein, 12 aa, Homo sapiens
  CDR3 for beta chain variable domain of TCR clone 306302 (TRBV5-5, TRBJ2-5)
CASSYFRETQYF

SEQ ID NO: 612605 - protein, 15 aa, Homo sapiens
  CDR3 for alpha chain variable domain of TCR clone 306303 (TRAV34, TRAJ38)
CGADFTPGNNRKLIW

SEQ ID NO: 612606 - protein, 13 aa, Homo sapiens
  CDR3 for beta chain variable domain of TCR clone 306303 (TRBV12-5, TRBJ2-3)
CASGDRQSDTQYF

SEQ ID NO: 612607 - protein, 12 aa, Homo sapiens
  CDR3 for alpha chain variable domain of TCR clone 306304 (TRAV8-3, TRAJ6)
CAVAGGSYIPTF

SEQ ID NO: 612608 - protein, 14 aa, Homo sapiens
  CDR3 for beta chain variable domain of TCR clone 306304 (TRBV27, TRBJ2-7)
RASATGTERREQYF

SEQ ID NO: 612609 - protein, 14 aa, Homo sapiens
  CDR3 for alpha chain variable domain of TCR clone 306305 (TRAV25, TRAJ35)
CARRMEGFGNVLHC

SEQ ID NO: 612610 - protein, 16 aa, Homo sapiens
  CDR3 for beta chain variable domain of TCR clone 306305 (TRBV11-3, TRBJ2-5)
CASSSVVAGSTETKYF

SEQ ID NO: 612611 - protein, 14 aa, Homo sapiens
  CDR3 for alpha chain variable domain of TCR clone 306306 (TRAV12-1, TRAJ17)
CVGNYKAAGNKLNF

SEQ ID NO: 612612 - protein, 17 aa, Homo sapiens
  CDR3 for beta chain variable domain of TCR clone 306306 (TRBV20-1, TRBJ2-1)
CSASSSGLAGSYNEQFF

SEQ ID NO: 612613 - protein, 14 aa, Homo sapiens
  CDR3 for alpha chain variable domain of TCR clone 306307 (TRAV12-2, TRAJ17)
CAVLFKAAGNKLTF

SEQ ID NO: 612614 - protein, 14 aa, Homo sapiens
  CDR3 for beta chain variable domain of TCR clone 306307 (TRBV7-6, TRBJ2-3)
CASSVAGGTDTQYF

SEQ ID NO: 612615 - protein, 14 aa, Homo sapiens
  CDR3 for alpha chain variable domain of TCR clone 306308 (TRAV38-1, TRAJ29)
CAFITPSENTPLVF

SEQ ID NO: 612616 - protein, 14 aa, Homo sapiens
  CDR3 for beta chain variable domain of TCR clone 306308 (TRBV18, TRBJ2-7)
CASSPRGGVYEQYF

SEQ ID NO: 612617 - protein, 13 aa, Homo sapiens
  CDR3 for alpha chain variable domain of TCR clone 306309 (TRAV13-1, TRAJ39)
CAASIWTGNMLTF

SEQ ID NO: 612618 - protein, 15 aa, Homo sapiens
  CDR3 for beta chain variable domain of TCR clone 306309 (TRBV7-9, TRBJ1-1)
CASSLLEQGGTEAFF

SEQ ID NO: 612619 - protein, 12 aa, Homo sapiens
  CDR3 for alpha chain variable domain of TCR clone 306310 (TRAV8-4, TRAJ43)
CAVSVNNNDMRF

SEQ ID NO: 612620 - protein, 13 aa, Homo sapiens
  CDR3 for beta chain variable domain of TCR clone 306310 (TRBV15, TRBJ1-6)
CATSGGLNSPLHF

SEQ ID NO: 612621 - protein, 15 aa, Homo sapiens
  CDR3 for alpha chain variable domain of TCR clone 306311 (TRAV20, TRAJ50)
CAVRQMRTSYDKVIF

SEQ ID NO: 612622 - protein, 17 aa, Homo sapiens
  CDR3 for beta chain variable domain of TCR clone 306311 (TRBV28, TRBJ2-7)
CASSPLHRASGVYEQYF

SEQ ID NO: 612623 - protein, 14 aa, Homo sapiens
  CDR3 for alpha chain variable domain of TCR clone 306312 (TRAV12-3, TRAJ10)
GHLPLTGGGNKLTF

SEQ ID NO: 612624 - protein, 14 aa, Homo sapiens
  CDR3 for beta chain variable domain of TCR clone 306312 (TRBV18, TRBJ2-7)
CASSPRGGAYEQYF

SEQ ID NO: 612625 - protein, 16 aa, Homo sapiens
  CDR3 for alpha chain variable domain of TCR clone 306313 (TRAV1-2, TRAJ10)
CAVRGVLTGGGNKLTV

SEQ ID NO: 612626 - protein, 20 aa, Homo sapiens
  CDR3 for beta chain variable domain of TCR clone 306313 (TRBV7-8, TRBJ2-2)
CASSHLFPGPTIHITGELFF

SEQ ID NO: 612627 - protein, 14 aa, Homo sapiens
  CDR3 for alpha chain variable domain of TCR clone 306314 (TRAV1-2, TRAJ8)
CAVREETGFQKLVF

SEQ ID NO: 612628 - protein, 13 aa, Homo sapiens
  CDR3 for beta chain variable domain of TCR clone 306314 (TRBV19, TRBJ1-2)
CASSVPGQDGYTF

SEQ ID NO: 612629 - protein, 16 aa, Homo sapiens
  CDR3 for alpha chain variable domain of TCR clone 306315 (TRAV3, TRAJ23)
CAVKIGIYNQGGKLIF

SEQ ID NO: 612630 - protein, 12 aa, Homo sapiens
  CDR3 for beta chain variable domain of TCR clone 306315 (TRBV3-1, TRBJ2-2)
CASSLFPGELFF

SEQ ID NO: 612631 - protein, 11 aa, Homo sapiens
  CDR3 for alpha chain variable domain of TCR clone 306316 (TRAV21, TRAJ39)
LLVNAGNMLTF

SEQ ID NO: 612632 - protein, 15 aa, Homo sapiens
  CDR3 for beta chain variable domain of TCR clone 306316 (TRBV29-1, TRBJ2-1)
CSGRDRTSSYNEQFF

SEQ ID NO: 612633 - protein, 16 aa, Homo sapiens
  CDR3 for alpha chain variable domain of TCR clone 306317 (TRAV26-2, TRAJ57)
CILRDVGSGGSENLVF

SEQ ID NO: 612634 - protein, 13 aa, Homo sapiens
  CDR3 for beta chain variable domain of TCR clone 306317 (TRBV18, TRBJ2-3)
CASSPGVTDTQYF

SEQ ID NO: 612635 - protein, 13 aa, Homo sapiens
  CDR3 for alpha chain variable domain of TCR clone 306318 (TRAV12-3, TRAJ33)
CAMSLNSNYQLIW

SEQ ID NO: 612636 - protein, 16 aa, Homo sapiens
  CDR3 for beta chain variable domain of TCR clone 306318 (TRBV13, TRBJ2-5)
CASSLRTGGSWETQYF

SEQ ID NO: 612637 - protein, 15 aa, Homo sapiens
  CDR3 for alpha chain variable domain of TCR clone 306319 (TRAV21, TRAJ45)
CAVSYSGGGADGLTF

SEQ ID NO: 612638 - protein, 12 aa, Homo sapiens
  CDR3 for beta chain variable domain of TCR clone 306319 (TRBV11-2, TRBJ2-1)
CASSPGNNEHFF

SEQ ID NO: 612639 - protein, 17 aa, Homo sapiens
  CDR3 for alpha chain variable domain of TCR clone 306320 (TRAV23/DV6, TRAJ57)
CAASSTLSQGGSEKLVF

SEQ ID NO: 612640 - protein, 14 aa, Homo sapiens
  CDR3 for beta chain variable domain of TCR clone 306320 (TRBV5-1, TRBJ2-7)
CASSFASGVNEQYF

SEQ ID NO: 612641 - protein, 12 aa, Homo sapiens
  CDR3 for alpha chain variable domain of TCR clone 306321 (TRAV24, TRAJ40)
CAFMPGTYKYIF

SEQ ID NO: 612642 - protein, 11 aa, Homo sapiens
  CDR3 for beta chain variable domain of TCR clone 306321 (TRBV10-1, TRBJ2-3)
CARSDSDTQYF

SEQ ID NO: 612643 - protein, 10 aa, Homo sapiens
  CDR3 for alpha chain variable domain of TCR clone 306322 (TRAV16, TRAJ22)
SAMHLRQLTF

SEQ ID NO: 612644 - protein, 11 aa, Homo sapiens
  CDR3 for beta chain variable domain of TCR clone 306322 (TRBV7-2, TRBJ2-2)
CASSIRGELFF

SEQ ID NO: 612645 - protein, 14 aa, Homo sapiens
  CDR3 for alpha chain variable domain of TCR clone 306323 (TRAV1-2, TRAJ16)
CAVNRFSDGQKLLF

SEQ ID NO: 612646 - protein, 19 aa, Homo sapiens
  CDR3 for beta chain variable domain of TCR clone 306323 (TRBV4-1, TRBJ2-1)
CASSQGPLPGLGSRNEQFF

SEQ ID NO: 612647 - protein, 12 aa, Homo sapiens
  CDR3 for alpha chain variable domain of TCR clone 306324 (TRAV23/DV6, TRAJ27)
CAASKSAGKSTF

SEQ ID NO: 612648 - protein, 18 aa, Homo sapiens
  CDR3 for beta chain variable domain of TCR clone 306324 (TRBV2, TRBJ2-3)
CASSEAGGQALGADTQYF

SEQ ID NO: 612649 - protein, 13 aa, Homo sapiens
  CDR3 for alpha chain variable domain of TCR clone 306325 (TRAV3, TRAJ28)
CACSGAGSYQLTF

SEQ ID NO: 612650 - protein, 14 aa, Homo sapiens
  CDR3 for beta chain variable domain of TCR clone 306325 (TRBV11-2, TRBJ1-2)
CASSLGTANYGYTF

SEQ ID NO: 612651 - protein, 15 aa, Homo sapiens
  CDR3 for alpha chain variable domain of TCR clone 306326 (TRAV20, TRAJ23)
CAVQAVRNQGGQLIF

SEQ ID NO: 612652 - protein, 13 aa, Homo sapiens
  CDR3 for beta chain variable domain of TCR clone 306326 (TRBV9, TRBJ2-7)
CASSASDSYEQYF

SEQ ID NO: 612653 - protein, 15 aa, Homo sapiens
  CDR3 for alpha chain variable domain of TCR clone 306327 (TRAV1-1, TRAJ20)
CAVRDNVANDYKLSF

SEQ ID NO: 612654 - protein, 13 aa, Homo sapiens
  CDR3 for beta chain variable domain of TCR clone 306327 (TRBV10-3, TRBJ2-7)
CASKLAVNYEQYF

SEQ ID NO: 612655 - protein, 12 aa, Homo sapiens
  CDR3 for alpha chain variable domain of TCR clone 306328 (TRAV35, TRAJ30)
CAGQLADEKIIF

SEQ ID NO: 612656 - protein, 17 aa, Homo sapiens
  CDR3 for beta chain variable domain of TCR clone 306328 (TRBV4-2, TRBJ2-5)
CASSPGRWRNFQETQYF

SEQ ID NO: 612657 - protein, 16 aa, Homo sapiens
  CDR3 for alpha chain variable domain of TCR clone 306329 (TRAV1-2, TRAJ10)
CAVRGVLTGGGNKLTF

SEQ ID NO: 612658 - protein, 15 aa, Homo sapiens
  CDR3 for beta chain variable domain of TCR clone 306329 (TRBV9, TRBJ1-6)
CASSVAGTGDSPLHC

SEQ ID NO: 612659 - protein, 14 aa, Homo sapiens
  CDR3 for alpha chain variable domain of TCR clone 306330 (TRAV8-3, TRAJ4)
CAVGAAGGYNKLIF

SEQ ID NO: 612660 - protein, 16 aa, Homo sapiens
  CDR3 for beta chain variable domain of TCR clone 306330 (TRBV12-5, TRBJ2-5)
CASGPRTSGNQQTQYF

SEQ ID NO: 612661 - protein, 15 aa, Homo sapiens
  CDR3 for alpha chain variable domain of TCR clone 306331 (TRAV3, TRAJ21)
CAVREPDFNKFTLNL

SEQ ID NO: 612662 - protein, 12 aa, Homo sapiens
  CDR3 for beta chain variable domain of TCR clone 306331 (TRBV11-2, TRBJ2-2)
CASSLGGGELFF

SEQ ID NO: 612663 - protein, 15 aa, Homo sapiens
  CDR3 for alpha chain variable domain of TCR clone 306332 (TRAV8-2, TRAJ13)
CVVSDLSGGYQKVTF

SEQ ID NO: 612664 - protein, 15 aa, Homo sapiens
  CDR3 for beta chain variable domain of TCR clone 306332 (TRBV6-3, TRBJ2-7)
CASSSPGTVFYEQYF

SEQ ID NO: 612665 - protein, 16 aa, Homo sapiens
  CDR3 for alpha chain variable domain of TCR clone 306333 (TRAV3, TRAJ10)
CAVIDMRAGGGNKLTF

SEQ ID NO: 612666 - protein, 14 aa, Homo sapiens
  CDR3 for beta chain variable domain of TCR clone 306333 (TRBV7-3, TRBJ2-2)
CASSLNSNTGELFF

SEQ ID NO: 612667 - protein, 12 aa, Homo sapiens
  CDR3 for alpha chain variable domain of TCR clone 306334 (TRAV1-2, TRAJ33)
CAALDSNYQLIW

SEQ ID NO: 612668 - protein, 14 aa, Homo sapiens
  CDR3 for beta chain variable domain of TCR clone 306334 (TRBV27, TRBJ2-1)
CASSDRAYYNEQFF

SEQ ID NO: 612669 - protein, 20 aa, Homo sapiens
  CDR3 for alpha chain variable domain of TCR clone 306335 (TRAV14/DV4, TRAJ22)
CAMREGPFSISSVSARQLTF

SEQ ID NO: 612670 - protein, 13 aa, Homo sapiens
  CDR3 for beta chain variable domain of TCR clone 306335 (TRBV4-2, TRBJ2-3)
CASSQDWQHTQYF

SEQ ID NO: 612671 - protein, 13 aa, Homo sapiens
  CDR3 for alpha chain variable domain of TCR clone 306336 (TRAV21, TRAJ20)
CAVGLRVDYKLSF

SEQ ID NO: 612672 - protein, 15 aa, Homo sapiens
  CDR3 for beta chain variable domain of TCR clone 306336 (TRBV6-1, TRBJ1-1)
CASSHRGTLKLSLDK

SEQ ID NO: 612673 - protein, 14 aa, Homo sapiens
  CDR3 for alpha chain variable domain of TCR clone 306337 (TRAV1-2, TRAJ8)
CAVREDTGFQQLVF

SEQ ID NO: 612674 - protein, 14 aa, Homo sapiens
  CDR3 for beta chain variable domain of TCR clone 306337 (TRBV7-2, TRBJ1-1)
CASSFLTGTTEAFF

SEQ ID NO: 612675 - protein, 14 aa, Homo sapiens
  CDR3 for alpha chain variable domain of TCR clone 306338 (TRAV26-1, TRAJ38)
CIADNAGNNRKLIW

SEQ ID NO: 612676 - protein, 16 aa, Homo sapiens
  CDR3 for beta chain variable domain of TCR clone 306338 (TRBV11-3, TRBJ2-5)
CASSSVVAGSTETQYF

SEQ ID NO: 612677 - protein, 14 aa, Homo sapiens
  CDR3 for alpha chain variable domain of TCR clone 306339 (TRAV12-2, TRAJ44)
CAVNPTGTASKLTF

SEQ ID NO: 612678 - protein, 13 aa, Homo sapiens
  CDR3 for beta chain variable domain of TCR clone 306339 (TRBV20-1, TRBJ1-6)
CSAPLGVGSPLHF

SEQ ID NO: 612679 - protein, 13 aa, Homo sapiens
  CDR3 for alpha chain variable domain of TCR clone 306340 (TRAV29/DV5, TRAJ49)
CAASTNTGNQFYF

SEQ ID NO: 612680 - protein, 11 aa, Homo sapiens
  CDR3 for beta chain variable domain of TCR clone 306340 (TRBV6-1, TRBJ2-1)
CASISANEQFF

SEQ ID NO: 612681 - protein, 11 aa, Homo sapiens
  CDR3 for alpha chain variable domain of TCR clone 306341 (TRAV23/DV6, TRAJ44)
CAAPTPGKLTF

SEQ ID NO: 612682 - protein, 16 aa, Homo sapiens
  CDR3 for beta chain variable domain of TCR clone 306341 (TRBV7-3, TRBJ2-2)
CASSLKRGTLSGELFF

SEQ ID NO: 612683 - protein, 13 aa, Homo sapiens
  CDR3 for alpha chain variable domain of TCR clone 306342 (TRAV8-3, TRAJ48)
CAVVPFGNEKLTF

SEQ ID NO: 612684 - protein, 13 aa, Homo sapiens
  CDR3 for beta chain variable domain of TCR clone 306342 (TRBV7-2, TRBJ1-5)
CASSFARNQPQHF

SEQ ID NO: 612685 - protein, 15 aa, Homo sapiens
  CDR3 for alpha chain variable domain of TCR clone 306343 (TRAV12-1, TRAJ44)
CVVSPNTGTASKLTF

SEQ ID NO: 612686 - protein, 13 aa, Homo sapiens
  CDR3 for beta chain variable domain of TCR clone 306343 (TRBV2, TRBJ2-5)
CASSALRGETQYF

SEQ ID NO: 612687 - protein, 13 aa, Homo sapiens
  CDR3 for alpha chain variable domain of TCR clone 306344 (TRAV8-4, TRAJ49)
CAVSDPGGNQFYF

SEQ ID NO: 612688 - protein, 13 aa, Homo sapiens
  CDR3 for beta chain variable domain of TCR clone 306344 (TRBV6-3, TRBJ2-3)
CASEGELKDTQYF

SEQ ID NO: 612689 - protein, 13 aa, Homo sapiens
  CDR3 for alpha chain variable domain of TCR clone 306345 (TRAV27, TRAJ42)
CAGARGSQVNLIF

SEQ ID NO: 612690 - protein, 15 aa, Homo sapiens
  CDR3 for beta chain variable domain of TCR clone 306345 (TRBV10-3, TRBJ2-2)
CAIRTDREDTGELFF

SEQ ID NO: 612691 - protein, 14 aa, Homo sapiens
  CDR3 for alpha chain variable domain of TCR clone 306346 (TRAV12-2, TRAJ40)
CAVQIPSGTYKYIF

SEQ ID NO: 612692 - protein, 20 aa, Homo sapiens
  CDR3 for beta chain variable domain of TCR clone 306346 (TRBV28, TRBJ2-1)
CASTPIGRSPGLAGGNEQFF

SEQ ID NO: 612693 - protein, 13 aa, Homo sapiens
  CDR3 for alpha chain variable domain of TCR clone 306347 (TRAV12-1, TRAJ9)
CVVLNTGGFKTIF

SEQ ID NO: 612694 - protein, 15 aa, Homo sapiens
  CDR3 for beta chain variable domain of TCR clone 306347 (TRBV13, TRBJ2-5)
CASSLAGYREETQYF

SEQ ID NO: 612695 - protein, 14 aa, Homo sapiens
  CDR3 for alpha chain variable domain of TCR clone 306348 (TRAV26-1, TRAJ21)
CIVRVVYNFNKFYF

SEQ ID NO: 612696 - protein, 11 aa, Homo sapiens
  CDR3 for beta chain variable domain of TCR clone 306348 (TRBV5-6, TRBJ2-5)
CASSLERQQYF

SEQ ID NO: 612697 - protein, 13 aa, Homo sapiens
  CDR3 for alpha chain variable domain of TCR clone 306349 (TRAV12-3, TRAJ37)
CAGCSSNTGKLIF

SEQ ID NO: 612698 - protein, 11 aa, Homo sapiens
  CDR3 for beta chain variable domain of TCR clone 306349 (TRBV12-4, TRBJ2-3)
CASTATDTQYF

SEQ ID NO: 612699 - protein, 17 aa, Homo sapiens
  CDR3 for alpha chain variable domain of TCR clone 306350 (TRAV26-1, TRAJ42)
CIVRVTGYGGSQGNLIF

SEQ ID NO: 612700 - protein, 12 aa, Homo sapiens
  CDR3 for beta chain variable domain of TCR clone 306350 (TRBV5-5, TRBJ2-5)
CASSYFGETQYF

SEQ ID NO: 612701 - protein, 14 aa, Homo sapiens
  CDR3 for alpha chain variable domain of TCR clone 306351 (TRAV27, TRAJ44)
CAGARTGTASKLTF

SEQ ID NO: 612702 - protein, 13 aa, Homo sapiens
  CDR3 for beta chain variable domain of TCR clone 306351 (TRBV7-9, TRBJ2-5)
CASLSPGQETQYF

SEQ ID NO: 612703 - protein, 13 aa, Homo sapiens
  CDR3 for alpha chain variable domain of TCR clone 306352 (TRAV2, TRAJ40)
CAVVTSGACKYIF

SEQ ID NO: 612704 - protein, 14 aa, Homo sapiens
  CDR3 for beta chain variable domain of TCR clone 306352 (TRBV19, TRBJ2-1)
CASPTFVLSGEQFF

SEQ ID NO: 612705 - protein, 12 aa, Homo sapiens
  CDR3 for alpha chain variable domain of TCR clone 306353 (TRAV13-2, TRAJ23)
CAERHRGGKLIF

SEQ ID NO: 612706 - protein, 16 aa, Homo sapiens
  CDR3 for beta chain variable domain of TCR clone 306353 (TRBV19, TRBJ2-2)
CASSFPGQGLAGELFF

SEQ ID NO: 612707 - protein, 15 aa, Homo sapiens
  CDR3 for alpha chain variable domain of TCR clone 306354 (TRAV25, TRAJ52)
CAGRPGGTSYGKLTF

SEQ ID NO: 612708 - protein, 16 aa, Homo sapiens
  CDR3 for beta chain variable domain of TCR clone 306354 (TRBV4-1, TRBJ2-7)
CASSQVGGRGNYEQYF

SEQ ID NO: 612709 - protein, 15 aa, Homo sapiens
  CDR3 for alpha chain variable domain of TCR clone 306355 (TRAV17, TRAJ35)
CATAFVIGFGNVLHC

SEQ ID NO: 612710 - protein, 13 aa, Homo sapiens
  CDR3 for beta chain variable domain of TCR clone 306355 (TRBV6-6, TRBJ1-2)
CASSPGANYGYTF

SEQ ID NO: 612711 - protein, 13 aa, Homo sapiens
  CDR3 for alpha chain variable domain of TCR clone 306356 (TRAV8-3, TRAJ4)
WVFYSGCYNKLIF

SEQ ID NO: 612712 - protein, 16 aa, Homo sapiens
  CDR3 for beta chain variable domain of TCR clone 306356 (TRBV7-8, TRBJ2-3)
CASSTEGQRETDTQYF

SEQ ID NO: 612713 - protein, 12 aa, Homo sapiens
  CDR3 for alpha chain variable domain of TCR clone 306357 (TRAV20, TRAJ45)
CAVQGGADGLTF

SEQ ID NO: 612714 - protein, 14 aa, Homo sapiens
  CDR3 for beta chain variable domain of TCR clone 306357 (TRBV20-1, TRBJ2-7)
CSAKRGRSSYEQYF

SEQ ID NO: 612715 - protein, 12 aa, Homo sapiens
  CDR3 for alpha chain variable domain of TCR clone 306358 (TRAV17, TRAJ57)
CATDGGSEKMVF

SEQ ID NO: 612716 - protein, 14 aa, Homo sapiens
  CDR3 for beta chain variable domain of TCR clone 306358 (TRBV28, TRBJ2-7)
CASTFYGRAHEQYF

SEQ ID NO: 612717 - protein, 13 aa, Homo sapiens
  CDR3 for alpha chain variable domain of TCR clone 306359 (TRAV3, TRAJ26)
CAVSRGYGQNFVF

SEQ ID NO: 612718 - protein, 15 aa, Homo sapiens
  CDR3 for beta chain variable domain of TCR clone 306359 (TRBV27, TRBJ2-1)
CASSLARGAYNGQFF

SEQ ID NO: 612719 - protein, 16 aa, Homo sapiens
  CDR3 for alpha chain variable domain of TCR clone 306360 (TRAV12-1, TRAJ48)
CVVNMVSNFGNEKLTF

SEQ ID NO: 612720 - protein, 18 aa, Homo sapiens
  CDR3 for beta chain variable domain of TCR clone 306360 (TRBV11-2, TRBJ2-6)
CASSLSPFLGTGANVLTF

SEQ ID NO: 612721 - protein, 14 aa, Homo sapiens
  CDR3 for alpha chain variable domain of TCR clone 306361 (TRAV12-1, TRAJ30)
CVVNIGGRDDKIIF

SEQ ID NO: 612722 - protein, 14 aa, Homo sapiens
  CDR3 for beta chain variable domain of TCR clone 306361 (TRBV7-6, TRBJ2-3)
CASSLGTVTKTQYF

SEQ ID NO: 612723 - protein, 15 aa, Homo sapiens
  CDR3 for alpha chain variable domain of TCR clone 306362 (TRAV26-1, TRAJ29)
CIVRVEGSGNTPLVF

SEQ ID NO: 612724 - protein, 11 aa, Homo sapiens
  CDR3 for beta chain variable domain of TCR clone 306362 (TRBV19, TRBJ1-1)
CASSIGSEAFF

SEQ ID NO: 612725 - protein, 17 aa, Homo sapiens
  CDR3 for alpha chain variable domain of TCR clone 306363 (TRAV3, TRAJ6)
CAVRDGPRAGGSYIPTF

SEQ ID NO: 612726 - protein, 13 aa, Homo sapiens
  CDR3 for beta chain variable domain of TCR clone 306363 (TRBV19, TRBJ1-2)
CASSVPGKDGYTF

SEQ ID NO: 612727 - protein, 11 aa, Homo sapiens
  CDR3 for alpha chain variable domain of TCR clone 306364 (TRAV27, TRAJ40)
SLTSGTYKYIF

SEQ ID NO: 612728 - protein, 19 aa, Homo sapiens
  CDR3 for beta chain variable domain of TCR clone 306364 (TRBV19, TRBJ2-5)
CASSIGQVTDFFLGETQYF

SEQ ID NO: 612729 - protein, 15 aa, Homo sapiens
  CDR3 for alpha chain variable domain of TCR clone 306365 (TRAV3, TRAJ5)
CAVRDLDTGRRRLTF

SEQ ID NO: 612730 - protein, 13 aa, Homo sapiens
  CDR3 for beta chain variable domain of TCR clone 306365 (TRBV12-4, TRBJ2-7)
CASSPTETYEQYF

SEQ ID NO: 612731 - protein, 16 aa, Homo sapiens
  CDR3 for alpha chain variable domain of TCR clone 306366 (TRAV8-3, TRAJ38)
CAVGASNAGNNRKLLW

SEQ ID NO: 612732 - protein, 15 aa, Homo sapiens
  CDR3 for beta chain variable domain of TCR clone 306366 (TRBV11-3, TRBJ1-3)
CASSLFGPSGNTTYF

SEQ ID NO: 612733 - protein, 12 aa, Homo sapiens
  CDR3 for alpha chain variable domain of TCR clone 306367 (TRAV21, TRAJ8)
CAVNTGFQKLVF

SEQ ID NO: 612734 - protein, 13 aa, Homo sapiens
  CDR3 for beta chain variable domain of TCR clone 306367 (TRBV19, TRBJ1-2)
CASSQGQVYGYTF

SEQ ID NO: 612735 - protein, 17 aa, Homo sapiens
  CDR3 for alpha chain variable domain of TCR clone 306368 (TRAV3, TRAJ6)
CAVRDGPRAGGSYIPTF

SEQ ID NO: 612736 - protein, 14 aa, Homo sapiens
  CDR3 for beta chain variable domain of TCR clone 306368 (TRBV19, TRBJ2-1)
CASSRLASINEQFF

SEQ ID NO: 612737 - protein, 11 aa, Homo sapiens
  CDR3 for alpha chain variable domain of TCR clone 306369 (TRAV1-2, TRAJ31)
CAVNSNARLMC

SEQ ID NO: 612738 - protein, 15 aa, Homo sapiens
  CDR3 for beta chain variable domain of TCR clone 306369 (TRBV28, TRBJ2-1)
CASSIIAGGRSEQFF

SEQ ID NO: 612739 - protein, 13 aa, Homo sapiens
  CDR3 for alpha chain variable domain of TCR clone 306370 (TRAV3, TRAJ43)
RAVRDTRGGDMRF

SEQ ID NO: 612740 - protein, 15 aa, Homo sapiens
  CDR3 for beta chain variable domain of TCR clone 306370 (TRBV6-5, TRBJ1-5)
CASSYSRRSNQPQHF

SEQ ID NO: 612741 - protein, 12 aa, Homo sapiens
  CDR3 for alpha chain variable domain of TCR clone 306371 (TRAV17, TRAJ43)
CATDAFPADMRF

SEQ ID NO: 612742 - protein, 14 aa, Homo sapiens
  CDR3 for beta chain variable domain of TCR clone 306371 (TRBV20-1, TRBJ2-3)
CSARDGGSTDTHYF

SEQ ID NO: 612743 - protein, 13 aa, Homo sapiens
  CDR3 for alpha chain variable domain of TCR clone 306372 (TRAV1-2, TRAJ12)
CAVSMDSSYKLIF

SEQ ID NO: 612744 - protein, 15 aa, Homo sapiens
  CDR3 for beta chain variable domain of TCR clone 306372 (TRBV27, TRBJ2-5)
CASSLITSGGETQYF

SEQ ID NO: 612745 - protein, 20 aa, Homo sapiens
  CDR3 for alpha chain variable domain of TCR clone 306373 (TRAV12-3, TRAJ41)
SLFIRDSQPSDSATPEALNF

SEQ ID NO: 612746 - protein, 17 aa, Homo sapiens
  CDR3 for beta chain variable domain of TCR clone 306373 (TRBV5-1, TRBJ2-7)
CASSLDLTSSSSSTSGR

SEQ ID NO: 612747 - protein, 14 aa, Homo sapiens
  CDR3 for alpha chain variable domain of TCR clone 306374 (TRAV12-3, TRAJ58)
CAMSTETSGSRLTF

SEQ ID NO: 612748 - protein, 14 aa, Homo sapiens
  CDR3 for beta chain variable domain of TCR clone 306374 (TRBV5-1, TRBJ2-7)
CASSRGESLYEQYF

SEQ ID NO: 612749 - protein, 16 aa, Homo sapiens
  CDR3 for alpha chain variable domain of TCR clone 306375 (TRAV8-3, TRAJ13)
CAVVLMNSGGYQKVTF

SEQ ID NO: 612750 - protein, 19 aa, Homo sapiens
  CDR3 for beta chain variable domain of TCR clone 306375 (TRBV2, TRBJ2-7)
CASSDDETSGRANDYEQYF

SEQ ID NO: 612751 - protein, 14 aa, Homo sapiens
  CDR3 for alpha chain variable domain of TCR clone 306376 (TRAV8-4, TRAJ9)
CAVRINTGGFKTIF

SEQ ID NO: 612752 - protein, 16 aa, Homo sapiens
  CDR3 for beta chain variable domain of TCR clone 306376 (TRBV5-4, TRBJ2-3)
CASQQPGAGGADTQYF

SEQ ID NO: 612753 - protein, 11 aa, Homo sapiens
  CDR3 for alpha chain variable domain of TCR clone 306377 (TRAV21, TRAJ27)
CAVRMQANQPL

SEQ ID NO: 612754 - protein, 17 aa, Homo sapiens
  CDR3 for beta chain variable domain of TCR clone 306377 (TRBV7-9, TRBJ2-6)
CASSFGAGYSGANVLTF

SEQ ID NO: 612755 - protein, 15 aa, Homo sapiens
  CDR3 for alpha chain variable domain of TCR clone 306378 (TRAV8-2, TRAJ16)
CVVSDGFSDGHKLLF

SEQ ID NO: 612756 - protein, 14 aa, Homo sapiens
  CDR3 for beta chain variable domain of TCR clone 306378 (TRBV7-3, TRBJ1-1)
CASSLGTGYTEAFF

SEQ ID NO: 612757 - protein, 14 aa, Homo sapiens
  CDR3 for alpha chain variable domain of TCR clone 306379 (TRAV1-2, TRAJ8)
YAVREDTGFQKLVF

SEQ ID NO: 612758 - protein, 16 aa, Homo sapiens
  CDR3 for beta chain variable domain of TCR clone 306379 (TRBV7-9, TRBJ2-1)
CASSDVAGGSYNEQFF

SEQ ID NO: 612759 - protein, 16 aa, Homo sapiens
  CDR3 for alpha chain variable domain of TCR clone 306380 (TRAV3, TRAJ6)
CCERRPQGRRKLHTTF

SEQ ID NO: 612760 - protein, 13 aa, Homo sapiens
  CDR3 for beta chain variable domain of TCR clone 306380 (TRBV27, TRBJ2-1)
CASRTLGVGEQFF

SEQ ID NO: 612761 - protein, 14 aa, Homo sapiens
  CDR3 for alpha chain variable domain of TCR clone 306381 (TRAV20, TRAJ56)
CAVQFGGANSKLTF

SEQ ID NO: 612762 - protein, 14 aa, Homo sapiens
  CDR3 for beta chain variable domain of TCR clone 306381 (TRBV2, TRBJ2-1)
CASSDRAYYNEQFF

SEQ ID NO: 612763 - protein, 16 aa, Homo sapiens
  CDR3 for alpha chain variable domain of TCR clone 306382 (TRAV12-3, TRAJ53)
CAMSPGSGGSNYKLTF

SEQ ID NO: 612764 - protein, 13 aa, Homo sapiens
  CDR3 for beta chain variable domain of TCR clone 306382 (TRBV7-8, TRBJ2-1)
CASSAGTGNEQFF

SEQ ID NO: 612765 - protein, 13 aa, Homo sapiens
  CDR3 for alpha chain variable domain of TCR clone 306383 (TRAV29/DV5, TRAJ34)
CAARVDNTDKLIF

SEQ ID NO: 612766 - protein, 12 aa, Homo sapiens
  CDR3 for beta chain variable domain of TCR clone 306383 (TRBV2, TRBJ2-1)
CAYGPPGNEQFF

SEQ ID NO: 612767 - protein, 13 aa, Homo sapiens
  CDR3 for alpha chain variable domain of TCR clone 306384 (TRAV13-2, TRAJ40)
CAEFTSGTYKYIF

SEQ ID NO: 612768 - protein, 14 aa, Homo sapiens
  CDR3 for beta chain variable domain of TCR clone 306384 (TRBV10-2, TRBJ1-5)
CVSSSTGRNQPQHF

SEQ ID NO: 612769 - protein, 18 aa, Homo sapiens
  CDR3 for alpha chain variable domain of TCR clone 306385 (TRAV12-3, TRAJ52)
CAMSRTNAGGTSYGKLTF

SEQ ID NO: 612770 - protein, 14 aa, Homo sapiens
  CDR3 for beta chain variable domain of TCR clone 306385 (TRBV7-3, TRBJ2-1)
CASSLGTSANEQFF

SEQ ID NO: 612771 - protein, 14 aa, Homo sapiens
  CDR3 for alpha chain variable domain of TCR clone 306386 (TRAV17, TRAJ31)
CATDAEDNNARLMF

SEQ ID NO: 612772 - protein, 19 aa, Homo sapiens
  CDR3 for beta chain variable domain of TCR clone 306386 (TRBV3-1, TRBJ2-1)
CASSRMIVPGLAGKNEQFF

SEQ ID NO: 612773 - protein, 13 aa, Homo sapiens
  CDR3 for alpha chain variable domain of TCR clone 306387 (TRAV8-3, TRAJ43)
RAVVPYNNNDMRF

SEQ ID NO: 612774 - protein, 16 aa, Homo sapiens
  CDR3 for beta chain variable domain of TCR clone 306387 (TRBV7-2, TRBJ2-5)
CASSPFPTGGEETQYF

SEQ ID NO: 612775 - protein, 16 aa, Homo sapiens
  CDR3 for alpha chain variable domain of TCR clone 306388 (TRAV3, TRAJ10)
CAVRDMRAGGGNTLTF

SEQ ID NO: 612776 - protein, 11 aa, Homo sapiens
  CDR3 for beta chain variable domain of TCR clone 306388 (TRBV29-1, TRBJ2-5)
CSEDRTGTQYF

SEQ ID NO: 612777 - protein, 20 aa, Homo sapiens
  CDR3 for alpha chain variable domain of TCR clone 306389 (TRAV12-1, TRAJ42)
SSVIQPPTSVKGGSQGNLIF

SEQ ID NO: 612778 - protein, 18 aa, Homo sapiens
  CDR3 for beta chain variable domain of TCR clone 306389 (TRBV11-2, TRBJ2-3)
CASSLGGASRGAPNTQYL

SEQ ID NO: 612779 - protein, 12 aa, Homo sapiens
  CDR3 for alpha chain variable domain of TCR clone 306390 (TRAV8-3, TRAJ34)
WASGYNTVKLIF

SEQ ID NO: 612780 - protein, 13 aa, Homo sapiens
  CDR3 for beta chain variable domain of TCR clone 306390 (TRBV6-4, TRBJ2-3)
CASSVSWADTQYF

SEQ ID NO: 612781 - protein, 15 aa, Homo sapiens
  CDR3 for alpha chain variable domain of TCR clone 306391 (TRAV8-4, TRAJ26)
CAVSSSMVRILSLVP

SEQ ID NO: 612782 - protein, 14 aa, Homo sapiens
  CDR3 for beta chain variable domain of TCR clone 306391 (TRBV18, TRBJ2-5)
CASSPRASSETQYF

SEQ ID NO: 612783 - protein, 14 aa, Homo sapiens
  CDR3 for alpha chain variable domain of TCR clone 306392 (TRAV1-2, TRAJ16)
CAVNRFSDGQKLLC

SEQ ID NO: 612784 - protein, 15 aa, Homo sapiens
  CDR3 for beta chain variable domain of TCR clone 306392 (TRBV4-2, TRBJ1-1)
CASSQQGAGDTEAFF

SEQ ID NO: 612785 - protein, 14 aa, Homo sapiens
  CDR3 for alpha chain variable domain of TCR clone 306393 (TRAV12-1, TRAJ46)
CVVTAKSSGDKLTF

SEQ ID NO: 612786 - protein, 17 aa, Homo sapiens
  CDR3 for beta chain variable domain of TCR clone 306393 (TRBV4-1, TRBJ2-3)
CASSQEPAGGPLDTQYF

SEQ ID NO: 612787 - protein, 15 aa, Homo sapiens
  CDR3 for alpha chain variable domain of TCR clone 306394 (TRAV38-1, TRAJ37)
CAFIFGSGNTGKLIF

SEQ ID NO: 612788 - protein, 12 aa, Homo sapiens
  CDR3 for beta chain variable domain of TCR clone 306394 (TRBV7-9, TRBJ2-7)
CASSLEGYDQYF

SEQ ID NO: 612789 - protein, 17 aa, Homo sapiens
  CDR3 for alpha chain variable domain of TCR clone 306395 (TRAV23/DV6, TRAJ58)
CAARLLRGETSGSRLNF

SEQ ID NO: 612790 - protein, 13 aa, Homo sapiens
  CDR3 for beta chain variable domain of TCR clone 306395 (TRBV6-4, TRBJ1-5)
CASSADLNQPQHF

SEQ ID NO: 612791 - protein, 14 aa, Homo sapiens
  CDR3 for alpha chain variable domain of TCR clone 306396 (TRAV13-2, TRAJ17)
CAENSKAAGNKLTI

SEQ ID NO: 612792 - protein, 11 aa, Homo sapiens
  CDR3 for beta chain variable domain of TCR clone 306396 (TRBV6-3, TRBJ2-3)
CATGQADTQYF

SEQ ID NO: 612793 - protein, 20 aa, Homo sapiens
  CDR3 for alpha chain variable domain of TCR clone 306397 (TRAV26-1, TRAJ42)
CCVLLRRQTYYGGSQGNLIF

SEQ ID NO: 612794 - protein, 13 aa, Homo sapiens
  CDR3 for beta chain variable domain of TCR clone 306397 (TRBV7-9, TRBJ2-5)
CASLPSGRETQYF

SEQ ID NO: 612795 - protein, 14 aa, Homo sapiens
  CDR3 for alpha chain variable domain of TCR clone 306398 (TRAV4, TRAJ17)
CLVGPQAAGNKLTF

SEQ ID NO: 612796 - protein, 15 aa, Homo sapiens
  CDR3 for beta chain variable domain of TCR clone 306398 (TRBV9, TRBJ2-1)
CASSRAGSSYNEQFF

SEQ ID NO: 612797 - protein, 18 aa, Homo sapiens
  CDR3 for alpha chain variable domain of TCR clone 306399 (TRAV21, TRAJ52)
CAVRPSPAGGTIYGKLTF

SEQ ID NO: 612798 - protein, 17 aa, Homo sapiens
  CDR3 for beta chain variable domain of TCR clone 306399 (TRBV6-4, TRBJ2-5)
CASREDGLAGFQETQYF

SEQ ID NO: 612799 - protein, 12 aa, Homo sapiens
  CDR3 for alpha chain variable domain of TCR clone 306400 (TRAV8-3, TRAJ26)
CAGDNYGQNFVF

SEQ ID NO: 612800 - protein, 13 aa, Homo sapiens
  CDR3 for beta chain variable domain of TCR clone 306400 (TRBV7-3, TRBJ2-5)
CASSFRGGETQYF

SEQ ID NO: 612801 - protein, 14 aa, Homo sapiens
  CDR3 for alpha chain variable domain of TCR clone 306401 (TRAV1-2, TRAJ8)
CAVREDTGFQKLVF

SEQ ID NO: 612802 - protein, 17 aa, Homo sapiens
  CDR3 for beta chain variable domain of TCR clone 306401 (TRBV6-5, TRBJ2-3)
CASSYTTATGRGDTQYF

SEQ ID NO: 612803 - protein, 19 aa, Homo sapiens
  CDR3 for alpha chain variable domain of TCR clone 306402 (TRAV2, TRAJ20)
ILQVREADAAVYRDCQLSF

SEQ ID NO: 612804 - protein, 12 aa, Homo sapiens
  CDR3 for beta chain variable domain of TCR clone 306402 (TRBV11-2, TRBJ2-2)
CASSLGGGELFF

SEQ ID NO: 612805 - protein, 12 aa, Homo sapiens
  CDR3 for alpha chain variable domain of TCR clone 306403 (TRAV25, TRAJ11)
CAGASGYSTLTF

SEQ ID NO: 612806 - protein, 14 aa, Homo sapiens
  CDR3 for beta chain variable domain of TCR clone 306403 (TRBV19, TRBJ2-1)
CASGKSTQYNEQFF

SEQ ID NO: 612807 - protein, 10 aa, Homo sapiens
  CDR3 for alpha chain variable domain of TCR clone 306404 (TRAV12-2, TRAJ41)
CAVTGDALNF

SEQ ID NO: 612808 - protein, 13 aa, Homo sapiens
  CDR3 for beta chain variable domain of TCR clone 306404 (TRBV4-2, TRBJ1-1)
CASSQAGNTEAFF

SEQ ID NO: 612809 - protein, 14 aa, Homo sapiens
  CDR3 for alpha chain variable domain of TCR clone 306405 (TRAV8-4, TRAJ48)
CAVSETFGNEKLTF

SEQ ID NO: 612810 - protein, 14 aa, Homo sapiens
  CDR3 for beta chain variable domain of TCR clone 306405 (TRBV13, TRBJ2-7)
GASSLKGASYEQYF

SEQ ID NO: 612811 - protein, 14 aa, Homo sapiens
  CDR3 for alpha chain variable domain of TCR clone 306406 (TRAV29/DV5, TRAJ20)
CAATILSNDYKLSF

SEQ ID NO: 612812 - protein, 19 aa, Homo sapiens
  CDR3 for beta chain variable domain of TCR clone 306406 (TRBV25-1, TRBJ2-2)
CAILVYRVDRGRKTGELFF

SEQ ID NO: 612813 - protein, 15 aa, Homo sapiens
  CDR3 for alpha chain variable domain of TCR clone 306407 (TRAV8-3, TRAJ11)
CAVGRLNSGYSTLTF

SEQ ID NO: 612814 - protein, 16 aa, Homo sapiens
  CDR3 for beta chain variable domain of TCR clone 306407 (TRBV6-6, TRBJ2-1)
CASSYSFSGSYNEQFF

SEQ ID NO: 612815 - protein, 14 aa, Homo sapiens
  CDR3 for alpha chain variable domain of TCR clone 306408 (TRAV12-1, TRAJ17)
CVVNYKAAGNKLTF

SEQ ID NO: 612816 - protein, 14 aa, Homo sapiens
  CDR3 for beta chain variable domain of TCR clone 306408 (TRBV20-1, TRBJ2-4)
CSASGGVGENIQYF

SEQ ID NO: 612817 - protein, 12 aa, Homo sapiens
  CDR3 for alpha chain variable domain of TCR clone 306409 (TRAV13-1, TRAJ21)
CAAKEGFNKFYF

SEQ ID NO: 612818 - protein, 14 aa, Homo sapiens
  CDR3 for beta chain variable domain of TCR clone 306409 (TRBV3-1, TRBJ2-5)
CASSQGPDQETQYF

SEQ ID NO: 612819 - protein, 17 aa, Homo sapiens
  CDR3 for alpha chain variable domain of TCR clone 306410 (TRAV13-2, TRAJ31)
CAENARLMFGDGTQLVV

SEQ ID NO: 612820 - protein, 14 aa, Homo sapiens
  CDR3 for beta chain variable domain of TCR clone 306410 (TRBV7-9, TRBJ2-1)
CASSLGVADNEQFV

SEQ ID NO: 612821 - protein, 15 aa, Homo sapiens
  CDR3 for alpha chain variable domain of TCR clone 306411 (TRAV17, TRAJ56)
TSVLRTPGANSKLTF

SEQ ID NO: 612822 - protein, 15 aa, Homo sapiens
  CDR3 for beta chain variable domain of TCR clone 306411 (TRBV27, TRBJ2-7)
CASSLSGTGLDEQYF

SEQ ID NO: 612823 - protein, 12 aa, Homo sapiens
  CDR3 for alpha chain variable domain of TCR clone 306412 (TRAV34, TRAJ49)
CGALLTGNQFYF

SEQ ID NO: 612824 - protein, 11 aa, Homo sapiens
  CDR3 for beta chain variable domain of TCR clone 306412 (TRBV7-9, TRBJ2-3)
CASSGPDTQYF

SEQ ID NO: 612825 - protein, 13 aa, Homo sapiens
  CDR3 for alpha chain variable domain of TCR clone 306413 (TRAV38-2/DV8, TRAJ21)
CAYSGYNFNKFYF

SEQ ID NO: 612826 - protein, 15 aa, Homo sapiens
  CDR3 for beta chain variable domain of TCR clone 306413 (TRBV20-1, TRBJ2-1)
CSARHLQEGPNEQFF

SEQ ID NO: 612827 - protein, 11 aa, Homo sapiens
  CDR3 for alpha chain variable domain of TCR clone 306414 (TRAV3, TRAJ37)
CAVWNTGKLIF

SEQ ID NO: 612828 - protein, 14 aa, Homo sapiens
  CDR3 for beta chain variable domain of TCR clone 306414 (TRBV5-1, TRBJ1-1)
SASSPTGLDTEAFF

SEQ ID NO: 612829 - protein, 23 aa, Homo sapiens
  CDR3 for alpha chain variable domain of TCR clone 306415 (TRAV8-4, TRAJ38)
CARLNAGNNHIQNPDPAVDQLRD

SEQ ID NO: 612830 - protein, 14 aa, Homo sapiens
  CDR3 for beta chain variable domain of TCR clone 306415 (TRBV7-8, TRBJ2-3)
CASSLEAGTDTQYF

SEQ ID NO: 612831 - protein, 15 aa, Homo sapiens
  CDR3 for alpha chain variable domain of TCR clone 306416 (TRAV23/DV6, TRAJ45)
CAASARGGGADGLTV

SEQ ID NO: 612832 - protein, 15 aa, Homo sapiens
  CDR3 for beta chain variable domain of TCR clone 306416 (TRBV3-1, TRBJ2-5)
CASSRGQASWKTQYF

SEQ ID NO: 612833 - protein, 16 aa, Homo sapiens
  CDR3 for alpha chain variable domain of TCR clone 306417 (TRAV1-2, TRAJ10)
YAVRGVLTGGGNKLTF

SEQ ID NO: 612834 - protein, 14 aa, Homo sapiens
  CDR3 for beta chain variable domain of TCR clone 306417 (TRBV5-5, TRBJ1-2)
CASSLDPYNYGYTF

SEQ ID NO: 612835 - protein, 10 aa, Homo sapiens
  CDR3 for alpha chain variable domain of TCR clone 306418 (TRAV13-1, TRAJ27)
CAPLARQINL

SEQ ID NO: 612836 - protein, 13 aa, Homo sapiens
  CDR3 for beta chain variable domain of TCR clone 306418 (TRBV7-9, TRBJ1-2)
CASSVKQNYGYTF

SEQ ID NO: 612837 - protein, 14 aa, Homo sapiens
  CDR3 for alpha chain variable domain of TCR clone 306419 (TRAV12-3, TRAJ10)
SHLHLTGGGNKLTF

SEQ ID NO: 612838 - protein, 11 aa, Homo sapiens
  CDR3 for beta chain variable domain of TCR clone 306419 (TRBV20-1, TRBJ2-5)
CSAGRAETQYF

SEQ ID NO: 612839 - protein, 14 aa, Homo sapiens
  CDR3 for alpha chain variable domain of TCR clone 306420 (TRAV1-2, TRAJ8)
CAVREDTGFQKLVF

SEQ ID NO: 612840 - protein, 15 aa, Homo sapiens
  CDR3 for beta chain variable domain of TCR clone 306420 (TRBV27, TRBJ2-1)
GASSNGGGSSNEQFF

SEQ ID NO: 612841 - protein, 15 aa, Homo sapiens
  CDR3 for alpha chain variable domain of TCR clone 306421 (TRAV8-4, TRAJ10)
CAVSDQMGGGNKLTF

SEQ ID NO: 612842 - protein, 14 aa, Homo sapiens
  CDR3 for beta chain variable domain of TCR clone 306421 (TRBV4-1, TRBJ2-3)
CASSQDWSKDTQYF

SEQ ID NO: 612843 - protein, 14 aa, Homo sapiens
  CDR3 for alpha chain variable domain of TCR clone 306422 (TRAV17, TRAJ53)
CATDAGGSNYKLTF

SEQ ID NO: 612844 - protein, 14 aa, Homo sapiens
  CDR3 for beta chain variable domain of TCR clone 306422 (TRBV6-1, TRBJ1-3)
CASVQGGGGNTIYF

SEQ ID NO: 612845 - protein, 14 aa, Homo sapiens
  CDR3 for alpha chain variable domain of TCR clone 306423 (TRAV1-2, TRAJ8)
CAVREDTGFQKLVF

SEQ ID NO: 612846 - protein, 14 aa, Homo sapiens
  CDR3 for beta chain variable domain of TCR clone 306423 (TRBV29-1, TRBJ2-5)
CTVETSGSGETQYF

SEQ ID NO: 612847 - protein, 18 aa, Homo sapiens
  CDR3 for alpha chain variable domain of TCR clone 306424 (TRAV13-1, TRAJ52)
CAASKRSAGDTSYGKLTF

SEQ ID NO: 612848 - protein, 13 aa, Homo sapiens
  CDR3 for beta chain variable domain of TCR clone 306424 (TRBV11-3, TRBJ2-5)
CASSSGLQETQYF

SEQ ID NO: 612849 - protein, 14 aa, Homo sapiens
  CDR3 for alpha chain variable domain of TCR clone 306425 (TRAV8-4, TRAJ13)
CAVTLSGGYQKVTF

SEQ ID NO: 612850 - protein, 13 aa, Homo sapiens
  CDR3 for beta chain variable domain of TCR clone 306425 (TRBV12-4, TRBJ2-7)
CASSPTETYEQYF

SEQ ID NO: 612851 - protein, 18 aa, Homo sapiens
  CDR3 for alpha chain variable domain of TCR clone 306426 (TRAV3, TRAJ38)
CAVRDCLNAGNNHIQTPD

SEQ ID NO: 612852 - protein, 19 aa, Homo sapiens
  CDR3 for beta chain variable domain of TCR clone 306426 (TRBV7-2, TRBJ2-3)
CASSFLSRNWGGGTDTQYF

SEQ ID NO: 612853 - protein, 12 aa, Homo sapiens
  CDR3 for alpha chain variable domain of TCR clone 306427 (TRAV13-1, TRAJ21)
CAAKEGFNKFYF

SEQ ID NO: 612854 - protein, 20 aa, Homo sapiens
  CDR3 for beta chain variable domain of TCR clone 306427 (TRBV28, TRBJ2-1)
CASTPSGRSPGLAGGNEQFF

SEQ ID NO: 612855 - protein, 14 aa, Homo sapiens
  CDR3 for alpha chain variable domain of TCR clone 306428 (TRAV27, TRAJ12)
CAGARMNSSYKLIF

SEQ ID NO: 612856 - protein, 18 aa, Homo sapiens
  CDR3 for beta chain variable domain of TCR clone 306428 (TRBV10-3, TRBJ2-7)
CAISESGRPSGGRVEQYF

SEQ ID NO: 612857 - protein, 10 aa, Homo sapiens
  CDR3 for alpha chain variable domain of TCR clone 306429 (TRAV30, TRAJ48)
CGIGNEKLTF

SEQ ID NO: 612858 - protein, 14 aa, Homo sapiens
  CDR3 for beta chain variable domain of TCR clone 306429 (TRBV7-6, TRBJ2-3)
CASSGAGGTDTRYF

SEQ ID NO: 612859 - protein, 16 aa, Homo sapiens
  CDR3 for alpha chain variable domain of TCR clone 306430 (TRAV14/DV4, TRAJ54)
CAMREGRIQGAQKLVF

SEQ ID NO: 612860 - protein, 16 aa, Homo sapiens
  CDR3 for beta chain variable domain of TCR clone 306430 (TRBV5-7, TRBJ1-1)
CASSLVGPRGNTEAFF

SEQ ID NO: 612861 - protein, 14 aa, Homo sapiens
  CDR3 for alpha chain variable domain of TCR clone 306431 (TRAV22, TRAJ28)
CAVYSGAGSYQITF

SEQ ID NO: 612862 - protein, 16 aa, Homo sapiens
  CDR3 for beta chain variable domain of TCR clone 306431 (TRBV24-1, TRBJ2-3)
CATSDPGTGATDTQYF

SEQ ID NO: 612863 - protein, 16 aa, Homo sapiens
  CDR3 for alpha chain variable domain of TCR clone 306432 (TRAV26-2, TRAJ45)
CTTASPIGGGADGLTF

SEQ ID NO: 612864 - protein, 20 aa, Homo sapiens
  CDR3 for beta chain variable domain of TCR clone 306432 (TRBV28, TRBJ2-1)
CAGTPIGRSPGLAGGNEQFF

SEQ ID NO: 612865 - protein, 13 aa, Homo sapiens
  CDR3 for alpha chain variable domain of TCR clone 306433 (TRAV12-2, TRAJ52)
CAVGGTSYGKLPF

SEQ ID NO: 612866 - protein, 14 aa, Homo sapiens
  CDR3 for beta chain variable domain of TCR clone 306433 (TRBV19, TRBJ2-1)
CASPTFVLSGEQFF

SEQ ID NO: 612867 - protein, 15 aa, Homo sapiens
  CDR3 for alpha chain variable domain of TCR clone 306434 (TRAV12-1, TRAJ9)
CVVSFGDTGGFKTIF

SEQ ID NO: 612868 - protein, 14 aa, Homo sapiens
  CDR3 for beta chain variable domain of TCR clone 306434 (TRBV6-1, TRBJ2-1)
CASAKDGFYNEQFF

SEQ ID NO: 612869 - protein, 14 aa, Homo sapiens
  CDR3 for alpha chain variable domain of TCR clone 306435 (TRAV3, TRAJ40)
CAVRDRRGTYKHIF

SEQ ID NO: 612870 - protein, 17 aa, Homo sapiens
  CDR3 for beta chain variable domain of TCR clone 306435 (TRBV7-3, TRBJ2-3)
RASSLMKRMRGADTQYF

SEQ ID NO: 612871 - protein, 12 aa, Homo sapiens
  CDR3 for alpha chain variable domain of TCR clone 306436 (TRAV16, TRAJ8)
CAPLGGFQKLVF

SEQ ID NO: 612872 - protein, 15 aa, Homo sapiens
  CDR3 for beta chain variable domain of TCR clone 306436 (TRBV7-3, TRBJ2-1)
CASSPTGGGEVEQFF

SEQ ID NO: 612873 - protein, 16 aa, Homo sapiens
  CDR3 for alpha chain variable domain of TCR clone 306437 (TRAV23/DV6, TRAJ9)
CAASIGGNTGGFKTIF

SEQ ID NO: 612874 - protein, 16 aa, Homo sapiens
  CDR3 for beta chain variable domain of TCR clone 306437 (TRBV27, TRBJ2-2)
CASSLQPGGAPGELFF

SEQ ID NO: 612875 - protein, 15 aa, Homo sapiens
  CDR3 for alpha chain variable domain of TCR clone 306438 (TRAV8-4, TRAJ37)
CAVSRGSGNTGKLIF

SEQ ID NO: 612876 - protein, 13 aa, Homo sapiens
  CDR3 for beta chain variable domain of TCR clone 306438 (TRBV20-1, TRBJ2-7)
CSATHTSGYEQYC

SEQ ID NO: 612877 - protein, 14 aa, Homo sapiens
  CDR3 for alpha chain variable domain of TCR clone 306439 (TRAV21, TRAJ35)
CAVMPIGFLNVLHC

SEQ ID NO: 612878 - protein, 12 aa, Homo sapiens
  CDR3 for beta chain variable domain of TCR clone 306439 (TRBV7-9, TRBJ2-7)
CASSIKREEQYF

SEQ ID NO: 612879 - protein, 15 aa, Homo sapiens
  CDR3 for alpha chain variable domain of TCR clone 306440 (TRAV8-3, TRAJ32)
CAVGPYGGATNKLIF

SEQ ID NO: 612880 - protein, 14 aa, Homo sapiens
  CDR3 for beta chain variable domain of TCR clone 306440 (TRBV29-1, TRBJ2-2)
CSVPAETNTGELFF

SEQ ID NO: 612881 - protein, 13 aa, Homo sapiens
  CDR3 for alpha chain variable domain of TCR clone 306441 (TRAV21, TRAJ20)
CAVGVFADYKLSF

SEQ ID NO: 612882 - protein, 13 aa, Homo sapiens
  CDR3 for beta chain variable domain of TCR clone 306441 (TRBV12-5, TRBJ2-3)
CASGDRQSDTQYF

SEQ ID NO: 612883 - protein, 14 aa, Homo sapiens
  CDR3 for alpha chain variable domain of TCR clone 306442 (TRAV13-1, TRAJ44)
CAAKATGTASKLTF

SEQ ID NO: 612884 - protein, 14 aa, Homo sapiens
  CDR3 for beta chain variable domain of TCR clone 306442 (TRBV11-2, TRBJ1-5)
CASSLDRGRQPQHF

SEQ ID NO: 612885 - protein, 13 aa, Homo sapiens
  CDR3 for alpha chain variable domain of TCR clone 306443 (TRAV3, TRAJ20)
CCEAFCNDYKLSF

SEQ ID NO: 612886 - protein, 14 aa, Homo sapiens
  CDR3 for beta chain variable domain of TCR clone 306443 (TRBV7-3, TRBJ2-1)
CASSLGTSANEQFF

SEQ ID NO: 612887 - protein, 13 aa, Homo sapiens
  CDR3 for alpha chain variable domain of TCR clone 306444 (TRAV21, TRAJ57)
CAVTQGGSEKLVF

SEQ ID NO: 612888 - protein, 13 aa, Homo sapiens
  CDR3 for beta chain variable domain of TCR clone 306444 (TRBV20-1, TRBJ1-1)
CSARGGGNTEAFF

SEQ ID NO: 612889 - protein, 11 aa, Homo sapiens
  CDR3 for alpha chain variable domain of TCR clone 306445 (TRAV8-3, TRAJ49)
CAGNTGNQFYF

SEQ ID NO: 612890 - protein, 12 aa, Homo sapiens
  CDR3 for beta chain variable domain of TCR clone 306445 (TRBV11-2, TRBJ2-7)
CASSPPADEQYF

SEQ ID NO: 612891 - protein, 15 aa, Homo sapiens
  CDR3 for alpha chain variable domain of TCR clone 306446 (TRAV13-1, TRAJ17)
CSASIERAAGNKLTF

SEQ ID NO: 612892 - protein, 13 aa, Homo sapiens
  CDR3 for beta chain variable domain of TCR clone 306446 (TRBV7-7, TRBJ2-3)
CASSLSSADTQYF

SEQ ID NO: 612893 - protein, 14 aa, Homo sapiens
  CDR3 for alpha chain variable domain of TCR clone 306447 (TRAV12-1, TRAJ12)
CVVISMDSSYKLIF

SEQ ID NO: 612894 - protein, 14 aa, Homo sapiens
  CDR3 for beta chain variable domain of TCR clone 306447 (TRBV11-3, TRBJ2-2)
CASSRDTSTGELFF

SEQ ID NO: 612895 - protein, 12 aa, Homo sapiens
  CDR3 for alpha chain variable domain of TCR clone 306448 (TRAV12-3, TRAJ34)
CAMGYNTDKPIF

SEQ ID NO: 612896 - protein, 14 aa, Homo sapiens
  CDR3 for beta chain variable domain of TCR clone 306448 (TRBV5-7, TRBJ1-5)
CASSRTGGGQPQHF

SEQ ID NO: 612897 - protein, 13 aa, Homo sapiens
  CDR3 for alpha chain variable domain of TCR clone 306449 (TRAV2, TRAJ40)
CAVVTSGTYKYIF

SEQ ID NO: 612898 - protein, 15 aa, Homo sapiens
  CDR3 for beta chain variable domain of TCR clone 306449 (TRBV4-3, TRBJ2-2)
CASSQGQGGTGELFF

SEQ ID NO: 612899 - protein, 14 aa, Homo sapiens
  CDR3 for alpha chain variable domain of TCR clone 306450 (TRAV38-1, TRAJ40)
CALRPTSGTYKYPF

SEQ ID NO: 612900 - protein, 14 aa, Homo sapiens
  CDR3 for beta chain variable domain of TCR clone 306450 (TRBV25-1, TRBJ1-1)
CASTHLGGNTEAFF

SEQ ID NO: 612901 - protein, 14 aa, Homo sapiens
  CDR3 for alpha chain variable domain of TCR clone 306451 (TRAV21, TRAJ35)
CAVMPIGFGHVLHS

SEQ ID NO: 612902 - protein, 12 aa, Homo sapiens
  CDR3 for beta chain variable domain of TCR clone 306451 (TRBV7-9, TRBJ2-7)
CASSIKREEQYF

SEQ ID NO: 612903 - protein, 13 aa, Homo sapiens
  CDR3 for alpha chain variable domain of TCR clone 306452 (TRAV27, TRAJ41)
CAGEGNSGYALNF

SEQ ID NO: 612904 - protein, 16 aa, Homo sapiens
  CDR3 for beta chain variable domain of TCR clone 306452 (TRBV2, TRBJ2-5)
CASSETQGVGEETQYF

SEQ ID NO: 612905 - protein, 17 aa, Homo sapiens
  CDR3 for alpha chain variable domain of TCR clone 306453 (TRAV23/DV6, TRAJ9)
CSASLSPPNTGGFKTIF

SEQ ID NO: 612906 - protein, 14 aa, Homo sapiens
  CDR3 for beta chain variable domain of TCR clone 306453 (TRBV11-2, TRBJ2-5)
CASSRTGGIETQYF

SEQ ID NO: 612907 - protein, 13 aa, Homo sapiens
  CDR3 for alpha chain variable domain of TCR clone 306454 (TRAV8-3, TRAJ48)
CAVVRFGNEKLTF

SEQ ID NO: 612908 - protein, 14 aa, Homo sapiens
  CDR3 for beta chain variable domain of TCR clone 306454 (TRBV2, TRBJ2-5)
CASSEGSYQETQYF

SEQ ID NO: 612909 - protein, 12 aa, Homo sapiens
  CDR3 for alpha chain variable domain of TCR clone 306455 (TRAV27, TRAJ35)
CAGADFGNVLHW

SEQ ID NO: 612910 - protein, 15 aa, Homo sapiens
  CDR3 for beta chain variable domain of TCR clone 306455 (TRBV20-1, TRBJ2-7)
CSARDRVSGMDEQYF

SEQ ID NO: 612911 - protein, 13 aa, Homo sapiens
  CDR3 for alpha chain variable domain of TCR clone 306456 (TRAV8-3, TRAJ28)
CAVGAVGSYQLSF

SEQ ID NO: 612912 - protein, 15 aa, Homo sapiens
  CDR3 for beta chain variable domain of TCR clone 306456 (TRBV7-9, TRBJ1-5)
CASSQGHQPNQTQHF

SEQ ID NO: 612913 - protein, 11 aa, Homo sapiens
  CDR3 for alpha chain variable domain of TCR clone 306457 (TRAV2, TRAJ13)
CASGGYQKVTF

SEQ ID NO: 612914 - protein, 17 aa, Homo sapiens
  CDR3 for beta chain variable domain of TCR clone 306457 (TRBV20-1, TRBJ2-2)
CSASGSGQGGLTGELFC

SEQ ID NO: 612915 - protein, 18 aa, Homo sapiens
  CDR3 for alpha chain variable domain of TCR clone 306458 (TRAV26-1, TRAJ23)
CIVRVGLEVWNQGGKLIF

SEQ ID NO: 612916 - protein, 15 aa, Homo sapiens
  CDR3 for beta chain variable domain of TCR clone 306458 (TRBV12-4, TRBJ2-5)
CQQFFCQGAPRDQYF

SEQ ID NO: 612917 - protein, 14 aa, Homo sapiens
  CDR3 for alpha chain variable domain of TCR clone 306459 (TRAV12-2, TRAJ13)
CAVKKTGGYQEVTF

SEQ ID NO: 612918 - protein, 15 aa, Homo sapiens
  CDR3 for beta chain variable domain of TCR clone 306459 (TRBV19, TRBJ1-6)
CTSSTQGAVGSPLHF

SEQ ID NO: 612919 - protein, 14 aa, Homo sapiens
  CDR3 for alpha chain variable domain of TCR clone 306460 (TRAV38-1, TRAJ11)
CAFMKHEGYSTLTF

SEQ ID NO: 612920 - protein, 14 aa, Homo sapiens
  CDR3 for beta chain variable domain of TCR clone 306460 (TRBV4-2, TRBJ2-5)
CASSQDRGRETQYF

SEQ ID NO: 612921 - protein, 15 aa, Homo sapiens
  CDR3 for alpha chain variable domain of TCR clone 306461 (TRAV26-1, TRAJ40)
CIVRAVPSGTYKYIF

SEQ ID NO: 612922 - protein, 14 aa, Homo sapiens
  CDR3 for beta chain variable domain of TCR clone 306461 (TRBV20-1, TRBJ2-1)
CSAQIGGSANEQFF

SEQ ID NO: 612923 - protein, 13 aa, Homo sapiens
  CDR3 for alpha chain variable domain of TCR clone 306462 (TRAV8-6, TRAJ49)
CAVITNTGNQFYF

SEQ ID NO: 612924 - protein, 14 aa, Homo sapiens
  CDR3 for beta chain variable domain of TCR clone 306462 (TRBV7-8, TRBJ2-7)
CASSPRDRVYEQYF

SEQ ID NO: 612925 - protein, 13 aa, Homo sapiens
  CDR3 for alpha chain variable domain of TCR clone 306463 (TRAV8-3, TRAJ43)
CAVGPDNNNDMRF

SEQ ID NO: 612926 - protein, 15 aa, Homo sapiens
  CDR3 for beta chain variable domain of TCR clone 306463 (TRBV7-8, TRBJ2-7)
CASSLERAGSYEQYF

SEQ ID NO: 612927 - protein, 16 aa, Homo sapiens
  CDR3 for alpha chain variable domain of TCR clone 306464 (TRAV13-1, TRAJ18)
CAASRMRGSTLGRLYF

SEQ ID NO: 612928 - protein, 12 aa, Homo sapiens
  CDR3 for beta chain variable domain of TCR clone 306464 (TRBV11-2, TRBJ2-2)
CASSLPTGELFF

SEQ ID NO: 612929 - protein, 12 aa, Homo sapiens
  CDR3 for alpha chain variable domain of TCR clone 306465 (TRAV21, TRAJ45)
CAAGGGADGLTF

SEQ ID NO: 612930 - protein, 16 aa, Homo sapiens
  CDR3 for beta chain variable domain of TCR clone 306465 (TRBV2, TRBJ2-3)
CQHRGAPRRWTDTQYF

SEQ ID NO: 612931 - protein, 18 aa, Homo sapiens
  CDR3 for alpha chain variable domain of TCR clone 306466 (TRAV13-1, TRAJ52)
CAASKRSAGGTSYVKLTL

SEQ ID NO: 612932 - protein, 13 aa, Homo sapiens
  CDR3 for beta chain variable domain of TCR clone 306466 (TRBV12-4, TRBJ1-2)
CASSLRQGKGYTF

SEQ ID NO: 612933 - protein, 14 aa, Homo sapiens
  CDR3 for alpha chain variable domain of TCR clone 306467 (TRAV1-2, TRAJ8)
CAVREDTGFQKLVI

SEQ ID NO: 612934 - protein, 16 aa, Homo sapiens
  CDR3 for beta chain variable domain of TCR clone 306467 (TRBV29-1, TRBJ2-6)
CSVEDITYSGANVLTF

SEQ ID NO: 612935 - protein, 16 aa, Homo sapiens
  CDR3 for alpha chain variable domain of TCR clone 306468 (TRAV19, TRAJ24)
CSSPLSTTDSWGELQF

SEQ ID NO: 612936 - protein, 13 aa, Homo sapiens
  CDR3 for beta chain variable domain of TCR clone 306468 (TRBV12-5, TRBJ2-3)
CASGDRQSDTQYF

SEQ ID NO: 612937 - protein, 14 aa, Homo sapiens
  CDR3 for alpha chain variable domain of TCR clone 306469 (TRAV13-1, TRAJ17)
CSKYRRAAGNKLTF

SEQ ID NO: 612938 - protein, 12 aa, Homo sapiens
  CDR3 for beta chain variable domain of TCR clone 306469 (TRBV5-7, TRBJ1-1)
CASSLGRGKAFF

SEQ ID NO: 612939 - protein, 14 aa, Homo sapiens
  CDR3 for alpha chain variable domain of TCR clone 306470 (TRAV2, TRAJ20)
CAVDLRKHDYKLSF

SEQ ID NO: 612940 - protein, 11 aa, Homo sapiens
  CDR3 for beta chain variable domain of TCR clone 306470 (TRBV7-9, TRBJ2-5)
CASSLGETQYF

SEQ ID NO: 612941 - protein, 14 aa, Homo sapiens
  CDR3 for alpha chain variable domain of TCR clone 306471 (TRAV1-2, TRAJ16)
CAVNRFSDGQKLPF

SEQ ID NO: 612942 - protein, 13 aa, Homo sapiens
  CDR3 for beta chain variable domain of TCR clone 306471 (TRBV7-7, TRBJ2-2)
CASSLTSAGELFF

SEQ ID NO: 612943 - protein, 14 aa, Homo sapiens
  CDR3 for alpha chain variable domain of TCR clone 306472 (TRAV12-3, TRAJ10)
SHLPLTGGGNKLTF

SEQ ID NO: 612944 - protein, 14 aa, Homo sapiens
  CDR3 for beta chain variable domain of TCR clone 306472 (TRBV7-9, TRBJ2-2)
CASSGLADTGELFF

SEQ ID NO: 612945 - protein, 11 aa, Homo sapiens
  CDR3 for alpha chain variable domain of TCR clone 306473 (TRAV35, TRAJ30)
CAGPGDDKIIF

SEQ ID NO: 612946 - protein, 16 aa, Homo sapiens
  CDR3 for beta chain variable domain of TCR clone 306473 (TRBV9, TRBJ2-3)
CASSGTSGKDTDTQYF

SEQ ID NO: 612947 - protein, 14 aa, Homo sapiens
  CDR3 for alpha chain variable domain of TCR clone 306474 (TRAV26-1, TRAJ38)
CIADNAGKHRKLIW

SEQ ID NO: 612948 - protein, 13 aa, Homo sapiens
  CDR3 for beta chain variable domain of TCR clone 306474 (TRBV20-1, TRBJ1-1)
CSARGGGNTEAFF

SEQ ID NO: 612949 - protein, 14 aa, Homo sapiens
  CDR3 for alpha chain variable domain of TCR clone 306475 (TRAV38-1, TRAJ43)
CAFMKHNNNNDMRF

SEQ ID NO: 612950 - protein, 17 aa, Homo sapiens
  CDR3 for beta chain variable domain of TCR clone 306475 (TRBV7-7, TRBJ1-4)
CASSLVGQRASNEKLFF

SEQ ID NO: 612951 - protein, 13 aa, Homo sapiens
  CDR3 for alpha chain variable domain of TCR clone 306476 (TRAV26-2, TRAJ43)
CILRAVNNNDMRF

SEQ ID NO: 612952 - protein, 18 aa, Homo sapiens
  CDR3 for beta chain variable domain of TCR clone 306476 (TRBV5-5, TRBJ1-5)
CASSLRQVKGSSNQPQHF

SEQ ID NO: 612953 - protein, 19 aa, Homo sapiens
  CDR3 for alpha chain variable domain of TCR clone 306477 (TRAV1-2, TRAJ26)
CLLPLCCERPDNYVQNFVF

SEQ ID NO: 612954 - protein, 12 aa, Homo sapiens
  CDR3 for beta chain variable domain of TCR clone 306477 (TRBV7-9, TRBJ2-7)
CATRTDAYEQYF

SEQ ID NO: 612955 - protein, 12 aa, Homo sapiens
  CDR3 for alpha chain variable domain of TCR clone 306478 (TRAV13-2, TRAJ8)
CAPWLGFQKLVF

SEQ ID NO: 612956 - protein, 12 aa, Homo sapiens
  CDR3 for beta chain variable domain of TCR clone 306478 (TRBV3-1, TRBJ2-1)
CASSQAYNEQFF

SEQ ID NO: 612957 - protein, 12 aa, Homo sapiens
  CDR3 for alpha chain variable domain of TCR clone 306479 (TRAV1-2, TRAJ33)
CAALDSNYQLIW

SEQ ID NO: 612958 - protein, 15 aa, Homo sapiens
  CDR3 for beta chain variable domain of TCR clone 306479 (TRBV7-6, TRBJ1-5)
CASSQSSGINQPQHF

SEQ ID NO: 612959 - protein, 15 aa, Homo sapiens
  CDR3 for alpha chain variable domain of TCR clone 306480 (TRAV19, TRAJ45)
CALSEAGRGAAGLTF

SEQ ID NO: 612960 - protein, 14 aa, Homo sapiens
  CDR3 for beta chain variable domain of TCR clone 306480 (TRBV7-3, TRBJ2-1)
CASSLAGGTNEQFF

SEQ ID NO: 612961 - protein, 16 aa, Homo sapiens
  CDR3 for alpha chain variable domain of TCR clone 306481 (TRAV22, TRAJ45)
CAVERGKRGGADGITF

SEQ ID NO: 612962 - protein, 16 aa, Homo sapiens
  CDR3 for beta chain variable domain of TCR clone 306481 (TRBV28, TRBJ2-6)
CASSTLLGSGANVLTF

SEQ ID NO: 612963 - protein, 17 aa, Homo sapiens
  CDR3 for alpha chain variable domain of TCR clone 306482 (TRAV3, TRAJ6)
CAVRDGPRAGGSYITTY

SEQ ID NO: 612964 - protein, 14 aa, Homo sapiens
  CDR3 for beta chain variable domain of TCR clone 306482 (TRBV7-2, TRBJ2-7)
CASSPKTSFYEQYF

SEQ ID NO: 612965 - protein, 12 aa, Homo sapiens
  CDR3 for alpha chain variable domain of TCR clone 306483 (TRAV8-3, TRAJ26)
CAGDNYAQNSVF

SEQ ID NO: 612966 - protein, 15 aa, Homo sapiens
  CDR3 for beta chain variable domain of TCR clone 306483 (TRBV9, TRBJ2-1)
CASSLAGSSYNEQFF

SEQ ID NO: 612967 - protein, 15 aa, Homo sapiens
  CDR3 for alpha chain variable domain of TCR clone 306484 (TRAV8-4, TRAJ13)
CAVSDWSGGYQKVTF

SEQ ID NO: 612968 - protein, 15 aa, Homo sapiens
  CDR3 for beta chain variable domain of TCR clone 306484 (TRBV25-1, TRBJ1-4)
CASSPGDSTNEKLFF

SEQ ID NO: 612969 - protein, 14 aa, Homo sapiens
  CDR3 for alpha chain variable domain of TCR clone 306485 (TRAV1-2, TRAJ16)
CAVNRFSDGKKLLF

SEQ ID NO: 612970 - protein, 19 aa, Homo sapiens
  CDR3 for beta chain variable domain of TCR clone 306485 (TRBV28, TRBJ2-7)
CASSYSGTSRLGWVYEQYF

SEQ ID NO: 612971 - protein, 11 aa, Homo sapiens
  CDR3 for alpha chain variable domain of TCR clone 306486 (TRAV4, TRAJ31)
CLVGDNARLMF

SEQ ID NO: 612972 - protein, 13 aa, Homo sapiens
  CDR3 for beta chain variable domain of TCR clone 306486 (TRBV20-1, TRBJ1-1)
CSAPLGGGTEAFF

SEQ ID NO: 612973 - protein, 17 aa, Homo sapiens
  CDR3 for alpha chain variable domain of TCR clone 306487 (TRAV13-1, TRAJ52)
CAAGRNAGGTSDGKLKF

SEQ ID NO: 612974 - protein, 13 aa, Homo sapiens
  CDR3 for beta chain variable domain of TCR clone 306487 (TRBV7-2, TRBJ1-1)
CASNLKGAKVAFF

SEQ ID NO: 612975 - protein, 16 aa, Homo sapiens
  CDR3 for alpha chain variable domain of TCR clone 306488 (TRAV8-3, TRAJ44)
CAVGASNTGTASKITF

SEQ ID NO: 612976 - protein, 15 aa, Homo sapiens
  CDR3 for beta chain variable domain of TCR clone 306488 (TRBV27, TRBJ1-5)
CASTFNRGSNQPQHF

SEQ ID NO: 612977 - protein, 14 aa, Homo sapiens
  CDR3 for alpha chain variable domain of TCR clone 306489 (TRAV1-2, TRAJ8)
CAVREDTGFQKLVF

SEQ ID NO: 612978 - protein, 13 aa, Homo sapiens
  CDR3 for beta chain variable domain of TCR clone 306489 (TRBV10-1, TRBJ2-1)
CASSAGPDNEQFF

SEQ ID NO: 612979 - protein, 16 aa, Homo sapiens
  CDR3 for alpha chain variable domain of TCR clone 306490 (TRAV1-2, TRAJ10)
CAVRGVLTGGGNKLTC

SEQ ID NO: 612980 - protein, 12 aa, Homo sapiens
  CDR3 for beta chain variable domain of TCR clone 306490 (TRBV12-4, TRBJ2-7)
CASSLGGYEQYF

SEQ ID NO: 612981 - protein, 15 aa, Homo sapiens
  CDR3 for alpha chain variable domain of TCR clone 306491 (TRAV13-1, TRAJ17)
CAASIDRAAGNKLTF

SEQ ID NO: 612982 - protein, 12 aa, Homo sapiens
  CDR3 for beta chain variable domain of TCR clone 306491 (TRBV5-7, TRBJ1-1)
CASSLGRGKAFF

SEQ ID NO: 612983 - protein, 16 aa, Homo sapiens
  CDR3 for alpha chain variable domain of TCR clone 306492 (TRAV3, TRAJ3)
CAVRDRAKSSASKIIF

SEQ ID NO: 612984 - protein, 16 aa, Homo sapiens
  CDR3 for beta chain variable domain of TCR clone 306492 (TRBV20-1, TRBJ2-4)
CSATSLAELANNIQYF

SEQ ID NO: 612985 - protein, 16 aa, Homo sapiens
  CDR3 for alpha chain variable domain of TCR clone 306493 (TRAV22, TRAJ45)
CAVERGKRGGANGLTF

SEQ ID NO: 612986 - protein, 16 aa, Homo sapiens
  CDR3 for beta chain variable domain of TCR clone 306493 (TRBV7-9, TRBJ2-5)
CASSPSGQGVKGTQYF

SEQ ID NO: 612987 - protein, 12 aa, Homo sapiens
  CDR3 for alpha chain variable domain of TCR clone 306494 (TRAV16, TRAJ10)
CSRTGGGNKLTF

SEQ ID NO: 612988 - protein, 14 aa, Homo sapiens
  CDR3 for beta chain variable domain of TCR clone 306494 (TRBV13, TRBJ2-7)
CASSLAVGSYEQYF

SEQ ID NO: 612989 - protein, 14 aa, Homo sapiens
  CDR3 for alpha chain variable domain of TCR clone 306495 (TRAV12-2, TRAJ17)
CAVLFKAAGNKLTF

SEQ ID NO: 612990 - protein, 16 aa, Homo sapiens
  CDR3 for beta chain variable domain of TCR clone 306495 (TRBV20-1, TRBJ2-7)
CSARAPGLALSYEQYF

SEQ ID NO: 612991 - protein, 15 aa, Homo sapiens
  CDR3 for alpha chain variable domain of TCR clone 306496 (TRAV29/DV5, TRAJ57)
CAASLLRGGSEKLVL

SEQ ID NO: 612992 - protein, 15 aa, Homo sapiens
  CDR3 for beta chain variable domain of TCR clone 306496 (TRBV5-1, TRBJ1-3)
CASSLEGGSGNAIYF

SEQ ID NO: 612993 - protein, 13 aa, Homo sapiens
  CDR3 for alpha chain variable domain of TCR clone 306497 (TRAV4, TRAJ9)
CLVEGGGGFKTIF

SEQ ID NO: 612994 - protein, 13 aa, Homo sapiens
  CDR3 for beta chain variable domain of TCR clone 306497 (TRBV7-2, TRBJ2-5)
CASSQTSVETQYF

SEQ ID NO: 612995 - protein, 14 aa, Homo sapiens
  CDR3 for alpha chain variable domain of TCR clone 306498 (TRAV13-2, TRAJ12)
CAETLMDSSYKLIF

SEQ ID NO: 612996 - protein, 14 aa, Homo sapiens
  CDR3 for beta chain variable domain of TCR clone 306498 (TRBV28, TRBJ1-4)
CASSFGTFDEKLFF

SEQ ID NO: 612997 - protein, 15 aa, Homo sapiens
  CDR3 for alpha chain variable domain of TCR clone 306499 (TRAV26-1, TRAJ29)
CIVRVEGSGNTPLVF

SEQ ID NO: 612998 - protein, 14 aa, Homo sapiens
  CDR3 for beta chain variable domain of TCR clone 306499 (TRBV18, TRBJ2-5)
CGSSPGVSQETRYF

SEQ ID NO: 612999 - protein, 13 aa, Homo sapiens
  CDR3 for alpha chain variable domain of TCR clone 306500 (TRAV1-2, TRAJ33)
CAVSEDSNYQLIW

SEQ ID NO: 613000 - protein, 16 aa, Homo sapiens
  CDR3 for beta chain variable domain of TCR clone 306500 (TRBV4-2, TRBJ2-7)
CASSQDGVERGYEQYS

SEQ ID NO: 613001 - protein, 14 aa, Homo sapiens
  CDR3 for alpha chain variable domain of TCR clone 306501 (TRAV17, TRAJ12)
CAILPMDSSYKLIF

SEQ ID NO: 613002 - protein, 12 aa, Homo sapiens
  CDR3 for beta chain variable domain of TCR clone 306501 (TRBV6-3, TRBJ2-7)
CASSLTPYEQYF

SEQ ID NO: 613003 - protein, 10 aa, Homo sapiens
  CDR3 for alpha chain variable domain of TCR clone 306502 (TRAV12-3, TRAJ49)
CAMNDDPFYF

SEQ ID NO: 613004 - protein, 13 aa, Homo sapiens
  CDR3 for beta chain variable domain of TCR clone 306502 (TRBV12-4, TRBJ1-1)
CASSPGTGFEDFF

SEQ ID NO: 613005 - protein, 15 aa, Homo sapiens
  CDR3 for alpha chain variable domain of TCR clone 306503 (TRAV12-1, TRAJ41)
CVVNSRTGSGYALNS

SEQ ID NO: 613006 - protein, 11 aa, Homo sapiens
  CDR3 for beta chain variable domain of TCR clone 306503 (TRBV6-4, TRBJ2-1)
CASSDSYAQFF

SEQ ID NO: 613007 - protein, 12 aa, Homo sapiens
  CDR3 for alpha chain variable domain of TCR clone 306504 (TRAV12-3, TRAJ17)
CAMTLTGNKLTF

SEQ ID NO: 613008 - protein, 15 aa, Homo sapiens
  CDR3 for beta chain variable domain of TCR clone 306504 (TRBV12-4, TRBJ2-5)
CASSPQTGLKETQYF

SEQ ID NO: 613009 - protein, 15 aa, Homo sapiens
  CDR3 for alpha chain variable domain of TCR clone 306505 (TRAV3, TRAJ20)
CAVRDIKLSDYKLSF

SEQ ID NO: 613010 - protein, 17 aa, Homo sapiens
  CDR3 for beta chain variable domain of TCR clone 306505 (TRBV7-3, TRBJ2-3)
CASSLRKRMRGADTQYF

SEQ ID NO: 613011 - protein, 13 aa, Homo sapiens
  CDR3 for alpha chain variable domain of TCR clone 306506 (TRAV8-3, TRAJ43)
CAVVPDNNNDMRF

SEQ ID NO: 613012 - protein, 13 aa, Homo sapiens
  CDR3 for beta chain variable domain of TCR clone 306506 (TRBV29-1, TRBJ2-1)
CSVEGGRVNEQFF

SEQ ID NO: 613013 - protein, 12 aa, Homo sapiens
  CDR3 for alpha chain variable domain of TCR clone 306507 (TRAV8-3, TRAJ20)
CAVGGGDYKLSF

SEQ ID NO: 613014 - protein, 16 aa, Homo sapiens
  CDR3 for beta chain variable domain of TCR clone 306507 (TRBV28, TRBJ1-5)
CASSLTGQGWNQPQHF

SEQ ID NO: 613015 - protein, 16 aa, Homo sapiens
  CDR3 for alpha chain variable domain of TCR clone 306508 (TRAV16, TRAJ52)
CALSAAGGTSYVKLTF

SEQ ID NO: 613016 - protein, 17 aa, Homo sapiens
  CDR3 for beta chain variable domain of TCR clone 306508 (TRBV11-2, TRBJ2-1)
CASSLYPPGVEYNEQFF

SEQ ID NO: 613017 - protein, 12 aa, Homo sapiens
  CDR3 for alpha chain variable domain of TCR clone 306509 (TRAV1-2, TRAJ33)
CAALDSHYQLIW

SEQ ID NO: 613018 - protein, 16 aa, Homo sapiens
  CDR3 for beta chain variable domain of TCR clone 306509 (TRBV6-4, TRBJ1-2)
CASSEAVGDPNYGYTF

SEQ ID NO: 613019 - protein, 12 aa, Homo sapiens
  CDR3 for alpha chain variable domain of TCR clone 306510 (TRAV1-1, TRAJ39)
CAVPVVGNMLTF

SEQ ID NO: 613020 - protein, 13 aa, Homo sapiens
  CDR3 for beta chain variable domain of TCR clone 306510 (TRBV4-1, TRBJ1-1)
CASSRKMNTEAFV

SEQ ID NO: 613021 - protein, 14 aa, Homo sapiens
  CDR3 for alpha chain variable domain of TCR clone 306511 (TRAV1-2, TRAJ8)
CAVRVDTGFLKFVF

SEQ ID NO: 613022 - protein, 15 aa, Homo sapiens
  CDR3 for beta chain variable domain of TCR clone 306511 (TRBV6-3, TRBJ2-7)
CASSSPGTVFYEQYF

SEQ ID NO: 613023 - protein, 17 aa, Homo sapiens
  CDR3 for alpha chain variable domain of TCR clone 306512 (TRAV13-2, TRAJ42)
CAEKGKNYGGSQGNLIF

SEQ ID NO: 613024 - protein, 16 aa, Homo sapiens
  CDR3 for beta chain variable domain of TCR clone 306512 (TRBV7-9, TRBJ2-1)
CASSLSTGWDYNEQFF

SEQ ID NO: 613025 - protein, 14 aa, Homo sapiens
  CDR3 for alpha chain variable domain of TCR clone 306513 (TRAV12-2, TRAJ13)
CAVKKTGGYQKVTF

SEQ ID NO: 613026 - protein, 12 aa, Homo sapiens
  CDR3 for beta chain variable domain of TCR clone 306513 (TRBV12-4, TRBJ1-2)
CASSFIWLDLRC

SEQ ID NO: 613027 - protein, 11 aa, Homo sapiens
  CDR3 for alpha chain variable domain of TCR clone 306514 (TRAV29/DV5, TRAJ31)
CEASYRDRLMF

SEQ ID NO: 613028 - protein, 19 aa, Homo sapiens
  CDR3 for beta chain variable domain of TCR clone 306514 (TRBV19, TRBJ2-5)
CASSIGQVTDLFLGETQYF

SEQ ID NO: 613029 - protein, 14 aa, Homo sapiens
  CDR3 for alpha chain variable domain of TCR clone 306515 (TRAV36/DV7, TRAJ57)
CAVAFPGGSEKLVF

SEQ ID NO: 613030 - protein, 12 aa, Homo sapiens
  CDR3 for beta chain variable domain of TCR clone 306515 (TRBV19, TRBJ2-7)
CASTSGTYEQYF

SEQ ID NO: 613031 - protein, 15 aa, Homo sapiens
  CDR3 for alpha chain variable domain of TCR clone 306516 (TRAV25, TRAJ10)
CAGLGLTGGGNKLTF

SEQ ID NO: 613032 - protein, 12 aa, Homo sapiens
  CDR3 for beta chain variable domain of TCR clone 306516 (TRBV6-3, TRBJ2-7)
CASSLTPYEQYF

SEQ ID NO: 613033 - protein, 16 aa, Homo sapiens
  CDR3 for alpha chain variable domain of TCR clone 306517 (TRAV3, TRAJ37)
CAVRPHGSGNTGELIF

SEQ ID NO: 613034 - protein, 16 aa, Homo sapiens
  CDR3 for beta chain variable domain of TCR clone 306517 (TRBV20-1, TRBJ1-4)
CSAPGQGLLTNEKLFF

SEQ ID NO: 613035 - protein, 18 aa, Homo sapiens
  CDR3 for alpha chain variable domain of TCR clone 306518 (TRAV21, TRAJ52)
CAVRPSPACGTSYRKLTF

SEQ ID NO: 613036 - protein, 17 aa, Homo sapiens
  CDR3 for beta chain variable domain of TCR clone 306518 (TRBV13, TRBJ2-3)
CASSLSRVAGGRNTQYF

SEQ ID NO: 613037 - protein, 14 aa, Homo sapiens
  CDR3 for alpha chain variable domain of TCR clone 306519 (TRAV12-2, TRAJ15)
CAPHTGQAGTALIF

SEQ ID NO: 613038 - protein, 14 aa, Homo sapiens
  CDR3 for beta chain variable domain of TCR clone 306519 (TRBV6-1, TRBJ2-7)
CASNRARPDYEQYF

SEQ ID NO: 613039 - protein, 16 aa, Homo sapiens
  CDR3 for alpha chain variable domain of TCR clone 306520 (TRAV3, TRAJ10)
CAVSDMRAGGGNKLTF

SEQ ID NO: 613040 - protein, 15 aa, Homo sapiens
  CDR3 for beta chain variable domain of TCR clone 306520 (TRBV11-3, TRBJ2-7)
CASSPGPASSYEQFF

SEQ ID NO: 613041 - protein, 10 aa, Homo sapiens
  CDR3 for alpha chain variable domain of TCR clone 306521 (TRAV38-1, TRAJ34)
CAFMDDKLIF

SEQ ID NO: 613042 - protein, 16 aa, Homo sapiens
  CDR3 for beta chain variable domain of TCR clone 306521 (TRBV11-3, TRBJ2-3)
CQQLGTDRGGTDTQYF

SEQ ID NO: 613043 - protein, 17 aa, Homo sapiens
  CDR3 for alpha chain variable domain of TCR clone 306522 (TRAV26-1, TRAJ53)
CIVRADDSGGSNYKLTF

SEQ ID NO: 613044 - protein, 15 aa, Homo sapiens
  CDR3 for beta chain variable domain of TCR clone 306522 (TRBV20-1, TRBJ2-7)
CSASVPAAYFYEQYF

SEQ ID NO: 613045 - protein, 23 aa, Homo sapiens
  CDR3 for alpha chain variable domain of TCR clone 306523 (TRAV26-1, TRAJ38)
CIADNAGNNHIQNPDPAVYQLRD

SEQ ID NO: 613046 - protein, 16 aa, Homo sapiens
  CDR3 for beta chain variable domain of TCR clone 306523 (TRBV9, TRBJ2-2)
CASSAMGKGNTGELFF

SEQ ID NO: 613047 - protein, 12 aa, Homo sapiens
  CDR3 for alpha chain variable domain of TCR clone 306524 (TRAV8-3, TRAJ5)
CAVDTGRRALTF

SEQ ID NO: 613048 - protein, 17 aa, Homo sapiens
  CDR3 for beta chain variable domain of TCR clone 306524 (TRBV25-1, TRBJ2-7)
CASSDARVVFSSYEQYF

SEQ ID NO: 613049 - protein, 13 aa, Homo sapiens
  CDR3 for alpha chain variable domain of TCR clone 306525 (TRAV2, TRAJ40)
CAVVTSGTYKYIF

SEQ ID NO: 613050 - protein, 15 aa, Homo sapiens
  CDR3 for beta chain variable domain of TCR clone 306525 (TRBV18, TRBJ1-1)
CASSPRQGENTEDFF

SEQ ID NO: 613051 - protein, 12 aa, Homo sapiens
  CDR3 for alpha chain variable domain of TCR clone 306526 (TRAV12-2, TRAJ31)
CAVNTPDARLMF

SEQ ID NO: 613052 - protein, 16 aa, Homo sapiens
  CDR3 for beta chain variable domain of TCR clone 306526 (TRBV20-1, TRBJ1-6)
SARGGYTFSYNSPLHF

SEQ ID NO: 613053 - protein, 13 aa, Homo sapiens
  CDR3 for alpha chain variable domain of TCR clone 306527 (TRAV12-3, TRAJ5)
CAMIYTGNRALTF

SEQ ID NO: 613054 - protein, 12 aa, Homo sapiens
  CDR3 for beta chain variable domain of TCR clone 306527 (TRBV18, TRBJ1-4)
CASSPSREKLFF

SEQ ID NO: 613055 - protein, 14 aa, Homo sapiens
  CDR3 for alpha chain variable domain of TCR clone 306528 (TRAV35, TRAJ33)
CWPRGRDSNYQLIW

SEQ ID NO: 613056 - protein, 14 aa, Homo sapiens
  CDR3 for beta chain variable domain of TCR clone 306528 (TRBV12-5, TRBJ2-5)
CASGSRTHQETQYF

SEQ ID NO: 613057 - protein, 13 aa, Homo sapiens
  CDR3 for alpha chain variable domain of TCR clone 306529 (TRAV21, TRAJ20)
CAVGLRVDYKLSF

SEQ ID NO: 613058 - protein, 15 aa, Homo sapiens
  CDR3 for beta chain variable domain of TCR clone 306529 (TRBV4-1, TRBJ2-7)
CASSQQGQGFGEQYF

SEQ ID NO: 613059 - protein, 15 aa, Homo sapiens
  CDR3 for alpha chain variable domain of TCR clone 306530 (TRAV2, TRAJ28)
CAVPYSGAGSYQLSF

SEQ ID NO: 613060 - protein, 17 aa, Homo sapiens
  CDR3 for beta chain variable domain of TCR clone 306530 (TRBV20-1, TRBJ2-4)
CSARDWASGGRENIQYF

SEQ ID NO: 613061 - protein, 14 aa, Homo sapiens
  CDR3 for alpha chain variable domain of TCR clone 306531 (TRAV26-1, TRAJ38)
CIADNAGNNRKLIW

SEQ ID NO: 613062 - protein, 17 aa, Homo sapiens
  CDR3 for beta chain variable domain of TCR clone 306531 (TRBV13, TRBJ2-3)
CSSSLSRVAGGRNTQYF

SEQ ID NO: 613063 - protein, 15 aa, Homo sapiens
  CDR3 for alpha chain variable domain of TCR clone 306532 (TRAV12-1, TRAJ48)
CVVNKVNFGNEKLTF

SEQ ID NO: 613064 - protein, 12 aa, Homo sapiens
  CDR3 for beta chain variable domain of TCR clone 306532 (TRBV6-1, TRBJ2-5)
CASSEGRETQYF

SEQ ID NO: 613065 - protein, 14 aa, Homo sapiens
  CDR3 for alpha chain variable domain of TCR clone 306533 (TRAV12-1, TRAJ43)
CVVNGRSNNNDMRF

SEQ ID NO: 613066 - protein, 12 aa, Homo sapiens
  CDR3 for beta chain variable domain of TCR clone 306533 (TRBV29-1, TRBJ2-3)
CSITGGADTQYF

SEQ ID NO: 613067 - protein, 17 aa, Homo sapiens
  CDR3 for alpha chain variable domain of TCR clone 306534 (TRAV13-1, TRAJ53)
CAASWKSSGGSNYKLIF

SEQ ID NO: 613068 - protein, 19 aa, Homo sapiens
  CDR3 for beta chain variable domain of TCR clone 306534 (TRBV7-9, TRBJ2-1)
CASSHNRGALLRSYNEQFF

SEQ ID NO: 613069 - protein, 13 aa, Homo sapiens
  CDR3 for alpha chain variable domain of TCR clone 306535 (TRAV30, TRAJ18)
CGTEASTLGRLYF

SEQ ID NO: 613070 - protein, 20 aa, Homo sapiens
  CDR3 for beta chain variable domain of TCR clone 306535 (TRBV19, TRBJ2-1)
CASSISRTVTSTRLNNEQFF

SEQ ID NO: 613071 - protein, 16 aa, Homo sapiens
  CDR3 for alpha chain variable domain of TCR clone 306536 (TRAV3, TRAJ37)
CAVRPHDSGNTGKLIF

SEQ ID NO: 613072 - protein, 15 aa, Homo sapiens
  CDR3 for beta chain variable domain of TCR clone 306536 (TRBV20-1, TRBJ2-7)
CSARDRVSGMDEQYF

SEQ ID NO: 613073 - protein, 16 aa, Homo sapiens
  CDR3 for alpha chain variable domain of TCR clone 306537 (TRAV14/DV4, TRAJ21)
CAMREGPKNNFNKFYF

SEQ ID NO: 613074 - protein, 12 aa, Homo sapiens
  CDR3 for beta chain variable domain of TCR clone 306537 (TRBV29-1, TRBJ2-2)
CSVDKYTGELFF

SEQ ID NO: 613075 - protein, 14 aa, Homo sapiens
  CDR3 for alpha chain variable domain of TCR clone 306538 (TRAV17, TRAJ34)
CATDSLEGTNKLIF

SEQ ID NO: 613076 - protein, 13 aa, Homo sapiens
  CDR3 for beta chain variable domain of TCR clone 306538 (TRBV11-2, TRBJ2-7)
CASSGTRPYEQYF

SEQ ID NO: 613077 - protein, 14 aa, Homo sapiens
  CDR3 for alpha chain variable domain of TCR clone 306539 (TRAV16, TRAJ32)
CALKSGGATNKLIF

SEQ ID NO: 613078 - protein, 17 aa, Homo sapiens
  CDR3 for beta chain variable domain of TCR clone 306539 (TRBV7-8, TRBJ2-7)
CASSFTSGRPPSYEQYF

SEQ ID NO: 613079 - protein, 17 aa, Homo sapiens
  CDR3 for alpha chain variable domain of TCR clone 306540 (TRAV8-6, TRAJ58)
CAVSSWVGETSGSRLTL

SEQ ID NO: 613080 - protein, 17 aa, Homo sapiens
  CDR3 for beta chain variable domain of TCR clone 306540 (TRBV4-3, TRBJ1-2)
CASSSRLQAGGSVGYTF

SEQ ID NO: 613081 - protein, 14 aa, Homo sapiens
  CDR3 for alpha chain variable domain of TCR clone 306541 (TRAV12-2, TRAJ40)
CAVKIPSGTYKYIF

SEQ ID NO: 613082 - protein, 16 aa, Homo sapiens
  CDR3 for beta chain variable domain of TCR clone 306541 (TRBV11-2, TRBJ1-2)
CASSLDTGGADYGYTF

SEQ ID NO: 613083 - protein, 15 aa, Homo sapiens
  CDR3 for alpha chain variable domain of TCR clone 306542 (TRAV13-1, TRAJ32)
CAASNGWWCYKQAHL

SEQ ID NO: 613084 - protein, 12 aa, Homo sapiens
  CDR3 for beta chain variable domain of TCR clone 306542 (TRBV12-4, TRBJ2-7)
CASSLGGYEQYF

SEQ ID NO: 613085 - protein, 14 aa, Homo sapiens
  CDR3 for alpha chain variable domain of TCR clone 306543 (TRAV12-2, TRAJ40)
CAVKIPSGPYKHIF

SEQ ID NO: 613086 - protein, 14 aa, Homo sapiens
  CDR3 for beta chain variable domain of TCR clone 306543 (TRBV20-1, TRBJ1-1)
CSAQTRIGGTEAFF

SEQ ID NO: 613087 - protein, 12 aa, Homo sapiens
  CDR3 for alpha chain variable domain of TCR clone 306544 (TRAV8-4, TRAJ43)
CAMSVNNNDMRF

SEQ ID NO: 613088 - protein, 14 aa, Homo sapiens
  CDR3 for beta chain variable domain of TCR clone 306544 (TRBV11-2, TRBJ1-2)
CASSLGTANYGYTF

SEQ ID NO: 613089 - protein, 16 aa, Homo sapiens
  CDR3 for alpha chain variable domain of TCR clone 306545 (TRAV23/DV6, TRAJ48)
CAAIGVVNFGNETLTF

SEQ ID NO: 613090 - protein, 15 aa, Homo sapiens
  CDR3 for beta chain variable domain of TCR clone 306545 (TRBV7-9, TRBJ2-1)
CASSLGWGRANEQFF

SEQ ID NO: 613091 - protein, 14 aa, Homo sapiens
  CDR3 for alpha chain variable domain of TCR clone 306546 (TRAV17, TRAJ45)
FATDARGGADGLTF

SEQ ID NO: 613092 - protein, 11 aa, Homo sapiens
  CDR3 for beta chain variable domain of TCR clone 306546 (TRBV28, TRBJ2-5)
CATGNQETQYF

SEQ ID NO: 613093 - protein, 11 aa, Homo sapiens
  CDR3 for alpha chain variable domain of TCR clone 306547 (TRAV12-3, TRAJ27)
CAMANAGKSTF

SEQ ID NO: 613094 - protein, 13 aa, Homo sapiens
  CDR3 for beta chain variable domain of TCR clone 306547 (TRBV20-1, TRBJ1-1)
CCARVGGNTEAFF

SEQ ID NO: 613095 - protein, 11 aa, Homo sapiens
  CDR3 for alpha chain variable domain of TCR clone 306548 (TRAV2, TRAJ13)
CASGGYQKVTL

SEQ ID NO: 613096 - protein, 16 aa, Homo sapiens
  CDR3 for beta chain variable domain of TCR clone 306548 (TRBV6-1, TRBJ2-5)
CASSGTLDRGAETQYF

SEQ ID NO: 613097 - protein, 13 aa, Homo sapiens
  CDR3 for alpha chain variable domain of TCR clone 306549 (TRAV8-3, TRAJ36)
CAVGATGANNLFF

SEQ ID NO: 613098 - protein, 14 aa, Homo sapiens
  CDR3 for beta chain variable domain of TCR clone 306549 (TRBV7-8, TRBJ2-3)
CASSFPDGQDTQYF

SEQ ID NO: 613099 - protein, 10 aa, Homo sapiens
  CDR3 for alpha chain variable domain of TCR clone 306550 (TRAV23/DV6, TRAJ57)
WAASSTLSQA

SEQ ID NO: 613100 - protein, 14 aa, Homo sapiens
  CDR3 for beta chain variable domain of TCR clone 306550 (TRBV25-1, TRBJ1-1)
CASTHLGGNTEAFF

SEQ ID NO: 613101 - protein, 16 aa, Homo sapiens
  CDR3 for alpha chain variable domain of TCR clone 306551 (TRAV3, TRAJ37)
CAVRVSGSGNTGKLIF

SEQ ID NO: 613102 - protein, 11 aa, Homo sapiens
  CDR3 for beta chain variable domain of TCR clone 306551 (TRBV11-3, TRBJ2-2)
CASSLPGELFF

SEQ ID NO: 613103 - protein, 14 aa, Homo sapiens
  CDR3 for alpha chain variable domain of TCR clone 306552 (TRAV12-3, TRAJ22)
YAMSSFGSARQLTF

SEQ ID NO: 613104 - protein, 11 aa, Homo sapiens
  CDR3 for beta chain variable domain of TCR clone 306552 (TRBV12-4, TRBJ2-2)
CASSSAGELFF

SEQ ID NO: 613105 - protein, 13 aa, Homo sapiens
  CDR3 for alpha chain variable domain of TCR clone 306553 (TRAV35, TRAJ40)
CAGQLSGTYKSIF

SEQ ID NO: 613106 - protein, 14 aa, Homo sapiens
  CDR3 for beta chain variable domain of TCR clone 306553 (TRBV3-1, TRBJ2-5)
CASSLQLAGENQYF

SEQ ID NO: 613107 - protein, 12 aa, Homo sapiens
  CDR3 for alpha chain variable domain of TCR clone 306554 (TRAV13-2, TRAJ23)
CAERHRGGKLIF

SEQ ID NO: 613108 - protein, 12 aa, Homo sapiens
  CDR3 for beta chain variable domain of TCR clone 306554 (TRBV20-1, TRBJ2-7)
CSVLQNEHEQYF

SEQ ID NO: 613109 - protein, 14 aa, Homo sapiens
  CDR3 for alpha chain variable domain of TCR clone 306555 (TRAV29/DV5, TRAJ36)
CAARRKTGANNLFF

SEQ ID NO: 613110 - protein, 14 aa, Homo sapiens
  CDR3 for beta chain variable domain of TCR clone 306555 (TRBV5-4, TRBJ1-1)
CASSLDSRRDEAFF

SEQ ID NO: 613111 - protein, 13 aa, Homo sapiens
  CDR3 for alpha chain variable domain of TCR clone 306556 (TRAV21, TRAJ27)
CAAHPGNAGKSTF

SEQ ID NO: 613112 - protein, 14 aa, Homo sapiens
  CDR3 for beta chain variable domain of TCR clone 306556 (TRBV11-2, TRBJ2-7)
CASSLGAGAYEQYF

SEQ ID NO: 613113 - protein, 13 aa, Homo sapiens
  CDR3 for alpha chain variable domain of TCR clone 306557 (TRAV12-2, TRAJ18)
CAVRGSTLGRLNF

SEQ ID NO: 613114 - protein, 14 aa, Homo sapiens
  CDR3 for beta chain variable domain of TCR clone 306557 (TRBV7-2, TRBJ2-7)
CASSLPPGQGPQYF

SEQ ID NO: 613115 - protein, 13 aa, Homo sapiens
  CDR3 for alpha chain variable domain of TCR clone 306558 (TRAV20, TRAJ21)
CAVEGYNSNRFYF

SEQ ID NO: 613116 - protein, 14 aa, Homo sapiens
  CDR3 for beta chain variable domain of TCR clone 306558 (TRBV3-1, TRBJ2-5)
CASSQGPDQETQYF

SEQ ID NO: 613117 - protein, 16 aa, Homo sapiens
  CDR3 for alpha chain variable domain of TCR clone 306559 (TRAV13-1, TRAJ18)
CAASSMRGSTLGRLYS

SEQ ID NO: 613118 - protein, 16 aa, Homo sapiens
  CDR3 for beta chain variable domain of TCR clone 306559 (TRBV27, TRBJ1-1)
CASSSRGRTGYTEAFF

SEQ ID NO: 613119 - protein, 12 aa, Homo sapiens
  CDR3 for alpha chain variable domain of TCR clone 306560 (TRAV12-2, TRAJ33)
CAVGDSNYQLIW

SEQ ID NO: 613120 - protein, 14 aa, Homo sapiens
  CDR3 for beta chain variable domain of TCR clone 306560 (TRBV7-9, TRBJ2-2)
CASSGLADTGELFF

SEQ ID NO: 613121 - protein, 14 aa, Homo sapiens
  CDR3 for alpha chain variable domain of TCR clone 306561 (TRAV12-2, TRAJ17)
CAVLFKAAGNDLTF

SEQ ID NO: 613122 - protein, 17 aa, Homo sapiens
  CDR3 for beta chain variable domain of TCR clone 306561 (TRBV20-1, TRBJ2-2)
CSASGSGQGGLTGELFF

SEQ ID NO: 613123 - protein, 12 aa, Homo sapiens
  CDR3 for alpha chain variable domain of TCR clone 306562 (TRAV12-1, TRAJ34)
CVVAGATDKLIF

SEQ ID NO: 613124 - protein, 16 aa, Homo sapiens
  CDR3 for beta chain variable domain of TCR clone 306562 (TRBV7-2, TRBJ1-2)
RASSSNQDRRGHGYTF

SEQ ID NO: 613125 - protein, 16 aa, Homo sapiens
  CDR3 for alpha chain variable domain of TCR clone 306563 (TRAV21, TRAJ17)
CAVRPGEAAAGNKLTF

SEQ ID NO: 613126 - protein, 16 aa, Homo sapiens
  CDR3 for beta chain variable domain of TCR clone 306563 (TRBV2, TRBJ2-7)
CASSEPWTGPSYEQYF

SEQ ID NO: 613127 - protein, 16 aa, Homo sapiens
  CDR3 for alpha chain variable domain of TCR clone 306564 (TRAV3, TRAJ28)
CAVLPRSGAVIYQLTF

SEQ ID NO: 613128 - protein, 18 aa, Homo sapiens
  CDR3 for beta chain variable domain of TCR clone 306564 (TRBV23-1, TRBJ2-7)
CASSQYRRTDSTSSTSGR

SEQ ID NO: 613129 - protein, 16 aa, Homo sapiens
  CDR3 for alpha chain variable domain of TCR clone 306565 (TRAV3, TRAJ10)
CAVRDMNAGGGNKLTF

SEQ ID NO: 613130 - protein, 16 aa, Homo sapiens
  CDR3 for beta chain variable domain of TCR clone 306565 (TRBV6-3, TRBJ1-2)
CAGSYSRRASNYGYTF

SEQ ID NO: 613131 - protein, 12 aa, Homo sapiens
  CDR3 for alpha chain variable domain of TCR clone 306566 (TRAV17, TRAJ48)
CALNFGNEKLTF

SEQ ID NO: 613132 - protein, 13 aa, Homo sapiens
  CDR3 for beta chain variable domain of TCR clone 306566 (TRBV20-1, TRBJ2-7)
CSADPGATYEQYF

SEQ ID NO: 613133 - protein, 14 aa, Homo sapiens
  CDR3 for alpha chain variable domain of TCR clone 306567 (TRAV12-1, TRAJ9)
CVVTGYTVGFKTIF

SEQ ID NO: 613134 - protein, 13 aa, Homo sapiens
  CDR3 for beta chain variable domain of TCR clone 306567 (TRBV20-1, TRBJ1-1)
CSARAGGNTEASF

SEQ ID NO: 613135 - protein, 17 aa, Homo sapiens
  CDR3 for alpha chain variable domain of TCR clone 306568 (TRAV3, TRAJ6)
CAVRDGPRAGGSYIPTF

SEQ ID NO: 613136 - protein, 13 aa, Homo sapiens
  CDR3 for beta chain variable domain of TCR clone 306568 (TRBV27, TRBJ2-7)
CASSLRHRYEQYF

SEQ ID NO: 613137 - protein, 13 aa, Homo sapiens
  CDR3 for alpha chain variable domain of TCR clone 306569 (TRAV26-1, TRAJ40)
CIVRGTGTYKYIF

SEQ ID NO: 613138 - protein, 12 aa, Homo sapiens
  CDR3 for beta chain variable domain of TCR clone 306569 (TRBV5-1, TRBJ2-7)
CASSLDSYEQYF

SEQ ID NO: 613139 - protein, 16 aa, Homo sapiens
  CDR3 for alpha chain variable domain of TCR clone 306570 (TRAV8-3, TRAJ48)
CAVGLISNFGNEKLTF

SEQ ID NO: 613140 - protein, 14 aa, Homo sapiens
  CDR3 for beta chain variable domain of TCR clone 306570 (TRBV19, TRBJ1-5)
CASSKMTGPQPQHF

SEQ ID NO: 613141 - protein, 15 aa, Homo sapiens
  CDR3 for alpha chain variable domain of TCR clone 306571 (TRAV8-3, TRAJ27)
CAVGPSKTNAGKSTF

SEQ ID NO: 613142 - protein, 19 aa, Homo sapiens
  CDR3 for beta chain variable domain of TCR clone 306571 (TRBV7-2, TRBJ2-3)
CASSFLSRNWGGGTDTQYF

SEQ ID NO: 613143 - protein, 15 aa, Homo sapiens
  CDR3 for alpha chain variable domain of TCR clone 306572 (TRAV21, TRAJ37)
CAVRPTLSNTGKLIF

SEQ ID NO: 613144 - protein, 16 aa, Homo sapiens
  CDR3 for beta chain variable domain of TCR clone 306572 (TRBV24-1, TRBJ2-3)
CATSDRRQDPTDTQYF

SEQ ID NO: 613145 - protein, 14 aa, Homo sapiens
  CDR3 for alpha chain variable domain of TCR clone 306573 (TRAV2, TRAJ16)
CAVERGSDGQKLLF

SEQ ID NO: 613146 - protein, 15 aa, Homo sapiens
  CDR3 for beta chain variable domain of TCR clone 306573 (TRBV10-3, TRBJ2-3)
CAISEALSSTDTQYF

SEQ ID NO: 613147 - protein, 14 aa, Homo sapiens
  CDR3 for alpha chain variable domain of TCR clone 306574 (TRAV1-2, TRAJ16)
CAVNRFSDGRKLLF

SEQ ID NO: 613148 - protein, 13 aa, Homo sapiens
  CDR3 for beta chain variable domain of TCR clone 306574 (TRBV7-2, TRBJ2-2)
CASSLAVTGELFF

SEQ ID NO: 613149 - protein, 18 aa, Homo sapiens
  CDR3 for alpha chain variable domain of TCR clone 306575 (TRAV13-1, TRAJ52)
CAADFPNAGVTSYGKLTF

SEQ ID NO: 613150 - protein, 14 aa, Homo sapiens
  CDR3 for beta chain variable domain of TCR clone 306575 (TRBV11-2, TRBJ2-3)
CASSLYAGRDTQYF

SEQ ID NO: 613151 - protein, 13 aa, Homo sapiens
  CDR3 for alpha chain variable domain of TCR clone 306576 (TRAV8-6, TRAJ34)
CAVSDQGTATPIF

SEQ ID NO: 613152 - protein, 14 aa, Homo sapiens
  CDR3 for beta chain variable domain of TCR clone 306576 (TRBV12-4, TRBJ1-1)
CASTWTGHDTEAFF

SEQ ID NO: 613153 - protein, 12 aa, Homo sapiens
  CDR3 for alpha chain variable domain of TCR clone 306577 (TRAV13-1, TRAJ21)
CAAKEGFNKFYF

SEQ ID NO: 613154 - protein, 12 aa, Homo sapiens
  CDR3 for beta chain variable domain of TCR clone 306577 (TRBV19, TRBJ2-7)
CASTSETYEQYF

SEQ ID NO: 613155 - protein, 12 aa, Homo sapiens
  CDR3 for alpha chain variable domain of TCR clone 306578 (TRAV38-2/DV8, TRAJ48)
CALLSGNEKLTF

SEQ ID NO: 613156 - protein, 14 aa, Homo sapiens
  CDR3 for beta chain variable domain of TCR clone 306578 (TRBV5-1, TRBJ1-2)
CASSLGDRGPGYTF

SEQ ID NO: 613157 - protein, 12 aa, Homo sapiens
  CDR3 for alpha chain variable domain of TCR clone 306579 (TRAV12-3, TRAJ17)
CAMRLTGNKLTF

SEQ ID NO: 613158 - protein, 15 aa, Homo sapiens
  CDR3 for beta chain variable domain of TCR clone 306579 (TRBV11-3, TRBJ2-3)
CASLKDGREGDTQYF

SEQ ID NO: 613159 - protein, 10 aa, Homo sapiens
  CDR3 for alpha chain variable domain of TCR clone 306580 (TRAV8-4, TRAJ43)
CAVRADDLRF

SEQ ID NO: 613160 - protein, 15 aa, Homo sapiens
  CDR3 for beta chain variable domain of TCR clone 306580 (TRBV5-1, TRBJ2-3)
CASSVTSGSTDTQYF

SEQ ID NO: 613161 - protein, 13 aa, Homo sapiens
  CDR3 for alpha chain variable domain of TCR clone 306581 (TRAV17, TRAJ21)
CATDGGNFNKFYF

SEQ ID NO: 613162 - protein, 16 aa, Homo sapiens
  CDR3 for beta chain variable domain of TCR clone 306581 (TRBV19, TRBJ2-1)
CASSKAGPSSYNEQFF

SEQ ID NO: 613163 - protein, 14 aa, Homo sapiens
  CDR3 for alpha chain variable domain of TCR clone 306582 (TRAV21, TRAJ38)
CAVMGAGNNRKLIW

SEQ ID NO: 613164 - protein, 13 aa, Homo sapiens
  CDR3 for beta chain variable domain of TCR clone 306582 (TRBV7-3, TRBJ2-5)
CSSSIGFFETQYF

SEQ ID NO: 613165 - protein, 16 aa, Homo sapiens
  CDR3 for alpha chain variable domain of TCR clone 306583 (TRAV3, TRAJ10)
CAVRDMRAGGGNKRTF

SEQ ID NO: 613166 - protein, 15 aa, Homo sapiens
  CDR3 for beta chain variable domain of TCR clone 306583 (TRBV7-9, TRBJ1-5)
CASSQGHQPNQPQHF

SEQ ID NO: 613167 - protein, 14 aa, Homo sapiens
  CDR3 for alpha chain variable domain of TCR clone 306584 (TRAV12-2, TRAJ3)
CAVSLYSSASKIIF

SEQ ID NO: 613168 - protein, 14 aa, Homo sapiens
  CDR3 for beta chain variable domain of TCR clone 306584 (TRBV27, TRBJ2-1)
CAGRIAETYNEQFF

SEQ ID NO: 613169 - protein, 12 aa, Homo sapiens
  CDR3 for alpha chain variable domain of TCR clone 306585 (TRAV12-1, TRAJ9)
CVVNPASFKSIF

SEQ ID NO: 613170 - protein, 15 aa, Homo sapiens
  CDR3 for beta chain variable domain of TCR clone 306585 (TRBV4-3, TRBJ2-2)
CASSQGTGGTGELFF

SEQ ID NO: 613171 - protein, 14 aa, Homo sapiens
  CDR3 for alpha chain variable domain of TCR clone 306586 (TRAV12-2, TRAJ40)
CAVKIPSGSYKYIF

SEQ ID NO: 613172 - protein, 12 aa, Homo sapiens
  CDR3 for beta chain variable domain of TCR clone 306586 (TRBV11-2, TRBJ2-1)
CASSPGNNEQFF

SEQ ID NO: 613173 - protein, 16 aa, Homo sapiens
  CDR3 for alpha chain variable domain of TCR clone 306587 (TRAV3, TRAJ10)
CAVRDMRAGGGNKVTF

SEQ ID NO: 613174 - protein, 17 aa, Homo sapiens
  CDR3 for beta chain variable domain of TCR clone 306587 (TRBV20-1, TRBJ2-2)
CSASGSGQGGLTGELFF

SEQ ID NO: 613175 - protein, 14 aa, Homo sapiens
  CDR3 for alpha chain variable domain of TCR clone 306588 (TRAV30, TRAJ45)
CGTSTGGGADGLTF

SEQ ID NO: 613176 - protein, 15 aa, Homo sapiens
  CDR3 for beta chain variable domain of TCR clone 306588 (TRBV7-2, TRBJ1-5)
CASSLGRGAGQPQHF

SEQ ID NO: 613177 - protein, 10 aa, Homo sapiens
  CDR3 for alpha chain variable domain of TCR clone 306589 (TRAV23/DV6, TRAJ31)
CARGGARLMF

SEQ ID NO: 613178 - protein, 14 aa, Homo sapiens
  CDR3 for beta chain variable domain of TCR clone 306589 (TRBV19, TRBJ1-5)
CASSQGYSNQPQHF

SEQ ID NO: 613179 - protein, 17 aa, Homo sapiens
  CDR3 for alpha chain variable domain of TCR clone 306590 (TRAV3, TRAJ6)
CAMRDGPRAGGSYIPTF

SEQ ID NO: 613180 - protein, 13 aa, Homo sapiens
  CDR3 for beta chain variable domain of TCR clone 306590 (TRBV12-4, TRBJ1-2)
CASSLRQGKGYTF

SEQ ID NO: 613181 - protein, 15 aa, Homo sapiens
  CDR3 for alpha chain variable domain of TCR clone 306591 (TRAV12-2, TRAJ53)
CAVNTGGGSNYKLTF

SEQ ID NO: 613182 - protein, 15 aa, Homo sapiens
  CDR3 for beta chain variable domain of TCR clone 306591 (TRBV5-1, TRBJ2-5)
CASSLGLGEIKTQYV

SEQ ID NO: 613183 - protein, 17 aa, Homo sapiens
  CDR3 for alpha chain variable domain of TCR clone 306592 (TRAV3, TRAJ12)
CAVRDGGRMDSSYKLIF

SEQ ID NO: 613184 - protein, 15 aa, Homo sapiens
  CDR3 for beta chain variable domain of TCR clone 306592 (TRBV9, TRBJ2-2)
CQQRHGKREHRGAVF

SEQ ID NO: 613185 - protein, 14 aa, Homo sapiens
  CDR3 for alpha chain variable domain of TCR clone 306593 (TRAV13-1, TRAJ35)
CAASKGGFGNVLHC

SEQ ID NO: 613186 - protein, 14 aa, Homo sapiens
  CDR3 for beta chain variable domain of TCR clone 306593 (TRBV7-2, TRBJ2-1)
CASSLVAGRNEQFF

SEQ ID NO: 613187 - protein, 13 aa, Homo sapiens
  CDR3 for alpha chain variable domain of TCR clone 306594 (TRAV8-6, TRAJ31)
CAVSDRGQCQTHV

SEQ ID NO: 613188 - protein, 15 aa, Homo sapiens
  CDR3 for beta chain variable domain of TCR clone 306594 (TRBV9, TRBJ2-1)
CASSLAGSSYNEQFF

SEQ ID NO: 613189 - protein, 17 aa, Homo sapiens
  CDR3 for alpha chain variable domain of TCR clone 306595 (TRAV21, TRAJ52)
CCGPSPAGGTSYGKLTF

SEQ ID NO: 613190 - protein, 17 aa, Homo sapiens
  CDR3 for beta chain variable domain of TCR clone 306595 (TRBV13, TRBJ2-3)
CASSLSRVAGGRNTQYF

SEQ ID NO: 613191 - protein, 16 aa, Homo sapiens
  CDR3 for alpha chain variable domain of TCR clone 306596 (TRAV25, TRAJ28)
CAGEGNSGAGSYQLTF

SEQ ID NO: 613192 - protein, 13 aa, Homo sapiens
  CDR3 for beta chain variable domain of TCR clone 306596 (TRBV11-2, TRBJ2-5)
CASSSTGEETQYF

SEQ ID NO: 613193 - protein, 13 aa, Homo sapiens
  CDR3 for alpha chain variable domain of TCR clone 306597 (TRAV9-2, TRAJ49)
CALIQIGGNQFYF

SEQ ID NO: 613194 - protein, 16 aa, Homo sapiens
  CDR3 for beta chain variable domain of TCR clone 306597 (TRBV13, TRBJ2-2)
CASSPRTWEHTGELFF

SEQ ID NO: 613195 - protein, 17 aa, Homo sapiens
  CDR3 for alpha chain variable domain of TCR clone 306598 (TRAV13-2, TRAJ5)
CAESVVIVGHGQESTYF

SEQ ID NO: 613196 - protein, 18 aa, Homo sapiens
  CDR3 for beta chain variable domain of TCR clone 306598 (TRBV4-1, TRBJ2-3)
CASSHQLAGGRSKDTQYF

SEQ ID NO: 613197 - protein, 15 aa, Homo sapiens
  CDR3 for alpha chain variable domain of TCR clone 306599 (TRAV3, TRAJ13)
CAVRVYSGGYQKVTF

SEQ ID NO: 613198 - protein, 14 aa, Homo sapiens
  CDR3 for beta chain variable domain of TCR clone 306599 (TRBV7-2, TRBJ2-7)
CASRSQGAAYEQYF

SEQ ID NO: 613199 - protein, 12 aa, Homo sapiens
  CDR3 for alpha chain variable domain of TCR clone 306600 (TRAV17, TRAJ20)
CATALNDYKLSF

SEQ ID NO: 613200 - protein, 17 aa, Homo sapiens
  CDR3 for beta chain variable domain of TCR clone 306600 (TRBV28, TRBJ2-5)
CASSRQGGLAGAETQYF

SEQ ID NO: 613201 - protein, 15 aa, Homo sapiens
  CDR3 for alpha chain variable domain of TCR clone 306601 (TRAV8-3, TRAJ37)
CAVGASASNTGKLIF

SEQ ID NO: 613202 - protein, 15 aa, Homo sapiens
  CDR3 for beta chain variable domain of TCR clone 306601 (TRBV5-4, TRBJ2-3)
CASSLAGRVTDTQYF

SEQ ID NO: 613203 - protein, 16 aa, Homo sapiens
  CDR3 for alpha chain variable domain of TCR clone 306602 (TRAV30, TRAJ26)
CGTESVGYNYGQNFVF

SEQ ID NO: 613204 - protein, 13 aa, Homo sapiens
  CDR3 for beta chain variable domain of TCR clone 306602 (TRBV19, TRBJ1-2)
CASSISEDYGYTF

SEQ ID NO: 613205 - protein, 16 aa, Homo sapiens
  CDR3 for alpha chain variable domain of TCR clone 306603 (TRAV1-1, TRAJ28)
CAVRDDSGAGSYQLTF

SEQ ID NO: 613206 - protein, 14 aa, Homo sapiens
  CDR3 for beta chain variable domain of TCR clone 306603 (TRBV19, TRBJ2-1)
CASPTFVLSGEQFF

SEQ ID NO: 613207 - protein, 14 aa, Homo sapiens
  CDR3 for alpha chain variable domain of TCR clone 306604 (TRAV3, TRAJ21)
CAVRDAYNFNKFYF

SEQ ID NO: 613208 - protein, 15 aa, Homo sapiens
  CDR3 for beta chain variable domain of TCR clone 306604 (TRBV6-5, TRBJ1-5)
CASSYSWDSNQPQRF

SEQ ID NO: 613209 - protein, 15 aa, Homo sapiens
  CDR3 for alpha chain variable domain of TCR clone 306605 (TRAV23/DV6, TRAJ12)
CAAIDLGAMDSSYKF

SEQ ID NO: 613210 - protein, 12 aa, Homo sapiens
  CDR3 for beta chain variable domain of TCR clone 306605 (TRBV10-3, TRBJ2-2)
CAIRENTGELFF

SEQ ID NO: 613211 - protein, 15 aa, Homo sapiens
  CDR3 for alpha chain variable domain of TCR clone 306606 (TRAV27, TRAJ38)
CAARRNAGNNRKLIW

SEQ ID NO: 613212 - protein, 14 aa, Homo sapiens
  CDR3 for beta chain variable domain of TCR clone 306606 (TRBV19, TRBJ2-1)
CASPTFVFSGEQFF

SEQ ID NO: 613213 - protein, 12 aa, Homo sapiens
  CDR3 for alpha chain variable domain of TCR clone 306607 (TRAV8-3, TRAJ20)
CAVGANDYKLSF

SEQ ID NO: 613214 - protein, 15 aa, Homo sapiens
  CDR3 for beta chain variable domain of TCR clone 306607 (TRBV13, TRBJ1-5)
CASSFGQGGVQPQHF

SEQ ID NO: 613215 - protein, 16 aa, Homo sapiens
  CDR3 for alpha chain variable domain of TCR clone 306608 (TRAV30, TRAJ24)
CGTEIVDADSWGKFQF

SEQ ID NO: 613216 - protein, 16 aa, Homo sapiens
  CDR3 for beta chain variable domain of TCR clone 306608 (TRBV19, TRBJ1-2)
CASSIGLFRDAHGYTF

SEQ ID NO: 613217 - protein, 14 aa, Homo sapiens
  CDR3 for alpha chain variable domain of TCR clone 306609 (TRAV20, TRAJ56)
CAVQFGGANSKLTF

SEQ ID NO: 613218 - protein, 14 aa, Homo sapiens
  CDR3 for beta chain variable domain of TCR clone 306609 (TRBV20-1, TRBJ2-7)
CSAKRGRNSYEQYF

SEQ ID NO: 613219 - protein, 13 aa, Homo sapiens
  CDR3 for alpha chain variable domain of TCR clone 306610 (TRAV13-1, TRAJ6)
CARGSGGSYIPTF

SEQ ID NO: 613220 - protein, 15 aa, Homo sapiens
  CDR3 for beta chain variable domain of TCR clone 306610 (TRBV3-1, TRBJ2-5)
CASSANLGGPETQYF

SEQ ID NO: 613221 - protein, 16 aa, Homo sapiens
  CDR3 for alpha chain variable domain of TCR clone 306611 (TRAV3, TRAJ23)
CAVKIGIYNQGGKLIF

SEQ ID NO: 613222 - protein, 12 aa, Homo sapiens
  CDR3 for beta chain variable domain of TCR clone 306611 (TRBV25-1, TRBJ2-7)
CASSGGYQQQYF

SEQ ID NO: 613223 - protein, 13 aa, Homo sapiens
  CDR3 for alpha chain variable domain of TCR clone 306612 (TRAV1-1, TRAJ13)
CAVNFGGYQKVTF

SEQ ID NO: 613224 - protein, 12 aa, Homo sapiens
  CDR3 for beta chain variable domain of TCR clone 306612 (TRBV28, TRBJ2-1)
CASSVQINEQFF

SEQ ID NO: 613225 - protein, 11 aa, Homo sapiens
  CDR3 for alpha chain variable domain of TCR clone 306613 (TRAV3, TRAJ21)
CAVCNFNKFYF

SEQ ID NO: 613226 - protein, 16 aa, Homo sapiens
  CDR3 for beta chain variable domain of TCR clone 306613 (TRBV19, TRBJ2-1)
CASSQAGPSSYNEQFF

SEQ ID NO: 613227 - protein, 11 aa, Homo sapiens
  CDR3 for alpha chain variable domain of TCR clone 306614 (TRAV21, TRAJ11)
CAVNGYSTLTF

SEQ ID NO: 613228 - protein, 15 aa, Homo sapiens
  CDR3 for beta chain variable domain of TCR clone 306614 (TRBV11-3, TRBJ2-3)
CASLKDGREGDTQYF

SEQ ID NO: 613229 - protein, 15 aa, Homo sapiens
  CDR3 for alpha chain variable domain of TCR clone 306615 (TRAV4, TRAJ8)
CLVGEQHTGFQKLVF

SEQ ID NO: 613230 - protein, 15 aa, Homo sapiens
  CDR3 for beta chain variable domain of TCR clone 306615 (TRBV7-9, TRBJ2-5)
CASSNRDYSQETQYF

SEQ ID NO: 613231 - protein, 14 aa, Homo sapiens
  CDR3 for alpha chain variable domain of TCR clone 306616 (TRAV23/DV6, TRAJ39)
CAASIGNAGNMLTF

SEQ ID NO: 613232 - protein, 12 aa, Homo sapiens
  CDR3 for beta chain variable domain of TCR clone 306616 (TRBV20-1, TRBJ2-5)
CSVGTVSETQYF

SEQ ID NO: 613233 - protein, 12 aa, Homo sapiens
  CDR3 for alpha chain variable domain of TCR clone 306617 (TRAV17, TRAJ57)
CATDGGSEKPVV

SEQ ID NO: 613234 - protein, 13 aa, Homo sapiens
  CDR3 for beta chain variable domain of TCR clone 306617 (TRBV7-9, TRBJ2-7)
CASSFAGAYEQYF

SEQ ID NO: 613235 - protein, 18 aa, Homo sapiens
  CDR3 for alpha chain variable domain of TCR clone 306618 (TRAV21, TRAJ52)
CAMRPSPAGGTSYGKLTF

SEQ ID NO: 613236 - protein, 13 aa, Homo sapiens
  CDR3 for beta chain variable domain of TCR clone 306618 (TRBV10-3, TRBJ2-7)
CASKLAVNYEQYF

SEQ ID NO: 613237 - protein, 11 aa, Homo sapiens
  CDR3 for alpha chain variable domain of TCR clone 306619 (TRAV4, TRAJ31)
CLVGLNARLMF

SEQ ID NO: 613238 - protein, 13 aa, Homo sapiens
  CDR3 for beta chain variable domain of TCR clone 306619 (TRBV7-3, TRBJ1-1)
CASSQDWGAEAFF

SEQ ID NO: 613239 - protein, 15 aa, Homo sapiens
  CDR3 for alpha chain variable domain of TCR clone 306620 (TRAV16, TRAJ12)
CSKWPLRDSSYKLIF

SEQ ID NO: 613240 - protein, 15 aa, Homo sapiens
  CDR3 for beta chain variable domain of TCR clone 306620 (TRBV18, TRBJ2-1)
CTSSPPGASYNEQFF

SEQ ID NO: 613241 - protein, 10 aa, Homo sapiens
  CDR3 for alpha chain variable domain of TCR clone 306621 (TRAV3, TRAJ4)
CAVRDGTGGY

SEQ ID NO: 613242 - protein, 13 aa, Homo sapiens
  CDR3 for beta chain variable domain of TCR clone 306621 (TRBV12-5, TRBJ1-2)
CASGVRTGNGYAF

SEQ ID NO: 613243 - protein, 13 aa, Homo sapiens
  CDR3 for alpha chain variable domain of TCR clone 306622 (TRAV26-1, TRAJ33)
CIVRVEGNYQLIW

SEQ ID NO: 613244 - protein, 16 aa, Homo sapiens
  CDR3 for beta chain variable domain of TCR clone 306622 (TRBV6-6, TRBJ2-3)
CASSYSHAGSTDTQYF

SEQ ID NO: 613245 - protein, 14 aa, Homo sapiens
  CDR3 for alpha chain variable domain of TCR clone 306623 (TRAV13-1, TRAJ35)
CAASKGGFGNVRHF

SEQ ID NO: 613246 - protein, 13 aa, Homo sapiens
  CDR3 for beta chain variable domain of TCR clone 306623 (TRBV7-3, TRBJ1-1)
CASSQDWGAEAFF

SEQ ID NO: 613247 - protein, 11 aa, Homo sapiens
  CDR3 for alpha chain variable domain of TCR clone 306624 (TRAV21, TRAJ34)
CAVTNTDKLIF

SEQ ID NO: 613248 - protein, 14 aa, Homo sapiens
  CDR3 for beta chain variable domain of TCR clone 306624 (TRBV11-2, TRBJ1-3)
CASSLTQGRNTIYF

SEQ ID NO: 613249 - protein, 12 aa, Homo sapiens
  CDR3 for alpha chain variable domain of TCR clone 306625 (TRAV1-1, TRAJ9)
WAVDTGGFKTIF

SEQ ID NO: 613250 - protein, 14 aa, Homo sapiens
  CDR3 for beta chain variable domain of TCR clone 306625 (TRBV7-8, TRBJ2-5)
CASSATGGQETQYF

SEQ ID NO: 613251 - protein, 13 aa, Homo sapiens
  CDR3 for alpha chain variable domain of TCR clone 306626 (TRAV12-2, TRAJ34)
CAVRGYNTDKLIF

SEQ ID NO: 613252 - protein, 15 aa, Homo sapiens
  CDR3 for beta chain variable domain of TCR clone 306626 (TRBV28, TRBJ2-1)
CAIRTGAGAIARQFF

SEQ ID NO: 613253 - protein, 15 aa, Homo sapiens
  CDR3 for alpha chain variable domain of TCR clone 306627 (TRAV8-4, TRAJ15)
CAVSYSNQAGTALIF

SEQ ID NO: 613254 - protein, 14 aa, Homo sapiens
  CDR3 for beta chain variable domain of TCR clone 306627 (TRBV11-3, TRBJ2-7)
CASSPDRNTYEQYF

SEQ ID NO: 613255 - protein, 13 aa, Homo sapiens
  CDR3 for alpha chain variable domain of TCR clone 306628 (TRAV12-2, TRAJ52)
CAVSGTSYGKLTF

SEQ ID NO: 613256 - protein, 18 aa, Homo sapiens
  CDR3 for beta chain variable domain of TCR clone 306628 (TRBV11-2, TRBJ2-3)
CASSLGGASRGAPNTQYF

SEQ ID NO: 613257 - protein, 14 aa, Homo sapiens
  CDR3 for alpha chain variable domain of TCR clone 306629 (TRAV1-2, TRAJ8)
CAVREDTGFQKLVF

SEQ ID NO: 613258 - protein, 18 aa, Homo sapiens
  CDR3 for beta chain variable domain of TCR clone 306629 (TRBV20-1, TRBJ2-6)
CSAETTPTHGSGANDLTF

SEQ ID NO: 613259 - protein, 14 aa, Homo sapiens
  CDR3 for alpha chain variable domain of TCR clone 306630 (TRAV1-2, TRAJ16)
CAVNRFSDGQKLLF

SEQ ID NO: 613260 - protein, 15 aa, Homo sapiens
  CDR3 for beta chain variable domain of TCR clone 306630 (TRBV28, TRBJ1-5)
CASSLDRGRDQPQHF

SEQ ID NO: 613261 - protein, 15 aa, Homo sapiens
  CDR3 for alpha chain variable domain of TCR clone 306631 (TRAV2, TRAJ15)
CAVEDREQAGTALIF

SEQ ID NO: 613262 - protein, 13 aa, Homo sapiens
  CDR3 for beta chain variable domain of TCR clone 306631 (TRBV10-2, TRBJ2-3)
CASSKSGDHTQYF

SEQ ID NO: 613263 - protein, 13 aa, Homo sapiens
  CDR3 for alpha chain variable domain of TCR clone 306632 (TRAV8-3, TRAJ21)
CAVGAYNFNKFYF

SEQ ID NO: 613264 - protein, 16 aa, Homo sapiens
  CDR3 for beta chain variable domain of TCR clone 306632 (TRBV19, TRBJ2-1)
CASSMGGGSSHNEQFF

SEQ ID NO: 613265 - protein, 11 aa, Homo sapiens
  CDR3 for alpha chain variable domain of TCR clone 306633 (TRAV2, TRAJ13)
CDSGGYQKVTF

SEQ ID NO: 613266 - protein, 15 aa, Homo sapiens
  CDR3 for beta chain variable domain of TCR clone 306633 (TRBV6-1, TRBJ2-2)
CASSRLRGDTGELFF

SEQ ID NO: 613267 - protein, 12 aa, Homo sapiens
  CDR3 for alpha chain variable domain of TCR clone 306634 (TRAV4, TRAJ26)
CLVGDYGQNFVF

SEQ ID NO: 613268 - protein, 16 aa, Homo sapiens
  CDR3 for beta chain variable domain of TCR clone 306634 (TRBV7-2, TRBJ1-2)
CASSSNQDRRGHGYTF

SEQ ID NO: 613269 - protein, 17 aa, Homo sapiens
  CDR3 for alpha chain variable domain of TCR clone 306635 (TRAV3, TRAJ6)
CAVRDGPRAGGSYIPTF

SEQ ID NO: 613270 - protein, 18 aa, Homo sapiens
  CDR3 for beta chain variable domain of TCR clone 306635 (TRBV7-9, TRBJ2-7)
CASSLTTSGSRTWYVQYF

SEQ ID NO: 613271 - protein, 14 aa, Homo sapiens
  CDR3 for alpha chain variable domain of TCR clone 306636 (TRAV1-2, TRAJ8)
CAVREDTGFQKLVF

SEQ ID NO: 613272 - protein, 16 aa, Homo sapiens
  CDR3 for beta chain variable domain of TCR clone 306636 (TRBV28, TRBJ1-4)
CASSPRYRGRSEKLFF

SEQ ID NO: 613273 - protein, 15 aa, Homo sapiens
  CDR3 for alpha chain variable domain of TCR clone 306637 (TRAV29/DV5, TRAJ54)
CSASPIIRGAQKLVF

SEQ ID NO: 613274 - protein, 11 aa, Homo sapiens
  CDR3 for beta chain variable domain of TCR clone 306637 (TRBV4-1, TRBJ2-2)
CASEHTGELFF

SEQ ID NO: 613275 - protein, 21 aa, Homo sapiens
  CDR3 for alpha chain variable domain of TCR clone 306638 (TRAV27, TRAJ24)
ASTSVRNDIPTTTDSWGKLQF

SEQ ID NO: 613276 - protein, 17 aa, Homo sapiens
  CDR3 for beta chain variable domain of TCR clone 306638 (TRBV20-1, TRBJ2-7)
CSARDPEGDHREYEQYF

SEQ ID NO: 613277 - protein, 14 aa, Homo sapiens
  CDR3 for alpha chain variable domain of TCR clone 306639 (TRAV1-2, TRAJ16)
CAVNRLSDGQKLLF

SEQ ID NO: 613278 - protein, 15 aa, Homo sapiens
  CDR3 for beta chain variable domain of TCR clone 306639 (TRBV7-2, TRBJ2-2)
CASSSLTGGTGELFF

SEQ ID NO: 613279 - protein, 14 aa, Homo sapiens
  CDR3 for alpha chain variable domain of TCR clone 306640 (TRAV13-1, TRAJ44)
CAAKATGTASKLTF

SEQ ID NO: 613280 - protein, 17 aa, Homo sapiens
  CDR3 for beta chain variable domain of TCR clone 306640 (TRBV7-3, TRBJ2-3)
RASSLLKRMRGADTQYF

SEQ ID NO: 613281 - protein, 14 aa, Homo sapiens
  CDR3 for alpha chain variable domain of TCR clone 306641 (TRAV29/DV5, TRAJ36)
CAARRKTGANNLFF

SEQ ID NO: 613282 - protein, 23 aa, Homo sapiens
  CDR3 for beta chain variable domain of TCR clone 306641 (TRBV4-2, TRBJ2-3)
CASSQDPPRASSISGGRGDTQYF

SEQ ID NO: 613283 - protein, 14 aa, Homo sapiens
  CDR3 for alpha chain variable domain of TCR clone 306642 (TRAV12-1, TRAJ17)
CVVNYKAAGNKLTF

SEQ ID NO: 613284 - protein, 15 aa, Homo sapiens
  CDR3 for beta chain variable domain of TCR clone 306642 (TRBV7-2, TRBJ2-7)
CASSLARGSAYEQYF

SEQ ID NO: 613285 - protein, 13 aa, Homo sapiens
  CDR3 for alpha chain variable domain of TCR clone 306643 (TRAV21, TRAJ37)
CAVSSGNTGKLIF

SEQ ID NO: 613286 - protein, 17 aa, Homo sapiens
  CDR3 for beta chain variable domain of TCR clone 306643 (TRBV5-1, TRBJ2-5)
CASSLLGLAANQESQYF

SEQ ID NO: 613287 - protein, 11 aa, Homo sapiens
  CDR3 for alpha chain variable domain of TCR clone 306644 (TRAV12-3, TRAJ43)
CAMSVSNDMRF

SEQ ID NO: 613288 - protein, 12 aa, Homo sapiens
  CDR3 for beta chain variable domain of TCR clone 306644 (TRBV11-2, TRBJ2-1)
CASSPGNSEQFF

SEQ ID NO: 613289 - protein, 15 aa, Homo sapiens
  CDR3 for alpha chain variable domain of TCR clone 306645 (TRAV3, TRAJ5)
CAVRDLDTGGGALTF

SEQ ID NO: 613290 - protein, 13 aa, Homo sapiens
  CDR3 for beta chain variable domain of TCR clone 306645 (TRBV12-4, TRBJ2-7)
CASSPTETYEQYF

SEQ ID NO: 613291 - protein, 13 aa, Homo sapiens
  CDR3 for alpha chain variable domain of TCR clone 306646 (TRAV1-2, TRAJ9)
CAALNTGGFKTIF

SEQ ID NO: 613292 - protein, 15 aa, Homo sapiens
  CDR3 for beta chain variable domain of TCR clone 306646 (TRBV7-6, TRBJ2-1)
CASSSLAGEGNEQFF

SEQ ID NO: 613293 - protein, 15 aa, Homo sapiens
  CDR3 for alpha chain variable domain of TCR clone 306647 (TRAV2, TRAJ9)
CAVEDRGTGGFKTIF

SEQ ID NO: 613294 - protein, 19 aa, Homo sapiens
  CDR3 for beta chain variable domain of TCR clone 306647 (TRBV28, TRBJ2-7)
WASSYSGTSRLGWVYEQYF

SEQ ID NO: 613295 - protein, 15 aa, Homo sapiens
  CDR3 for alpha chain variable domain of TCR clone 306648 (TRAV8-6, TRAJ10)
CAVSDQAGGGNKLTL

SEQ ID NO: 613296 - protein, 16 aa, Homo sapiens
  CDR3 for beta chain variable domain of TCR clone 306648 (TRBV10-3, TRBJ2-1)
CAISGVGDGGGGEQFF

SEQ ID NO: 613297 - protein, 14 aa, Homo sapiens
  CDR3 for alpha chain variable domain of TCR clone 306649 (TRAV12-3, TRAJ10)
SHLPLTGGGNKLTF

SEQ ID NO: 613298 - protein, 16 aa, Homo sapiens
  CDR3 for beta chain variable domain of TCR clone 306649 (TRBV19, TRBJ2-1)
CASSIQGGGSYNEQFF

SEQ ID NO: 613299 - protein, 16 aa, Homo sapiens
  CDR3 for alpha chain variable domain of TCR clone 306650 (TRAV3, TRAJ10)
CALRDMRAGGGNKLTF

SEQ ID NO: 613300 - protein, 13 aa, Homo sapiens
  CDR3 for beta chain variable domain of TCR clone 306650 (TRBV6-1, TRBJ1-1)
CASSRQGNTEAFF

SEQ ID NO: 613301 - protein, 13 aa, Homo sapiens
  CDR3 for alpha chain variable domain of TCR clone 306651 (TRAV12-2, TRAJ40)
CAVRRTGTYKYIF

SEQ ID NO: 613302 - protein, 15 aa, Homo sapiens
  CDR3 for beta chain variable domain of TCR clone 306651 (TRBV12-4, TRBJ1-2)
CASSPITGGGYGYTF

SEQ ID NO: 613303 - protein, 13 aa, Homo sapiens
  CDR3 for alpha chain variable domain of TCR clone 306652 (TRAV2, TRAJ15)
CAVSSQAGTALIF

SEQ ID NO: 613304 - protein, 16 aa, Homo sapiens
  CDR3 for beta chain variable domain of TCR clone 306652 (TRBV18, TRBJ1-5)
CASSPYRVEGNQPQHF

SEQ ID NO: 613305 - protein, 11 aa, Homo sapiens
  CDR3 for alpha chain variable domain of TCR clone 306653 (TRAV12-3, TRAJ49)
CAANTGNQFYF

SEQ ID NO: 613306 - protein, 15 aa, Homo sapiens
  CDR3 for beta chain variable domain of TCR clone 306653 (TRBV9, TRBJ1-6)
CASSVAGTGDSPLHF

SEQ ID NO: 613307 - protein, 14 aa, Homo sapiens
  CDR3 for alpha chain variable domain of TCR clone 306654 (TRAV1-2, TRAJ8)
CAVREDTGFQKLVF

SEQ ID NO: 613308 - protein, 11 aa, Homo sapiens
  CDR3 for beta chain variable domain of TCR clone 306654 (TRBV29-1, TRBJ2-5)
CSVASGETQYF

SEQ ID NO: 613309 - protein, 11 aa, Homo sapiens
  CDR3 for alpha chain variable domain of TCR clone 306655 (TRAV3, TRAJ21)
CAVGNFNKFYF

SEQ ID NO: 613310 - protein, 13 aa, Homo sapiens
  CDR3 for beta chain variable domain of TCR clone 306655 (TRBV12-4, TRBJ2-5)
CASSPGTEETQYF

SEQ ID NO: 613311 - protein, 15 aa, Homo sapiens
  CDR3 for alpha chain variable domain of TCR clone 306656 (TRAV8-6, TRAJ26)
CAVSDQSPGGQIFVF

SEQ ID NO: 613312 - protein, 13 aa, Homo sapiens
  CDR3 for beta chain variable domain of TCR clone 306656 (TRBV27, TRBJ2-7)
CASSLRHRYEQYF

SEQ ID NO: 613313 - protein, 18 aa, Homo sapiens
  CDR3 for alpha chain variable domain of TCR clone 306657 (TRAV12-3, TRAJ52)
CAMSVGGAGGTSYGKLTF

SEQ ID NO: 613314 - protein, 12 aa, Homo sapiens
  CDR3 for beta chain variable domain of TCR clone 306657 (TRBV7-9, TRBJ2-7)
CASSLQGYEQYF

SEQ ID NO: 613315 - protein, 11 aa, Homo sapiens
  CDR3 for alpha chain variable domain of TCR clone 306658 (TRAV35, TRAJ30)
CAGERDDKIIF

SEQ ID NO: 613316 - protein, 14 aa, Homo sapiens
  CDR3 for beta chain variable domain of TCR clone 306658 (TRBV15, TRBJ2-5)
CATSGDRGQETQYV

SEQ ID NO: 613317 - protein, 14 aa, Homo sapiens
  CDR3 for alpha chain variable domain of TCR clone 306659 (TRAV14/DV4, TRAJ26)
CAMREGTYGQNFVF

SEQ ID NO: 613318 - protein, 16 aa, Homo sapiens
  CDR3 for beta chain variable domain of TCR clone 306659 (TRBV10-3, TRBJ2-1)
CAISGVGDGGGGEQFF

SEQ ID NO: 613319 - protein, 14 aa, Homo sapiens
  CDR3 for alpha chain variable domain of TCR clone 306660 (TRAV3, TRAJ6)
CAVRDSRRKLHTYI

SEQ ID NO: 613320 - protein, 15 aa, Homo sapiens
  CDR3 for beta chain variable domain of TCR clone 306660 (TRBV18, TRBJ2-7)
CASPPLQGRTYEQYF

SEQ ID NO: 613321 - protein, 13 aa, Homo sapiens
  CDR3 for alpha chain variable domain of TCR clone 306661 (TRAV27, TRAJ41)
CAGEGNSGYALNF

SEQ ID NO: 613322 - protein, 15 aa, Homo sapiens
  CDR3 for beta chain variable domain of TCR clone 306661 (TRBV6-3, TRBJ2-7)
CASSSPGTVLYEQYF

SEQ ID NO: 613323 - protein, 14 aa, Homo sapiens
  CDR3 for alpha chain variable domain of TCR clone 306662 (TRAV13-1, TRAJ35)
CAASKGGFGKVLHC

SEQ ID NO: 613324 - protein, 16 aa, Homo sapiens
  CDR3 for beta chain variable domain of TCR clone 306662 (TRBV24-1, TRBJ2-3)
CATSDAISGITDTQYF

SEQ ID NO: 613325 - protein, 11 aa, Homo sapiens
  CDR3 for alpha chain variable domain of TCR clone 306663 (TRAV2, TRAJ33)
CAVDSNYQLIW

SEQ ID NO: 613326 - protein, 16 aa, Homo sapiens
  CDR3 for beta chain variable domain of TCR clone 306663 (TRBV4-2, TRBJ1-5)
CASSQGQGASNQPQHF

SEQ ID NO: 613327 - protein, 16 aa, Homo sapiens
  CDR3 for alpha chain variable domain of TCR clone 306664 (TRAV30, TRAJ24)
CGTEIVDADSWGKFQF

SEQ ID NO: 613328 - protein, 14 aa, Homo sapiens
  CDR3 for beta chain variable domain of TCR clone 306664 (TRBV6-1, TRBJ2-2)
CASSALTGGGELFF

SEQ ID NO: 613329 - protein, 11 aa, Homo sapiens
  CDR3 for alpha chain variable domain of TCR clone 306665 (TRAV1-1, TRAJ23)
CAVRQGGKLIF

SEQ ID NO: 613330 - protein, 16 aa, Homo sapiens
  CDR3 for beta chain variable domain of TCR clone 306665 (TRBV7-8, TRBJ2-2)
CASSLKRGTLSGELFF

SEQ ID NO: 613331 - protein, 14 aa, Homo sapiens
  CDR3 for alpha chain variable domain of TCR clone 306666 (TRAV2, TRAJ9)
CAVEDRSGGFKTIF

SEQ ID NO: 613332 - protein, 11 aa, Homo sapiens
  CDR3 for beta chain variable domain of TCR clone 306666 (TRBV7-9, TRBJ2-5)
CDSSLGETQYF

SEQ ID NO: 613333 - protein, 13 aa, Homo sapiens
  CDR3 for alpha chain variable domain of TCR clone 306667 (TRAV27, TRAJ56)
CAGKPGANSKLTF

SEQ ID NO: 613334 - protein, 18 aa, Homo sapiens
  CDR3 for beta chain variable domain of TCR clone 306667 (TRBV11-2, TRBJ2-3)
CASSLGGASRGAPNTHYF

SEQ ID NO: 613335 - protein, 16 aa, Homo sapiens
  CDR3 for alpha chain variable domain of TCR clone 306668 (TRAV26-1, TRAJ37)
CIVRGDGSGNTGKLIF

SEQ ID NO: 613336 - protein, 16 aa, Homo sapiens
  CDR3 for beta chain variable domain of TCR clone 306668 (TRBV7-3, TRBJ2-2)
CASSLKRGTLSGELFF

SEQ ID NO: 613337 - protein, 13 aa, Homo sapiens
  CDR3 for alpha chain variable domain of TCR clone 306669 (TRAV12-3, TRAJ33)
CTTSVNSNYQLIW

SEQ ID NO: 613338 - protein, 16 aa, Homo sapiens
  CDR3 for beta chain variable domain of TCR clone 306669 (TRBV13, TRBJ2-5)
CASSLRTGGSWETQYF

SEQ ID NO: 613339 - protein, 16 aa, Homo sapiens
  CDR3 for alpha chain variable domain of TCR clone 306670 (TRAV26-1, TRAJ45)
CIVEKYSGGGADGLTL

SEQ ID NO: 613340 - protein, 13 aa, Homo sapiens
  CDR3 for beta chain variable domain of TCR clone 306670 (TRBV4-2, TRBJ1-1)
CASSQAGNTEAFF

SEQ ID NO: 613341 - protein, 13 aa, Homo sapiens
  CDR3 for alpha chain variable domain of TCR clone 306671 (TRAV8-3, TRAJ36)
CAVGATGSNNLFF

SEQ ID NO: 613342 - protein, 16 aa, Homo sapiens
  CDR3 for beta chain variable domain of TCR clone 306671 (TRBV20-1, TRBJ1-4)
CSAPGQGLLTNEKLFF

SEQ ID NO: 613343 - protein, 12 aa, Homo sapiens
  CDR3 for alpha chain variable domain of TCR clone 306672 (TRAV8-3, TRAJ20)
CAVGSNDYKFSF

SEQ ID NO: 613344 - protein, 16 aa, Homo sapiens
  CDR3 for beta chain variable domain of TCR clone 306672 (TRBV19, TRBJ2-2)
CASRSPGTGATGELFF

SEQ ID NO: 613345 - protein, 15 aa, Homo sapiens
  CDR3 for alpha chain variable domain of TCR clone 306673 (TRAV21, TRAJ13)
CAVRPTSGGYQKVTF

SEQ ID NO: 613346 - protein, 15 aa, Homo sapiens
  CDR3 for beta chain variable domain of TCR clone 306673 (TRBV28, TRBJ2-7)
CASRPGGMGFYEQYF

SEQ ID NO: 613347 - protein, 14 aa, Homo sapiens
  CDR3 for alpha chain variable domain of TCR clone 306674 (TRAV12-1, TRAJ17)
CVVNYKAAVNKLTF

SEQ ID NO: 613348 - protein, 15 aa, Homo sapiens
  CDR3 for beta chain variable domain of TCR clone 306674 (TRBV7-6, TRBJ2-3)
CASSYLAGEADTQYF

SEQ ID NO: 613349 - protein, 10 aa, Homo sapiens
  CDR3 for alpha chain variable domain of TCR clone 306675 (TRAV12-3, TRAJ49)
CAMNDDQFYF

SEQ ID NO: 613350 - protein, 15 aa, Homo sapiens
  CDR3 for beta chain variable domain of TCR clone 306675 (TRBV27, TRBJ2-5)
CASSLYPRGGETQYF

SEQ ID NO: 613351 - protein, 14 aa, Homo sapiens
  CDR3 for alpha chain variable domain of TCR clone 306676 (TRAV12-2, TRAJ13)
CAVKKSGGYQKVTF

SEQ ID NO: 613352 - protein, 15 aa, Homo sapiens
  CDR3 for beta chain variable domain of TCR clone 306676 (TRBV27, TRBJ2-1)
CASSNGRGSSNEQFF

SEQ ID NO: 613353 - protein, 16 aa, Homo sapiens
  CDR3 for alpha chain variable domain of TCR clone 306677 (TRAV3, TRAJ37)
CAVRPHGSGNTGKLIF

SEQ ID NO: 613354 - protein, 15 aa, Homo sapiens
  CDR3 for beta chain variable domain of TCR clone 306677 (TRBV4-1, TRBJ1-4)
CASSDTGGTNEKLFF

SEQ ID NO: 613355 - protein, 10 aa, Homo sapiens
  CDR3 for alpha chain variable domain of TCR clone 306678 (TRAV1-2, TRAJ18)
CAVRGEAQPW

SEQ ID NO: 613356 - protein, 13 aa, Homo sapiens
  CDR3 for beta chain variable domain of TCR clone 306678 (TRBV7-3, TRBJ2-1)
CASSPVAYNEQFF

SEQ ID NO: 613357 - protein, 13 aa, Homo sapiens
  CDR3 for alpha chain variable domain of TCR clone 306679 (TRAV12-1, TRAJ40)
CVVPTSGTYKYIF

SEQ ID NO: 613358 - protein, 18 aa, Homo sapiens
  CDR3 for beta chain variable domain of TCR clone 306679 (TRBV7-6, TRBJ2-1)
CASSPRTSGVSSYNEQFF

SEQ ID NO: 613359 - protein, 15 aa, Homo sapiens
  CDR3 for alpha chain variable domain of TCR clone 306680 (TRAV3, TRAJ22)
CAVRDRGGSARQLTF

SEQ ID NO: 613360 - protein, 16 aa, Homo sapiens
  CDR3 for beta chain variable domain of TCR clone 306680 (TRBV5-4, TRBJ2-1)
CASSWGLAGGLVEQFF

SEQ ID NO: 613361 - protein, 14 aa, Homo sapiens
  CDR3 for alpha chain variable domain of TCR clone 306681 (TRAV38-1, TRAJ45)
CASHPGGGADGLTF

SEQ ID NO: 613362 - protein, 13 aa, Homo sapiens
  CDR3 for beta chain variable domain of TCR clone 306681 (TRBV7-9, TRBJ2-2)
CASSSAGTGELFF

SEQ ID NO: 613363 - protein, 15 aa, Homo sapiens
  CDR3 for alpha chain variable domain of TCR clone 306682 (TRAV1-2, TRAJ26)
CAVRDLITMVRILFF

SEQ ID NO: 613364 - protein, 15 aa, Homo sapiens
  CDR3 for beta chain variable domain of TCR clone 306682 (TRBV9, TRBJ1-6)
CASSVAGTGDSPLHF

SEQ ID NO: 613365 - protein, 13 aa, Homo sapiens
  CDR3 for alpha chain variable domain of TCR clone 306683 (TRAV36/DV7, TRAJ7)
CAVERYGNNRLAF

SEQ ID NO: 613366 - protein, 14 aa, Homo sapiens
  CDR3 for beta chain variable domain of TCR clone 306683 (TRBV7-2, TRBJ2-7)
CASSPKTSFYEQYF

SEQ ID NO: 613367 - protein, 12 aa, Homo sapiens
  CDR3 for alpha chain variable domain of TCR clone 306684 (TRAV3, TRAJ31)
CAVRDGNARLMF

SEQ ID NO: 613368 - protein, 17 aa, Homo sapiens
  CDR3 for beta chain variable domain of TCR clone 306684 (TRBV7-2, TRBJ2-3)
CSSLKREGSGITDTQYF

SEQ ID NO: 613369 - protein, 16 aa, Homo sapiens
  CDR3 for alpha chain variable domain of TCR clone 306685 (TRAV8-4, TRAJ18)
CAVTANGGSTLGRLYL

SEQ ID NO: 613370 - protein, 14 aa, Homo sapiens
  CDR3 for beta chain variable domain of TCR clone 306685 (TRBV12-4, TRBJ1-2)
CASSSAGHTYGYTF

SEQ ID NO: 613371 - protein, 13 aa, Homo sapiens
  CDR3 for alpha chain variable domain of TCR clone 306686 (TRAV3, TRAJ20)
CCEAFCNDYKLSF

SEQ ID NO: 613372 - protein, 12 aa, Homo sapiens
  CDR3 for beta chain variable domain of TCR clone 306686 (TRBV18, TRBJ1-1)
CASSPGGTEAFF

SEQ ID NO: 613373 - protein, 14 aa, Homo sapiens
  CDR3 for alpha chain variable domain of TCR clone 306687 (TRAV12-2, TRAJ17)
CAVNIKAAGNKLTF

SEQ ID NO: 613374 - protein, 15 aa, Homo sapiens
  CDR3 for beta chain variable domain of TCR clone 306687 (TRBV10-3, TRBJ2-1)
CATNGGPGQGDEQFF

SEQ ID NO: 613375 - protein, 14 aa, Homo sapiens
  CDR3 for alpha chain variable domain of TCR clone 306688 (TRAV12-3, TRAJ10)
SHLPLTGGGNKLTF

SEQ ID NO: 613376 - protein, 15 aa, Homo sapiens
  CDR3 for beta chain variable domain of TCR clone 306688 (TRBV9, TRBJ1-6)
CASSVAGTGDSTLHF

SEQ ID NO: 613377 - protein, 13 aa, Homo sapiens
  CDR3 for alpha chain variable domain of TCR clone 306689 (TRAV3, TRAJ26)
CAVSRGHGQNFVF

SEQ ID NO: 613378 - protein, 15 aa, Homo sapiens
  CDR3 for beta chain variable domain of TCR clone 306689 (TRBV27, TRBJ2-1)
CASSLARGAYNEQFF

SEQ ID NO: 613379 - protein, 16 aa, Homo sapiens
  CDR3 for alpha chain variable domain of TCR clone 306690 (TRAV26-1, TRAJ50)
CIVRVEAGTSYDKLIF

SEQ ID NO: 613380 - protein, 13 aa, Homo sapiens
  CDR3 for beta chain variable domain of TCR clone 306690 (TRBV25-1, TRBJ1-2)
CASSENMGRGYTF

SEQ ID NO: 613381 - protein, 14 aa, Homo sapiens
  CDR3 for alpha chain variable domain of TCR clone 306691 (TRAV38-1, TRAJ45)
CAYYLGGGADGLTF

SEQ ID NO: 613382 - protein, 16 aa, Homo sapiens
  CDR3 for beta chain variable domain of TCR clone 306691 (TRBV7-2, TRBJ2-6)
CASSLAGRSGANVLTF

SEQ ID NO: 613383 - protein, 13 aa, Homo sapiens
  CDR3 for alpha chain variable domain of TCR clone 306692 (TRAV2, TRAJ41)
CAVGEYSGYALNF

SEQ ID NO: 613384 - protein, 15 aa, Homo sapiens
  CDR3 for beta chain variable domain of TCR clone 306692 (TRBV12-4, TRBJ1-6)
CASSLLGGSNSPLHF

SEQ ID NO: 613385 - protein, 12 aa, Homo sapiens
  CDR3 for alpha chain variable domain of TCR clone 306693 (TRAV12-3, TRAJ40)
CAMSSGTYKYIF

SEQ ID NO: 613386 - protein, 17 aa, Homo sapiens
  CDR3 for beta chain variable domain of TCR clone 306693 (TRBV5-1, TRBJ2-5)
CASSLLGLAANQETQYF

SEQ ID NO: 613387 - protein, 14 aa, Homo sapiens
  CDR3 for alpha chain variable domain of TCR clone 306694 (TRAV12-1, TRAJ12)
CVVNRPDSSYKLIF

SEQ ID NO: 613388 - protein, 15 aa, Homo sapiens
  CDR3 for beta chain variable domain of TCR clone 306694 (TRBV5-1, TRBJ1-1)
CASSLGMGTSTEDFF

SEQ ID NO: 613389 - protein, 15 aa, Homo sapiens
  CDR3 for alpha chain variable domain of TCR clone 306695 (TRAV2, TRAJ9)
CAVEDRSTGGFKTIF

SEQ ID NO: 613390 - protein, 15 aa, Homo sapiens
  CDR3 for beta chain variable domain of TCR clone 306695 (TRBV18, TRBJ2-1)
CASSPPSASYNEQFF

SEQ ID NO: 613391 - protein, 14 aa, Homo sapiens
  CDR3 for alpha chain variable domain of TCR clone 306696 (TRAV12-1, TRAJ12)
CVVTRMDSSYKLIF

SEQ ID NO: 613392 - protein, 15 aa, Homo sapiens
  CDR3 for beta chain variable domain of TCR clone 306696 (TRBV11-2, TRBJ2-1)
CASSLTSGGYNEQFF

SEQ ID NO: 613393 - protein, 13 aa, Homo sapiens
  CDR3 for alpha chain variable domain of TCR clone 306697 (TRAV13-1, TRAJ40)
CAASKGGTYKYIF

SEQ ID NO: 613394 - protein, 13 aa, Homo sapiens
  CDR3 for beta chain variable domain of TCR clone 306697 (TRBV7-6, TRBJ1-2)
CASSLVAVYGYTF

SEQ ID NO: 613395 - protein, 14 aa, Homo sapiens
  CDR3 for alpha chain variable domain of TCR clone 306698 (TRAV9-2, TRAJ28)
CALTLGAGSYQLTF

SEQ ID NO: 613396 - protein, 14 aa, Homo sapiens
  CDR3 for beta chain variable domain of TCR clone 306698 (TRBV10-3, TRBJ1-3)
CAIRGQRAGNTIYF

SEQ ID NO: 613397 - protein, 14 aa, Homo sapiens
  CDR3 for alpha chain variable domain of TCR clone 306699 (TRAV21, TRAJ37)
CAVQGSSNTGKLIF

SEQ ID NO: 613398 - protein, 13 aa, Homo sapiens
  CDR3 for beta chain variable domain of TCR clone 306699 (TRBV7-2, TRBJ2-5)
CASSQTSVETQYF

SEQ ID NO: 613399 - protein, 12 aa, Homo sapiens
  CDR3 for alpha chain variable domain of TCR clone 306700 (TRAV35, TRAJ12)
CAGMDSSYKLIF

SEQ ID NO: 613400 - protein, 14 aa, Homo sapiens
  CDR3 for beta chain variable domain of TCR clone 306700 (TRBV28, TRBJ2-5)
CASSLYRGTETQYY

SEQ ID NO: 613401 - protein, 14 aa, Homo sapiens
  CDR3 for alpha chain variable domain of TCR clone 306701 (TRAV12-1, TRAJ17)
CVVNYNAAGNKLTF

SEQ ID NO: 613402 - protein, 16 aa, Homo sapiens
  CDR3 for beta chain variable domain of TCR clone 306701 (TRBV12-4, TRBJ1-5)
CASSRPVGGSNQPQHF

SEQ ID NO: 613403 - protein, 11 aa, Homo sapiens
  CDR3 for alpha chain variable domain of TCR clone 306702 (TRAV12-3, TRAJ43)
CAMSVSKDMRF

SEQ ID NO: 613404 - protein, 16 aa, Homo sapiens
  CDR3 for beta chain variable domain of TCR clone 306702 (TRBV7-9, TRBJ2-1)
CASSDVAGGSYNEQFF

SEQ ID NO: 613405 - protein, 15 aa, Homo sapiens
  CDR3 for alpha chain variable domain of TCR clone 306703 (TRAV12-1, TRAJ42)
CVVTRAGGRQGNLIF

SEQ ID NO: 613406 - protein, 14 aa, Homo sapiens
  CDR3 for beta chain variable domain of TCR clone 306703 (TRBV11-2, TRBJ2-3)
CASSLGGGANTQYF

SEQ ID NO: 613407 - protein, 14 aa, Homo sapiens
  CDR3 for alpha chain variable domain of TCR clone 306704 (TRAV12-3, TRAJ29)
CAMILLSGNTPLLF

SEQ ID NO: 613408 - protein, 16 aa, Homo sapiens
  CDR3 for beta chain variable domain of TCR clone 306704 (TRBV28, TRBJ2-7)
CASSSGTSGRGYEQYF

SEQ ID NO: 613409 - protein, 14 aa, Homo sapiens
  CDR3 for alpha chain variable domain of TCR clone 306705 (TRAV38-1, TRAJ40)
CALRPTSGTYKYIF

SEQ ID NO: 613410 - protein, 13 aa, Homo sapiens
  CDR3 for beta chain variable domain of TCR clone 306705 (TRBV12-4, TRBJ2-5)
CASRLAVQETQYF

SEQ ID NO: 613411 - protein, 16 aa, Homo sapiens
  CDR3 for alpha chain variable domain of TCR clone 306706 (TRAV3, TRAJ18)
CAVRAGRGSTLGRLYF

SEQ ID NO: 613412 - protein, 15 aa, Homo sapiens
  CDR3 for beta chain variable domain of TCR clone 306706 (TRBV7-9, TRBJ1-6)
CASSSPGRGNSPLHF

SEQ ID NO: 613413 - protein, 14 aa, Homo sapiens
  CDR3 for alpha chain variable domain of TCR clone 306707 (TRAV3, TRAJ9)
CAVRLNTGGFKTIF

SEQ ID NO: 613414 - protein, 16 aa, Homo sapiens
  CDR3 for beta chain variable domain of TCR clone 306707 (TRBV11-2, TRBJ2-1)
CQQLIPPGVEYNEQFF

SEQ ID NO: 613415 - protein, 16 aa, Homo sapiens
  CDR3 for alpha chain variable domain of TCR clone 306708 (TRAV8-6, TRAJ22)
CAVSPISSGSARQLTF

SEQ ID NO: 613416 - protein, 15 aa, Homo sapiens
  CDR3 for beta chain variable domain of TCR clone 306708 (TRBV7-9, TRBJ1-6)
CASSSPGRGNSPLHF

SEQ ID NO: 613417 - protein, 13 aa, Homo sapiens
  CDR3 for alpha chain variable domain of TCR clone 306709 (TRAV13-1, TRAJ26)
CAIVFGPGTRLSV

SEQ ID NO: 613418 - protein, 16 aa, Homo sapiens
  CDR3 for beta chain variable domain of TCR clone 306709 (TRBV12-4, TRBJ1-5)
CASSRPVGGSNQPQHF

SEQ ID NO: 613419 - protein, 14 aa, Homo sapiens
  CDR3 for alpha chain variable domain of TCR clone 306710 (TRAV17, TRAJ22)
CATSPSGSARQLTF

SEQ ID NO: 613420 - protein, 14 aa, Homo sapiens
  CDR3 for beta chain variable domain of TCR clone 306710 (TRBV25-1, TRBJ1-1)
CASTHLGGNTEAFF

SEQ ID NO: 613421 - protein, 18 aa, Homo sapiens
  CDR3 for alpha chain variable domain of TCR clone 306711 (TRAV29/DV5, TRAJ52)
CAAGFRGAGGTSYGKLTF

SEQ ID NO: 613422 - protein, 16 aa, Homo sapiens
  CDR3 for beta chain variable domain of TCR clone 306711 (TRBV7-3, TRBJ2-2)
GASSLKRGTLSGELFF

SEQ ID NO: 613423 - protein, 15 aa, Homo sapiens
  CDR3 for alpha chain variable domain of TCR clone 306712 (TRAV12-2, TRAJ56)
CAVNPFTGANSKLTF

SEQ ID NO: 613424 - protein, 16 aa, Homo sapiens
  CDR3 for beta chain variable domain of TCR clone 306712 (TRBV7-3, TRBJ2-2)
CASSLKRGTLSGELFF

SEQ ID NO: 613425 - protein, 19 aa, Homo sapiens
  CDR3 for alpha chain variable domain of TCR clone 306713 (TRAV23/DV6, TRAJ9)
CSKHRLKGAGPTGGLKTIF

SEQ ID NO: 613426 - protein, 15 aa, Homo sapiens
  CDR3 for beta chain variable domain of TCR clone 306713 (TRBV6-3, TRBJ2-1)
CASSYASDSYNEQFF

SEQ ID NO: 613427 - protein, 13 aa, Homo sapiens
  CDR3 for alpha chain variable domain of TCR clone 306714 (TRAV21, TRAJ27)
CAARPGNAGKSTF

SEQ ID NO: 613428 - protein, 14 aa, Homo sapiens
  CDR3 for beta chain variable domain of TCR clone 306714 (TRBV7-9, TRBJ2-2)
CASSGLADTGELFF

SEQ ID NO: 613429 - protein, 12 aa, Homo sapiens
  CDR3 for alpha chain variable domain of TCR clone 306715 (TRAV26-1, TRAJ53)
CIEGGSNYKLTF

SEQ ID NO: 613430 - protein, 15 aa, Homo sapiens
  CDR3 for beta chain variable domain of TCR clone 306715 (TRBV6-3, TRBJ2-7)
CASSSPGTVFYEQYF

SEQ ID NO: 613431 - protein, 15 aa, Homo sapiens
  CDR3 for alpha chain variable domain of TCR clone 306716 (TRAV26-1, TRAJ29)
CIVRVEGSGNTPLVS

SEQ ID NO: 613432 - protein, 14 aa, Homo sapiens
  CDR3 for beta chain variable domain of TCR clone 306716 (TRBV18, TRBJ2-5)
CAGSPGVSQETQYF

SEQ ID NO: 613433 - protein, 14 aa, Homo sapiens
  CDR3 for alpha chain variable domain of TCR clone 306717 (TRAV12-2, TRAJ44)
CAVNAAGTASKLTF

SEQ ID NO: 613434 - protein, 13 aa, Homo sapiens
  CDR3 for beta chain variable domain of TCR clone 306717 (TRBV20-1, TRBJ1-6)
CSAPLGVGSPLHF

SEQ ID NO: 613435 - protein, 14 aa, Homo sapiens
  CDR3 for alpha chain variable domain of TCR clone 306718 (TRAV13-1, TRAJ35)
CAASKGGFGNVLHC

SEQ ID NO: 613436 - protein, 18 aa, Homo sapiens
  CDR3 for beta chain variable domain of TCR clone 306718 (TRBV7-6, TRBJ2-1)
CASSPRTSGMSSYNEQFF

SEQ ID NO: 613437 - protein, 14 aa, Homo sapiens
  CDR3 for alpha chain variable domain of TCR clone 306719 (TRAV2, TRAJ37)
CAVDFTSNTGKLIF

SEQ ID NO: 613438 - protein, 13 aa, Homo sapiens
  CDR3 for beta chain variable domain of TCR clone 306719 (TRBV19, TRBJ1-1)
CASSITGESEAFF

SEQ ID NO: 613439 - protein, 12 aa, Homo sapiens
  CDR3 for alpha chain variable domain of TCR clone 306720 (TRAV14/DV4, TRAJ50)
CAMREGNSKVLF

SEQ ID NO: 613440 - protein, 16 aa, Homo sapiens
  CDR3 for beta chain variable domain of TCR clone 306720 (TRBV28, TRBJ2-3)
CASSLSGQTSTDTQYF

SEQ ID NO: 613441 - protein, 11 aa, Homo sapiens
  CDR3 for alpha chain variable domain of TCR clone 306721 (TRAV12-3, TRAJ43)
CAISVSNDMRF

SEQ ID NO: 613442 - protein, 14 aa, Homo sapiens
  CDR3 for beta chain variable domain of TCR clone 306721 (TRBV7-8, TRBJ2-3)
CASSLEAGTDTQYF

SEQ ID NO: 613443 - protein, 14 aa, Homo sapiens
  CDR3 for alpha chain variable domain of TCR clone 306722 (TRAV8-4, TRAJ9)
CAVTFNNGGFKTIF

SEQ ID NO: 613444 - protein, 15 aa, Homo sapiens
  CDR3 for beta chain variable domain of TCR clone 306722 (TRBV7-9, TRBJ2-2)
CASSPETGAGGELFF

SEQ ID NO: 613445 - protein, 14 aa, Homo sapiens
  CDR3 for alpha chain variable domain of TCR clone 306723 (TRAV3, TRAJ34)
CAVRDTNNTDKLIF

SEQ ID NO: 613446 - protein, 13 aa, Homo sapiens
  CDR3 for beta chain variable domain of TCR clone 306723 (TRBV20-1, TRBJ1-1)
CSARGGGNTEAFF

SEQ ID NO: 613447 - protein, 15 aa, Homo sapiens
  CDR3 for alpha chain variable domain of TCR clone 306724 (TRAV13-1, TRAJ32)
CAASIYGGATNKLIL

SEQ ID NO: 613448 - protein, 12 aa, Homo sapiens
  CDR3 for beta chain variable domain of TCR clone 306724 (TRBV7-6, TRBJ2-3)
CASSTGTDTQYF

SEQ ID NO: 613449 - protein, 12 aa, Homo sapiens
  CDR3 for alpha chain variable domain of TCR clone 306725 (TRAV36/DV7, TRAJ54)
CAVVRGAQKLVF

SEQ ID NO: 613450 - protein, 14 aa, Homo sapiens
  CDR3 for beta chain variable domain of TCR clone 306725 (TRBV20-1, TRBJ2-4)
CSARDRGQGGIQCF

SEQ ID NO: 613451 - protein, 19 aa, Homo sapiens
  CDR3 for alpha chain variable domain of TCR clone 306726 (TRAV25, TRAJ20)
TATQTTDVGILPHDYKLSF

SEQ ID NO: 613452 - protein, 15 aa, Homo sapiens
  CDR3 for beta chain variable domain of TCR clone 306726 (TRBV6-6, TRBJ1-5)
CASSSLQGTNQPQHF

SEQ ID NO: 613453 - protein, 17 aa, Homo sapiens
  CDR3 for alpha chain variable domain of TCR clone 306727 (TRAV3, TRAJ42)
CAVRDRDYGGSQGNSIF

SEQ ID NO: 613454 - protein, 13 aa, Homo sapiens
  CDR3 for beta chain variable domain of TCR clone 306727 (TRBV10-3, TRBJ2-7)
CASKLAVNYEQYF

SEQ ID NO: 613455 - protein, 14 aa, Homo sapiens
  CDR3 for alpha chain variable domain of TCR clone 306728 (TRAV12-2, TRAJ6)
CASKWGGGSYIPTF

SEQ ID NO: 613456 - protein, 14 aa, Homo sapiens
  CDR3 for beta chain variable domain of TCR clone 306728 (TRBV7-2, TRBJ2-7)
CASSPKTIFYEQYF

SEQ ID NO: 613457 - protein, 13 aa, Homo sapiens
  CDR3 for alpha chain variable domain of TCR clone 306729 (TRAV23/DV6, TRAJ22)
CAPWGGSASQLTF

SEQ ID NO: 613458 - protein, 13 aa, Homo sapiens
  CDR3 for beta chain variable domain of TCR clone 306729 (TRBV18, TRBJ2-7)
CQLPNLGGYEQYF

SEQ ID NO: 613459 - protein, 16 aa, Homo sapiens
  CDR3 for alpha chain variable domain of TCR clone 306730 (TRAV16, TRAJ52)
CSLSVAGGTSYGKLTF

SEQ ID NO: 613460 - protein, 12 aa, Homo sapiens
  CDR3 for beta chain variable domain of TCR clone 306730 (TRBV12-4, TRBJ1-3)
CASSFSGNTIYF

SEQ ID NO: 613461 - protein, 23 aa, Homo sapiens
  CDR3 for alpha chain variable domain of TCR clone 306731 (TRAV26-1, TRAJ38)
CIADNAGNNHIQNPDPAVYQLRD

SEQ ID NO: 613462 - protein, 17 aa, Homo sapiens
  CDR3 for beta chain variable domain of TCR clone 306731 (TRBV11-2, TRBJ2-6)
CASSQRDSFSGANVLTF

SEQ ID NO: 613463 - protein, 13 aa, Homo sapiens
  CDR3 for alpha chain variable domain of TCR clone 306732 (TRAV8-3, TRAJ43)
CAVGIYNNNDMRF

SEQ ID NO: 613464 - protein, 12 aa, Homo sapiens
  CDR3 for beta chain variable domain of TCR clone 306732 (TRBV3-1, TRBJ2-1)
CASSQGSSGQFF

SEQ ID NO: 613465 - protein, 13 aa, Homo sapiens
  CDR3 for alpha chain variable domain of TCR clone 306733 (TRAV8-1, TRAJ28)
CAVSGAGSYQLTS

SEQ ID NO: 613466 - protein, 14 aa, Homo sapiens
  CDR3 for beta chain variable domain of TCR clone 306733 (TRBV7-2, TRBJ2-2)
CASRGQGAAGELFF

SEQ ID NO: 613467 - protein, 14 aa, Homo sapiens
  CDR3 for alpha chain variable domain of TCR clone 306734 (TRAV12-2, TRAJ13)
CAVKKTGGYQKVTF

SEQ ID NO: 613468 - protein, 15 aa, Homo sapiens
  CDR3 for beta chain variable domain of TCR clone 306734 (TRBV12-4, TRBJ2-5)
CASSPPTGPQETQYF

SEQ ID NO: 613469 - protein, 14 aa, Homo sapiens
  CDR3 for alpha chain variable domain of TCR clone 306735 (TRAV12-1, TRAJ9)
CVVNRRTGGFKNIF

SEQ ID NO: 613470 - protein, 13 aa, Homo sapiens
  CDR3 for beta chain variable domain of TCR clone 306735 (TRBV5-7, TRBJ2-1)
CASSLVESVEQFF

SEQ ID NO: 613471 - protein, 14 aa, Homo sapiens
  CDR3 for alpha chain variable domain of TCR clone 306736 (TRAV26-1, TRAJ44)
CIAPSTGTASKLTF

SEQ ID NO: 613472 - protein, 13 aa, Homo sapiens
  CDR3 for beta chain variable domain of TCR clone 306736 (TRBV28, TRBJ2-3)
CASSLPQVDTQYF

SEQ ID NO: 613473 - protein, 15 aa, Homo sapiens
  CDR3 for alpha chain variable domain of TCR clone 306737 (TRAV12-3, TRAJ6)
CAMSPASGGSYIPTF

SEQ ID NO: 613474 - protein, 15 aa, Homo sapiens
  CDR3 for beta chain variable domain of TCR clone 306737 (TRBV2, TRBJ1-2)
CASSESRTVNYGYIF

SEQ ID NO: 613475 - protein, 16 aa, Homo sapiens
  CDR3 for alpha chain variable domain of TCR clone 306738 (TRAV26-1, TRAJ11)
CIVRVVLGFRIQHPHL

SEQ ID NO: 613476 - protein, 11 aa, Homo sapiens
  CDR3 for beta chain variable domain of TCR clone 306738 (TRBV29-1, TRBJ2-5)
CSEDRTGTQYF

SEQ ID NO: 613477 - protein, 15 aa, Homo sapiens
  CDR3 for alpha chain variable domain of TCR clone 306739 (TRAV27, TRAJ38)
CAARRNAGNNRQLIW

SEQ ID NO: 613478 - protein, 13 aa, Homo sapiens
  CDR3 for beta chain variable domain of TCR clone 306739 (TRBV4-1, TRBJ1-1)
CASSRKMNTEAFF

SEQ ID NO: 613479 - protein, 14 aa, Homo sapiens
  CDR3 for alpha chain variable domain of TCR clone 306740 (TRAV35, TRAJ22)
CAGLRPASARQLTF

SEQ ID NO: 613480 - protein, 15 aa, Homo sapiens
  CDR3 for beta chain variable domain of TCR clone 306740 (TRBV12-4, TRBJ2-5)
CASSPPTGLQETQFF

SEQ ID NO: 613481 - protein, 12 aa, Homo sapiens
  CDR3 for alpha chain variable domain of TCR clone 306741 (TRAV12-3, TRAJ17)
CAMTLTGDKLTF

SEQ ID NO: 613482 - protein, 15 aa, Homo sapiens
  CDR3 for beta chain variable domain of TCR clone 306741 (TRBV20-1, TRBJ2-7)
CSARDRVSGMDEQYL

SEQ ID NO: 613483 - protein, 14 aa, Homo sapiens
  CDR3 for alpha chain variable domain of TCR clone 306742 (TRAV4, TRAJ6)
CLVGEAGGSYITTF

SEQ ID NO: 613484 - protein, 16 aa, Homo sapiens
  CDR3 for beta chain variable domain of TCR clone 306742 (TRBV7-6, TRBJ2-1)
CASSLNEGPSYNEQFF

SEQ ID NO: 613485 - protein, 14 aa, Homo sapiens
  CDR3 for alpha chain variable domain of TCR clone 306743 (TRAV3, TRAJ33)
CAVRDMGSNYQLIW

SEQ ID NO: 613486 - protein, 17 aa, Homo sapiens
  CDR3 for beta chain variable domain of TCR clone 306743 (TRBV19, TRBJ2-1)
CARSIWSAQPTHNEQFS

SEQ ID NO: 613487 - protein, 14 aa, Homo sapiens
  CDR3 for alpha chain variable domain of TCR clone 306744 (TRAV2, TRAJ9)
CAVEDRSGGFKTIF

SEQ ID NO: 613488 - protein, 14 aa, Homo sapiens
  CDR3 for beta chain variable domain of TCR clone 306744 (TRBV19, TRBJ2-1)
CASKDPSSYNEQFF

SEQ ID NO: 613489 - protein, 15 aa, Homo sapiens
  CDR3 for alpha chain variable domain of TCR clone 306745 (TRAV26-1, TRAJ17)
CIVRVVKAAGNQLTF

SEQ ID NO: 613490 - protein, 16 aa, Homo sapiens
  CDR3 for beta chain variable domain of TCR clone 306745 (TRBV7-9, TRBJ2-1)
CASSLVSGPSYNEQFF

SEQ ID NO: 613491 - protein, 15 aa, Homo sapiens
  CDR3 for alpha chain variable domain of TCR clone 306746 (TRAV13-1, TRAJ9)
CAASTLNTGGFKTIF

SEQ ID NO: 613492 - protein, 15 aa, Homo sapiens
  CDR3 for beta chain variable domain of TCR clone 306746 (TRBV6-5, TRBJ2-4)
CDSSLRESPKNIQYF

SEQ ID NO: 613493 - protein, 16 aa, Homo sapiens
  CDR3 for alpha chain variable domain of TCR clone 306747 (TRAV20, TRAJ52)
CAVLRAGGTSYGKLTF

SEQ ID NO: 613494 - protein, 15 aa, Homo sapiens
  CDR3 for beta chain variable domain of TCR clone 306747 (TRBV4-2, TRBJ1-3)
CASSQDGAQGNTIYF

SEQ ID NO: 613495 - protein, 14 aa, Homo sapiens
  CDR3 for alpha chain variable domain of TCR clone 306748 (TRAV35, TRAJ33)
CAGSSQDSNYQLIW

SEQ ID NO: 613496 - protein, 13 aa, Homo sapiens
  CDR3 for beta chain variable domain of TCR clone 306748 (TRBV27, TRBJ1-1)
CASSLSIGAEAFF

SEQ ID NO: 613497 - protein, 13 aa, Homo sapiens
  CDR3 for alpha chain variable domain of TCR clone 306749 (TRAV12-1, TRAJ6)
CVVFPGGSYIPTF

SEQ ID NO: 613498 - protein, 16 aa, Homo sapiens
  CDR3 for beta chain variable domain of TCR clone 306749 (TRBV7-3, TRBJ2-1)
CASSLEGYRSYNEQFF

SEQ ID NO: 613499 - protein, 14 aa, Homo sapiens
  CDR3 for alpha chain variable domain of TCR clone 306750 (TRAV1-2, TRAJ8)
CAVREDTGFQKLVF

SEQ ID NO: 613500 - protein, 13 aa, Homo sapiens
  CDR3 for beta chain variable domain of TCR clone 306750 (TRBV2, TRBJ1-5)
CASSQGGRQPQHF

SEQ ID NO: 613501 - protein, 17 aa, Homo sapiens
  CDR3 for alpha chain variable domain of TCR clone 306751 (TRAV3, TRAJ6)
CAVRDGPRAEGSYIPTF

SEQ ID NO: 613502 - protein, 14 aa, Homo sapiens
  CDR3 for beta chain variable domain of TCR clone 306751 (TRBV7-2, TRBJ2-7)
CASSPKTSFYDQYF

SEQ ID NO: 613503 - protein, 14 aa, Homo sapiens
  CDR3 for alpha chain variable domain of TCR clone 306752 (TRAV2, TRAJ9)
CAVEDRSGGFKTIF

SEQ ID NO: 613504 - protein, 16 aa, Homo sapiens
  CDR3 for beta chain variable domain of TCR clone 306752 (TRBV7-3, TRBJ2-1)
CASSLEGYRSYSEQFF

SEQ ID NO: 613505 - protein, 14 aa, Homo sapiens
  CDR3 for alpha chain variable domain of TCR clone 306753 (TRAV26-1, TRAJ38)
CIADNAGNNRKLIW

SEQ ID NO: 613506 - protein, 15 aa, Homo sapiens
  CDR3 for beta chain variable domain of TCR clone 306753 (TRBV2, TRBJ2-7)
CASSEGLARSYEQYF

SEQ ID NO: 613507 - protein, 15 aa, Homo sapiens
  CDR3 for alpha chain variable domain of TCR clone 306754 (TRAV26-1, TRAJ44)
CIVRANTVTASKITF

SEQ ID NO: 613508 - protein, 16 aa, Homo sapiens
  CDR3 for beta chain variable domain of TCR clone 306754 (TRBV7-7, TRBJ2-1)
CASSLASGTSYNEQFF

SEQ ID NO: 613509 - protein, 15 aa, Homo sapiens
  CDR3 for alpha chain variable domain of TCR clone 306755 (TRAV8-3, TRAJ44)
CAVGAGASTASKLTF

SEQ ID NO: 613510 - protein, 12 aa, Homo sapiens
  CDR3 for beta chain variable domain of TCR clone 306755 (TRBV7-8, TRBJ2-4)
CASILGGNIQYF

SEQ ID NO: 613511 - protein, 12 aa, Homo sapiens
  CDR3 for alpha chain variable domain of TCR clone 306756 (TRAV21, TRAJ13)
PGPSGGYQKVTF

SEQ ID NO: 613512 - protein, 14 aa, Homo sapiens
  CDR3 for beta chain variable domain of TCR clone 306756 (TRBV20-1, TRBJ2-7)
CSAKDRKGAYEQFF

SEQ ID NO: 613513 - protein, 17 aa, Homo sapiens
  CDR3 for alpha chain variable domain of TCR clone 306757 (TRAV12-3, TRAJ6)
CAMSARGGAGGSYIPTF

SEQ ID NO: 613514 - protein, 12 aa, Homo sapiens
  CDR3 for beta chain variable domain of TCR clone 306757 (TRBV12-4, TRBJ2-3)
CASSTLPDTHYF

SEQ ID NO: 613515 - protein, 15 aa, Homo sapiens
  CDR3 for alpha chain variable domain of TCR clone 306758 (TRAV23/DV6, TRAJ57)
CAASSTLSKGGSETL

SEQ ID NO: 613516 - protein, 14 aa, Homo sapiens
  CDR3 for beta chain variable domain of TCR clone 306758 (TRBV25-1, TRBJ1-1)
CASTHLGGNTEAFF

SEQ ID NO: 613517 - protein, 15 aa, Homo sapiens
  CDR3 for alpha chain variable domain of TCR clone 306759 (TRAV8-6, TRAJ6)
CAVSGESGGSYIPTF

SEQ ID NO: 613518 - protein, 16 aa, Homo sapiens
  CDR3 for beta chain variable domain of TCR clone 306759 (TRBV20-1, TRBJ1-4)
CSAPGQGLLTNEKLFF

SEQ ID NO: 613519 - protein, 14 aa, Homo sapiens
  CDR3 for alpha chain variable domain of TCR clone 306760 (TRAV22, TRAJ6)
CAGVGPGGSYIPTF

SEQ ID NO: 613520 - protein, 16 aa, Homo sapiens
  CDR3 for beta chain variable domain of TCR clone 306760 (TRBV19, TRBJ2-1)
CASSKAGPSSYNEQFF

SEQ ID NO: 613521 - protein, 15 aa, Homo sapiens
  CDR3 for alpha chain variable domain of TCR clone 306761 (TRAV20, TRAJ53)
CAVQASGGSNYKLTF

SEQ ID NO: 613522 - protein, 12 aa, Homo sapiens
  CDR3 for beta chain variable domain of TCR clone 306761 (TRBV7-6, TRBJ2-5)
CSSSLSQETQYF

SEQ ID NO: 613523 - protein, 11 aa, Homo sapiens
  CDR3 for alpha chain variable domain of TCR clone 306762 (TRAV13-1, TRAJ43)
SAAHNNNDMRF

SEQ ID NO: 613524 - protein, 15 aa, Homo sapiens
  CDR3 for beta chain variable domain of TCR clone 306762 (TRBV6-1, TRBJ2-2)
CASSRLRGDTGELLF

SEQ ID NO: 613525 - protein, 15 aa, Homo sapiens
  CDR3 for alpha chain variable domain of TCR clone 306763 (TRAV38-2/DV8, TRAJ45)
CAYWDSGGGADGLHF

SEQ ID NO: 613526 - protein, 14 aa, Homo sapiens
  CDR3 for beta chain variable domain of TCR clone 306763 (TRBV7-2, TRBJ2-7)
CASRSQGAAYEQYF

SEQ ID NO: 613527 - protein, 13 aa, Homo sapiens
  CDR3 for alpha chain variable domain of TCR clone 306764 (TRAV21, TRAJ15)
CAVANQAGTALIF

SEQ ID NO: 613528 - protein, 15 aa, Homo sapiens
  CDR3 for beta chain variable domain of TCR clone 306764 (TRBV27, TRBJ2-7)
CASSLGSSVSPEQNF

SEQ ID NO: 613529 - protein, 16 aa, Homo sapiens
  CDR3 for alpha chain variable domain of TCR clone 306765 (TRAV30, TRAJ24)
CGTEIVDADSRGKFQF

SEQ ID NO: 613530 - protein, 13 aa, Homo sapiens
  CDR3 for beta chain variable domain of TCR clone 306765 (TRBV7-9, TRBJ1-2)
CASSLKQNYGYIF

SEQ ID NO: 613531 - protein, 15 aa, Homo sapiens
  CDR3 for alpha chain variable domain of TCR clone 306766 (TRAV21, TRAJ53)
CATLNSGGNNYKQTF

SEQ ID NO: 613532 - protein, 13 aa, Homo sapiens
  CDR3 for beta chain variable domain of TCR clone 306766 (TRBV4-1, TRBJ2-2)
CASSQENNGELFF

SEQ ID NO: 613533 - protein, 14 aa, Homo sapiens
  CDR3 for alpha chain variable domain of TCR clone 306767 (TRAV2, TRAJ9)
CAVEDRSRGFKTIF

SEQ ID NO: 613534 - protein, 13 aa, Homo sapiens
  CDR3 for beta chain variable domain of TCR clone 306767 (TRBV7-9, TRBJ2-7)
CASSFAGAYEQYF

SEQ ID NO: 613535 - protein, 14 aa, Homo sapiens
  CDR3 for alpha chain variable domain of TCR clone 306768 (TRAV26-1, TRAJ39)
CIVRGSRAGNLLTL

SEQ ID NO: 613536 - protein, 15 aa, Homo sapiens
  CDR3 for beta chain variable domain of TCR clone 306768 (TRBV7-9, TRBJ1-5)
CASSQGHQPNQPQHF

SEQ ID NO: 613537 - protein, 14 aa, Homo sapiens
  CDR3 for alpha chain variable domain of TCR clone 306769 (TRAV8-1, TRAJ4)
CAVKFSGGYNKLIF

SEQ ID NO: 613538 - protein, 22 aa, Homo sapiens
  CDR3 for beta chain variable domain of TCR clone 306769 (TRBV7-3, TRBJ2-5)
CASARDRVILRPRDTVLRARHA

SEQ ID NO: 613539 - protein, 14 aa, Homo sapiens
  CDR3 for alpha chain variable domain of TCR clone 306770 (TRAV1-2, TRAJ16)
CAVNRFSDGQKLLF

SEQ ID NO: 613540 - protein, 13 aa, Homo sapiens
  CDR3 for beta chain variable domain of TCR clone 306770 (TRBV13, TRBJ2-1)
CASTPGSYNEQFF

SEQ ID NO: 613541 - protein, 16 aa, Homo sapiens
  CDR3 for alpha chain variable domain of TCR clone 306771 (TRAV16, TRAJ4)
CALSRMFSGGYNKLIF

SEQ ID NO: 613542 - protein, 12 aa, Homo sapiens
  CDR3 for beta chain variable domain of TCR clone 306771 (TRBV5-4, TRBJ2-5)
CASSSTRETQYL

SEQ ID NO: 613543 - protein, 18 aa, Homo sapiens
  CDR3 for alpha chain variable domain of TCR clone 306772 (TRAV13-1, TRAJ52)
CAAKNPNAGGTSYGKLTF

SEQ ID NO: 613544 - protein, 13 aa, Homo sapiens
  CDR3 for beta chain variable domain of TCR clone 306772 (TRBV11-2, TRBJ1-3)
CASSLSERNTIYF

SEQ ID NO: 613545 - protein, 18 aa, Homo sapiens
  CDR3 for alpha chain variable domain of TCR clone 306773 (TRAV9-2, TRAJ52)
CALSRHNAGGTSYGKLTS

SEQ ID NO: 613546 - protein, 16 aa, Homo sapiens
  CDR3 for beta chain variable domain of TCR clone 306773 (TRBV19, TRBJ2-1)
CASSKAGPSSYNEQFF

SEQ ID NO: 613547 - protein, 12 aa, Homo sapiens
  CDR3 for alpha chain variable domain of TCR clone 306774 (TRAV1-1, TRAJ39)
CAVPVVGNMLTF

SEQ ID NO: 613548 - protein, 16 aa, Homo sapiens
  CDR3 for beta chain variable domain of TCR clone 306774 (TRBV11-1, TRBJ2-2)
CASSAEGLKNTGELFF

SEQ ID NO: 613549 - protein, 12 aa, Homo sapiens
  CDR3 for alpha chain variable domain of TCR clone 306775 (TRAV21, TRAJ31)
CAVRGNNARLMF

SEQ ID NO: 613550 - protein, 16 aa, Homo sapiens
  CDR3 for beta chain variable domain of TCR clone 306775 (TRBV6-1, TRBJ2-5)
CASSETLDRGAETQYF

SEQ ID NO: 613551 - protein, 15 aa, Homo sapiens
  CDR3 for alpha chain variable domain of TCR clone 306776 (TRAV2, TRAJ32)
CAVANYGGATNKLIF

SEQ ID NO: 613552 - protein, 15 aa, Homo sapiens
  CDR3 for beta chain variable domain of TCR clone 306776 (TRBV7-7, TRBJ2-5)
RASSQLERAEETQYF

SEQ ID NO: 613553 - protein, 13 aa, Homo sapiens
  CDR3 for alpha chain variable domain of TCR clone 306777 (TRAV2, TRAJ15)
CAVASQAGTALIF

SEQ ID NO: 613554 - protein, 13 aa, Homo sapiens
  CDR3 for beta chain variable domain of TCR clone 306777 (TRBV20-1, TRBJ1-1)
RSAPLGGGTEAFF

SEQ ID NO: 613555 - protein, 15 aa, Homo sapiens
  CDR3 for alpha chain variable domain of TCR clone 306778 (TRAV26-2, TRAJ13)
CILRDLSGGYQKVTF

SEQ ID NO: 613556 - protein, 14 aa, Homo sapiens
  CDR3 for beta chain variable domain of TCR clone 306778 (TRBV4-1, TRBJ2-3)
CASSQGGSADTQYF

SEQ ID NO: 613557 - protein, 14 aa, Homo sapiens
  CDR3 for alpha chain variable domain of TCR clone 306779 (TRAV17, TRAJ57)
CATDPQGGSEKLVF

SEQ ID NO: 613558 - protein, 14 aa, Homo sapiens
  CDR3 for beta chain variable domain of TCR clone 306779 (TRBV4-3, TRBJ1-1)
CASSQGWTPARAFF

SEQ ID NO: 613559 - protein, 13 aa, Homo sapiens
  CDR3 for alpha chain variable domain of TCR clone 306780 (TRAV13-1, TRAJ6)
CAASKGGSYIPTF

SEQ ID NO: 613560 - protein, 14 aa, Homo sapiens
  CDR3 for beta chain variable domain of TCR clone 306780 (TRBV7-2, TRBJ2-1)
CDSSLGVGYNEQFF

SEQ ID NO: 613561 - protein, 15 aa, Homo sapiens
  CDR3 for alpha chain variable domain of TCR clone 306781 (TRAV4, TRAJ39)
CLVGPNNNAGNMLTF

SEQ ID NO: 613562 - protein, 15 aa, Homo sapiens
  CDR3 for beta chain variable domain of TCR clone 306781 (TRBV28, TRBJ1-3)
CASSMGWASGNTIYF

SEQ ID NO: 613563 - protein, 14 aa, Homo sapiens
  CDR3 for alpha chain variable domain of TCR clone 306782 (TRAV1-2, TRAJ16)
CAVNRFSDGQKLLF

SEQ ID NO: 613564 - protein, 12 aa, Homo sapiens
  CDR3 for beta chain variable domain of TCR clone 306782 (TRBV7-6, TRBJ2-7)
CASSLADSEQYY

SEQ ID NO: 613565 - protein, 12 aa, Homo sapiens
  CDR3 for alpha chain variable domain of TCR clone 306783 (TRAV1-2, TRAJ9)
CAGYTGGFKTIF

SEQ ID NO: 613566 - protein, 15 aa, Homo sapiens
  CDR3 for beta chain variable domain of TCR clone 306783 (TRBV11-2, TRBJ2-1)
CASSPAGQSLNERFF

SEQ ID NO: 613567 - protein, 17 aa, Homo sapiens
  CDR3 for alpha chain variable domain of TCR clone 306784 (TRAV26-1, TRAJ37)
CIVRVITVSSNTGKLIF

SEQ ID NO: 613568 - protein, 13 aa, Homo sapiens
  CDR3 for beta chain variable domain of TCR clone 306784 (TRBV2, TRBJ2-7)
CASSVGGSGVQYF

SEQ ID NO: 613569 - protein, 14 aa, Homo sapiens
  CDR3 for alpha chain variable domain of TCR clone 306785 (TRAV38-1, TRAJ54)
CAFMPPSGAQKLVF

SEQ ID NO: 613570 - protein, 16 aa, Homo sapiens
  CDR3 for beta chain variable domain of TCR clone 306785 (TRBV28, TRBJ2-1)
CASSLGGSGSYNEQFF

SEQ ID NO: 613571 - protein, 14 aa, Homo sapiens
  CDR3 for alpha chain variable domain of TCR clone 306786 (TRAV16, TRAJ33)
CALSAMDSNYQLIW

SEQ ID NO: 613572 - protein, 12 aa, Homo sapiens
  CDR3 for beta chain variable domain of TCR clone 306786 (TRBV7-9, TRBJ2-7)
CASSIKREEQYF

SEQ ID NO: 613573 - protein, 13 aa, Homo sapiens
  CDR3 for alpha chain variable domain of TCR clone 306787 (TRAV12-1, TRAJ40)
CVVPTSGTYKYIS

SEQ ID NO: 613574 - protein, 16 aa, Homo sapiens
  CDR3 for beta chain variable domain of TCR clone 306787 (TRBV7-9, TRBJ1-2)
CASSLGFSSGEDGYTF

SEQ ID NO: 613575 - protein, 15 aa, Homo sapiens
  CDR3 for alpha chain variable domain of TCR clone 306788 (TRAV3, TRAJ32)
CAVSSYGGATNKLIF

SEQ ID NO: 613576 - protein, 14 aa, Homo sapiens
  CDR3 for beta chain variable domain of TCR clone 306788 (TRBV5-1, TRBJ2-7)
CASSRGESLYEQYF

SEQ ID NO: 613577 - protein, 13 aa, Homo sapiens
  CDR3 for alpha chain variable domain of TCR clone 306789 (TRAV13-2, TRAJ48)
CAEMDFGNEKLTF

SEQ ID NO: 613578 - protein, 15 aa, Homo sapiens
  CDR3 for beta chain variable domain of TCR clone 306789 (TRBV15, TRBJ2-1)
CATSRPGQGLHEQFF

SEQ ID NO: 613579 - protein, 13 aa, Homo sapiens
  CDR3 for alpha chain variable domain of TCR clone 306790 (TRAV8-3, TRAJ34)
CAVGGGNTDKLIF

SEQ ID NO: 613580 - protein, 17 aa, Homo sapiens
  CDR3 for beta chain variable domain of TCR clone 306790 (TRBV11-2, TRBJ2-1)
CASSLYPPGVEYNEQFF

SEQ ID NO: 613581 - protein, 16 aa, Homo sapiens
  CDR3 for alpha chain variable domain of TCR clone 306791 (TRAV30, TRAJ24)
CGTEIVDADSWGKFQF

SEQ ID NO: 613582 - protein, 14 aa, Homo sapiens
  CDR3 for beta chain variable domain of TCR clone 306791 (TRBV11-3, TRBJ2-7)
CASSLGVGDYEQYF

SEQ ID NO: 613583 - protein, 13 aa, Homo sapiens
  CDR3 for alpha chain variable domain of TCR clone 306792 (TRAV29/DV5, TRAJ29)
CAASAAGNTPLVC

SEQ ID NO: 613584 - protein, 16 aa, Homo sapiens
  CDR3 for beta chain variable domain of TCR clone 306792 (TRBV12-4, TRBJ2-5)
CASSFFVRGRQETQYF

SEQ ID NO: 613585 - protein, 16 aa, Homo sapiens
  CDR3 for alpha chain variable domain of TCR clone 306793 (TRAV12-3, TRAJ53)
CAMSPGSGGSNYKLTF

SEQ ID NO: 613586 - protein, 13 aa, Homo sapiens
  CDR3 for beta chain variable domain of TCR clone 306793 (TRBV19, TRBJ2-5)
CASSIHSQETQYF

SEQ ID NO: 613587 - protein, 12 aa, Homo sapiens
  CDR3 for alpha chain variable domain of TCR clone 306794 (TRAV8-6, TRAJ11)
CAVSSGYSTLTF

SEQ ID NO: 613588 - protein, 14 aa, Homo sapiens
  CDR3 for beta chain variable domain of TCR clone 306794 (TRBV19, TRBJ2-1)
CASPTFVLSGEQFF

SEQ ID NO: 613589 - protein, 12 aa, Homo sapiens
  CDR3 for alpha chain variable domain of TCR clone 306795 (TRAV13-1, TRAJ49)
CAASIWGNQFYF

SEQ ID NO: 613590 - protein, 14 aa, Homo sapiens
  CDR3 for beta chain variable domain of TCR clone 306795 (TRBV12-4, TRBJ2-3)
CASSLEAGTDTQYF

SEQ ID NO: 613591 - protein, 14 aa, Homo sapiens
  CDR3 for alpha chain variable domain of TCR clone 306796 (TRAV12-2, TRAJ13)
CAVKKTGGYRKITF

SEQ ID NO: 613592 - protein, 15 aa, Homo sapiens
  CDR3 for beta chain variable domain of TCR clone 306796 (TRBV27, TRBJ2-1)
CASSNGGGSSNEQFF

SEQ ID NO: 613593 - protein, 12 aa, Homo sapiens
  CDR3 for alpha chain variable domain of TCR clone 306797 (TRAV20, TRAJ33)
CAVRGSNYKLIW

SEQ ID NO: 613594 - protein, 13 aa, Homo sapiens
  CDR3 for beta chain variable domain of TCR clone 306797 (TRBV4-3, TRBJ1-1)
CASSPTGNTEAFF

SEQ ID NO: 613595 - protein, 13 aa, Homo sapiens
  CDR3 for alpha chain variable domain of TCR clone 306798 (TRAV1-2, TRAJ11)
CAVRDSGYSTLTF

SEQ ID NO: 613596 - protein, 16 aa, Homo sapiens
  CDR3 for beta chain variable domain of TCR clone 306798 (TRBV4-2, TRBJ2-3)
CASSQELAGDTDTQYF

SEQ ID NO: 613597 - protein, 14 aa, Homo sapiens
  CDR3 for alpha chain variable domain of TCR clone 306799 (TRAV3, TRAJ28)
CAVRRGAGSYKLTF

SEQ ID NO: 613598 - protein, 16 aa, Homo sapiens
  CDR3 for beta chain variable domain of TCR clone 306799 (TRBV4-1, TRBJ2-7)
CASSQEWTSGPLEQYF

SEQ ID NO: 613599 - protein, 12 aa, Homo sapiens
  CDR3 for alpha chain variable domain of TCR clone 306800 (TRAV35, TRAJ49)
CAGWNTGNQFYF

SEQ ID NO: 613600 - protein, 16 aa, Homo sapiens
  CDR3 for beta chain variable domain of TCR clone 306800 (TRBV5-1, TRBJ2-2)
YASSLWDTTNTGELFF

SEQ ID NO: 613601 - protein, 17 aa, Homo sapiens
  CDR3 for alpha chain variable domain of TCR clone 306801 (TRAV13-1, TRAJ28)
CAASTPYSGVGSYQLTF

SEQ ID NO: 613602 - protein, 14 aa, Homo sapiens
  CDR3 for beta chain variable domain of TCR clone 306801 (TRBV7-2, TRBJ2-7)
CASSPKTSFYEQYF

SEQ ID NO: 613603 - protein, 15 aa, Homo sapiens
  CDR3 for alpha chain variable domain of TCR clone 306802 (TRAV12-1, TRAJ6)
CVVNCPLRRKLHTYI

SEQ ID NO: 613604 - protein, 12 aa, Homo sapiens
  CDR3 for beta chain variable domain of TCR clone 306802 (TRBV19, TRBJ2-1)
CASSRQGAEQFF

SEQ ID NO: 613605 - protein, 13 aa, Homo sapiens
  CDR3 for alpha chain variable domain of TCR clone 306803 (TRAV17, TRAJ29)
CATDAFRKHTSCL

SEQ ID NO: 613606 - protein, 13 aa, Homo sapiens
  CDR3 for beta chain variable domain of TCR clone 306803 (TRBV5-7, TRBJ2-6)
CASTSSGANVLTV

SEQ ID NO: 613607 - protein, 10 aa, Homo sapiens
  CDR3 for alpha chain variable domain of TCR clone 306804 (TRAV12-3, TRAJ49)
CAMNDDQFYF

SEQ ID NO: 613608 - protein, 16 aa, Homo sapiens
  CDR3 for beta chain variable domain of TCR clone 306804 (TRBV28, TRBJ2-5)
CASSFSPAGGWETQYF

SEQ ID NO: 613609 - protein, 16 aa, Homo sapiens
  CDR3 for alpha chain variable domain of TCR clone 306805 (TRAV3, TRAJ37)
CAVRPHGPGNTGKLIF

SEQ ID NO: 613610 - protein, 13 aa, Homo sapiens
  CDR3 for beta chain variable domain of TCR clone 306805 (TRBV7-9, TRBJ2-4)
CATEGLAGNIQYF

SEQ ID NO: 613611 - protein, 16 aa, Homo sapiens
  CDR3 for alpha chain variable domain of TCR clone 306806 (TRAV12-3, TRAJ53)
CAVSPGSGGSNYKLTF

SEQ ID NO: 613612 - protein, 11 aa, Homo sapiens
  CDR3 for beta chain variable domain of TCR clone 306806 (TRBV29-1, TRBJ2-5)
CSEDRTGTKYF

SEQ ID NO: 613613 - protein, 18 aa, Homo sapiens
  CDR3 for alpha chain variable domain of TCR clone 306807 (TRAV21, TRAJ52)
CAVRPSPAGGTSYGKLTF

SEQ ID NO: 613614 - protein, 16 aa, Homo sapiens
  CDR3 for beta chain variable domain of TCR clone 306807 (TRBV7-3, TRBJ2-1)
CASSLEGYRSHNEQFF

SEQ ID NO: 613615 - protein, 10 aa, Homo sapiens
  CDR3 for alpha chain variable domain of TCR clone 306808 (TRAV26-1, TRAJ22)
CIVSLNFFWF

SEQ ID NO: 613616 - protein, 15 aa, Homo sapiens
  CDR3 for beta chain variable domain of TCR clone 306808 (TRBV4-2, TRBJ1-2)
CASSQRTGGRDGYTY

SEQ ID NO: 613617 - protein, 14 aa, Homo sapiens
  CDR3 for alpha chain variable domain of TCR clone 306809 (TRAV9-2, TRAJ39)
CALYIYNAGNMLTF

SEQ ID NO: 613618 - protein, 16 aa, Homo sapiens
  CDR3 for beta chain variable domain of TCR clone 306809 (TRBV7-9, TRBJ2-3)
CASSPWREVGTDTQYF

SEQ ID NO: 613619 - protein, 13 aa, Homo sapiens
  CDR3 for alpha chain variable domain of TCR clone 306810 (TRAV3, TRAJ15)
CAVRDQAGTALIF

SEQ ID NO: 613620 - protein, 13 aa, Homo sapiens
  CDR3 for beta chain variable domain of TCR clone 306810 (TRBV27, TRBJ2-7)
CASSFGDSHEQYF

SEQ ID NO: 613621 - protein, 16 aa, Homo sapiens
  CDR3 for alpha chain variable domain of TCR clone 306811 (TRAV38-1, TRAJ56)
CAFMNRQTGANSKLTF

SEQ ID NO: 613622 - protein, 15 aa, Homo sapiens
  CDR3 for beta chain variable domain of TCR clone 306811 (TRBV20-1, TRBJ2-7)
CSARDRVSGMDEQYF

SEQ ID NO: 613623 - protein, 15 aa, Homo sapiens
  CDR3 for alpha chain variable domain of TCR clone 306812 (TRAV17, TRAJ16)
CATALRFSDGQKLLF

SEQ ID NO: 613624 - protein, 13 aa, Homo sapiens
  CDR3 for beta chain variable domain of TCR clone 306812 (TRBV9, TRBJ2-7)
CASSVAEYYEQYF

SEQ ID NO: 613625 - protein, 14 aa, Homo sapiens
  CDR3 for alpha chain variable domain of TCR clone 306813 (TRAV1-2, TRAJ8)
CAVREDTGFQKLVF

SEQ ID NO: 613626 - protein, 14 aa, Homo sapiens
  CDR3 for beta chain variable domain of TCR clone 306813 (TRBV11-2, TRBJ2-7)
RASSSTGEGYEQYF

SEQ ID NO: 613627 - protein, 14 aa, Homo sapiens
  CDR3 for alpha chain variable domain of TCR clone 306814 (TRAV13-1, TRAJ40)
CAASMTSGTYKYIF

SEQ ID NO: 613628 - protein, 16 aa, Homo sapiens
  CDR3 for beta chain variable domain of TCR clone 306814 (TRBV25-1, TRBJ1-1)
CASSGDRDRGRIEAFF

SEQ ID NO: 613629 - protein, 17 aa, Homo sapiens
  CDR3 for alpha chain variable domain of TCR clone 306815 (TRAV23/DV6, TRAJ58)
CAARLLRGETSGSRLTF

SEQ ID NO: 613630 - protein, 14 aa, Homo sapiens
  CDR3 for beta chain variable domain of TCR clone 306815 (TRBV11-2, TRBJ2-3)
CASSLDGTTDTQYF

SEQ ID NO: 613631 - protein, 14 aa, Homo sapiens
  CDR3 for alpha chain variable domain of TCR clone 306816 (TRAV20, TRAJ10)
CGVRVEGGGNKLTF

SEQ ID NO: 613632 - protein, 18 aa, Homo sapiens
  CDR3 for beta chain variable domain of TCR clone 306816 (TRBV24-1, TRBJ2-1)
CATSDLMFLGRGVHEQFF

SEQ ID NO: 613633 - protein, 13 aa, Homo sapiens
  CDR3 for alpha chain variable domain of TCR clone 306817 (TRAV3, TRAJ27)
CAVRLLGAGKSTF

SEQ ID NO: 613634 - protein, 17 aa, Homo sapiens
  CDR3 for beta chain variable domain of TCR clone 306817 (TRBV13, TRBJ2-3)
CASSLSRVAGGGNTQYF

SEQ ID NO: 613635 - protein, 13 aa, Homo sapiens
  CDR3 for alpha chain variable domain of TCR clone 306818 (TRAV21, TRAJ27)
CAARPGNAGKSTF

SEQ ID NO: 613636 - protein, 14 aa, Homo sapiens
  CDR3 for beta chain variable domain of TCR clone 306818 (TRBV7-2, TRBJ2-7)
CASSLHPGRYEQYF

SEQ ID NO: 613637 - protein, 17 aa, Homo sapiens
  CDR3 for alpha chain variable domain of TCR clone 306819 (TRAV26-1, TRAJ53)
CIVRVDDSGGSNYKLTF

SEQ ID NO: 613638 - protein, 14 aa, Homo sapiens
  CDR3 for beta chain variable domain of TCR clone 306819 (TRBV11-2, TRBJ2-3)
CASSRLARTDTQYF

SEQ ID NO: 613639 - protein, 13 aa, Homo sapiens
  CDR3 for alpha chain variable domain of TCR clone 306820 (TRAV2, TRAJ29)
CAAQNSGNTPLVF

SEQ ID NO: 613640 - protein, 14 aa, Homo sapiens
  CDR3 for beta chain variable domain of TCR clone 306820 (TRBV7-9, TRBJ2-4)
CASSLAMGGNIQYF

SEQ ID NO: 613641 - protein, 17 aa, Homo sapiens
  CDR3 for alpha chain variable domain of TCR clone 306821 (TRAV3, TRAJ6)
CAVRDGPRAGGSYIPTF

SEQ ID NO: 613642 - protein, 20 aa, Homo sapiens
  CDR3 for beta chain variable domain of TCR clone 306821 (TRBV28, TRBJ2-1)
CASTPIGRLPGLAGGNEQFF

SEQ ID NO: 613643 - protein, 14 aa, Homo sapiens
  CDR3 for alpha chain variable domain of TCR clone 306822 (TRAV1-2, TRAJ6)
CAVSLSGGSYIPPL

SEQ ID NO: 613644 - protein, 15 aa, Homo sapiens
  CDR3 for beta chain variable domain of TCR clone 306822 (TRBV28, TRBJ2-7)
CASSPGGRGFYEQYF

SEQ ID NO: 613645 - protein, 13 aa, Homo sapiens
  CDR3 for alpha chain variable domain of TCR clone 306823 (TRAV26-1, TRAJ34)
CIVTPWITDKLIF

SEQ ID NO: 613646 - protein, 13 aa, Homo sapiens
  CDR3 for beta chain variable domain of TCR clone 306823 (TRBV5-1, TRBJ2-1)
CASSLGSYNEQFF

SEQ ID NO: 613647 - protein, 12 aa, Homo sapiens
  CDR3 for alpha chain variable domain of TCR clone 306824 (TRAV13-1, TRAJ27)
CAAHTNAGKSTF

SEQ ID NO: 613648 - protein, 14 aa, Homo sapiens
  CDR3 for beta chain variable domain of TCR clone 306824 (TRBV19, TRBJ2-2)
CASSGQRIAGELFF

SEQ ID NO: 613649 - protein, 12 aa, Homo sapiens
  CDR3 for alpha chain variable domain of TCR clone 306825 (TRAV1-1, TRAJ39)
CAVPVVGNTLTF

SEQ ID NO: 613650 - protein, 15 aa, Homo sapiens
  CDR3 for beta chain variable domain of TCR clone 306825 (TRBV19, TRBJ1-6)
CASSTQGAVGSPLHF

SEQ ID NO: 613651 - protein, 13 aa, Homo sapiens
  CDR3 for alpha chain variable domain of TCR clone 306826 (TRAV27, TRAJ37)
CAGGPSNTGKPIF

SEQ ID NO: 613652 - protein, 14 aa, Homo sapiens
  CDR3 for beta chain variable domain of TCR clone 306826 (TRBV4-2, TRBJ2-1)
CASGLDRAYNEQFF

SEQ ID NO: 613653 - protein, 14 aa, Homo sapiens
  CDR3 for alpha chain variable domain of TCR clone 306827 (TRAV26-1, TRAJ38)
CIADNAGNNRKLIL

SEQ ID NO: 613654 - protein, 17 aa, Homo sapiens
  CDR3 for beta chain variable domain of TCR clone 306827 (TRBV20-1, TRBJ2-2)
CSASGSGQGGLTGELFF

SEQ ID NO: 613655 - protein, 13 aa, Homo sapiens
  CDR3 for alpha chain variable domain of TCR clone 306828 (TRAV12-3, TRAJ5)
CAMIYTGRRALTF

SEQ ID NO: 613656 - protein, 16 aa, Homo sapiens
  CDR3 for beta chain variable domain of TCR clone 306828 (TRBV12-5, TRBJ2-5)
CASGPRTSGNQETQYF

SEQ ID NO: 613657 - protein, 13 aa, Homo sapiens
  CDR3 for alpha chain variable domain of TCR clone 306829 (TRAV36/DV7, TRAJ33)
CAVDMDSNNQLIW

SEQ ID NO: 613658 - protein, 16 aa, Homo sapiens
  CDR3 for beta chain variable domain of TCR clone 306829 (TRBV15, TRBJ2-3)
CATRLSGGRAPDTQYF

SEQ ID NO: 613659 - protein, 12 aa, Homo sapiens
  CDR3 for alpha chain variable domain of TCR clone 306830 (TRAV1-1, TRAJ39)
CAVPVVGNMLTF

SEQ ID NO: 613660 - protein, 13 aa, Homo sapiens
  CDR3 for beta chain variable domain of TCR clone 306830 (TRBV19, TRBJ2-1)
CASSTGDRMSSSS

SEQ ID NO: 613661 - protein, 10 aa, Homo sapiens
  CDR3 for alpha chain variable domain of TCR clone 306831 (TRAV26-1, TRAJ40)
CIAGTYKYIF

SEQ ID NO: 613662 - protein, 15 aa, Homo sapiens
  CDR3 for beta chain variable domain of TCR clone 306831 (TRBV19, TRBJ2-1)
CSSSSPGVPLDEQFF

SEQ ID NO: 613663 - protein, 17 aa, Homo sapiens
  CDR3 for alpha chain variable domain of TCR clone 306832 (TRAV13-1, TRAJ52)
CAASSGAGGTSYGKLTF

SEQ ID NO: 613664 - protein, 20 aa, Homo sapiens
  CDR3 for beta chain variable domain of TCR clone 306832 (TRBV4-3, TRBJ2-3)
CASSPRVEMRASGRPDTQYF

SEQ ID NO: 613665 - protein, 12 aa, Homo sapiens
  CDR3 for alpha chain variable domain of TCR clone 306833 (TRAV13-2, TRAJ32)
RVYGGATNKLIF

SEQ ID NO: 613666 - protein, 15 aa, Homo sapiens
  CDR3 for beta chain variable domain of TCR clone 306833 (TRBV7-9, TRBJ1-5)
CASSQGHQPNQPQHF

SEQ ID NO: 613667 - protein, 10 aa, Homo sapiens
  CDR3 for alpha chain variable domain of TCR clone 306834 (TRAV17, TRAJ52)
SATNYGKLTF

SEQ ID NO: 613668 - protein, 13 aa, Homo sapiens
  CDR3 for beta chain variable domain of TCR clone 306834 (TRBV29-1, TRBJ2-5)
SAASGGLAQRQYF

SEQ ID NO: 613669 - protein, 16 aa, Homo sapiens
  CDR3 for alpha chain variable domain of TCR clone 306835 (TRAV30, TRAJ24)
CVTEIMDADSWGKFQF

SEQ ID NO: 613670 - protein, 14 aa, Homo sapiens
  CDR3 for beta chain variable domain of TCR clone 306835 (TRBV12-5, TRBJ2-5)
CASGSRTHQETQYF

SEQ ID NO: 613671 - protein, 11 aa, Homo sapiens
  CDR3 for alpha chain variable domain of TCR clone 306836 (TRAV12-1, TRAJ43)
CVEYDNNDMRF

SEQ ID NO: 613672 - protein, 16 aa, Homo sapiens
  CDR3 for beta chain variable domain of TCR clone 306836 (TRBV12-5, TRBJ2-5)
CASGPRTSGNQETQYF

SEQ ID NO: 613673 - protein, 14 aa, Homo sapiens
  CDR3 for alpha chain variable domain of TCR clone 306837 (TRAV26-2, TRAJ27)
CILRDISDAGKSTL

SEQ ID NO: 613674 - protein, 15 aa, Homo sapiens
  CDR3 for beta chain variable domain of TCR clone 306837 (TRBV10-3, TRBJ2-7)
CATREQGLRSYEQYF

SEQ ID NO: 613675 - protein, 14 aa, Homo sapiens
  CDR3 for alpha chain variable domain of TCR clone 306838 (TRAV8-3, TRAJ23)
CVVIIYNQGGKLIF

SEQ ID NO: 613676 - protein, 15 aa, Homo sapiens
  CDR3 for beta chain variable domain of TCR clone 306838 (TRBV18, TRBJ2-1)
CASSPPSASYNEQFF

SEQ ID NO: 613677 - protein, 12 aa, Homo sapiens
  CDR3 for alpha chain variable domain of TCR clone 306839 (TRAV17, TRAJ20)
CATRSNDYKLSF

SEQ ID NO: 613678 - protein, 13 aa, Homo sapiens
  CDR3 for beta chain variable domain of TCR clone 306839 (TRBV10-3, TRBJ1-1)
CAIIPEGGTEAFF

SEQ ID NO: 613679 - protein, 11 aa, Homo sapiens
  CDR3 for alpha chain variable domain of TCR clone 306840 (TRAV8-4, TRAJ34)
FAVSWTYKLIF

SEQ ID NO: 613680 - protein, 14 aa, Homo sapiens
  CDR3 for beta chain variable domain of TCR clone 306840 (TRBV7-9, TRBJ2-3)
CASSLEDGTDTQYF

SEQ ID NO: 613681 - protein, 13 aa, Homo sapiens
  CDR3 for alpha chain variable domain of TCR clone 306841 (TRAV21, TRAJ33)
RAVAGDSNYQLIW

SEQ ID NO: 613682 - protein, 13 aa, Homo sapiens
  CDR3 for beta chain variable domain of TCR clone 306841 (TRBV10-3, TRBJ2-7)
CASKLAVNYEQYF

SEQ ID NO: 613683 - protein, 16 aa, Homo sapiens
  CDR3 for alpha chain variable domain of TCR clone 306842 (TRAV12-3, TRAJ4)
CAMTRLVSGGYNKLIF

SEQ ID NO: 613684 - protein, 16 aa, Homo sapiens
  CDR3 for beta chain variable domain of TCR clone 306842 (TRBV27, TRBJ2-1)
CASSARLAGVYNEQFF

SEQ ID NO: 613685 - protein, 17 aa, Homo sapiens
  CDR3 for alpha chain variable domain of TCR clone 306843 (TRAV13-1, TRAJ52)
CAAGRNAGGTSYGKLTF

SEQ ID NO: 613686 - protein, 14 aa, Homo sapiens
  CDR3 for beta chain variable domain of TCR clone 306843 (TRBV12-5, TRBJ2-5)
CASGSRTHQETQYF

SEQ ID NO: 613687 - protein, 12 aa, Homo sapiens
  CDR3 for alpha chain variable domain of TCR clone 306844 (TRAV12-2, TRAJ31)
CAVNTPDARLMF

SEQ ID NO: 613688 - protein, 17 aa, Homo sapiens
  CDR3 for beta chain variable domain of TCR clone 306844 (TRBV20-1, TRBJ1-6)
CSARGGYTFSYNSTLHF

SEQ ID NO: 613689 - protein, 17 aa, Homo sapiens
  CDR3 for alpha chain variable domain of TCR clone 306845 (TRAV26-1, TRAJ53)
CIVRVDDSGGSNYKLTF

SEQ ID NO: 613690 - protein, 11 aa, Homo sapiens
  CDR3 for beta chain variable domain of TCR clone 306845 (TRBV7-8, TRBJ2-7)
CASSLSLEQYF

SEQ ID NO: 613691 - protein, 15 aa, Homo sapiens
  CDR3 for alpha chain variable domain of TCR clone 306846 (TRAV4, TRAJ39)
CLVGPNNNAGNMLTF

SEQ ID NO: 613692 - protein, 15 aa, Homo sapiens
  CDR3 for beta chain variable domain of TCR clone 306846 (TRBV7-9, TRBJ1-4)
CASSRTGGFNEKLFF

SEQ ID NO: 613693 - protein, 12 aa, Homo sapiens
  CDR3 for alpha chain variable domain of TCR clone 306847 (TRAV16, TRAJ10)
CSRTGGGNKLTF

SEQ ID NO: 613694 - protein, 15 aa, Homo sapiens
  CDR3 for beta chain variable domain of TCR clone 306847 (TRBV7-6, TRBJ1-5)
CASSQSSGINQPQHF

SEQ ID NO: 613695 - protein, 12 aa, Homo sapiens
  CDR3 for alpha chain variable domain of TCR clone 306848 (TRAV1-1, TRAJ8)
CAGGTGCQKLVF

SEQ ID NO: 613696 - protein, 16 aa, Homo sapiens
  CDR3 for beta chain variable domain of TCR clone 306848 (TRBV12-5, TRBJ2-5)
CASGPRTSGNQETQYF

SEQ ID NO: 613697 - protein, 12 aa, Homo sapiens
  CDR3 for alpha chain variable domain of TCR clone 306849 (TRAV41, TRAJ58)
RAVETSGSRLTF

SEQ ID NO: 613698 - protein, 15 aa, Homo sapiens
  CDR3 for beta chain variable domain of TCR clone 306849 (TRBV29-1, TRBJ2-6)
CSVGDRGSGANVLTF

SEQ ID NO: 613699 - protein, 11 aa, Homo sapiens
  CDR3 for alpha chain variable domain of TCR clone 306850 (TRAV21, TRAJ34)
CAHYNTDKLIF

SEQ ID NO: 613700 - protein, 11 aa, Homo sapiens
  CDR3 for beta chain variable domain of TCR clone 306850 (TRBV29-1, TRBJ2-5)
CGEDRTGTQYF

SEQ ID NO: 613701 - protein, 11 aa, Homo sapiens
  CDR3 for alpha chain variable domain of TCR clone 306851 (TRAV1-2, TRAJ20)
CGVANDYKLSF

SEQ ID NO: 613702 - protein, 13 aa, Homo sapiens
  CDR3 for beta chain variable domain of TCR clone 306851 (TRBV12-5, TRBJ2-3)
CASQNRGTDTQYF

SEQ ID NO: 613703 - protein, 14 aa, Homo sapiens
  CDR3 for alpha chain variable domain of TCR clone 306852 (TRAV35, TRAJ33)
CAGSSQDSNYQLIW

SEQ ID NO: 613704 - protein, 13 aa, Homo sapiens
  CDR3 for beta chain variable domain of TCR clone 306852 (TRBV7-3, TRBJ1-1)
CASSLDWGAEAFF

SEQ ID NO: 613705 - protein, 13 aa, Homo sapiens
  CDR3 for alpha chain variable domain of TCR clone 306853 (TRAV27, TRAJ45)
CRSSGGGADGLTF

SEQ ID NO: 613706 - protein, 13 aa, Homo sapiens
  CDR3 for beta chain variable domain of TCR clone 306853 (TRBV27, TRBJ2-1)
CASRTLGVGEQFF

SEQ ID NO: 613707 - protein, 13 aa, Homo sapiens
  CDR3 for alpha chain variable domain of TCR clone 306854 (TRAV30, TRAJ6)
CGFIEGGSYIPTF

SEQ ID NO: 613708 - protein, 13 aa, Homo sapiens
  CDR3 for beta chain variable domain of TCR clone 306854 (TRBV5-4, TRBJ2-5)
CASGPVYQETQYF

SEQ ID NO: 613709 - protein, 14 aa, Homo sapiens
  CDR3 for alpha chain variable domain of TCR clone 306855 (TRAV27, TRAJ13)
CRSSNSGGYQKVTF

SEQ ID NO: 613710 - protein, 16 aa, Homo sapiens
  CDR3 for beta chain variable domain of TCR clone 306855 (TRBV7-6, TRBJ2-1)
CIAVPAAWGGAHEQFF

SEQ ID NO: 613711 - protein, 17 aa, Homo sapiens
  CDR3 for alpha chain variable domain of TCR clone 306856 (TRAV26-1, TRAJ53)
CIVRVDDSGGSNYKLTF

SEQ ID NO: 613712 - protein, 15 aa, Homo sapiens
  CDR3 for beta chain variable domain of TCR clone 306856 (TRBV20-1, TRBJ2-7)
CSARDRVTGMDEQYF

SEQ ID NO: 613713 - protein, 14 aa, Homo sapiens
  CDR3 for alpha chain variable domain of TCR clone 306857 (TRAV4, TRAJ20)
CLVGDFINDYKLSF

SEQ ID NO: 613714 - protein, 18 aa, Homo sapiens
  CDR3 for beta chain variable domain of TCR clone 306857 (TRBV25-1, TRBJ1-2)
CASSGLQNGQGLIFGYTF

SEQ ID NO: 613715 - protein, 12 aa, Homo sapiens
  CDR3 for alpha chain variable domain of TCR clone 306858 (TRAV12-3, TRAJ17)
CAMTLTGNKLTF

SEQ ID NO: 613716 - protein, 13 aa, Homo sapiens
  CDR3 for beta chain variable domain of TCR clone 306858 (TRBV27, TRBJ2-1)
CASRTLRVGEQFF

SEQ ID NO: 613717 - protein, 22 aa, Homo sapiens
  CDR3 for alpha chain variable domain of TCR clone 306859 (TRAV27, TRAJ38)
CAGRFNAGNNHIQNPDPAVYQL

SEQ ID NO: 613718 - protein, 15 aa, Homo sapiens
  CDR3 for beta chain variable domain of TCR clone 306859 (TRBV20-1, TRBJ1-1)
CSARGGGTLKLSLDK

SEQ ID NO: 613719 - protein, 11 aa, Homo sapiens
  CDR3 for alpha chain variable domain of TCR clone 306860 (TRAV12-1, TRAJ30)
CVVNGKDKIIF

SEQ ID NO: 613720 - protein, 15 aa, Homo sapiens
  CDR3 for beta chain variable domain of TCR clone 306860 (TRBV28, TRBJ2-5)
CASSSGRTIQGTQYF

SEQ ID NO: 613721 - protein, 14 aa, Homo sapiens
  CDR3 for alpha chain variable domain of TCR clone 306861 (TRAV8-6, TRAJ11)
CAVSDPSGYSTLTF

SEQ ID NO: 613722 - protein, 16 aa, Homo sapiens
  CDR3 for beta chain variable domain of TCR clone 306861 (TRBV19, TRBJ2-2)
CASRSPGTGATGELFF

SEQ ID NO: 613723 - protein, 15 aa, Homo sapiens
  CDR3 for alpha chain variable domain of TCR clone 306862 (TRAV8-4, TRAJ6)
CAVTHASGGSSIPTF

SEQ ID NO: 613724 - protein, 15 aa, Homo sapiens
  CDR3 for beta chain variable domain of TCR clone 306862 (TRBV7-2, TRBJ2-3)
CASSLNGGGTDTQYF

SEQ ID NO: 613725 - protein, 12 aa, Homo sapiens
  CDR3 for alpha chain variable domain of TCR clone 306863 (TRAV13-1, TRAJ21)
CAAKEGFNKFYF

SEQ ID NO: 613726 - protein, 15 aa, Homo sapiens
  CDR3 for beta chain variable domain of TCR clone 306863 (TRBV19, TRBJ1-2)
CASSVGQVLNYGYTI

SEQ ID NO: 613727 - protein, 12 aa, Homo sapiens
  CDR3 for alpha chain variable domain of TCR clone 306864 (TRAV21, TRAJ11)
CAATSGYSTLTF

SEQ ID NO: 613728 - protein, 14 aa, Homo sapiens
  CDR3 for beta chain variable domain of TCR clone 306864 (TRBV20-1, TRBJ2-7)
CSAPELAGVGVQYF

SEQ ID NO: 613729 - protein, 19 aa, Homo sapiens
  CDR3 for alpha chain variable domain of TCR clone 306865 (TRAV3, TRAJ6)
CAVRDKNPSRSGGSYIPTF

SEQ ID NO: 613730 - protein, 15 aa, Homo sapiens
  CDR3 for beta chain variable domain of TCR clone 306865 (TRBV18, TRBJ2-7)
CASSPTFMDSYEQYF

SEQ ID NO: 613731 - protein, 15 aa, Homo sapiens
  CDR3 for alpha chain variable domain of TCR clone 306866 (TRAV8-4, TRAJ52)
CAVSDGGISYGKLTF

SEQ ID NO: 613732 - protein, 12 aa, Homo sapiens
  CDR3 for beta chain variable domain of TCR clone 306866 (TRBV29-1, TRBJ2-3)
CSVTSGGDTQYF

SEQ ID NO: 613733 - protein, 15 aa, Homo sapiens
  CDR3 for alpha chain variable domain of TCR clone 306867 (TRAV3, TRAJ30)
CAVRDEYGRDDKIIF

SEQ ID NO: 613734 - protein, 16 aa, Homo sapiens
  CDR3 for beta chain variable domain of TCR clone 306867 (TRBV5-1, TRBJ2-5)
CASSVANHRGRETQYF

SEQ ID NO: 613735 - protein, 14 aa, Homo sapiens
  CDR3 for alpha chain variable domain of TCR clone 306868 (TRAV16, TRAJ33)
CALSAMDSNYQLIW

SEQ ID NO: 613736 - protein, 12 aa, Homo sapiens
  CDR3 for beta chain variable domain of TCR clone 306868 (TRBV12-4, TRBJ2-7)
CASSLGGYEQYF

SEQ ID NO: 613737 - protein, 14 aa, Homo sapiens
  CDR3 for alpha chain variable domain of TCR clone 306869 (TRAV23/DV6, TRAJ6)
CAASRSGGSYIPTF

SEQ ID NO: 613738 - protein, 14 aa, Homo sapiens
  CDR3 for beta chain variable domain of TCR clone 306869 (TRBV12-5, TRBJ2-5)
CASGSRTHQETQYF

SEQ ID NO: 613739 - protein, 15 aa, Homo sapiens
  CDR3 for alpha chain variable domain of TCR clone 306870 (TRAV35, TRAJ58)
CAGRRQETSGSRLPF

SEQ ID NO: 613740 - protein, 16 aa, Homo sapiens
  CDR3 for beta chain variable domain of TCR clone 306870 (TRBV20-1, TRBJ1-4)
CSAPGQGLLTNEKLFF

SEQ ID NO: 613741 - protein, 15 aa, Homo sapiens
  CDR3 for alpha chain variable domain of TCR clone 306871 (TRAV38-1, TRAJ37)
FAFIFGSGNTGKLIF

SEQ ID NO: 613742 - protein, 12 aa, Homo sapiens
  CDR3 for beta chain variable domain of TCR clone 306871 (TRBV7-9, TRBJ2-7)
CAISLEGYEQYF

SEQ ID NO: 613743 - protein, 11 aa, Homo sapiens
  CDR3 for alpha chain variable domain of TCR clone 306872 (TRAV21, TRAJ20)
CAVRNDYKLSF

SEQ ID NO: 613744 - protein, 17 aa, Homo sapiens
  CDR3 for beta chain variable domain of TCR clone 306872 (TRBV11-2, TRBJ2-1)
CASSLYPPGVEYNEQFF

SEQ ID NO: 613745 - protein, 23 aa, Homo sapiens
  CDR3 for alpha chain variable domain of TCR clone 306873 (TRAV12-2, TRAJ36)
SLLIRDSQPSDSATLERANNLFF

SEQ ID NO: 613746 - protein, 13 aa, Homo sapiens
  CDR3 for beta chain variable domain of TCR clone 306873 (TRBV4-2, TRBJ1-1)
CASSQAGNTEAFF

SEQ ID NO: 613747 - protein, 15 aa, Homo sapiens
  CDR3 for alpha chain variable domain of TCR clone 306874 (TRAV25, TRAJ10)
CAGPLLTGGGNKLTF

SEQ ID NO: 613748 - protein, 20 aa, Homo sapiens
  CDR3 for beta chain variable domain of TCR clone 306874 (TRBV28, TRBJ2-1)
CASTPIGRSPGLAGGNEQFF

SEQ ID NO: 613749 - protein, 12 aa, Homo sapiens
  CDR3 for alpha chain variable domain of TCR clone 306875 (TRAV25, TRAJ16)
CAGPKDGHKLLF

SEQ ID NO: 613750 - protein, 13 aa, Homo sapiens
  CDR3 for beta chain variable domain of TCR clone 306875 (TRBV3-1, TRBJ1-2)
CASSQRAPGGYTF

SEQ ID NO: 613751 - protein, 14 aa, Homo sapiens
  CDR3 for alpha chain variable domain of TCR clone 306876 (TRAV35, TRAJ24)
CAGPRRDSWGKLQF

SEQ ID NO: 613752 - protein, 12 aa, Homo sapiens
  CDR3 for beta chain variable domain of TCR clone 306876 (TRBV12-4, TRBJ2-3)
CAGSLGQDTQYF

SEQ ID NO: 613753 - protein, 12 aa, Homo sapiens
  CDR3 for alpha chain variable domain of TCR clone 306877 (TRAV12-3, TRAJ17)
CAMTLPGNKPTF

SEQ ID NO: 613754 - protein, 13 aa, Homo sapiens
  CDR3 for beta chain variable domain of TCR clone 306877 (TRBV5-1, TRBJ1-1)
CASSADWDTEAFF

SEQ ID NO: 613755 - protein, 16 aa, Homo sapiens
  CDR3 for alpha chain variable domain of TCR clone 306878 (TRAV21, TRAJ37)
CAVRTSGSSNTGKLIF

SEQ ID NO: 613756 - protein, 13 aa, Homo sapiens
  CDR3 for beta chain variable domain of TCR clone 306878 (TRBV7-9, TRBJ2-5)
CTSLPSGRETQYF

SEQ ID NO: 613757 - protein, 13 aa, Homo sapiens
  CDR3 for alpha chain variable domain of TCR clone 306879 (TRAV3, TRAJ27)
CAVRPLGAGKSTF

SEQ ID NO: 613758 - protein, 15 aa, Homo sapiens
  CDR3 for beta chain variable domain of TCR clone 306879 (TRBV19, TRBJ1-1)
CASTSGQIQNTEAFF

SEQ ID NO: 613759 - protein, 12 aa, Homo sapiens
  CDR3 for alpha chain variable domain of TCR clone 306880 (TRAV17, TRAJ16)
CATVLPGQKLPF

SEQ ID NO: 613760 - protein, 15 aa, Homo sapiens
  CDR3 for beta chain variable domain of TCR clone 306880 (TRBV6-3, TRBJ2-2)
CASSFLATLTGELFF

SEQ ID NO: 613761 - protein, 15 aa, Homo sapiens
  CDR3 for alpha chain variable domain of TCR clone 306881 (TRAV8-2, TRAJ44)
DAAEYFDGTASKLTF

SEQ ID NO: 613762 - protein, 14 aa, Homo sapiens
  CDR3 for beta chain variable domain of TCR clone 306881 (TRBV7-8, TRBJ2-3)
CASSLGRGTDTQYF

SEQ ID NO: 613763 - protein, 16 aa, Homo sapiens
  CDR3 for alpha chain variable domain of TCR clone 306882 (TRAV12-3, TRAJ53)
CAMSPGSGGSNYILTF

SEQ ID NO: 613764 - protein, 14 aa, Homo sapiens
  CDR3 for beta chain variable domain of TCR clone 306882 (TRBV7-2, TRBJ1-1)
CASSFLTGTTEAFF

SEQ ID NO: 613765 - protein, 14 aa, Homo sapiens
  CDR3 for alpha chain variable domain of TCR clone 306883 (TRAV30, TRAJ26)
CGTDIVSYGQNFVF

SEQ ID NO: 613766 - protein, 13 aa, Homo sapiens
  CDR3 for beta chain variable domain of TCR clone 306883 (TRBV19, TRBJ1-3)
CASRLSLGNTIYF

SEQ ID NO: 613767 - protein, 10 aa, Homo sapiens
  CDR3 for alpha chain variable domain of TCR clone 306884 (TRAV21, TRAJ34)
CAADTDKLIF

SEQ ID NO: 613768 - protein, 16 aa, Homo sapiens
  CDR3 for beta chain variable domain of TCR clone 306884 (TRBV6-5, TRBJ2-2)
CASSRVSRAQPGELFF

SEQ ID NO: 613769 - protein, 14 aa, Homo sapiens
  CDR3 for alpha chain variable domain of TCR clone 306885 (TRAV12-1, TRAJ17)
CVVNYKAAGNKLTF

SEQ ID NO: 613770 - protein, 19 aa, Homo sapiens
  CDR3 for beta chain variable domain of TCR clone 306885 (TRBV7-9, TRBJ2-1)
GASGHNRGALLRSYNEQFF

SEQ ID NO: 613771 - protein, 11 aa, Homo sapiens
  CDR3 for alpha chain variable domain of TCR clone 306886 (TRAV21, TRAJ34)
CAVTNTDKLIF

SEQ ID NO: 613772 - protein, 13 aa, Homo sapiens
  CDR3 for beta chain variable domain of TCR clone 306886 (TRBV4-1, TRBJ2-1)
CASSQAGGDEQFF

SEQ ID NO: 613773 - protein, 15 aa, Homo sapiens
  CDR3 for alpha chain variable domain of TCR clone 306887 (TRAV8-3, TRAJ27)
CAVGPSKTNAGKSTF

SEQ ID NO: 613774 - protein, 15 aa, Homo sapiens
  CDR3 for beta chain variable domain of TCR clone 306887 (TRBV7-2, TRBJ2-1)
CASSSVLAGGNKQFF

SEQ ID NO: 613775 - protein, 11 aa, Homo sapiens
  CDR3 for alpha chain variable domain of TCR clone 306888 (TRAV21, TRAJ23)
CAPQRRGKLIF

SEQ ID NO: 613776 - protein, 13 aa, Homo sapiens
  CDR3 for beta chain variable domain of TCR clone 306888 (TRBV10-3, TRBJ2-7)
CASKLAVNYEQYF

SEQ ID NO: 613777 - protein, 15 aa, Homo sapiens
  CDR3 for alpha chain variable domain of TCR clone 306889 (TRAV17, TRAJ22)
CATVAPSGSARQVTF

SEQ ID NO: 613778 - protein, 14 aa, Homo sapiens
  CDR3 for beta chain variable domain of TCR clone 306889 (TRBV4-1, TRBJ2-2)
CASSQAVNTGELFF

SEQ ID NO: 613779 - protein, 12 aa, Homo sapiens
  CDR3 for alpha chain variable domain of TCR clone 306890 (TRAV13-2, TRAJ23)
CAERHRGGKLIF

SEQ ID NO: 613780 - protein, 12 aa, Homo sapiens
  CDR3 for beta chain variable domain of TCR clone 306890 (TRBV7-9, TRBJ2-7)
CASSLEGYEQYF

SEQ ID NO: 613781 - protein, 14 aa, Homo sapiens
  CDR3 for alpha chain variable domain of TCR clone 306891 (TRAV12-3, TRAJ10)
SHLPLTGGGNKLTF

SEQ ID NO: 613782 - protein, 16 aa, Homo sapiens
  CDR3 for beta chain variable domain of TCR clone 306891 (TRBV5-8, TRBJ2-2)
CASSLISPGGAGELFF

SEQ ID NO: 613783 - protein, 15 aa, Homo sapiens
  CDR3 for alpha chain variable domain of TCR clone 306892 (TRAV38-2/DV8, TRAJ57)
CASARPQGGSEKLVF

SEQ ID NO: 613784 - protein, 17 aa, Homo sapiens
  CDR3 for beta chain variable domain of TCR clone 306892 (TRBV18, TRBJ1-5)
CASSPTMGQGTNQPQHF

SEQ ID NO: 613785 - protein, 15 aa, Homo sapiens
  CDR3 for alpha chain variable domain of TCR clone 306893 (TRAV2, TRAJ9)
CAVEDRGTGGFKTIF

SEQ ID NO: 613786 - protein, 16 aa, Homo sapiens
  CDR3 for beta chain variable domain of TCR clone 306893 (TRBV11-2, TRBJ2-1)
CASSPRLAGVYNEQFF

SEQ ID NO: 613787 - protein, 16 aa, Homo sapiens
  CDR3 for alpha chain variable domain of TCR clone 306894 (TRAV13-1, TRAJ45)
CAARGSRKGGAEGLTF

SEQ ID NO: 613788 - protein, 13 aa, Homo sapiens
  CDR3 for beta chain variable domain of TCR clone 306894 (TRBV12-4, TRBJ2-5)
CASRRRGKETQYF

SEQ ID NO: 613789 - protein, 14 aa, Homo sapiens
  CDR3 for alpha chain variable domain of TCR clone 306895 (TRAV1-2, TRAJ16)
CAVNRFSDGQKLLF

SEQ ID NO: 613790 - protein, 12 aa, Homo sapiens
  CDR3 for beta chain variable domain of TCR clone 306895 (TRBV6-5, TRBJ2-5)
CARSEGSETQYF

SEQ ID NO: 613791 - protein, 15 aa, Homo sapiens
  CDR3 for alpha chain variable domain of TCR clone 306896 (TRAV3, TRAJ5)
CAVSDLDTGRRALTF

SEQ ID NO: 613792 - protein, 14 aa, Homo sapiens
  CDR3 for beta chain variable domain of TCR clone 306896 (TRBV25-1, TRBJ1-4)
CASSGGGQPEKLFF

SEQ ID NO: 613793 - protein, 15 aa, Homo sapiens
  CDR3 for alpha chain variable domain of TCR clone 306897 (TRAV29/DV5, TRAJ44)
CSASAGTGTASKLTF

SEQ ID NO: 613794 - protein, 12 aa, Homo sapiens
  CDR3 for beta chain variable domain of TCR clone 306897 (TRBV11-2, TRBJ2-2)
CASSLGGGELFF

SEQ ID NO: 613795 - protein, 14 aa, Homo sapiens
  CDR3 for alpha chain variable domain of TCR clone 306898 (TRAV12-3, TRAJ10)
SHLPLTGGGNKLTF

SEQ ID NO: 613796 - protein, 11 aa, Homo sapiens
  CDR3 for beta chain variable domain of TCR clone 306898 (TRBV7-3, TRBJ2-5)
CQQLPGRDQYF

SEQ ID NO: 613797 - protein, 12 aa, Homo sapiens
  CDR3 for alpha chain variable domain of TCR clone 306899 (TRAV12-2, TRAJ3)
CAVWSSASKIIF

SEQ ID NO: 613798 - protein, 12 aa, Homo sapiens
  CDR3 for beta chain variable domain of TCR clone 306899 (TRBV11-2, TRBJ2-1)
CVSSPGNNEQFF

SEQ ID NO: 613799 - protein, 16 aa, Homo sapiens
  CDR3 for alpha chain variable domain of TCR clone 306900 (TRAV16, TRAJ4)
CITLLPFSGGYNKLTF

SEQ ID NO: 613800 - protein, 14 aa, Homo sapiens
  CDR3 for beta chain variable domain of TCR clone 306900 (TRBV19, TRBJ2-7)
CASSMGQGAIEQYF

SEQ ID NO: 613801 - protein, 15 aa, Homo sapiens
  CDR3 for alpha chain variable domain of TCR clone 306901 (TRAV13-2, TRAJ10)
CAENRDTGGGNKLTF

SEQ ID NO: 613802 - protein, 17 aa, Homo sapiens
  CDR3 for beta chain variable domain of TCR clone 306901 (TRBV13, TRBJ2-3)
CASSLSRVAGGRNTQYF

SEQ ID NO: 613803 - protein, 11 aa, Homo sapiens
  CDR3 for alpha chain variable domain of TCR clone 306902 (TRAV1-1, TRAJ23)
CAVRQGGKIIF

SEQ ID NO: 613804 - protein, 15 aa, Homo sapiens
  CDR3 for beta chain variable domain of TCR clone 306902 (TRBV27, TRBJ2-1)
CASSNGGGSSNEQFF

SEQ ID NO: 613805 - protein, 15 aa, Homo sapiens
  CDR3 for alpha chain variable domain of TCR clone 306903 (TRAV29/DV5, TRAJ47)
CAARPTMEYGNKLVF

SEQ ID NO: 613806 - protein, 13 aa, Homo sapiens
  CDR3 for beta chain variable domain of TCR clone 306903 (TRBV20-1, TRBJ1-1)
CSARAGGNSEAFF

SEQ ID NO: 613807 - protein, 21 aa, Homo sapiens
  CDR3 for alpha chain variable domain of TCR clone 306904 (TRAV29/DV5, TRAJ52)
CSVLLCSKREAVGTSYGKLTF

SEQ ID NO: 613808 - protein, 15 aa, Homo sapiens
  CDR3 for beta chain variable domain of TCR clone 306904 (TRBV6-1, TRBJ2-1)
CASSELRGQYNEQFF

SEQ ID NO: 613809 - protein, 13 aa, Homo sapiens
  CDR3 for alpha chain variable domain of TCR clone 306905 (TRAV17, TRAJ31)
CATDENNNARLMF

SEQ ID NO: 613810 - protein, 17 aa, Homo sapiens
  CDR3 for beta chain variable domain of TCR clone 306905 (TRBV11-2, TRBJ2-1)
CASSLYPPGVEYNEQFF

SEQ ID NO: 613811 - protein, 13 aa, Homo sapiens
  CDR3 for alpha chain variable domain of TCR clone 306906 (TRAV12-1, TRAJ43)
CVVSHHNNNVMRF

SEQ ID NO: 613812 - protein, 14 aa, Homo sapiens
  CDR3 for beta chain variable domain of TCR clone 306906 (TRBV5-5, TRBJ2-2)
CASSLLGDTGELFF

SEQ ID NO: 613813 - protein, 15 aa, Homo sapiens
  CDR3 for alpha chain variable domain of TCR clone 306907 (TRAV38-2/DV8, TRAJ28)
CAYRSRGAGSYQLTF

SEQ ID NO: 613814 - protein, 17 aa, Homo sapiens
  CDR3 for beta chain variable domain of TCR clone 306907 (TRBV7-9, TRBJ2-1)
CASSLYPPGVEYNEQFF

SEQ ID NO: 613815 - protein, 16 aa, Homo sapiens
  CDR3 for alpha chain variable domain of TCR clone 306908 (TRAV1-2, TRAJ10)
CAVRGVLTGGGNKLTF

SEQ ID NO: 613816 - protein, 12 aa, Homo sapiens
  CDR3 for beta chain variable domain of TCR clone 306908 (TRBV11-2, TRBJ2-1)
CASSPGNNEKFF

SEQ ID NO: 613817 - protein, 13 aa, Homo sapiens
  CDR3 for alpha chain variable domain of TCR clone 306909 (TRAV12-1, TRAJ22)
CVVYSGSARQLTF

SEQ ID NO: 613818 - protein, 16 aa, Homo sapiens
  CDR3 for beta chain variable domain of TCR clone 306909 (TRBV7-8, TRBJ2-4)
CASSAERTLAKNIQYF

SEQ ID NO: 613819 - protein, 14 aa, Homo sapiens
  CDR3 for alpha chain variable domain of TCR clone 306910 (TRAV8-3, TRAJ35)
CAVVPQGFGNVLHC

SEQ ID NO: 613820 - protein, 15 aa, Homo sapiens
  CDR3 for beta chain variable domain of TCR clone 306910 (TRBV6-1, TRBJ2-2)
CASSAGRGYTGELFF

SEQ ID NO: 613821 - protein, 15 aa, Homo sapiens
  CDR3 for alpha chain variable domain of TCR clone 306911 (TRAV26-1, TRAJ56)
CIVRVATGANSKLTF

SEQ ID NO: 613822 - protein, 15 aa, Homo sapiens
  CDR3 for beta chain variable domain of TCR clone 306911 (TRBV7-8, TRBJ2-7)
CASSLGTGNPYEQYF

SEQ ID NO: 613823 - protein, 15 aa, Homo sapiens
  CDR3 for alpha chain variable domain of TCR clone 306912 (TRAV8-3, TRAJ27)
RAVGSSKTNAGKSTF

SEQ ID NO: 613824 - protein, 12 aa, Homo sapiens
  CDR3 for beta chain variable domain of TCR clone 306912 (TRBV11-2, TRBJ2-2)
CASSLGGGELFF

SEQ ID NO: 613825 - protein, 11 aa, Homo sapiens
  CDR3 for alpha chain variable domain of TCR clone 306913 (TRAV12-3, TRAJ16)
LTGGDGQKLLF

SEQ ID NO: 613826 - protein, 16 aa, Homo sapiens
  CDR3 for beta chain variable domain of TCR clone 306913 (TRBV13, TRBJ2-2)
CASSPRTGEHTGELFF

SEQ ID NO: 613827 - protein, 12 aa, Homo sapiens
  CDR3 for alpha chain variable domain of TCR clone 306914 (TRAV3, TRAJ20)
CEAFSNDYKLSF

SEQ ID NO: 613828 - protein, 15 aa, Homo sapiens
  CDR3 for beta chain variable domain of TCR clone 306914 (TRBV19, TRBJ2-6)
CASVRRDSGANVLTF

SEQ ID NO: 613829 - protein, 13 aa, Homo sapiens
  CDR3 for alpha chain variable domain of TCR clone 306915 (TRAV27, TRAJ57)
CRSAQGVSEKLVF

SEQ ID NO: 613830 - protein, 11 aa, Homo sapiens
  CDR3 for beta chain variable domain of TCR clone 306915 (TRBV11-2, TRBJ1-1)
CDSSINTEAFF

SEQ ID NO: 613831 - protein, 13 aa, Homo sapiens
  CDR3 for alpha chain variable domain of TCR clone 306916 (TRAV29/DV5, TRAJ31)
FAASRNNNARLMF

SEQ ID NO: 613832 - protein, 12 aa, Homo sapiens
  CDR3 for beta chain variable domain of TCR clone 306916 (TRBV14, TRBJ2-7)
CASSLYKDEQYF

SEQ ID NO: 613833 - protein, 14 aa, Homo sapiens
  CDR3 for alpha chain variable domain of TCR clone 306917 (TRAV16, TRAJ33)
CALSAMDSNYHLIW

SEQ ID NO: 613834 - protein, 14 aa, Homo sapiens
  CDR3 for beta chain variable domain of TCR clone 306917 (TRBV4-2, TRBJ2-1)
CASGLDRAYNEQFF

SEQ ID NO: 613835 - protein, 16 aa, Homo sapiens
  CDR3 for alpha chain variable domain of TCR clone 306918 (TRAV27, TRAJ13)
CAGAKSDFGGYQKVTF

SEQ ID NO: 613836 - protein, 15 aa, Homo sapiens
  CDR3 for beta chain variable domain of TCR clone 306918 (TRBV29-1, TRBJ2-1)
CSVGRHALFYNEQFF

SEQ ID NO: 613837 - protein, 13 aa, Homo sapiens
  CDR3 for alpha chain variable domain of TCR clone 306919 (TRAV17, TRAJ5)
CALRGTGRRALTF

SEQ ID NO: 613838 - protein, 14 aa, Homo sapiens
  CDR3 for beta chain variable domain of TCR clone 306919 (TRBV9, TRBJ1-1)
CASSVEGGGTEAFF

SEQ ID NO: 613839 - protein, 12 aa, Homo sapiens
  CDR3 for alpha chain variable domain of TCR clone 306920 (TRAV12-2, TRAJ4)
GWPEGGYNKLIF

SEQ ID NO: 613840 - protein, 16 aa, Homo sapiens
  CDR3 for beta chain variable domain of TCR clone 306920 (TRBV6-1, TRBJ2-5)
CASSETLDRGAEAQYF

SEQ ID NO: 613841 - protein, 15 aa, Homo sapiens
  CDR3 for alpha chain variable domain of TCR clone 306921 (TRAV13-1, TRAJ27)
CAARGGNTNAGKSTF

SEQ ID NO: 613842 - protein, 15 aa, Homo sapiens
  CDR3 for beta chain variable domain of TCR clone 306921 (TRBV12-4, TRBJ1-5)
CASTRQGSSNQPQHF

SEQ ID NO: 613843 - protein, 18 aa, Homo sapiens
  CDR3 for alpha chain variable domain of TCR clone 306922 (TRAV8-3, TRAJ4)
WVRDPTSNDPGGYNKLIF

SEQ ID NO: 613844 - protein, 13 aa, Homo sapiens
  CDR3 for beta chain variable domain of TCR clone 306922 (TRBV20-1, TRBJ1-2)
CSATGIQGSGFTF

SEQ ID NO: 613845 - protein, 14 aa, Homo sapiens
  CDR3 for alpha chain variable domain of TCR clone 306923 (TRAV1-2, TRAJ16)
CAVNRFSDGLKLLF

SEQ ID NO: 613846 - protein, 13 aa, Homo sapiens
  CDR3 for beta chain variable domain of TCR clone 306923 (TRBV10-3, TRBJ2-7)
CASKLAVNYEQYF

SEQ ID NO: 613847 - protein, 11 aa, Homo sapiens
  CDR3 for alpha chain variable domain of TCR clone 306924 (TRAV21, TRAJ11)
CAVNGYSTLTF

SEQ ID NO: 613848 - protein, 15 aa, Homo sapiens
  CDR3 for beta chain variable domain of TCR clone 306924 (TRBV19, TRBJ1-5)
CASSILTGENQPQHF

SEQ ID NO: 613849 - protein, 14 aa, Homo sapiens
  CDR3 for alpha chain variable domain of TCR clone 306925 (TRAV8-2, TRAJ4)
CVVSPSGGHNKLMC

SEQ ID NO: 613850 - protein, 15 aa, Homo sapiens
  CDR3 for beta chain variable domain of TCR clone 306925 (TRBV4-1, TRBJ1-4)
CASSDTGGTNEKLFF

SEQ ID NO: 613851 - protein, 12 aa, Homo sapiens
  CDR3 for alpha chain variable domain of TCR clone 306926 (TRAV21, TRAJ40)
CAASTGTYKYIF

SEQ ID NO: 613852 - protein, 14 aa, Homo sapiens
  CDR3 for beta chain variable domain of TCR clone 306926 (TRBV19, TRBJ2-1)
CASPTFVLSGEQFF

SEQ ID NO: 613853 - protein, 14 aa, Homo sapiens
  CDR3 for alpha chain variable domain of TCR clone 306927 (TRAV13-2, TRAJ43)
CAEIATYNNNDMRF

SEQ ID NO: 613854 - protein, 15 aa, Homo sapiens
  CDR3 for beta chain variable domain of TCR clone 306927 (TRBV7-9, TRBJ2-2)
CASGPLDTFPGELFF

SEQ ID NO: 613855 - protein, 16 aa, Homo sapiens
  CDR3 for alpha chain variable domain of TCR clone 306928 (TRAV12-2, TRAJ32)
CAVNMNYGGATNTPIF

SEQ ID NO: 613856 - protein, 16 aa, Homo sapiens
  CDR3 for beta chain variable domain of TCR clone 306928 (TRBV7-8, TRBJ2-3)
CASSTEGQRETDTQYF

SEQ ID NO: 613857 - protein, 12 aa, Homo sapiens
  CDR3 for alpha chain variable domain of TCR clone 306929 (TRAV8-3, TRAJ26)
CAGDNYGQNFVF

SEQ ID NO: 613858 - protein, 16 aa, Homo sapiens
  CDR3 for beta chain variable domain of TCR clone 306929 (TRBV6-1, TRBJ2-5)
CASSETLYRGAETQYF

SEQ ID NO: 613859 - protein, 22 aa, Homo sapiens
  CDR3 for alpha chain variable domain of TCR clone 306930 (TRAV2, TRAJ38)
CAVEEFPNAGNNHIQNPDPAVY

SEQ ID NO: 613860 - protein, 14 aa, Homo sapiens
  CDR3 for beta chain variable domain of TCR clone 306930 (TRBV29-1, TRBJ1-4)
CSVSGRQGGETLFF

SEQ ID NO: 613861 - protein, 15 aa, Homo sapiens
  CDR3 for alpha chain variable domain of TCR clone 306931 (TRAV12-2, TRAJ53)
CAVNGGGGSNYKLTF

SEQ ID NO: 613862 - protein, 13 aa, Homo sapiens
  CDR3 for beta chain variable domain of TCR clone 306931 (TRBV20-1, TRBJ1-1)
CSARAGGNTEAFF

SEQ ID NO: 613863 - protein, 12 aa, Homo sapiens
  CDR3 for alpha chain variable domain of TCR clone 306932 (TRAV2, TRAJ33)
CAVEDSNYQLIW

SEQ ID NO: 613864 - protein, 14 aa, Homo sapiens
  CDR3 for beta chain variable domain of TCR clone 306932 (TRBV6-1, TRBJ1-3)
CASVQGGGGNTIYF

SEQ ID NO: 613865 - protein, 11 aa, Homo sapiens
  CDR3 for alpha chain variable domain of TCR clone 306933 (TRAV13-2, TRAJ20)
CADSNDYKLSF

SEQ ID NO: 613866 - protein, 15 aa, Homo sapiens
  CDR3 for beta chain variable domain of TCR clone 306933 (TRBV11-1, TRBJ2-1)
CASSGQAEPYNEQFF

SEQ ID NO: 613867 - protein, 15 aa, Homo sapiens
  CDR3 for alpha chain variable domain of TCR clone 306934 (TRAV21, TRAJ38)
CAVVSDAGNNRKLIW

SEQ ID NO: 613868 - protein, 13 aa, Homo sapiens
  CDR3 for beta chain variable domain of TCR clone 306934 (TRBV2, TRBJ2-6)
CASNFYQANVLTF

SEQ ID NO: 613869 - protein, 15 aa, Homo sapiens
  CDR3 for alpha chain variable domain of TCR clone 306935 (TRAV26-1, TRAJ37)
CIVKTASSNTGKLIF

SEQ ID NO: 613870 - protein, 12 aa, Homo sapiens
  CDR3 for beta chain variable domain of TCR clone 306935 (TRBV7-8, TRBJ2-7)
CASSLGDREQYF

SEQ ID NO: 613871 - protein, 15 aa, Homo sapiens
  CDR3 for alpha chain variable domain of TCR clone 306936 (TRAV8-3, TRAJ21)
CAVGALPPRGYKFYF

SEQ ID NO: 613872 - protein, 14 aa, Homo sapiens
  CDR3 for beta chain variable domain of TCR clone 306936 (TRBV12-5, TRBJ2-5)
CASGSRTHQETQYF

SEQ ID NO: 613873 - protein, 15 aa, Homo sapiens
  CDR3 for alpha chain variable domain of TCR clone 306937 (TRAV3, TRAJ22)
CAVGDRGGSARQTTF

SEQ ID NO: 613874 - protein, 14 aa, Homo sapiens
  CDR3 for beta chain variable domain of TCR clone 306937 (TRBV19, TRBJ1-5)
CASSLGLIGQPQHF

SEQ ID NO: 613875 - protein, 14 aa, Homo sapiens
  CDR3 for alpha chain variable domain of TCR clone 306938 (TRAV17, TRAJ45)
CATASGGGADGLTF

SEQ ID NO: 613876 - protein, 17 aa, Homo sapiens
  CDR3 for beta chain variable domain of TCR clone 306938 (TRBV18, TRBJ2-7)
CASSLGTGGYIPYEQYF

SEQ ID NO: 613877 - protein, 14 aa, Homo sapiens
  CDR3 for alpha chain variable domain of TCR clone 306939 (TRAV1-2, TRAJ16)
CAVNRFSDGQKLLF

SEQ ID NO: 613878 - protein, 18 aa, Homo sapiens
  CDR3 for beta chain variable domain of TCR clone 306939 (TRBV20-1, TRBJ2-6)
CSAETTPTHGSGANVQTF

SEQ ID NO: 613879 - protein, 15 aa, Homo sapiens
  CDR3 for alpha chain variable domain of TCR clone 306940 (TRAV12-1, TRAJ4)
CVVNPFSGGYNKLIF

SEQ ID NO: 613880 - protein, 12 aa, Homo sapiens
  CDR3 for beta chain variable domain of TCR clone 306940 (TRBV11-2, TRBJ2-2)
CASSLGGGELFF

SEQ ID NO: 613881 - protein, 14 aa, Homo sapiens
  CDR3 for alpha chain variable domain of TCR clone 306941 (TRAV8-2, TRAJ15)
CVVSDQKAGIALIF

SEQ ID NO: 613882 - protein, 14 aa, Homo sapiens
  CDR3 for beta chain variable domain of TCR clone 306941 (TRBV5-1, TRBJ2-7)
CASSRGESLYEQYF

SEQ ID NO: 613883 - protein, 18 aa, Homo sapiens
  CDR3 for alpha chain variable domain of TCR clone 306942 (TRAV1-2, TRAJ18)
CAVRDMGDRGSTLGRRYF

SEQ ID NO: 613884 - protein, 17 aa, Homo sapiens
  CDR3 for beta chain variable domain of TCR clone 306942 (TRBV12-4, TRBJ2-2)
CASSLGVGRGGTGELFF

SEQ ID NO: 613885 - protein, 16 aa, Homo sapiens
  CDR3 for alpha chain variable domain of TCR clone 306943 (TRAV13-1, TRAJ45)
CAACTHSGGGADGLTF

SEQ ID NO: 613886 - protein, 14 aa, Homo sapiens
  CDR3 for beta chain variable domain of TCR clone 306943 (TRBV28, TRBJ2-5)
CASSSPDSQETQYF

SEQ ID NO: 613887 - protein, 18 aa, Homo sapiens
  CDR3 for alpha chain variable domain of TCR clone 306944 (TRAV2, TRAJ32)
CCLLLCLHYGGATNKLIF

SEQ ID NO: 613888 - protein, 16 aa, Homo sapiens
  CDR3 for beta chain variable domain of TCR clone 306944 (TRBV7-9, TRBJ2-7)
CSSSYPDREGGYEQYF

SEQ ID NO: 613889 - protein, 16 aa, Homo sapiens
  CDR3 for alpha chain variable domain of TCR clone 306945 (TRAV35, TRAJ28)
CAGQRYSGAGSYQLTF

SEQ ID NO: 613890 - protein, 14 aa, Homo sapiens
  CDR3 for beta chain variable domain of TCR clone 306945 (TRBV12-4, TRBJ1-1)
CASSLGTGGTEAFF

SEQ ID NO: 613891 - protein, 18 aa, Homo sapiens
  CDR3 for alpha chain variable domain of TCR clone 306946 (TRAV21, TRAJ52)
CAVRPSPAGGTSYGKLTF

SEQ ID NO: 613892 - protein, 16 aa, Homo sapiens
  CDR3 for beta chain variable domain of TCR clone 306946 (TRBV7-3, TRBJ2-1)
CASSLGGYRSYNEQFF

SEQ ID NO: 613893 - protein, 13 aa, Homo sapiens
  CDR3 for alpha chain variable domain of TCR clone 306947 (TRAV29/DV5, TRAJ31)
CAASRNNNARLMF

SEQ ID NO: 613894 - protein, 15 aa, Homo sapiens
  CDR3 for beta chain variable domain of TCR clone 306947 (TRBV27, TRBJ2-5)
CASSLYPRGGETQYF

SEQ ID NO: 613895 - protein, 17 aa, Homo sapiens
  CDR3 for alpha chain variable domain of TCR clone 306948 (TRAV17, TRAJ52)
SATERPSGGTSYGKLTF

SEQ ID NO: 613896 - protein, 15 aa, Homo sapiens
  CDR3 for beta chain variable domain of TCR clone 306948 (TRBV5-1, TRBJ2-1)
CASSLVANSYNEQFF

SEQ ID NO: 613897 - protein, 11 aa, Homo sapiens
  CDR3 for alpha chain variable domain of TCR clone 306949 (TRAV2, TRAJ13)
CASGGYQKVTF

SEQ ID NO: 613898 - protein, 20 aa, Homo sapiens
  CDR3 for beta chain variable domain of TCR clone 306949 (TRBV7-8, TRBJ2-2)
CASSHLFPGPTIHIAGELFF

SEQ ID NO: 613899 - protein, 15 aa, Homo sapiens
  CDR3 for alpha chain variable domain of TCR clone 306950 (TRAV21, TRAJ53)
CATLTSGGSNYKLTF

SEQ ID NO: 613900 - protein, 16 aa, Homo sapiens
  CDR3 for beta chain variable domain of TCR clone 306950 (TRBV12-4, TRBJ1-5)
CASSRAVGGSNQPQHF

SEQ ID NO: 613901 - protein, 15 aa, Homo sapiens
  CDR3 for alpha chain variable domain of TCR clone 306951 (TRAV26-1, TRAJ22)
CIVRVSFWFCKATDL

SEQ ID NO: 613902 - protein, 13 aa, Homo sapiens
  CDR3 for beta chain variable domain of TCR clone 306951 (TRBV7-6, TRBJ1-2)
CASSLVADYGYTF

SEQ ID NO: 613903 - protein, 14 aa, Homo sapiens
  CDR3 for alpha chain variable domain of TCR clone 306952 (TRAV27, TRAJ22)
CAGLPSGSARQLTF

SEQ ID NO: 613904 - protein, 13 aa, Homo sapiens
  CDR3 for beta chain variable domain of TCR clone 306952 (TRBV7-8, TRBJ2-7)
CASSAPSGSEQYF

SEQ ID NO: 613905 - protein, 14 aa, Homo sapiens
  CDR3 for alpha chain variable domain of TCR clone 306953 (TRAV29/DV5, TRAJ36)
CAARRKTGANNLFF

SEQ ID NO: 613906 - protein, 17 aa, Homo sapiens
  CDR3 for beta chain variable domain of TCR clone 306953 (TRBV24-1, TRBJ2-1)
CATSDVSTSGTYNEQFF

SEQ ID NO: 613907 - protein, 16 aa, Homo sapiens
  CDR3 for alpha chain variable domain of TCR clone 306954 (TRAV23/DV6, TRAJ52)
CAARPSGGTSYGKLTF

SEQ ID NO: 613908 - protein, 16 aa, Homo sapiens
  CDR3 for beta chain variable domain of TCR clone 306954 (TRBV19, TRBJ2-1)
CASSKAGPSSYNEQFF

SEQ ID NO: 613909 - protein, 14 aa, Homo sapiens
  CDR3 for alpha chain variable domain of TCR clone 306955 (TRAV13-1, TRAJ30)
CAASPQNRDDKIIF

SEQ ID NO: 613910 - protein, 12 aa, Homo sapiens
  CDR3 for beta chain variable domain of TCR clone 306955 (TRBV11-2, TRBJ2-1)
CASSPGNNEQFF

SEQ ID NO: 613911 - protein, 21 aa, Homo sapiens
  CDR3 for alpha chain variable domain of TCR clone 306956 (TRAV17, TRAJ7)
TASRAADTASYFCTTLGRLAF

SEQ ID NO: 613912 - protein, 13 aa, Homo sapiens
  CDR3 for beta chain variable domain of TCR clone 306956 (TRBV12-4, TRBJ2-7)
CASSLERVREQYF

SEQ ID NO: 613913 - protein, 12 aa, Homo sapiens
  CDR3 for alpha chain variable domain of TCR clone 306957 (TRAV12-3, TRAJ41)
CAMSYSGDALNF

SEQ ID NO: 613914 - protein, 13 aa, Homo sapiens
  CDR3 for beta chain variable domain of TCR clone 306957 (TRBV7-3, TRBJ2-1)
CASSLDSYNEQFF

SEQ ID NO: 613915 - protein, 16 aa, Homo sapiens
  CDR3 for alpha chain variable domain of TCR clone 306958 (TRAV26-1, TRAJ53)
CIVRVAMGGSNYKLTF

SEQ ID NO: 613916 - protein, 17 aa, Homo sapiens
  CDR3 for beta chain variable domain of TCR clone 306958 (TRBV28, TRBJ2-3)
CASSPTPAGGRVDTQYF

SEQ ID NO: 613917 - protein, 14 aa, Homo sapiens
  CDR3 for alpha chain variable domain of TCR clone 306959 (TRAV26-1, TRAJ21)
CIVRVGHNFNQFYF

SEQ ID NO: 613918 - protein, 15 aa, Homo sapiens
  CDR3 for beta chain variable domain of TCR clone 306959 (TRBV4-3, TRBJ2-1)
CASSRGLAGSNEQFF

SEQ ID NO: 613919 - protein, 14 aa, Homo sapiens
  CDR3 for alpha chain variable domain of TCR clone 306960 (TRAV3, TRAJ17)
CAVRDAAAGNKLTF

SEQ ID NO: 613920 - protein, 14 aa, Homo sapiens
  CDR3 for beta chain variable domain of TCR clone 306960 (TRBV19, TRBJ2-1)
CASPTFVLSGEQFF

SEQ ID NO: 613921 - protein, 15 aa, Homo sapiens
  CDR3 for alpha chain variable domain of TCR clone 306961 (TRAV3, TRAJ22)
CAVRDRGGSARQLTF

SEQ ID NO: 613922 - protein, 15 aa, Homo sapiens
  CDR3 for beta chain variable domain of TCR clone 306961 (TRBV2, TRBJ2-3)
CASSDFEKATDTQYF

SEQ ID NO: 613923 - protein, 22 aa, Homo sapiens
  CDR3 for alpha chain variable domain of TCR clone 306962 (TRAV13-1, TRAJ35)
CAASKGGFGNVLHCMSVTQVIV

SEQ ID NO: 613924 - protein, 13 aa, Homo sapiens
  CDR3 for beta chain variable domain of TCR clone 306962 (TRBV7-3, TRBJ1-1)
CASSQDWGAEAFF

SEQ ID NO: 613925 - protein, 10 aa, Homo sapiens
  CDR3 for alpha chain variable domain of TCR clone 306963 (TRAV12-1, TRAJ20)
CVVNPRKLSF

SEQ ID NO: 613926 - protein, 15 aa, Homo sapiens
  CDR3 for beta chain variable domain of TCR clone 306963 (TRBV5-1, TRBJ2-1)
CASSPPRAHYNEQFF

SEQ ID NO: 613927 - protein, 12 aa, Homo sapiens
  CDR3 for alpha chain variable domain of TCR clone 306964 (TRAV23/DV6, TRAJ3)
FAARAPQQCFQD

SEQ ID NO: 613928 - protein, 17 aa, Homo sapiens
  CDR3 for beta chain variable domain of TCR clone 306964 (TRBV7-9, TRBJ2-3)
CASSPTVAGDLTDTQYF

SEQ ID NO: 613929 - protein, 11 aa, Homo sapiens
  CDR3 for alpha chain variable domain of TCR clone 306965 (TRAV12-1, TRAJ30)
CVVNGQDKIIF

SEQ ID NO: 613930 - protein, 12 aa, Homo sapiens
  CDR3 for beta chain variable domain of TCR clone 306965 (TRBV19, TRBJ2-1)
CASSMQDTEQFF

SEQ ID NO: 613931 - protein, 15 aa, Homo sapiens
  CDR3 for alpha chain variable domain of TCR clone 306966 (TRAV3, TRAJ4)
CAVRDGTGGYNKLIF

SEQ ID NO: 613932 - protein, 12 aa, Homo sapiens
  CDR3 for beta chain variable domain of TCR clone 306966 (TRBV7-9, TRBJ2-7)
CASSLEGYEQYF

SEQ ID NO: 613933 - protein, 18 aa, Homo sapiens
  CDR3 for alpha chain variable domain of TCR clone 306967 (TRAV13-1, TRAJ28)
CAASPVPILWGWELPTHF

SEQ ID NO: 613934 - protein, 13 aa, Homo sapiens
  CDR3 for beta chain variable domain of TCR clone 306967 (TRBV15, TRBJ2-7)
CATSTTEHYEQYF

SEQ ID NO: 613935 - protein, 18 aa, Homo sapiens
  CDR3 for alpha chain variable domain of TCR clone 306968 (TRAV13-1, TRAJ52)
CAAKNPNAGGTSYGKLTF

SEQ ID NO: 613936 - protein, 14 aa, Homo sapiens
  CDR3 for beta chain variable domain of TCR clone 306968 (TRBV5-7, TRBJ1-2)
CASSAVGVSGGYTF

SEQ ID NO: 613937 - protein, 15 aa, Homo sapiens
  CDR3 for alpha chain variable domain of TCR clone 306969 (TRAV21, TRAJ53)
CATLNSGGSNYKLTF

SEQ ID NO: 613938 - protein, 13 aa, Homo sapiens
  CDR3 for beta chain variable domain of TCR clone 306969 (TRBV4-1, TRBJ2-2)
CASSQENTGELFF

SEQ ID NO: 613939 - protein, 17 aa, Homo sapiens
  CDR3 for alpha chain variable domain of TCR clone 306970 (TRAV12-2, TRAJ52)
CAVNPYAGGTSYGKLTF

SEQ ID NO: 613940 - protein, 16 aa, Homo sapiens
  CDR3 for beta chain variable domain of TCR clone 306970 (TRBV29-1, TRBJ2-7)
CSVEVVGTSGSYEQYF

SEQ ID NO: 613941 - protein, 16 aa, Homo sapiens
  CDR3 for alpha chain variable domain of TCR clone 306971 (TRAV35, TRAJ20)
CWADPSSGFNDYKLGF

SEQ ID NO: 613942 - protein, 16 aa, Homo sapiens
  CDR3 for beta chain variable domain of TCR clone 306971 (TRBV19, TRBJ2-2)
CASRSPGTGATGELFF

SEQ ID NO: 613943 - protein, 13 aa, Homo sapiens
  CDR3 for alpha chain variable domain of TCR clone 306972 (TRAV23/DV6, TRAJ58)
CAAPGTSGSRLTF

SEQ ID NO: 613944 - protein, 13 aa, Homo sapiens
  CDR3 for beta chain variable domain of TCR clone 306972 (TRBV5-5, TRBJ1-2)
CASSFWRGEDYTF

SEQ ID NO: 613945 - protein, 15 aa, Homo sapiens
  CDR3 for alpha chain variable domain of TCR clone 306973 (TRAV1-2, TRAJ28)
CAVRNSGAGSYQLTF

SEQ ID NO: 613946 - protein, 16 aa, Homo sapiens
  CDR3 for beta chain variable domain of TCR clone 306973 (TRBV28, TRBJ2-7)
CASSSSGTNGSYEQYF

SEQ ID NO: 613947 - protein, 17 aa, Homo sapiens
  CDR3 for alpha chain variable domain of TCR clone 306974 (TRAV3, TRAJ6)
CAVRDGPRAGGSYIPTF

SEQ ID NO: 613948 - protein, 14 aa, Homo sapiens
  CDR3 for beta chain variable domain of TCR clone 306974 (TRBV7-2, TRBJ2-7)
CASNPKTGFYEQYF

SEQ ID NO: 613949 - protein, 13 aa, Homo sapiens
  CDR3 for alpha chain variable domain of TCR clone 306975 (TRAV16, TRAJ30)
CALAQNRDDKIIF

SEQ ID NO: 613950 - protein, 15 aa, Homo sapiens
  CDR3 for beta chain variable domain of TCR clone 306975 (TRBV2, TRBJ1-1)
CASTEPEQGASGAFF

SEQ ID NO: 613951 - protein, 13 aa, Homo sapiens
  CDR3 for alpha chain variable domain of TCR clone 306976 (TRAV17, TRAJ26)
CATVDNYGQNFVF

SEQ ID NO: 613952 - protein, 15 aa, Homo sapiens
  CDR3 for beta chain variable domain of TCR clone 306976 (TRBV6-1, TRBJ2-1)
CASSELRGQYNEQFF

SEQ ID NO: 613953 - protein, 19 aa, Homo sapiens
  CDR3 for alpha chain variable domain of TCR clone 306977 (TRAV38-1, TRAJ53)
CAFMKHGLESGGSNYKLTF

SEQ ID NO: 613954 - protein, 15 aa, Homo sapiens
  CDR3 for beta chain variable domain of TCR clone 306977 (TRBV20-1, TRBJ1-1)
CSASRGVTGNTEAFF

SEQ ID NO: 613955 - protein, 10 aa, Homo sapiens
  CDR3 for alpha chain variable domain of TCR clone 306978 (TRAV27, TRAJ58)
SETRGSRLTF

SEQ ID NO: 613956 - protein, 14 aa, Homo sapiens
  CDR3 for beta chain variable domain of TCR clone 306978 (TRBV7-2, TRBJ2-7)
CASSPKTSFYEQYF

SEQ ID NO: 613957 - protein, 14 aa, Homo sapiens
  CDR3 for alpha chain variable domain of TCR clone 306979 (TRAV8-3, TRAJ6)
CAVGASGGSYIPTF

SEQ ID NO: 613958 - protein, 17 aa, Homo sapiens
  CDR3 for beta chain variable domain of TCR clone 306979 (TRBV18, TRBJ2-2)
CARSPSDPWQNTGELFF

SEQ ID NO: 613959 - protein, 16 aa, Homo sapiens
  CDR3 for alpha chain variable domain of TCR clone 306980 (TRAV12-3, TRAJ53)
CAMRPGRGGSNYKMTF

SEQ ID NO: 613960 - protein, 16 aa, Homo sapiens
  CDR3 for beta chain variable domain of TCR clone 306980 (TRBV4-2, TRBJ1-1)
CASSQAGFGMNTEAFF

SEQ ID NO: 613961 - protein, 12 aa, Homo sapiens
  CDR3 for alpha chain variable domain of TCR clone 306981 (TRAV12-1, TRAJ40)
CVVYSGTYKYIF

SEQ ID NO: 613962 - protein, 10 aa, Homo sapiens
  CDR3 for beta chain variable domain of TCR clone 306981 (TRBV7-9, TRBJ1-2)
CASSLSRTMA

SEQ ID NO: 613963 - protein, 13 aa, Homo sapiens
  CDR3 for alpha chain variable domain of TCR clone 306982 (TRAV21, TRAJ57)
CAVTQGGSEKLFF

SEQ ID NO: 613964 - protein, 18 aa, Homo sapiens
  CDR3 for beta chain variable domain of TCR clone 306982 (TRBV12-4, TRBJ2-2)
CASSLVAGTRGRTGELFF

SEQ ID NO: 613965 - protein, 15 aa, Homo sapiens
  CDR3 for alpha chain variable domain of TCR clone 306983 (TRAV26-1, TRAJ22)
CIVRVSFWLCKATDF

SEQ ID NO: 613966 - protein, 13 aa, Homo sapiens
  CDR3 for beta chain variable domain of TCR clone 306983 (TRBV7-9, TRBJ1-2)
CASSLKQNYGYTF

SEQ ID NO: 613967 - protein, 15 aa, Homo sapiens
  CDR3 for alpha chain variable domain of TCR clone 306984 (TRAV13-1, TRAJ57)
QVPPLSQGGSEKLVF

SEQ ID NO: 613968 - protein, 14 aa, Homo sapiens
  CDR3 for beta chain variable domain of TCR clone 306984 (TRBV19, TRBJ2-1)
CASGKSTQYNEQFF

SEQ ID NO: 613969 - protein, 12 aa, Homo sapiens
  CDR3 for alpha chain variable domain of TCR clone 306985 (TRAV13-1, TRAJ21)
CAAKEGFNKFYF

SEQ ID NO: 613970 - protein, 18 aa, Homo sapiens
  CDR3 for beta chain variable domain of TCR clone 306985 (TRBV6-6, TRBJ1-3)
CASSCSKWDSISGNTIYF

SEQ ID NO: 613971 - protein, 13 aa, Homo sapiens
  CDR3 for alpha chain variable domain of TCR clone 306986 (TRAV17, TRAJ5)
CAPMDTGRRALTF

SEQ ID NO: 613972 - protein, 16 aa, Homo sapiens
  CDR3 for beta chain variable domain of TCR clone 306986 (TRBV20-1, TRBJ1-2)
CSASMGQGVANYGYTF

SEQ ID NO: 613973 - protein, 16 aa, Homo sapiens
  CDR3 for alpha chain variable domain of TCR clone 306987 (TRAV30, TRAJ24)
CGTEIVDADSWGKFQF

SEQ ID NO: 613974 - protein, 13 aa, Homo sapiens
  CDR3 for beta chain variable domain of TCR clone 306987 (TRBV24-1, TRBJ1-2)
CATSGTALDGYTF

SEQ ID NO: 613975 - protein, 13 aa, Homo sapiens
  CDR3 for alpha chain variable domain of TCR clone 306988 (TRAV23/DV6, TRAJ20)
GAAGGFHDYKLSF

SEQ ID NO: 613976 - protein, 14 aa, Homo sapiens
  CDR3 for beta chain variable domain of TCR clone 306988 (TRBV3-1, TRBJ2-7)
CASSQSGAHYEQYF

SEQ ID NO: 613977 - protein, 13 aa, Homo sapiens
  CDR3 for alpha chain variable domain of TCR clone 306989 (TRAV12-3, TRAJ33)
CAMSVNSNYQLIW

SEQ ID NO: 613978 - protein, 14 aa, Homo sapiens
  CDR3 for beta chain variable domain of TCR clone 306989 (TRBV20-1, TRBJ2-7)
CSVGGRGPRSEQYF

SEQ ID NO: 613979 - protein, 12 aa, Homo sapiens
  CDR3 for alpha chain variable domain of TCR clone 306990 (TRAV29/DV5, TRAJ34)
CAASGNTDKLIF

SEQ ID NO: 613980 - protein, 14 aa, Homo sapiens
  CDR3 for beta chain variable domain of TCR clone 306990 (TRBV6-1, TRBJ1-3)
CASVQGGGGNTIYF

SEQ ID NO: 613981 - protein, 10 aa, Homo sapiens
  CDR3 for alpha chain variable domain of TCR clone 306991 (TRAV38-1, TRAJ53)
CAFMKHGLES

SEQ ID NO: 613982 - protein, 13 aa, Homo sapiens
  CDR3 for beta chain variable domain of TCR clone 306991 (TRBV19, TRBJ2-7)
CASSPPQSYEQYF

SEQ ID NO: 613983 - protein, 17 aa, Homo sapiens
  CDR3 for alpha chain variable domain of TCR clone 306992 (TRAV6, TRAJ32)
CAPKCMNYGGATNKLIF

SEQ ID NO: 613984 - protein, 12 aa, Homo sapiens
  CDR3 for beta chain variable domain of TCR clone 306992 (TRBV20-1, TRBJ1-2)
CSASREDYGYAF

SEQ ID NO: 613985 - protein, 15 aa, Homo sapiens
  CDR3 for alpha chain variable domain of TCR clone 306993 (TRAV4, TRAJ39)
CLMGPNNNAGNMLTF

SEQ ID NO: 613986 - protein, 13 aa, Homo sapiens
  CDR3 for beta chain variable domain of TCR clone 306993 (TRBV11-2, TRBJ2-5)
CASSSTGEETQYF

SEQ ID NO: 613987 - protein, 13 aa, Homo sapiens
  CDR3 for alpha chain variable domain of TCR clone 306994 (TRAV35, TRAJ42)
CAGFPGRQGNRIF

SEQ ID NO: 613988 - protein, 13 aa, Homo sapiens
  CDR3 for beta chain variable domain of TCR clone 306994 (TRBV29-1, TRBJ2-1)
CSVEGGRVNEQFF

SEQ ID NO: 613989 - protein, 14 aa, Homo sapiens
  CDR3 for alpha chain variable domain of TCR clone 306995 (TRAV38-2/DV8, TRAJ49)
CAYRSPNTGNQFYF

SEQ ID NO: 613990 - protein, 16 aa, Homo sapiens
  CDR3 for beta chain variable domain of TCR clone 306995 (TRBV5-1, TRBJ1-1)
CASSSGGNSLNTEAFF

SEQ ID NO: 613991 - protein, 14 aa, Homo sapiens
  CDR3 for alpha chain variable domain of TCR clone 306996 (TRAV38-1, TRAJ11)
CAFMKHEGHSTLTF

SEQ ID NO: 613992 - protein, 12 aa, Homo sapiens
  CDR3 for beta chain variable domain of TCR clone 306996 (TRBV10-3, TRBJ2-3)
CAISESPQARVF

SEQ ID NO: 613993 - protein, 12 aa, Homo sapiens
  CDR3 for alpha chain variable domain of TCR clone 306997 (TRAV13-1, TRAJ21)
CAAKEGFNKFYF

SEQ ID NO: 613994 - protein, 16 aa, Homo sapiens
  CDR3 for beta chain variable domain of TCR clone 306997 (TRBV4-1, TRBJ2-5)
CASSHAERAGGETQYF

SEQ ID NO: 613995 - protein, 20 aa, Homo sapiens
  CDR3 for alpha chain variable domain of TCR clone 306998 (TRAV4, TRAJ29)
CCVLLPRGCVPFSGNTSLVF

SEQ ID NO: 613996 - protein, 12 aa, Homo sapiens
  CDR3 for beta chain variable domain of TCR clone 306998 (TRBV6-1, TRBJ2-7)
CASSDYSYEQYF

SEQ ID NO: 613997 - protein, 16 aa, Homo sapiens
  CDR3 for alpha chain variable domain of TCR clone 306999 (TRAV30, TRAJ24)
CGTEVVDADSWGKFQF

SEQ ID NO: 613998 - protein, 14 aa, Homo sapiens
  CDR3 for beta chain variable domain of TCR clone 306999 (TRBV12-5, TRBJ2-5)
CASGSRTHQETQYV

SEQ ID NO: 613999 - protein, 15 aa, Homo sapiens
  CDR3 for alpha chain variable domain of TCR clone 307000 (TRAV29/DV5, TRAJ47)
CAARPTMEYGNKMVF

SEQ ID NO: 614000 - protein, 13 aa, Homo sapiens
  CDR3 for beta chain variable domain of TCR clone 307000 (TRBV20-1, TRBJ1-1)
CSARAGGNTEAFF

SEQ ID NO: 614001 - protein, 17 aa, Homo sapiens
  CDR3 for alpha chain variable domain of TCR clone 307001 (TRAV12-3, TRAJ6)
CAMSARGGAGGSYIPTF

SEQ ID NO: 614002 - protein, 12 aa, Homo sapiens
  CDR3 for beta chain variable domain of TCR clone 307001 (TRBV12-4, TRBJ2-3)
CANSALPDTQYF

SEQ ID NO: 614003 - protein, 12 aa, Homo sapiens
  CDR3 for alpha chain variable domain of TCR clone 307002 (TRAV12-3, TRAJ17)
CAMTLTGNTLTL

SEQ ID NO: 614004 - protein, 15 aa, Homo sapiens
  CDR3 for beta chain variable domain of TCR clone 307002 (TRBV20-1, TRBJ2-7)
CSARDRVSGMDEQYF

SEQ ID NO: 614005 - protein, 12 aa, Homo sapiens
  CDR3 for alpha chain variable domain of TCR clone 307003 (TRAV17, TRAJ30)
CATDARDDKLIF

SEQ ID NO: 614006 - protein, 15 aa, Homo sapiens
  CDR3 for beta chain variable domain of TCR clone 307003 (TRBV4-1, TRBJ2-1)
CASNQGGELYNEQFF

SEQ ID NO: 614007 - protein, 14 aa, Homo sapiens
  CDR3 for alpha chain variable domain of TCR clone 307004 (TRAV30, TRAJ33)
CRTVAPRSNYQLIW

SEQ ID NO: 614008 - protein, 16 aa, Homo sapiens
  CDR3 for beta chain variable domain of TCR clone 307004 (TRBV3-1, TRBJ2-5)
CASSPGQFNGFGTQYF

SEQ ID NO: 614009 - protein, 16 aa, Homo sapiens
  CDR3 for alpha chain variable domain of TCR clone 307005 (TRAV20, TRAJ38)
CAVQASNAGNNRKLTW

SEQ ID NO: 614010 - protein, 14 aa, Homo sapiens
  CDR3 for beta chain variable domain of TCR clone 307005 (TRBV7-2, TRBJ1-1)
CASSFLTGTTEAFF

SEQ ID NO: 614011 - protein, 12 aa, Homo sapiens
  CDR3 for alpha chain variable domain of TCR clone 307006 (TRAV17, TRAJ12)
CATLRSSYKLIF

SEQ ID NO: 614012 - protein, 14 aa, Homo sapiens
  CDR3 for beta chain variable domain of TCR clone 307006 (TRBV11-2, TRBJ2-3)
CASSRLARTDTQYF

SEQ ID NO: 614013 - protein, 11 aa, Homo sapiens
  CDR3 for alpha chain variable domain of TCR clone 307007 (TRAV17, TRAJ31)
CATDRTDRLMF

SEQ ID NO: 614014 - protein, 14 aa, Homo sapiens
  CDR3 for beta chain variable domain of TCR clone 307007 (TRBV4-1, TRBJ2-2)
CASSQAVNTGELFF

SEQ ID NO: 614015 - protein, 12 aa, Homo sapiens
  CDR3 for alpha chain variable domain of TCR clone 307008 (TRAV13-1, TRAJ24)
CAALGSWGKLQF

SEQ ID NO: 614016 - protein, 12 aa, Homo sapiens
  CDR3 for beta chain variable domain of TCR clone 307008 (TRBV11-2, TRBJ2-2)
CASSLGGGELFF

SEQ ID NO: 614017 - protein, 10 aa, Homo sapiens
  CDR3 for alpha chain variable domain of TCR clone 307009 (TRAV12-2, TRAJ20)
CAVYPYKLSF

SEQ ID NO: 614018 - protein, 14 aa, Homo sapiens
  CDR3 for beta chain variable domain of TCR clone 307009 (TRBV10-3, TRBJ2-2)
CAISEVSHSGELVF

SEQ ID NO: 614019 - protein, 17 aa, Homo sapiens
  CDR3 for alpha chain variable domain of TCR clone 307010 (TRAV3, TRAJ6)
CALRDGPRAGGSYIPTF

SEQ ID NO: 614020 - protein, 15 aa, Homo sapiens
  CDR3 for beta chain variable domain of TCR clone 307010 (TRBV5-8, TRBJ2-2)
CASSLDRGATGELFF

SEQ ID NO: 614021 - protein, 12 aa, Homo sapiens
  CDR3 for alpha chain variable domain of TCR clone 307011 (TRAV12-3, TRAJ17)
CAMTLTGNRLTF

SEQ ID NO: 614022 - protein, 15 aa, Homo sapiens
  CDR3 for beta chain variable domain of TCR clone 307011 (TRBV11-3, TRBJ2-7)
CASSPGPASSYEQYF

SEQ ID NO: 614023 - protein, 14 aa, Homo sapiens
  CDR3 for alpha chain variable domain of TCR clone 307012 (TRAV2, TRAJ26)
CAVEDWNYGQNFVF

SEQ ID NO: 614024 - protein, 15 aa, Homo sapiens
  CDR3 for beta chain variable domain of TCR clone 307012 (TRBV15, TRBJ1-5)
CATSRDPVSNQPQHF

SEQ ID NO: 614025 - protein, 16 aa, Homo sapiens
  CDR3 for alpha chain variable domain of TCR clone 307013 (TRAV2, TRAJ4)
CAVEDRFSGGHNKLIF

SEQ ID NO: 614026 - protein, 13 aa, Homo sapiens
  CDR3 for beta chain variable domain of TCR clone 307013 (TRBV7-7, TRBJ2-5)
CASSRSGQETQYF

SEQ ID NO: 614027 - protein, 14 aa, Homo sapiens
  CDR3 for alpha chain variable domain of TCR clone 307014 (TRAV1-2, TRAJ16)
CAVNRFSDGPKLLF

SEQ ID NO: 614028 - protein, 13 aa, Homo sapiens
  CDR3 for beta chain variable domain of TCR clone 307014 (TRBV10-3, TRBJ2-7)
CASKLAVNYEQYF

SEQ ID NO: 614029 - protein, 14 aa, Homo sapiens
  CDR3 for alpha chain variable domain of TCR clone 307015 (TRAV17, TRAJ34)
CATDSLEGTDKLIF

SEQ ID NO: 614030 - protein, 17 aa, Homo sapiens
  CDR3 for beta chain variable domain of TCR clone 307015 (TRBV20-1, TRBJ1-6)
CSARGGYTFSYNSPLHL

SEQ ID NO: 614031 - protein, 16 aa, Homo sapiens
  CDR3 for alpha chain variable domain of TCR clone 307016 (TRAV3, TRAJ37)
CAVRGKGSGNTGKLIF

SEQ ID NO: 614032 - protein, 15 aa, Homo sapiens
  CDR3 for beta chain variable domain of TCR clone 307016 (TRBV18, TRBJ2-2)
CASSTSGLHTGELFF

SEQ ID NO: 614033 - protein, 15 aa, Homo sapiens
  CDR3 for alpha chain variable domain of TCR clone 307017 (TRAV23/DV6, TRAJ18)
CAASFRGSTLGTLYF

SEQ ID NO: 614034 - protein, 13 aa, Homo sapiens
  CDR3 for beta chain variable domain of TCR clone 307017 (TRBV28, TRBJ2-7)
CAILDRAGGEQYF

SEQ ID NO: 614035 - protein, 15 aa, Homo sapiens
  CDR3 for alpha chain variable domain of TCR clone 307018 (TRAV30, TRAJ32)
CGTEILGGATTKLIF

SEQ ID NO: 614036 - protein, 13 aa, Homo sapiens
  CDR3 for beta chain variable domain of TCR clone 307018 (TRBV6-3, TRBJ2-7)
CASSFSGGYEQYF

SEQ ID NO: 614037 - protein, 13 aa, Homo sapiens
  CDR3 for alpha chain variable domain of TCR clone 307019 (TRAV2, TRAJ29)
CAAGDSGNTPLVF

SEQ ID NO: 614038 - protein, 16 aa, Homo sapiens
  CDR3 for beta chain variable domain of TCR clone 307019 (TRBV7-9, TRBJ1-2)
CASSTGGGAINYGYTF

SEQ ID NO: 614039 - protein, 11 aa, Homo sapiens
  CDR3 for alpha chain variable domain of TCR clone 307020 (TRAV1-1, TRAJ23)
CAVRQGGKLIF

SEQ ID NO: 614040 - protein, 16 aa, Homo sapiens
  CDR3 for beta chain variable domain of TCR clone 307020 (TRBV7-8, TRBJ2-2)
CASSHLFPRADYPYHR

SEQ ID NO: 614041 - protein, 16 aa, Homo sapiens
  CDR3 for alpha chain variable domain of TCR clone 307021 (TRAV27, TRAJ52)
CAGAPAGGTSYGKLTF

SEQ ID NO: 614042 - protein, 12 aa, Homo sapiens
  CDR3 for beta chain variable domain of TCR clone 307021 (TRBV27, TRBJ2-1)
CASRGFYNEPFF

SEQ ID NO: 614043 - protein, 14 aa, Homo sapiens
  CDR3 for alpha chain variable domain of TCR clone 307022 (TRAV1-2, TRAJ8)
CAVREDTGFQKLVF

SEQ ID NO: 614044 - protein, 15 aa, Homo sapiens
  CDR3 for beta chain variable domain of TCR clone 307022 (TRBV27, TRBJ1-6)
CASSFDRGLGSHLHF

SEQ ID NO: 614045 - protein, 14 aa, Homo sapiens
  CDR3 for alpha chain variable domain of TCR clone 307023 (TRAV12-2, TRAJ24)
CAVTPADSWGKLQF

SEQ ID NO: 614046 - protein, 13 aa, Homo sapiens
  CDR3 for beta chain variable domain of TCR clone 307023 (TRBV19, TRBJ1-5)
CASSIGGNQPQHF

SEQ ID NO: 614047 - protein, 15 aa, Homo sapiens
  CDR3 for alpha chain variable domain of TCR clone 307024 (TRAV34, TRAJ36)
CGAPSRLGGANNLFF

SEQ ID NO: 614048 - protein, 16 aa, Homo sapiens
  CDR3 for beta chain variable domain of TCR clone 307024 (TRBV4-3, TRBJ2-1)
CASSFRRLGSWDEQFF

SEQ ID NO: 614049 - protein, 14 aa, Homo sapiens
  CDR3 for alpha chain variable domain of TCR clone 307025 (TRAV12-1, TRAJ3)
CVVNPGSSASTIIF

SEQ ID NO: 614050 - protein, 14 aa, Homo sapiens
  CDR3 for beta chain variable domain of TCR clone 307025 (TRBV20-1, TRBJ2-3)
CSARGGTSTDTQYF

SEQ ID NO: 614051 - protein, 19 aa, Homo sapiens
  CDR3 for alpha chain variable domain of TCR clone 307026 (TRAV26-1, TRAJ52)
CIVRAHRNAGGTSYGKLTF

SEQ ID NO: 614052 - protein, 14 aa, Homo sapiens
  CDR3 for beta chain variable domain of TCR clone 307026 (TRBV7-3, TRBJ2-1)
CASSLAGGTNEQFF

SEQ ID NO: 614053 - protein, 14 aa, Homo sapiens
  CDR3 for alpha chain variable domain of TCR clone 307027 (TRAV20, TRAJ18)
CAVGRGSTLGRLYF

SEQ ID NO: 614054 - protein, 14 aa, Homo sapiens
  CDR3 for beta chain variable domain of TCR clone 307027 (TRBV28, TRBJ2-4)
CDSTQVTGVNIQYF

SEQ ID NO: 614055 - protein, 10 aa, Homo sapiens
  CDR3 for alpha chain variable domain of TCR clone 307028 (TRAV20, TRAJ22)
CAASARQLTF

SEQ ID NO: 614056 - protein, 14 aa, Homo sapiens
  CDR3 for beta chain variable domain of TCR clone 307028 (TRBV19, TRBJ2-1)
CASSMGSGATEQFF

SEQ ID NO: 614057 - protein, 14 aa, Homo sapiens
  CDR3 for alpha chain variable domain of TCR clone 307029 (TRAV22, TRAJ6)
FPGVGPGGSYIPTF

SEQ ID NO: 614058 - protein, 14 aa, Homo sapiens
  CDR3 for beta chain variable domain of TCR clone 307029 (TRBV9, TRBJ2-7)
CASSVGVGSYEQYF

SEQ ID NO: 614059 - protein, 15 aa, Homo sapiens
  CDR3 for alpha chain variable domain of TCR clone 307030 (TRAV2, TRAJ9)
CAVEDRGTGGFKTVF

SEQ ID NO: 614060 - protein, 14 aa, Homo sapiens
  CDR3 for beta chain variable domain of TCR clone 307030 (TRBV12-5, TRBJ2-5)
CASGSRTHQETQYF

SEQ ID NO: 614061 - protein, 14 aa, Homo sapiens
  CDR3 for alpha chain variable domain of TCR clone 307031 (TRAV1-2, TRAJ8)
CAVREDTGFQKLGC

SEQ ID NO: 614062 - protein, 15 aa, Homo sapiens
  CDR3 for beta chain variable domain of TCR clone 307031 (TRBV28, TRBJ2-4)
CAAGSGTLLMGMQYF

SEQ ID NO: 614063 - protein, 13 aa, Homo sapiens
  CDR3 for alpha chain variable domain of TCR clone 307032 (TRAV1-2, TRAJ12)
CAVSMDSSYKLIF

SEQ ID NO: 614064 - protein, 15 aa, Homo sapiens
  CDR3 for beta chain variable domain of TCR clone 307032 (TRBV9, TRBJ1-6)
CASSVAGTGDSPLHF

SEQ ID NO: 614065 - protein, 14 aa, Homo sapiens
  CDR3 for alpha chain variable domain of TCR clone 307033 (TRAV17, TRAJ40)
CATALTSETYKYIF

SEQ ID NO: 614066 - protein, 13 aa, Homo sapiens
  CDR3 for beta chain variable domain of TCR clone 307033 (TRBV7-6, TRBJ1-2)
CASSLVADYGYTF

SEQ ID NO: 614067 - protein, 19 aa, Homo sapiens
  CDR3 for alpha chain variable domain of TCR clone 307034 (TRAV26-1, TRAJ29)
CCVLFHRQSRGSGNTPLVF

SEQ ID NO: 614068 - protein, 14 aa, Homo sapiens
  CDR3 for beta chain variable domain of TCR clone 307034 (TRBV18, TRBJ2-5)
CASSPGVSQETQYF

SEQ ID NO: 614069 - protein, 14 aa, Homo sapiens
  CDR3 for alpha chain variable domain of TCR clone 307035 (TRAV21, TRAJ37)
CAASGSSKTGKLIF

SEQ ID NO: 614070 - protein, 15 aa, Homo sapiens
  CDR3 for beta chain variable domain of TCR clone 307035 (TRBV5-8, TRBJ2-1)
CASSLGALRANEQFF

SEQ ID NO: 614071 - protein, 14 aa, Homo sapiens
  CDR3 for alpha chain variable domain of TCR clone 307036 (TRAV13-1, TRAJ13)
CAASRVGGYQKVTF

SEQ ID NO: 614072 - protein, 13 aa, Homo sapiens
  CDR3 for beta chain variable domain of TCR clone 307036 (TRBV11-2, TRBJ1-1)
CASSLGNGAEAFF

SEQ ID NO: 614073 - protein, 18 aa, Homo sapiens
  CDR3 for alpha chain variable domain of TCR clone 307037 (TRAV21, TRAJ53)
CAVKGGENSGGSNYKLTV

SEQ ID NO: 614074 - protein, 18 aa, Homo sapiens
  CDR3 for beta chain variable domain of TCR clone 307037 (TRBV11-2, TRBJ2-3)
CASSLGGASRGAPNTQYF

SEQ ID NO: 614075 - protein, 13 aa, Homo sapiens
  CDR3 for alpha chain variable domain of TCR clone 307038 (TRAV13-1, TRAJ6)
CAASSGGSYLPTF

SEQ ID NO: 614076 - protein, 14 aa, Homo sapiens
  CDR3 for beta chain variable domain of TCR clone 307038 (TRBV20-1, TRBJ2-4)
CSAVAGGPGNIQYF

SEQ ID NO: 614077 - protein, 14 aa, Homo sapiens
  CDR3 for alpha chain variable domain of TCR clone 307039 (TRAV23/DV6, TRAJ37)
CAASTSSNTGKLIF

SEQ ID NO: 614078 - protein, 16 aa, Homo sapiens
  CDR3 for beta chain variable domain of TCR clone 307039 (TRBV11-2, TRBJ1-2)
CASSLDTGGADYGYTF

SEQ ID NO: 614079 - protein, 14 aa, Homo sapiens
  CDR3 for alpha chain variable domain of TCR clone 307040 (TRAV1-2, TRAJ8)
CAVREDTSFQKLVF

SEQ ID NO: 614080 - protein, 14 aa, Homo sapiens
  CDR3 for beta chain variable domain of TCR clone 307040 (TRBV7-9, TRBJ1-1)
CASTPLQSYTEAFF

SEQ ID NO: 614081 - protein, 12 aa, Homo sapiens
  CDR3 for alpha chain variable domain of TCR clone 307041 (TRAV12-1, TRAJ40)
CVFYSGTYKYIF

SEQ ID NO: 614082 - protein, 16 aa, Homo sapiens
  CDR3 for beta chain variable domain of TCR clone 307041 (TRBV19, TRBJ2-2)
CASSTARASNTGELFF

SEQ ID NO: 614083 - protein, 14 aa, Homo sapiens
  CDR3 for alpha chain variable domain of TCR clone 307042 (TRAV26-1, TRAJ39)
CIVKGSRAGNMPTF

SEQ ID NO: 614084 - protein, 15 aa, Homo sapiens
  CDR3 for beta chain variable domain of TCR clone 307042 (TRBV7-9, TRBJ1-5)
CASSQGHQPNQPQHF

SEQ ID NO: 614085 - protein, 12 aa, Homo sapiens
  CDR3 for alpha chain variable domain of TCR clone 307043 (TRAV21, TRAJ33)
CAKMDSDYQLIW

SEQ ID NO: 614086 - protein, 14 aa, Homo sapiens
  CDR3 for beta chain variable domain of TCR clone 307043 (TRBV12-4, TRBJ2-3)
CASTIAGWGDTQYF

SEQ ID NO: 614087 - protein, 14 aa, Homo sapiens
  CDR3 for alpha chain variable domain of TCR clone 307044 (TRAV35, TRAJ42)
CCVPYGGSQGNLIF

SEQ ID NO: 614088 - protein, 16 aa, Homo sapiens
  CDR3 for beta chain variable domain of TCR clone 307044 (TRBV29-1, TRBJ1-2)
CSVEANRDIANYGYTF

SEQ ID NO: 614089 - protein, 15 aa, Homo sapiens
  CDR3 for alpha chain variable domain of TCR clone 307045 (TRAV30, TRAJ32)
CGTVILGGATNKLIF

SEQ ID NO: 614090 - protein, 13 aa, Homo sapiens
  CDR3 for beta chain variable domain of TCR clone 307045 (TRBV6-3, TRBJ2-7)
CASSVSGGYEQYF

SEQ ID NO: 614091 - protein, 14 aa, Homo sapiens
  CDR3 for alpha chain variable domain of TCR clone 307046 (TRAV12-2, TRAJ33)
CAVKRARSNYQLTW

SEQ ID NO: 614092 - protein, 15 aa, Homo sapiens
  CDR3 for beta chain variable domain of TCR clone 307046 (TRBV20-1, TRBJ2-7)
CSARDRVAGMDEQYF

SEQ ID NO: 614093 - protein, 14 aa, Homo sapiens
  CDR3 for alpha chain variable domain of TCR clone 307047 (TRAV12-2, TRAJ9)
CAVNALEGGFKTIF

SEQ ID NO: 614094 - protein, 16 aa, Homo sapiens
  CDR3 for beta chain variable domain of TCR clone 307047 (TRBV7-2, TRBJ2-7)
CASSLGLAGGAYEQYF

SEQ ID NO: 614095 - protein, 12 aa, Homo sapiens
  CDR3 for alpha chain variable domain of TCR clone 307048 (TRAV8-1, TRAJ23)
CAVGNQGGKLIF

SEQ ID NO: 614096 - protein, 13 aa, Homo sapiens
  CDR3 for beta chain variable domain of TCR clone 307048 (TRBV7-3, TRBJ1-2)
CASSLKQNYGDTF

SEQ ID NO: 614097 - protein, 12 aa, Homo sapiens
  CDR3 for alpha chain variable domain of TCR clone 307049 (TRAV12-2, TRAJ17)
CRGRAAGNKLTF

SEQ ID NO: 614098 - protein, 11 aa, Homo sapiens
  CDR3 for beta chain variable domain of TCR clone 307049 (TRBV29-1, TRBJ2-5)
CSEDRTGTQYF

SEQ ID NO: 614099 - protein, 12 aa, Homo sapiens
  CDR3 for alpha chain variable domain of TCR clone 307050 (TRAV12-2, TRAJ49)
CAVTNTGNQFYF

SEQ ID NO: 614100 - protein, 13 aa, Homo sapiens
  CDR3 for beta chain variable domain of TCR clone 307050 (TRBV11-2, TRBJ1-1)
CASSLAKDSKAFF

SEQ ID NO: 614101 - protein, 15 aa, Homo sapiens
  CDR3 for alpha chain variable domain of TCR clone 307051 (TRAV13-1, TRAJ42)
CAAPNYGGSQGNLIF

SEQ ID NO: 614102 - protein, 15 aa, Homo sapiens
  CDR3 for beta chain variable domain of TCR clone 307051 (TRBV19, TRBJ1-1)
CASMGFRDVNTEAFF

SEQ ID NO: 614103 - protein, 14 aa, Homo sapiens
  CDR3 for alpha chain variable domain of TCR clone 307052 (TRAV26-1, TRAJ38)
CIADNAGNNRKLIW

SEQ ID NO: 614104 - protein, 13 aa, Homo sapiens
  CDR3 for beta chain variable domain of TCR clone 307052 (TRBV15, TRBJ1-6)
CATSGGLNSPLHL

SEQ ID NO: 614105 - protein, 15 aa, Homo sapiens
  CDR3 for alpha chain variable domain of TCR clone 307053 (TRAV17, TRAJ23)
YATDAEDNQGGKLIF

SEQ ID NO: 614106 - protein, 12 aa, Homo sapiens
  CDR3 for beta chain variable domain of TCR clone 307053 (TRBV2, TRBJ2-1)
CAKREGYNEQFF

SEQ ID NO: 614107 - protein, 12 aa, Homo sapiens
  CDR3 for alpha chain variable domain of TCR clone 307054 (TRAV12-3, TRAJ17)
CAMTLTGNKLTF

SEQ ID NO: 614108 - protein, 12 aa, Homo sapiens
  CDR3 for beta chain variable domain of TCR clone 307054 (TRBV28, TRBJ1-5)
CASRDSNQPQHF

SEQ ID NO: 614109 - protein, 14 aa, Homo sapiens
  CDR3 for alpha chain variable domain of TCR clone 307055 (TRAV9-2, TRAJ35)
CALRSIGFGNVQHC

SEQ ID NO: 614110 - protein, 12 aa, Homo sapiens
  CDR3 for beta chain variable domain of TCR clone 307055 (TRBV5-4, TRBJ2-5)
CASSSTRETQYF

SEQ ID NO: 614111 - protein, 12 aa, Homo sapiens
  CDR3 for alpha chain variable domain of TCR clone 307056 (TRAV3, TRAJ20)
CAVREPDYKLSF

SEQ ID NO: 614112 - protein, 15 aa, Homo sapiens
  CDR3 for beta chain variable domain of TCR clone 307056 (TRBV6-5, TRBJ2-5)
CASSPLAGGIETQYF

SEQ ID NO: 614113 - protein, 18 aa, Homo sapiens
  CDR3 for alpha chain variable domain of TCR clone 307057 (TRAV21, TRAJ52)
CAVRPSPAGGTSYGKLTF

SEQ ID NO: 614114 - protein, 12 aa, Homo sapiens
  CDR3 for beta chain variable domain of TCR clone 307057 (TRBV19, TRBJ2-3)
CATTSSTDTQYF

SEQ ID NO: 614115 - protein, 14 aa, Homo sapiens
  CDR3 for alpha chain variable domain of TCR clone 307058 (TRAV35, TRAJ22)
CAGLRPGSARQLTF

SEQ ID NO: 614116 - protein, 13 aa, Homo sapiens
  CDR3 for beta chain variable domain of TCR clone 307058 (TRBV10-3, TRBJ2-7)
RASKLAVNYEQYF

SEQ ID NO: 614117 - protein, 17 aa, Homo sapiens
  CDR3 for alpha chain variable domain of TCR clone 307059 (TRAV26-1, TRAJ53)
CIVRVDDSGGSNNKLTF

SEQ ID NO: 614118 - protein, 19 aa, Homo sapiens
  CDR3 for beta chain variable domain of TCR clone 307059 (TRBV25-1, TRBJ2-2)
CAILVYRVDRGRKTGELFF

SEQ ID NO: 614119 - protein, 14 aa, Homo sapiens
  CDR3 for alpha chain variable domain of TCR clone 307060 (TRAV17, TRAJ15)
CATDRGQAGTALIF

SEQ ID NO: 614120 - protein, 17 aa, Homo sapiens
  CDR3 for beta chain variable domain of TCR clone 307060 (TRBV29-1, TRBJ2-1)
CSVVGLAGAYAYNEQFF

SEQ ID NO: 614121 - protein, 14 aa, Homo sapiens
  CDR3 for alpha chain variable domain of TCR clone 307061 (TRAV16, TRAJ34)
CALPYDYNTDKLIF

SEQ ID NO: 614122 - protein, 16 aa, Homo sapiens
  CDR3 for beta chain variable domain of TCR clone 307061 (TRBV7-6, TRBJ2-1)
CASSAPGPSSYNEQFF

SEQ ID NO: 614123 - protein, 16 aa, Homo sapiens
  CDR3 for alpha chain variable domain of TCR clone 307062 (TRAV12-2, TRAJ28)
CAVITDSGAGSYQLTF

SEQ ID NO: 614124 - protein, 12 aa, Homo sapiens
  CDR3 for beta chain variable domain of TCR clone 307062 (TRBV9, TRBJ2-2)
CASSLVTGELFF

SEQ ID NO: 614125 - protein, 17 aa, Homo sapiens
  CDR3 for alpha chain variable domain of TCR clone 307063 (TRAV3, TRAJ42)
CAVRDRDYGGSQGNLIF

SEQ ID NO: 614126 - protein, 14 aa, Homo sapiens
  CDR3 for beta chain variable domain of TCR clone 307063 (TRBV7-2, TRBJ2-5)
CASSPRGSSDTQYF

SEQ ID NO: 614127 - protein, 13 aa, Homo sapiens
  CDR3 for alpha chain variable domain of TCR clone 307064 (TRAV35, TRAJ22)
CWAKAGSARQLTF

SEQ ID NO: 614128 - protein, 15 aa, Homo sapiens
  CDR3 for beta chain variable domain of TCR clone 307064 (TRBV12-4, TRBJ2-5)
CASSPPTGLQETHYF

SEQ ID NO: 614129 - protein, 17 aa, Homo sapiens
  CDR3 for alpha chain variable domain of TCR clone 307065 (TRAV26-2, TRAJ42)
CILRDVGYGGSQGNLIF

SEQ ID NO: 614130 - protein, 15 aa, Homo sapiens
  CDR3 for beta chain variable domain of TCR clone 307065 (TRBV7-9, TRBJ1-4)
CASSARTGGNEKLFF

SEQ ID NO: 614131 - protein, 12 aa, Homo sapiens
  CDR3 for alpha chain variable domain of TCR clone 307066 (TRAV16, TRAJ26)
CALRSYVQNFVF

SEQ ID NO: 614132 - protein, 14 aa, Homo sapiens
  CDR3 for beta chain variable domain of TCR clone 307066 (TRBV10-3, TRBJ2-1)
CAISSDLAYNEQFF

SEQ ID NO: 614133 - protein, 16 aa, Homo sapiens
  CDR3 for alpha chain variable domain of TCR clone 307067 (TRAV8-3, TRAJ52)
CAVQPAGGTSYGKLTF

SEQ ID NO: 614134 - protein, 12 aa, Homo sapiens
  CDR3 for beta chain variable domain of TCR clone 307067 (TRBV7-9, TRBJ1-1)
CASSLVRGEAFF

SEQ ID NO: 614135 - protein, 18 aa, Homo sapiens
  CDR3 for alpha chain variable domain of TCR clone 307068 (TRAV29/DV5, TRAJ52)
CAAGFRGAGGTSYGKLTF

SEQ ID NO: 614136 - protein, 13 aa, Homo sapiens
  CDR3 for beta chain variable domain of TCR clone 307068 (TRBV15, TRBJ1-6)
CATSGGLNSPLHF

SEQ ID NO: 614137 - protein, 12 aa, Homo sapiens
  CDR3 for alpha chain variable domain of TCR clone 307069 (TRAV30, TRAJ43)
CGTEERGNDMRF

SEQ ID NO: 614138 - protein, 14 aa, Homo sapiens
  CDR3 for beta chain variable domain of TCR clone 307069 (TRBV7-2, TRBJ2-7)
CASSPKTSCYEQYF

SEQ ID NO: 614139 - protein, 15 aa, Homo sapiens
  CDR3 for alpha chain variable domain of TCR clone 307070 (TRAV13-1, TRAJ57)
QVPPLSQGGSERLVF

SEQ ID NO: 614140 - protein, 17 aa, Homo sapiens
  CDR3 for beta chain variable domain of TCR clone 307070 (TRBV7-3, TRBJ2-3)
CASSLMERMRGADTQYF

SEQ ID NO: 614141 - protein, 12 aa, Homo sapiens
  CDR3 for alpha chain variable domain of TCR clone 307071 (TRAV2, TRAJ33)
CAFMGSNYQLIW

SEQ ID NO: 614142 - protein, 16 aa, Homo sapiens
  CDR3 for beta chain variable domain of TCR clone 307071 (TRBV12-4, TRBJ2-5)
CASSFFVRGRQETQYF

SEQ ID NO: 614143 - protein, 11 aa, Homo sapiens
  CDR3 for alpha chain variable domain of TCR clone 307072 (TRAV12-3, TRAJ43)
CAMSVSNDMRF

SEQ ID NO: 614144 - protein, 11 aa, Homo sapiens
  CDR3 for beta chain variable domain of TCR clone 307072 (TRBV7-8, TRBJ2-7)
CASSLSLEQYF

SEQ ID NO: 614145 - protein, 13 aa, Homo sapiens
  CDR3 for alpha chain variable domain of TCR clone 307073 (TRAV1-2, TRAJ9)
CAALNTGGFKTIF

SEQ ID NO: 614146 - protein, 14 aa, Homo sapiens
  CDR3 for beta chain variable domain of TCR clone 307073 (TRBV4-2, TRBJ2-7)
CASSQGQTAYEQYF

SEQ ID NO: 614147 - protein, 13 aa, Homo sapiens
  CDR3 for alpha chain variable domain of TCR clone 307074 (TRAV3, TRAJ36)
CAVRDTGANNLFF

SEQ ID NO: 614148 - protein, 15 aa, Homo sapiens
  CDR3 for beta chain variable domain of TCR clone 307074 (TRBV20-1, TRBJ2-7)
CSAESGTSGAYEQYF

SEQ ID NO: 614149 - protein, 21 aa, Homo sapiens
  CDR3 for alpha chain variable domain of TCR clone 307075 (TRAV1-1, TRAJ6)
CLLLLRCERLERTGGSYIPTF

SEQ ID NO: 614150 - protein, 14 aa, Homo sapiens
  CDR3 for beta chain variable domain of TCR clone 307075 (TRBV7-2, TRBJ2-5)
CASSLSGGGEAQYF

SEQ ID NO: 614151 - protein, 12 aa, Homo sapiens
  CDR3 for alpha chain variable domain of TCR clone 307076 (TRAV21, TRAJ11)
CAVTSGYSTLTF

SEQ ID NO: 614152 - protein, 13 aa, Homo sapiens
  CDR3 for beta chain variable domain of TCR clone 307076 (TRBV20-1, TRBJ1-1)
CSARGGGNTEAFF

SEQ ID NO: 614153 - protein, 18 aa, Homo sapiens
  CDR3 for alpha chain variable domain of TCR clone 307077 (TRAV17, TRAJ45)
CATSLDLYSVGGADGLTF

SEQ ID NO: 614154 - protein, 15 aa, Homo sapiens
  CDR3 for beta chain variable domain of TCR clone 307077 (TRBV11-2, TRBJ2-1)
CASSKNRGLIYEQFF

SEQ ID NO: 614155 - protein, 18 aa, Homo sapiens
  CDR3 for alpha chain variable domain of TCR clone 307078 (TRAV26-1, TRAJ52)
CIVRVEGAGGTSYGNLTF

SEQ ID NO: 614156 - protein, 13 aa, Homo sapiens
  CDR3 for beta chain variable domain of TCR clone 307078 (TRBV7-3, TRBJ1-2)
CASSLKRGYGYTS

SEQ ID NO: 614157 - protein, 15 aa, Homo sapiens
  CDR3 for alpha chain variable domain of TCR clone 307079 (TRAV26-1, TRAJ29)
CIVRVEGSGNTLLVF

SEQ ID NO: 614158 - protein, 15 aa, Homo sapiens
  CDR3 for beta chain variable domain of TCR clone 307079 (TRBV7-9, TRBJ1-5)
CASSQGHQPNQTQHF

SEQ ID NO: 614159 - protein, 11 aa, Homo sapiens
  CDR3 for alpha chain variable domain of TCR clone 307080 (TRAV12-3, TRAJ49)
CAANTGNQFYF

SEQ ID NO: 614160 - protein, 15 aa, Homo sapiens
  CDR3 for beta chain variable domain of TCR clone 307080 (TRBV11-2, TRBJ2-1)
SASSLGTSGLNEQFF

SEQ ID NO: 614161 - protein, 14 aa, Homo sapiens
  CDR3 for alpha chain variable domain of TCR clone 307081 (TRAV12-2, TRAJ13)
CAVQKTGGYQKVTF

SEQ ID NO: 614162 - protein, 14 aa, Homo sapiens
  CDR3 for beta chain variable domain of TCR clone 307081 (TRBV5-5, TRBJ2-7)
CASSSGQGTYEQYF

SEQ ID NO: 614163 - protein, 13 aa, Homo sapiens
  CDR3 for alpha chain variable domain of TCR clone 307082 (TRAV17, TRAJ40)
CAGALGGTNKYIF

SEQ ID NO: 614164 - protein, 16 aa, Homo sapiens
  CDR3 for beta chain variable domain of TCR clone 307082 (TRBV7-2, TRBJ1-4)
CASSLAPGRRDEKLFF

SEQ ID NO: 614165 - protein, 12 aa, Homo sapiens
  CDR3 for alpha chain variable domain of TCR clone 307083 (TRAV26-1, TRAJ23)
CIVTPQGGKLIF

SEQ ID NO: 614166 - protein, 15 aa, Homo sapiens
  CDR3 for beta chain variable domain of TCR clone 307083 (TRBV2, TRBJ2-7)
CASSEGLARSYEQYF

SEQ ID NO: 614167 - protein, 14 aa, Homo sapiens
  CDR3 for alpha chain variable domain of TCR clone 307084 (TRAV27, TRAJ15)
RAGFDNQAGTALIF

SEQ ID NO: 614168 - protein, 15 aa, Homo sapiens
  CDR3 for beta chain variable domain of TCR clone 307084 (TRBV7-2, TRBJ2-1)
CASTHGTGIYNEQFF

SEQ ID NO: 614169 - protein, 11 aa, Homo sapiens
  CDR3 for alpha chain variable domain of TCR clone 307085 (TRAV21, TRAJ48)
CAVDGNEKLTF

SEQ ID NO: 614170 - protein, 15 aa, Homo sapiens
  CDR3 for beta chain variable domain of TCR clone 307085 (TRBV7-9, TRBJ1-4)
CASSRTGGFNEKLFF

SEQ ID NO: 614171 - protein, 13 aa, Homo sapiens
  CDR3 for alpha chain variable domain of TCR clone 307086 (TRAV27, TRAJ3)
ASLRGSSASKIIF

SEQ ID NO: 614172 - protein, 15 aa, Homo sapiens
  CDR3 for beta chain variable domain of TCR clone 307086 (TRBV28, TRBJ1-3)
CASSMGWASRNTIYF

SEQ ID NO: 614173 - protein, 16 aa, Homo sapiens
  CDR3 for alpha chain variable domain of TCR clone 307087 (TRAV10, TRAJ13)
CVVSARNSGGYQKVTF

SEQ ID NO: 614174 - protein, 19 aa, Homo sapiens
  CDR3 for beta chain variable domain of TCR clone 307087 (TRBV12-4, TRBJ2-1)
CASTLAFDPRDKEANEQFC

SEQ ID NO: 614175 - protein, 12 aa, Homo sapiens
  CDR3 for alpha chain variable domain of TCR clone 307088 (TRAV27, TRAJ13)
CAGVRGYQKVTF

SEQ ID NO: 614176 - protein, 16 aa, Homo sapiens
  CDR3 for beta chain variable domain of TCR clone 307088 (TRBV28, TRBJ2-1)
CASSSSYSGSLNEQYF

SEQ ID NO: 614177 - protein, 18 aa, Homo sapiens
  CDR3 for alpha chain variable domain of TCR clone 307089 (TRAV13-1, TRAJ52)
CAASKRSAGGTSYGKLTF

SEQ ID NO: 614178 - protein, 16 aa, Homo sapiens
  CDR3 for beta chain variable domain of TCR clone 307089 (TRBV7-7, TRBJ2-3)
CASSPGTSGSTDTQYF

SEQ ID NO: 614179 - protein, 16 aa, Homo sapiens
  CDR3 for alpha chain variable domain of TCR clone 307090 (TRAV30, TRAJ24)
CGTEIVDADSWGRFQF

SEQ ID NO: 614180 - protein, 13 aa, Homo sapiens
  CDR3 for beta chain variable domain of TCR clone 307090 (TRBV10-3, TRBJ2-7)
CASKLAVNYEQYF

SEQ ID NO: 614181 - protein, 11 aa, Homo sapiens
  CDR3 for alpha chain variable domain of TCR clone 307091 (TRAV21, TRAJ34)
CAVTNTDKLIF

SEQ ID NO: 614182 - protein, 15 aa, Homo sapiens
  CDR3 for beta chain variable domain of TCR clone 307091 (TRBV7-2, TRBJ2-3)
CASSSTGLETDTQYF

SEQ ID NO: 614183 - protein, 14 aa, Homo sapiens
  CDR3 for alpha chain variable domain of TCR clone 307092 (TRAV2, TRAJ37)
CAVDVTSNTGKLIF

SEQ ID NO: 614184 - protein, 13 aa, Homo sapiens
  CDR3 for beta chain variable domain of TCR clone 307092 (TRBV20-1, TRBJ1-1)
CSAPLGGGTEAFF

SEQ ID NO: 614185 - protein, 14 aa, Homo sapiens
  CDR3 for alpha chain variable domain of TCR clone 307093 (TRAV13-2, TRAJ32)
CAENYVGATNKLIF

SEQ ID NO: 614186 - protein, 17 aa, Homo sapiens
  CDR3 for beta chain variable domain of TCR clone 307093 (TRBV7-8, TRBJ2-6)
CASSAGTGGAGANVLTF

SEQ ID NO: 614187 - protein, 13 aa, Homo sapiens
  CDR3 for alpha chain variable domain of TCR clone 307094 (TRAV12-3, TRAJ21)
CAPGPHNFNKFYF

SEQ ID NO: 614188 - protein, 16 aa, Homo sapiens
  CDR3 for beta chain variable domain of TCR clone 307094 (TRBV5-1, TRBJ2-2)
CASSSYREGDTGELFF

SEQ ID NO: 614189 - protein, 14 aa, Homo sapiens
  CDR3 for alpha chain variable domain of TCR clone 307095 (TRAV35, TRAJ33)
CAGSSQDSNYQLIW

SEQ ID NO: 614190 - protein, 18 aa, Homo sapiens
  CDR3 for beta chain variable domain of TCR clone 307095 (TRBV11-2, TRBJ2-3)
RASSLGGASRGAPNTQYF

SEQ ID NO: 614191 - protein, 14 aa, Homo sapiens
  CDR3 for alpha chain variable domain of TCR clone 307096 (TRAV4, TRAJ6)
CLVPASGGSYIPTF

SEQ ID NO: 614192 - protein, 12 aa, Homo sapiens
  CDR3 for beta chain variable domain of TCR clone 307096 (TRBV6-5, TRBJ2-3)
CASSLSTDTQYF

SEQ ID NO: 614193 - protein, 14 aa, Homo sapiens
  CDR3 for alpha chain variable domain of TCR clone 307097 (TRAV1-2, TRAJ16)
CAVNRFSDCQKLLF

SEQ ID NO: 614194 - protein, 15 aa, Homo sapiens
  CDR3 for beta chain variable domain of TCR clone 307097 (TRBV7-9, TRBJ1-6)
CASSSPGRGNSPLHL

SEQ ID NO: 614195 - protein, 15 aa, Homo sapiens
  CDR3 for alpha chain variable domain of TCR clone 307098 (TRAV35, TRAJ40)
CAGQLWDSGTYKYIF

SEQ ID NO: 614196 - protein, 12 aa, Homo sapiens
  CDR3 for beta chain variable domain of TCR clone 307098 (TRBV7-8, TRBJ2-7)
CASILAGYEQYF

SEQ ID NO: 614197 - protein, 23 aa, Homo sapiens
  CDR3 for alpha chain variable domain of TCR clone 307099 (TRAV26-1, )
CIADNAGNNNIQNHDPAVYQLRD

SEQ ID NO: 614198 - protein, 13 aa, Homo sapiens
  CDR3 for beta chain variable domain of TCR clone 307099 (TRBV20-1, TRBJ1-1)
CSARGGGNTEAFF

SEQ ID NO: 614199 - protein, 15 aa, Homo sapiens
  CDR3 for alpha chain variable domain of TCR clone 307100 (TRAV3, TRAJ5)
CAVRDLDTGRRALTF

SEQ ID NO: 614200 - protein, 19 aa, Homo sapiens
  CDR3 for beta chain variable domain of TCR clone 307100 (TRBV7-3, TRBJ2-2)
CASSLRAGGSGPNTGELFF

SEQ ID NO: 614201 - protein, 12 aa, Homo sapiens
  CDR3 for alpha chain variable domain of TCR clone 307101 (TRAV8-3, TRAJ26)
CAGDNYGKNFVF

SEQ ID NO: 614202 - protein, 14 aa, Homo sapiens
  CDR3 for beta chain variable domain of TCR clone 307101 (TRBV12-4, TRBJ1-1)
CASSLGTGGTEAFF

SEQ ID NO: 614203 - protein, 14 aa, Homo sapiens
  CDR3 for alpha chain variable domain of TCR clone 307102 (TRAV1-1, TRAJ27)
CAVIYNTNAGKSTS

SEQ ID NO: 614204 - protein, 15 aa, Homo sapiens
  CDR3 for beta chain variable domain of TCR clone 307102 (TRBV6-3, TRBJ2-7)
CASSSPGTVFYEQYF

SEQ ID NO: 614205 - protein, 12 aa, Homo sapiens
  CDR3 for alpha chain variable domain of TCR clone 307103 (TRAV13-1, TRAJ21)
CAAKEGSTKIYF

SEQ ID NO: 614206 - protein, 17 aa, Homo sapiens
  CDR3 for beta chain variable domain of TCR clone 307103 (TRBV19, TRBJ2-7)
CASSISFYDSYPYEQYF

SEQ ID NO: 614207 - protein, 17 aa, Homo sapiens
  CDR3 for alpha chain variable domain of TCR clone 307104 (TRAV4, TRAJ42)
CLVGVLNYGGSQGNLIF

SEQ ID NO: 614208 - protein, 13 aa, Homo sapiens
  CDR3 for beta chain variable domain of TCR clone 307104 (TRBV18, TRBJ2-5)
CASSPAGKETQYF

SEQ ID NO: 614209 - protein, 13 aa, Homo sapiens
  CDR3 for alpha chain variable domain of TCR clone 307105 (TRAV8-3, TRAJ5)
CAVGPRGRRALTF

SEQ ID NO: 614210 - protein, 16 aa, Homo sapiens
  CDR3 for beta chain variable domain of TCR clone 307105 (TRBV11-3, TRBJ2-3)
CGSSPGGLLGTDTQYF

SEQ ID NO: 614211 - protein, 13 aa, Homo sapiens
  CDR3 for alpha chain variable domain of TCR clone 307106 (TRAV39, TRAJ49)
CAVDRNTGTHFYF

SEQ ID NO: 614212 - protein, 14 aa, Homo sapiens
  CDR3 for beta chain variable domain of TCR clone 307106 (TRBV4-1, TRBJ1-1)
CASSRSGQSFEAFF

SEQ ID NO: 614213 - protein, 14 aa, Homo sapiens
  CDR3 for alpha chain variable domain of TCR clone 307107 (TRAV3, TRAJ6)
CAVRDWGGSYIPTF

SEQ ID NO: 614214 - protein, 17 aa, Homo sapiens
  CDR3 for beta chain variable domain of TCR clone 307107 (TRBV6-5, TRBJ2-1)
CASRLSGRFESYNAQFF

SEQ ID NO: 614215 - protein, 11 aa, Homo sapiens
  CDR3 for alpha chain variable domain of TCR clone 307108 (TRAV3, TRAJ21)
CAVGNFNKFYF

SEQ ID NO: 614216 - protein, 16 aa, Homo sapiens
  CDR3 for beta chain variable domain of TCR clone 307108 (TRBV19, TRBJ2-1)
CASSKAGPSSYNAQFF

SEQ ID NO: 614217 - protein, 14 aa, Homo sapiens
  CDR3 for alpha chain variable domain of TCR clone 307109 (TRAV1-2, TRAJ16)
CAVNRFSDGPKLLF

SEQ ID NO: 614218 - protein, 14 aa, Homo sapiens
  CDR3 for beta chain variable domain of TCR clone 307109 (TRBV7-9, TRBJ2-3)
CASSLEDGTDTQYF

SEQ ID NO: 614219 - protein, 12 aa, Homo sapiens
  CDR3 for alpha chain variable domain of TCR clone 307110 (TRAV20, TRAJ39)
CAVGNAGNMLTF

SEQ ID NO: 614220 - protein, 16 aa, Homo sapiens
  CDR3 for beta chain variable domain of TCR clone 307110 (TRBV15, TRBJ1-2)
CATSRGRRTGGGGYTF

SEQ ID NO: 614221 - protein, 14 aa, Homo sapiens
  CDR3 for alpha chain variable domain of TCR clone 307111 (TRAV26-1, TRAJ38)
CIADNAGNNRKLIW

SEQ ID NO: 614222 - protein, 14 aa, Homo sapiens
  CDR3 for beta chain variable domain of TCR clone 307111 (TRBV7-3, TRBJ1-1)
CASSLGAGYTEAFF

SEQ ID NO: 614223 - protein, 15 aa, Homo sapiens
  CDR3 for alpha chain variable domain of TCR clone 307112 (TRAV29/DV5, TRAJ22)
CAVRDRGGSARPLTF

SEQ ID NO: 614224 - protein, 16 aa, Homo sapiens
  CDR3 for beta chain variable domain of TCR clone 307112 (TRBV5-4, TRBJ2-3)
CASQQPGAGGADTQYF

SEQ ID NO: 614225 - protein, 14 aa, Homo sapiens
  CDR3 for alpha chain variable domain of TCR clone 307113 (TRAV38-1, TRAJ45)
CAYYSGGGADCLTF

SEQ ID NO: 614226 - protein, 20 aa, Homo sapiens
  CDR3 for beta chain variable domain of TCR clone 307113 (TRBV28, TRBJ2-1)
CASTPIGRSPGLAGGNEQFF

SEQ ID NO: 614227 - protein, 23 aa, Homo sapiens
  CDR3 for alpha chain variable domain of TCR clone 307114 (TRAV26-1, TRAJ38)
CIADNAGNNHIQNPDPAVYQLRD

SEQ ID NO: 614228 - protein, 14 aa, Homo sapiens
  CDR3 for beta chain variable domain of TCR clone 307114 (TRBV2, TRBJ2-5)
CASTWGRAQETQYF

SEQ ID NO: 614229 - protein, 11 aa, Homo sapiens
  CDR3 for alpha chain variable domain of TCR clone 307115 (TRAV12-3, TRAJ27)
CAMANAGKSTF

SEQ ID NO: 614230 - protein, 16 aa, Homo sapiens
  CDR3 for beta chain variable domain of TCR clone 307115 (TRBV28, TRBJ2-7)
CASSLFFETGGPEQYF

SEQ ID NO: 614231 - protein, 17 aa, Homo sapiens
  CDR3 for alpha chain variable domain of TCR clone 307116 (TRAV12-2, TRAJ22)
CAVNRIPFSGSARQLTF

SEQ ID NO: 614232 - protein, 15 aa, Homo sapiens
  CDR3 for beta chain variable domain of TCR clone 307116 (TRBV20-1, TRBJ2-7)
CSARDRVSGMDEQYF

SEQ ID NO: 614233 - protein, 11 aa, Homo sapiens
  CDR3 for alpha chain variable domain of TCR clone 307117 (TRAV3, TRAJ21)
CAVGNFNKIYF

SEQ ID NO: 614234 - protein, 16 aa, Homo sapiens
  CDR3 for beta chain variable domain of TCR clone 307117 (TRBV7-6, TRBJ2-1)
CASSAPGPSSYNEQFF

SEQ ID NO: 614235 - protein, 14 aa, Homo sapiens
  CDR3 for alpha chain variable domain of TCR clone 307118 (TRAV1-2, TRAJ16)
CAVNRFSDGQRLLF

SEQ ID NO: 614236 - protein, 17 aa, Homo sapiens
  CDR3 for beta chain variable domain of TCR clone 307118 (TRBV7-3, TRBJ2-3)
CASSLKKRMRGADTQYF

SEQ ID NO: 614237 - protein, 14 aa, Homo sapiens
  CDR3 for alpha chain variable domain of TCR clone 307119 (TRAV25, TRAJ35)
CARRMEGFGNVLHC

SEQ ID NO: 614238 - protein, 16 aa, Homo sapiens
  CDR3 for beta chain variable domain of TCR clone 307119 (TRBV27, TRBJ2-2)
CASSFRGLVRTGELFF

SEQ ID NO: 614239 - protein, 19 aa, Homo sapiens
  CDR3 for alpha chain variable domain of TCR clone 307120 (TRAV8-4, TRAJ3)
CAVTGENLVQQCFQVNLWF

SEQ ID NO: 614240 - protein, 16 aa, Homo sapiens
  CDR3 for beta chain variable domain of TCR clone 307120 (TRBV4-2, TRBJ1-1)
CASSQAGFGMNTEAFF

SEQ ID NO: 614241 - protein, 15 aa, Homo sapiens
  CDR3 for alpha chain variable domain of TCR clone 307121 (TRAV29/DV5, TRAJ42)
CAAKTDGGSQGNLIF

SEQ ID NO: 614242 - protein, 13 aa, Homo sapiens
  CDR3 for beta chain variable domain of TCR clone 307121 (TRBV10-3, TRBJ1-2)
CAINADLNYGYTF

SEQ ID NO: 614243 - protein, 10 aa, Homo sapiens
  CDR3 for alpha chain variable domain of TCR clone 307122 (TRAV12-2, TRAJ20)
CAVYLYKLSF

SEQ ID NO: 614244 - protein, 15 aa, Homo sapiens
  CDR3 for beta chain variable domain of TCR clone 307122 (TRBV15, TRBJ1-5)
CATSRDPVSNQPQHF

SEQ ID NO: 614245 - protein, 12 aa, Homo sapiens
  CDR3 for alpha chain variable domain of TCR clone 307123 (TRAV2, TRAJ31)
CAVEDNNARLMF

SEQ ID NO: 614246 - protein, 14 aa, Homo sapiens
  CDR3 for beta chain variable domain of TCR clone 307123 (TRBV18, TRBJ1-5)
CASSRQQRNQPQHF

SEQ ID NO: 614247 - protein, 14 aa, Homo sapiens
  CDR3 for alpha chain variable domain of TCR clone 307124 (TRAV8-4, TRAJ48)
CAVSETFGNEKLTF

SEQ ID NO: 614248 - protein, 14 aa, Homo sapiens
  CDR3 for beta chain variable domain of TCR clone 307124 (TRBV13, TRBJ2-7)
CASGLKGASYEQYF

SEQ ID NO: 614249 - protein, 12 aa, Homo sapiens
  CDR3 for alpha chain variable domain of TCR clone 307125 (TRAV16, TRAJ10)
CSRTGGGNKLTF

SEQ ID NO: 614250 - protein, 13 aa, Homo sapiens
  CDR3 for beta chain variable domain of TCR clone 307125 (TRBV7-7, TRBJ2-2)
CASSLTSAGELFF

SEQ ID NO: 614251 - protein, 14 aa, Homo sapiens
  CDR3 for alpha chain variable domain of TCR clone 307126 (TRAV1-2, TRAJ16)
CAVNRFSYGQKLLF

SEQ ID NO: 614252 - protein, 16 aa, Homo sapiens
  CDR3 for beta chain variable domain of TCR clone 307126 (TRBV7-3, TRBJ2-2)
CASSLKRGTLSGELFS

SEQ ID NO: 614253 - protein, 16 aa, Homo sapiens
  CDR3 for alpha chain variable domain of TCR clone 307127 (TRAV30, TRAJ24)
CGTEIVDAYSWGKFQF

SEQ ID NO: 614254 - protein, 16 aa, Homo sapiens
  CDR3 for beta chain variable domain of TCR clone 307127 (TRBV20-1, TRBJ1-4)
CSAPGQGLLTNEKLFF

SEQ ID NO: 614255 - protein, 13 aa, Homo sapiens
  CDR3 for alpha chain variable domain of TCR clone 307128 (TRAV8-3, TRAJ43)
CAVGPDNNNDMRF

SEQ ID NO: 614256 - protein, 15 aa, Homo sapiens
  CDR3 for beta chain variable domain of TCR clone 307128 (TRBV5-1, TRBJ2-2)
CASSLAAGGSGELFF

SEQ ID NO: 614257 - protein, 13 aa, Homo sapiens
  CDR3 for alpha chain variable domain of TCR clone 307129 (TRAV20, TRAJ31)
CAVQAWNNTRLMF

SEQ ID NO: 614258 - protein, 14 aa, Homo sapiens
  CDR3 for beta chain variable domain of TCR clone 307129 (TRBV7-2, TRBJ2-7)
CASSPKTSFYEQYF

SEQ ID NO: 614259 - protein, 14 aa, Homo sapiens
  CDR3 for alpha chain variable domain of TCR clone 307130 (TRAV21, TRAJ15)
CAVSLNRAGTALIF

SEQ ID NO: 614260 - protein, 11 aa, Homo sapiens
  CDR3 for beta chain variable domain of TCR clone 307130 (TRBV20-1, TRBJ2-7)
CSARTSYEQYF

SEQ ID NO: 614261 - protein, 15 aa, Homo sapiens
  CDR3 for alpha chain variable domain of TCR clone 307131 (TRAV26-1, TRAJ28)
CIVRVAWAGSYQLTF

SEQ ID NO: 614262 - protein, 19 aa, Homo sapiens
  CDR3 for beta chain variable domain of TCR clone 307131 (TRBV7-3, TRBJ2-7)
CASSLTGVAGGWPSYEQYF

SEQ ID NO: 614263 - protein, 17 aa, Homo sapiens
  CDR3 for alpha chain variable domain of TCR clone 307132 (TRAV3, TRAJ6)
CAVRDGPRAGGSYIPTF

SEQ ID NO: 614264 - protein, 15 aa, Homo sapiens
  CDR3 for beta chain variable domain of TCR clone 307132 (TRBV7-9, TRBJ1-2)
CASSLGRTVNYGYTF

SEQ ID NO: 614265 - protein, 11 aa, Homo sapiens
  CDR3 for alpha chain variable domain of TCR clone 307133 (TRAV2, TRAJ33)
CAVDSNYQLIC

SEQ ID NO: 614266 - protein, 17 aa, Homo sapiens
  CDR3 for beta chain variable domain of TCR clone 307133 (TRBV20-1, TRBJ2-3)
CSARDGWNAKERDTQHF

SEQ ID NO: 614267 - protein, 14 aa, Homo sapiens
  CDR3 for alpha chain variable domain of TCR clone 307134 (TRAV12-2, TRAJ17)
CAVLFKAAGNKLTF

SEQ ID NO: 614268 - protein, 17 aa, Homo sapiens
  CDR3 for beta chain variable domain of TCR clone 307134 (TRBV20-1, TRBJ2-2)
CSAGGSGQDGLTGELFF

SEQ ID NO: 614269 - protein, 14 aa, Homo sapiens
  CDR3 for alpha chain variable domain of TCR clone 307135 (TRAV2, TRAJ9)
CAVEDRSRGFKTIF

SEQ ID NO: 614270 - protein, 15 aa, Homo sapiens
  CDR3 for beta chain variable domain of TCR clone 307135 (TRBV6-6, TRBJ2-7)
CASSYSYGGSYEQYF

SEQ ID NO: 614271 - protein, 12 aa, Homo sapiens
  CDR3 for alpha chain variable domain of TCR clone 307136 (TRAV13-1, TRAJ21)
CAAKEGFNKFYL

SEQ ID NO: 614272 - protein, 15 aa, Homo sapiens
  CDR3 for beta chain variable domain of TCR clone 307136 (TRBV20-1, TRBJ2-7)
CSARDRVSGMDEQYF

SEQ ID NO: 614273 - protein, 14 aa, Homo sapiens
  CDR3 for alpha chain variable domain of TCR clone 307137 (TRAV12-2, TRAJ40)
CAVKIPSGTYNYIF

SEQ ID NO: 614274 - protein, 14 aa, Homo sapiens
  CDR3 for beta chain variable domain of TCR clone 307137 (TRBV11-2, TRBJ1-5)
CASSLDRGRQPQHF

SEQ ID NO: 614275 - protein, 15 aa, Homo sapiens
  CDR3 for alpha chain variable domain of TCR clone 307138 (TRAV17, TRAJ54)
CATEKLGQGAQKLVF

SEQ ID NO: 614276 - protein, 19 aa, Homo sapiens
  CDR3 for beta chain variable domain of TCR clone 307138 (TRBV7-3, TRBJ1-1)
CASSLGAKWTLKLSLDRHQ

SEQ ID NO: 614277 - protein, 13 aa, Homo sapiens
  CDR3 for alpha chain variable domain of TCR clone 307139 (TRAV13-2, TRAJ48)
CAEMDFGNEKLTF

SEQ ID NO: 614278 - protein, 13 aa, Homo sapiens
  CDR3 for beta chain variable domain of TCR clone 307139 (TRBV18, TRBJ2-7)
CASSRSGSYEQYF

SEQ ID NO: 614279 - protein, 15 aa, Homo sapiens
  CDR3 for alpha chain variable domain of TCR clone 307140 (TRAV8-3, TRAJ45)
CASSYSGGGADGPTF

SEQ ID NO: 614280 - protein, 13 aa, Homo sapiens
  CDR3 for beta chain variable domain of TCR clone 307140 (TRBV10-3, TRBJ2-7)
CASKLAVNYDQYF

SEQ ID NO: 614281 - protein, 17 aa, Homo sapiens
  CDR3 for alpha chain variable domain of TCR clone 307141 (TRAV3, TRAJ6)
CAVRDGPRAGGSHIPTF

SEQ ID NO: 614282 - protein, 17 aa, Homo sapiens
  CDR3 for beta chain variable domain of TCR clone 307141 (TRBV20-1, TRBJ2-1)
CSAPPRLAGTRYNEQFF

SEQ ID NO: 614283 - protein, 13 aa, Homo sapiens
  CDR3 for alpha chain variable domain of TCR clone 307142 (TRAV29/DV5, TRAJ31)
CAASRNNNARLMF

SEQ ID NO: 614284 - protein, 12 aa, Homo sapiens
  CDR3 for beta chain variable domain of TCR clone 307142 (TRBV14, TRBJ2-7)
CAGSSLKGEQYF

SEQ ID NO: 614285 - protein, 14 aa, Homo sapiens
  CDR3 for alpha chain variable domain of TCR clone 307143 (TRAV38-1, TRAJ40)
CALSPTSGTYKYIF

SEQ ID NO: 614286 - protein, 14 aa, Homo sapiens
  CDR3 for beta chain variable domain of TCR clone 307143 (TRBV5-4, TRBJ1-1)
CASSLDSRRDEAFF

SEQ ID NO: 614287 - protein, 12 aa, Homo sapiens
  CDR3 for alpha chain variable domain of TCR clone 307144 (TRAV3, TRAJ20)
CAVRDHHYKLSF

SEQ ID NO: 614288 - protein, 13 aa, Homo sapiens
  CDR3 for beta chain variable domain of TCR clone 307144 (TRBV9, TRBJ2-7)
CASSVGQGGEQYF

SEQ ID NO: 614289 - protein, 22 aa, Homo sapiens
  CDR3 for alpha chain variable domain of TCR clone 307145 (TRAV16, )
CALRTQIPDIQNPDPAVYQLSD

SEQ ID NO: 614290 - protein, 15 aa, Homo sapiens
  CDR3 for beta chain variable domain of TCR clone 307145 (TRBV27, TRBJ2-1)
CASSNGGGSSNEQFF

SEQ ID NO: 614291 - protein, 12 aa, Homo sapiens
  CDR3 for alpha chain variable domain of TCR clone 307146 (TRAV21, TRAJ57)
CAAGDGSEKLVF

SEQ ID NO: 614292 - protein, 13 aa, Homo sapiens
  CDR3 for beta chain variable domain of TCR clone 307146 (TRBV7-3, TRBJ1-1)
CASSQDWGAEAFF

SEQ ID NO: 614293 - protein, 14 aa, Homo sapiens
  CDR3 for alpha chain variable domain of TCR clone 307147 (TRAV12-3, TRAJ10)
SHLPLTGGGNKLTF

SEQ ID NO: 614294 - protein, 17 aa, Homo sapiens
  CDR3 for beta chain variable domain of TCR clone 307147 (TRBV7-9, TRBJ2-1)
CASSLVASYPSYNEQFF

SEQ ID NO: 614295 - protein, 11 aa, Homo sapiens
  CDR3 for alpha chain variable domain of TCR clone 307148 (TRAV27, TRAJ20)
CAGADDYKLSF

SEQ ID NO: 614296 - protein, 16 aa, Homo sapiens
  CDR3 for beta chain variable domain of TCR clone 307148 (TRBV7-3, TRBJ2-2)
CASSLKRGTLSGELFF

SEQ ID NO: 614297 - protein, 11 aa, Homo sapiens
  CDR3 for alpha chain variable domain of TCR clone 307149 (TRAV1-2, TRAJ40)
CAVPGTYNYIF

SEQ ID NO: 614298 - protein, 15 aa, Homo sapiens
  CDR3 for beta chain variable domain of TCR clone 307149 (TRBV25-1, TRBJ1-4)
CASSPGDSTNEKLFF

SEQ ID NO: 614299 - protein, 13 aa, Homo sapiens
  CDR3 for alpha chain variable domain of TCR clone 307150 (TRAV21, TRAJ37)
CAVGSGNTGKLIF

SEQ ID NO: 614300 - protein, 17 aa, Homo sapiens
  CDR3 for beta chain variable domain of TCR clone 307150 (TRBV5-1, TRBJ2-5)
CASSLLGLAANQETQYF

SEQ ID NO: 614301 - protein, 14 aa, Homo sapiens
  CDR3 for alpha chain variable domain of TCR clone 307151 (TRAV29/DV5, TRAJ36)
CAARRKTGANNLFF

SEQ ID NO: 614302 - protein, 13 aa, Homo sapiens
  CDR3 for beta chain variable domain of TCR clone 307151 (TRBV15, TRBJ1-2)
CATSMTANYGDTF

SEQ ID NO: 614303 - protein, 15 aa, Homo sapiens
  CDR3 for alpha chain variable domain of TCR clone 307152 (TRAV27, TRAJ38)
CAARRNAGNNRKLLW

SEQ ID NO: 614304 - protein, 13 aa, Homo sapiens
  CDR3 for beta chain variable domain of TCR clone 307152 (TRBV28, TRBJ2-5)
CAGASRGEETQYF

SEQ ID NO: 614305 - protein, 14 aa, Homo sapiens
  CDR3 for alpha chain variable domain of TCR clone 307153 (TRAV8-3, TRAJ37)
CAVGPYDNTGKLIF

SEQ ID NO: 614306 - protein, 13 aa, Homo sapiens
  CDR3 for beta chain variable domain of TCR clone 307153 (TRBV7-9, TRBJ1-2)
CASSLKQNYGYTF

SEQ ID NO: 614307 - protein, 11 aa, Homo sapiens
  CDR3 for alpha chain variable domain of TCR clone 307154 (TRAV12-1, TRAJ34)
CVVNKGIELIF

SEQ ID NO: 614308 - protein, 12 aa, Homo sapiens
  CDR3 for beta chain variable domain of TCR clone 307154 (TRBV2, TRBJ2-1)
CAYGPPGNEQFF

SEQ ID NO: 614309 - protein, 13 aa, Homo sapiens
  CDR3 for alpha chain variable domain of TCR clone 307155 (TRAV13-1, TRAJ39)
CSKYSNASNMLTF

SEQ ID NO: 614310 - protein, 14 aa, Homo sapiens
  CDR3 for beta chain variable domain of TCR clone 307155 (TRBV7-2, TRBJ2-5)
CASSPRGSSETQYF

SEQ ID NO: 614311 - protein, 10 aa, Homo sapiens
  CDR3 for alpha chain variable domain of TCR clone 307156 (TRAV26-1, TRAJ22)
RSGSARQLTF

SEQ ID NO: 614312 - protein, 13 aa, Homo sapiens
  CDR3 for beta chain variable domain of TCR clone 307156 (TRBV7-9, TRBJ1-2)
CASSLKQDYGCTF

SEQ ID NO: 614313 - protein, 16 aa, Homo sapiens
  CDR3 for alpha chain variable domain of TCR clone 307157 (TRAV3, TRAJ37)
CAVRGKGSGNTGKRIF

SEQ ID NO: 614314 - protein, 14 aa, Homo sapiens
  CDR3 for beta chain variable domain of TCR clone 307157 (TRBV7-2, TRBJ2-7)
CASSPKTSFYEQYF

SEQ ID NO: 614315 - protein, 16 aa, Homo sapiens
  CDR3 for alpha chain variable domain of TCR clone 307158 (TRAV1-2, TRAJ35)
CAVRGLTIGFGNLLHC

SEQ ID NO: 614316 - protein, 13 aa, Homo sapiens
  CDR3 for beta chain variable domain of TCR clone 307158 (TRBV6-6, TRBJ2-1)
CASSLHQGDEQFF

SEQ ID NO: 614317 - protein, 13 aa, Homo sapiens
  CDR3 for alpha chain variable domain of TCR clone 307159 (TRAV36/DV7, TRAJ33)
CAVDMDSNYQLIW

SEQ ID NO: 614318 - protein, 16 aa, Homo sapiens
  CDR3 for beta chain variable domain of TCR clone 307159 (TRBV15, TRBJ2-3)
CATRLSGGRAPDTQYV

SEQ ID NO: 614319 - protein, 16 aa, Homo sapiens
  CDR3 for alpha chain variable domain of TCR clone 307160 (TRAV12-3, TRAJ10)
CAMKKGITGGGNKLTF

SEQ ID NO: 614320 - protein, 14 aa, Homo sapiens
  CDR3 for beta chain variable domain of TCR clone 307160 (TRBV12-5, TRBJ2-5)
CASGSRTHQETQYF

SEQ ID NO: 614321 - protein, 13 aa, Homo sapiens
  CDR3 for alpha chain variable domain of TCR clone 307161 (TRAV39, TRAJ58)
CAGEETIGSRFTF

SEQ ID NO: 614322 - protein, 13 aa, Homo sapiens
  CDR3 for beta chain variable domain of TCR clone 307161 (TRBV15, TRBJ2-7)
CATSTTGHYEQYF

SEQ ID NO: 614323 - protein, 16 aa, Homo sapiens
  CDR3 for alpha chain variable domain of TCR clone 307162 (TRAV30, TRAJ24)
CGTEIVDADSWGKFQF

SEQ ID NO: 614324 - protein, 13 aa, Homo sapiens
  CDR3 for beta chain variable domain of TCR clone 307162 (TRBV10-3, TRBJ2-7)
CASKLAVNYEQYS

SEQ ID NO: 614325 - protein, 13 aa, Homo sapiens
  CDR3 for alpha chain variable domain of TCR clone 307163 (TRAV17, TRAJ45)
CATPGGGADGLTF

SEQ ID NO: 614326 - protein, 11 aa, Homo sapiens
  CDR3 for beta chain variable domain of TCR clone 307163 (TRBV29-1, TRBJ1-1)
CSVEVGTRTFF

SEQ ID NO: 614327 - protein, 13 aa, Homo sapiens
  CDR3 for alpha chain variable domain of TCR clone 307164 (TRAV2, TRAJ40)
CAVVTSGIYKYIF

SEQ ID NO: 614328 - protein, 12 aa, Homo sapiens
  CDR3 for beta chain variable domain of TCR clone 307164 (TRBV6-3, TRBJ2-7)
CASSLTPYEQYF

SEQ ID NO: 614329 - protein, 14 aa, Homo sapiens
  CDR3 for alpha chain variable domain of TCR clone 307165 (TRAV23/DV6, TRAJ24)
CAASLSGSWGKLQF

SEQ ID NO: 614330 - protein, 16 aa, Homo sapiens
  CDR3 for beta chain variable domain of TCR clone 307165 (TRBV7-9, TRBJ2-6)
CASSLKGPLRANVLTF

SEQ ID NO: 614331 - protein, 15 aa, Homo sapiens
  CDR3 for alpha chain variable domain of TCR clone 307166 (TRAV3, TRAJ10)
CAVRDGTGGGNKLTF

SEQ ID NO: 614332 - protein, 15 aa, Homo sapiens
  CDR3 for beta chain variable domain of TCR clone 307166 (TRBV4-1, TRBJ1-4)
CASSDTGGTNEKLFF

SEQ ID NO: 614333 - protein, 15 aa, Homo sapiens
  CDR3 for alpha chain variable domain of TCR clone 307167 (TRAV23/DV6, TRAJ44)
CAAMKPTGTASKLTF

SEQ ID NO: 614334 - protein, 17 aa, Homo sapiens
  CDR3 for beta chain variable domain of TCR clone 307167 (TRBV28, TRBJ2-7)
CASSPLHRASGVYEQYF

SEQ ID NO: 614335 - protein, 14 aa, Homo sapiens
  CDR3 for alpha chain variable domain of TCR clone 307168 (TRAV35, TRAJ22)
FAGLRPGSARQLTF

SEQ ID NO: 614336 - protein, 14 aa, Homo sapiens
  CDR3 for beta chain variable domain of TCR clone 307168 (TRBV4-1, TRBJ2-7)
CASSPVAGGDEQYF

SEQ ID NO: 614337 - protein, 14 aa, Homo sapiens
  CDR3 for alpha chain variable domain of TCR clone 307169 (TRAV1-2, TRAJ16)
CAVDRFSDGQKLLF

SEQ ID NO: 614338 - protein, 11 aa, Homo sapiens
  CDR3 for beta chain variable domain of TCR clone 307169 (TRBV29-1, TRBJ2-5)
CSEDRTGTQYF

SEQ ID NO: 614339 - protein, 16 aa, Homo sapiens
  CDR3 for alpha chain variable domain of TCR clone 307170 (TRAV20, TRAJ53)
CAVQAESGGSNYKLTF

SEQ ID NO: 614340 - protein, 15 aa, Homo sapiens
  CDR3 for beta chain variable domain of TCR clone 307170 (TRBV7-3, TRBJ2-1)
CASSLSSGSFDEQFF

SEQ ID NO: 614341 - protein, 11 aa, Homo sapiens
  CDR3 for alpha chain variable domain of TCR clone 307171 (TRAV3, TRAJ21)
CAVCNFNKFYF

SEQ ID NO: 614342 - protein, 16 aa, Homo sapiens
  CDR3 for beta chain variable domain of TCR clone 307171 (TRBV19, TRBJ2-1)
CASSEAGPSSYNEQFF

SEQ ID NO: 614343 - protein, 13 aa, Homo sapiens
  CDR3 for alpha chain variable domain of TCR clone 307172 (TRAV8-6, TRAJ13)
CAVRDGGYQKVTF

SEQ ID NO: 614344 - protein, 15 aa, Homo sapiens
  CDR3 for beta chain variable domain of TCR clone 307172 (TRBV7-9, TRBJ2-2)
CASRHEGTSTGELFF

SEQ ID NO: 614345 - protein, 11 aa, Homo sapiens
  CDR3 for alpha chain variable domain of TCR clone 307173 (TRAV2, TRAJ13)
CASGGYQKVTF

SEQ ID NO: 614346 - protein, 15 aa, Homo sapiens
  CDR3 for beta chain variable domain of TCR clone 307173 (TRBV7-9, TRBJ1-6)
CASSSPGRGNSPLHC

SEQ ID NO: 614347 - protein, 16 aa, Homo sapiens
  CDR3 for alpha chain variable domain of TCR clone 307174 (TRAV29/DV5, TRAJ36)
CAASAHYQSWANNLFF

SEQ ID NO: 614348 - protein, 16 aa, Homo sapiens
  CDR3 for beta chain variable domain of TCR clone 307174 (TRBV4-2, TRBJ2-3)
CASSQELAGDTDTQYF

SEQ ID NO: 614349 - protein, 16 aa, Homo sapiens
  CDR3 for alpha chain variable domain of TCR clone 307175 (TRAV12-2, TRAJ43)
CAGDDMRFGAGTRLTV

SEQ ID NO: 614350 - protein, 15 aa, Homo sapiens
  CDR3 for beta chain variable domain of TCR clone 307175 (TRBV11-3, TRBJ2-1)
CASSLAGQTYNEQFF

SEQ ID NO: 614351 - protein, 14 aa, Homo sapiens
  CDR3 for alpha chain variable domain of TCR clone 307176 (TRAV26-1, TRAJ39)
CIVRAYNAGNMLTF

SEQ ID NO: 614352 - protein, 12 aa, Homo sapiens
  CDR3 for beta chain variable domain of TCR clone 307176 (TRBV29-1, TRBJ2-3)
CSVTGGADTQYF

SEQ ID NO: 614353 - protein, 18 aa, Homo sapiens
  CDR3 for alpha chain variable domain of TCR clone 307177 (TRAV8-6, TRAJ36)
CAVSDGLRDWGKQPLLWD

SEQ ID NO: 614354 - protein, 13 aa, Homo sapiens
  CDR3 for beta chain variable domain of TCR clone 307177 (TRBV12-4, TRBJ1-2)
CASSLRQGKGYTF

SEQ ID NO: 614355 - protein, 13 aa, Homo sapiens
  CDR3 for alpha chain variable domain of TCR clone 307178 (TRAV26-1, TRAJ48)
CIVRVVGDEKLTF

SEQ ID NO: 614356 - protein, 15 aa, Homo sapiens
  CDR3 for beta chain variable domain of TCR clone 307178 (TRBV11-3, TRBJ2-3)
CASLKDGREGDTQYF

SEQ ID NO: 614357 - protein, 18 aa, Homo sapiens
  CDR3 for alpha chain variable domain of TCR clone 307179 (TRAV13-1, TRAJ52)
CAASKRIAGGTSYGKLKF

SEQ ID NO: 614358 - protein, 13 aa, Homo sapiens
  CDR3 for beta chain variable domain of TCR clone 307179 (TRBV12-4, TRBJ1-2)
CASSLRQGKGYTF

SEQ ID NO: 614359 - protein, 10 aa, Homo sapiens
  CDR3 for alpha chain variable domain of TCR clone 307180 (TRAV1-2, TRAJ20)
CSLNDYKLSF

SEQ ID NO: 614360 - protein, 16 aa, Homo sapiens
  CDR3 for beta chain variable domain of TCR clone 307180 (TRBV20-1, TRBJ1-1)
CSARALTQGMNTEAFF

SEQ ID NO: 614361 - protein, 13 aa, Homo sapiens
  CDR3 for alpha chain variable domain of TCR clone 307181 (TRAV13-2, TRAJ48)
CAEMDFGNEQLTF

SEQ ID NO: 614362 - protein, 15 aa, Homo sapiens
  CDR3 for beta chain variable domain of TCR clone 307181 (TRBV7-3, TRBJ2-1)
CASSQRGGALIEQFF

SEQ ID NO: 614363 - protein, 14 aa, Homo sapiens
  CDR3 for alpha chain variable domain of TCR clone 307182 (TRAV35, TRAJ33)
CWPRGRASNYQLIW

SEQ ID NO: 614364 - protein, 11 aa, Homo sapiens
  CDR3 for beta chain variable domain of TCR clone 307182 (TRBV10-3, TRBJ2-7)
CAISEGLEQYF

SEQ ID NO: 614365 - protein, 13 aa, Homo sapiens
  CDR3 for alpha chain variable domain of TCR clone 307183 (TRAV30, TRAJ24)
CGTVTDSWGKLQF

SEQ ID NO: 614366 - protein, 16 aa, Homo sapiens
  CDR3 for beta chain variable domain of TCR clone 307183 (TRBV19, TRBJ2-1)
CASSKAGPSSYSEQFF

SEQ ID NO: 614367 - protein, 13 aa, Homo sapiens
  CDR3 for alpha chain variable domain of TCR clone 307184 (TRAV8-3, TRAJ28)
CPVGAVGSYQLTF

SEQ ID NO: 614368 - protein, 17 aa, Homo sapiens
  CDR3 for beta chain variable domain of TCR clone 307184 (TRBV11-2, TRBJ2-1)
CASSLYPPGVEYNEQFF

SEQ ID NO: 614369 - protein, 12 aa, Homo sapiens
  CDR3 for alpha chain variable domain of TCR clone 307185 (TRAV3, TRAJ20)
CAVRDPDYKLSF

SEQ ID NO: 614370 - protein, 15 aa, Homo sapiens
  CDR3 for beta chain variable domain of TCR clone 307185 (TRBV20-1, TRBJ2-2)
CSAIPGHSNTGELFF

SEQ ID NO: 614371 - protein, 15 aa, Homo sapiens
  CDR3 for alpha chain variable domain of TCR clone 307186 (TRAV21, TRAJ38)
CAVRQDAGNNRKLIW

SEQ ID NO: 614372 - protein, 11 aa, Homo sapiens
  CDR3 for beta chain variable domain of TCR clone 307186 (TRBV12-4, TRBJ2-3)
WASTATDTQYF

SEQ ID NO: 614373 - protein, 14 aa, Homo sapiens
  CDR3 for alpha chain variable domain of TCR clone 307187 (TRAV1-2, TRAJ16)
CAVNRFSDGQKLLF

SEQ ID NO: 614374 - protein, 15 aa, Homo sapiens
  CDR3 for beta chain variable domain of TCR clone 307187 (TRBV7-9, TRBJ2-1)
CASSPQREPYNEQFF

SEQ ID NO: 614375 - protein, 14 aa, Homo sapiens
  CDR3 for alpha chain variable domain of TCR clone 307188 (TRAV12-3, TRAJ10)
SHLPLTGGGNKLTF

SEQ ID NO: 614376 - protein, 15 aa, Homo sapiens
  CDR3 for beta chain variable domain of TCR clone 307188 (TRBV7-9, TRBJ1-6)
CASSSPGRGNSPLHS

SEQ ID NO: 614377 - protein, 14 aa, Homo sapiens
  CDR3 for alpha chain variable domain of TCR clone 307189 (TRAV1-2, TRAJ8)
CAVREDTGFQKLVF

SEQ ID NO: 614378 - protein, 19 aa, Homo sapiens
  CDR3 for beta chain variable domain of TCR clone 307189 (TRBV14, TRBJ2-1)
CASSQDQRWEAPEYNEQFF

SEQ ID NO: 614379 - protein, 15 aa, Homo sapiens
  CDR3 for alpha chain variable domain of TCR clone 307190 (TRAV20, TRAJ24)
CAVQAAPDSWGKFQF

SEQ ID NO: 614380 - protein, 15 aa, Homo sapiens
  CDR3 for beta chain variable domain of TCR clone 307190 (TRBV20-1, TRBJ2-7)
CSARDRVSGMDEQYF

SEQ ID NO: 614381 - protein, 15 aa, Homo sapiens
  CDR3 for alpha chain variable domain of TCR clone 307191 (TRAV3, TRAJ36)
CAVRASQTGANNLFF

SEQ ID NO: 614382 - protein, 18 aa, Homo sapiens
  CDR3 for beta chain variable domain of TCR clone 307191 (TRBV11-2, TRBJ2-3)
CASSLGGASRGAPNTQYF

SEQ ID NO: 614383 - protein, 15 aa, Homo sapiens
  CDR3 for alpha chain variable domain of TCR clone 307192 (TRAV21, TRAJ52)
CAVRGGCTSYGKLTF

SEQ ID NO: 614384 - protein, 15 aa, Homo sapiens
  CDR3 for beta chain variable domain of TCR clone 307192 (TRBV18, TRBJ1-5)
CASSPSDRSNQPQHF

SEQ ID NO: 614385 - protein, 13 aa, Homo sapiens
  CDR3 for alpha chain variable domain of TCR clone 307193 (TRAV21, TRAJ27)
CAARPGNAGKPTF

SEQ ID NO: 614386 - protein, 17 aa, Homo sapiens
  CDR3 for beta chain variable domain of TCR clone 307193 (TRBV7-3, TRBJ2-2)
CASSLSGTSGGTGELFF

SEQ ID NO: 614387 - protein, 14 aa, Homo sapiens
  CDR3 for alpha chain variable domain of TCR clone 307194 (TRAV14/DV4, TRAJ54)
CAMREATGAQKLVF

SEQ ID NO: 614388 - protein, 15 aa, Homo sapiens
  CDR3 for beta chain variable domain of TCR clone 307194 (TRBV7-2, TRBJ2-2)
CASRRPGQNTGELFF

SEQ ID NO: 614389 - protein, 13 aa, Homo sapiens
  CDR3 for alpha chain variable domain of TCR clone 307195 (TRAV12-2, TRAJ39)
CAVNNNAGNMLTF

SEQ ID NO: 614390 - protein, 14 aa, Homo sapiens
  CDR3 for beta chain variable domain of TCR clone 307195 (TRBV7-2, TRBJ2-2)
CASRGQGAAGELFF

SEQ ID NO: 614391 - protein, 15 aa, Homo sapiens
  CDR3 for alpha chain variable domain of TCR clone 307196 (TRAV3, TRAJ12)
CAVRAIRDSSYKLIF

SEQ ID NO: 614392 - protein, 15 aa, Homo sapiens
  CDR3 for beta chain variable domain of TCR clone 307196 (TRBV27, TRBJ2-7)
CASSLRNEQGYEQYF

SEQ ID NO: 614393 - protein, 13 aa, Homo sapiens
  CDR3 for alpha chain variable domain of TCR clone 307197 (TRAV27, TRAJ27)
CAGKGTNAGKSTF

SEQ ID NO: 614394 - protein, 13 aa, Homo sapiens
  CDR3 for beta chain variable domain of TCR clone 307197 (TRBV7-9, TRBJ1-2)
CASSLKQNYGHTF

SEQ ID NO: 614395 - protein, 20 aa, Homo sapiens
  CDR3 for alpha chain variable domain of TCR clone 307198 (TRAV12-1, TRAJ42)
SSVIQPPTSVKGGSQGNLIF

SEQ ID NO: 614396 - protein, 15 aa, Homo sapiens
  CDR3 for beta chain variable domain of TCR clone 307198 (TRBV9, TRBJ1-6)
CASSVAGTGDSPLHF

SEQ ID NO: 614397 - protein, 15 aa, Homo sapiens
  CDR3 for alpha chain variable domain of TCR clone 307199 (TRAV12-1, TRAJ9)
CVVSFGDTGGFKTIF

SEQ ID NO: 614398 - protein, 18 aa, Homo sapiens
  CDR3 for beta chain variable domain of TCR clone 307199 (TRBV12-4, TRBJ2-2)
CASSLVAGTRGRTGELFF

SEQ ID NO: 614399 - protein, 13 aa, Homo sapiens
  CDR3 for alpha chain variable domain of TCR clone 307200 (TRAV26-2, TRAJ43)
CILRAVNNNDMSF

SEQ ID NO: 614400 - protein, 14 aa, Homo sapiens
  CDR3 for beta chain variable domain of TCR clone 307200 (TRBV19, TRBJ2-1)
CASPTFVLSGEQFF

SEQ ID NO: 614401 - protein, 12 aa, Homo sapiens
  CDR3 for alpha chain variable domain of TCR clone 307201 (TRAV2, TRAJ5)
CALDTGRRALTF

SEQ ID NO: 614402 - protein, 14 aa, Homo sapiens
  CDR3 for beta chain variable domain of TCR clone 307201 (TRBV19, TRBJ2-1)
RASPTFVLSGEQFF

SEQ ID NO: 614403 - protein, 13 aa, Homo sapiens
  CDR3 for alpha chain variable domain of TCR clone 307202 (TRAV17, TRAJ34)
CATDLYNTDKLIF

SEQ ID NO: 614404 - protein, 15 aa, Homo sapiens
  CDR3 for beta chain variable domain of TCR clone 307202 (TRBV20-1, TRBJ2-3)
CSATGTTGFTDTQYF

SEQ ID NO: 614405 - protein, 13 aa, Homo sapiens
  CDR3 for alpha chain variable domain of TCR clone 307203 (TRAV34, TRAJ33)
CGADMNSNDQLIW

SEQ ID NO: 614406 - protein, 16 aa, Homo sapiens
  CDR3 for beta chain variable domain of TCR clone 307203 (TRBV20-1, TRBJ2-1)
CSASLAGGPGYNEQFV

SEQ ID NO: 614407 - protein, 14 aa, Homo sapiens
  CDR3 for alpha chain variable domain of TCR clone 307204 (TRAV13-1, TRAJ24)
CAASPADSWGKFQF

SEQ ID NO: 614408 - protein, 15 aa, Homo sapiens
  CDR3 for beta chain variable domain of TCR clone 307204 (TRBV2, TRBJ2-7)
CASTLLGSGATEQYF

SEQ ID NO: 614409 - protein, 13 aa, Homo sapiens
  CDR3 for alpha chain variable domain of TCR clone 307205 (TRAV21, TRAJ27)
CAARPGNAGKSTF

SEQ ID NO: 614410 - protein, 13 aa, Homo sapiens
  CDR3 for beta chain variable domain of TCR clone 307205 (TRBV13, TRBJ2-1)
CASIWGGRGEQFF

SEQ ID NO: 614411 - protein, 14 aa, Homo sapiens
  CDR3 for alpha chain variable domain of TCR clone 307206 (TRAV12-2, TRAJ53)
CDVKGGGSNYKLTF

SEQ ID NO: 614412 - protein, 14 aa, Homo sapiens
  CDR3 for beta chain variable domain of TCR clone 307206 (TRBV5-4, TRBJ1-1)
CASSLDSRRDEAFF

SEQ ID NO: 614413 - protein, 14 aa, Homo sapiens
  CDR3 for alpha chain variable domain of TCR clone 307207 (TRAV1-2, TRAJ16)
CAVNRFSDGQKLLF

SEQ ID NO: 614414 - protein, 16 aa, Homo sapiens
  CDR3 for beta chain variable domain of TCR clone 307207 (TRBV7-3, TRBJ2-2)
CASSLKRGTLSGELFC

SEQ ID NO: 614415 - protein, 10 aa, Homo sapiens
  CDR3 for alpha chain variable domain of TCR clone 307208 (TRAV1-2, TRAJ31)
CAFLDARLMF

SEQ ID NO: 614416 - protein, 15 aa, Homo sapiens
  CDR3 for beta chain variable domain of TCR clone 307208 (TRBV4-1, TRBJ1-4)
CASSDTGGTNEKLFF

SEQ ID NO: 614417 - protein, 15 aa, Homo sapiens
  CDR3 for alpha chain variable domain of TCR clone 307209 (TRAV3, TRAJ4)
CAVRDGTGGSNKLIF

SEQ ID NO: 614418 - protein, 16 aa, Homo sapiens
  CDR3 for beta chain variable domain of TCR clone 307209 (TRBV27, TRBJ2-2)
GASSSSGVSNTGELFF

SEQ ID NO: 614419 - protein, 14 aa, Homo sapiens
  CDR3 for alpha chain variable domain of TCR clone 307210 (TRAV38-1, TRAJ43)
CAFMKHNNNNDMRF

SEQ ID NO: 614420 - protein, 17 aa, Homo sapiens
  CDR3 for beta chain variable domain of TCR clone 307210 (TRBV7-7, TRBJ1-4)
CASSLVGQGASNERLFF

SEQ ID NO: 614421 - protein, 10 aa, Homo sapiens
  CDR3 for alpha chain variable domain of TCR clone 307211 (TRAV12-1, TRAJ37)
CVGWAGKLIF

SEQ ID NO: 614422 - protein, 13 aa, Homo sapiens
  CDR3 for beta chain variable domain of TCR clone 307211 (TRBV7-3, TRBJ1-1)
CASSQDWGAEAFF

SEQ ID NO: 614423 - protein, 14 aa, Homo sapiens
  CDR3 for alpha chain variable domain of TCR clone 307212 (TRAV17, TRAJ57)
CATDPQGGYEKLVF

SEQ ID NO: 614424 - protein, 14 aa, Homo sapiens
  CDR3 for beta chain variable domain of TCR clone 307212 (TRBV25-1, TRBJ1-1)
CASTHLGGNTEAFF

SEQ ID NO: 614425 - protein, 16 aa, Homo sapiens
  CDR3 for alpha chain variable domain of TCR clone 307213 (TRAV3, TRAJ37)
CAVRPHGSGNTGKLIF

SEQ ID NO: 614426 - protein, 16 aa, Homo sapiens
  CDR3 for beta chain variable domain of TCR clone 307213 (TRBV11-2, TRBJ1-2)
CASSLDRGGNNYGYTF

SEQ ID NO: 614427 - protein, 16 aa, Homo sapiens
  CDR3 for alpha chain variable domain of TCR clone 307214 (TRAV2, TRAJ4)
CAVEARFSGGYHKLIF

SEQ ID NO: 614428 - protein, 14 aa, Homo sapiens
  CDR3 for beta chain variable domain of TCR clone 307214 (TRBV13, TRBJ2-1)
CASSAGQGAYEQFF

SEQ ID NO: 614429 - protein, 20 aa, Homo sapiens
  CDR3 for alpha chain variable domain of TCR clone 307215 (TRAV25, TRAJ33)
TATQTTDVGTSRGSNYQLIW

SEQ ID NO: 614430 - protein, 14 aa, Homo sapiens
  CDR3 for beta chain variable domain of TCR clone 307215 (TRBV7-2, TRBJ2-5)
CASSTGGELNTQYF

SEQ ID NO: 614431 - protein, 16 aa, Homo sapiens
  CDR3 for alpha chain variable domain of TCR clone 307216 (TRAV26-1, TRAJ36)
CIVRAIGRSGANNLFF

SEQ ID NO: 614432 - protein, 14 aa, Homo sapiens
  CDR3 for beta chain variable domain of TCR clone 307216 (TRBV25-1, TRBJ2-1)
CASSKTGGYNEQFL

SEQ ID NO: 614433 - protein, 19 aa, Homo sapiens
  CDR3 for alpha chain variable domain of TCR clone 307217 (TRAV3, TRAJ6)
CAVRDGPGQEEATYLHLAE

SEQ ID NO: 614434 - protein, 14 aa, Homo sapiens
  CDR3 for beta chain variable domain of TCR clone 307217 (TRBV7-2, TRBJ2-7)
CASSPKTSFYEQYF

SEQ ID NO: 614435 - protein, 15 aa, Homo sapiens
  CDR3 for alpha chain variable domain of TCR clone 307218 (TRAV1-1, TRAJ23)
CAVREGDNQGGKLIF

SEQ ID NO: 614436 - protein, 12 aa, Homo sapiens
  CDR3 for beta chain variable domain of TCR clone 307218 (TRBV7-2, TRBJ1-2)
CASRDSIYGYTF

SEQ ID NO: 614437 - protein, 12 aa, Homo sapiens
  CDR3 for alpha chain variable domain of TCR clone 307219 (TRAV17, TRAJ17)
CATDAESNKLTF

SEQ ID NO: 614438 - protein, 13 aa, Homo sapiens
  CDR3 for beta chain variable domain of TCR clone 307219 (TRBV12-5, TRBJ2-3)
CASQNRGTDTQYF

SEQ ID NO: 614439 - protein, 13 aa, Homo sapiens
  CDR3 for alpha chain variable domain of TCR clone 307220 (TRAV8-4, TRAJ20)
CAVSRSNDYKLSL

SEQ ID NO: 614440 - protein, 15 aa, Homo sapiens
  CDR3 for beta chain variable domain of TCR clone 307220 (TRBV6-1, TRBJ2-2)
CASIVTSGITGELFF

SEQ ID NO: 614441 - protein, 15 aa, Homo sapiens
  CDR3 for alpha chain variable domain of TCR clone 307221 (TRAV12-3, TRAJ6)
CAMSATTGGSYIPTF

SEQ ID NO: 614442 - protein, 17 aa, Homo sapiens
  CDR3 for beta chain variable domain of TCR clone 307221 (TRBV4-1, TRBJ1-4)
CASSQEGPRGVEEKLFF

SEQ ID NO: 614443 - protein, 14 aa, Homo sapiens
  CDR3 for alpha chain variable domain of TCR clone 307222 (TRAV12-2, TRAJ40)
CAVKIPSGTYKYIF

SEQ ID NO: 614444 - protein, 16 aa, Homo sapiens
  CDR3 for beta chain variable domain of TCR clone 307222 (TRBV7-2, TRBJ2-5)
WASSPFPTGGEETQYF

SEQ ID NO: 614445 - protein, 15 aa, Homo sapiens
  CDR3 for alpha chain variable domain of TCR clone 307223 (TRAV4, TRAJ17)
CLVGDIGAAGNKLTF

SEQ ID NO: 614446 - protein, 14 aa, Homo sapiens
  CDR3 for beta chain variable domain of TCR clone 307223 (TRBV6-3, TRBJ2-7)
CASSHSVRVYEQYF

SEQ ID NO: 614447 - protein, 15 aa, Homo sapiens
  CDR3 for alpha chain variable domain of TCR clone 307224 (TRAV1-1, TRAJ5)
CAVRHMDTGRCALTF

SEQ ID NO: 614448 - protein, 17 aa, Homo sapiens
  CDR3 for beta chain variable domain of TCR clone 307224 (TRBV28, TRBJ2-7)
CASSPGLAGGDSSEQYF

SEQ ID NO: 614449 - protein, 14 aa, Homo sapiens
  CDR3 for alpha chain variable domain of TCR clone 307225 (TRAV8-6, TRAJ13)
CAGGSSGGYQTVTF

SEQ ID NO: 614450 - protein, 15 aa, Homo sapiens
  CDR3 for beta chain variable domain of TCR clone 307225 (TRBV7-2, TRBJ2-7)
CASSLSGALTYEQYF

SEQ ID NO: 614451 - protein, 15 aa, Homo sapiens
  CDR3 for alpha chain variable domain of TCR clone 307226 (TRAV22, TRAJ56)
CAVEEYTGANSKLTF

SEQ ID NO: 614452 - protein, 15 aa, Homo sapiens
  CDR3 for beta chain variable domain of TCR clone 307226 (TRBV7-9, TRBJ1-5)
CASSQCHQPNQPQHF

SEQ ID NO: 614453 - protein, 13 aa, Homo sapiens
  CDR3 for alpha chain variable domain of TCR clone 307227 (TRAV13-1, TRAJ10)
CAATAGGGKKLTF

SEQ ID NO: 614454 - protein, 14 aa, Homo sapiens
  CDR3 for beta chain variable domain of TCR clone 307227 (TRBV12-4, TRBJ2-7)
CASSPAGLKYEQYF

SEQ ID NO: 614455 - protein, 11 aa, Homo sapiens
  CDR3 for alpha chain variable domain of TCR clone 307228 (TRAV12-1, TRAJ8)
CVVTGFQKLVF

SEQ ID NO: 614456 - protein, 15 aa, Homo sapiens
  CDR3 for beta chain variable domain of TCR clone 307228 (TRBV24-1, TRBJ2-1)
CATSGSGGFYNEQFF

SEQ ID NO: 614457 - protein, 13 aa, Homo sapiens
  CDR3 for alpha chain variable domain of TCR clone 307229 (TRAV12-1, TRAJ6)
CVVYPGGSYIPTF

SEQ ID NO: 614458 - protein, 15 aa, Homo sapiens
  CDR3 for beta chain variable domain of TCR clone 307229 (TRBV7-8, TRBJ2-1)
CASSLADSLYNEQFF

SEQ ID NO: 614459 - protein, 11 aa, Homo sapiens
  CDR3 for alpha chain variable domain of TCR clone 307230 (TRAV23/DV6, TRAJ48)
CAPRWGEKLTF

SEQ ID NO: 614460 - protein, 13 aa, Homo sapiens
  CDR3 for beta chain variable domain of TCR clone 307230 (TRBV12-4, TRBJ2-5)
CASNPGTEETQYF

SEQ ID NO: 614461 - protein, 15 aa, Homo sapiens
  CDR3 for alpha chain variable domain of TCR clone 307231 (TRAV21, TRAJ53)
CATLNSGGSNNKLTF

SEQ ID NO: 614462 - protein, 17 aa, Homo sapiens
  CDR3 for beta chain variable domain of TCR clone 307231 (TRBV20-1, TRBJ2-2)
CSASGSGQGGLTGELFF

SEQ ID NO: 614463 - protein, 12 aa, Homo sapiens
  CDR3 for alpha chain variable domain of TCR clone 307232 (TRAV13-1, TRAJ48)
CAANCGNEKLTF

SEQ ID NO: 614464 - protein, 10 aa, Homo sapiens
  CDR3 for beta chain variable domain of TCR clone 307232 (TRBV20-1, TRBJ1-5)
QCQGDQPQHF

SEQ ID NO: 614465 - protein, 15 aa, Homo sapiens
  CDR3 for alpha chain variable domain of TCR clone 307233 (TRAV12-3, TRAJ27)
CAMRAYNTNAGKLTF

SEQ ID NO: 614466 - protein, 14 aa, Homo sapiens
  CDR3 for beta chain variable domain of TCR clone 307233 (TRBV7-6, TRBJ2-3)
CASSLGTVTDTQYF

SEQ ID NO: 614467 - protein, 13 aa, Homo sapiens
  CDR3 for alpha chain variable domain of TCR clone 307234 (TRAV12-2, TRAJ20)
CAVYPSNDYKLSF

SEQ ID NO: 614468 - protein, 12 aa, Homo sapiens
  CDR3 for beta chain variable domain of TCR clone 307234 (TRBV5-5, TRBJ1-2)
CASSALNYGYTF

SEQ ID NO: 614469 - protein, 15 aa, Homo sapiens
  CDR3 for alpha chain variable domain of TCR clone 307235 (TRAV26-1, TRAJ29)
CIVRVEGSGKTPLVF

SEQ ID NO: 614470 - protein, 15 aa, Homo sapiens
  CDR3 for beta chain variable domain of TCR clone 307235 (TRBV7-9, TRBJ1-5)
CASSQGHQPNQTQHF

SEQ ID NO: 614471 - protein, 11 aa, Homo sapiens
  CDR3 for alpha chain variable domain of TCR clone 307236 (TRAV1-2, TRAJ20)
CAVANDYKLSF

SEQ ID NO: 614472 - protein, 18 aa, Homo sapiens
  CDR3 for beta chain variable domain of TCR clone 307236 (TRBV20-1, TRBJ2-6)
CSAETTPTHGCGANVLAF

SEQ ID NO: 614473 - protein, 11 aa, Homo sapiens
  CDR3 for alpha chain variable domain of TCR clone 307237 (TRAV1-2, TRAJ34)
CAGYNTDKLIF

SEQ ID NO: 614474 - protein, 16 aa, Homo sapiens
  CDR3 for beta chain variable domain of TCR clone 307237 (TRBV10-3, TRBJ2-1)
CAISGVGDVGGGEQFF

SEQ ID NO: 614475 - protein, 14 aa, Homo sapiens
  CDR3 for alpha chain variable domain of TCR clone 307238 (TRAV2, TRAJ23)
CAVVLRNQGGKLIF

SEQ ID NO: 614476 - protein, 15 aa, Homo sapiens
  CDR3 for beta chain variable domain of TCR clone 307238 (TRBV6-5, TRBJ2-5)
CASSPLAGGIETQYF

SEQ ID NO: 614477 - protein, 14 aa, Homo sapiens
  CDR3 for alpha chain variable domain of TCR clone 307239 (TRAV12-3, TRAJ29)
CAMSPYSGNTPLVF

SEQ ID NO: 614478 - protein, 14 aa, Homo sapiens
  CDR3 for beta chain variable domain of TCR clone 307239 (TRBV12-4, TRBJ2-1)
CASSLGQGASEQFF

SEQ ID NO: 614479 - protein, 16 aa, Homo sapiens
  CDR3 for alpha chain variable domain of TCR clone 307240 (TRAV12-1, TRAJ22)
CVVNTISSGSAWQLTF

SEQ ID NO: 614480 - protein, 13 aa, Homo sapiens
  CDR3 for beta chain variable domain of TCR clone 307240 (TRBV19, TRBJ2-1)
CASNGGVFSEQFF

SEQ ID NO: 614481 - protein, 14 aa, Homo sapiens
  CDR3 for alpha chain variable domain of TCR clone 307241 (TRAV8-4, TRAJ16)
CAVSPVGRCPEAAL

SEQ ID NO: 614482 - protein, 14 aa, Homo sapiens
  CDR3 for beta chain variable domain of TCR clone 307241 (TRBV23-1, TRBJ2-5)
CASSFLRSQETQYF

SEQ ID NO: 614483 - protein, 16 aa, Homo sapiens
  CDR3 for alpha chain variable domain of TCR clone 307242 (TRAV27, TRAJ13)
CAGAKSDSGGYQKVTF

SEQ ID NO: 614484 - protein, 15 aa, Homo sapiens
  CDR3 for beta chain variable domain of TCR clone 307242 (TRBV7-2, TRBJ2-7)
CASSLGGAKSGEQYF

SEQ ID NO: 614485 - protein, 12 aa, Homo sapiens
  CDR3 for alpha chain variable domain of TCR clone 307243 (TRAV27, TRAJ58)
CAGARDTSRLTF

SEQ ID NO: 614486 - protein, 14 aa, Homo sapiens
  CDR3 for beta chain variable domain of TCR clone 307243 (TRBV7-3, TRBJ2-1)
CASSLGPSANEQFF

SEQ ID NO: 614487 - protein, 14 aa, Homo sapiens
  CDR3 for alpha chain variable domain of TCR clone 307244 (TRAV16, TRAJ26)
CARSSANYGQNFVF

SEQ ID NO: 614488 - protein, 12 aa, Homo sapiens
  CDR3 for beta chain variable domain of TCR clone 307244 (TRBV6-5, TRBJ2-2)
CASRTGTGELFF

SEQ ID NO: 614489 - protein, 15 aa, Homo sapiens
  CDR3 for alpha chain variable domain of TCR clone 307245 (TRAV26-1, TRAJ40)
CMVRVTTSGTYKYIF

SEQ ID NO: 614490 - protein, 12 aa, Homo sapiens
  CDR3 for beta chain variable domain of TCR clone 307245 (TRBV7-9, TRBJ1-4)
CASSTDREKLFF

SEQ ID NO: 614491 - protein, 12 aa, Homo sapiens
  CDR3 for alpha chain variable domain of TCR clone 307246 (TRAV21, TRAJ39)
CAADNAGNMLTF

SEQ ID NO: 614492 - protein, 16 aa, Homo sapiens
  CDR3 for beta chain variable domain of TCR clone 307246 (TRBV12-4, TRBJ2-5)
CASSFFVRGRQETQYF

SEQ ID NO: 614493 - protein, 12 aa, Homo sapiens
  CDR3 for alpha chain variable domain of TCR clone 307247 (TRAV25, TRAJ5)
CAGGGGRRALTF

SEQ ID NO: 614494 - protein, 15 aa, Homo sapiens
  CDR3 for beta chain variable domain of TCR clone 307247 (TRBV27, TRBJ2-1)
CASSNGGGSSNEQFF

SEQ ID NO: 614495 - protein, 23 aa, Homo sapiens
  CDR3 for alpha chain variable domain of TCR clone 307248 (TRAV12-2, TRAJ36)
SLLIRDSQPSDSATLERANNLFF

SEQ ID NO: 614496 - protein, 15 aa, Homo sapiens
  CDR3 for beta chain variable domain of TCR clone 307248 (TRBV2, TRBJ2-7)
CASSEGLARSYEQYF

SEQ ID NO: 614497 - protein, 12 aa, Homo sapiens
  CDR3 for alpha chain variable domain of TCR clone 307249 (TRAV12-3, TRAJ42)
CAPVGSQGNLIF

SEQ ID NO: 614498 - protein, 14 aa, Homo sapiens
  CDR3 for beta chain variable domain of TCR clone 307249 (TRBV7-2, TRBJ1-6)
CASSLQGANSPLHF

SEQ ID NO: 614499 - protein, 15 aa, Homo sapiens
  CDR3 for alpha chain variable domain of TCR clone 307250 (TRAV8-3, TRAJ45)
CASSYSGGGAYGLNF

SEQ ID NO: 614500 - protein, 13 aa, Homo sapiens
  CDR3 for beta chain variable domain of TCR clone 307250 (TRBV10-3, TRBJ2-7)
CASKLAVNYEQYF

SEQ ID NO: 614501 - protein, 17 aa, Homo sapiens
  CDR3 for alpha chain variable domain of TCR clone 307251 (TRAV3, TRAJ6)
CAVRDGPRAGGSYIPTF

SEQ ID NO: 614502 - protein, 13 aa, Homo sapiens
  CDR3 for beta chain variable domain of TCR clone 307251 (TRBV19, TRBJ1-2)
CASSVPGQDGYSF

SEQ ID NO: 614503 - protein, 15 aa, Homo sapiens
  CDR3 for alpha chain variable domain of TCR clone 307252 (TRAV20, TRAJ40)
CAVQRGTSGTCKYIF

SEQ ID NO: 614504 - protein, 19 aa, Homo sapiens
  CDR3 for beta chain variable domain of TCR clone 307252 (TRBV28, TRBJ2-7)
CASSYSGTGRLGWVYEQYF

SEQ ID NO: 614505 - protein, 17 aa, Homo sapiens
  CDR3 for alpha chain variable domain of TCR clone 307253 (TRAV12-2, TRAJ4)
CAVNERPVSGGYNKLIF

SEQ ID NO: 614506 - protein, 17 aa, Homo sapiens
  CDR3 for beta chain variable domain of TCR clone 307253 (TRBV6-3, TRBJ2-1)
CASSYSSGTRGLDEQFF

SEQ ID NO: 614507 - protein, 17 aa, Homo sapiens
  CDR3 for alpha chain variable domain of TCR clone 307254 (TRAV26-1, TRAJ37)
CIVRVITVSSNTGKLIF

SEQ ID NO: 614508 - protein, 12 aa, Homo sapiens
  CDR3 for beta chain variable domain of TCR clone 307254 (TRBV7-8, TRBJ2-7)
CASSLGDREQYF

SEQ ID NO: 614509 - protein, 23 aa, Homo sapiens
  CDR3 for alpha chain variable domain of TCR clone 307255 (TRAV21, TRAJ9)
CAVEAVALGASKLSLEQEKEYLV

SEQ ID NO: 614510 - protein, 13 aa, Homo sapiens
  CDR3 for beta chain variable domain of TCR clone 307255 (TRBV12-4, TRBJ1-2)
CASSSGLTVISTF

SEQ ID NO: 614511 - protein, 14 aa, Homo sapiens
  CDR3 for alpha chain variable domain of TCR clone 307256 (TRAV1-2, TRAJ8)
CAVREDTGFQKLVF

SEQ ID NO: 614512 - protein, 18 aa, Homo sapiens
  CDR3 for beta chain variable domain of TCR clone 307256 (TRBV11-2, TRBJ2-3)
CASSLGGDSRGAPNTQYF

SEQ ID NO: 614513 - protein, 14 aa, Homo sapiens
  CDR3 for alpha chain variable domain of TCR clone 307257 (TRAV8-4, TRAJ16)
CAVSPVGRWPEAAL

SEQ ID NO: 614514 - protein, 14 aa, Homo sapiens
  CDR3 for beta chain variable domain of TCR clone 307257 (TRBV23-1, TRBJ2-5)
CASSFLRSQEIQYF

SEQ ID NO: 614515 - protein, 12 aa, Homo sapiens
  CDR3 for alpha chain variable domain of TCR clone 307258 (TRAV12-3, TRAJ17)
CAMTLTGNKLTF

SEQ ID NO: 614516 - protein, 13 aa, Homo sapiens
  CDR3 for beta chain variable domain of TCR clone 307258 (TRBV20-1, TRBJ2-7)
CSAQTGLSYEQYF

SEQ ID NO: 614517 - protein, 16 aa, Homo sapiens
  CDR3 for alpha chain variable domain of TCR clone 307259 (TRAV3, TRAJ37)
CAVRPHGSGNTGKLIF

SEQ ID NO: 614518 - protein, 13 aa, Homo sapiens
  CDR3 for beta chain variable domain of TCR clone 307259 (TRBV2, TRBJ1-5)
CASGKGGYQPQHF

SEQ ID NO: 614519 - protein, 16 aa, Homo sapiens
  CDR3 for alpha chain variable domain of TCR clone 307260 (TRAV8-3, TRAJ10)
CAVGPILTGGGNKLTF

SEQ ID NO: 614520 - protein, 13 aa, Homo sapiens
  CDR3 for beta chain variable domain of TCR clone 307260 (TRBV7-2, TRBJ2-5)
CASSRGGLETQYF

SEQ ID NO: 614521 - protein, 17 aa, Homo sapiens
  CDR3 for alpha chain variable domain of TCR clone 307261 (TRAV8-3, TRAJ8)
CAVGPNEHRLSETCICN

SEQ ID NO: 614522 - protein, 13 aa, Homo sapiens
  CDR3 for beta chain variable domain of TCR clone 307261 (TRBV10-2, TRBJ2-3)
CASSESGDHTQYF

SEQ ID NO: 614523 - protein, 10 aa, Homo sapiens
  CDR3 for alpha chain variable domain of TCR clone 307262 (TRAV36/DV7, TRAJ31)
CAVGEARLMF

SEQ ID NO: 614524 - protein, 13 aa, Homo sapiens
  CDR3 for beta chain variable domain of TCR clone 307262 (TRBV10-3, TRBJ2-7)
CASKLAVNYEQYF

SEQ ID NO: 614525 - protein, 14 aa, Homo sapiens
  CDR3 for alpha chain variable domain of TCR clone 307263 (TRAV35, TRAJ10)
CAGILTGGGNKLTF

SEQ ID NO: 614526 - protein, 13 aa, Homo sapiens
  CDR3 for beta chain variable domain of TCR clone 307263 (TRBV25-1, TRBJ2-3)
CASSEWGTDTQYF

SEQ ID NO: 614527 - protein, 14 aa, Homo sapiens
  CDR3 for alpha chain variable domain of TCR clone 307264 (TRAV13-1, TRAJ35)
CAASKGGFGNVLHC

SEQ ID NO: 614528 - protein, 13 aa, Homo sapiens
  CDR3 for beta chain variable domain of TCR clone 307264 (TRBV11-2, TRBJ2-5)
CASSRGPSETQYF

SEQ ID NO: 614529 - protein, 10 aa, Homo sapiens
  CDR3 for alpha chain variable domain of TCR clone 307265 (TRAV36/DV7, TRAJ49)
CALTGNQFYF

SEQ ID NO: 614530 - protein, 14 aa, Homo sapiens
  CDR3 for beta chain variable domain of TCR clone 307265 (TRBV28, TRBJ2-1)
CASSLLQGTNEQFF

SEQ ID NO: 614531 - protein, 12 aa, Homo sapiens
  CDR3 for alpha chain variable domain of TCR clone 307266 (TRAV1-1, TRAJ43)
CAPRVSSNDMRF

SEQ ID NO: 614532 - protein, 17 aa, Homo sapiens
  CDR3 for beta chain variable domain of TCR clone 307266 (TRBV11-2, TRBJ2-1)
CASSLYPPGVEYNEQFF

SEQ ID NO: 614533 - protein, 12 aa, Homo sapiens
  CDR3 for alpha chain variable domain of TCR clone 307267 (TRAV9-2, TRAJ9)
CAMNTGGFKTIF

SEQ ID NO: 614534 - protein, 17 aa, Homo sapiens
  CDR3 for beta chain variable domain of TCR clone 307267 (TRBV28, TRBJ2-5)
CAGSRQGGLAGAETQYF

SEQ ID NO: 614535 - protein, 13 aa, Homo sapiens
  CDR3 for alpha chain variable domain of TCR clone 307268 (TRAV30, TRAJ26)
CGTEIPLGQNFVF

SEQ ID NO: 614536 - protein, 15 aa, Homo sapiens
  CDR3 for beta chain variable domain of TCR clone 307268 (TRBV6-1, TRBJ2-2)
CASSAGQGYTGELFF

SEQ ID NO: 614537 - protein, 14 aa, Homo sapiens
  CDR3 for alpha chain variable domain of TCR clone 307269 (TRAV1-2, TRAJ16)
YAVNRFSDGQKLLF

SEQ ID NO: 614538 - protein, 13 aa, Homo sapiens
  CDR3 for beta chain variable domain of TCR clone 307269 (TRBV18, TRBJ2-5)
CASSPAGKETQYF

SEQ ID NO: 614539 - protein, 10 aa, Homo sapiens
  CDR3 for alpha chain variable domain of TCR clone 307270 (TRAV30, TRAJ48)
CGIGNEKLTF

SEQ ID NO: 614540 - protein, 20 aa, Homo sapiens
  CDR3 for beta chain variable domain of TCR clone 307270 (TRBV28, TRBJ2-1)
CASTPIGRSPGLAGGNEQFF

SEQ ID NO: 614541 - protein, 14 aa, Homo sapiens
  CDR3 for alpha chain variable domain of TCR clone 307271 (TRAV16, TRAJ15)
CALRPNQPGTALIF

SEQ ID NO: 614542 - protein, 16 aa, Homo sapiens
  CDR3 for beta chain variable domain of TCR clone 307271 (TRBV6-5, TRBJ2-2)
CASSYGRVPDTGELFF

SEQ ID NO: 614543 - protein, 13 aa, Homo sapiens
  CDR3 for alpha chain variable domain of TCR clone 307272 (TRAV8-4, TRAJ48)
CAVSLFGNEKLTF

SEQ ID NO: 614544 - protein, 14 aa, Homo sapiens
  CDR3 for beta chain variable domain of TCR clone 307272 (TRBV19, TRBJ2-1)
CASPTFVLSGEQFF

SEQ ID NO: 614545 - protein, 14 aa, Homo sapiens
  CDR3 for alpha chain variable domain of TCR clone 307273 (TRAV17, TRAJ56)
CATVPAGANSKLTF

SEQ ID NO: 614546 - protein, 15 aa, Homo sapiens
  CDR3 for beta chain variable domain of TCR clone 307273 (TRBV5-1, TRBJ2-3)
CASSYTSGSTDTQYF

SEQ ID NO: 614547 - protein, 16 aa, Homo sapiens
  CDR3 for alpha chain variable domain of TCR clone 307274 (TRAV26-2, TRAJ57)
CILRDVGSGGSEKLVF

SEQ ID NO: 614548 - protein, 13 aa, Homo sapiens
  CDR3 for beta chain variable domain of TCR clone 307274 (TRBV18, TRBJ2-3)
CASSPGVTGTQYF

SEQ ID NO: 614549 - protein, 15 aa, Homo sapiens
  CDR3 for alpha chain variable domain of TCR clone 307275 (TRAV8-4, TRAJ29)
CAVSEDFRGNTPLVF

SEQ ID NO: 614550 - protein, 14 aa, Homo sapiens
  CDR3 for beta chain variable domain of TCR clone 307275 (TRBV12-5, TRBJ2-5)
CASGSRTHQETQYF

SEQ ID NO: 614551 - protein, 12 aa, Homo sapiens
  CDR3 for alpha chain variable domain of TCR clone 307276 (TRAV1-1, TRAJ27)
CAVRRQEADQPL

SEQ ID NO: 614552 - protein, 18 aa, Homo sapiens
  CDR3 for beta chain variable domain of TCR clone 307276 (TRBV4-1, TRBJ2-6)
CASSQRTSGNSGANVLTF

SEQ ID NO: 614553 - protein, 13 aa, Homo sapiens
  CDR3 for alpha chain variable domain of TCR clone 307277 (TRAV27, TRAJ39)
CAGVNNAGNMLNF

SEQ ID NO: 614554 - protein, 19 aa, Homo sapiens
  CDR3 for beta chain variable domain of TCR clone 307277 (TRBV5-1, TRBJ2-3)
CASSLWLAGGITTTDTQYF

SEQ ID NO: 614555 - protein, 11 aa, Homo sapiens
  CDR3 for alpha chain variable domain of TCR clone 307278 (TRAV12-2, TRAJ43)
CASPIGNDMRF

SEQ ID NO: 614556 - protein, 12 aa, Homo sapiens
  CDR3 for beta chain variable domain of TCR clone 307278 (TRBV20-1, TRBJ2-7)
CSAGLKMGEQSF

SEQ ID NO: 614557 - protein, 15 aa, Homo sapiens
  CDR3 for alpha chain variable domain of TCR clone 307279 (TRAV12-1, TRAJ6)
CVVNCPLRRKLHTYI

SEQ ID NO: 614558 - protein, 13 aa, Homo sapiens
  CDR3 for beta chain variable domain of TCR clone 307279 (TRBV7-3, TRBJ2-1)
CASSPVAYNEQFF

SEQ ID NO: 614559 - protein, 15 aa, Homo sapiens
  CDR3 for alpha chain variable domain of TCR clone 307280 (TRAV3, TRAJ22)
CAVRDRGGSARQLTF

SEQ ID NO: 614560 - protein, 13 aa, Homo sapiens
  CDR3 for beta chain variable domain of TCR clone 307280 (TRBV10-2, TRBJ2-7)
CASGASGDYEQYF

SEQ ID NO: 614561 - protein, 12 aa, Homo sapiens
  CDR3 for alpha chain variable domain of TCR clone 307281 (TRAV12-2, TRAJ9)
CAVYNGGFKTIF

SEQ ID NO: 614562 - protein, 14 aa, Homo sapiens
  CDR3 for beta chain variable domain of TCR clone 307281 (TRBV6-1, TRBJ1-5)
CASSETGVEQPQHF

SEQ ID NO: 614563 - protein, 12 aa, Homo sapiens
  CDR3 for alpha chain variable domain of TCR clone 307282 (TRAV4, TRAJ6)
CLAPGGSYIPTF

SEQ ID NO: 614564 - protein, 17 aa, Homo sapiens
  CDR3 for beta chain variable domain of TCR clone 307282 (TRBV20-1, TRBJ2-2)
CSASGSGQGGLTGELFV

SEQ ID NO: 614565 - protein, 14 aa, Homo sapiens
  CDR3 for alpha chain variable domain of TCR clone 307283 (TRAV12-3, TRAJ10)
SHLPLTGGGNKLTF

SEQ ID NO: 614566 - protein, 16 aa, Homo sapiens
  CDR3 for beta chain variable domain of TCR clone 307283 (TRBV4-1, TRBJ2-7)
CASSQNDRDNSYEQYF

SEQ ID NO: 614567 - protein, 17 aa, Homo sapiens
  CDR3 for alpha chain variable domain of TCR clone 307284 (TRAV8-6, TRAJ58)
CAVSSWVGETSGSRLTF

SEQ ID NO: 614568 - protein, 15 aa, Homo sapiens
  CDR3 for beta chain variable domain of TCR clone 307284 (TRBV20-1, TRBJ1-4)
QCSGTGLINYEKLFF

SEQ ID NO: 614569 - protein, 14 aa, Homo sapiens
  CDR3 for alpha chain variable domain of TCR clone 307285 (TRAV26-1, TRAJ34)
CIVRVAYNTDKLIF

SEQ ID NO: 614570 - protein, 15 aa, Homo sapiens
  CDR3 for beta chain variable domain of TCR clone 307285 (TRBV7-2, TRBJ2-1)
CASRKTGSSYNEQFF

SEQ ID NO: 614571 - protein, 14 aa, Homo sapiens
  CDR3 for alpha chain variable domain of TCR clone 307286 (TRAV26-1, TRAJ44)
CIARTTGTASKLTF

SEQ ID NO: 614572 - protein, 14 aa, Homo sapiens
  CDR3 for beta chain variable domain of TCR clone 307286 (TRBV25-1, TRBJ1-1)
CASTHLGGNTEAFF

SEQ ID NO: 614573 - protein, 15 aa, Homo sapiens
  CDR3 for alpha chain variable domain of TCR clone 307287 (TRAV13-1, TRAJ36)
CAASIRQTGANNLFF

SEQ ID NO: 614574 - protein, 15 aa, Homo sapiens
  CDR3 for beta chain variable domain of TCR clone 307287 (TRBV24-1, TRBJ2-3)
CATSDRDRGTDTQYF

SEQ ID NO: 614575 - protein, 16 aa, Homo sapiens
  CDR3 for alpha chain variable domain of TCR clone 307288 (TRAV3, TRAJ37)
CAVMGKGSGNTGKLIF

SEQ ID NO: 614576 - protein, 13 aa, Homo sapiens
  CDR3 for beta chain variable domain of TCR clone 307288 (TRBV14, TRBJ2-7)
CASSQDRRYEQYF

SEQ ID NO: 614577 - protein, 13 aa, Homo sapiens
  CDR3 for alpha chain variable domain of TCR clone 307289 (TRAV3, TRAJ7)
CAVSSYGNNRLAF

SEQ ID NO: 614578 - protein, 13 aa, Homo sapiens
  CDR3 for beta chain variable domain of TCR clone 307289 (TRBV19, TRBJ1-2)
CASSVPGQDGYTF

SEQ ID NO: 614579 - protein, 18 aa, Homo sapiens
  CDR3 for alpha chain variable domain of TCR clone 307290 (TRAV29/DV5, TRAJ52)
CAAGFRGAGGTSYGKLTF

SEQ ID NO: 614580 - protein, 14 aa, Homo sapiens
  CDR3 for beta chain variable domain of TCR clone 307290 (TRBV25-1, TRBJ1-1)
CTSTHLGGNTEAFF

SEQ ID NO: 614581 - protein, 14 aa, Homo sapiens
  CDR3 for alpha chain variable domain of TCR clone 307291 (TRAV12-3, TRAJ53)
RGATSGGSNYKLTF

SEQ ID NO: 614582 - protein, 13 aa, Homo sapiens
  CDR3 for beta chain variable domain of TCR clone 307291 (TRBV19, TRBJ1-5)
CASSTQDGQPQHF

SEQ ID NO: 614583 - protein, 13 aa, Homo sapiens
  CDR3 for alpha chain variable domain of TCR clone 307292 (TRAV21, TRAJ27)
CAARPGNAGKSTF

SEQ ID NO: 614584 - protein, 14 aa, Homo sapiens
  CDR3 for beta chain variable domain of TCR clone 307292 (TRBV2, TRBJ2-1)
CASSDRAYYNEQFF

SEQ ID NO: 614585 - protein, 17 aa, Homo sapiens
  CDR3 for alpha chain variable domain of TCR clone 307293 (TRAV23/DV6, TRAJ58)
CAARLLRGETSGFRLTF

SEQ ID NO: 614586 - protein, 15 aa, Homo sapiens
  CDR3 for beta chain variable domain of TCR clone 307293 (TRBV9, TRBJ1-6)
CASSVAGTGDSPLHF

SEQ ID NO: 614587 - protein, 12 aa, Homo sapiens
  CDR3 for alpha chain variable domain of TCR clone 307294 (TRAV22, TRAJ29)
CAPPSGNTPLVF

SEQ ID NO: 614588 - protein, 15 aa, Homo sapiens
  CDR3 for beta chain variable domain of TCR clone 307294 (TRBV11-2, TRBJ1-5)
CASSQGHQPNQPQHF

SEQ ID NO: 614589 - protein, 14 aa, Homo sapiens
  CDR3 for alpha chain variable domain of TCR clone 307295 (TRAV12-3, TRAJ33)
CAMSVPGSNYQLIW

SEQ ID NO: 614590 - protein, 14 aa, Homo sapiens
  CDR3 for beta chain variable domain of TCR clone 307295 (TRBV12-4, TRBJ2-5)
CASSFGASGGTQYF

SEQ ID NO: 614591 - protein, 14 aa, Homo sapiens
  CDR3 for alpha chain variable domain of TCR clone 307296 (TRAV3, TRAJ22)
CAVRDYGSARQLTF

SEQ ID NO: 614592 - protein, 15 aa, Homo sapiens
  CDR3 for beta chain variable domain of TCR clone 307296 (TRBV7-3, TRBJ2-1)
CASSLKASEYNERFF

SEQ ID NO: 614593 - protein, 13 aa, Homo sapiens
  CDR3 for alpha chain variable domain of TCR clone 307297 (TRAV12-3, TRAJ53)
CAMRGGSNSKLTF

SEQ ID NO: 614594 - protein, 15 aa, Homo sapiens
  CDR3 for beta chain variable domain of TCR clone 307297 (TRBV2, TRBJ2-1)
CATQARLVMIGEQFF

SEQ ID NO: 614595 - protein, 13 aa, Homo sapiens
  CDR3 for alpha chain variable domain of TCR clone 307298 (TRAV8-3, TRAJ53)
CAVGRGSYYKLTF

SEQ ID NO: 614596 - protein, 14 aa, Homo sapiens
  CDR3 for beta chain variable domain of TCR clone 307298 (TRBV7-9, TRBJ2-1)
CASSPRDSLYEQFF

SEQ ID NO: 614597 - protein, 14 aa, Homo sapiens
  CDR3 for alpha chain variable domain of TCR clone 307299 (TRAV3, TRAJ9)
CAVRLNTGGFKTIS

SEQ ID NO: 614598 - protein, 15 aa, Homo sapiens
  CDR3 for beta chain variable domain of TCR clone 307299 (TRBV7-2, TRBJ2-1)
CASSLASGRVNEQFF

SEQ ID NO: 614599 - protein, 14 aa, Homo sapiens
  CDR3 for alpha chain variable domain of TCR clone 307300 (TRAV1-2, TRAJ33)
CAVRAPDSNSQLIW

SEQ ID NO: 614600 - protein, 14 aa, Homo sapiens
  CDR3 for beta chain variable domain of TCR clone 307300 (TRBV11-3, TRBJ1-6)
CASSFSGGDSPLHF

SEQ ID NO: 614601 - protein, 12 aa, Homo sapiens
  CDR3 for alpha chain variable domain of TCR clone 307301 (TRAV8-3, TRAJ26)
CAGDNYGQNFVF

SEQ ID NO: 614602 - protein, 17 aa, Homo sapiens
  CDR3 for beta chain variable domain of TCR clone 307301 (TRBV7-8, TRBJ2-6)
CASSAGAGGAGANVLTF

SEQ ID NO: 614603 - protein, 13 aa, Homo sapiens
  CDR3 for alpha chain variable domain of TCR clone 307302 (TRAV25, TRAJ24)
CAGGTDSWGKFQF

SEQ ID NO: 614604 - protein, 16 aa, Homo sapiens
  CDR3 for beta chain variable domain of TCR clone 307302 (TRBV28, TRBJ2-3)
CASSLFTGVSTDAQYF

SEQ ID NO: 614605 - protein, 13 aa, Homo sapiens
  CDR3 for alpha chain variable domain of TCR clone 307303 (TRAV27, TRAJ45)
CRSSGGGADGLTF

SEQ ID NO: 614606 - protein, 17 aa, Homo sapiens
  CDR3 for beta chain variable domain of TCR clone 307303 (TRBV7-3, TRBJ2-5)
CASSLGSGRSGSETQYF

SEQ ID NO: 614607 - protein, 11 aa, Homo sapiens
  CDR3 for alpha chain variable domain of TCR clone 307304 (TRAV12-2, TRAJ31)
CAVTIWASLMF

SEQ ID NO: 614608 - protein, 15 aa, Homo sapiens
  CDR3 for beta chain variable domain of TCR clone 307304 (TRBV19, TRBJ2-7)
CASSIGGRLVNEHYF

SEQ ID NO: 614609 - protein, 15 aa, Homo sapiens
  CDR3 for alpha chain variable domain of TCR clone 307305 (TRAV12-2, TRAJ53)
CAVNGGGGSNYKLTF

SEQ ID NO: 614610 - protein, 17 aa, Homo sapiens
  CDR3 for beta chain variable domain of TCR clone 307305 (TRBV7-3, TRBJ2-3)
CASSLMKRMRGSDTQYF

SEQ ID NO: 614611 - protein, 14 aa, Homo sapiens
  CDR3 for alpha chain variable domain of TCR clone 307306 (TRAV1-2, TRAJ16)
CAVNRFSDGQKLLF

SEQ ID NO: 614612 - protein, 15 aa, Homo sapiens
  CDR3 for beta chain variable domain of TCR clone 307306 (TRBV7-2, TRBJ2-1)
CASISGLAGGNEQFF

SEQ ID NO: 614613 - protein, 13 aa, Homo sapiens
  CDR3 for alpha chain variable domain of TCR clone 307307 (TRAV2, TRAJ40)
CAVVTSGTYKYIF

SEQ ID NO: 614614 - protein, 16 aa, Homo sapiens
  CDR3 for beta chain variable domain of TCR clone 307307 (TRBV7-9, TRBJ1-3)
WASSLGAGSSGNTIYF

SEQ ID NO: 614615 - protein, 14 aa, Homo sapiens
  CDR3 for alpha chain variable domain of TCR clone 307308 (TRAV8-3, TRAJ4)
CAVGAAGRYNKLIF

SEQ ID NO: 614616 - protein, 15 aa, Homo sapiens
  CDR3 for beta chain variable domain of TCR clone 307308 (TRBV6-5, TRBJ2-1)
CASSYDAGAGNEQFF

SEQ ID NO: 614617 - protein, 14 aa, Homo sapiens
  CDR3 for alpha chain variable domain of TCR clone 307309 (TRAV12-2, TRAJ6)
CAVIASGGSYIPPF

SEQ ID NO: 614618 - protein, 15 aa, Homo sapiens
  CDR3 for beta chain variable domain of TCR clone 307309 (TRBV20-1, TRBJ2-7)
CSARDRVSGMDEQYF

SEQ ID NO: 614619 - protein, 12 aa, Homo sapiens
  CDR3 for alpha chain variable domain of TCR clone 307310 (TRAV29/DV5, TRAJ49)
CTATDTGNQFYL

SEQ ID NO: 614620 - protein, 12 aa, Homo sapiens
  CDR3 for beta chain variable domain of TCR clone 307310 (TRBV12-4, TRBJ2-7)
CASSLGGYEQYF

SEQ ID NO: 614621 - protein, 14 aa, Homo sapiens
  CDR3 for alpha chain variable domain of TCR clone 307311 (TRAV4, TRAJ30)
CLVGDFRRDDKIIF

SEQ ID NO: 614622 - protein, 15 aa, Homo sapiens
  CDR3 for beta chain variable domain of TCR clone 307311 (TRBV6-5, TRBJ2-1)
CASSYDAGAGNEQFF

SEQ ID NO: 614623 - protein, 15 aa, Homo sapiens
  CDR3 for alpha chain variable domain of TCR clone 307312 (TRAV8-3, TRAJ41)
CAVGSNSNSGYALNF

SEQ ID NO: 614624 - protein, 14 aa, Homo sapiens
  CDR3 for beta chain variable domain of TCR clone 307312 (TRBV7-2, TRBJ2-7)
CASSPKTSFYEQYF

SEQ ID NO: 614625 - protein, 13 aa, Homo sapiens
  CDR3 for alpha chain variable domain of TCR clone 307313 (TRAV21, TRAJ27)
CAARPGNAGKSTF

SEQ ID NO: 614626 - protein, 20 aa, Homo sapiens
  CDR3 for beta chain variable domain of TCR clone 307313 (TRBV7-8, TRBJ2-2)
CASSHLFPGPTIQITGELFF

SEQ ID NO: 614627 - protein, 16 aa, Homo sapiens
  CDR3 for alpha chain variable domain of TCR clone 307314 (TRAV17, TRAJ52)
CATGIIGGTSYGKLTF

SEQ ID NO: 614628 - protein, 16 aa, Homo sapiens
  CDR3 for beta chain variable domain of TCR clone 307314 (TRBV7-3, TRBJ2-2)
CASSLKRGTLSGELFF

SEQ ID NO: 614629 - protein, 12 aa, Homo sapiens
  CDR3 for alpha chain variable domain of TCR clone 307315 (TRAV12-3, TRAJ17)
CAMTLTGNKLTF

SEQ ID NO: 614630 - protein, 13 aa, Homo sapiens
  CDR3 for beta chain variable domain of TCR clone 307315 (TRBV4-2, TRBJ1-1)
CASGQAGNTEAFF

SEQ ID NO: 614631 - protein, 14 aa, Homo sapiens
  CDR3 for alpha chain variable domain of TCR clone 307316 (TRAV9-2, TRAJ39)
CALYIYNEGNMPTF

SEQ ID NO: 614632 - protein, 14 aa, Homo sapiens
  CDR3 for beta chain variable domain of TCR clone 307316 (TRBV6-1, TRBJ1-3)
CASVQGGGGNTIYF

SEQ ID NO: 614633 - protein, 16 aa, Homo sapiens
  CDR3 for alpha chain variable domain of TCR clone 307317 (TRAV12-2, TRAJ52)
FRLANAGGTSYGKLTF

SEQ ID NO: 614634 - protein, 14 aa, Homo sapiens
  CDR3 for beta chain variable domain of TCR clone 307317 (TRBV7-6, TRBJ2-3)
CASSLGTVTDTQYF

SEQ ID NO: 614635 - protein, 13 aa, Homo sapiens
  CDR3 for alpha chain variable domain of TCR clone 307318 (TRAV12-3, TRAJ5)
CAMIYTGRRALTF

SEQ ID NO: 614636 - protein, 11 aa, Homo sapiens
  CDR3 for beta chain variable domain of TCR clone 307318 (TRBV18, TRBJ1-4)
CQLTEPEKLFF

SEQ ID NO: 614637 - protein, 12 aa, Homo sapiens
  CDR3 for alpha chain variable domain of TCR clone 307319 (TRAV1-2, TRAJ33)
CAALGSNYQLIW

SEQ ID NO: 614638 - protein, 13 aa, Homo sapiens
  CDR3 for beta chain variable domain of TCR clone 307319 (TRBV7-2, TRBJ2-7)
CASSFGQEKEQYF

SEQ ID NO: 614639 - protein, 13 aa, Homo sapiens
  CDR3 for alpha chain variable domain of TCR clone 307320 (TRAV26-1, TRAJ40)
CIVRVEGTYKYIF

SEQ ID NO: 614640 - protein, 15 aa, Homo sapiens
  CDR3 for beta chain variable domain of TCR clone 307320 (TRBV12-4, TRBJ1-2)
CASSVAHRDGQAYTF

SEQ ID NO: 614641 - protein, 13 aa, Homo sapiens
  CDR3 for alpha chain variable domain of TCR clone 307321 (TRAV29/DV5, TRAJ31)
FAASRNNNARLMF

SEQ ID NO: 614642 - protein, 12 aa, Homo sapiens
  CDR3 for beta chain variable domain of TCR clone 307321 (TRBV14, TRBJ2-4)
CASSNLKSIQYF

SEQ ID NO: 614643 - protein, 13 aa, Homo sapiens
  CDR3 for alpha chain variable domain of TCR clone 307322 (TRAV17, TRAJ5)
CDTMDTGRRALTF

SEQ ID NO: 614644 - protein, 15 aa, Homo sapiens
  CDR3 for beta chain variable domain of TCR clone 307322 (TRBV20-1, TRBJ2-5)
CSATRTSGSLETQYF

SEQ ID NO: 614645 - protein, 16 aa, Homo sapiens
  CDR3 for alpha chain variable domain of TCR clone 307323 (TRAV23/DV6, TRAJ48)
CAASGGVNFGNEKLTF

SEQ ID NO: 614646 - protein, 15 aa, Homo sapiens
  CDR3 for beta chain variable domain of TCR clone 307323 (TRBV7-9, TRBJ2-1)
CASSLGWGRANEQFF

SEQ ID NO: 614647 - protein, 14 aa, Homo sapiens
  CDR3 for alpha chain variable domain of TCR clone 307324 (TRAV34, TRAJ22)
CGADTSGSARQLTF

SEQ ID NO: 614648 - protein, 15 aa, Homo sapiens
  CDR3 for beta chain variable domain of TCR clone 307324 (TRBV7-9, TRBJ1-5)
CASSQGHQPNQPQHF

SEQ ID NO: 614649 - protein, 15 aa, Homo sapiens
  CDR3 for alpha chain variable domain of TCR clone 307325 (TRAV12-3, TRAJ22)
CAMRKISGSARQLTF

SEQ ID NO: 614650 - protein, 16 aa, Homo sapiens
  CDR3 for beta chain variable domain of TCR clone 307325 (TRBV20-1, TRBJ2-2)
CSARRPGTGNTGELFF

SEQ ID NO: 614651 - protein, 14 aa, Homo sapiens
  CDR3 for alpha chain variable domain of TCR clone 307326 (TRAV12-2, TRAJ17)
CAVLFKAAGNKPTF

SEQ ID NO: 614652 - protein, 14 aa, Homo sapiens
  CDR3 for beta chain variable domain of TCR clone 307326 (TRBV12-5, TRBJ2-5)
CASGSRTHQETQYF

SEQ ID NO: 614653 - protein, 15 aa, Homo sapiens
  CDR3 for alpha chain variable domain of TCR clone 307327 (TRAV8-3, TRAJ45)
CASSYSGGVADGLTF

SEQ ID NO: 614654 - protein, 12 aa, Homo sapiens
  CDR3 for beta chain variable domain of TCR clone 307327 (TRBV12-4, TRBJ2-7)
CASSLGGYEQYF

SEQ ID NO: 614655 - protein, 12 aa, Homo sapiens
  CDR3 for alpha chain variable domain of TCR clone 307328 (TRAV26-1, TRAJ17)
CIVRSAGNKLTL

SEQ ID NO: 614656 - protein, 15 aa, Homo sapiens
  CDR3 for beta chain variable domain of TCR clone 307328 (TRBV7-6, TRBJ1-2)
CASSSGGRGGYGYTF

SEQ ID NO: 614657 - protein, 12 aa, Homo sapiens
  CDR3 for alpha chain variable domain of TCR clone 307329 (TRAV25, TRAJ11)
RAGYSGYSTLTF

SEQ ID NO: 614658 - protein, 13 aa, Homo sapiens
  CDR3 for beta chain variable domain of TCR clone 307329 (TRBV7-9, TRBJ1-2)
CASSLKQNYGYSF

SEQ ID NO: 614659 - protein, 14 aa, Homo sapiens
  CDR3 for alpha chain variable domain of TCR clone 307330 (TRAV25, TRAJ39)
CGRPNNNAGNMLTF

SEQ ID NO: 614660 - protein, 12 aa, Homo sapiens
  CDR3 for beta chain variable domain of TCR clone 307330 (TRBV7-8, TRBJ2-7)
CASSLGDREQYF

SEQ ID NO: 614661 - protein, 13 aa, Homo sapiens
  CDR3 for alpha chain variable domain of TCR clone 307331 (TRAV19, TRAJ57)
CALLQGGSEKLVF

SEQ ID NO: 614662 - protein, 15 aa, Homo sapiens
  CDR3 for beta chain variable domain of TCR clone 307331 (TRBV5-5, TRBJ1-5)
CASSSTPGSNQPQHF

SEQ ID NO: 614663 - protein, 14 aa, Homo sapiens
  CDR3 for alpha chain variable domain of TCR clone 307332 (TRAV38-1, TRAJ39)
CAFAYNNAGNMLTF

SEQ ID NO: 614664 - protein, 15 aa, Homo sapiens
  CDR3 for beta chain variable domain of TCR clone 307332 (TRBV19, TRBJ2-6)
CASSIWPSGANVLTF

SEQ ID NO: 614665 - protein, 13 aa, Homo sapiens
  CDR3 for alpha chain variable domain of TCR clone 307333 (TRAV30, TRAJ22)
RGTLSGSARQLTF

SEQ ID NO: 614666 - protein, 14 aa, Homo sapiens
  CDR3 for beta chain variable domain of TCR clone 307333 (TRBV6-1, TRBJ2-1)
CASSEATGVNEQFF

SEQ ID NO: 614667 - protein, 14 aa, Homo sapiens
  CDR3 for alpha chain variable domain of TCR clone 307334 (TRAV17, TRAJ31)
CATVLRNNNARLMF

SEQ ID NO: 614668 - protein, 15 aa, Homo sapiens
  CDR3 for beta chain variable domain of TCR clone 307334 (TRBV7-2, TRBJ2-1)
RASSSGLAGGNEQFF

SEQ ID NO: 614669 - protein, 14 aa, Homo sapiens
  CDR3 for alpha chain variable domain of TCR clone 307335 (TRAV12-2, TRAJ39)
CAVQGGNAGNMLTF

SEQ ID NO: 614670 - protein, 13 aa, Homo sapiens
  CDR3 for beta chain variable domain of TCR clone 307335 (TRBV12-4, TRBJ1-1)
CASSSGRGTEAFF

SEQ ID NO: 614671 - protein, 19 aa, Homo sapiens
  CDR3 for alpha chain variable domain of TCR clone 307336 (TRAV2, TRAJ20)
ILQVREADAAVYRDCKLSF

SEQ ID NO: 614672 - protein, 15 aa, Homo sapiens
  CDR3 for beta chain variable domain of TCR clone 307336 (TRBV11-3, TRBJ1-1)
CASSLGGPGDTEAFF

SEQ ID NO: 614673 - protein, 17 aa, Homo sapiens
  CDR3 for alpha chain variable domain of TCR clone 307337 (TRAV27, TRAJ18)
CAGLHRGRGSTLGRLYF

SEQ ID NO: 614674 - protein, 14 aa, Homo sapiens
  CDR3 for beta chain variable domain of TCR clone 307337 (TRBV20-1, TRBJ1-5)
CSARGLGSNQPQHF

SEQ ID NO: 614675 - protein, 11 aa, Homo sapiens
  CDR3 for alpha chain variable domain of TCR clone 307338 (TRAV21, TRAJ7)
CAAYGNNRLAF

SEQ ID NO: 614676 - protein, 14 aa, Homo sapiens
  CDR3 for beta chain variable domain of TCR clone 307338 (TRBV4-1, TRBJ2-7)
CASSRTGVAFEQYC

SEQ ID NO: 614677 - protein, 18 aa, Homo sapiens
  CDR3 for alpha chain variable domain of TCR clone 307339 (TRAV26-1, TRAJ52)
CIVRVEGAGGTSYGKLTF

SEQ ID NO: 614678 - protein, 13 aa, Homo sapiens
  CDR3 for beta chain variable domain of TCR clone 307339 (TRBV7-3, TRBJ1-2)
CASSLKRGYGYAL

SEQ ID NO: 614679 - protein, 13 aa, Homo sapiens
  CDR3 for alpha chain variable domain of TCR clone 307340 (TRAV2, TRAJ40)
CAVVTSGTYKYIF

SEQ ID NO: 614680 - protein, 17 aa, Homo sapiens
  CDR3 for beta chain variable domain of TCR clone 307340 (TRBV18, TRBJ2-3)
CASSAAGTSGSTDTQYF

SEQ ID NO: 614681 - protein, 17 aa, Homo sapiens
  CDR3 for alpha chain variable domain of TCR clone 307341 (TRAV3, TRAJ42)
CAVRDRDYGGSQGNLIF

SEQ ID NO: 614682 - protein, 13 aa, Homo sapiens
  CDR3 for beta chain variable domain of TCR clone 307341 (TRBV28, TRBJ2-5)
CASSFAGGETQYF

SEQ ID NO: 614683 - protein, 12 aa, Homo sapiens
  CDR3 for alpha chain variable domain of TCR clone 307342 (TRAV13-1, TRAJ27)
CAAHTNACKSTF

SEQ ID NO: 614684 - protein, 14 aa, Homo sapiens
  CDR3 for beta chain variable domain of TCR clone 307342 (TRBV12-5, TRBJ2-5)
CASGSRTHQETQYF

SEQ ID NO: 614685 - protein, 13 aa, Homo sapiens
  CDR3 for alpha chain variable domain of TCR clone 307343 (TRAV27, TRAJ49)
CAPRPYTGNQFYF

SEQ ID NO: 614686 - protein, 14 aa, Homo sapiens
  CDR3 for beta chain variable domain of TCR clone 307343 (TRBV7-3, TRBJ2-1)
CASSLAGGTNEQFF

SEQ ID NO: 614687 - protein, 11 aa, Homo sapiens
  CDR3 for alpha chain variable domain of TCR clone 307344 (TRAV21, TRAJ11)
CAVNGYSTLTF

SEQ ID NO: 614688 - protein, 14 aa, Homo sapiens
  CDR3 for beta chain variable domain of TCR clone 307344 (TRBV7-3, TRBJ2-1)
CASSLAGGTNEQFF

SEQ ID NO: 614689 - protein, 12 aa, Homo sapiens
  CDR3 for alpha chain variable domain of TCR clone 307345 (TRAV2, TRAJ31)
CAVEDNNARLMF

SEQ ID NO: 614690 - protein, 16 aa, Homo sapiens
  CDR3 for beta chain variable domain of TCR clone 307345 (TRBV5-1, TRBJ2-2)
CASSSRTGGRTGELFF

SEQ ID NO: 614691 - protein, 12 aa, Homo sapiens
  CDR3 for alpha chain variable domain of TCR clone 307346 (TRAV21, TRAJ31)
CAVWGNNARLMF

SEQ ID NO: 614692 - protein, 21 aa, Homo sapiens
  CDR3 for beta chain variable domain of TCR clone 307346 (TRBV27, TRBJ2-5)
CASSYGPGRSEGDPVLRARHA

SEQ ID NO: 614693 - protein, 12 aa, Homo sapiens
  CDR3 for alpha chain variable domain of TCR clone 307347 (TRAV13-1, TRAJ21)
CAAKEGFNKFYF

SEQ ID NO: 614694 - protein, 14 aa, Homo sapiens
  CDR3 for beta chain variable domain of TCR clone 307347 (TRBV7-2, TRBJ2-7)
CASSPKISFYEQYF

SEQ ID NO: 614695 - protein, 14 aa, Homo sapiens
  CDR3 for alpha chain variable domain of TCR clone 307348 (TRAV1-2, TRAJ16)
CAVSRFSDGQKLLF

SEQ ID NO: 614696 - protein, 15 aa, Homo sapiens
  CDR3 for beta chain variable domain of TCR clone 307348 (TRBV28, TRBJ2-1)
CASSIIAGGRSEQFF

SEQ ID NO: 614697 - protein, 14 aa, Homo sapiens
  CDR3 for alpha chain variable domain of TCR clone 307349 (TRAV12-2, TRAJ17)
CAVLFKAAGNKLTF

SEQ ID NO: 614698 - protein, 17 aa, Homo sapiens
  CDR3 for beta chain variable domain of TCR clone 307349 (TRBV20-1, TRBJ2-2)
FIASGSGQGGLTGELFF

SEQ ID NO: 614699 - protein, 13 aa, Homo sapiens
  CDR3 for alpha chain variable domain of TCR clone 307350 (TRAV26-1, )
CIVSHRVEGFWNQ

SEQ ID NO: 614700 - protein, 14 aa, Homo sapiens
  CDR3 for beta chain variable domain of TCR clone 307350 (TRBV20-1, TRBJ2-7)
CSAWTALSSYERYF

SEQ ID NO: 614701 - protein, 14 aa, Homo sapiens
  CDR3 for alpha chain variable domain of TCR clone 307351 (TRAV1-2, TRAJ16)
CAVNRFSDGQKLLF

SEQ ID NO: 614702 - protein, 15 aa, Homo sapiens
  CDR3 for beta chain variable domain of TCR clone 307351 (TRBV19, TRBJ2-1)
CASSTPGLAYNEQFF

SEQ ID NO: 614703 - protein, 14 aa, Homo sapiens
  CDR3 for alpha chain variable domain of TCR clone 307352 (TRAV8-3, TRAJ10)
CAVGNAGGGNKLTF

SEQ ID NO: 614704 - protein, 13 aa, Homo sapiens
  CDR3 for beta chain variable domain of TCR clone 307352 (TRBV11-3, TRBJ2-3)
CASSHDTKDTQYF

SEQ ID NO: 614705 - protein, 15 aa, Homo sapiens
  CDR3 for alpha chain variable domain of TCR clone 307353 (TRAV3, TRAJ42)
CAVRGGTGSQGNLIF

SEQ ID NO: 614706 - protein, 14 aa, Homo sapiens
  CDR3 for beta chain variable domain of TCR clone 307353 (TRBV7-6, TRBJ2-3)
CASSLGTVTDTQYF

SEQ ID NO: 614707 - protein, 14 aa, Homo sapiens
  CDR3 for alpha chain variable domain of TCR clone 307354 (TRAV29/DV5, TRAJ48)
CAAMALFGNEKLTF

SEQ ID NO: 614708 - protein, 14 aa, Homo sapiens
  CDR3 for beta chain variable domain of TCR clone 307354 (TRBV7-3, TRBJ1-1)
CASSLGTGYTEAFF

SEQ ID NO: 614709 - protein, 12 aa, Homo sapiens
  CDR3 for alpha chain variable domain of TCR clone 307355 (TRAV13-1, TRAJ21)
CAAKEGFKKFYF

SEQ ID NO: 614710 - protein, 14 aa, Homo sapiens
  CDR3 for beta chain variable domain of TCR clone 307355 (TRBV23-1, TRBJ2-5)
CASSFLRSQETQYF

SEQ ID NO: 614711 - protein, 12 aa, Homo sapiens
  CDR3 for alpha chain variable domain of TCR clone 307356 (TRAV8-3, TRAJ20)
CAVGANDYKPSL

SEQ ID NO: 614712 - protein, 16 aa, Homo sapiens
  CDR3 for beta chain variable domain of TCR clone 307356 (TRBV19, TRBJ2-2)
CASRSPGTGATGELFF

SEQ ID NO: 614713 - protein, 13 aa, Homo sapiens
  CDR3 for alpha chain variable domain of TCR clone 307357 (TRAV36/DV7, TRAJ49)
CAGDSNTGNQFYF

SEQ ID NO: 614714 - protein, 12 aa, Homo sapiens
  CDR3 for beta chain variable domain of TCR clone 307357 (TRBV11-2, TRBJ2-2)
CTSSLGGGELFF

SEQ ID NO: 614715 - protein, 12 aa, Homo sapiens
  CDR3 for alpha chain variable domain of TCR clone 307358 (TRAV13-1, TRAJ21)
CAAKEGFNKFYF

SEQ ID NO: 614716 - protein, 17 aa, Homo sapiens
  CDR3 for beta chain variable domain of TCR clone 307358 (TRBV7-9, TRBJ2-3)
CASSLEEAGAYPDTQYF

SEQ ID NO: 614717 - protein, 15 aa, Homo sapiens
  CDR3 for alpha chain variable domain of TCR clone 307359 (TRAV3, TRAJ47)
CAVRDIGEYGNKLVF

SEQ ID NO: 614718 - protein, 14 aa, Homo sapiens
  CDR3 for beta chain variable domain of TCR clone 307359 (TRBV13, TRBJ2-5)
CASSLERVGDTQYS

SEQ ID NO: 614719 - protein, 14 aa, Homo sapiens
  CDR3 for alpha chain variable domain of TCR clone 307360 (TRAV1-2, TRAJ8)
CAVREDTGFQKLVF

SEQ ID NO: 614720 - protein, 14 aa, Homo sapiens
  CDR3 for beta chain variable domain of TCR clone 307360 (TRBV7-6, TRBJ2-3)
CTSSLGTVTDTQYF

SEQ ID NO: 614721 - protein, 14 aa, Homo sapiens
  CDR3 for alpha chain variable domain of TCR clone 307361 (TRAV1-2, TRAJ16)
CAVNRFSDGHKLLF

SEQ ID NO: 614722 - protein, 15 aa, Homo sapiens
  CDR3 for beta chain variable domain of TCR clone 307361 (TRBV4-2, TRBJ1-1)
CASSQQGAGDTEAFF

SEQ ID NO: 614723 - protein, 13 aa, Homo sapiens
  CDR3 for alpha chain variable domain of TCR clone 307362 (TRAV36/DV7, TRAJ34)
CAVGEVNTDKLIF

SEQ ID NO: 614724 - protein, 20 aa, Homo sapiens
  CDR3 for beta chain variable domain of TCR clone 307362 (TRBV28, TRBJ2-1)
CASTPIGRSPGLAGGNEQFF

SEQ ID NO: 614725 - protein, 12 aa, Homo sapiens
  CDR3 for alpha chain variable domain of TCR clone 307363 (TRAV26-2, TRAJ21)
CILKGKFNKFYF

SEQ ID NO: 614726 - protein, 12 aa, Homo sapiens
  CDR3 for beta chain variable domain of TCR clone 307363 (TRBV12-4, TRBJ2-7)
CASSLGGYEQYF

SEQ ID NO: 614727 - protein, 11 aa, Homo sapiens
  CDR3 for alpha chain variable domain of TCR clone 307364 (TRAV1-2, TRAJ20)
CAVSNDNKLSF

SEQ ID NO: 614728 - protein, 16 aa, Homo sapiens
  CDR3 for beta chain variable domain of TCR clone 307364 (TRBV29-1, TRBJ2-6)
CSVEDITYSGANVLTF

SEQ ID NO: 614729 - protein, 14 aa, Homo sapiens
  CDR3 for alpha chain variable domain of TCR clone 307365 (TRAV1-2, TRAJ16)
CAVNRFSDGQKLLF

SEQ ID NO: 614730 - protein, 13 aa, Homo sapiens
  CDR3 for beta chain variable domain of TCR clone 307365 (TRBV27, TRBJ2-1)
CASRTLGVGEQFL

SEQ ID NO: 614731 - protein, 10 aa, Homo sapiens
  CDR3 for alpha chain variable domain of TCR clone 307366 (TRAV9-2, TRAJ49)
CALNGNQFYF

SEQ ID NO: 614732 - protein, 16 aa, Homo sapiens
  CDR3 for beta chain variable domain of TCR clone 307366 (TRBV19, TRBJ2-3)
CASSPGAASRTDTQYF

SEQ ID NO: 614733 - protein, 16 aa, Homo sapiens
  CDR3 for alpha chain variable domain of TCR clone 307367 (TRAV8-6, TRAJ37)
CAVIGLGSSNTGKLIF

SEQ ID NO: 614734 - protein, 11 aa, Homo sapiens
  CDR3 for beta chain variable domain of TCR clone 307367 (TRBV12-4, TRBJ2-3)
CASTATDTQYF

SEQ ID NO: 614735 - protein, 11 aa, Homo sapiens
  CDR3 for alpha chain variable domain of TCR clone 307368 (TRAV23/DV6, TRAJ48)
CAPRWGKKLTF

SEQ ID NO: 614736 - protein, 13 aa, Homo sapiens
  CDR3 for beta chain variable domain of TCR clone 307368 (TRBV12-4, TRBJ2-5)
CASSPGTEETQYF

SEQ ID NO: 614737 - protein, 13 aa, Homo sapiens
  CDR3 for alpha chain variable domain of TCR clone 307369 (TRAV21, TRAJ27)
CAALNTNAGKSTF

SEQ ID NO: 614738 - protein, 13 aa, Homo sapiens
  CDR3 for beta chain variable domain of TCR clone 307369 (TRBV24-1, TRBJ2-2)
CATSDWSTGELFF

SEQ ID NO: 614739 - protein, 15 aa, Homo sapiens
  CDR3 for alpha chain variable domain of TCR clone 307370 (TRAV27, TRAJ38)
CAARRNAGNNRKLIL

SEQ ID NO: 614740 - protein, 13 aa, Homo sapiens
  CDR3 for beta chain variable domain of TCR clone 307370 (TRBV12-5, TRBJ2-3)
CASGDRQSDTQYC

SEQ ID NO: 614741 - protein, 11 aa, Homo sapiens
  CDR3 for alpha chain variable domain of TCR clone 307371 (TRAV17, TRAJ43)
CATPRSNDMRF

SEQ ID NO: 614742 - protein, 15 aa, Homo sapiens
  CDR3 for beta chain variable domain of TCR clone 307371 (TRBV11-2, TRBJ2-1)
CASSLGTSGLNEQFV

SEQ ID NO: 614743 - protein, 14 aa, Homo sapiens
  CDR3 for alpha chain variable domain of TCR clone 307372 (TRAV3, TRAJ42)
CCEMLGGSQGNLIF

SEQ ID NO: 614744 - protein, 14 aa, Homo sapiens
  CDR3 for beta chain variable domain of TCR clone 307372 (TRBV19, TRBJ2-5)
CASSSSGIQETQYF

SEQ ID NO: 614745 - protein, 16 aa, Homo sapiens
  CDR3 for alpha chain variable domain of TCR clone 307373 (TRAV30, TRAJ24)
CGTEIVDADSWGRFQF

SEQ ID NO: 614746 - protein, 14 aa, Homo sapiens
  CDR3 for beta chain variable domain of TCR clone 307373 (TRBV11-2, TRBJ2-7)
CASSPGQGLYEQYF

SEQ ID NO: 614747 - protein, 11 aa, Homo sapiens
  CDR3 for alpha chain variable domain of TCR clone 307374 (TRAV13-1, TRAJ43)
CAASMRNDMRF

SEQ ID NO: 614748 - protein, 12 aa, Homo sapiens
  CDR3 for beta chain variable domain of TCR clone 307374 (TRBV29-1, TRBJ2-3)
RSVTGGADTQYF

SEQ ID NO: 614749 - protein, 12 aa, Homo sapiens
  CDR3 for alpha chain variable domain of TCR clone 307375 (TRAV1-2, TRAJ8)
CAVRTGFRKLVF

SEQ ID NO: 614750 - protein, 15 aa, Homo sapiens
  CDR3 for beta chain variable domain of TCR clone 307375 (TRBV11-3, TRBJ2-3)
CASLKDGREGDTQYF

SEQ ID NO: 614751 - protein, 12 aa, Homo sapiens
  CDR3 for alpha chain variable domain of TCR clone 307376 (TRAV25, TRAJ38)
CAGTGNNRKLIW

SEQ ID NO: 614752 - protein, 14 aa, Homo sapiens
  CDR3 for beta chain variable domain of TCR clone 307376 (TRBV5-4, TRBJ1-1)
CASSLDSRRDEAFF

SEQ ID NO: 614753 - protein, 14 aa, Homo sapiens
  CDR3 for alpha chain variable domain of TCR clone 307377 (TRAV17, TRAJ56)
CATIPAGANSKLTF

SEQ ID NO: 614754 - protein, 13 aa, Homo sapiens
  CDR3 for beta chain variable domain of TCR clone 307377 (TRBV12-4, TRBJ2-2)
CASSITGSGELFF

SEQ ID NO: 614755 - protein, 17 aa, Homo sapiens
  CDR3 for alpha chain variable domain of TCR clone 307378 (TRAV3, TRAJ42)
CALRDRDYGGIQGNLIF

SEQ ID NO: 614756 - protein, 15 aa, Homo sapiens
  CDR3 for beta chain variable domain of TCR clone 307378 (TRBV6-6, TRBJ2-7)
CASSYSYGGSYEQYF

SEQ ID NO: 614757 - protein, 15 aa, Homo sapiens
  CDR3 for alpha chain variable domain of TCR clone 307379 (TRAV26-1, TRAJ29)
CIARVKGSGNTPLVF

SEQ ID NO: 614758 - protein, 15 aa, Homo sapiens
  CDR3 for beta chain variable domain of TCR clone 307379 (TRBV7-9, TRBJ1-5)
CASSQGHQPNQPQHF

SEQ ID NO: 614759 - protein, 13 aa, Homo sapiens
  CDR3 for alpha chain variable domain of TCR clone 307380 (TRAV21, TRAJ27)
CAALNTNAGKSTF

SEQ ID NO: 614760 - protein, 14 aa, Homo sapiens
  CDR3 for beta chain variable domain of TCR clone 307380 (TRBV27, TRBJ1-1)
CASSLLSGLSEAFC

SEQ ID NO: 614761 - protein, 17 aa, Homo sapiens
  CDR3 for alpha chain variable domain of TCR clone 307381 (TRAV23/DV6, TRAJ9)
CAASPSPPNTGGFKTIF

SEQ ID NO: 614762 - protein, 18 aa, Homo sapiens
  CDR3 for beta chain variable domain of TCR clone 307381 (TRBV4-1, TRBJ2-7)
CASSQDTGAGSGLNEQYF

SEQ ID NO: 614763 - protein, 19 aa, Homo sapiens
  CDR3 for alpha chain variable domain of TCR clone 307382 (TRAV26-1, TRAJ50)
CCVLLHRQNPKTSYDKVIF

SEQ ID NO: 614764 - protein, 18 aa, Homo sapiens
  CDR3 for beta chain variable domain of TCR clone 307382 (TRBV11-2, TRBJ2-3)
CASSLGGASRGAPNTQYF

SEQ ID NO: 614765 - protein, 12 aa, Homo sapiens
  CDR3 for alpha chain variable domain of TCR clone 307383 (TRAV16, TRAJ10)
FSRTGGGNKLTF

SEQ ID NO: 614766 - protein, 13 aa, Homo sapiens
  CDR3 for beta chain variable domain of TCR clone 307383 (TRBV15, TRBJ2-7)
CATSTTGHYEQYF

SEQ ID NO: 614767 - protein, 15 aa, Homo sapiens
  CDR3 for alpha chain variable domain of TCR clone 307384 (TRAV17, TRAJ57)
CATGPSQGGAEKLVF

SEQ ID NO: 614768 - protein, 11 aa, Homo sapiens
  CDR3 for beta chain variable domain of TCR clone 307384 (TRBV29-1, TRBJ2-5)
CSEDRPGTQYF

SEQ ID NO: 614769 - protein, 13 aa, Homo sapiens
  CDR3 for alpha chain variable domain of TCR clone 307385 (TRAV21, TRAJ27)
CAARPGNAGKSTF

SEQ ID NO: 614770 - protein, 14 aa, Homo sapiens
  CDR3 for beta chain variable domain of TCR clone 307385 (TRBV7-6, TRBJ2-1)
CARSLGGGADEQFF

SEQ ID NO: 614771 - protein, 16 aa, Homo sapiens
  CDR3 for alpha chain variable domain of TCR clone 307386 (TRAV16, TRAJ42)
CARKMNYGGSQGNLIF

SEQ ID NO: 614772 - protein, 13 aa, Homo sapiens
  CDR3 for beta chain variable domain of TCR clone 307386 (TRBV20-1, TRBJ2-7)
CSASPPSSYEQYL

SEQ ID NO: 614773 - protein, 14 aa, Homo sapiens
  CDR3 for alpha chain variable domain of TCR clone 307387 (TRAV12-2, TRAJ13)
CAVKKTGGYQKVTF

SEQ ID NO: 614774 - protein, 13 aa, Homo sapiens
  CDR3 for beta chain variable domain of TCR clone 307387 (TRBV12-4, TRBJ1-2)
CASSFIWLHLRFA

SEQ ID NO: 614775 - protein, 15 aa, Homo sapiens
  CDR3 for alpha chain variable domain of TCR clone 307388 (TRAV4, TRAJ39)
CLVGPNNNEGNMLTF

SEQ ID NO: 614776 - protein, 14 aa, Homo sapiens
  CDR3 for beta chain variable domain of TCR clone 307388 (TRBV19, TRBJ2-1)
CASPTFVLSGEQFF

SEQ ID NO: 614777 - protein, 15 aa, Homo sapiens
  CDR3 for alpha chain variable domain of TCR clone 307389 (TRAV16, TRAJ52)
CALNAGGTSYGKLTF

SEQ ID NO: 614778 - protein, 12 aa, Homo sapiens
  CDR3 for beta chain variable domain of TCR clone 307389 (TRBV11-2, TRBJ2-1)
CASSPGNNEQFF

SEQ ID NO: 614779 - protein, 14 aa, Homo sapiens
  CDR3 for alpha chain variable domain of TCR clone 307390 (TRAV9-2, TRAJ39)
CALYIYNAGNMLTF

SEQ ID NO: 614780 - protein, 14 aa, Homo sapiens
  CDR3 for beta chain variable domain of TCR clone 307390 (TRBV6-1, TRBJ1-3)
CAIVQGGGGNTIYF

SEQ ID NO: 614781 - protein, 13 aa, Homo sapiens
  CDR3 for alpha chain variable domain of TCR clone 307391 (TRAV8-3, TRAJ5)
CAVGPRSRRALTF

SEQ ID NO: 614782 - protein, 16 aa, Homo sapiens
  CDR3 for beta chain variable domain of TCR clone 307391 (TRBV11-3, TRBJ2-3)
CASSPGGLLGTDTQYF

SEQ ID NO: 614783 - protein, 12 aa, Homo sapiens
  CDR3 for alpha chain variable domain of TCR clone 307392 (TRAV12-3, TRAJ20)
FAMVRGDYMLSF

SEQ ID NO: 614784 - protein, 14 aa, Homo sapiens
  CDR3 for beta chain variable domain of TCR clone 307392 (TRBV5-5, TRBJ1-5)
CASSGQGVDQPQHF

SEQ ID NO: 614785 - protein, 13 aa, Homo sapiens
  CDR3 for alpha chain variable domain of TCR clone 307393 (TRAV1-2, TRAJ9)
CAALNTGGFKTIF

SEQ ID NO: 614786 - protein, 13 aa, Homo sapiens
  CDR3 for beta chain variable domain of TCR clone 307393 (TRBV6-1, TRBJ1-1)
CASSRQGNTEAFF

SEQ ID NO: 614787 - protein, 10 aa, Homo sapiens
  CDR3 for alpha chain variable domain of TCR clone 307394 (TRAV36/DV7, TRAJ31)
CASNNARLMF

SEQ ID NO: 614788 - protein, 14 aa, Homo sapiens
  CDR3 for beta chain variable domain of TCR clone 307394 (TRBV19, TRBJ2-1)
CASPTFVLSGEQFF

SEQ ID NO: 614789 - protein, 12 aa, Homo sapiens
  CDR3 for alpha chain variable domain of TCR clone 307395 (TRAV13-1, TRAJ49)
CAASIRSNQFYF

SEQ ID NO: 614790 - protein, 14 aa, Homo sapiens
  CDR3 for beta chain variable domain of TCR clone 307395 (TRBV7-2, TRBJ2-7)
CASSPGLAGNEQFF

SEQ ID NO: 614791 - protein, 15 aa, Homo sapiens
  CDR3 for alpha chain variable domain of TCR clone 307396 (TRAV12-3, TRAJ42)
CAMSGHGGSQGNLIF

SEQ ID NO: 614792 - protein, 13 aa, Homo sapiens
  CDR3 for beta chain variable domain of TCR clone 307396 (TRBV7-8, TRBJ2-7)
CASSLTGGREQYF

SEQ ID NO: 614793 - protein, 13 aa, Homo sapiens
  CDR3 for alpha chain variable domain of TCR clone 307397 (TRAV30, TRAJ31)
CGTEITNNARLMF

SEQ ID NO: 614794 - protein, 17 aa, Homo sapiens
  CDR3 for beta chain variable domain of TCR clone 307397 (TRBV7-8, TRBJ2-7)
CASSFTSGRPPSYEQYF

SEQ ID NO: 614795 - protein, 16 aa, Homo sapiens
  CDR3 for alpha chain variable domain of TCR clone 307398 (TRAV3, TRAJ10)
CAVSDMRAGGGNKLTF

SEQ ID NO: 614796 - protein, 16 aa, Homo sapiens
  CDR3 for beta chain variable domain of TCR clone 307398 (TRBV19, TRBJ2-2)
CASSFPGQGLAGELFF

SEQ ID NO: 614797 - protein, 15 aa, Homo sapiens
  CDR3 for alpha chain variable domain of TCR clone 307399 (TRAV12-1, TRAJ36)
CVVNEHQTGAINLFF

SEQ ID NO: 614798 - protein, 12 aa, Homo sapiens
  CDR3 for beta chain variable domain of TCR clone 307399 (TRBV29-1, TRBJ2-3)
CSVTGGADTQYF

SEQ ID NO: 614799 - protein, 17 aa, Homo sapiens
  CDR3 for alpha chain variable domain of TCR clone 307400 (TRAV27, TRAJ26)
CAGARAPLDNYGQNFFF

SEQ ID NO: 614800 - protein, 15 aa, Homo sapiens
  CDR3 for beta chain variable domain of TCR clone 307400 (TRBV11-2, TRBJ2-5)
CASSPRSGGVETQYF

SEQ ID NO: 614801 - protein, 12 aa, Homo sapiens
  CDR3 for alpha chain variable domain of TCR clone 307401 (TRAV12-1, TRAJ40)
CVVFSGTYKYIF

SEQ ID NO: 614802 - protein, 14 aa, Homo sapiens
  CDR3 for beta chain variable domain of TCR clone 307401 (TRBV7-9, TRBJ2-5)
CASSLDTAQETQYF

SEQ ID NO: 614803 - protein, 11 aa, Homo sapiens
  CDR3 for alpha chain variable domain of TCR clone 307402 (TRAV2, TRAJ13)
CASGGYQKVTL

SEQ ID NO: 614804 - protein, 13 aa, Homo sapiens
  CDR3 for beta chain variable domain of TCR clone 307402 (TRBV20-1, TRBJ1-1)
CSARVGGNTEAFF

SEQ ID NO: 614805 - protein, 17 aa, Homo sapiens
  CDR3 for alpha chain variable domain of TCR clone 307403 (TRAV3, TRAJ42)
CAVRDRDYGGNQGNLIF

SEQ ID NO: 614806 - protein, 13 aa, Homo sapiens
  CDR3 for beta chain variable domain of TCR clone 307403 (TRBV20-1, TRBJ2-5)
CSARRGTGATQYF

SEQ ID NO: 614807 - protein, 14 aa, Homo sapiens
  CDR3 for alpha chain variable domain of TCR clone 307404 (TRAV17, TRAJ22)
CATVLSGSARQLTF

SEQ ID NO: 614808 - protein, 11 aa, Homo sapiens
  CDR3 for beta chain variable domain of TCR clone 307404 (TRBV29-1, TRBJ2-5)
CSEDRTGTQYF

SEQ ID NO: 614809 - protein, 14 aa, Homo sapiens
  CDR3 for alpha chain variable domain of TCR clone 307405 (TRAV8-4, TRAJ54)
CAVSEGLGAQKLVF

SEQ ID NO: 614810 - protein, 15 aa, Homo sapiens
  CDR3 for beta chain variable domain of TCR clone 307405 (TRBV6-1, TRBJ2-6)
CASSSRPSGANVLTF

SEQ ID NO: 614811 - protein, 14 aa, Homo sapiens
  CDR3 for alpha chain variable domain of TCR clone 307406 (TRAV38-1, TRAJ40)
CALRPTSGTYKYIF

SEQ ID NO: 614812 - protein, 13 aa, Homo sapiens
  CDR3 for beta chain variable domain of TCR clone 307406 (TRBV7-6, TRBJ2-7)
CASSLDRTHEQYF

SEQ ID NO: 614813 - protein, 12 aa, Homo sapiens
  CDR3 for alpha chain variable domain of TCR clone 307407 (TRAV26-1, TRAJ36)
CIVETGANNLFF

SEQ ID NO: 614814 - protein, 15 aa, Homo sapiens
  CDR3 for beta chain variable domain of TCR clone 307407 (TRBV28, TRBJ2-5)
CASSPPWSYQETQYF

SEQ ID NO: 614815 - protein, 16 aa, Homo sapiens
  CDR3 for alpha chain variable domain of TCR clone 307408 (TRAV12-3, TRAJ53)
CAMSPGSGGSYYTLTF

SEQ ID NO: 614816 - protein, 11 aa, Homo sapiens
  CDR3 for beta chain variable domain of TCR clone 307408 (TRBV29-1, TRBJ2-5)
CSEDRTGTQYF

SEQ ID NO: 614817 - protein, 11 aa, Homo sapiens
  CDR3 for alpha chain variable domain of TCR clone 307409 (TRAV8-3, TRAJ15)
CAVGPGTALTF

SEQ ID NO: 614818 - protein, 18 aa, Homo sapiens
  CDR3 for beta chain variable domain of TCR clone 307409 (TRBV18, TRBJ2-3)
CASSYTSGAAGGTDTQYF

SEQ ID NO: 614819 - protein, 14 aa, Homo sapiens
  CDR3 for alpha chain variable domain of TCR clone 307410 (TRAV12-2, TRAJ48)
CAVNAFFGNEKLTF

SEQ ID NO: 614820 - protein, 13 aa, Homo sapiens
  CDR3 for beta chain variable domain of TCR clone 307410 (TRBV28, TRBJ2-7)
CAGAQQGLHEQYF

SEQ ID NO: 614821 - protein, 14 aa, Homo sapiens
  CDR3 for alpha chain variable domain of TCR clone 307411 (TRAV35, TRAJ22)
CAWLKPGSARQLTF

SEQ ID NO: 614822 - protein, 15 aa, Homo sapiens
  CDR3 for beta chain variable domain of TCR clone 307411 (TRBV12-4, TRBJ2-5)
CASSPPTGLQETQYF

SEQ ID NO: 614823 - protein, 15 aa, Homo sapiens
  CDR3 for alpha chain variable domain of TCR clone 307412 (TRAV12-2, TRAJ11)
CAAPGLNSGYSTLTF

SEQ ID NO: 614824 - protein, 15 aa, Homo sapiens
  CDR3 for beta chain variable domain of TCR clone 307412 (TRBV12-4, TRBJ1-2)
CASSPGTRGIYGYTF

SEQ ID NO: 614825 - protein, 22 aa, Homo sapiens
  CDR3 for alpha chain variable domain of TCR clone 307413 (TRAV34, TRAJ52)
STSVEQTRRSNAGGTSYGKLTF

SEQ ID NO: 614826 - protein, 12 aa, Homo sapiens
  CDR3 for beta chain variable domain of TCR clone 307413 (TRBV11-2, TRBJ2-2)
CASSLGGGELFF

SEQ ID NO: 614827 - protein, 13 aa, Homo sapiens
  CDR3 for alpha chain variable domain of TCR clone 307414 (TRAV1-1, TRAJ9)
CAAKNTGGFKTIF

SEQ ID NO: 614828 - protein, 13 aa, Homo sapiens
  CDR3 for beta chain variable domain of TCR clone 307414 (TRBV7-9, TRBJ1-2)
CASSFKQNYGYTF

SEQ ID NO: 614829 - protein, 19 aa, Homo sapiens
  CDR3 for alpha chain variable domain of TCR clone 307415 (TRAV2, TRAJ20)
ILQVREADAAVYRDCKPSF

SEQ ID NO: 614830 - protein, 18 aa, Homo sapiens
  CDR3 for beta chain variable domain of TCR clone 307415 (TRBV7-3, TRBJ2-3)
CASSSTGTYPSSTDTQYF

SEQ ID NO: 614831 - protein, 11 aa, Homo sapiens
  CDR3 for alpha chain variable domain of TCR clone 307416 (TRAV35, TRAJ34)
CWAMNTDKLIF

SEQ ID NO: 614832 - protein, 13 aa, Homo sapiens
  CDR3 for beta chain variable domain of TCR clone 307416 (TRBV19, TRBJ2-7)
CASSIDRTYEQYF

SEQ ID NO: 614833 - protein, 11 aa, Homo sapiens
  CDR3 for alpha chain variable domain of TCR clone 307417 (TRAV12-3, TRAJ41)
CAMNAREALNF

SEQ ID NO: 614834 - protein, 16 aa, Homo sapiens
  CDR3 for beta chain variable domain of TCR clone 307417 (TRBV7-8, TRBJ2-3)
CASSTEGQRETDTRYF

SEQ ID NO: 614835 - protein, 12 aa, Homo sapiens
  CDR3 for alpha chain variable domain of TCR clone 307418 (TRAV22, TRAJ3)
CAGYSSASKIIF

SEQ ID NO: 614836 - protein, 14 aa, Homo sapiens
  CDR3 for beta chain variable domain of TCR clone 307418 (TRBV12-4, TRBJ2-7)
CASTFGLSTYEQYF

SEQ ID NO: 614837 - protein, 14 aa, Homo sapiens
  CDR3 for alpha chain variable domain of TCR clone 307419 (TRAV2, TRAJ32)
TSPSQGGATNKLIF

SEQ ID NO: 614838 - protein, 12 aa, Homo sapiens
  CDR3 for beta chain variable domain of TCR clone 307419 (TRBV20-1, TRBJ2-7)
CSAITPTKEQYF

SEQ ID NO: 614839 - protein, 22 aa, Homo sapiens
  CDR3 for alpha chain variable domain of TCR clone 307420 (TRAV2, TRAJ9)
CAVSIGVEASKLSLEQEQDYLL

SEQ ID NO: 614840 - protein, 13 aa, Homo sapiens
  CDR3 for beta chain variable domain of TCR clone 307420 (TRBV12-4, TRBJ1-5)
CASSPDRAQPQHF

SEQ ID NO: 614841 - protein, 10 aa, Homo sapiens
  CDR3 for alpha chain variable domain of TCR clone 307421 (TRAV22, TRAJ15)
CAATGTALIF

SEQ ID NO: 614842 - protein, 14 aa, Homo sapiens
  CDR3 for beta chain variable domain of TCR clone 307421 (TRBV25-1, TRBJ1-1)
CASTHLGGNTEAVF

SEQ ID NO: 614843 - protein, 14 aa, Homo sapiens
  CDR3 for alpha chain variable domain of TCR clone 307422 (TRAV35, TRAJ39)
CAGQLGNAGNMLTF

SEQ ID NO: 614844 - protein, 19 aa, Homo sapiens
  CDR3 for beta chain variable domain of TCR clone 307422 (TRBV7-2, TRBJ2-3)
CASSFLSRNWGGGTDTQYF

SEQ ID NO: 614845 - protein, 15 aa, Homo sapiens
  CDR3 for alpha chain variable domain of TCR clone 307423 (TRAV17, TRAJ16)
CATARRFPDGQKLLF

SEQ ID NO: 614846 - protein, 15 aa, Homo sapiens
  CDR3 for beta chain variable domain of TCR clone 307423 (TRBV13, TRBJ1-5)
CASSFGQGGVQPQHF

SEQ ID NO: 614847 - protein, 14 aa, Homo sapiens
  CDR3 for alpha chain variable domain of TCR clone 307424 (TRAV12-3, TRAJ10)
SHLPLTGGGNKLTF

SEQ ID NO: 614848 - protein, 17 aa, Homo sapiens
  CDR3 for beta chain variable domain of TCR clone 307424 (TRBV7-8, TRBJ1-2)
CASSLRPLQGHLYGYTF

SEQ ID NO: 614849 - protein, 13 aa, Homo sapiens
  CDR3 for alpha chain variable domain of TCR clone 307425 (TRAV23/DV6, TRAJ58)
CAARLIRGPSLTF

SEQ ID NO: 614850 - protein, 13 aa, Homo sapiens
  CDR3 for beta chain variable domain of TCR clone 307425 (TRBV2, TRBJ1-6)
CADSGSYNSPLHF

SEQ ID NO: 614851 - protein, 10 aa, Homo sapiens
  CDR3 for alpha chain variable domain of TCR clone 307426 (TRAV5, TRAJ34)
CAEDTDKLIF

SEQ ID NO: 614852 - protein, 12 aa, Homo sapiens
  CDR3 for beta chain variable domain of TCR clone 307426 (TRBV7-9, TRBJ2-7)
CASSLEGYEQYF

SEQ ID NO: 614853 - protein, 13 aa, Homo sapiens
  CDR3 for alpha chain variable domain of TCR clone 307427 (TRAV26-2, TRAJ54)
CILRDQGAQKLVF

SEQ ID NO: 614854 - protein, 15 aa, Homo sapiens
  CDR3 for beta chain variable domain of TCR clone 307427 (TRBV6-5, TRBJ2-1)
CASSYDAGAGNEQFF

SEQ ID NO: 614855 - protein, 13 aa, Homo sapiens
  CDR3 for alpha chain variable domain of TCR clone 307428 (TRAV12-1, TRAJ33)
CGDAPDSNYQLIW

SEQ ID NO: 614856 - protein, 14 aa, Homo sapiens
  CDR3 for beta chain variable domain of TCR clone 307428 (TRBV7-2, TRBJ2-1)
CASSPRDSLYEQFF

SEQ ID NO: 614857 - protein, 12 aa, Homo sapiens
  CDR3 for alpha chain variable domain of TCR clone 307429 (TRAV1-1, TRAJ9)
CAVDTAVFKTIF

SEQ ID NO: 614858 - protein, 14 aa, Homo sapiens
  CDR3 for beta chain variable domain of TCR clone 307429 (TRBV7-8, TRBJ2-5)
CASSATGGQETQYF

SEQ ID NO: 614859 - protein, 14 aa, Homo sapiens
  CDR3 for alpha chain variable domain of TCR clone 307430 (TRAV3, TRAJ7)
CAVREWEREQQTRF

SEQ ID NO: 614860 - protein, 12 aa, Homo sapiens
  CDR3 for beta chain variable domain of TCR clone 307430 (TRBV24-1, TRBJ1-4)
CATSDPNEKLFF

SEQ ID NO: 614861 - protein, 16 aa, Homo sapiens
  CDR3 for alpha chain variable domain of TCR clone 307431 (TRAV30, TRAJ24)
CGTEIVGADSWGKFQF

SEQ ID NO: 614862 - protein, 19 aa, Homo sapiens
  CDR3 for beta chain variable domain of TCR clone 307431 (TRBV7-2, TRBJ2-3)
CDSSFLSRNWGGGTDTQYF

SEQ ID NO: 614863 - protein, 16 aa, Homo sapiens
  CDR3 for alpha chain variable domain of TCR clone 307432 (TRAV12-1, TRAJ43)
CVVNPHRFGAGTRLTV

SEQ ID NO: 614864 - protein, 13 aa, Homo sapiens
  CDR3 for beta chain variable domain of TCR clone 307432 (TRBV20-1, TRBJ1-1)
CRARGGGNTEAFF

SEQ ID NO: 614865 - protein, 13 aa, Homo sapiens
  CDR3 for alpha chain variable domain of TCR clone 307433 (TRAV21, TRAJ57)
CAVTQGGSEKLVF

SEQ ID NO: 614866 - protein, 16 aa, Homo sapiens
  CDR3 for beta chain variable domain of TCR clone 307433 (TRBV25-1, TRBJ2-7)
CASSELTGGGIYEQYF

SEQ ID NO: 614867 - protein, 11 aa, Homo sapiens
  CDR3 for alpha chain variable domain of TCR clone 307434 (TRAV25, TRAJ49)
CAGGTGNQFYF

SEQ ID NO: 614868 - protein, 17 aa, Homo sapiens
  CDR3 for beta chain variable domain of TCR clone 307434 (TRBV20-1, TRBJ2-1)
CSASSSGLAGSYNEQFF

SEQ ID NO: 614869 - protein, 14 aa, Homo sapiens
  CDR3 for alpha chain variable domain of TCR clone 307435 (TRAV16, TRAJ48)
CALTPGFGNEKLNF

SEQ ID NO: 614870 - protein, 14 aa, Homo sapiens
  CDR3 for beta chain variable domain of TCR clone 307435 (TRBV7-2, TRBJ2-7)
CASSSISGFSEQYF

SEQ ID NO: 614871 - protein, 12 aa, Homo sapiens
  CDR3 for alpha chain variable domain of TCR clone 307436 (TRAV8-3, TRAJ20)
CAVGANDYKLRS

SEQ ID NO: 614872 - protein, 15 aa, Homo sapiens
  CDR3 for beta chain variable domain of TCR clone 307436 (TRBV12-4, TRBJ2-5)
CASSPPTGLQEAQYF

SEQ ID NO: 614873 - protein, 15 aa, Homo sapiens
  CDR3 for alpha chain variable domain of TCR clone 307437 (TRAV27, TRAJ38)
CAARRNAGNNRKLFW

SEQ ID NO: 614874 - protein, 11 aa, Homo sapiens
  CDR3 for beta chain variable domain of TCR clone 307437 (TRBV12-4, TRBJ2-2)
CASSSAGELFF

SEQ ID NO: 614875 - protein, 14 aa, Homo sapiens
  CDR3 for alpha chain variable domain of TCR clone 307438 (TRAV35, TRAJ13)
CAGRSPGGYQKVTF

SEQ ID NO: 614876 - protein, 14 aa, Homo sapiens
  CDR3 for beta chain variable domain of TCR clone 307438 (TRBV4-1, TRBJ2-2)
CASSQAVNTGELFF

SEQ ID NO: 614877 - protein, 18 aa, Homo sapiens
  CDR3 for alpha chain variable domain of TCR clone 307439 (TRAV21, TRAJ52)
CAVRPSPAGGTSYGKLTF

SEQ ID NO: 614878 - protein, 19 aa, Homo sapiens
  CDR3 for beta chain variable domain of TCR clone 307439 (TRBV4-1, TRBJ1-4)
CASSKKGLGGWRKNCFLAV

SEQ ID NO: 614879 - protein, 20 aa, Homo sapiens
  CDR3 for alpha chain variable domain of TCR clone 307440 (TRAV12-2, TRAJ52)
SPMIQPPARAGGTSYGKLTF

SEQ ID NO: 614880 - protein, 16 aa, Homo sapiens
  CDR3 for beta chain variable domain of TCR clone 307440 (TRBV15, TRBJ1-2)
CATSRGPRTGGGGYTF

SEQ ID NO: 614881 - protein, 12 aa, Homo sapiens
  CDR3 for alpha chain variable domain of TCR clone 307441 (TRAV12-3, TRAJ20)
CAMVRGDYKLSF

SEQ ID NO: 614882 - protein, 15 aa, Homo sapiens
  CDR3 for beta chain variable domain of TCR clone 307441 (TRBV11-3, TRBJ2-1)
CASSLGDSSHNEQFF

SEQ ID NO: 614883 - protein, 11 aa, Homo sapiens
  CDR3 for alpha chain variable domain of TCR clone 307442 (TRAV1-1, TRAJ23)
CSVRQGGKLIF

SEQ ID NO: 614884 - protein, 14 aa, Homo sapiens
  CDR3 for beta chain variable domain of TCR clone 307442 (TRBV19, TRBJ2-1)
CASPTFVLSGEQFF

SEQ ID NO: 614885 - protein, 14 aa, Homo sapiens
  CDR3 for alpha chain variable domain of TCR clone 307443 (TRAV12-2, TRAJ11)
CAVEGGSGYSTLTF

SEQ ID NO: 614886 - protein, 20 aa, Homo sapiens
  CDR3 for beta chain variable domain of TCR clone 307443 (TRBV7-8, TRBJ2-1)
CASSLAHRLAGVRSYNEQFF

SEQ ID NO: 614887 - protein, 13 aa, Homo sapiens
  CDR3 for alpha chain variable domain of TCR clone 307444 (TRAV12-2, TRAJ4)
CTGFSGGYNKLIF

SEQ ID NO: 614888 - protein, 14 aa, Homo sapiens
  CDR3 for beta chain variable domain of TCR clone 307444 (TRBV24-1, TRBJ1-1)
CATSIPRGDTEAFF

SEQ ID NO: 614889 - protein, 15 aa, Homo sapiens
  CDR3 for alpha chain variable domain of TCR clone 307445 (TRAV21, TRAJ24)
CAARSSTDSWGKLQF

SEQ ID NO: 614890 - protein, 13 aa, Homo sapiens
  CDR3 for beta chain variable domain of TCR clone 307445 (TRBV5-5, TRBJ2-5)
CASSLLDGETQYF

SEQ ID NO: 614891 - protein, 15 aa, Homo sapiens
  CDR3 for alpha chain variable domain of TCR clone 307446 (TRAV12-2, TRAJ50)
CAVNGLETSYDKVIF

SEQ ID NO: 614892 - protein, 15 aa, Homo sapiens
  CDR3 for beta chain variable domain of TCR clone 307446 (TRBV20-1, TRBJ2-7)
CSARGFRPQTYEQYF

SEQ ID NO: 614893 - protein, 14 aa, Homo sapiens
  CDR3 for alpha chain variable domain of TCR clone 307447 (TRAV35, TRAJ34)
CAGRGTPTSASLGL

SEQ ID NO: 614894 - protein, 14 aa, Homo sapiens
  CDR3 for beta chain variable domain of TCR clone 307447 (TRBV5-1, TRBJ2-7)
CASSRGESLYEQYF

SEQ ID NO: 614895 - protein, 14 aa, Homo sapiens
  CDR3 for alpha chain variable domain of TCR clone 307448 (TRAV13-1, TRAJ35)
CAASKGGFGNVLHC

SEQ ID NO: 614896 - protein, 14 aa, Homo sapiens
  CDR3 for beta chain variable domain of TCR clone 307448 (TRBV15, TRBJ2-7)
CATSRVARGYEQYF

SEQ ID NO: 614897 - protein, 12 aa, Homo sapiens
  CDR3 for alpha chain variable domain of TCR clone 307449 (TRAV26-1, TRAJ31)
CIVRSINARLMF

SEQ ID NO: 614898 - protein, 14 aa, Homo sapiens
  CDR3 for beta chain variable domain of TCR clone 307449 (TRBV28, TRBJ2-7)
CASSGLAEPAEQYF

SEQ ID NO: 614899 - protein, 14 aa, Homo sapiens
  CDR3 for alpha chain variable domain of TCR clone 307450 (TRAV13-1, TRAJ35)
CAASKGGFGNVLHC

SEQ ID NO: 614900 - protein, 14 aa, Homo sapiens
  CDR3 for beta chain variable domain of TCR clone 307450 (TRBV7-9, TRBJ2-3)
CASSLEDGTDTQYF

SEQ ID NO: 614901 - protein, 15 aa, Homo sapiens
  CDR3 for alpha chain variable domain of TCR clone 307451 (TRAV17, TRAJ16)
CATAPRLSDGQKLLF

SEQ ID NO: 614902 - protein, 15 aa, Homo sapiens
  CDR3 for beta chain variable domain of TCR clone 307451 (TRBV20-1, TRBJ1-1)
CSASRGVTGNTEAFF

SEQ ID NO: 614903 - protein, 17 aa, Homo sapiens
  CDR3 for alpha chain variable domain of TCR clone 307452 (TRAV23/DV6, TRAJ58)
CAARLLRGETSGSRLTF

SEQ ID NO: 614904 - protein, 12 aa, Homo sapiens
  CDR3 for beta chain variable domain of TCR clone 307452 (TRBV7-9, TRBJ1-4)
CASSTDREKLFF

SEQ ID NO: 614905 - protein, 11 aa, Homo sapiens
  CDR3 for alpha chain variable domain of TCR clone 307453 (TRAV1-2, TRAJ20)
CAVANDYKRSF

SEQ ID NO: 614906 - protein, 14 aa, Homo sapiens
  CDR3 for beta chain variable domain of TCR clone 307453 (TRBV7-9, TRBJ1-1)
CASTPLQSYTEAFF

SEQ ID NO: 614907 - protein, 14 aa, Homo sapiens
  CDR3 for alpha chain variable domain of TCR clone 307454 (TRAV29/DV5, TRAJ32)
CAAAYGGATNKLIF

SEQ ID NO: 614908 - protein, 15 aa, Homo sapiens
  CDR3 for beta chain variable domain of TCR clone 307454 (TRBV27, TRBJ2-7)
CASSTAGTGSYDQYF

SEQ ID NO: 614909 - protein, 14 aa, Homo sapiens
  CDR3 for alpha chain variable domain of TCR clone 307455 (TRAV13-2, TRAJ39)
GDSVRNNAGNMLTF

SEQ ID NO: 614910 - protein, 12 aa, Homo sapiens
  CDR3 for beta chain variable domain of TCR clone 307455 (TRBV14, TRBJ2-7)
CASSRLKGEQYF

SEQ ID NO: 614911 - protein, 14 aa, Homo sapiens
  CDR3 for alpha chain variable domain of TCR clone 307456 (TRAV12-2, TRAJ24)
CAVTPADSWGKLQF

SEQ ID NO: 614912 - protein, 15 aa, Homo sapiens
  CDR3 for beta chain variable domain of TCR clone 307456 (TRBV9, TRBJ1-6)
CASSVAGTGESPLHF

SEQ ID NO: 614913 - protein, 23 aa, Homo sapiens
  CDR3 for alpha chain variable domain of TCR clone 307457 (TRAV26-1, TRAJ38)
CIADNAGNNHIQNPDPAVHQLRD

SEQ ID NO: 614914 - protein, 15 aa, Homo sapiens
  CDR3 for beta chain variable domain of TCR clone 307457 (TRBV7-6, TRBJ2-5)
CASSKPTGPQETQYF

SEQ ID NO: 614915 - protein, 15 aa, Homo sapiens
  CDR3 for alpha chain variable domain of TCR clone 307458 (TRAV3, TRAJ20)
CAVRDIKLSDYKLSF

SEQ ID NO: 614916 - protein, 17 aa, Homo sapiens
  CDR3 for beta chain variable domain of TCR clone 307458 (TRBV19, TRBJ1-1)
CASSIAGRGLMNTEAFF

SEQ ID NO: 614917 - protein, 14 aa, Homo sapiens
  CDR3 for alpha chain variable domain of TCR clone 307459 (TRAV16, TRAJ37)
CALDISGNTGKLIF

SEQ ID NO: 614918 - protein, 14 aa, Homo sapiens
  CDR3 for beta chain variable domain of TCR clone 307459 (TRBV12-4, TRBJ1-1)
CASSLGTGGTEAFF

SEQ ID NO: 614919 - protein, 16 aa, Homo sapiens
  CDR3 for alpha chain variable domain of TCR clone 307460 (TRAV12-2, TRAJ43)
CAGDDMRFGAGTRLTE

SEQ ID NO: 614920 - protein, 16 aa, Homo sapiens
  CDR3 for beta chain variable domain of TCR clone 307460 (TRBV4-2, TRBJ2-7)
CASSQDRGTSSYEQYF

SEQ ID NO: 614921 - protein, 12 aa, Homo sapiens
  CDR3 for alpha chain variable domain of TCR clone 307461 (TRAV12-3, TRAJ17)
CAMTLKGNKLTF

SEQ ID NO: 614922 - protein, 14 aa, Homo sapiens
  CDR3 for beta chain variable domain of TCR clone 307461 (TRBV7-3, TRBJ2-1)
CASSLAGGTNEQFF

SEQ ID NO: 614923 - protein, 17 aa, Homo sapiens
  CDR3 for alpha chain variable domain of TCR clone 307462 (TRAV13-1, TRAJ52)
CAASSGAGGTSYGKLTF

SEQ ID NO: 614924 - protein, 15 aa, Homo sapiens
  CDR3 for beta chain variable domain of TCR clone 307462 (TRBV2, TRBJ2-7)
CASSEGLARSYEQYF

SEQ ID NO: 614925 - protein, 13 aa, Homo sapiens
  CDR3 for alpha chain variable domain of TCR clone 307463 (TRAV21, TRAJ27)
CAARPGNAGKSTF

SEQ ID NO: 614926 - protein, 14 aa, Homo sapiens
  CDR3 for beta chain variable domain of TCR clone 307463 (TRBV7-6, TRBJ2-3)
CASSLGTVTDTPSF

SEQ ID NO: 614927 - protein, 13 aa, Homo sapiens
  CDR3 for alpha chain variable domain of TCR clone 307464 (TRAV2, TRAJ15)
CAVASQAGTALIF

SEQ ID NO: 614928 - protein, 15 aa, Homo sapiens
  CDR3 for beta chain variable domain of TCR clone 307464 (TRBV20-1, TRBJ1-1)
CSARSAATSNTEAFF

SEQ ID NO: 614929 - protein, 12 aa, Homo sapiens
  CDR3 for alpha chain variable domain of TCR clone 307465 (TRAV12-3, TRAJ17)
CAMTLTGNKLTF

SEQ ID NO: 614930 - protein, 15 aa, Homo sapiens
  CDR3 for beta chain variable domain of TCR clone 307465 (TRBV19, TRBJ2-1)
CASSILGAGRHEQFF

SEQ ID NO: 614931 - protein, 14 aa, Homo sapiens
  CDR3 for alpha chain variable domain of TCR clone 307466 (TRAV1-2, TRAJ16)
CAVNRFSDGQKLLF

SEQ ID NO: 614932 - protein, 15 aa, Homo sapiens
  CDR3 for beta chain variable domain of TCR clone 307466 (TRBV7-9, TRBJ1-6)
CASSSPGRGNSRLHF

SEQ ID NO: 614933 - protein, 15 aa, Homo sapiens
  CDR3 for alpha chain variable domain of TCR clone 307467 (TRAV3, TRAJ6)
CAVRDGPRRKLHTYI

SEQ ID NO: 614934 - protein, 14 aa, Homo sapiens
  CDR3 for beta chain variable domain of TCR clone 307467 (TRBV7-2, TRBJ2-7)
CASSPKTSFYEQYF

SEQ ID NO: 614935 - protein, 14 aa, Homo sapiens
  CDR3 for alpha chain variable domain of TCR clone 307468 (TRAV12-3, TRAJ22)
CAMSLFGSARQLTF

SEQ ID NO: 614936 - protein, 15 aa, Homo sapiens
  CDR3 for beta chain variable domain of TCR clone 307468 (TRBV12-4, TRBJ2-5)
CASSPPTGLQETQYF

SEQ ID NO: 614937 - protein, 14 aa, Homo sapiens
  CDR3 for alpha chain variable domain of TCR clone 307469 (TRAV8-3, TRAJ6)
CAVGSSGGSYIPTF

SEQ ID NO: 614938 - protein, 14 aa, Homo sapiens
  CDR3 for beta chain variable domain of TCR clone 307469 (TRBV4-1, TRBJ2-2)
CASSQEVNTGELFF

SEQ ID NO: 614939 - protein, 13 aa, Homo sapiens
  CDR3 for alpha chain variable domain of TCR clone 307470 (TRAV13-2, TRAJ48)
CAEMDFGNEKLTF

SEQ ID NO: 614940 - protein, 17 aa, Homo sapiens
  CDR3 for beta chain variable domain of TCR clone 307470 (TRBV18, TRBJ2-3)
CASSAAGTSGRSDTQYF

SEQ ID NO: 614941 - protein, 17 aa, Homo sapiens
  CDR3 for alpha chain variable domain of TCR clone 307471 (TRAV3, TRAJ42)
CAVRDRDYGGRQGNLIF

SEQ ID NO: 614942 - protein, 15 aa, Homo sapiens
  CDR3 for beta chain variable domain of TCR clone 307471 (TRBV5-1, TRBJ2-1)
CASSPPRAPYNEQFF

SEQ ID NO: 614943 - protein, 12 aa, Homo sapiens
  CDR3 for alpha chain variable domain of TCR clone 307472 (TRAV12-3, TRAJ17)
CAMTITGTKLTF

SEQ ID NO: 614944 - protein, 15 aa, Homo sapiens
  CDR3 for beta chain variable domain of TCR clone 307472 (TRBV20-1, TRBJ2-7)
CSARDRVSGMDEQYF

SEQ ID NO: 614945 - protein, 13 aa, Homo sapiens
  CDR3 for alpha chain variable domain of TCR clone 307473 (TRAV2, TRAJ15)
CAVASQAGTALIF

SEQ ID NO: 614946 - protein, 14 aa, Homo sapiens
  CDR3 for beta chain variable domain of TCR clone 307473 (TRBV6-1, TRBJ1-3)
CASGEGGGGNTIYF

SEQ ID NO: 614947 - protein, 14 aa, Homo sapiens
  CDR3 for alpha chain variable domain of TCR clone 307474 (TRAV13-1, TRAJ39)
CAASEGNAGNMLTF

SEQ ID NO: 614948 - protein, 12 aa, Homo sapiens
  CDR3 for beta chain variable domain of TCR clone 307474 (TRBV6-3, TRBJ2-7)
CASSLTPYEQYF

SEQ ID NO: 614949 - protein, 12 aa, Homo sapiens
  CDR3 for alpha chain variable domain of TCR clone 307475 (TRAV12-1, TRAJ23)
CVVNIPGGKLIF

SEQ ID NO: 614950 - protein, 15 aa, Homo sapiens
  CDR3 for beta chain variable domain of TCR clone 307475 (TRBV27, TRBJ2-1)
CASSNGGGSSNEQFF

SEQ ID NO: 614951 - protein, 13 aa, Homo sapiens
  CDR3 for alpha chain variable domain of TCR clone 307476 (TRAV2, TRAJ21)
CAVEDLNFNKFYF

SEQ ID NO: 614952 - protein, 13 aa, Homo sapiens
  CDR3 for beta chain variable domain of TCR clone 307476 (TRBV5-1, TRBJ1-2)
CASSLVPGGGYTF

SEQ ID NO: 614953 - protein, 11 aa, Homo sapiens
  CDR3 for alpha chain variable domain of TCR clone 307477 (TRAV21, TRAJ11)
CAVNGYSTLTF

SEQ ID NO: 614954 - protein, 11 aa, Homo sapiens
  CDR3 for beta chain variable domain of TCR clone 307477 (TRBV11-2, TRBJ2-7)
CASISDYEQYF

SEQ ID NO: 614955 - protein, 14 aa, Homo sapiens
  CDR3 for alpha chain variable domain of TCR clone 307478 (TRAV12-2, TRAJ15)
CAPHTGQAGTALIF

SEQ ID NO: 614956 - protein, 15 aa, Homo sapiens
  CDR3 for beta chain variable domain of TCR clone 307478 (TRBV13, TRBJ2-2)
CASGYRGRRTGELFF

SEQ ID NO: 614957 - protein, 13 aa, Homo sapiens
  CDR3 for alpha chain variable domain of TCR clone 307479 (TRAV2, TRAJ23)
CAVMGNQGGKLIF

SEQ ID NO: 614958 - protein, 15 aa, Homo sapiens
  CDR3 for beta chain variable domain of TCR clone 307479 (TRBV11-2, TRBJ2-1)
CASSSSTISDNEQFF

SEQ ID NO: 614959 - protein, 11 aa, Homo sapiens
  CDR3 for alpha chain variable domain of TCR clone 307480 (TRAV2, TRAJ13)
CASGGYQTVTF

SEQ ID NO: 614960 - protein, 14 aa, Homo sapiens
  CDR3 for beta chain variable domain of TCR clone 307480 (TRBV6-1, TRBJ1-3)
CASVQGGGGNTIYF

SEQ ID NO: 614961 - protein, 14 aa, Homo sapiens
  CDR3 for alpha chain variable domain of TCR clone 307481 (TRAV12-3, TRAJ10)
SHLPLTGGGNKLTF

SEQ ID NO: 614962 - protein, 14 aa, Homo sapiens
  CDR3 for beta chain variable domain of TCR clone 307481 (TRBV7-2, TRBJ2-3)
CASNPGVYTDTQYF

SEQ ID NO: 614963 - protein, 14 aa, Homo sapiens
  CDR3 for alpha chain variable domain of TCR clone 307482 (TRAV8-2, TRAJ4)
CVVSPSGGYNKLIF

SEQ ID NO: 614964 - protein, 15 aa, Homo sapiens
  CDR3 for beta chain variable domain of TCR clone 307482 (TRBV25-1, TRBJ2-1)
CASSNGGGSSNEQFF

SEQ ID NO: 614965 - protein, 15 aa, Homo sapiens
  CDR3 for alpha chain variable domain of TCR clone 307483 (TRAV12-3, TRAJ11)
CAMSEENSGYSTLTF

SEQ ID NO: 614966 - protein, 16 aa, Homo sapiens
  CDR3 for beta chain variable domain of TCR clone 307483 (TRBV5-1, TRBJ2-7)
CASSLEGLAGLYELYF

SEQ ID NO: 614967 - protein, 14 aa, Homo sapiens
  CDR3 for alpha chain variable domain of TCR clone 307484 (TRAV1-1, TRAJ15)
CAVMANQAGTALIF

SEQ ID NO: 614968 - protein, 14 aa, Homo sapiens
  CDR3 for beta chain variable domain of TCR clone 307484 (TRBV14, TRBJ2-5)
CASSPQRHYETQYF

SEQ ID NO: 614969 - protein, 11 aa, Homo sapiens
  CDR3 for alpha chain variable domain of TCR clone 307485 (TRAV21, TRAJ48)
CAVDGNEKLTF

SEQ ID NO: 614970 - protein, 16 aa, Homo sapiens
  CDR3 for beta chain variable domain of TCR clone 307485 (TRBV12-4, TRBJ1-5)
CDSSSGPRGSNQPQHS

SEQ ID NO: 614971 - protein, 11 aa, Homo sapiens
  CDR3 for alpha chain variable domain of TCR clone 307486 (TRAV12-2, TRAJ29)
CAVTLRSPLVF

SEQ ID NO: 614972 - protein, 16 aa, Homo sapiens
  CDR3 for beta chain variable domain of TCR clone 307486 (TRBV19, TRBJ1-5)
RASSIDRGGPRQPQHF

SEQ ID NO: 614973 - protein, 13 aa, Homo sapiens
  CDR3 for alpha chain variable domain of TCR clone 307487 (TRAV8-3, TRAJ44)
CAVVPGTASKLTF

SEQ ID NO: 614974 - protein, 13 aa, Homo sapiens
  CDR3 for beta chain variable domain of TCR clone 307487 (TRBV5-1, TRBJ2-1)
CASSLGSYNEQFF

SEQ ID NO: 614975 - protein, 14 aa, Homo sapiens
  CDR3 for alpha chain variable domain of TCR clone 307488 (TRAV9-2, TRAJ39)
CALYIYNAGNMLAF

SEQ ID NO: 614976 - protein, 17 aa, Homo sapiens
  CDR3 for beta chain variable domain of TCR clone 307488 (TRBV13, TRBJ2-3)
CASSLSRVAGGRNTQYF

SEQ ID NO: 614977 - protein, 14 aa, Homo sapiens
  CDR3 for alpha chain variable domain of TCR clone 307489 (TRAV3, TRAJ9)
CAVRGNTGGFKTIF

SEQ ID NO: 614978 - protein, 14 aa, Homo sapiens
  CDR3 for beta chain variable domain of TCR clone 307489 (TRBV15, TRBJ2-1)
CATSVVEDYNEQFF

SEQ ID NO: 614979 - protein, 15 aa, Homo sapiens
  CDR3 for alpha chain variable domain of TCR clone 307490 (TRAV12-3, TRAJ6)
CAMSATTGGSYIPTF

SEQ ID NO: 614980 - protein, 15 aa, Homo sapiens
  CDR3 for beta chain variable domain of TCR clone 307490 (TRBV7-6, TRBJ1-5)
CASSQNSGINQPQHF

SEQ ID NO: 614981 - protein, 18 aa, Homo sapiens
  CDR3 for alpha chain variable domain of TCR clone 307491 (TRAV29/DV5, TRAJ26)
CSVLLCSKRKPEGKHFVF

SEQ ID NO: 614982 - protein, 17 aa, Homo sapiens
  CDR3 for beta chain variable domain of TCR clone 307491 (TRBV20-1, TRBJ2-2)
CSASGSGQGGLTGELFF

SEQ ID NO: 614983 - protein, 15 aa, Homo sapiens
  CDR3 for alpha chain variable domain of TCR clone 307492 (TRAV12-3, TRAJ6)
CAMSATTGGSYIPTF

SEQ ID NO: 614984 - protein, 14 aa, Homo sapiens
  CDR3 for beta chain variable domain of TCR clone 307492 (TRBV18, TRBJ1-4)
CASSPGPNGEKLFF

SEQ ID NO: 614985 - protein, 10 aa, Homo sapiens
  CDR3 for alpha chain variable domain of TCR clone 307493 (TRAV30, TRAJ48)
CGIGNEKLTF

SEQ ID NO: 614986 - protein, 14 aa, Homo sapiens
  CDR3 for beta chain variable domain of TCR clone 307493 (TRBV7-2, TRBJ2-7)
CASSPRTSFYEQYF

SEQ ID NO: 614987 - protein, 18 aa, Homo sapiens
  CDR3 for alpha chain variable domain of TCR clone 307494 (TRAV14/DV4, TRAJ3)
CAMREGSGGYSSASKIIF

SEQ ID NO: 614988 - protein, 15 aa, Homo sapiens
  CDR3 for beta chain variable domain of TCR clone 307494 (TRBV7-9, TRBJ1-5)
CASSQGHQPNQPQHF

SEQ ID NO: 614989 - protein, 16 aa, Homo sapiens
  CDR3 for alpha chain variable domain of TCR clone 307495 (TRAV16, TRAJ4)
CALSRMFSGGYNKLIF

SEQ ID NO: 614990 - protein, 12 aa, Homo sapiens
  CDR3 for beta chain variable domain of TCR clone 307495 (TRBV24-1, TRBJ1-1)
CATLYPHTEAFF

SEQ ID NO: 614991 - protein, 17 aa, Homo sapiens
  CDR3 for alpha chain variable domain of TCR clone 307496 (TRAV8-6, TRAJ58)
CAVSSWVGETSGSRLTF

SEQ ID NO: 614992 - protein, 13 aa, Homo sapiens
  CDR3 for beta chain variable domain of TCR clone 307496 (TRBV12-4, TRBJ1-1)
CASSPGTGFEAFF

SEQ ID NO: 614993 - protein, 16 aa, Homo sapiens
  CDR3 for alpha chain variable domain of TCR clone 307497 (TRAV12-3, TRAJ53)
CAMSPGSGGSNYKLTL

SEQ ID NO: 614994 - protein, 18 aa, Homo sapiens
  CDR3 for beta chain variable domain of TCR clone 307497 (TRBV6-3, TRBJ2-2)
CASSYRPGGLDRPGELFF

SEQ ID NO: 614995 - protein, 17 aa, Homo sapiens
  CDR3 for alpha chain variable domain of TCR clone 307498 (TRAV23/DV6, TRAJ57)
CAASSTLSQGGSEKLVF

SEQ ID NO: 614996 - protein, 12 aa, Homo sapiens
  CDR3 for beta chain variable domain of TCR clone 307498 (TRBV12-5, TRBJ2-5)
CASGQGVETQYF

SEQ ID NO: 614997 - protein, 13 aa, Homo sapiens
  CDR3 for alpha chain variable domain of TCR clone 307499 (TRAV14/DV4, TRAJ4)
CAMKAGGYNKLIF

SEQ ID NO: 614998 - protein, 17 aa, Homo sapiens
  CDR3 for beta chain variable domain of TCR clone 307499 (TRBV7-9, TRBJ2-3)
CASSLEEAGAYPDTQYF

SEQ ID NO: 614999 - protein, 14 aa, Homo sapiens
  CDR3 for alpha chain variable domain of TCR clone 307500 (TRAV8-6, TRAJ29)
CAVSRASGNTPLVF

SEQ ID NO: 615000 - protein, 15 aa, Homo sapiens
  CDR3 for beta chain variable domain of TCR clone 307500 (TRBV2, TRBJ2-1)
CASTPTGSSYNEQFF

SEQ ID NO: 615001 - protein, 12 aa, Homo sapiens
  CDR3 for alpha chain variable domain of TCR clone 307501 (TRAV12-3, TRAJ17)
YAMTLTGNKITF

SEQ ID NO: 615002 - protein, 14 aa, Homo sapiens
  CDR3 for beta chain variable domain of TCR clone 307501 (TRBV19, TRBJ2-1)
CASPTFVLSGEQFF

SEQ ID NO: 615003 - protein, 16 aa, Homo sapiens
  CDR3 for alpha chain variable domain of TCR clone 307502 (TRAV21, TRAJ37)
CAVRTAGSSNTGKLIF

SEQ ID NO: 615004 - protein, 13 aa, Homo sapiens
  CDR3 for beta chain variable domain of TCR clone 307502 (TRBV7-9, TRBJ2-5)
CASLPSGRKTQYF

SEQ ID NO: 615005 - protein, 12 aa, Homo sapiens
  CDR3 for alpha chain variable domain of TCR clone 307503 (TRAV12-1, TRAJ23)
CVVNIPGEKLIF

SEQ ID NO: 615006 - protein, 15 aa, Homo sapiens
  CDR3 for beta chain variable domain of TCR clone 307503 (TRBV7-2, TRBJ2-7)
CASSLVSSGSYEQYF

SEQ ID NO: 615007 - protein, 16 aa, Homo sapiens
  CDR3 for alpha chain variable domain of TCR clone 307504 (TRAV3, TRAJ37)
CAVRGKGSGNTGKLIV

SEQ ID NO: 615008 - protein, 13 aa, Homo sapiens
  CDR3 for beta chain variable domain of TCR clone 307504 (TRBV7-2, TRBJ2-2)
CASSSVRAGELFF

SEQ ID NO: 615009 - protein, 15 aa, Homo sapiens
  CDR3 for alpha chain variable domain of TCR clone 307505 (TRAV8-3, TRAJ41)
CAVGSNSNSGYALNF

SEQ ID NO: 615010 - protein, 17 aa, Homo sapiens
  CDR3 for beta chain variable domain of TCR clone 307505 (TRBV25-1, TRBJ2-1)
CASSAYGQGRGLYEQFF

SEQ ID NO: 615011 - protein, 14 aa, Homo sapiens
  CDR3 for alpha chain variable domain of TCR clone 307506 (TRAV4, TRAJ17)
CLAGPRAAGNTLTF

SEQ ID NO: 615012 - protein, 14 aa, Homo sapiens
  CDR3 for beta chain variable domain of TCR clone 307506 (TRBV11-1, TRBJ2-7)
CASSFRQGSYEQYF

SEQ ID NO: 615013 - protein, 15 aa, Homo sapiens
  CDR3 for alpha chain variable domain of TCR clone 307507 (TRAV21, TRAJ53)
CATLNRGGSNYKLTF

SEQ ID NO: 615014 - protein, 13 aa, Homo sapiens
  CDR3 for beta chain variable domain of TCR clone 307507 (TRBV11-2, TRBJ2-5)
CASSSTGEETQYF

SEQ ID NO: 615015 - protein, 15 aa, Homo sapiens
  CDR3 for alpha chain variable domain of TCR clone 307508 (TRAV3, TRAJ47)
CAVRDLGEYGNKLVF

SEQ ID NO: 615016 - protein, 14 aa, Homo sapiens
  CDR3 for beta chain variable domain of TCR clone 307508 (TRBV13, TRBJ2-5)
CASSLERVGGTQYF

SEQ ID NO: 615017 - protein, 14 aa, Homo sapiens
  CDR3 for alpha chain variable domain of TCR clone 307509 (TRAV8-3, TRAJ12)
CAVGARDSSYKLIF

SEQ ID NO: 615018 - protein, 17 aa, Homo sapiens
  CDR3 for beta chain variable domain of TCR clone 307509 (TRBV28, TRBJ2-5)
CASSTPEGDALQETQYL

SEQ ID NO: 615019 - protein, 14 aa, Homo sapiens
  CDR3 for alpha chain variable domain of TCR clone 307510 (TRAV9-2, TRAJ39)
CALYIYNAGNMLTF

SEQ ID NO: 615020 - protein, 15 aa, Homo sapiens
  CDR3 for beta chain variable domain of TCR clone 307510 (TRBV28, TRBJ1-3)
CASSMGCASGNTIYF

SEQ ID NO: 615021 - protein, 20 aa, Homo sapiens
  CDR3 for alpha chain variable domain of TCR clone 307511 (TRAV12-1, TRAJ42)
SSVIQPPTSVTGGSQGNLIF

SEQ ID NO: 615022 - protein, 18 aa, Homo sapiens
  CDR3 for beta chain variable domain of TCR clone 307511 (TRBV11-2, TRBJ2-3)
YASSLGGASRGAPNTQYF

SEQ ID NO: 615023 - protein, 14 aa, Homo sapiens
  CDR3 for alpha chain variable domain of TCR clone 307512 (TRAV13-2, TRAJ32)
CAENYGGATNKLIF

SEQ ID NO: 615024 - protein, 14 aa, Homo sapiens
  CDR3 for beta chain variable domain of TCR clone 307512 (TRBV4-2, TRBJ2-1)
CASGLDRAYNEQFF

SEQ ID NO: 615025 - protein, 17 aa, Homo sapiens
  CDR3 for alpha chain variable domain of TCR clone 307513 (TRAV3, TRAJ6)
CAVRDGPRAGESYIPTF

SEQ ID NO: 615026 - protein, 14 aa, Homo sapiens
  CDR3 for beta chain variable domain of TCR clone 307513 (TRBV7-2, TRBJ2-7)
CASSTKTSFYEQYF

SEQ ID NO: 615027 - protein, 13 aa, Homo sapiens
  CDR3 for alpha chain variable domain of TCR clone 307514 (TRAV12-1, TRAJ13)
CVVALLGYQKVTF

SEQ ID NO: 615028 - protein, 13 aa, Homo sapiens
  CDR3 for beta chain variable domain of TCR clone 307514 (TRBV20-1, TRBJ2-5)
CSAILTGRETQYF

SEQ ID NO: 615029 - protein, 14 aa, Homo sapiens
  CDR3 for alpha chain variable domain of TCR clone 307515 (TRAV2, TRAJ37)
CAVDFTSNTGKLIF

SEQ ID NO: 615030 - protein, 14 aa, Homo sapiens
  CDR3 for beta chain variable domain of TCR clone 307515 (TRBV20-1, TRBJ1-1)
SAGLHLGGGTEAFF

SEQ ID NO: 615031 - protein, 16 aa, Homo sapiens
  CDR3 for alpha chain variable domain of TCR clone 307516 (TRAV12-3, TRAJ53)
CAMSPGSGGSNDKLTV

SEQ ID NO: 615032 - protein, 14 aa, Homo sapiens
  CDR3 for beta chain variable domain of TCR clone 307516 (TRBV4-1, TRBJ1-1)
CASSRSGQSCEAFF

SEQ ID NO: 615033 - protein, 14 aa, Homo sapiens
  CDR3 for alpha chain variable domain of TCR clone 307517 (TRAV12-2, TRAJ6)
CASKWGGGSYIPTF

SEQ ID NO: 615034 - protein, 11 aa, Homo sapiens
  CDR3 for beta chain variable domain of TCR clone 307517 (TRBV19, TRBJ1-1)
CASSIGSEAFF

SEQ ID NO: 615035 - protein, 15 aa, Homo sapiens
  CDR3 for alpha chain variable domain of TCR clone 307518 (TRAV38-1, TRAJ57)
CAFMDSQGGSEKLVF

SEQ ID NO: 615036 - protein, 16 aa, Homo sapiens
  CDR3 for beta chain variable domain of TCR clone 307518 (TRBV20-1, TRBJ1-4)
CSAPGQGLLTNEKLFF

SEQ ID NO: 615037 - protein, 14 aa, Homo sapiens
  CDR3 for alpha chain variable domain of TCR clone 307519 (TRAV8-2, TRAJ11)
CVVSEKSGYSTVTF

SEQ ID NO: 615038 - protein, 16 aa, Homo sapiens
  CDR3 for beta chain variable domain of TCR clone 307519 (TRBV28, TRBJ2-1)
CASSSPEYPRDNEQFF

SEQ ID NO: 615039 - protein, 14 aa, Homo sapiens
  CDR3 for alpha chain variable domain of TCR clone 307520 (TRAV1-2, TRAJ8)
CAVREDTGFQKLVF

SEQ ID NO: 615040 - protein, 15 aa, Homo sapiens
  CDR3 for beta chain variable domain of TCR clone 307520 (TRBV28, TRBJ1-2)
CASSSPRRGNYGYTF

SEQ ID NO: 615041 - protein, 13 aa, Homo sapiens
  CDR3 for alpha chain variable domain of TCR clone 307521 (TRAV27, TRAJ49)
CAPRTYTGNQFYF

SEQ ID NO: 615042 - protein, 16 aa, Homo sapiens
  CDR3 for beta chain variable domain of TCR clone 307521 (TRBV4-1, TRBJ1-2)
CASSQDAGQVLYGYAF

SEQ ID NO: 615043 - protein, 22 aa, Homo sapiens
  CDR3 for alpha chain variable domain of TCR clone 307522 (TRAV27, )
CAVRTQIPDVQNPDPAVYQLRN

SEQ ID NO: 615044 - protein, 16 aa, Homo sapiens
  CDR3 for beta chain variable domain of TCR clone 307522 (TRBV5-1, TRBJ2-3)
CASSLGLAVYTDTQYF

SEQ ID NO: 615045 - protein, 14 aa, Homo sapiens
  CDR3 for alpha chain variable domain of TCR clone 307523 (TRAV12-2, TRAJ17)
CAVLFKAAGNKLTF

SEQ ID NO: 615046 - protein, 19 aa, Homo sapiens
  CDR3 for beta chain variable domain of TCR clone 307523 (TRBV28, TRBJ2-7)
CASGYSGTSRLGWVYEQYF

SEQ ID NO: 615047 - protein, 12 aa, Homo sapiens
  CDR3 for alpha chain variable domain of TCR clone 307524 (TRAV8-3, TRAJ6)
CAVAGGSYIPTF

SEQ ID NO: 615048 - protein, 17 aa, Homo sapiens
  CDR3 for beta chain variable domain of TCR clone 307524 (TRBV13, TRBJ2-3)
CASSLSRVAGGRNTQYF

SEQ ID NO: 615049 - protein, 14 aa, Homo sapiens
  CDR3 for alpha chain variable domain of TCR clone 307525 (TRAV21, TRAJ35)
CAVMPIGFGNVCIA

SEQ ID NO: 615050 - protein, 12 aa, Homo sapiens
  CDR3 for beta chain variable domain of TCR clone 307525 (TRBV7-9, TRBJ2-7)
CASSIKREEQYF

SEQ ID NO: 615051 - protein, 14 aa, Homo sapiens
  CDR3 for alpha chain variable domain of TCR clone 307526 (TRAV12-3, TRAJ10)
SHLPLTRGGNKLTF

SEQ ID NO: 615052 - protein, 15 aa, Homo sapiens
  CDR3 for beta chain variable domain of TCR clone 307526 (TRBV7-3, TRBJ2-2)
CASSETGQGTGELFF

SEQ ID NO: 615053 - protein, 14 aa, Homo sapiens
  CDR3 for alpha chain variable domain of TCR clone 307527 (TRAV9-2, TRAJ39)
CALYIYNAGNMLTF

SEQ ID NO: 615054 - protein, 12 aa, Homo sapiens
  CDR3 for beta chain variable domain of TCR clone 307527 (TRBV19, TRBJ2-7)
CASTDRDYEQYF

SEQ ID NO: 615055 - protein, 14 aa, Homo sapiens
  CDR3 for alpha chain variable domain of TCR clone 307528 (TRAV2, TRAJ9)
CAVEDRSGGFKTIF

SEQ ID NO: 615056 - protein, 13 aa, Homo sapiens
  CDR3 for beta chain variable domain of TCR clone 307528 (TRBV27, TRBJ1-1)
CASSLSIGAEAFL

SEQ ID NO: 615057 - protein, 17 aa, Homo sapiens
  CDR3 for alpha chain variable domain of TCR clone 307529 (TRAV13-2, TRAJ43)
CAENEGMRFGAGTRLTV

SEQ ID NO: 615058 - protein, 13 aa, Homo sapiens
  CDR3 for beta chain variable domain of TCR clone 307529 (TRBV19, TRBJ1-1)
CASSFGRNTEAYF

SEQ ID NO: 615059 - protein, 13 aa, Homo sapiens
  CDR3 for alpha chain variable domain of TCR clone 307530 (TRAV2, TRAJ40)
CAVVTSGTYKYIF

SEQ ID NO: 615060 - protein, 15 aa, Homo sapiens
  CDR3 for beta chain variable domain of TCR clone 307530 (TRBV6-3, TRBJ2-7)
CGSSSPGTVFYEQYF

SEQ ID NO: 615061 - protein, 12 aa, Homo sapiens
  CDR3 for alpha chain variable domain of TCR clone 307531 (TRAV35, TRAJ12)
CAGMDSSYKLIF

SEQ ID NO: 615062 - protein, 14 aa, Homo sapiens
  CDR3 for beta chain variable domain of TCR clone 307531 (TRBV28, TRBJ2-5)
CASSLYRGTESQYF

SEQ ID NO: 615063 - protein, 15 aa, Homo sapiens
  CDR3 for alpha chain variable domain of TCR clone 307532 (TRAV14/DV4, TRAJ26)
CAMIEGQNYGQNFVF

SEQ ID NO: 615064 - protein, 13 aa, Homo sapiens
  CDR3 for beta chain variable domain of TCR clone 307532 (TRBV24-1, TRBJ2-2)
CATSDWSTGELFF

SEQ ID NO: 615065 - protein, 14 aa, Homo sapiens
  CDR3 for alpha chain variable domain of TCR clone 307533 (TRAV12-3, TRAJ37)
CVSEGSSNTGKLIF

SEQ ID NO: 615066 - protein, 14 aa, Homo sapiens
  CDR3 for beta chain variable domain of TCR clone 307533 (TRBV20-1, TRBJ1-1)
CRAQTRIGGTEAFF

SEQ ID NO: 615067 - protein, 13 aa, Homo sapiens
  CDR3 for alpha chain variable domain of TCR clone 307534 (TRAV8-6, TRAJ49)
CAVITNTGNQFYF

SEQ ID NO: 615068 - protein, 12 aa, Homo sapiens
  CDR3 for beta chain variable domain of TCR clone 307534 (TRBV11-2, TRBJ2-5)
CASSLDTQTQYF

SEQ ID NO: 615069 - protein, 15 aa, Homo sapiens
  CDR3 for alpha chain variable domain of TCR clone 307535 (TRAV1-2, TRAJ30)
CAVRPHGNRDDKIIF

SEQ ID NO: 615070 - protein, 13 aa, Homo sapiens
  CDR3 for beta chain variable domain of TCR clone 307535 (TRBV4-1, TRBJ2-7)
CASSQGQAYEQHF

SEQ ID NO: 615071 - protein, 14 aa, Homo sapiens
  CDR3 for alpha chain variable domain of TCR clone 307536 (TRAV14/DV4, TRAJ15)
CAMRRDQAGTALIF

SEQ ID NO: 615072 - protein, 16 aa, Homo sapiens
  CDR3 for beta chain variable domain of TCR clone 307536 (TRBV15, TRBJ2-3)
CATSRDLVIVTDTQYF

SEQ ID NO: 615073 - protein, 15 aa, Homo sapiens
  CDR3 for alpha chain variable domain of TCR clone 307537 (TRAV20, TRAJ4)
CAVQVFSGGYNKLIF

SEQ ID NO: 615074 - protein, 17 aa, Homo sapiens
  CDR3 for beta chain variable domain of TCR clone 307537 (TRBV7-9, TRBJ2-3)
CASSPTVAGDLTDTQYF

SEQ ID NO: 615075 - protein, 13 aa, Homo sapiens
  CDR3 for alpha chain variable domain of TCR clone 307538 (TRAV29/DV5, TRAJ44)
CSASTGTASKLTF

SEQ ID NO: 615076 - protein, 13 aa, Homo sapiens
  CDR3 for beta chain variable domain of TCR clone 307538 (TRBV19, TRBJ2-7)
CASRKAGGSERYF

SEQ ID NO: 615077 - protein, 12 aa, Homo sapiens
  CDR3 for alpha chain variable domain of TCR clone 307539 (TRAV12-3, TRAJ17)
CAMTLTGNKLTF

SEQ ID NO: 615078 - protein, 15 aa, Homo sapiens
  CDR3 for beta chain variable domain of TCR clone 307539 (TRBV14, TRBJ1-2)
CASSPEKGGNYGYTF

SEQ ID NO: 615079 - protein, 14 aa, Homo sapiens
  CDR3 for alpha chain variable domain of TCR clone 307540 (TRAV20, TRAJ16)
CAGRFFSDGQKLLF

SEQ ID NO: 615080 - protein, 16 aa, Homo sapiens
  CDR3 for beta chain variable domain of TCR clone 307540 (TRBV5-1, TRBJ2-3)
CASSSIGAGSTDTQYF

SEQ ID NO: 615081 - protein, 13 aa, Homo sapiens
  CDR3 for alpha chain variable domain of TCR clone 307541 (TRAV13-1, TRAJ20)
CAARVSNDYKLSF

SEQ ID NO: 615082 - protein, 16 aa, Homo sapiens
  CDR3 for beta chain variable domain of TCR clone 307541 (TRBV11-1, TRBJ1-1)
RATNPRDRAFNTEAFF

SEQ ID NO: 615083 - protein, 14 aa, Homo sapiens
  CDR3 for alpha chain variable domain of TCR clone 307542 (TRAV12-2, TRAJ12)
CAVINRDSSYKLIF

SEQ ID NO: 615084 - protein, 15 aa, Homo sapiens
  CDR3 for beta chain variable domain of TCR clone 307542 (TRBV28, TRBJ2-1)
CDSSLDTSAYNEQFF

SEQ ID NO: 615085 - protein, 13 aa, Homo sapiens
  CDR3 for alpha chain variable domain of TCR clone 307543 (TRAV29/DV5, TRAJ47)
CAASAEYGNKLGF

SEQ ID NO: 615086 - protein, 15 aa, Homo sapiens
  CDR3 for beta chain variable domain of TCR clone 307543 (TRBV7-9, TRBJ1-4)
CASSARTGGNEKLFF

SEQ ID NO: 615087 - protein, 12 aa, Homo sapiens
  CDR3 for alpha chain variable domain of TCR clone 307544 (TRAV21, TRAJ33)
CAKMDSNDQLIW

SEQ ID NO: 615088 - protein, 18 aa, Homo sapiens
  CDR3 for beta chain variable domain of TCR clone 307544 (TRBV15, TRBJ2-3)
CATSRDGARSWDTDTQYF

SEQ ID NO: 615089 - protein, 11 aa, Homo sapiens
  CDR3 for alpha chain variable domain of TCR clone 307545 (TRAV12-1, TRAJ43)
CVGYDNNDMRF

SEQ ID NO: 615090 - protein, 16 aa, Homo sapiens
  CDR3 for beta chain variable domain of TCR clone 307545 (TRBV5-4, TRBJ2-1)
CASSLVGSGQDNEQFF

SEQ ID NO: 615091 - protein, 15 aa, Homo sapiens
  CDR3 for alpha chain variable domain of TCR clone 307546 (TRAV17, TRAJ4)
CATGTWSGGYNKLIF

SEQ ID NO: 615092 - protein, 16 aa, Homo sapiens
  CDR3 for beta chain variable domain of TCR clone 307546 (TRBV20-1, TRBJ1-2)
CSASMGQGVANYGYTF

SEQ ID NO: 615093 - protein, 11 aa, Homo sapiens
  CDR3 for alpha chain variable domain of TCR clone 307547 (TRAV12-3, TRAJ43)
CAMSVSNDMRF

SEQ ID NO: 615094 - protein, 16 aa, Homo sapiens
  CDR3 for beta chain variable domain of TCR clone 307547 (TRBV5-1, TRBJ2-2)
CASSLWDTTNTGELFF

SEQ ID NO: 615095 - protein, 10 aa, Homo sapiens
  CDR3 for alpha chain variable domain of TCR clone 307548 (TRAV1-2, TRAJ34)
CAVNTDKLIF

SEQ ID NO: 615096 - protein, 18 aa, Homo sapiens
  CDR3 for beta chain variable domain of TCR clone 307548 (TRBV7-9, TRBJ2-7)
CASSLTTSGSRTWYELYF

SEQ ID NO: 615097 - protein, 15 aa, Homo sapiens
  CDR3 for alpha chain variable domain of TCR clone 307549 (TRAV17, TRAJ42)
CATDHYGGRQGNLIF

SEQ ID NO: 615098 - protein, 14 aa, Homo sapiens
  CDR3 for beta chain variable domain of TCR clone 307549 (TRBV19, TRBJ2-5)
CASSIEHSQETQYF

SEQ ID NO: 615099 - protein, 14 aa, Homo sapiens
  CDR3 for alpha chain variable domain of TCR clone 307550 (TRAV17, TRAJ39)
CATDPVRAVNMLTF

SEQ ID NO: 615100 - protein, 12 aa, Homo sapiens
  CDR3 for beta chain variable domain of TCR clone 307550 (TRBV2, TRBJ2-4)
CASQGDSGIQYF

SEQ ID NO: 615101 - protein, 13 aa, Homo sapiens
  CDR3 for alpha chain variable domain of TCR clone 307551 (TRAV3, TRAJ21)
CAVREPDFNKFYF

SEQ ID NO: 615102 - protein, 12 aa, Homo sapiens
  CDR3 for beta chain variable domain of TCR clone 307551 (TRBV28, TRBJ2-6)
CAIQAGANVLIF

SEQ ID NO: 615103 - protein, 12 aa, Homo sapiens
  CDR3 for alpha chain variable domain of TCR clone 307552 (TRAV3, TRAJ31)
CAVRDGNARLMF

SEQ ID NO: 615104 - protein, 18 aa, Homo sapiens
  CDR3 for beta chain variable domain of TCR clone 307552 (TRBV7-2, TRBJ2-3)
CASSLKREGSGITDTKYF

SEQ ID NO: 615105 - protein, 19 aa, Homo sapiens
  CDR3 for alpha chain variable domain of TCR clone 307553 (TRAV2, TRAJ20)
ILQVREADAAVYRDCKLSF

SEQ ID NO: 615106 - protein, 15 aa, Homo sapiens
  CDR3 for beta chain variable domain of TCR clone 307553 (TRBV10-3, TRBJ2-1)
CAIRNGTSGHNEQFF

SEQ ID NO: 615107 - protein, 13 aa, Homo sapiens
  CDR3 for alpha chain variable domain of TCR clone 307554 (TRAV13-2, TRAJ53)
CAENMGSNYKLTF

SEQ ID NO: 615108 - protein, 13 aa, Homo sapiens
  CDR3 for beta chain variable domain of TCR clone 307554 (TRBV4-1, TRBJ2-2)
CASSQENTGELFV

SEQ ID NO: 615109 - protein, 11 aa, Homo sapiens
  CDR3 for alpha chain variable domain of TCR clone 307555 (TRAV2, TRAJ33)
CAVDCNYPLIW

SEQ ID NO: 615110 - protein, 15 aa, Homo sapiens
  CDR3 for beta chain variable domain of TCR clone 307555 (TRBV19, TRBJ1-2)
CASSVGQVLNYGYTF

SEQ ID NO: 615111 - protein, 13 aa, Homo sapiens
  CDR3 for alpha chain variable domain of TCR clone 307556 (TRAV35, TRAJ42)
CAGFPGSQGNLIF

SEQ ID NO: 615112 - protein, 13 aa, Homo sapiens
  CDR3 for beta chain variable domain of TCR clone 307556 (TRBV19, TRBJ1-2)
CASSVPGQDGYAF

SEQ ID NO: 615113 - protein, 16 aa, Homo sapiens
  CDR3 for alpha chain variable domain of TCR clone 307557 (TRAV38-1, TRAJ56)
CAFMKRQTGANSKLTF

SEQ ID NO: 615114 - protein, 15 aa, Homo sapiens
  CDR3 for beta chain variable domain of TCR clone 307557 (TRBV12-4, TRBJ2-5)
CASSPPTGLQETQYF

SEQ ID NO: 615115 - protein, 11 aa, Homo sapiens
  CDR3 for alpha chain variable domain of TCR clone 307558 (TRAV1-1, TRAJ23)
CAVRQGGKLIF

SEQ ID NO: 615116 - protein, 12 aa, Homo sapiens
  CDR3 for beta chain variable domain of TCR clone 307558 (TRBV3-1, TRBJ2-5)
CASSQRGETQYF

SEQ ID NO: 615117 - protein, 14 aa, Homo sapiens
  CDR3 for alpha chain variable domain of TCR clone 307559 (TRAV8-3, TRAJ9)
CAVVYNTGGFKTIF

SEQ ID NO: 615118 - protein, 11 aa, Homo sapiens
  CDR3 for beta chain variable domain of TCR clone 307559 (TRBV29-1, TRBJ2-5)
CSEDRTGTQYF

SEQ ID NO: 615119 - protein, 14 aa, Homo sapiens
  CDR3 for alpha chain variable domain of TCR clone 307560 (TRAV38-1, TRAJ29)
CSFITPSGNTTLVF

SEQ ID NO: 615120 - protein, 14 aa, Homo sapiens
  CDR3 for beta chain variable domain of TCR clone 307560 (TRBV18, TRBJ2-7)
CASSPRGGAYEQYF

SEQ ID NO: 615121 - protein, 17 aa, Homo sapiens
  CDR3 for alpha chain variable domain of TCR clone 307561 (TRAV16, TRAJ42)
CALSPKLSGGSQGNLIF

SEQ ID NO: 615122 - protein, 13 aa, Homo sapiens
  CDR3 for beta chain variable domain of TCR clone 307561 (TRBV19, TRBJ1-5)
CASSTRRDQPQHF

SEQ ID NO: 615123 - protein, 13 aa, Homo sapiens
  CDR3 for alpha chain variable domain of TCR clone 307562 (TRAV20, TRAJ37)
CAGGSSNTGKLIF

SEQ ID NO: 615124 - protein, 21 aa, Homo sapiens
  CDR3 for beta chain variable domain of TCR clone 307562 (TRBV4-2, TRBJ2-3)
PCSQKTRPCISVPAAPDTQYF

SEQ ID NO: 615125 - protein, 14 aa, Homo sapiens
  CDR3 for alpha chain variable domain of TCR clone 307563 (TRAV9-2, TRAJ38)
CALSNAGNNRKLIW

SEQ ID NO: 615126 - protein, 15 aa, Homo sapiens
  CDR3 for beta chain variable domain of TCR clone 307563 (TRBV9, TRBJ2-1)
CASSLAGSSYNEQFF

SEQ ID NO: 615127 - protein, 14 aa, Homo sapiens
  CDR3 for alpha chain variable domain of TCR clone 307564 (TRAV12-1, TRAJ17)
CVVNYKAAGNKLTF

SEQ ID NO: 615128 - protein, 13 aa, Homo sapiens
  CDR3 for beta chain variable domain of TCR clone 307564 (TRBV20-1, TRBJ1-1)
QCTNTDWGTEAFF

SEQ ID NO: 615129 - protein, 15 aa, Homo sapiens
  CDR3 for alpha chain variable domain of TCR clone 307565 (TRAV38-1, TRAJ57)
CAFMDSQGGSEKLVF

SEQ ID NO: 615130 - protein, 16 aa, Homo sapiens
  CDR3 for beta chain variable domain of TCR clone 307565 (TRBV10-3, TRBJ2-1)
CAIRGGGRGDYNEQFI

SEQ ID NO: 615131 - protein, 15 aa, Homo sapiens
  CDR3 for alpha chain variable domain of TCR clone 307566 (TRAV12-2, TRAJ53)
CAANGGGGSNYKLTF

SEQ ID NO: 615132 - protein, 15 aa, Homo sapiens
  CDR3 for beta chain variable domain of TCR clone 307566 (TRBV28, TRBJ2-1)
CASSGLAEVDNEQFF

SEQ ID NO: 615133 - protein, 14 aa, Homo sapiens
  CDR3 for alpha chain variable domain of TCR clone 307567 (TRAV12-3, TRAJ29)
CAMSPYSGKTHLVF

SEQ ID NO: 615134 - protein, 12 aa, Homo sapiens
  CDR3 for beta chain variable domain of TCR clone 307567 (TRBV12-4, TRBJ2-7)
CASNPGGGEQYF

SEQ ID NO: 615135 - protein, 16 aa, Homo sapiens
  CDR3 for alpha chain variable domain of TCR clone 307568 (TRAV8-3, TRAJ13)
CAVGAYPSGGYQKVTF

SEQ ID NO: 615136 - protein, 14 aa, Homo sapiens
  CDR3 for beta chain variable domain of TCR clone 307568 (TRBV4-1, TRBJ2-2)
CASSQAVNTGELFF

SEQ ID NO: 615137 - protein, 14 aa, Homo sapiens
  CDR3 for alpha chain variable domain of TCR clone 307569 (TRAV12-2, TRAJ13)
CAVRNTGGYQKVTF

SEQ ID NO: 615138 - protein, 19 aa, Homo sapiens
  CDR3 for beta chain variable domain of TCR clone 307569 (TRBV25-1, TRBJ2-2)
CAILVYRVDRGRKTGELFF

SEQ ID NO: 615139 - protein, 16 aa, Homo sapiens
  CDR3 for alpha chain variable domain of TCR clone 307570 (TRAV8-6, TRAJ44)
CAVSDSLTGPASKLTF

SEQ ID NO: 615140 - protein, 14 aa, Homo sapiens
  CDR3 for beta chain variable domain of TCR clone 307570 (TRBV7-2, TRBJ2-7)
CASSPKTSFYEQYF

SEQ ID NO: 615141 - protein, 16 aa, Homo sapiens
  CDR3 for alpha chain variable domain of TCR clone 307571 (TRAV8-3, TRAJ18)
CAVALDRGSTLGRLDF

SEQ ID NO: 615142 - protein, 11 aa, Homo sapiens
  CDR3 for beta chain variable domain of TCR clone 307571 (TRBV29-1, TRBJ1-1)
CSVEILTEAFF

SEQ ID NO: 615143 - protein, 14 aa, Homo sapiens
  CDR3 for alpha chain variable domain of TCR clone 307572 (TRAV26-1, TRAJ38)
VVADNAGNNRKLIW

SEQ ID NO: 615144 - protein, 15 aa, Homo sapiens
  CDR3 for beta chain variable domain of TCR clone 307572 (TRBV27, TRBJ2-1)
CASSNGGGSSNEQFF

SEQ ID NO: 615145 - protein, 13 aa, Homo sapiens
  CDR3 for alpha chain variable domain of TCR clone 307573 (TRAV12-1, TRAJ8)
CVGMGPGFQKLVF

SEQ ID NO: 615146 - protein, 16 aa, Homo sapiens
  CDR3 for beta chain variable domain of TCR clone 307573 (TRBV7-3, TRBJ2-2)
CASSLKRGTLSGELFF

SEQ ID NO: 615147 - protein, 14 aa, Homo sapiens
  CDR3 for alpha chain variable domain of TCR clone 307574 (TRAV34, TRAJ44)
CGADGTGTASKLTF

SEQ ID NO: 615148 - protein, 14 aa, Homo sapiens
  CDR3 for beta chain variable domain of TCR clone 307574 (TRBV12-4, TRBJ1-1)
CASSLGTGGTEAFF

SEQ ID NO: 615149 - protein, 16 aa, Homo sapiens
  CDR3 for alpha chain variable domain of TCR clone 307575 (TRAV3, TRAJ37)
CAVRPHGSGNTGKLIF

SEQ ID NO: 615150 - protein, 13 aa, Homo sapiens
  CDR3 for beta chain variable domain of TCR clone 307575 (TRBV11-2, TRBJ1-1)
CASSPTRNTEAFF

SEQ ID NO: 615151 - protein, 16 aa, Homo sapiens
  CDR3 for alpha chain variable domain of TCR clone 307576 (TRAV3, TRAJ37)
CAVRGEGSGNTGKLIS

SEQ ID NO: 615152 - protein, 13 aa, Homo sapiens
  CDR3 for beta chain variable domain of TCR clone 307576 (TRBV14, TRBJ2-7)
CASSQDRRYEQYF

SEQ ID NO: 615153 - protein, 12 aa, Homo sapiens
  CDR3 for alpha chain variable domain of TCR clone 307577 (TRAV21, TRAJ33)
CAVQDSDYQLIW

SEQ ID NO: 615154 - protein, 14 aa, Homo sapiens
  CDR3 for beta chain variable domain of TCR clone 307577 (TRBV28, TRBJ2-1)
CASSPVEGGNEQFF

SEQ ID NO: 615155 - protein, 14 aa, Homo sapiens
  CDR3 for alpha chain variable domain of TCR clone 307578 (TRAV8-3, TRAJ4)
CAVGAAGGYNKLIF

SEQ ID NO: 615156 - protein, 15 aa, Homo sapiens
  CDR3 for beta chain variable domain of TCR clone 307578 (TRBV20-1, TRBJ2-5)
CSAPPRTGCGETQYF

SEQ ID NO: 615157 - protein, 17 aa, Homo sapiens
  CDR3 for alpha chain variable domain of TCR clone 307579 (TRAV4, TRAJ18)
CLVVAAGRGSTLGRLYF

SEQ ID NO: 615158 - protein, 13 aa, Homo sapiens
  CDR3 for beta chain variable domain of TCR clone 307579 (TRBV28, TRBJ2-2)
CASSLATGMGDAR

SEQ ID NO: 615159 - protein, 16 aa, Homo sapiens
  CDR3 for alpha chain variable domain of TCR clone 307580 (TRAV16, TRAJ42)
CALSGYYGGSQGNLIF

SEQ ID NO: 615160 - protein, 15 aa, Homo sapiens
  CDR3 for beta chain variable domain of TCR clone 307580 (TRBV7-9, TRBJ1-1)
CASSPELGGGTEAFF

SEQ ID NO: 615161 - protein, 11 aa, Homo sapiens
  CDR3 for alpha chain variable domain of TCR clone 307581 (TRAV2, TRAJ33)
CAVESNYHLIW

SEQ ID NO: 615162 - protein, 16 aa, Homo sapiens
  CDR3 for beta chain variable domain of TCR clone 307581 (TRBV13, TRBJ2-2)
CASSPRTGEHTGELFF

SEQ ID NO: 615163 - protein, 16 aa, Homo sapiens
  CDR3 for alpha chain variable domain of TCR clone 307582 (TRAV23/DV6, TRAJ9)
CAASIGGTTGGFKTIF

SEQ ID NO: 615164 - protein, 17 aa, Homo sapiens
  CDR3 for beta chain variable domain of TCR clone 307582 (TRBV13, TRBJ2-3)
CASSLSRVAGGRNTQYF

SEQ ID NO: 615165 - protein, 16 aa, Homo sapiens
  CDR3 for alpha chain variable domain of TCR clone 307583 (TRAV4, TRAJ22)
CLVGDLYSGSARQLAF

SEQ ID NO: 615166 - protein, 18 aa, Homo sapiens
  CDR3 for beta chain variable domain of TCR clone 307583 (TRBV7-9, TRBJ2-7)
CASSLTTSGSRTWYEQYF

SEQ ID NO: 615167 - protein, 13 aa, Homo sapiens
  CDR3 for alpha chain variable domain of TCR clone 307584 (TRAV12-2, TRAJ18)
CAVRGSTLGRLYF

SEQ ID NO: 615168 - protein, 15 aa, Homo sapiens
  CDR3 for beta chain variable domain of TCR clone 307584 (TRBV9, TRBJ1-6)
CASSVAGTGDSPLHF

SEQ ID NO: 615169 - protein, 20 aa, Homo sapiens
  CDR3 for alpha chain variable domain of TCR clone 307585 (TRAV1-2, TRAJ34)
LLKELQMKDSASPNTDKLIF

SEQ ID NO: 615170 - protein, 18 aa, Homo sapiens
  CDR3 for beta chain variable domain of TCR clone 307585 (TRBV3-1, TRBJ2-5)
CASSQAGTSGGGREAQYF

SEQ ID NO: 615171 - protein, 15 aa, Homo sapiens
  CDR3 for alpha chain variable domain of TCR clone 307586 (TRAV3, TRAJ5)
CAVRDLDTGRRALTF

SEQ ID NO: 615172 - protein, 12 aa, Homo sapiens
  CDR3 for beta chain variable domain of TCR clone 307586 (TRBV7-9, TRBJ1-5)
CASSPRGQPQHF

SEQ ID NO: 615173 - protein, 16 aa, Homo sapiens
  CDR3 for alpha chain variable domain of TCR clone 307587 (TRAV13-1, TRAJ39)
CAASIVMQATCPPLVG

SEQ ID NO: 615174 - protein, 16 aa, Homo sapiens
  CDR3 for beta chain variable domain of TCR clone 307587 (TRBV7-2, TRBJ2-3)
CASSLVALYSTDTQYF

SEQ ID NO: 615175 - protein, 14 aa, Homo sapiens
  CDR3 for alpha chain variable domain of TCR clone 307588 (TRAV21, TRAJ35)
CAVMPIGFGNVLHC

SEQ ID NO: 615176 - protein, 14 aa, Homo sapiens
  CDR3 for beta chain variable domain of TCR clone 307588 (TRBV7-8, TRBJ2-3)
CASSLDRGTDTQYF

SEQ ID NO: 615177 - protein, 14 aa, Homo sapiens
  CDR3 for alpha chain variable domain of TCR clone 307589 (TRAV12-3, TRAJ10)
SHLPLTGGGNKLTF

SEQ ID NO: 615178 - protein, 13 aa, Homo sapiens
  CDR3 for beta chain variable domain of TCR clone 307589 (TRBV7-9, TRBJ2-3)
CASSPGSTDTQYL

SEQ ID NO: 615179 - protein, 15 aa, Homo sapiens
  CDR3 for alpha chain variable domain of TCR clone 307590 (TRAV17, TRAJ56)
CATEPFTEANSKLTF

SEQ ID NO: 615180 - protein, 15 aa, Homo sapiens
  CDR3 for beta chain variable domain of TCR clone 307590 (TRBV10-3, TRBJ2-1)
CATNGGPGQGDEQFF

SEQ ID NO: 615181 - protein, 12 aa, Homo sapiens
  CDR3 for alpha chain variable domain of TCR clone 307591 (TRAV3, TRAJ26)
CAVRDYGQNFVF

SEQ ID NO: 615182 - protein, 14 aa, Homo sapiens
  CDR3 for beta chain variable domain of TCR clone 307591 (TRBV6-5, TRBJ2-7)
CASSPHRGLREQYF

SEQ ID NO: 615183 - protein, 16 aa, Homo sapiens
  CDR3 for alpha chain variable domain of TCR clone 307592 (TRAV30, TRAJ24)
CGTEIVDADSWGTFQF

SEQ ID NO: 615184 - protein, 16 aa, Homo sapiens
  CDR3 for beta chain variable domain of TCR clone 307592 (TRBV12-5, TRBJ2-5)
CASGPRTSGNQETQYF

SEQ ID NO: 615185 - protein, 15 aa, Homo sapiens
  CDR3 for alpha chain variable domain of TCR clone 307593 (TRAV27, TRAJ38)
CAARRNAGNNRKLIW

SEQ ID NO: 615186 - protein, 15 aa, Homo sapiens
  CDR3 for beta chain variable domain of TCR clone 307593 (TRBV10-1, TRBJ2-3)
CASSATSGGFDTQYF

SEQ ID NO: 615187 - protein, 13 aa, Homo sapiens
  CDR3 for alpha chain variable domain of TCR clone 307594 (TRAV13-2, TRAJ53)
CAENMGRDYKLTF

SEQ ID NO: 615188 - protein, 13 aa, Homo sapiens
  CDR3 for beta chain variable domain of TCR clone 307594 (TRBV4-1, TRBJ2-2)
CASSQEDTGELFF

SEQ ID NO: 615189 - protein, 16 aa, Homo sapiens
  CDR3 for alpha chain variable domain of TCR clone 307595 (TRAV30, TRAJ24)
CGTEIVDAASWGKFQF

SEQ ID NO: 615190 - protein, 19 aa, Homo sapiens
  CDR3 for beta chain variable domain of TCR clone 307595 (TRBV19, TRBJ2-5)
CASSIGKVTDFFLGETQYF

SEQ ID NO: 615191 - protein, 13 aa, Homo sapiens
  CDR3 for alpha chain variable domain of TCR clone 307596 (TRAV21, TRAJ57)
CAVTQGGSEKLVL

SEQ ID NO: 615192 - protein, 15 aa, Homo sapiens
  CDR3 for beta chain variable domain of TCR clone 307596 (TRBV28, TRBJ1-4)
CASSLGTGTKEKLFF

SEQ ID NO: 615193 - protein, 13 aa, Homo sapiens
  CDR3 for alpha chain variable domain of TCR clone 307597 (TRAV21, TRAJ15)
CAVANQAGTALIF

SEQ ID NO: 615194 - protein, 15 aa, Homo sapiens
  CDR3 for beta chain variable domain of TCR clone 307597 (TRBV6-6, TRBJ2-5)
CASSPGGGLEETQYF

SEQ ID NO: 615195 - protein, 13 aa, Homo sapiens
  CDR3 for alpha chain variable domain of TCR clone 307598 (TRAV17, TRAJ5)
CALRGTGRRALTF

SEQ ID NO: 615196 - protein, 13 aa, Homo sapiens
  CDR3 for beta chain variable domain of TCR clone 307598 (TRBV11-3, TRBJ1-1)
CASTGSLNTEAFF

SEQ ID NO: 615197 - protein, 13 aa, Homo sapiens
  CDR3 for alpha chain variable domain of TCR clone 307599 (TRAV3, TRAJ20)
CCEAFCNDYKLSF

SEQ ID NO: 615198 - protein, 15 aa, Homo sapiens
  CDR3 for beta chain variable domain of TCR clone 307599 (TRBV19, TRBJ2-6)
CASVRRDSEANVLTF

SEQ ID NO: 615199 - protein, 12 aa, Homo sapiens
  CDR3 for alpha chain variable domain of TCR clone 307600 (TRAV1-1, TRAJ15)
CAVGQAGTALIF

SEQ ID NO: 615200 - protein, 13 aa, Homo sapiens
  CDR3 for beta chain variable domain of TCR clone 307600 (TRBV7-3, TRBJ1-1)
CASSQDWGAEAFF

SEQ ID NO: 615201 - protein, 15 aa, Homo sapiens
  CDR3 for alpha chain variable domain of TCR clone 307601 (TRAV34, TRAJ38)
CGADCTPGNNRKLIW

SEQ ID NO: 615202 - protein, 14 aa, Homo sapiens
  CDR3 for beta chain variable domain of TCR clone 307601 (TRBV19, TRBJ2-1)
CASPTFVLSGEQFF

SEQ ID NO: 615203 - protein, 13 aa, Homo sapiens
  CDR3 for alpha chain variable domain of TCR clone 307602 (TRAV26-1, TRAJ33)
CIVRVEGNYQFIW

SEQ ID NO: 615204 - protein, 16 aa, Homo sapiens
  CDR3 for beta chain variable domain of TCR clone 307602 (TRBV15, TRBJ2-7)
CATSRDRGRRRGEQYF

SEQ ID NO: 615205 - protein, 11 aa, Homo sapiens
  CDR3 for alpha chain variable domain of TCR clone 307603 (TRAV12-3, TRAJ49)
CAANTGNQSYF

SEQ ID NO: 615206 - protein, 16 aa, Homo sapiens
  CDR3 for beta chain variable domain of TCR clone 307603 (TRBV7-9, TRBJ2-3)
CASSPWREVGTDTQYF

SEQ ID NO: 615207 - protein, 14 aa, Homo sapiens
  CDR3 for alpha chain variable domain of TCR clone 307604 (TRAV17, TRAJ57)
CATDPQGGSEKLVF

SEQ ID NO: 615208 - protein, 15 aa, Homo sapiens
  CDR3 for beta chain variable domain of TCR clone 307604 (TRBV7-2, TRBJ2-3)
CASSLAGAFIDTQYF

SEQ ID NO: 615209 - protein, 11 aa, Homo sapiens
  CDR3 for alpha chain variable domain of TCR clone 307605 (TRAV35, TRAJ30)
CAGPGDDKITF

SEQ ID NO: 615210 - protein, 18 aa, Homo sapiens
  CDR3 for beta chain variable domain of TCR clone 307605 (TRBV7-6, TRBJ2-1)
CASSPRTSGMSSYNEQFF

SEQ ID NO: 615211 - protein, 14 aa, Homo sapiens
  CDR3 for alpha chain variable domain of TCR clone 307606 (TRAV8-2, TRAJ4)
CVVSPSGGYNKMIF

SEQ ID NO: 615212 - protein, 15 aa, Homo sapiens
  CDR3 for beta chain variable domain of TCR clone 307606 (TRBV6-6, TRBJ2-7)
CASSYSYGGSYEQYF

SEQ ID NO: 615213 - protein, 12 aa, Homo sapiens
  CDR3 for alpha chain variable domain of TCR clone 307607 (TRAV8-3, TRAJ20)
CAVGANDYKLSF

SEQ ID NO: 615214 - protein, 13 aa, Homo sapiens
  CDR3 for beta chain variable domain of TCR clone 307607 (TRBV12-5, TRBJ2-3)
CASQNRGTDTQYF

SEQ ID NO: 615215 - protein, 14 aa, Homo sapiens
  CDR3 for alpha chain variable domain of TCR clone 307608 (TRAV12-2, TRAJ3)
FAVNGYSSASKIIF

SEQ ID NO: 615216 - protein, 16 aa, Homo sapiens
  CDR3 for beta chain variable domain of TCR clone 307608 (TRBV4-2, TRBJ2-2)
CASSQDPSGREGELFF

SEQ ID NO: 615217 - protein, 15 aa, Homo sapiens
  CDR3 for alpha chain variable domain of TCR clone 307609 (TRAV1-2, TRAJ30)
CAVRPHGNRDDKIIF

SEQ ID NO: 615218 - protein, 13 aa, Homo sapiens
  CDR3 for beta chain variable domain of TCR clone 307609 (TRBV4-1, TRBJ2-7)
CASSQGHAYEQYF

SEQ ID NO: 615219 - protein, 14 aa, Homo sapiens
  CDR3 for alpha chain variable domain of TCR clone 307610 (TRAV12-2, TRAJ36)
CAVQISTGANNLFF

SEQ ID NO: 615220 - protein, 14 aa, Homo sapiens
  CDR3 for beta chain variable domain of TCR clone 307610 (TRBV25-1, TRBJ1-2)
CASSDTTGVVGYTF

SEQ ID NO: 615221 - protein, 14 aa, Homo sapiens
  CDR3 for alpha chain variable domain of TCR clone 307611 (TRAV1-2, TRAJ8)
CAVREDTGFHKLVF

SEQ ID NO: 615222 - protein, 13 aa, Homo sapiens
  CDR3 for beta chain variable domain of TCR clone 307611 (TRBV5-1, TRBJ1-2)
CASSIDRPEGYTF

SEQ ID NO: 615223 - protein, 15 aa, Homo sapiens
  CDR3 for alpha chain variable domain of TCR clone 307612 (TRAV12-2, TRAJ53)
CAVNGGGGSNYKMTL

SEQ ID NO: 615224 - protein, 13 aa, Homo sapiens
  CDR3 for beta chain variable domain of TCR clone 307612 (TRBV3-1, TRBJ1-1)
CASSPGVITEAFF

SEQ ID NO: 615225 - protein, 11 aa, Homo sapiens
  CDR3 for alpha chain variable domain of TCR clone 307613 (TRAV21, TRAJ39)
LLVNAGNVLTF

SEQ ID NO: 615226 - protein, 16 aa, Homo sapiens
  CDR3 for beta chain variable domain of TCR clone 307613 (TRBV9, TRBJ2-7)
CASSVGLGGGTYEQYF

SEQ ID NO: 615227 - protein, 17 aa, Homo sapiens
  CDR3 for alpha chain variable domain of TCR clone 307614 (TRAV13-1, TRAJ52)
CSAGRNAGGTSYGKLTF

SEQ ID NO: 615228 - protein, 12 aa, Homo sapiens
  CDR3 for beta chain variable domain of TCR clone 307614 (TRBV29-1, TRBJ1-3)
CSTRDSGNTIYF

SEQ ID NO: 615229 - protein, 12 aa, Homo sapiens
  CDR3 for alpha chain variable domain of TCR clone 307615 (TRAV21, TRAJ58)
CALSASGSRLTF

SEQ ID NO: 615230 - protein, 13 aa, Homo sapiens
  CDR3 for beta chain variable domain of TCR clone 307615 (TRBV5-7, TRBJ1-2)
CASSLAVFNGYTF

SEQ ID NO: 615231 - protein, 15 aa, Homo sapiens
  CDR3 for alpha chain variable domain of TCR clone 307616 (TRAV4, TRAJ39)
CLVGPNNNAGNILTF

SEQ ID NO: 615232 - protein, 14 aa, Homo sapiens
  CDR3 for beta chain variable domain of TCR clone 307616 (TRBV19, TRBJ2-1)
CASTTFVLSGEQFF

SEQ ID NO: 615233 - protein, 14 aa, Homo sapiens
  CDR3 for alpha chain variable domain of TCR clone 307617 (TRAV12-2, TRAJ24)
CAVTPADSWGKLQF

SEQ ID NO: 615234 - protein, 15 aa, Homo sapiens
  CDR3 for beta chain variable domain of TCR clone 307617 (TRBV27, TRBJ2-1)
CASSNGGGYSNEQFF

SEQ ID NO: 615235 - protein, 15 aa, Homo sapiens
  CDR3 for alpha chain variable domain of TCR clone 307618 (TRAV26-1, TRAJ29)
CIVRVEGSGNTPLVF

SEQ ID NO: 615236 - protein, 15 aa, Homo sapiens
  CDR3 for beta chain variable domain of TCR clone 307618 (TRBV28, TRBJ2-5)
CASSPGQGSIESQHF

SEQ ID NO: 615237 - protein, 11 aa, Homo sapiens
  CDR3 for alpha chain variable domain of TCR clone 307619 (TRAV4, TRAJ20)
CLVGDKVTTTS

SEQ ID NO: 615238 - protein, 13 aa, Homo sapiens
  CDR3 for beta chain variable domain of TCR clone 307619 (TRBV10-3, TRBJ2-7)
CASTLAVNYEQYF

SEQ ID NO: 615239 - protein, 13 aa, Homo sapiens
  CDR3 for alpha chain variable domain of TCR clone 307620 (TRAV26-2, TRAJ54)
CIPRVGGAQKLVC

SEQ ID NO: 615240 - protein, 16 aa, Homo sapiens
  CDR3 for beta chain variable domain of TCR clone 307620 (TRBV4-1, TRBJ1-1)
CASSSMSERPNTEAFF

SEQ ID NO: 615241 - protein, 12 aa, Homo sapiens
  CDR3 for alpha chain variable domain of TCR clone 307621 (TRAV3, TRAJ20)
CAVRDPAYKLSF

SEQ ID NO: 615242 - protein, 14 aa, Homo sapiens
  CDR3 for beta chain variable domain of TCR clone 307621 (TRBV10-3, TRBJ2-5)
CATSRDRDRETQYF

SEQ ID NO: 615243 - protein, 14 aa, Homo sapiens
  CDR3 for alpha chain variable domain of TCR clone 307622 (TRAV8-2, TRAJ37)
CVVSISGNTGKLIF

SEQ ID NO: 615244 - protein, 11 aa, Homo sapiens
  CDR3 for beta chain variable domain of TCR clone 307622 (TRBV18, TRBJ2-5)
CASSPREAQYF

SEQ ID NO: 615245 - protein, 11 aa, Homo sapiens
  CDR3 for alpha chain variable domain of TCR clone 307623 (TRAV3, TRAJ21)
CAVGKCNKFYF

SEQ ID NO: 615246 - protein, 15 aa, Homo sapiens
  CDR3 for beta chain variable domain of TCR clone 307623 (TRBV5-1, TRBJ2-1)
CASSLVANSYNEQFF

SEQ ID NO: 615247 - protein, 14 aa, Homo sapiens
  CDR3 for alpha chain variable domain of TCR clone 307624 (TRAV12-2, TRAJ13)
CAVKKTGGYQKVTF

SEQ ID NO: 615248 - protein, 18 aa, Homo sapiens
  CDR3 for beta chain variable domain of TCR clone 307624 (TRBV28, TRBJ2-7)
CASKAGGGIRAVLRAGHQ

SEQ ID NO: 615249 - protein, 15 aa, Homo sapiens
  CDR3 for alpha chain variable domain of TCR clone 307625 (TRAV1-2, TRAJ17)
CAVRGYGAAGNKLTF

SEQ ID NO: 615250 - protein, 23 aa, Homo sapiens
  CDR3 for beta chain variable domain of TCR clone 307625 (TRBV11-2, TRBJ2-5)
CASSSPGGEGAAARDPVLRARHA

SEQ ID NO: 615251 - protein, 16 aa, Homo sapiens
  CDR3 for alpha chain variable domain of TCR clone 307626 (TRAV3, TRAJ10)
CAVRDMRAGGGNKLTF

SEQ ID NO: 615252 - protein, 13 aa, Homo sapiens
  CDR3 for beta chain variable domain of TCR clone 307626 (TRBV27, TRBJ1-4)
CASSLMGDEKLFF

SEQ ID NO: 615253 - protein, 14 aa, Homo sapiens
  CDR3 for alpha chain variable domain of TCR clone 307627 (TRAV12-3, TRAJ9)
CAMSPNTGGFKTIF

SEQ ID NO: 615254 - protein, 12 aa, Homo sapiens
  CDR3 for beta chain variable domain of TCR clone 307627 (TRBV19, TRBJ1-5)
CASNIAQQPQHF

SEQ ID NO: 615255 - protein, 16 aa, Homo sapiens
  CDR3 for alpha chain variable domain of TCR clone 307628 (TRAV23/DV6, TRAJ58)
CSKITKGEASGSRLTF

SEQ ID NO: 615256 - protein, 15 aa, Homo sapiens
  CDR3 for beta chain variable domain of TCR clone 307628 (TRBV7-3, TRBJ2-2)
CASSETGQGTGELFF

SEQ ID NO: 615257 - protein, 16 aa, Homo sapiens
  CDR3 for alpha chain variable domain of TCR clone 307629 (TRAV8-3, TRAJ42)
CAVGEGNGGSQGNLIF

SEQ ID NO: 615258 - protein, 14 aa, Homo sapiens
  CDR3 for beta chain variable domain of TCR clone 307629 (TRBV7-2, TRBJ2-1)
CASSRGGARDEQFF

SEQ ID NO: 615259 - protein, 17 aa, Homo sapiens
  CDR3 for alpha chain variable domain of TCR clone 307630 (TRAV16, TRAJ58)
CITVLSNGETSASRLTF

SEQ ID NO: 615260 - protein, 17 aa, Homo sapiens
  CDR3 for beta chain variable domain of TCR clone 307630 (TRBV18, TRBJ2-1)
CASSKGLSGGADNEQFF

SEQ ID NO: 615261 - protein, 13 aa, Homo sapiens
  CDR3 for alpha chain variable domain of TCR clone 307631 (TRAV21, TRAJ27)
CAACPGNAGKSTF

SEQ ID NO: 615262 - protein, 12 aa, Homo sapiens
  CDR3 for beta chain variable domain of TCR clone 307631 (TRBV11-2, TRBJ2-2)
CASSLGGGELFF

SEQ ID NO: 615263 - protein, 19 aa, Homo sapiens
  CDR3 for alpha chain variable domain of TCR clone 307632 (TRAV23/DV6, TRAJ9)
CSKHRLKGAGHTGGFKIIF

SEQ ID NO: 615264 - protein, 15 aa, Homo sapiens
  CDR3 for beta chain variable domain of TCR clone 307632 (TRBV6-3, TRBJ2-1)
CASSYASDSYNEQFF

SEQ ID NO: 615265 - protein, 15 aa, Homo sapiens
  CDR3 for alpha chain variable domain of TCR clone 307633 (TRAV21, TRAJ53)
CATLNSGGSNYKLTF

SEQ ID NO: 615266 - protein, 16 aa, Homo sapiens
  CDR3 for beta chain variable domain of TCR clone 307633 (TRBV9, TRBJ2-1)
CASSVGGGRNYNEHFF

SEQ ID NO: 615267 - protein, 17 aa, Homo sapiens
  CDR3 for alpha chain variable domain of TCR clone 307634 (TRAV26-1, TRAJ46)
IASSESEKKSSGDKLTF

SEQ ID NO: 615268 - protein, 16 aa, Homo sapiens
  CDR3 for beta chain variable domain of TCR clone 307634 (TRBV19, TRBJ2-2)
CASRSPGTGATGELFF

SEQ ID NO: 615269 - protein, 16 aa, Homo sapiens
  CDR3 for alpha chain variable domain of TCR clone 307635 (TRAV14/DV4, TRAJ4)
CNERGLREGWLNKLIF

SEQ ID NO: 615270 - protein, 14 aa, Homo sapiens
  CDR3 for beta chain variable domain of TCR clone 307635 (TRBV19, TRBJ2-7)
CASSMGQGAIEQYF

SEQ ID NO: 615271 - protein, 14 aa, Homo sapiens
  CDR3 for alpha chain variable domain of TCR clone 307636 (TRAV12-1, TRAJ17)
CEVNYKAAGNKLTF

SEQ ID NO: 615272 - protein, 17 aa, Homo sapiens
  CDR3 for beta chain variable domain of TCR clone 307636 (TRBV7-3, TRBJ2-3)
CASSLMKRMRGADTQYF

SEQ ID NO: 615273 - protein, 14 aa, Homo sapiens
  CDR3 for alpha chain variable domain of TCR clone 307637 (TRAV12-3, TRAJ57)
CARALEGGSEKLVF

SEQ ID NO: 615274 - protein, 14 aa, Homo sapiens
  CDR3 for beta chain variable domain of TCR clone 307637 (TRBV7-8, TRBJ2-7)
CASTFRGGPNEQYF

SEQ ID NO: 615275 - protein, 16 aa, Homo sapiens
  CDR3 for alpha chain variable domain of TCR clone 307638 (TRAV30, TRAJ24)
CGTEIVDADSWVKFQF

SEQ ID NO: 615276 - protein, 13 aa, Homo sapiens
  CDR3 for beta chain variable domain of TCR clone 307638 (TRBV12-5, TRBJ2-3)
CASGDRQSDTQYF

SEQ ID NO: 615277 - protein, 13 aa, Homo sapiens
  CDR3 for alpha chain variable domain of TCR clone 307639 (TRAV2, TRAJ20)
CAVEDPSEYKLSL

SEQ ID NO: 615278 - protein, 16 aa, Homo sapiens
  CDR3 for beta chain variable domain of TCR clone 307639 (TRBV25-1, TRBJ2-7)
CASSELTGGGIYEQYF

SEQ ID NO: 615279 - protein, 14 aa, Homo sapiens
  CDR3 for alpha chain variable domain of TCR clone 307640 (TRAV26-1, TRAJ38)
CIADNAGNNRKLTW

SEQ ID NO: 615280 - protein, 17 aa, Homo sapiens
  CDR3 for beta chain variable domain of TCR clone 307640 (TRBV20-1, TRBJ2-2)
CSASGSGQGGLTGELFF

SEQ ID NO: 615281 - protein, 14 aa, Homo sapiens
  CDR3 for alpha chain variable domain of TCR clone 307641 (TRAV1-2, TRAJ8)
CAVREDTDFQKLLF

SEQ ID NO: 615282 - protein, 15 aa, Homo sapiens
  CDR3 for beta chain variable domain of TCR clone 307641 (TRBV6-3, TRBJ2-7)
CASSSPGTVFYEQYF

SEQ ID NO: 615283 - protein, 14 aa, Homo sapiens
  CDR3 for alpha chain variable domain of TCR clone 307642 (TRAV13-1, TRAJ35)
CAASKGGFGNVLHC

SEQ ID NO: 615284 - protein, 15 aa, Homo sapiens
  CDR3 for beta chain variable domain of TCR clone 307642 (TRBV19, TRBJ2-1)
CASSSPGVPLDEQFF

SEQ ID NO: 615285 - protein, 11 aa, Homo sapiens
  CDR3 for alpha chain variable domain of TCR clone 307643 (TRAV1-1, TRAJ30)
CAQNRDDKIIF

SEQ ID NO: 615286 - protein, 13 aa, Homo sapiens
  CDR3 for beta chain variable domain of TCR clone 307643 (TRBV15, TRBJ2-7)
CATSTTGHYEQYF

SEQ ID NO: 615287 - protein, 17 aa, Homo sapiens
  CDR3 for alpha chain variable domain of TCR clone 307644 (TRAV3, TRAJ12)
CCETRYGTMDSSYKLIF

SEQ ID NO: 615288 - protein, 15 aa, Homo sapiens
  CDR3 for beta chain variable domain of TCR clone 307644 (TRBV5-5, TRBJ1-5)
CASSLKGGGEQPQHF

SEQ ID NO: 615289 - protein, 14 aa, Homo sapiens
  CDR3 for alpha chain variable domain of TCR clone 307645 (TRAV12-2, TRAJ45)
CAVNKGGGADGLTF

SEQ ID NO: 615290 - protein, 15 aa, Homo sapiens
  CDR3 for beta chain variable domain of TCR clone 307645 (TRBV9, TRBJ1-6)
CASSVAGTGDSTLDF

SEQ ID NO: 615291 - protein, 11 aa, Homo sapiens
  CDR3 for alpha chain variable domain of TCR clone 307646 (TRAV21, TRAJ11)
CAVNGYSTLTF

SEQ ID NO: 615292 - protein, 13 aa, Homo sapiens
  CDR3 for beta chain variable domain of TCR clone 307646 (TRBV19, TRBJ2-1)
CASSPRASLEQFF

SEQ ID NO: 615293 - protein, 11 aa, Homo sapiens
  CDR3 for alpha chain variable domain of TCR clone 307647 (TRAV3, TRAJ21)
CAVGNFNKFYF

SEQ ID NO: 615294 - protein, 16 aa, Homo sapiens
  CDR3 for beta chain variable domain of TCR clone 307647 (TRBV19, TRBJ2-1)
CASSKAGPSAYDEQFF

SEQ ID NO: 615295 - protein, 18 aa, Homo sapiens
  CDR3 for alpha chain variable domain of TCR clone 307648 (TRAV26-1, TRAJ52)
CIVRVEGAGGTSYGKLTF

SEQ ID NO: 615296 - protein, 13 aa, Homo sapiens
  CDR3 for beta chain variable domain of TCR clone 307648 (TRBV7-3, TRBJ1-2)
CASSLKRGYDYTF

SEQ ID NO: 615297 - protein, 14 aa, Homo sapiens
  CDR3 for alpha chain variable domain of TCR clone 307649 (TRAV20, TRAJ56)
RAVQFGGANSKLTF

SEQ ID NO: 615298 - protein, 14 aa, Homo sapiens
  CDR3 for beta chain variable domain of TCR clone 307649 (TRBV7-2, TRBJ1-1)
CASSFLTGTTEAFF

SEQ ID NO: 615299 - protein, 17 aa, Homo sapiens
  CDR3 for alpha chain variable domain of TCR clone 307650 (TRAV4, TRAJ42)
CLVGVLNYGESQGNLIF

SEQ ID NO: 615300 - protein, 12 aa, Homo sapiens
  CDR3 for beta chain variable domain of TCR clone 307650 (TRBV20-1, TRBJ2-1)
CSAQYTYNEQFF

SEQ ID NO: 615301 - protein, 13 aa, Homo sapiens
  CDR3 for alpha chain variable domain of TCR clone 307651 (TRAV14/DV4, TRAJ23)
CAMRVVKGGKLIF

SEQ ID NO: 615302 - protein, 15 aa, Homo sapiens
  CDR3 for beta chain variable domain of TCR clone 307651 (TRBV6-3, TRBJ2-1)
CASSYASDSYNEQFF

SEQ ID NO: 615303 - protein, 14 aa, Homo sapiens
  CDR3 for alpha chain variable domain of TCR clone 307652 (TRAV26-1, TRAJ38)
CIADNADNNRKLIW

SEQ ID NO: 615304 - protein, 14 aa, Homo sapiens
  CDR3 for beta chain variable domain of TCR clone 307652 (TRBV20-1, TRBJ1-1)
CSARTRIGGTEAFF

SEQ ID NO: 615305 - protein, 12 aa, Homo sapiens
  CDR3 for alpha chain variable domain of TCR clone 307653 (TRAV12-3, TRAJ17)
CAMTLTGSKLTF

SEQ ID NO: 615306 - protein, 13 aa, Homo sapiens
  CDR3 for beta chain variable domain of TCR clone 307653 (TRBV27, TRBJ2-1)
CASRTLGVGEQFF

SEQ ID NO: 615307 - protein, 15 aa, Homo sapiens
  CDR3 for alpha chain variable domain of TCR clone 307654 (TRAV2, TRAJ22)
CAVPSRGGSARQLTF

SEQ ID NO: 615308 - protein, 11 aa, Homo sapiens
  CDR3 for beta chain variable domain of TCR clone 307654 (TRBV27, TRBJ2-3)
CGSSLGDTQYF

SEQ ID NO: 615309 - protein, 12 aa, Homo sapiens
  CDR3 for alpha chain variable domain of TCR clone 307655 (TRAV27, TRAJ22)
CAGDGAGVEIWF

SEQ ID NO: 615310 - protein, 17 aa, Homo sapiens
  CDR3 for beta chain variable domain of TCR clone 307655 (TRBV3-1, TRBJ2-5)
CASSNWGGTSGQETQYF

SEQ ID NO: 615311 - protein, 14 aa, Homo sapiens
  CDR3 for alpha chain variable domain of TCR clone 307656 (TRAV12-2, TRAJ17)
CAVNIKAAGNKLTF

SEQ ID NO: 615312 - protein, 16 aa, Homo sapiens
  CDR3 for beta chain variable domain of TCR clone 307656 (TRBV20-1, TRBJ2-6)
CSPSSQGYDGANVLTF

SEQ ID NO: 615313 - protein, 14 aa, Homo sapiens
  CDR3 for alpha chain variable domain of TCR clone 307657 (TRAV12-2, TRAJ44)
CAVNPAGIASKLTF

SEQ ID NO: 615314 - protein, 13 aa, Homo sapiens
  CDR3 for beta chain variable domain of TCR clone 307657 (TRBV20-1, TRBJ1-6)
CSAPLGVGSLLHF

SEQ ID NO: 615315 - protein, 15 aa, Homo sapiens
  CDR3 for alpha chain variable domain of TCR clone 307658 (TRAV12-1, TRAJ45)
CVVLSGGGGADGLTF

SEQ ID NO: 615316 - protein, 15 aa, Homo sapiens
  CDR3 for beta chain variable domain of TCR clone 307658 (TRBV10-2, TRBJ2-6)
CASSEQGTGANVLTF

SEQ ID NO: 615317 - protein, 12 aa, Homo sapiens
  CDR3 for alpha chain variable domain of TCR clone 307659 (TRAV13-1, TRAJ49)
CAASILGNQFYF

SEQ ID NO: 615318 - protein, 14 aa, Homo sapiens
  CDR3 for beta chain variable domain of TCR clone 307659 (TRBV12-4, TRBJ1-1)
CASSLDGLNTEAFF

SEQ ID NO: 615319 - protein, 14 aa, Homo sapiens
  CDR3 for alpha chain variable domain of TCR clone 307660 (TRAV12-2, TRAJ24)
CAGTPADSWGKLQF

SEQ ID NO: 615320 - protein, 12 aa, Homo sapiens
  CDR3 for beta chain variable domain of TCR clone 307660 (TRBV3-1, TRBJ2-1)
CASSQGSSGQFF

SEQ ID NO: 615321 - protein, 13 aa, Homo sapiens
  CDR3 for alpha chain variable domain of TCR clone 307661 (TRAV12-3, TRAJ33)
CAISVNSNYQLIW

SEQ ID NO: 615322 - protein, 13 aa, Homo sapiens
  CDR3 for beta chain variable domain of TCR clone 307661 (TRBV7-2, TRBJ2-2)
CASSLAVTGELFS

SEQ ID NO: 615323 - protein, 16 aa, Homo sapiens
  CDR3 for alpha chain variable domain of TCR clone 307662 (TRAV30, TRAJ24)
CGTEIVDADSWGKFQL

SEQ ID NO: 615324 - protein, 17 aa, Homo sapiens
  CDR3 for beta chain variable domain of TCR clone 307662 (TRBV20-1, TRBJ2-1)
CSASSSGLAGSYNELFF

SEQ ID NO: 615325 - protein, 14 aa, Homo sapiens
  CDR3 for alpha chain variable domain of TCR clone 307663 (TRAV12-2, TRAJ15)
CAPHTGQAGTALIF

SEQ ID NO: 615326 - protein, 17 aa, Homo sapiens
  CDR3 for beta chain variable domain of TCR clone 307663 (TRBV20-1, TRBJ2-1)
CSASSSGLAGSYNEQFF

SEQ ID NO: 615327 - protein, 16 aa, Homo sapiens
  CDR3 for alpha chain variable domain of TCR clone 307664 (TRAV26-1, TRAJ23)
CIVRVHPYNQGGKLLF

SEQ ID NO: 615328 - protein, 15 aa, Homo sapiens
  CDR3 for beta chain variable domain of TCR clone 307664 (TRBV5-7, TRBJ2-7)
CASSPYFEGSYEQYF

SEQ ID NO: 615329 - protein, 13 aa, Homo sapiens
  CDR3 for alpha chain variable domain of TCR clone 307665 (TRAV2, TRAJ15)
CAVASQAGTALIF

SEQ ID NO: 615330 - protein, 19 aa, Homo sapiens
  CDR3 for beta chain variable domain of TCR clone 307665 (TRBV20-1, TRBJ2-7)
CSAAGTSGGEAPTSSTSGR

SEQ ID NO: 615331 - protein, 15 aa, Homo sapiens
  CDR3 for alpha chain variable domain of TCR clone 307666 (TRAV23/DV6, TRAJ38)
CAASGGAGNNRKPFW

SEQ ID NO: 615332 - protein, 13 aa, Homo sapiens
  CDR3 for beta chain variable domain of TCR clone 307666 (TRBV7-2, TRBJ1-2)
CASSLPGLYGYTF

SEQ ID NO: 615333 - protein, 16 aa, Homo sapiens
  CDR3 for alpha chain variable domain of TCR clone 307667 (TRAV38-2/DV8, TRAJ45)
CAYRGNSGGGADGPTF

SEQ ID NO: 615334 - protein, 17 aa, Homo sapiens
  CDR3 for beta chain variable domain of TCR clone 307667 (TRBV5-1, TRBJ2-7)
FAPAADNPGQIPYEQYF

SEQ ID NO: 615335 - protein, 16 aa, Homo sapiens
  CDR3 for alpha chain variable domain of TCR clone 307668 (TRAV3, TRAJ10)
CAVRDRRAGGGNKLTF

SEQ ID NO: 615336 - protein, 14 aa, Homo sapiens
  CDR3 for beta chain variable domain of TCR clone 307668 (TRBV25-1, TRBJ1-1)
CASTHLGGNTEAFF

SEQ ID NO: 615337 - protein, 14 aa, Homo sapiens
  CDR3 for alpha chain variable domain of TCR clone 307669 (TRAV16, TRAJ17)
CALSGSAAGNKITF

SEQ ID NO: 615338 - protein, 13 aa, Homo sapiens
  CDR3 for beta chain variable domain of TCR clone 307669 (TRBV7-9, TRBJ1-2)
CASSLKQNYGYTF

SEQ ID NO: 615339 - protein, 13 aa, Homo sapiens
  CDR3 for alpha chain variable domain of TCR clone 307670 (TRAV1-2, TRAJ11)
CAVRDSGYSTLTF

SEQ ID NO: 615340 - protein, 14 aa, Homo sapiens
  CDR3 for beta chain variable domain of TCR clone 307670 (TRBV11-2, TRBJ1-2)
CASSSGQAGDGYTF

SEQ ID NO: 615341 - protein, 16 aa, Homo sapiens
  CDR3 for alpha chain variable domain of TCR clone 307671 (TRAV12-2, TRAJ52)
CRIANAGGTSYGKLTF

SEQ ID NO: 615342 - protein, 15 aa, Homo sapiens
  CDR3 for beta chain variable domain of TCR clone 307671 (TRBV20-1, TRBJ2-7)
CSARDRVSGMDEQYF

SEQ ID NO: 615343 - protein, 16 aa, Homo sapiens
  CDR3 for alpha chain variable domain of TCR clone 307672 (TRAV3, TRAJ37)
CAVRVRGSGNTGKLVF

SEQ ID NO: 615344 - protein, 13 aa, Homo sapiens
  CDR3 for beta chain variable domain of TCR clone 307672 (TRBV14, TRBJ2-1)
CASSQDRRNEQFF

SEQ ID NO: 615345 - protein, 11 aa, Homo sapiens
  CDR3 for alpha chain variable domain of TCR clone 307673 (TRAV2, TRAJ33)
CAVESNYQLIW

SEQ ID NO: 615346 - protein, 15 aa, Homo sapiens
  CDR3 for beta chain variable domain of TCR clone 307673 (TRBV11-1, TRBJ2-7)
CASSRGRFKTYEQYF

SEQ ID NO: 615347 - protein, 10 aa, Homo sapiens
  CDR3 for alpha chain variable domain of TCR clone 307674 (TRAV13-1, TRAJ47)
CAASRIWKQT

SEQ ID NO: 615348 - protein, 16 aa, Homo sapiens
  CDR3 for beta chain variable domain of TCR clone 307674 (TRBV20-1, TRBJ1-2)
CSASMGQGVANYGYTF

SEQ ID NO: 615349 - protein, 11 aa, Homo sapiens
  CDR3 for alpha chain variable domain of TCR clone 307675 (TRAV17, TRAJ43)
CSTLRSNDMRF

SEQ ID NO: 615350 - protein, 15 aa, Homo sapiens
  CDR3 for beta chain variable domain of TCR clone 307675 (TRBV11-2, TRBJ2-1)
CASSLGTSGLNEQFF

SEQ ID NO: 615351 - protein, 14 aa, Homo sapiens
  CDR3 for alpha chain variable domain of TCR clone 307676 (TRAV17, TRAJ45)
CATASGGGADGLTF

SEQ ID NO: 615352 - protein, 15 aa, Homo sapiens
  CDR3 for beta chain variable domain of TCR clone 307676 (TRBV11-2, TRBJ2-1)
CAISRNRGLMYEQFF

SEQ ID NO: 615353 - protein, 15 aa, Homo sapiens
  CDR3 for alpha chain variable domain of TCR clone 307677 (TRAV20, TRAJ4)
CAVTMFSGGYNKLIF

SEQ ID NO: 615354 - protein, 13 aa, Homo sapiens
  CDR3 for beta chain variable domain of TCR clone 307677 (TRBV11-2, TRBJ2-1)
CASSLDLVNEQFF

SEQ ID NO: 615355 - protein, 14 aa, Homo sapiens
  CDR3 for alpha chain variable domain of TCR clone 307678 (TRAV8-3, TRAJ16)
CAVDRFSDGQKLLF

SEQ ID NO: 615356 - protein, 15 aa, Homo sapiens
  CDR3 for beta chain variable domain of TCR clone 307678 (TRBV7-6, TRBJ2-1)
CASSTGQGPYNEQFF

SEQ ID NO: 615357 - protein, 16 aa, Homo sapiens
  CDR3 for alpha chain variable domain of TCR clone 307679 (TRAV3, TRAJ37)
CAVRGKGSGNTGKLSF

SEQ ID NO: 615358 - protein, 13 aa, Homo sapiens
  CDR3 for beta chain variable domain of TCR clone 307679 (TRBV19, TRBJ1-2)
CASSVPGQDGYTF

SEQ ID NO: 615359 - protein, 10 aa, Homo sapiens
  CDR3 for alpha chain variable domain of TCR clone 307680 (TRAV5, TRAJ34)
CAEDTDKLIF

SEQ ID NO: 615360 - protein, 16 aa, Homo sapiens
  CDR3 for beta chain variable domain of TCR clone 307680 (TRBV4-1, TRBJ1-2)
CASSQDAGQVLYGYTF

SEQ ID NO: 615361 - protein, 15 aa, Homo sapiens
  CDR3 for alpha chain variable domain of TCR clone 307681 (TRAV2, TRAJ11)
CAVGGRNSGYSTLSF

SEQ ID NO: 615362 - protein, 14 aa, Homo sapiens
  CDR3 for beta chain variable domain of TCR clone 307681 (TRBV4-1, TRBJ2-2)
CASSQAVNTGELFF

SEQ ID NO: 615363 - protein, 12 aa, Homo sapiens
  CDR3 for alpha chain variable domain of TCR clone 307682 (TRAV17, TRAJ39)
CATGAAGNMLTF

SEQ ID NO: 615364 - protein, 16 aa, Homo sapiens
  CDR3 for beta chain variable domain of TCR clone 307682 (TRBV20-1, TRBJ1-2)
CSASMGQGVANYGYTF

SEQ ID NO: 615365 - protein, 13 aa, Homo sapiens
  CDR3 for alpha chain variable domain of TCR clone 307683 (TRAV35, TRAJ57)
CAGSQGGSEKLVF

SEQ ID NO: 615366 - protein, 13 aa, Homo sapiens
  CDR3 for beta chain variable domain of TCR clone 307683 (TRBV7-3, TRBJ1-1)
CASSQDWGAEAFF

SEQ ID NO: 615367 - protein, 14 aa, Homo sapiens
  CDR3 for alpha chain variable domain of TCR clone 307684 (TRAV12-1, TRAJ33)
CVVNPEDSNYQLIW

SEQ ID NO: 615368 - protein, 11 aa, Homo sapiens
  CDR3 for beta chain variable domain of TCR clone 307684 (TRBV7-6, TRBJ2-1)
CASSNYGKQFF

SEQ ID NO: 615369 - protein, 16 aa, Homo sapiens
  CDR3 for alpha chain variable domain of TCR clone 307685 (TRAV16, TRAJ4)
CALSRMFSGGYNKLIF

SEQ ID NO: 615370 - protein, 14 aa, Homo sapiens
  CDR3 for beta chain variable domain of TCR clone 307685 (TRBV20-1, TRBJ2-1)
CSAQIGGSANEQFF

SEQ ID NO: 615371 - protein, 16 aa, Homo sapiens
  CDR3 for alpha chain variable domain of TCR clone 307686 (TRAV24, TRAJ53)
CAFNMGGGGSNYKLTF

SEQ ID NO: 615372 - protein, 14 aa, Homo sapiens
  CDR3 for beta chain variable domain of TCR clone 307686 (TRBV2, TRBJ2-5)
CASKRDGTTETQYF

SEQ ID NO: 615373 - protein, 14 aa, Homo sapiens
  CDR3 for alpha chain variable domain of TCR clone 307687 (TRAV8-3, TRAJ4)
CAVGAAGGYNKLIF

SEQ ID NO: 615374 - protein, 12 aa, Homo sapiens
  CDR3 for beta chain variable domain of TCR clone 307687 (TRBV2, TRBJ2-1)
CASSATWNEQFF

SEQ ID NO: 615375 - protein, 13 aa, Homo sapiens
  CDR3 for alpha chain variable domain of TCR clone 307688 (TRAV8-6, TRAJ21)
CAVSPSSLNNFYF

SEQ ID NO: 615376 - protein, 14 aa, Homo sapiens
  CDR3 for beta chain variable domain of TCR clone 307688 (TRBV7-9, TRBJ2-5)
CASSLDTAQETQYL

SEQ ID NO: 615377 - protein, 14 aa, Homo sapiens
  CDR3 for alpha chain variable domain of TCR clone 307689 (TRAV12-3, TRAJ58)
CAMSTETSGSRLPF

SEQ ID NO: 615378 - protein, 13 aa, Homo sapiens
  CDR3 for beta chain variable domain of TCR clone 307689 (TRBV27, TRBJ2-3)
CASSWGRTDTQYF

SEQ ID NO: 615379 - protein, 14 aa, Homo sapiens
  CDR3 for alpha chain variable domain of TCR clone 307690 (TRAV3, TRAJ9)
CAGRGNTGGFKTIF

SEQ ID NO: 615380 - protein, 14 aa, Homo sapiens
  CDR3 for beta chain variable domain of TCR clone 307690 (TRBV15, TRBJ2-1)
CATSGVEDYNEQFF

SEQ ID NO: 615381 - protein, 17 aa, Homo sapiens
  CDR3 for alpha chain variable domain of TCR clone 307691 (TRAV26-1, TRAJ21)
CIAKGKFYFGSGTKLNV

SEQ ID NO: 615382 - protein, 13 aa, Homo sapiens
  CDR3 for beta chain variable domain of TCR clone 307691 (TRBV7-9, TRBJ1-2)
CASSLKQNYGYTF

SEQ ID NO: 615383 - protein, 12 aa, Homo sapiens
  CDR3 for alpha chain variable domain of TCR clone 307692 (TRAV8-3, TRAJ20)
CAVGANDYKLSF

SEQ ID NO: 615384 - protein, 15 aa, Homo sapiens
  CDR3 for beta chain variable domain of TCR clone 307692 (TRBV7-2, TRBJ2-3)
CASSLAGAFIDTQYF

SEQ ID NO: 615385 - protein, 10 aa, Homo sapiens
  CDR3 for alpha chain variable domain of TCR clone 307693 (TRAV38-2/DV8, TRAJ40)
CASGTYKYIF

SEQ ID NO: 615386 - protein, 15 aa, Homo sapiens
  CDR3 for beta chain variable domain of TCR clone 307693 (TRBV20-1, TRBJ2-7)
CSARDRVSGMDEQYF

SEQ ID NO: 615387 - protein, 12 aa, Homo sapiens
  CDR3 for alpha chain variable domain of TCR clone 307694 (TRAV30, TRAJ39)
CGRGNAGNMLIF

SEQ ID NO: 615388 - protein, 15 aa, Homo sapiens
  CDR3 for beta chain variable domain of TCR clone 307694 (TRBV5-1, TRBJ1-1)
CASSWTGRGNTEAFF

SEQ ID NO: 615389 - protein, 11 aa, Homo sapiens
  CDR3 for alpha chain variable domain of TCR clone 307695 (TRAV23/DV6, TRAJ11)
CAVGGYSTLTF

SEQ ID NO: 615390 - protein, 15 aa, Homo sapiens
  CDR3 for beta chain variable domain of TCR clone 307695 (TRBV18, TRBJ2-1)
CASSPPSASYNEQFF

SEQ ID NO: 615391 - protein, 18 aa, Homo sapiens
  CDR3 for alpha chain variable domain of TCR clone 307696 (TRAV17, TRAJ56)
CFLLLCYGPPGANSKLTF

SEQ ID NO: 615392 - protein, 13 aa, Homo sapiens
  CDR3 for beta chain variable domain of TCR clone 307696 (TRBV12-4, TRBJ2-2)
CASSITGSGELFF

SEQ ID NO: 615393 - protein, 12 aa, Homo sapiens
  CDR3 for alpha chain variable domain of TCR clone 307697 (TRAV21, TRAJ3)
CCFYSSASKIIF

SEQ ID NO: 615394 - protein, 13 aa, Homo sapiens
  CDR3 for beta chain variable domain of TCR clone 307697 (TRBV7-3, TRBJ2-5)
CASSIGFFETQYF

SEQ ID NO: 615395 - protein, 14 aa, Homo sapiens
  CDR3 for alpha chain variable domain of TCR clone 307698 (TRAV21, TRAJ52)
CGRAGGTSYGKLTF

SEQ ID NO: 615396 - protein, 14 aa, Homo sapiens
  CDR3 for beta chain variable domain of TCR clone 307698 (TRBV19, TRBJ1-2)
CASSVLGYSYGYTF

SEQ ID NO: 615397 - protein, 12 aa, Homo sapiens
  CDR3 for alpha chain variable domain of TCR clone 307699 (TRAV12-2, TRAJ30)
CAVRNRDDKIIF

SEQ ID NO: 615398 - protein, 15 aa, Homo sapiens
  CDR3 for beta chain variable domain of TCR clone 307699 (TRBV11-3, TRBJ2-7)
CASSPGPASSYEQYF

SEQ ID NO: 615399 - protein, 15 aa, Homo sapiens
  CDR3 for alpha chain variable domain of TCR clone 307700 (TRAV17, TRAJ23)
CATDSEDNQGGKLIF

SEQ ID NO: 615400 - protein, 14 aa, Homo sapiens
  CDR3 for beta chain variable domain of TCR clone 307700 (TRBV6-1, TRBJ1-3)
CASVQGGGGNTIYF

SEQ ID NO: 615401 - protein, 13 aa, Homo sapiens
  CDR3 for alpha chain variable domain of TCR clone 307701 (TRAV29/DV5, TRAJ31)
CAASLNNNARLMF

SEQ ID NO: 615402 - protein, 12 aa, Homo sapiens
  CDR3 for beta chain variable domain of TCR clone 307701 (TRBV14, TRBJ1-1)
CASSQLKGLAFF

SEQ ID NO: 615403 - protein, 11 aa, Homo sapiens
  CDR3 for alpha chain variable domain of TCR clone 307702 (TRAV23/DV6, TRAJ58)
CAARLLRGETS

SEQ ID NO: 615404 - protein, 15 aa, Homo sapiens
  CDR3 for beta chain variable domain of TCR clone 307702 (TRBV10-3, TRBJ2-2)
CAIRTDREDTGELFF

SEQ ID NO: 615405 - protein, 13 aa, Homo sapiens
  CDR3 for alpha chain variable domain of TCR clone 307703 (TRAV17, TRAJ9)
CATDYTGGFTTIF

SEQ ID NO: 615406 - protein, 13 aa, Homo sapiens
  CDR3 for beta chain variable domain of TCR clone 307703 (TRBV7-9, TRBJ1-2)
CASSLKQNYGYTF

SEQ ID NO: 615407 - protein, 11 aa, Homo sapiens
  CDR3 for alpha chain variable domain of TCR clone 307704 (TRAV1-1, TRAJ23)
CAVRQGGKLIF

SEQ ID NO: 615408 - protein, 20 aa, Homo sapiens
  CDR3 for beta chain variable domain of TCR clone 307704 (TRBV7-8, TRBJ2-2)
CASSHLFPGPTIQMTGELFF

SEQ ID NO: 615409 - protein, 14 aa, Homo sapiens
  CDR3 for alpha chain variable domain of TCR clone 307705 (TRAV12-2, TRAJ40)
CAVKIPSGTYKYIF

SEQ ID NO: 615410 - protein, 13 aa, Homo sapiens
  CDR3 for beta chain variable domain of TCR clone 307705 (TRBV12-4, TRBJ1-1)
CASSPGTGFEAFL

SEQ ID NO: 615411 - protein, 15 aa, Homo sapiens
  CDR3 for alpha chain variable domain of TCR clone 307706 (TRAV21, TRAJ53)
CATLNSGGSNYKLTF

SEQ ID NO: 615412 - protein, 15 aa, Homo sapiens
  CDR3 for beta chain variable domain of TCR clone 307706 (TRBV20-1, TRBJ2-7)
CSAREGRDSLYEQYF

SEQ ID NO: 615413 - protein, 13 aa, Homo sapiens
  CDR3 for alpha chain variable domain of TCR clone 307707 (TRAV8-4, TRAJ49)
CAVSDPGGNQVYF

SEQ ID NO: 615414 - protein, 11 aa, Homo sapiens
  CDR3 for beta chain variable domain of TCR clone 307707 (TRBV29-1, TRBJ1-3)
CSVAIGNTIYF

SEQ ID NO: 615415 - protein, 15 aa, Homo sapiens
  CDR3 for alpha chain variable domain of TCR clone 307708 (TRAV26-1, TRAJ22)
CIVRVSFWFCKATYL

SEQ ID NO: 615416 - protein, 14 aa, Homo sapiens
  CDR3 for beta chain variable domain of TCR clone 307708 (TRBV7-2, TRBJ2-7)
CASSPKTSFYEQYF

SEQ ID NO: 615417 - protein, 16 aa, Homo sapiens
  CDR3 for alpha chain variable domain of TCR clone 307709 (TRAV30, TRAJ48)
CGTEIKSNFGNEKLTF

SEQ ID NO: 615418 - protein, 17 aa, Homo sapiens
  CDR3 for beta chain variable domain of TCR clone 307709 (TRBV27, TRBJ2-1)
CASGSERGGQSADEQFF

SEQ ID NO: 615419 - protein, 17 aa, Homo sapiens
  CDR3 for alpha chain variable domain of TCR clone 307710 (TRAV16, TRAJ42)
CALSPKLYGGSQGNLIF

SEQ ID NO: 615420 - protein, 13 aa, Homo sapiens
  CDR3 for beta chain variable domain of TCR clone 307710 (TRBV19, TRBJ1-5)
CASSTRRDQLQHF

SEQ ID NO: 615421 - protein, 14 aa, Homo sapiens
  CDR3 for alpha chain variable domain of TCR clone 307711 (TRAV1-2, TRAJ8)
CAVREDRGFQKLVF

SEQ ID NO: 615422 - protein, 15 aa, Homo sapiens
  CDR3 for beta chain variable domain of TCR clone 307711 (TRBV12-4, TRBJ2-5)
CASSPPTGLQETQYF

SEQ ID NO: 615423 - protein, 12 aa, Homo sapiens
  CDR3 for alpha chain variable domain of TCR clone 307712 (TRAV17, TRAJ12)
CATLRSSYKLIF

SEQ ID NO: 615424 - protein, 15 aa, Homo sapiens
  CDR3 for beta chain variable domain of TCR clone 307712 (TRBV5-1, TRBJ2-7)
CASSLDLTSSYEQYF

SEQ ID NO: 615425 - protein, 14 aa, Homo sapiens
  CDR3 for alpha chain variable domain of TCR clone 307713 (TRAV13-2, TRAJ43)
CAEIPTYNNNDMRF

SEQ ID NO: 615426 - protein, 13 aa, Homo sapiens
  CDR3 for beta chain variable domain of TCR clone 307713 (TRBV19, TRBJ1-3)
CASRLSLGNTIYF

SEQ ID NO: 615427 - protein, 15 aa, Homo sapiens
  CDR3 for alpha chain variable domain of TCR clone 307714 (TRAV26-1, TRAJ20)
CIVRVAGSNDYKLSF

SEQ ID NO: 615428 - protein, 17 aa, Homo sapiens
  CDR3 for beta chain variable domain of TCR clone 307714 (TRBV11-2, TRBJ2-1)
CASSLYPLGVEYNEQFF

SEQ ID NO: 615429 - protein, 14 aa, Homo sapiens
  CDR3 for alpha chain variable domain of TCR clone 307715 (TRAV36/DV7, TRAJ32)
CAVGHVGATNKLIF

SEQ ID NO: 615430 - protein, 16 aa, Homo sapiens
  CDR3 for beta chain variable domain of TCR clone 307715 (TRBV12-4, TRBJ1-4)
CASSLKGIGDGEKLFF

SEQ ID NO: 615431 - protein, 15 aa, Homo sapiens
  CDR3 for alpha chain variable domain of TCR clone 307716 (TRAV2, TRAJ15)
CAVEDREQAVTALIF

SEQ ID NO: 615432 - protein, 14 aa, Homo sapiens
  CDR3 for beta chain variable domain of TCR clone 307716 (TRBV11-2, TRBJ2-7)
CASSLGAGAYEQYF

SEQ ID NO: 615433 - protein, 14 aa, Homo sapiens
  CDR3 for alpha chain variable domain of TCR clone 307717 (TRAV1-2, TRAJ16)
CVVNRFSDGQKLLF

SEQ ID NO: 615434 - protein, 16 aa, Homo sapiens
  CDR3 for beta chain variable domain of TCR clone 307717 (TRBV11-2, TRBJ1-2)
CASSLDTGGADYGYTF

SEQ ID NO: 615435 - protein, 13 aa, Homo sapiens
  CDR3 for alpha chain variable domain of TCR clone 307718 (TRAV25, TRAJ26)
CAGMDNYGQNFVF

SEQ ID NO: 615436 - protein, 15 aa, Homo sapiens
  CDR3 for beta chain variable domain of TCR clone 307718 (TRBV10-3, TRBJ2-1)
CAVRNGTSGHNEQFF

SEQ ID NO: 615437 - protein, 14 aa, Homo sapiens
  CDR3 for alpha chain variable domain of TCR clone 307719 (TRAV17, TRAJ39)
CATDPVRAGNMLTF

SEQ ID NO: 615438 - protein, 15 aa, Homo sapiens
  CDR3 for beta chain variable domain of TCR clone 307719 (TRBV13, TRBJ1-5)
CASILGQGGVQPQHF

SEQ ID NO: 615439 - protein, 10 aa, Homo sapiens
  CDR3 for alpha chain variable domain of TCR clone 307720 (TRAV23/DV6, TRAJ31)
CARGGARLMF

SEQ ID NO: 615440 - protein, 13 aa, Homo sapiens
  CDR3 for beta chain variable domain of TCR clone 307720 (TRBV12-4, TRBJ1-1)
CASSPGTGFEAFF

SEQ ID NO: 615441 - protein, 15 aa, Homo sapiens
  CDR3 for alpha chain variable domain of TCR clone 307721 (TRAV13-1, TRAJ52)
SYYNAGGTSYGKLKF

SEQ ID NO: 615442 - protein, 11 aa, Homo sapiens
  CDR3 for beta chain variable domain of TCR clone 307721 (TRBV12-4, TRBJ2-2)
CASSSAGELFF

SEQ ID NO: 615443 - protein, 14 aa, Homo sapiens
  CDR3 for alpha chain variable domain of TCR clone 307722 (TRAV13-1, TRAJ45)
CAAIGGGGADGLPF

SEQ ID NO: 615444 - protein, 16 aa, Homo sapiens
  CDR3 for beta chain variable domain of TCR clone 307722 (TRBV7-2, TRBJ1-1)
CASSLGAGWTNTEAFF

SEQ ID NO: 615445 - protein, 16 aa, Homo sapiens
  CDR3 for alpha chain variable domain of TCR clone 307723 (TRAV30, TRAJ24)
CSTEIVDADSWGKFQL

SEQ ID NO: 615446 - protein, 14 aa, Homo sapiens
  CDR3 for beta chain variable domain of TCR clone 307723 (TRBV12-5, TRBJ2-5)
CASGSRTHQETQYF

SEQ ID NO: 615447 - protein, 12 aa, Homo sapiens
  CDR3 for alpha chain variable domain of TCR clone 307724 (TRAV13-1, TRAJ15)
CAASQAGNALIF

SEQ ID NO: 615448 - protein, 18 aa, Homo sapiens
  CDR3 for beta chain variable domain of TCR clone 307724 (TRBV7-9, TRBJ2-3)
CASSFPINGQISTDTQYF

SEQ ID NO: 615449 - protein, 12 aa, Homo sapiens
  CDR3 for alpha chain variable domain of TCR clone 307725 (TRAV13-2, TRAJ23)
CAERPRGGKLIF

SEQ ID NO: 615450 - protein, 16 aa, Homo sapiens
  CDR3 for beta chain variable domain of TCR clone 307725 (TRBV7-2, TRBJ2-6)
CASSLAGRSGANVLTF

SEQ ID NO: 615451 - protein, 13 aa, Homo sapiens
  CDR3 for alpha chain variable domain of TCR clone 307726 (TRAV12-2, TRAJ4)
CAGFSGGYNKLIF

SEQ ID NO: 615452 - protein, 14 aa, Homo sapiens
  CDR3 for beta chain variable domain of TCR clone 307726 (TRBV24-1, TRBJ1-1)
CATSVPRGDTEAFF

SEQ ID NO: 615453 - protein, 13 aa, Homo sapiens
  CDR3 for alpha chain variable domain of TCR clone 307727 (TRAV8-2, TRAJ11)
CVVSDLGYSTLTF

SEQ ID NO: 615454 - protein, 16 aa, Homo sapiens
  CDR3 for beta chain variable domain of TCR clone 307727 (TRBV24-1, TRBJ2-3)
CATSDPGTGATDTQYF

SEQ ID NO: 615455 - protein, 12 aa, Homo sapiens
  CDR3 for alpha chain variable domain of TCR clone 307728 (TRAV12-3, TRAJ17)
CAMTLTGDKLTF

SEQ ID NO: 615456 - protein, 17 aa, Homo sapiens
  CDR3 for beta chain variable domain of TCR clone 307728 (TRBV19, TRBJ2-6)
CASSTGQVFSGANVLTF

SEQ ID NO: 615457 - protein, 14 aa, Homo sapiens
  CDR3 for alpha chain variable domain of TCR clone 307729 (TRAV3, TRAJ27)
CAVRDDTNAGKSTC

SEQ ID NO: 615458 - protein, 15 aa, Homo sapiens
  CDR3 for beta chain variable domain of TCR clone 307729 (TRBV7-7, TRBJ2-2)
CATSKLAKNTGELFF

SEQ ID NO: 615459 - protein, 14 aa, Homo sapiens
  CDR3 for alpha chain variable domain of TCR clone 307730 (TRAV12-1, TRAJ17)
CVVNYKTAGNKLTF

SEQ ID NO: 615460 - protein, 17 aa, Homo sapiens
  CDR3 for beta chain variable domain of TCR clone 307730 (TRBV11-2, TRBJ2-1)
CASSLYPPGVEYNEQFF

SEQ ID NO: 615461 - protein, 17 aa, Homo sapiens
  CDR3 for alpha chain variable domain of TCR clone 307731 (TRAV26-1, TRAJ53)
CIVRVDDIGGSNYKLTL

SEQ ID NO: 615462 - protein, 15 aa, Homo sapiens
  CDR3 for beta chain variable domain of TCR clone 307731 (TRBV20-1, TRBJ2-7)
CSARVPAAYFYEQYF

SEQ ID NO: 615463 - protein, 13 aa, Homo sapiens
  CDR3 for alpha chain variable domain of TCR clone 307732 (TRAV2, TRAJ21)
CAVEDLNFNKFYF

SEQ ID NO: 615464 - protein, 14 aa, Homo sapiens
  CDR3 for beta chain variable domain of TCR clone 307732 (TRBV28, TRBJ2-5)
CQQSGTGEYRDQYF

SEQ ID NO: 615465 - protein, 14 aa, Homo sapiens
  CDR3 for alpha chain variable domain of TCR clone 307733 (TRAV12-2, TRAJ57)
CAVITQGGSEKLVF

SEQ ID NO: 615466 - protein, 15 aa, Homo sapiens
  CDR3 for beta chain variable domain of TCR clone 307733 (TRBV4-1, TRBJ2-1)
CSSSQVLAGGDEQFF

SEQ ID NO: 615467 - protein, 13 aa, Homo sapiens
  CDR3 for alpha chain variable domain of TCR clone 307734 (TRAV1-2, TRAJ9)
CAVLNTGGFKTIF

SEQ ID NO: 615468 - protein, 15 aa, Homo sapiens
  CDR3 for beta chain variable domain of TCR clone 307734 (TRBV11-2, TRBJ2-1)
CASSSPSTRYNEQFF

SEQ ID NO: 615469 - protein, 15 aa, Homo sapiens
  CDR3 for alpha chain variable domain of TCR clone 307735 (TRAV17, TRAJ57)
CATCPSQGGSEKLVV

SEQ ID NO: 615470 - protein, 16 aa, Homo sapiens
  CDR3 for beta chain variable domain of TCR clone 307735 (TRBV12-4, TRBJ1-5)
CASSRPVGGSNQPQHF

SEQ ID NO: 615471 - protein, 17 aa, Homo sapiens
  CDR3 for alpha chain variable domain of TCR clone 307736 (TRAV3, TRAJ6)
CAVSRRTDIGGSYIPAF

SEQ ID NO: 615472 - protein, 18 aa, Homo sapiens
  CDR3 for beta chain variable domain of TCR clone 307736 (TRBV7-2, TRBJ2-3)
CASSLETSRGRKADTQYF

SEQ ID NO: 615473 - protein, 15 aa, Homo sapiens
  CDR3 for alpha chain variable domain of TCR clone 307737 (TRAV34, TRAJ38)
CGADFTPGTNRKLIL

SEQ ID NO: 615474 - protein, 16 aa, Homo sapiens
  CDR3 for beta chain variable domain of TCR clone 307737 (TRBV12-5, TRBJ2-5)
CASGPRTSGNQETQYF

SEQ ID NO: 615475 - protein, 16 aa, Homo sapiens
  CDR3 for alpha chain variable domain of TCR clone 307738 (TRAV8-3, TRAJ8)
CAVPRDGNTGFQKIVS

SEQ ID NO: 615476 - protein, 14 aa, Homo sapiens
  CDR3 for beta chain variable domain of TCR clone 307738 (TRBV28, TRBJ1-1)
CASSESGRGTEAFF

SEQ ID NO: 615477 - protein, 14 aa, Homo sapiens
  CDR3 for alpha chain variable domain of TCR clone 307739 (TRAV9-2, TRAJ39)
CALYIYNAGNMLTF

SEQ ID NO: 615478 - protein, 12 aa, Homo sapiens
  CDR3 for beta chain variable domain of TCR clone 307739 (TRBV11-2, TRBJ2-2)
CASSPGGGELFF

SEQ ID NO: 615479 - protein, 15 aa, Homo sapiens
  CDR3 for alpha chain variable domain of TCR clone 307740 (TRAV35, TRAJ40)
CWATLGTSGTYKYIF

SEQ ID NO: 615480 - protein, 12 aa, Homo sapiens
  CDR3 for beta chain variable domain of TCR clone 307740 (TRBV28, TRBJ2-3)
CASSGGPDTQYF

SEQ ID NO: 615481 - protein, 19 aa, Homo sapiens
  CDR3 for alpha chain variable domain of TCR clone 307741 (TRAV8-3, TRAJ34)
LSTSVLWVWGLRNTDKLIF

SEQ ID NO: 615482 - protein, 14 aa, Homo sapiens
  CDR3 for beta chain variable domain of TCR clone 307741 (TRBV19, TRBJ2-1)
CASPTFVLSGEQFF

SEQ ID NO: 615483 - protein, 11 aa, Homo sapiens
  CDR3 for alpha chain variable domain of TCR clone 307742 (TRAV21, TRAJ11)
CAVNGYSTLTF

SEQ ID NO: 615484 - protein, 14 aa, Homo sapiens
  CDR3 for beta chain variable domain of TCR clone 307742 (TRBV19, TRBJ2-1)
CASGKSTQYNEQFF

SEQ ID NO: 615485 - protein, 14 aa, Homo sapiens
  CDR3 for alpha chain variable domain of TCR clone 307743 (TRAV8-3, TRAJ15)
CALSEDQAGTALIF

SEQ ID NO: 615486 - protein, 16 aa, Homo sapiens
  CDR3 for beta chain variable domain of TCR clone 307743 (TRBV7-9, TRBJ2-3)
CASSPWREVGTDTQYF

SEQ ID NO: 615487 - protein, 16 aa, Homo sapiens
  CDR3 for alpha chain variable domain of TCR clone 307744 (TRAV35, TRAJ28)
CAGQKYSGAGSYQLAF

SEQ ID NO: 615488 - protein, 16 aa, Homo sapiens
  CDR3 for beta chain variable domain of TCR clone 307744 (TRBV7-3, TRBJ2-2)
CASSLKRGTLSGELFF

SEQ ID NO: 615489 - protein, 14 aa, Homo sapiens
  CDR3 for alpha chain variable domain of TCR clone 307745 (TRAV1-2, TRAJ8)
CAVREDTGFQKLVF

SEQ ID NO: 615490 - protein, 17 aa, Homo sapiens
  CDR3 for beta chain variable domain of TCR clone 307745 (TRBV6-1, TRBJ1-2)
CASSGTHSQRGNYGYTF

SEQ ID NO: 615491 - protein, 16 aa, Homo sapiens
  CDR3 for alpha chain variable domain of TCR clone 307746 (TRAV3, TRAJ37)
CAVRGKGSGNTGKLIF

SEQ ID NO: 615492 - protein, 13 aa, Homo sapiens
  CDR3 for beta chain variable domain of TCR clone 307746 (TRBV4-2, TRBJ1-1)
CASSQAGSTEAFF

SEQ ID NO: 615493 - protein, 17 aa, Homo sapiens
  CDR3 for alpha chain variable domain of TCR clone 307747 (TRAV3, TRAJ6)
CAVRHGPRAGGSYIPTL

SEQ ID NO: 615494 - protein, 14 aa, Homo sapiens
  CDR3 for beta chain variable domain of TCR clone 307747 (TRBV7-2, TRBJ2-7)
CASSPTTSFYEQYF

SEQ ID NO: 615495 - protein, 12 aa, Homo sapiens
  CDR3 for alpha chain variable domain of TCR clone 307748 (TRAV12-2, TRAJ31)
CAVHTPDARLMF

SEQ ID NO: 615496 - protein, 12 aa, Homo sapiens
  CDR3 for beta chain variable domain of TCR clone 307748 (TRBV12-4, TRBJ2-7)
CASSLGGYEQYF

SEQ ID NO: 615497 - protein, 11 aa, Homo sapiens
  CDR3 for alpha chain variable domain of TCR clone 307749 (TRAV1-1, TRAJ23)
CALRQGEKLIF

SEQ ID NO: 615498 - protein, 20 aa, Homo sapiens
  CDR3 for beta chain variable domain of TCR clone 307749 (TRBV7-8, TRBJ2-2)
CASSHLFPGPTIHITGELFF

SEQ ID NO: 615499 - protein, 11 aa, Homo sapiens
  CDR3 for alpha chain variable domain of TCR clone 307750 (TRAV21, TRAJ20)
CAARDDYKLSF

SEQ ID NO: 615500 - protein, 14 aa, Homo sapiens
  CDR3 for beta chain variable domain of TCR clone 307750 (TRBV7-2, TRBJ2-7)
CASSPNTSFYEQYF

SEQ ID NO: 615501 - protein, 14 aa, Homo sapiens
  CDR3 for alpha chain variable domain of TCR clone 307751 (TRAV22, TRAJ28)
CAVEPGAGSYQLTF

SEQ ID NO: 615502 - protein, 12 aa, Homo sapiens
  CDR3 for beta chain variable domain of TCR clone 307751 (TRBV3-1, TRBJ2-1)
CASSQGSSGQFF

SEQ ID NO: 615503 - protein, 14 aa, Homo sapiens
  CDR3 for alpha chain variable domain of TCR clone 307752 (TRAV29/DV5, TRAJ57)
CAARSQGGSEKLVF

SEQ ID NO: 615504 - protein, 14 aa, Homo sapiens
  CDR3 for beta chain variable domain of TCR clone 307752 (TRBV7-2, TRBJ2-7)
CASSPKTSFYEQYF

SEQ ID NO: 615505 - protein, 13 aa, Homo sapiens
  CDR3 for alpha chain variable domain of TCR clone 307753 (TRAV8-1, TRAJ24)
CAGSTDSWGKLQF

SEQ ID NO: 615506 - protein, 13 aa, Homo sapiens
  CDR3 for beta chain variable domain of TCR clone 307753 (TRBV7-9, TRBJ1-2)
CASSLKQNYGYTF

SEQ ID NO: 615507 - protein, 12 aa, Homo sapiens
  CDR3 for alpha chain variable domain of TCR clone 307754 (TRAV8-4, TRAJ49)
CAVKGTGNQFYF

SEQ ID NO: 615508 - protein, 17 aa, Homo sapiens
  CDR3 for beta chain variable domain of TCR clone 307754 (TRBV13, TRBJ2-3)
CASSLSRVAGGRNTQYF

SEQ ID NO: 615509 - protein, 13 aa, Homo sapiens
  CDR3 for alpha chain variable domain of TCR clone 307755 (TRAV21, TRAJ57)
CAVIEGGSEKLVF

SEQ ID NO: 615510 - protein, 14 aa, Homo sapiens
  CDR3 for beta chain variable domain of TCR clone 307755 (TRBV12-4, TRBJ2-3)
CASTIAGWGDTQYF

SEQ ID NO: 615511 - protein, 13 aa, Homo sapiens
  CDR3 for alpha chain variable domain of TCR clone 307756 (TRAV12-3, TRAJ7)
CAITPYGNNRLAF

SEQ ID NO: 615512 - protein, 16 aa, Homo sapiens
  CDR3 for beta chain variable domain of TCR clone 307756 (TRBV20-1, TRBJ1-4)
CSASPYGGELNEKLFF

SEQ ID NO: 615513 - protein, 16 aa, Homo sapiens
  CDR3 for alpha chain variable domain of TCR clone 307757 (TRAV3, TRAJ18)
CAVRDGRGSTLGRPYV

SEQ ID NO: 615514 - protein, 15 aa, Homo sapiens
  CDR3 for beta chain variable domain of TCR clone 307757 (TRBV7-9, TRBJ1-6)
CASSSPGRGNSPLHF

SEQ ID NO: 615515 - protein, 14 aa, Homo sapiens
  CDR3 for alpha chain variable domain of TCR clone 307758 (TRAV8-3, TRAJ4)
CAVGAAGGYNKLIF

SEQ ID NO: 615516 - protein, 17 aa, Homo sapiens
  CDR3 for beta chain variable domain of TCR clone 307758 (TRBV6-5, TRBJ2-1)
CTSVPAVTMRERNEQFF

SEQ ID NO: 615517 - protein, 16 aa, Homo sapiens
  CDR3 for alpha chain variable domain of TCR clone 307759 (TRAV1-2, TRAJ10)
CAVRGVLTGGGNKLTF

SEQ ID NO: 615518 - protein, 14 aa, Homo sapiens
  CDR3 for beta chain variable domain of TCR clone 307759 (TRBV19, TRBJ2-1)
CASRAELETGEQFF

SEQ ID NO: 615519 - protein, 12 aa, Homo sapiens
  CDR3 for alpha chain variable domain of TCR clone 307760 (TRAV12-3, TRAJ17)
CAMTLTGNKLTF

SEQ ID NO: 615520 - protein, 15 aa, Homo sapiens
  CDR3 for beta chain variable domain of TCR clone 307760 (TRBV20-1, TRBJ2-7)
CSSRDPVSGMDEQYF

SEQ ID NO: 615521 - protein, 11 aa, Homo sapiens
  CDR3 for alpha chain variable domain of TCR clone 307761 (TRAV27, TRAJ47)
SIVEYGNKLVF

SEQ ID NO: 615522 - protein, 18 aa, Homo sapiens
  CDR3 for beta chain variable domain of TCR clone 307761 (TRBV2, TRBJ2-1)
CASRGLAGGPRTYNEHFF

SEQ ID NO: 615523 - protein, 15 aa, Homo sapiens
  CDR3 for alpha chain variable domain of TCR clone 307762 (TRAV23/DV6, TRAJ18)
CAARYRGSTLGRLYF

SEQ ID NO: 615524 - protein, 16 aa, Homo sapiens
  CDR3 for beta chain variable domain of TCR clone 307762 (TRBV7-9, TRBJ1-2)
CASSLGFSSGEDGYTF

SEQ ID NO: 615525 - protein, 14 aa, Homo sapiens
  CDR3 for alpha chain variable domain of TCR clone 307763 (TRAV29/DV5, TRAJ36)
CAARRKTGSNNLFF

SEQ ID NO: 615526 - protein, 15 aa, Homo sapiens
  CDR3 for beta chain variable domain of TCR clone 307763 (TRBV5-1, TRBJ2-2)
CASSLFGQNTGELFF

SEQ ID NO: 615527 - protein, 13 aa, Homo sapiens
  CDR3 for alpha chain variable domain of TCR clone 307764 (TRAV26-1, TRAJ36)
CIVVGTGANNLFF

SEQ ID NO: 615528 - protein, 12 aa, Homo sapiens
  CDR3 for beta chain variable domain of TCR clone 307764 (TRBV5-1, TRBJ1-2)
CASSQDTYGYTF

SEQ ID NO: 615529 - protein, 13 aa, Homo sapiens
  CDR3 for alpha chain variable domain of TCR clone 307765 (TRAV29/DV5, TRAJ33)
CAAGVESNYRLIW

SEQ ID NO: 615530 - protein, 14 aa, Homo sapiens
  CDR3 for beta chain variable domain of TCR clone 307765 (TRBV11-2, TRBJ2-5)
CASSRTGCIETQYF

SEQ ID NO: 615531 - protein, 12 aa, Homo sapiens
  CDR3 for alpha chain variable domain of TCR clone 307766 (TRAV29/DV5, TRAJ36)
CAARRKTGQTTS

SEQ ID NO: 615532 - protein, 15 aa, Homo sapiens
  CDR3 for beta chain variable domain of TCR clone 307766 (TRBV6-5, TRBJ2-1)
CASSYDAGAGNEQFF

SEQ ID NO: 615533 - protein, 15 aa, Homo sapiens
  CDR3 for alpha chain variable domain of TCR clone 307767 (TRAV3, TRAJ22)
CAVRDGPGSARQLTF

SEQ ID NO: 615534 - protein, 12 aa, Homo sapiens
  CDR3 for beta chain variable domain of TCR clone 307767 (TRBV18, TRBJ2-1)
CASSSDEDEQFF

SEQ ID NO: 615535 - protein, 14 aa, Homo sapiens
  CDR3 for alpha chain variable domain of TCR clone 307768 (TRAV8-4, TRAJ54)
FAVSEVLGAQKLVF

SEQ ID NO: 615536 - protein, 13 aa, Homo sapiens
  CDR3 for beta chain variable domain of TCR clone 307768 (TRBV27, TRBJ2-7)
CASSFVSSYEQYF

SEQ ID NO: 615537 - protein, 13 aa, Homo sapiens
  CDR3 for alpha chain variable domain of TCR clone 307769 (TRAV3, TRAJ20)
CCEASCNDYKLSF

SEQ ID NO: 615538 - protein, 11 aa, Homo sapiens
  CDR3 for beta chain variable domain of TCR clone 307769 (TRBV11-2, TRBJ2-2)
CASSLPGELFF

SEQ ID NO: 615539 - protein, 14 aa, Homo sapiens
  CDR3 for alpha chain variable domain of TCR clone 307770 (TRAV3, TRAJ32)
CCERRAGATNELIF

SEQ ID NO: 615540 - protein, 12 aa, Homo sapiens
  CDR3 for beta chain variable domain of TCR clone 307770 (TRBV6-1, TRBJ2-7)
CASSDYSYEQYF

SEQ ID NO: 615541 - protein, 14 aa, Homo sapiens
  CDR3 for alpha chain variable domain of TCR clone 307771 (TRAV12-3, TRAJ22)
CAMSLFGSAWQLTF

SEQ ID NO: 615542 - protein, 11 aa, Homo sapiens
  CDR3 for beta chain variable domain of TCR clone 307771 (TRBV12-4, TRBJ2-2)
RASSSAGELFF

SEQ ID NO: 615543 - protein, 15 aa, Homo sapiens
  CDR3 for alpha chain variable domain of TCR clone 307772 (TRAV8-4, TRAJ15)
CAVSDPVQAGTALIF

SEQ ID NO: 615544 - protein, 16 aa, Homo sapiens
  CDR3 for beta chain variable domain of TCR clone 307772 (TRBV7-3, TRBJ2-2)
CASSLKRGTLSGELFF

SEQ ID NO: 615545 - protein, 15 aa, Homo sapiens
  CDR3 for alpha chain variable domain of TCR clone 307773 (TRAV3, TRAJ17)
CAVRDTGAAGNKLTF

SEQ ID NO: 615546 - protein, 17 aa, Homo sapiens
  CDR3 for beta chain variable domain of TCR clone 307773 (TRBV24-1, TRBJ2-1)
CATSDVSTSGTYNEQFF

SEQ ID NO: 615547 - protein, 16 aa, Homo sapiens
  CDR3 for alpha chain variable domain of TCR clone 307774 (TRAV38-2/DV8, TRAJ10)
CAYTNILTGGGNKLTF

SEQ ID NO: 615548 - protein, 15 aa, Homo sapiens
  CDR3 for beta chain variable domain of TCR clone 307774 (TRBV12-4, TRBJ1-5)
CASSLPGRSNQPQHF

SEQ ID NO: 615549 - protein, 17 aa, Homo sapiens
  CDR3 for alpha chain variable domain of TCR clone 307775 (TRAV3, TRAJ28)
CAVREAYSGAGGYQPTF

SEQ ID NO: 615550 - protein, 18 aa, Homo sapiens
  CDR3 for beta chain variable domain of TCR clone 307775 (TRBV27, TRBJ2-1)
CASGNRAVGVGSKNEQFF

SEQ ID NO: 615551 - protein, 14 aa, Homo sapiens
  CDR3 for alpha chain variable domain of TCR clone 307776 (TRAV12-2, TRAJ33)
CAVNRARSNYQLIW

SEQ ID NO: 615552 - protein, 12 aa, Homo sapiens
  CDR3 for beta chain variable domain of TCR clone 307776 (TRBV24-1, TRBJ2-3)
CATSDSTDTRYF

SEQ ID NO: 615553 - protein, 12 aa, Homo sapiens
  CDR3 for alpha chain variable domain of TCR clone 307777 (TRAV12-1, TRAJ40)
CVVYSGTYKYIF

SEQ ID NO: 615554 - protein, 14 aa, Homo sapiens
  CDR3 for beta chain variable domain of TCR clone 307777 (TRBV7-6, TRBJ2-1)
CASSWGGGADEQFF

SEQ ID NO: 615555 - protein, 16 aa, Homo sapiens
  CDR3 for alpha chain variable domain of TCR clone 307778 (TRAV23/DV6, TRAJ48)
CAASGVVNFGKEKLTF

SEQ ID NO: 615556 - protein, 15 aa, Homo sapiens
  CDR3 for beta chain variable domain of TCR clone 307778 (TRBV20-1, TRBJ2-5)
CSAGLAGVSQETQYF

SEQ ID NO: 615557 - protein, 15 aa, Homo sapiens
  CDR3 for alpha chain variable domain of TCR clone 307779 (TRAV4, TRAJ36)
CLVGDRQTGANNLVF

SEQ ID NO: 615558 - protein, 13 aa, Homo sapiens
  CDR3 for beta chain variable domain of TCR clone 307779 (TRBV20-1, TRBJ1-1)
CSARVGGNTEAFF

SEQ ID NO: 615559 - protein, 16 aa, Homo sapiens
  CDR3 for alpha chain variable domain of TCR clone 307780 (TRAV8-3, TRAJ10)
CAVGAGVTGGGNKLTF

SEQ ID NO: 615560 - protein, 13 aa, Homo sapiens
  CDR3 for beta chain variable domain of TCR clone 307780 (TRBV18, TRBJ1-1)
CASSPGPSGEAFF

SEQ ID NO: 615561 - protein, 10 aa, Homo sapiens
  CDR3 for alpha chain variable domain of TCR clone 307781 (TRAV2, TRAJ34)
CAVVNDKLIF

SEQ ID NO: 615562 - protein, 16 aa, Homo sapiens
  CDR3 for beta chain variable domain of TCR clone 307781 (TRBV5-1, TRBJ2-3)
CASSLGLEVYTDTQYF

SEQ ID NO: 615563 - protein, 15 aa, Homo sapiens
  CDR3 for alpha chain variable domain of TCR clone 307782 (TRAV1-2, TRAJ10)
CAVRGFTGGGNKLTF

SEQ ID NO: 615564 - protein, 13 aa, Homo sapiens
  CDR3 for beta chain variable domain of TCR clone 307782 (TRBV20-1, TRBJ1-6)
CSAKSSYNSPLHF

SEQ ID NO: 615565 - protein, 10 aa, Homo sapiens
  CDR3 for alpha chain variable domain of TCR clone 307783 (TRAV36/DV7, TRAJ31)
CAVGEARLMF

SEQ ID NO: 615566 - protein, 14 aa, Homo sapiens
  CDR3 for beta chain variable domain of TCR clone 307783 (TRBV5-7, TRBJ2-7)
CASSGGLSSYEQYF

SEQ ID NO: 615567 - protein, 13 aa, Homo sapiens
  CDR3 for alpha chain variable domain of TCR clone 307784 (TRAV12-2, TRAJ12)
CAVNWDSSYKLIF

SEQ ID NO: 615568 - protein, 14 aa, Homo sapiens
  CDR3 for beta chain variable domain of TCR clone 307784 (TRBV2, TRBJ2-1)
CASRPGSSYNEQFF

SEQ ID NO: 615569 - protein, 11 aa, Homo sapiens
  CDR3 for alpha chain variable domain of TCR clone 307785 (TRAV1-1, TRAJ30)
CAVSRDDKIIF

SEQ ID NO: 615570 - protein, 14 aa, Homo sapiens
  CDR3 for beta chain variable domain of TCR clone 307785 (TRBV6-1, TRBJ1-3)
CASVQGGGGNTIYF

SEQ ID NO: 615571 - protein, 11 aa, Homo sapiens
  CDR3 for alpha chain variable domain of TCR clone 307786 (TRAV12-3, TRAJ43)
CAMIVSNDMRF

SEQ ID NO: 615572 - protein, 14 aa, Homo sapiens
  CDR3 for beta chain variable domain of TCR clone 307786 (TRBV12-5, TRBJ2-5)
CASGSRTHQETQYF

SEQ ID NO: 615573 - protein, 14 aa, Homo sapiens
  CDR3 for alpha chain variable domain of TCR clone 307787 (TRAV12-3, TRAJ10)
SHLPLTGGGNKLTF

SEQ ID NO: 615574 - protein, 13 aa, Homo sapiens
  CDR3 for beta chain variable domain of TCR clone 307787 (TRBV28, TRBJ2-1)
CASRSGGLNEQFF

SEQ ID NO: 615575 - protein, 17 aa, Homo sapiens
  CDR3 for alpha chain variable domain of TCR clone 307788 (TRAV3, TRAJ6)
CAVRDGPRAGGRYIPTF

SEQ ID NO: 615576 - protein, 20 aa, Homo sapiens
  CDR3 for beta chain variable domain of TCR clone 307788 (TRBV28, TRBJ2-1)
CASTPIGRSPGLAGGNDQFF

SEQ ID NO: 615577 - protein, 13 aa, Homo sapiens
  CDR3 for alpha chain variable domain of TCR clone 307789 (TRAV21, TRAJ27)
CAARPGNAGKSTF

SEQ ID NO: 615578 - protein, 15 aa, Homo sapiens
  CDR3 for beta chain variable domain of TCR clone 307789 (TRBV11-2, TRBJ2-1)
CASSLGPDSYNEQFF

SEQ ID NO: 615579 - protein, 15 aa, Homo sapiens
  CDR3 for alpha chain variable domain of TCR clone 307790 (TRAV29/DV5, TRAJ40)
CAASVQGSGTYKYIF

SEQ ID NO: 615580 - protein, 11 aa, Homo sapiens
  CDR3 for beta chain variable domain of TCR clone 307790 (TRBV29-1, TRBJ2-5)
CSEDRTGTQYF

SEQ ID NO: 615581 - protein, 15 aa, Homo sapiens
  CDR3 for alpha chain variable domain of TCR clone 307791 (TRAV17, TRAJ57)
CATGPSHGGPEKLVF

SEQ ID NO: 615582 - protein, 16 aa, Homo sapiens
  CDR3 for beta chain variable domain of TCR clone 307791 (TRBV12-4, TRBJ1-5)
CASSRPVGGSNQPQHF

SEQ ID NO: 615583 - protein, 12 aa, Homo sapiens
  CDR3 for alpha chain variable domain of TCR clone 307792 (TRAV12-3, TRAJ17)
CAMTLTGNKLTF

SEQ ID NO: 615584 - protein, 19 aa, Homo sapiens
  CDR3 for beta chain variable domain of TCR clone 307792 (TRBV6-3, TRBJ2-6)
CASSYSSRAGVSGANVLTF

SEQ ID NO: 615585 - protein, 15 aa, Homo sapiens
  CDR3 for alpha chain variable domain of TCR clone 307793 (TRAV25, TRAJ52)
CAGTSGGTSYGKLTF

SEQ ID NO: 615586 - protein, 16 aa, Homo sapiens
  CDR3 for beta chain variable domain of TCR clone 307793 (TRBV2, TRBJ2-1)
CASSVGGSLSYNEQFF

SEQ ID NO: 615587 - protein, 17 aa, Homo sapiens
  CDR3 for alpha chain variable domain of TCR clone 307794 (TRAV26-1, TRAJ37)
CIVRVITVSSNTGKIIF

SEQ ID NO: 615588 - protein, 15 aa, Homo sapiens
  CDR3 for beta chain variable domain of TCR clone 307794 (TRBV10-1, TRBJ2-3)
CASSATSGGFDTQYF

SEQ ID NO: 615589 - protein, 13 aa, Homo sapiens
  CDR3 for alpha chain variable domain of TCR clone 307795 (TRAV13-2, TRAJ48)
CAEMDVGNEKLTL

SEQ ID NO: 615590 - protein, 15 aa, Homo sapiens
  CDR3 for beta chain variable domain of TCR clone 307795 (TRBV7-9, TRBJ1-6)
CASSSPGRGNSPLHF

SEQ ID NO: 615591 - protein, 13 aa, Homo sapiens
  CDR3 for alpha chain variable domain of TCR clone 307796 (TRAV17, TRAJ39)
CAISTNAGNMLTF

SEQ ID NO: 615592 - protein, 15 aa, Homo sapiens
  CDR3 for beta chain variable domain of TCR clone 307796 (TRBV28, TRBJ2-5)
CASSAPRQVQETQYF

SEQ ID NO: 615593 - protein, 12 aa, Homo sapiens
  CDR3 for alpha chain variable domain of TCR clone 307797 (TRAV12-3, TRAJ17)
CAMTLTGNKLTF

SEQ ID NO: 615594 - protein, 12 aa, Homo sapiens
  CDR3 for beta chain variable domain of TCR clone 307797 (TRBV11-2, TRBJ2-7)
CASSLTTYEQYF

SEQ ID NO: 615595 - protein, 13 aa, Homo sapiens
  CDR3 for alpha chain variable domain of TCR clone 307798 (TRAV23/DV6, TRAJ34)
CAAIENNTDKHIF

SEQ ID NO: 615596 - protein, 18 aa, Homo sapiens
  CDR3 for beta chain variable domain of TCR clone 307798 (TRBV20-1, TRBJ2-6)
CSAETTPTHGSGANVLTF

SEQ ID NO: 615597 - protein, 13 aa, Homo sapiens
  CDR3 for alpha chain variable domain of TCR clone 307799 (TRAV12-1, TRAJ43)
CVVSHHNNNDMRF

SEQ ID NO: 615598 - protein, 15 aa, Homo sapiens
  CDR3 for beta chain variable domain of TCR clone 307799 (TRBV7-2, TRBJ2-6)
CASSSGHSGANVLTF

SEQ ID NO: 615599 - protein, 14 aa, Homo sapiens
  CDR3 for alpha chain variable domain of TCR clone 307800 (TRAV17, TRAJ12)
CAILPMDSSYKLIF

SEQ ID NO: 615600 - protein, 15 aa, Homo sapiens
  CDR3 for beta chain variable domain of TCR clone 307800 (TRBV5-1, TRBJ1-1)
CAISLGEGENTEAFF

SEQ ID NO: 615601 - protein, 15 aa, Homo sapiens
  CDR3 for alpha chain variable domain of TCR clone 307801 (TRAV3, TRAJ20)
CALRDIKLSDYKLSF

SEQ ID NO: 615602 - protein, 15 aa, Homo sapiens
  CDR3 for beta chain variable domain of TCR clone 307801 (TRBV7-9, TRBJ1-6)
CASSSPGCGNSPLHF

SEQ ID NO: 615603 - protein, 18 aa, Homo sapiens
  CDR3 for alpha chain variable domain of TCR clone 307802 (TRAV21, TRAJ52)
CAVRPSPAGGTSYGKLTF

SEQ ID NO: 615604 - protein, 14 aa, Homo sapiens
  CDR3 for beta chain variable domain of TCR clone 307802 (TRBV7-2, TRBJ2-7)
CASSFKTGATEQYF

SEQ ID NO: 615605 - protein, 13 aa, Homo sapiens
  CDR3 for alpha chain variable domain of TCR clone 307803 (TRAV27, TRAJ42)
CAGARGSQGNLIF

SEQ ID NO: 615606 - protein, 14 aa, Homo sapiens
  CDR3 for beta chain variable domain of TCR clone 307803 (TRBV20-1, TRBJ2-1)
CSAQIGGSANEQFF

SEQ ID NO: 615607 - protein, 13 aa, Homo sapiens
  CDR3 for alpha chain variable domain of TCR clone 307804 (TRAV12-2, TRAJ18)
CAVRGSTLGRLYF

SEQ ID NO: 615608 - protein, 20 aa, Homo sapiens
  CDR3 for beta chain variable domain of TCR clone 307804 (TRBV7-8, TRBJ2-2)
CGSSHLFPGPTIHITGELFF

SEQ ID NO: 615609 - protein, 12 aa, Homo sapiens
  CDR3 for alpha chain variable domain of TCR clone 307805 (TRAV4, TRAJ21)
CLVGDNFNKFYF

SEQ ID NO: 615610 - protein, 12 aa, Homo sapiens
  CDR3 for beta chain variable domain of TCR clone 307805 (TRBV7-9, TRBJ1-5)
CASSPQGQPQHF

SEQ ID NO: 615611 - protein, 15 aa, Homo sapiens
  CDR3 for alpha chain variable domain of TCR clone 307806 (TRAV8-3, TRAJ40)
CAAPSLGSGTYKYIF

SEQ ID NO: 615612 - protein, 16 aa, Homo sapiens
  CDR3 for beta chain variable domain of TCR clone 307806 (TRBV2, TRBJ2-1)
CASSVGGSLSYNEQFF

SEQ ID NO: 615613 - protein, 15 aa, Homo sapiens
  CDR3 for alpha chain variable domain of TCR clone 307807 (TRAV17, TRAJ57)
CATGPSQGGSEKLVF

SEQ ID NO: 615614 - protein, 15 aa, Homo sapiens
  CDR3 for beta chain variable domain of TCR clone 307807 (TRBV12-4, TRBJ1-5)
CQSRPVGGSNQPQHF

SEQ ID NO: 615615 - protein, 17 aa, Homo sapiens
  CDR3 for alpha chain variable domain of TCR clone 307808 (TRAV13-1, TRAJ52)
CAACSGAGGTSYGKVTF

SEQ ID NO: 615616 - protein, 15 aa, Homo sapiens
  CDR3 for beta chain variable domain of TCR clone 307808 (TRBV2, TRBJ2-1)
CASSELAGSYNEQFF

SEQ ID NO: 615617 - protein, 12 aa, Homo sapiens
  CDR3 for alpha chain variable domain of TCR clone 307809 (TRAV13-1, TRAJ43)
CAASIGDNDMRF

SEQ ID NO: 615618 - protein, 13 aa, Homo sapiens
  CDR3 for beta chain variable domain of TCR clone 307809 (TRBV7-3, TRBJ1-2)
CASSSKRGYGYTF

SEQ ID NO: 615619 - protein, 16 aa, Homo sapiens
  CDR3 for alpha chain variable domain of TCR clone 307810 (TRAV27, TRAJ13)
CAGAKSDSGGYQEVTF

SEQ ID NO: 615620 - protein, 12 aa, Homo sapiens
  CDR3 for beta chain variable domain of TCR clone 307810 (TRBV29-1, TRBJ2-3)
CSVTGGADTQYF

SEQ ID NO: 615621 - protein, 14 aa, Homo sapiens
  CDR3 for alpha chain variable domain of TCR clone 307811 (TRAV12-2, TRAJ13)
GAVKKTGGYQKVTF

SEQ ID NO: 615622 - protein, 12 aa, Homo sapiens
  CDR3 for beta chain variable domain of TCR clone 307811 (TRBV11-3, TRBJ2-3)
CASSLWEDTQYC

SEQ ID NO: 615623 - protein, 14 aa, Homo sapiens
  CDR3 for alpha chain variable domain of TCR clone 307812 (TRAV12-1, TRAJ54)
CVVNIYQGAQKLVF

SEQ ID NO: 615624 - protein, 14 aa, Homo sapiens
  CDR3 for beta chain variable domain of TCR clone 307812 (TRBV5-8, TRBJ1-5)
CASSGQGVDQPQHF

SEQ ID NO: 615625 - protein, 13 aa, Homo sapiens
  CDR3 for alpha chain variable domain of TCR clone 307813 (TRAV23/DV6, TRAJ22)
CAPYPGSARQLTF

SEQ ID NO: 615626 - protein, 15 aa, Homo sapiens
  CDR3 for beta chain variable domain of TCR clone 307813 (TRBV11-2, TRBJ1-6)
CASSLDPWVVSPLHF

SEQ ID NO: 615627 - protein, 16 aa, Homo sapiens
  CDR3 for alpha chain variable domain of TCR clone 307814 (TRAV23/DV6, TRAJ9)
CAASIGGNTGGFKTIF

SEQ ID NO: 615628 - protein, 14 aa, Homo sapiens
  CDR3 for beta chain variable domain of TCR clone 307814 (TRBV4-2, TRBJ2-1)
CATGLDRAYNEQFF

SEQ ID NO: 615629 - protein, 17 aa, Homo sapiens
  CDR3 for alpha chain variable domain of TCR clone 307815 (TRAV3, TRAJ6)
CAVRDGPRAGGSYIPTI

SEQ ID NO: 615630 - protein, 13 aa, Homo sapiens
  CDR3 for beta chain variable domain of TCR clone 307815 (TRBV10-2, TRBJ2-7)
CASGASGGYEQYF

SEQ ID NO: 615631 - protein, 13 aa, Homo sapiens
  CDR3 for alpha chain variable domain of TCR clone 307816 (TRAV2, TRAJ40)
CAVVTSGTYKYIF

SEQ ID NO: 615632 - protein, 14 aa, Homo sapiens
  CDR3 for beta chain variable domain of TCR clone 307816 (TRBV7-2, TRBJ2-7)
CASSLPPGQGTQYF

SEQ ID NO: 615633 - protein, 13 aa, Homo sapiens
  CDR3 for alpha chain variable domain of TCR clone 307817 (TRAV1-2, TRAJ9)
CAALNTGGFKTIF

SEQ ID NO: 615634 - protein, 16 aa, Homo sapiens
  CDR3 for beta chain variable domain of TCR clone 307817 (TRBV2, TRBJ2-3)
CQHRGAPRRWTDTQYF

SEQ ID NO: 615635 - protein, 14 aa, Homo sapiens
  CDR3 for alpha chain variable domain of TCR clone 307818 (TRAV17, TRAJ35)
CATDRPGSGNVLHC

SEQ ID NO: 615636 - protein, 16 aa, Homo sapiens
  CDR3 for beta chain variable domain of TCR clone 307818 (TRBV27, TRBJ2-5)
CASSYGPGGQKETQYF

SEQ ID NO: 615637 - protein, 13 aa, Homo sapiens
  CDR3 for alpha chain variable domain of TCR clone 307819 (TRAV36/DV7, TRAJ7)
CAGTRYGNNRRAF

SEQ ID NO: 615638 - protein, 14 aa, Homo sapiens
  CDR3 for beta chain variable domain of TCR clone 307819 (TRBV19, TRBJ2-1)
CASPTFVLSGEQFF

SEQ ID NO: 615639 - protein, 11 aa, Homo sapiens
  CDR3 for alpha chain variable domain of TCR clone 307820 (TRAV21, TRAJ34)
CAVTNTDKLIF

SEQ ID NO: 615640 - protein, 16 aa, Homo sapiens
  CDR3 for beta chain variable domain of TCR clone 307820 (TRBV10-2, TRBJ2-7)
CASSESTGASSYEQYF

SEQ ID NO: 615641 - protein, 17 aa, Homo sapiens
  CDR3 for alpha chain variable domain of TCR clone 307821 (TRAV3, TRAJ6)
CAVRDGPRAGGSYIPTF

SEQ ID NO: 615642 - protein, 16 aa, Homo sapiens
  CDR3 for beta chain variable domain of TCR clone 307821 (TRBV5-1, TRBJ2-1)
CASSLSSLRESNEQFF

SEQ ID NO: 615643 - protein, 13 aa, Homo sapiens
  CDR3 for alpha chain variable domain of TCR clone 307822 (TRAV3, TRAJ29)
CAVRDWENTPLVF

SEQ ID NO: 615644 - protein, 15 aa, Homo sapiens
  CDR3 for beta chain variable domain of TCR clone 307822 (TRBV12-4, TRBJ2-5)
CASIGRTGEGETQYF

SEQ ID NO: 615645 - protein, 14 aa, Homo sapiens
  CDR3 for alpha chain variable domain of TCR clone 307823 (TRAV1-1, TRAJ27)
CAVIYNTNAGKSTF

SEQ ID NO: 615646 - protein, 16 aa, Homo sapiens
  CDR3 for beta chain variable domain of TCR clone 307823 (TRBV5-1, TRBJ2-3)
CASSLGLAVYTDMQYF

SEQ ID NO: 615647 - protein, 14 aa, Homo sapiens
  CDR3 for alpha chain variable domain of TCR clone 307824 (TRAV1-2, TRAJ16)
CAVNRFSDGQKLLF

SEQ ID NO: 615648 - protein, 14 aa, Homo sapiens
  CDR3 for beta chain variable domain of TCR clone 307824 (TRBV7-9, TRBJ2-2)
CASSFDRGTGELFF

SEQ ID NO: 615649 - protein, 12 aa, Homo sapiens
  CDR3 for alpha chain variable domain of TCR clone 307825 (TRAV16, TRAJ10)
FSRTGGGNKLTF

SEQ ID NO: 615650 - protein, 13 aa, Homo sapiens
  CDR3 for beta chain variable domain of TCR clone 307825 (TRBV7-3, TRBJ1-1)
CASSQDRGAEAFF

SEQ ID NO: 615651 - protein, 16 aa, Homo sapiens
  CDR3 for alpha chain variable domain of TCR clone 307826 (TRAV12-3, TRAJ53)
CALSPGSGGSNYKLTL

SEQ ID NO: 615652 - protein, 11 aa, Homo sapiens
  CDR3 for beta chain variable domain of TCR clone 307826 (TRBV29-1, TRBJ2-5)
CSEDRTGTQYF

SEQ ID NO: 615653 - protein, 13 aa, Homo sapiens
  CDR3 for alpha chain variable domain of TCR clone 307827 (TRAV2, TRAJ40)
WAVVTSGTYKYIF

SEQ ID NO: 615654 - protein, 15 aa, Homo sapiens
  CDR3 for beta chain variable domain of TCR clone 307827 (TRBV11-3, TRBJ2-3)
CAGLKDGREGDTQYF

SEQ ID NO: 615655 - protein, 12 aa, Homo sapiens
  CDR3 for alpha chain variable domain of TCR clone 307828 (TRAV13-2, TRAJ23)
CAERHRGGKLIF

SEQ ID NO: 615656 - protein, 16 aa, Homo sapiens
  CDR3 for beta chain variable domain of TCR clone 307828 (TRBV7-2, TRBJ2-6)
CAILSGVACGANVLTF

SEQ ID NO: 615657 - protein, 17 aa, Homo sapiens
  CDR3 for alpha chain variable domain of TCR clone 307829 (TRAV3, TRAJ6)
CAVRDGPRAGGSYIPPF

SEQ ID NO: 615658 - protein, 17 aa, Homo sapiens
  CDR3 for beta chain variable domain of TCR clone 307829 (TRBV27, TRBJ2-6)
CASSLTGFASGANVLTF

SEQ ID NO: 615659 - protein, 14 aa, Homo sapiens
  CDR3 for alpha chain variable domain of TCR clone 307830 (TRAV30, TRAJ26)
CVTEIVSYGQNFVF

SEQ ID NO: 615660 - protein, 13 aa, Homo sapiens
  CDR3 for beta chain variable domain of TCR clone 307830 (TRBV19, TRBJ1-3)
CASRLSVGNTIYF

SEQ ID NO: 615661 - protein, 14 aa, Homo sapiens
  CDR3 for alpha chain variable domain of TCR clone 307831 (TRAV12-1, TRAJ3)
CGAARYSSASKIIF

SEQ ID NO: 615662 - protein, 15 aa, Homo sapiens
  CDR3 for beta chain variable domain of TCR clone 307831 (TRBV7-2, TRBJ2-6)
CASSREGSGAYVLPF

SEQ ID NO: 615663 - protein, 14 aa, Homo sapiens
  CDR3 for alpha chain variable domain of TCR clone 307832 (TRAV1-2, TRAJ16)
CAVNRFSDGQKLFF

SEQ ID NO: 615664 - protein, 15 aa, Homo sapiens
  CDR3 for beta chain variable domain of TCR clone 307832 (TRBV19, TRBJ1-6)
CASSTQGAVGSPLHF

SEQ ID NO: 615665 - protein, 14 aa, Homo sapiens
  CDR3 for alpha chain variable domain of TCR clone 307833 (TRAV16, TRAJ39)
CALSKNNAGNMLTF

SEQ ID NO: 615666 - protein, 14 aa, Homo sapiens
  CDR3 for beta chain variable domain of TCR clone 307833 (TRBV11-2, TRBJ2-5)
CASSRTGGIETQYF

SEQ ID NO: 615667 - protein, 15 aa, Homo sapiens
  CDR3 for alpha chain variable domain of TCR clone 307834 (TRAV8-3, TRAJ15)
CAVGAPNQAGTALIF

SEQ ID NO: 615668 - protein, 14 aa, Homo sapiens
  CDR3 for beta chain variable domain of TCR clone 307834 (TRBV7-2, TRBJ1-1)
CASSFLTGTTEAFF

SEQ ID NO: 615669 - protein, 10 aa, Homo sapiens
  CDR3 for alpha chain variable domain of TCR clone 307835 (TRAV21, TRAJ43)
CAVRIGEMRF

SEQ ID NO: 615670 - protein, 13 aa, Homo sapiens
  CDR3 for beta chain variable domain of TCR clone 307835 (TRBV20-1, TRBJ2-7)
CSAPGLADYEQYF

SEQ ID NO: 615671 - protein, 12 aa, Homo sapiens
  CDR3 for alpha chain variable domain of TCR clone 307836 (TRAV12-3, TRAJ17)
CAMTLTGDKLTF

SEQ ID NO: 615672 - protein, 15 aa, Homo sapiens
  CDR3 for beta chain variable domain of TCR clone 307836 (TRBV20-1, TRBJ2-7)
CSARDRVSGMNEQYF

SEQ ID NO: 615673 - protein, 13 aa, Homo sapiens
  CDR3 for alpha chain variable domain of TCR clone 307837 (TRAV12-3, TRAJ43)
CAMRPYNNNDMRL

SEQ ID NO: 615674 - protein, 16 aa, Homo sapiens
  CDR3 for beta chain variable domain of TCR clone 307837 (TRBV11-2, TRBJ2-1)
CASSLLLLSSYNEQFF

SEQ ID NO: 615675 - protein, 14 aa, Homo sapiens
  CDR3 for alpha chain variable domain of TCR clone 307838 (TRAV2, TRAJ22)
CAVEDSGSARQLTF

SEQ ID NO: 615676 - protein, 15 aa, Homo sapiens
  CDR3 for beta chain variable domain of TCR clone 307838 (TRBV28, TRBJ1-2)
CASSLPVGHGDGYTI

SEQ ID NO: 615677 - protein, 13 aa, Homo sapiens
  CDR3 for alpha chain variable domain of TCR clone 307839 (TRAV21, TRAJ20)
CAVGLRVDYKLSF

SEQ ID NO: 615678 - protein, 17 aa, Homo sapiens
  CDR3 for beta chain variable domain of TCR clone 307839 (TRBV28, TRBJ2-7)
CASSPLPAGGKSYEQYF

SEQ ID NO: 615679 - protein, 14 aa, Homo sapiens
  CDR3 for alpha chain variable domain of TCR clone 307840 (TRAV13-1, TRAJ48)
CAASTDFGNEKLTF

SEQ ID NO: 615680 - protein, 14 aa, Homo sapiens
  CDR3 for beta chain variable domain of TCR clone 307840 (TRBV7-2, TRBJ2-2)
CASSADGHTGELFF

SEQ ID NO: 615681 - protein, 13 aa, Homo sapiens
  CDR3 for alpha chain variable domain of TCR clone 307841 (TRAV13-1, TRAJ8)
CAASIRGFQKLVF

SEQ ID NO: 615682 - protein, 14 aa, Homo sapiens
  CDR3 for beta chain variable domain of TCR clone 307841 (TRBV7-2, TRBJ2-1)
CARSLVQGRNEQFF

SEQ ID NO: 615683 - protein, 15 aa, Homo sapiens
  CDR3 for alpha chain variable domain of TCR clone 307842 (TRAV2, TRAJ15)
CAVEVRGKAGTALIF

SEQ ID NO: 615684 - protein, 13 aa, Homo sapiens
  CDR3 for beta chain variable domain of TCR clone 307842 (TRBV10-2, TRBJ2-7)
CASGASGGYEQYF

SEQ ID NO: 615685 - protein, 12 aa, Homo sapiens
  CDR3 for alpha chain variable domain of TCR clone 307843 (TRAV8-3, TRAJ20)
CAVGANDYKLSF

SEQ ID NO: 615686 - protein, 17 aa, Homo sapiens
  CDR3 for beta chain variable domain of TCR clone 307843 (TRBV14, TRBJ2-1)
CASSQDRRDSIYNEQFF

SEQ ID NO: 615687 - protein, 12 aa, Homo sapiens
  CDR3 for alpha chain variable domain of TCR clone 307844 (TRAV12-2, TRAJ4)
GWPEGGYNKLIF

SEQ ID NO: 615688 - protein, 15 aa, Homo sapiens
  CDR3 for beta chain variable domain of TCR clone 307844 (TRBV4-1, TRBJ2-7)
CASSQNTGRLYEQYF

SEQ ID NO: 615689 - protein, 14 aa, Homo sapiens
  CDR3 for alpha chain variable domain of TCR clone 307845 (TRAV29/DV5, TRAJ36)
CAARRKTGANNLFF

SEQ ID NO: 615690 - protein, 13 aa, Homo sapiens
  CDR3 for beta chain variable domain of TCR clone 307845 (TRBV12-5, TRBJ2-5)
VLVVHGHIKRQYF

SEQ ID NO: 615691 - protein, 11 aa, Homo sapiens
  CDR3 for alpha chain variable domain of TCR clone 307846 (TRAV12-3, TRAJ49)
CAANTGNQFSF

SEQ ID NO: 615692 - protein, 12 aa, Homo sapiens
  CDR3 for beta chain variable domain of TCR clone 307846 (TRBV6-3, TRBJ2-7)
CASSEPGFEQYF

SEQ ID NO: 615693 - protein, 13 aa, Homo sapiens
  CDR3 for alpha chain variable domain of TCR clone 307847 (TRAV8-4, TRAJ9)
CAVSGAGGFKTIF

SEQ ID NO: 615694 - protein, 16 aa, Homo sapiens
  CDR3 for beta chain variable domain of TCR clone 307847 (TRBV5-1, TRBJ2-7)
CASSVTSRSSTYEQYF

SEQ ID NO: 615695 - protein, 13 aa, Homo sapiens
  CDR3 for alpha chain variable domain of TCR clone 307848 (TRAV8-4, TRAJ29)
CAVSATGNTPLVF

SEQ ID NO: 615696 - protein, 15 aa, Homo sapiens
  CDR3 for beta chain variable domain of TCR clone 307848 (TRBV27, TRBJ1-4)
CASSNRRGFNEKLFF

SEQ ID NO: 615697 - protein, 16 aa, Homo sapiens
  CDR3 for alpha chain variable domain of TCR clone 307849 (TRAV38-1, TRAJ56)
CAFMKRQTGANSKLTF

SEQ ID NO: 615698 - protein, 12 aa, Homo sapiens
  CDR3 for beta chain variable domain of TCR clone 307849 (TRBV5-1, TRBJ1-2)
CASSQDTYGYTF

SEQ ID NO: 615699 - protein, 11 aa, Homo sapiens
  CDR3 for alpha chain variable domain of TCR clone 307850 (TRAV16, TRAJ20)
CALSEGSKAAL

SEQ ID NO: 615700 - protein, 13 aa, Homo sapiens
  CDR3 for beta chain variable domain of TCR clone 307850 (TRBV7-3, TRBJ2-1)
CASSLDSYNEQFF

SEQ ID NO: 615701 - protein, 14 aa, Homo sapiens
  CDR3 for alpha chain variable domain of TCR clone 307851 (TRAV3, TRAJ22)
CAVRDYGSARQLTF

SEQ ID NO: 615702 - protein, 15 aa, Homo sapiens
  CDR3 for beta chain variable domain of TCR clone 307851 (TRBV27, TRBJ1-6)
CASSFDRGLGSPLHF

SEQ ID NO: 615703 - protein, 13 aa, Homo sapiens
  CDR3 for alpha chain variable domain of TCR clone 307852 (TRAV12-2, TRAJ6)
CAARGGGSYIPTF

SEQ ID NO: 615704 - protein, 15 aa, Homo sapiens
  CDR3 for beta chain variable domain of TCR clone 307852 (TRBV20-1, TRBJ2-7)
CSARDRVSGMDEQYF

SEQ ID NO: 615705 - protein, 12 aa, Homo sapiens
  CDR3 for alpha chain variable domain of TCR clone 307853 (TRAV21, TRAJ31)
CAVGGNNARLMF

SEQ ID NO: 615706 - protein, 14 aa, Homo sapiens
  CDR3 for beta chain variable domain of TCR clone 307853 (TRBV6-1, TRBJ1-3)
CASVQGGGGNTIYF

SEQ ID NO: 615707 - protein, 15 aa, Homo sapiens
  CDR3 for alpha chain variable domain of TCR clone 307854 (TRAV2, TRAJ36)
CAVQGAQTGANNLFF

SEQ ID NO: 615708 - protein, 13 aa, Homo sapiens
  CDR3 for beta chain variable domain of TCR clone 307854 (TRBV18, TRBJ2-2)
CASSPTRGGELFF

SEQ ID NO: 615709 - protein, 13 aa, Homo sapiens
  CDR3 for alpha chain variable domain of TCR clone 307855 (TRAV2, TRAJ40)
CAVVASGTYKYIF

SEQ ID NO: 615710 - protein, 17 aa, Homo sapiens
  CDR3 for beta chain variable domain of TCR clone 307855 (TRBV7-3, TRBJ2-3)
CASSLMKRMRGADTQYF

SEQ ID NO: 615711 - protein, 15 aa, Homo sapiens
  CDR3 for alpha chain variable domain of TCR clone 307856 (TRAV2, TRAJ9)
CAVEDRGTGGFKTIF

SEQ ID NO: 615712 - protein, 14 aa, Homo sapiens
  CDR3 for beta chain variable domain of TCR clone 307856 (TRBV7-6, TRBJ2-3)
CASSVAGGTDTQYF

SEQ ID NO: 615713 - protein, 17 aa, Homo sapiens
  CDR3 for alpha chain variable domain of TCR clone 307857 (TRAV13-1, TRAJ53)
CAASWKSSGGSNYKMTF

SEQ ID NO: 615714 - protein, 19 aa, Homo sapiens
  CDR3 for beta chain variable domain of TCR clone 307857 (TRBV7-9, TRBJ2-1)
CASSHNRGALLRSYNEQFF

SEQ ID NO: 615715 - protein, 14 aa, Homo sapiens
  CDR3 for alpha chain variable domain of TCR clone 307858 (TRAV1-2, TRAJ16)
CAVNRFSDGQKLLF

SEQ ID NO: 615716 - protein, 13 aa, Homo sapiens
  CDR3 for beta chain variable domain of TCR clone 307858 (TRBV7-3, TRBJ1-1)
CASSQDWGDESFF

SEQ ID NO: 615717 - protein, 16 aa, Homo sapiens
  CDR3 for alpha chain variable domain of TCR clone 307859 (TRAV12-2, TRAJ32)
CAVNLGQGGATNKLIV

SEQ ID NO: 615718 - protein, 15 aa, Homo sapiens
  CDR3 for beta chain variable domain of TCR clone 307859 (TRBV20-1, TRBJ2-7)
CSARGPLAGGREQYF

SEQ ID NO: 615719 - protein, 18 aa, Homo sapiens
  CDR3 for alpha chain variable domain of TCR clone 307860 (TRAV16, TRAJ45)
CAQASYPSSGGGADGLAF

SEQ ID NO: 615720 - protein, 12 aa, Homo sapiens
  CDR3 for beta chain variable domain of TCR clone 307860 (TRBV11-3, TRBJ2-4)
CASSAGRVIQYF

SEQ ID NO: 615721 - protein, 14 aa, Homo sapiens
  CDR3 for alpha chain variable domain of TCR clone 307861 (TRAV35, TRAJ33)
CAGSSKDSNYQLIW

SEQ ID NO: 615722 - protein, 13 aa, Homo sapiens
  CDR3 for beta chain variable domain of TCR clone 307861 (TRBV7-2, TRBJ2-7)
CASSAPSGSEQYF

SEQ ID NO: 615723 - protein, 15 aa, Homo sapiens
  CDR3 for alpha chain variable domain of TCR clone 307862 (TRAV12-2, TRAJ50)
CAVNGLETSYDKVIF

SEQ ID NO: 615724 - protein, 14 aa, Homo sapiens
  CDR3 for beta chain variable domain of TCR clone 307862 (TRBV7-2, TRBJ1-1)
CASSFLTGTSEAFF

SEQ ID NO: 615725 - protein, 13 aa, Homo sapiens
  CDR3 for alpha chain variable domain of TCR clone 307863 (TRAV3, TRAJ20)
CAVRSLNDYKLSF

SEQ ID NO: 615726 - protein, 18 aa, Homo sapiens
  CDR3 for beta chain variable domain of TCR clone 307863 (TRBV7-9, TRBJ2-3)
CARSPRGTSGTGTDTQYF

SEQ ID NO: 615727 - protein, 14 aa, Homo sapiens
  CDR3 for alpha chain variable domain of TCR clone 307864 (TRAV12-2, TRAJ13)
CAVTKTGGCQKVTF

SEQ ID NO: 615728 - protein, 12 aa, Homo sapiens
  CDR3 for beta chain variable domain of TCR clone 307864 (TRBV6-3, TRBJ2-7)
CASSLTPYEQYF

SEQ ID NO: 615729 - protein, 11 aa, Homo sapiens
  CDR3 for alpha chain variable domain of TCR clone 307865 (TRAV25, TRAJ41)
CARNSGYALNF

SEQ ID NO: 615730 - protein, 15 aa, Homo sapiens
  CDR3 for beta chain variable domain of TCR clone 307865 (TRBV28, TRBJ2-4)
CAAGSGTLLMGIQYF

SEQ ID NO: 615731 - protein, 15 aa, Homo sapiens
  CDR3 for alpha chain variable domain of TCR clone 307866 (TRAV12-2, TRAJ20)
CAVKGGFGAGTTVTV

SEQ ID NO: 615732 - protein, 13 aa, Homo sapiens
  CDR3 for beta chain variable domain of TCR clone 307866 (TRBV12-4, TRBJ2-7)
CAISPGQLYEQYF

SEQ ID NO: 615733 - protein, 16 aa, Homo sapiens
  CDR3 for alpha chain variable domain of TCR clone 307867 (TRAV23/DV6, TRAJ9)
CAASIGGNTGGLKTIF

SEQ ID NO: 615734 - protein, 12 aa, Homo sapiens
  CDR3 for beta chain variable domain of TCR clone 307867 (TRBV11-2, TRBJ2-1)
CASSVQREEQFF

SEQ ID NO: 615735 - protein, 12 aa, Homo sapiens
  CDR3 for alpha chain variable domain of TCR clone 307868 (TRAV12-3, TRAJ17)
CAMKLTGNKQTF

SEQ ID NO: 615736 - protein, 15 aa, Homo sapiens
  CDR3 for beta chain variable domain of TCR clone 307868 (TRBV20-1, TRBJ2-7)
CSARDRVSGMDEQYF

SEQ ID NO: 615737 - protein, 13 aa, Homo sapiens
  CDR3 for alpha chain variable domain of TCR clone 307869 (TRAV14/DV4, TRAJ20)
CAMRESRDYKLSF

SEQ ID NO: 615738 - protein, 15 aa, Homo sapiens
  CDR3 for beta chain variable domain of TCR clone 307869 (TRBV7-3, TRBJ2-1)
CASSLSSGSFDEQFF

SEQ ID NO: 615739 - protein, 13 aa, Homo sapiens
  CDR3 for alpha chain variable domain of TCR clone 307870 (TRAV21, TRAJ20)
CAVGLRVDYKLSF

SEQ ID NO: 615740 - protein, 14 aa, Homo sapiens
  CDR3 for beta chain variable domain of TCR clone 307870 (TRBV2, TRBJ2-1)
CASRTGSSYNEQFF

SEQ ID NO: 615741 - protein, 12 aa, Homo sapiens
  CDR3 for alpha chain variable domain of TCR clone 307871 (TRAV35, TRAJ34)
CWAFYNTDKLIF

SEQ ID NO: 615742 - protein, 17 aa, Homo sapiens
  CDR3 for beta chain variable domain of TCR clone 307871 (TRBV7-2, TRBJ2-2)
CASSPRGAGEGTGELFF

SEQ ID NO: 615743 - protein, 14 aa, Homo sapiens
  CDR3 for alpha chain variable domain of TCR clone 307872 (TRAV12-2, TRAJ13)
CAVKMTGGYQKVTF

SEQ ID NO: 615744 - protein, 20 aa, Homo sapiens
  CDR3 for beta chain variable domain of TCR clone 307872 (TRBV19, TRBJ2-1)
CASSISRTVTSTRLNNEQFF

SEQ ID NO: 615745 - protein, 14 aa, Homo sapiens
  CDR3 for alpha chain variable domain of TCR clone 307873 (TRAV1-2, TRAJ8)
CAVREDTGFQKLVF

SEQ ID NO: 615746 - protein, 15 aa, Homo sapiens
  CDR3 for beta chain variable domain of TCR clone 307873 (TRBV2, TRBJ2-1)
CASSEARSAYNEQFF

SEQ ID NO: 615747 - protein, 16 aa, Homo sapiens
  CDR3 for alpha chain variable domain of TCR clone 307874 (TRAV30, TRAJ24)
CGTEIVDADSWGKFQF

SEQ ID NO: 615748 - protein, 12 aa, Homo sapiens
  CDR3 for beta chain variable domain of TCR clone 307874 (TRBV7-8, TRBJ2-1)
CASSALAGRVFF

SEQ ID NO: 615749 - protein, 15 aa, Homo sapiens
  CDR3 for alpha chain variable domain of TCR clone 307875 (TRAV26-1, TRAJ42)
CIVRVKGGSQGNLIF

SEQ ID NO: 615750 - protein, 15 aa, Homo sapiens
  CDR3 for beta chain variable domain of TCR clone 307875 (TRBV7-2, TRBJ2-1)
CASTHGTGIYNEQFF

SEQ ID NO: 615751 - protein, 13 aa, Homo sapiens
  CDR3 for alpha chain variable domain of TCR clone 307876 (TRAV2, TRAJ12)
CAVGADSSYKLIF

SEQ ID NO: 615752 - protein, 11 aa, Homo sapiens
  CDR3 for beta chain variable domain of TCR clone 307876 (TRBV7-8, TRBJ2-7)
CASSLSLEQYF

SEQ ID NO: 615753 - protein, 18 aa, Homo sapiens
  CDR3 for alpha chain variable domain of TCR clone 307877 (TRAV21, TRAJ52)
CAASPSPAGGTSYGKLTF

SEQ ID NO: 615754 - protein, 17 aa, Homo sapiens
  CDR3 for beta chain variable domain of TCR clone 307877 (TRBV13, TRBJ2-3)
CASSLSRVAGGRNTQYF

SEQ ID NO: 615755 - protein, 12 aa, Homo sapiens
  CDR3 for alpha chain variable domain of TCR clone 307878 (TRAV12-3, TRAJ48)
CAMRIGNEKLTF

SEQ ID NO: 615756 - protein, 12 aa, Homo sapiens
  CDR3 for beta chain variable domain of TCR clone 307878 (TRBV13, TRBJ2-7)
CASSVQAYEQYF

SEQ ID NO: 615757 - protein, 12 aa, Homo sapiens
  CDR3 for alpha chain variable domain of TCR clone 307879 (TRAV38-1, TRAJ47)
CAFETYGNKLVF

SEQ ID NO: 615758 - protein, 13 aa, Homo sapiens
  CDR3 for beta chain variable domain of TCR clone 307879 (TRBV29-1, TRBJ2-2)
CSTTGVNTGELFF

SEQ ID NO: 615759 - protein, 11 aa, Homo sapiens
  CDR3 for alpha chain variable domain of TCR clone 307880 (TRAV2, TRAJ13)
CASGGYQKVTF

SEQ ID NO: 615760 - protein, 15 aa, Homo sapiens
  CDR3 for beta chain variable domain of TCR clone 307880 (TRBV20-1, TRBJ2-5)
CSATPLTGDQETQYF

SEQ ID NO: 615761 - protein, 16 aa, Homo sapiens
  CDR3 for alpha chain variable domain of TCR clone 307881 (TRAV30, TRAJ24)
CGTEIVDADSWGKFQF

SEQ ID NO: 615762 - protein, 14 aa, Homo sapiens
  CDR3 for beta chain variable domain of TCR clone 307881 (TRBV7-8, TRBJ2-3)
CASSLGAGTDTKYF

SEQ ID NO: 615763 - protein, 12 aa, Homo sapiens
  CDR3 for alpha chain variable domain of TCR clone 307882 (TRAV26-1, TRAJ26)
CVVFIYGQNFVF

SEQ ID NO: 615764 - protein, 13 aa, Homo sapiens
  CDR3 for beta chain variable domain of TCR clone 307882 (TRBV27, TRBJ1-1)
CASSLSIGAEAFF

SEQ ID NO: 615765 - protein, 12 aa, Homo sapiens
  CDR3 for alpha chain variable domain of TCR clone 307883 (TRAV1-1, TRAJ8)
CAGCTGFQQLVF

SEQ ID NO: 615766 - protein, 13 aa, Homo sapiens
  CDR3 for beta chain variable domain of TCR clone 307883 (TRBV7-3, TRBJ1-1)
CASSQDWGAEAFF

SEQ ID NO: 615767 - protein, 16 aa, Homo sapiens
  CDR3 for alpha chain variable domain of TCR clone 307884 (TRAV3, TRAJ21)
CAVRDIERGNLNKFYF

SEQ ID NO: 615768 - protein, 13 aa, Homo sapiens
  CDR3 for beta chain variable domain of TCR clone 307884 (TRBV27, TRBJ2-7)
CASSVTTGYEQYS

SEQ ID NO: 615769 - protein, 14 aa, Homo sapiens
  CDR3 for alpha chain variable domain of TCR clone 307885 (TRAV12-2, TRAJ13)
CAVNPSGGYQKVTF

SEQ ID NO: 615770 - protein, 13 aa, Homo sapiens
  CDR3 for beta chain variable domain of TCR clone 307885 (TRBV11-3, TRBJ1-1)
CASTGSLNTEAFF

SEQ ID NO: 615771 - protein, 12 aa, Homo sapiens
  CDR3 for alpha chain variable domain of TCR clone 307886 (TRAV1-2, TRAJ42)
CVAGGSQGNLIF

SEQ ID NO: 615772 - protein, 14 aa, Homo sapiens
  CDR3 for beta chain variable domain of TCR clone 307886 (TRBV13, TRBJ2-5)
CASSLERVGETQYF

SEQ ID NO: 615773 - protein, 14 aa, Homo sapiens
  CDR3 for alpha chain variable domain of TCR clone 307887 (TRAV12-3, TRAJ10)
SHLPLTGGGNKLTF

SEQ ID NO: 615774 - protein, 13 aa, Homo sapiens
  CDR3 for beta chain variable domain of TCR clone 307887 (TRBV7-6, TRBJ2-3)
CASSLRSDNTQYF

SEQ ID NO: 615775 - protein, 12 aa, Homo sapiens
  CDR3 for alpha chain variable domain of TCR clone 307888 (TRAV21, TRAJ13)
PGPSGGYQKVTF

SEQ ID NO: 615776 - protein, 14 aa, Homo sapiens
  CDR3 for beta chain variable domain of TCR clone 307888 (TRBV20-1, TRBJ2-7)
CSAKDRKGAYEQYV

SEQ ID NO: 615777 - protein, 22 aa, Homo sapiens
  CDR3 for alpha chain variable domain of TCR clone 307889 (TRAV13-1, TRAJ37)
CAARIGGLWQHRQTNLWARDNF

SEQ ID NO: 615778 - protein, 15 aa, Homo sapiens
  CDR3 for beta chain variable domain of TCR clone 307889 (TRBV10-3, TRBJ2-3)
CAISLTSGGTDTQYF

SEQ ID NO: 615779 - protein, 12 aa, Homo sapiens
  CDR3 for alpha chain variable domain of TCR clone 307890 (TRAV3, TRAJ43)
CALRDPNNDMRF

SEQ ID NO: 615780 - protein, 17 aa, Homo sapiens
  CDR3 for beta chain variable domain of TCR clone 307890 (TRBV7-8, TRBJ2-6)
CASSAGTGGAGANVLTF

SEQ ID NO: 615781 - protein, 14 aa, Homo sapiens
  CDR3 for alpha chain variable domain of TCR clone 307891 (TRAV12-2, TRAJ6)
CASKWGGGSYTPTF

SEQ ID NO: 615782 - protein, 13 aa, Homo sapiens
  CDR3 for beta chain variable domain of TCR clone 307891 (TRBV2, TRBJ1-1)
CASSEGGNTEAFF

SEQ ID NO: 615783 - protein, 14 aa, Homo sapiens
  CDR3 for alpha chain variable domain of TCR clone 307892 (TRAV3, TRAJ24)
CAVILTDSWGKLQF

SEQ ID NO: 615784 - protein, 12 aa, Homo sapiens
  CDR3 for beta chain variable domain of TCR clone 307892 (TRBV12-5, TRBJ2-5)
CASGQGVETQYF

SEQ ID NO: 615785 - protein, 14 aa, Homo sapiens
  CDR3 for alpha chain variable domain of TCR clone 307893 (TRAV12-2, TRAJ40)
CAVKIPSGTYKYIF

SEQ ID NO: 615786 - protein, 12 aa, Homo sapiens
  CDR3 for beta chain variable domain of TCR clone 307893 (TRBV7-3, TRBJ2-1)
CASSLGFNEQFF

SEQ ID NO: 615787 - protein, 14 aa, Homo sapiens
  CDR3 for alpha chain variable domain of TCR clone 307894 (TRAV12-2, TRAJ17)
CAVLFKAAGNKLTF

SEQ ID NO: 615788 - protein, 13 aa, Homo sapiens
  CDR3 for beta chain variable domain of TCR clone 307894 (TRBV28, TRBJ2-2)
CASIRESTGELFF

SEQ ID NO: 615789 - protein, 18 aa, Homo sapiens
  CDR3 for alpha chain variable domain of TCR clone 307895 (TRAV21, TRAJ52)
CAVRPFPAGGTSSGKLTF

SEQ ID NO: 615790 - protein, 17 aa, Homo sapiens
  CDR3 for beta chain variable domain of TCR clone 307895 (TRBV13, TRBJ2-3)
CASSLSRVAGGRNTQYF

SEQ ID NO: 615791 - protein, 14 aa, Homo sapiens
  CDR3 for alpha chain variable domain of TCR clone 307896 (TRAV1-2, TRAJ8)
CAVREDTGFQKLVF

SEQ ID NO: 615792 - protein, 14 aa, Homo sapiens
  CDR3 for beta chain variable domain of TCR clone 307896 (TRBV5-4, TRBJ1-1)
CASSLDRRRDEAFF

SEQ ID NO: 615793 - protein, 17 aa, Homo sapiens
  CDR3 for alpha chain variable domain of TCR clone 307897 (TRAV13-1, TRAJ52)
CAASSGAGGTSYGKLTF

SEQ ID NO: 615794 - protein, 15 aa, Homo sapiens
  CDR3 for beta chain variable domain of TCR clone 307897 (TRBV2, TRBJ2-1)
CASSELTGSYNEQFF

SEQ ID NO: 615795 - protein, 14 aa, Homo sapiens
  CDR3 for alpha chain variable domain of TCR clone 307898 (TRAV12-2, TRAJ13)
CAVKKTGGYQKVTS

SEQ ID NO: 615796 - protein, 16 aa, Homo sapiens
  CDR3 for beta chain variable domain of TCR clone 307898 (TRBV2, TRBJ2-1)
CASRSPAGGKYNEQFF

SEQ ID NO: 615797 - protein, 13 aa, Homo sapiens
  CDR3 for alpha chain variable domain of TCR clone 307899 (TRAV12-3, TRAJ13)
CSMSSGGYQKVTF

SEQ ID NO: 615798 - protein, 14 aa, Homo sapiens
  CDR3 for beta chain variable domain of TCR clone 307899 (TRBV2, TRBJ2-1)
SASRTGSSYNEQFF

SEQ ID NO: 615799 - protein, 12 aa, Homo sapiens
  CDR3 for alpha chain variable domain of TCR clone 307900 (TRAV12-2, TRAJ4)
GWPEGGYNKLIF

SEQ ID NO: 615800 - protein, 14 aa, Homo sapiens
  CDR3 for beta chain variable domain of TCR clone 307900 (TRBV18, TRBJ1-2)
CASSPDRVVYGDTF

SEQ ID NO: 615801 - protein, 14 aa, Homo sapiens
  CDR3 for alpha chain variable domain of TCR clone 307901 (TRAV2, TRAJ9)
CAVEDRSGGFKTIF

SEQ ID NO: 615802 - protein, 15 aa, Homo sapiens
  CDR3 for beta chain variable domain of TCR clone 307901 (TRBV5-7, TRBJ1-5)
CASSYGKSWDQPQHF

SEQ ID NO: 615803 - protein, 15 aa, Homo sapiens
  CDR3 for alpha chain variable domain of TCR clone 307902 (TRAV2, TRAJ15)
CAAEDRGQAGTALIF

SEQ ID NO: 615804 - protein, 16 aa, Homo sapiens
  CDR3 for beta chain variable domain of TCR clone 307902 (TRBV2, TRBJ2-3)
CASSTSVEGVTDTQYF

SEQ ID NO: 615805 - protein, 15 aa, Homo sapiens
  CDR3 for alpha chain variable domain of TCR clone 307903 (TRAV20, TRAJ43)
CAVQAGKSSNNDMRF

SEQ ID NO: 615806 - protein, 14 aa, Homo sapiens
  CDR3 for beta chain variable domain of TCR clone 307903 (TRBV5-1, TRBJ2-7)
CASSRGESLYEQYF

SEQ ID NO: 615807 - protein, 15 aa, Homo sapiens
  CDR3 for alpha chain variable domain of TCR clone 307904 (TRAV3, TRAJ22)
CAVRDRGGSARQLTF

SEQ ID NO: 615808 - protein, 14 aa, Homo sapiens
  CDR3 for beta chain variable domain of TCR clone 307904 (TRBV13, TRBJ2-5)
CASSLGTAQETQYF

SEQ ID NO: 615809 - protein, 11 aa, Homo sapiens
  CDR3 for alpha chain variable domain of TCR clone 307905 (TRAV29/DV5, TRAJ49)
CAALPGNQFYF

SEQ ID NO: 615810 - protein, 17 aa, Homo sapiens
  CDR3 for beta chain variable domain of TCR clone 307905 (TRBV4-2, TRBJ1-1)
CASTQFGGGSGNTEAFF

SEQ ID NO: 615811 - protein, 16 aa, Homo sapiens
  CDR3 for alpha chain variable domain of TCR clone 307906 (TRAV12-3, TRAJ28)
CAMRANSGAGSYQLTF

SEQ ID NO: 615812 - protein, 16 aa, Homo sapiens
  CDR3 for beta chain variable domain of TCR clone 307906 (TRBV7-2, TRBJ1-3)
CASSSLEASSGNTIYF

SEQ ID NO: 615813 - protein, 14 aa, Homo sapiens
  CDR3 for alpha chain variable domain of TCR clone 307907 (TRAV12-1, TRAJ9)
CVVNRGTGGFKAIF

SEQ ID NO: 615814 - protein, 13 aa, Homo sapiens
  CDR3 for beta chain variable domain of TCR clone 307907 (TRBV12-5, TRBJ2-3)
CASGDRQSDTQYF

SEQ ID NO: 615815 - protein, 12 aa, Homo sapiens
  CDR3 for alpha chain variable domain of TCR clone 307908 (TRAV21, TRAJ8)
CAVTTGFQKLVF

SEQ ID NO: 615816 - protein, 13 aa, Homo sapiens
  CDR3 for beta chain variable domain of TCR clone 307908 (TRBV6-3, TRBJ2-1)
CASSYDNYNEQFF

SEQ ID NO: 615817 - protein, 11 aa, Homo sapiens
  CDR3 for alpha chain variable domain of TCR clone 307909 (TRAV35, TRAJ30)
CAPGGGDKIIF

SEQ ID NO: 615818 - protein, 16 aa, Homo sapiens
  CDR3 for beta chain variable domain of TCR clone 307909 (TRBV2, TRBJ2-3)
CASSTSVEGVTDTQYF

SEQ ID NO: 615819 - protein, 12 aa, Homo sapiens
  CDR3 for alpha chain variable domain of TCR clone 307910 (TRAV21, TRAJ56)
CAVGVNRSKLTF

SEQ ID NO: 615820 - protein, 14 aa, Homo sapiens
  CDR3 for beta chain variable domain of TCR clone 307910 (TRBV10-2, TRBJ1-5)
CASSSTGRNQPQHF

SEQ ID NO: 615821 - protein, 14 aa, Homo sapiens
  CDR3 for alpha chain variable domain of TCR clone 307911 (TRAV12-2, TRAJ13)
CAVKKTGGYQKVTF

SEQ ID NO: 615822 - protein, 18 aa, Homo sapiens
  CDR3 for beta chain variable domain of TCR clone 307911 (TRBV12-5, TRBJ2-5)
CIFVLVVRTSGNQETQYF

SEQ ID NO: 615823 - protein, 13 aa, Homo sapiens
  CDR3 for alpha chain variable domain of TCR clone 307912 (TRAV20, TRAJ9)
CAALNTGGFKTIF

SEQ ID NO: 615824 - protein, 14 aa, Homo sapiens
  CDR3 for beta chain variable domain of TCR clone 307912 (TRBV13, TRBJ2-3)
CASSSGSPTDTQYF

SEQ ID NO: 615825 - protein, 13 aa, Homo sapiens
  CDR3 for alpha chain variable domain of TCR clone 307913 (TRAV1-2, TRAJ9)
CAVLNTGGFKTIF

SEQ ID NO: 615826 - protein, 13 aa, Homo sapiens
  CDR3 for beta chain variable domain of TCR clone 307913 (TRBV20-1, TRBJ1-1)
CSAPLGGGTEAFF

SEQ ID NO: 615827 - protein, 16 aa, Homo sapiens
  CDR3 for alpha chain variable domain of TCR clone 307914 (TRAV14/DV4, TRAJ53)
CAMREGGGGSNYKLTF

SEQ ID NO: 615828 - protein, 12 aa, Homo sapiens
  CDR3 for beta chain variable domain of TCR clone 307914 (TRBV2, TRBJ2-5)
CASKEYGETQYF

SEQ ID NO: 615829 - protein, 13 aa, Homo sapiens
  CDR3 for alpha chain variable domain of TCR clone 307915 (TRAV12-3, TRAJ13)
CAMSSGGYQTVTF

SEQ ID NO: 615830 - protein, 17 aa, Homo sapiens
  CDR3 for beta chain variable domain of TCR clone 307915 (TRBV4-1, TRBJ1-4)
CASSQEGPRGVEEKLSF

SEQ ID NO: 615831 - protein, 11 aa, Homo sapiens
  CDR3 for alpha chain variable domain of TCR clone 307916 (TRAV23/DV6, TRAJ58)
CAARLLRGETS

SEQ ID NO: 615832 - protein, 12 aa, Homo sapiens
  CDR3 for beta chain variable domain of TCR clone 307916 (TRBV7-9, TRBJ1-2)
CSSLKQNYGYTF

SEQ ID NO: 615833 - protein, 10 aa, Homo sapiens
  CDR3 for alpha chain variable domain of TCR clone 307917 (TRAV20, TRAJ40)
CCGGTYKYIF

SEQ ID NO: 615834 - protein, 15 aa, Homo sapiens
  CDR3 for beta chain variable domain of TCR clone 307917 (TRBV6-3, TRBJ2-2)
CASSFLATLTGELFF

SEQ ID NO: 615835 - protein, 14 aa, Homo sapiens
  CDR3 for alpha chain variable domain of TCR clone 307918 (TRAV13-2, TRAJ16)
CAENNWEDGQKLRF

SEQ ID NO: 615836 - protein, 12 aa, Homo sapiens
  CDR3 for beta chain variable domain of TCR clone 307918 (TRBV11-2, TRBJ2-1)
CASSPGNNEQFF

SEQ ID NO: 615837 - protein, 14 aa, Homo sapiens
  CDR3 for alpha chain variable domain of TCR clone 307919 (TRAV8-1, TRAJ5)
CAVSMDTGRRALTF

SEQ ID NO: 615838 - protein, 16 aa, Homo sapiens
  CDR3 for beta chain variable domain of TCR clone 307919 (TRBV20-1, TRBJ1-2)
CSASMGQGVANYGYTF

SEQ ID NO: 615839 - protein, 14 aa, Homo sapiens
  CDR3 for alpha chain variable domain of TCR clone 307920 (TRAV3, TRAJ27)
CAVRDDTNAGKSTF

SEQ ID NO: 615840 - protein, 16 aa, Homo sapiens
  CDR3 for beta chain variable domain of TCR clone 307920 (TRBV11-2, TRBJ2-7)
CASSLAPTGVNYEQYF

SEQ ID NO: 615841 - protein, 14 aa, Homo sapiens
  CDR3 for alpha chain variable domain of TCR clone 307921 (TRAV1-2, TRAJ8)
CAVREDTGFQKLGF

SEQ ID NO: 615842 - protein, 16 aa, Homo sapiens
  CDR3 for beta chain variable domain of TCR clone 307921 (TRBV20-1, TRBJ2-4)
CSARAILAGQGDIQYF

SEQ ID NO: 615843 - protein, 14 aa, Homo sapiens
  CDR3 for alpha chain variable domain of TCR clone 307922 (TRAV4, TRAJ23)
CLVGSYNQGGKLIF

SEQ ID NO: 615844 - protein, 18 aa, Homo sapiens
  CDR3 for beta chain variable domain of TCR clone 307922 (TRBV6-5, TRBJ2-6)
CASRTPGQGRTGANVLTF

SEQ ID NO: 615845 - protein, 16 aa, Homo sapiens
  CDR3 for alpha chain variable domain of TCR clone 307923 (TRAV30, TRAJ24)
CGTEIVDAESWGTFQF

SEQ ID NO: 615846 - protein, 14 aa, Homo sapiens
  CDR3 for beta chain variable domain of TCR clone 307923 (TRBV12-5, TRBJ2-5)
CASGSRTHQETQYF

SEQ ID NO: 615847 - protein, 13 aa, Homo sapiens
  CDR3 for alpha chain variable domain of TCR clone 307924 (TRAV2, TRAJ24)
CDLQLTAGGNSSL

SEQ ID NO: 615848 - protein, 15 aa, Homo sapiens
  CDR3 for beta chain variable domain of TCR clone 307924 (TRBV7-9, TRBJ1-6)
CASSSPGRGNSPLHF

SEQ ID NO: 615849 - protein, 11 aa, Homo sapiens
  CDR3 for alpha chain variable domain of TCR clone 307925 (TRAV2, TRAJ33)
CAVESNYQLIW

SEQ ID NO: 615850 - protein, 14 aa, Homo sapiens
  CDR3 for beta chain variable domain of TCR clone 307925 (TRBV19, TRBJ2-1)
CASGRAGPGNEQFC

SEQ ID NO: 615851 - protein, 12 aa, Homo sapiens
  CDR3 for alpha chain variable domain of TCR clone 307926 (TRAV12-3, TRAJ17)
CAMTLTGNKLTF

SEQ ID NO: 615852 - protein, 14 aa, Homo sapiens
  CDR3 for beta chain variable domain of TCR clone 307926 (TRBV19, TRBJ2-1)
CASLTFVLSGEQFF

SEQ ID NO: 615853 - protein, 16 aa, Homo sapiens
  CDR3 for alpha chain variable domain of TCR clone 307927 (TRAV30, TRAJ24)
CGTEMVDADSWGKFHF

SEQ ID NO: 615854 - protein, 14 aa, Homo sapiens
  CDR3 for beta chain variable domain of TCR clone 307927 (TRBV12-5, TRBJ2-5)
CASGSRTHQETQYF

SEQ ID NO: 615855 - protein, 14 aa, Homo sapiens
  CDR3 for alpha chain variable domain of TCR clone 307928 (TRAV12-2, TRAJ17)
CAALFKAAGNKLTF

SEQ ID NO: 615856 - protein, 13 aa, Homo sapiens
  CDR3 for beta chain variable domain of TCR clone 307928 (TRBV12-4, TRBJ1-2)
CASSLRQGKGYTF

SEQ ID NO: 615857 - protein, 13 aa, Homo sapiens
  CDR3 for alpha chain variable domain of TCR clone 307929 (TRAV35, TRAJ43)
CAGYPYNNNDMRF

SEQ ID NO: 615858 - protein, 15 aa, Homo sapiens
  CDR3 for beta chain variable domain of TCR clone 307929 (TRBV25-1, TRBJ1-4)
CASSKRIATSEKLFF

SEQ ID NO: 615859 - protein, 11 aa, Homo sapiens
  CDR3 for alpha chain variable domain of TCR clone 307930 (TRAV12-3, TRAJ27)
CAMANAGKSTF

SEQ ID NO: 615860 - protein, 13 aa, Homo sapiens
  CDR3 for beta chain variable domain of TCR clone 307930 (TRBV20-1, TRBJ1-1)
CSARVGGHTEAFF

SEQ ID NO: 615861 - protein, 17 aa, Homo sapiens
  CDR3 for alpha chain variable domain of TCR clone 307931 (TRAV3, TRAJ42)
CAVRDRDYGGSQGNPIF

SEQ ID NO: 615862 - protein, 17 aa, Homo sapiens
  CDR3 for beta chain variable domain of TCR clone 307931 (TRBV5-1, TRBJ2-5)
CASSLLGLAANQETQYF

SEQ ID NO: 615863 - protein, 14 aa, Homo sapiens
  CDR3 for alpha chain variable domain of TCR clone 307932 (TRAV3, TRAJ9)
CAVRLNTGGFKTIF

SEQ ID NO: 615864 - protein, 15 aa, Homo sapiens
  CDR3 for beta chain variable domain of TCR clone 307932 (TRBV7-2, TRBJ2-1)
CASSLASGRVNQQFF

SEQ ID NO: 615865 - protein, 14 aa, Homo sapiens
  CDR3 for alpha chain variable domain of TCR clone 307933 (TRAV12-2, TRAJ17)
CAVLFKAAGNKLTF

SEQ ID NO: 615866 - protein, 15 aa, Homo sapiens
  CDR3 for beta chain variable domain of TCR clone 307933 (TRBV18, TRBJ2-5)
CASSPDPGLQETQYF

SEQ ID NO: 615867 - protein, 15 aa, Homo sapiens
  CDR3 for alpha chain variable domain of TCR clone 307934 (TRAV26-1, TRAJ21)
CIVRVPNYNFNKSYF

SEQ ID NO: 615868 - protein, 16 aa, Homo sapiens
  CDR3 for beta chain variable domain of TCR clone 307934 (TRBV7-9, TRBJ2-3)
CASSLQGNPGTDTQYF

SEQ ID NO: 615869 - protein, 14 aa, Homo sapiens
  CDR3 for alpha chain variable domain of TCR clone 307935 (TRAV8-3, TRAJ35)
CAVVPQGFGNVLHF

SEQ ID NO: 615870 - protein, 14 aa, Homo sapiens
  CDR3 for beta chain variable domain of TCR clone 307935 (TRBV19, TRBJ2-1)
CASPTFVLGGEQFF

SEQ ID NO: 615871 - protein, 13 aa, Homo sapiens
  CDR3 for alpha chain variable domain of TCR clone 307936 (TRAV29/DV5, TRAJ31)
CAASRNNNARPMF

SEQ ID NO: 615872 - protein, 20 aa, Homo sapiens
  CDR3 for beta chain variable domain of TCR clone 307936 (TRBV7-8, TRBJ2-2)
CASSHLFPGPTIHITGELFF

SEQ ID NO: 615873 - protein, 17 aa, Homo sapiens
  CDR3 for alpha chain variable domain of TCR clone 307937 (TRAV26-1, TRAJ37)
CIVRVITVSSNTGKLIF

SEQ ID NO: 615874 - protein, 13 aa, Homo sapiens
  CDR3 for beta chain variable domain of TCR clone 307937 (TRBV10-3, TRBJ2-7)
CASKLAVNYEQYF

SEQ ID NO: 615875 - protein, 12 aa, Homo sapiens
  CDR3 for alpha chain variable domain of TCR clone 307938 (TRAV12-1, TRAJ40)
CVVYSGTYKSIF

SEQ ID NO: 615876 - protein, 15 aa, Homo sapiens
  CDR3 for beta chain variable domain of TCR clone 307938 (TRBV7-9, TRBJ1-6)
CASSSPGRGNSPLHF

SEQ ID NO: 615877 - protein, 16 aa, Homo sapiens
  CDR3 for alpha chain variable domain of TCR clone 307939 (TRAV30, TRAJ24)
YGTEIVDADSWGKFQF

SEQ ID NO: 615878 - protein, 15 aa, Homo sapiens
  CDR3 for beta chain variable domain of TCR clone 307939 (TRBV9, TRBJ1-6)
CASSVAGTGDSPLHF

SEQ ID NO: 615879 - protein, 13 aa, Homo sapiens
  CDR3 for alpha chain variable domain of TCR clone 307940 (TRAV21, TRAJ20)
CAVGLRVDYKLSL

SEQ ID NO: 615880 - protein, 12 aa, Homo sapiens
  CDR3 for beta chain variable domain of TCR clone 307940 (TRBV7-3, TRBJ2-1)
CASSFINNEQFF

SEQ ID NO: 615881 - protein, 15 aa, Homo sapiens
  CDR3 for alpha chain variable domain of TCR clone 307941 (TRAV8-3, TRAJ11)
CAVGLLNSGYSTLTF

SEQ ID NO: 615882 - protein, 14 aa, Homo sapiens
  CDR3 for beta chain variable domain of TCR clone 307941 (TRBV19, TRBJ2-7)
CASNFRDTFTGMYF

SEQ ID NO: 615883 - protein, 14 aa, Homo sapiens
  CDR3 for alpha chain variable domain of TCR clone 307942 (TRAV13-1, TRAJ39)
CAASYNNEGNMLTF

SEQ ID NO: 615884 - protein, 13 aa, Homo sapiens
  CDR3 for beta chain variable domain of TCR clone 307942 (TRBV24-1, TRBJ1-4)
CATNNGRSEKLFF

SEQ ID NO: 615885 - protein, 15 aa, Homo sapiens
  CDR3 for alpha chain variable domain of TCR clone 307943 (TRAV38-1, TRAJ28)
WACWGVGAGSYQLTF

SEQ ID NO: 615886 - protein, 15 aa, Homo sapiens
  CDR3 for beta chain variable domain of TCR clone 307943 (TRBV12-4, TRBJ2-2)
CASSPQPGSTGELFF

SEQ ID NO: 615887 - protein, 13 aa, Homo sapiens
  CDR3 for alpha chain variable domain of TCR clone 307944 (TRAV2, TRAJ34)
CAVEEDNTDKLIF

SEQ ID NO: 615888 - protein, 15 aa, Homo sapiens
  CDR3 for beta chain variable domain of TCR clone 307944 (TRBV27, TRBJ1-5)
CASSLGTGFDQPQHF

SEQ ID NO: 615889 - protein, 19 aa, Homo sapiens
  CDR3 for alpha chain variable domain of TCR clone 307945 (TRAV38-2/DV8, TRAJ45)
CAYRRSYEYSGGGADGLTF

SEQ ID NO: 615890 - protein, 17 aa, Homo sapiens
  CDR3 for beta chain variable domain of TCR clone 307945 (TRBV11-2, TRBJ2-5)
CASSNSQENPVLRARHA

SEQ ID NO: 615891 - protein, 12 aa, Homo sapiens
  CDR3 for alpha chain variable domain of TCR clone 307946 (TRAV13-1, TRAJ27)
CAAHTNAGKSTF

SEQ ID NO: 615892 - protein, 13 aa, Homo sapiens
  CDR3 for beta chain variable domain of TCR clone 307946 (TRBV7-8, TRBJ2-7)
CASSLTGGREQYF

SEQ ID NO: 615893 - protein, 18 aa, Homo sapiens
  CDR3 for alpha chain variable domain of TCR clone 307947 (TRAV8-3, TRAJ4)
WVRDPTSNDPGGYNKLIF

SEQ ID NO: 615894 - protein, 13 aa, Homo sapiens
  CDR3 for beta chain variable domain of TCR clone 307947 (TRBV20-1, TRBJ1-2)
CSATGIQGSGQTF

SEQ ID NO: 615895 - protein, 12 aa, Homo sapiens
  CDR3 for alpha chain variable domain of TCR clone 307948 (TRAV35, TRAJ12)
CARMDSSYKLIF

SEQ ID NO: 615896 - protein, 14 aa, Homo sapiens
  CDR3 for beta chain variable domain of TCR clone 307948 (TRBV28, TRBJ2-5)
CASSLYRGTETQYF

SEQ ID NO: 615897 - protein, 15 aa, Homo sapiens
  CDR3 for alpha chain variable domain of TCR clone 307949 (TRAV3, TRAJ47)
CAVRDIGEYGNKLVF

SEQ ID NO: 615898 - protein, 13 aa, Homo sapiens
  CDR3 for beta chain variable domain of TCR clone 307949 (TRBV15, TRBJ1-2)
CATSMTANYGYTF

SEQ ID NO: 615899 - protein, 15 aa, Homo sapiens
  CDR3 for alpha chain variable domain of TCR clone 307950 (TRAV26-1, TRAJ29)
CIVRVDGSGNTPLVF

SEQ ID NO: 615900 - protein, 14 aa, Homo sapiens
  CDR3 for beta chain variable domain of TCR clone 307950 (TRBV18, TRBJ2-5)
CASSPGVYQETQYF

SEQ ID NO: 615901 - protein, 14 aa, Homo sapiens
  CDR3 for alpha chain variable domain of TCR clone 307951 (TRAV1-2, TRAJ16)
CAVNRFSDGQKLLF

SEQ ID NO: 615902 - protein, 13 aa, Homo sapiens
  CDR3 for beta chain variable domain of TCR clone 307951 (TRBV4-2, TRBJ2-5)
CASRPAGGETQYF

SEQ ID NO: 615903 - protein, 13 aa, Homo sapiens
  CDR3 for alpha chain variable domain of TCR clone 307952 (TRAV12-1, TRAJ34)
CGEPLRNTDKLIF

SEQ ID NO: 615904 - protein, 15 aa, Homo sapiens
  CDR3 for beta chain variable domain of TCR clone 307952 (TRBV3-1, TRBJ2-2)
CASSQDWTRAGELLF

SEQ ID NO: 615905 - protein, 13 aa, Homo sapiens
  CDR3 for alpha chain variable domain of TCR clone 307953 (TRAV23/DV6, TRAJ16)
CAASGSDGQKLLF

SEQ ID NO: 615906 - protein, 15 aa, Homo sapiens
  CDR3 for beta chain variable domain of TCR clone 307953 (TRBV5-1, TRBJ1-1)
CASSFTGGWYTEAFF

SEQ ID NO: 615907 - protein, 14 aa, Homo sapiens
  CDR3 for alpha chain variable domain of TCR clone 307954 (TRAV12-1, TRAJ15)
CLPPANHAGTALIF

SEQ ID NO: 615908 - protein, 13 aa, Homo sapiens
  CDR3 for beta chain variable domain of TCR clone 307954 (TRBV7-2, TRBJ2-4)
CASSREHANIQYF

SEQ ID NO: 615909 - protein, 17 aa, Homo sapiens
  CDR3 for alpha chain variable domain of TCR clone 307955 (TRAV8-3, TRAJ34)
CAFPGKLIFGTGTRLQV

SEQ ID NO: 615910 - protein, 16 aa, Homo sapiens
  CDR3 for beta chain variable domain of TCR clone 307955 (TRBV5-1, TRBJ2-2)
CASSSYREGDTGELFF

SEQ ID NO: 615911 - protein, 10 aa, Homo sapiens
  CDR3 for alpha chain variable domain of TCR clone 307956 (TRAV1-2, TRAJ34)
CAVNTDTLIF

SEQ ID NO: 615912 - protein, 13 aa, Homo sapiens
  CDR3 for beta chain variable domain of TCR clone 307956 (TRBV10-1, TRBJ2-1)
CASSAGPDNEQFF

SEQ ID NO: 615913 - protein, 15 aa, Homo sapiens
  CDR3 for alpha chain variable domain of TCR clone 307957 (TRAV26-1, TRAJ40)
CIVRVTTSGTYKYIF

SEQ ID NO: 615914 - protein, 14 aa, Homo sapiens
  CDR3 for beta chain variable domain of TCR clone 307957 (TRBV28, TRBJ2-5)
CASSSGTAQETQYF

SEQ ID NO: 615915 - protein, 12 aa, Homo sapiens
  CDR3 for alpha chain variable domain of TCR clone 307958 (TRAV23/DV6, TRAJ30)
CAASKGDDKIIF

SEQ ID NO: 615916 - protein, 17 aa, Homo sapiens
  CDR3 for beta chain variable domain of TCR clone 307958 (TRBV7-3, TRBJ2-3)
CASSLMKRMRGADTQYF

SEQ ID NO: 615917 - protein, 16 aa, Homo sapiens
  CDR3 for alpha chain variable domain of TCR clone 307959 (TRAV1-2, TRAJ10)
CAVRGVLTGGGNKITF

SEQ ID NO: 615918 - protein, 14 aa, Homo sapiens
  CDR3 for beta chain variable domain of TCR clone 307959 (TRBV12-4, TRBJ1-1)
CASSLGTGGTEAFF

SEQ ID NO: 615919 - protein, 11 aa, Homo sapiens
  CDR3 for alpha chain variable domain of TCR clone 307960 (TRAV29/DV5, TRAJ47)
CAAQRGNKLVF

SEQ ID NO: 615920 - protein, 14 aa, Homo sapiens
  CDR3 for beta chain variable domain of TCR clone 307960 (TRBV11-2, TRBJ1-2)
CASSLGTANYGYTF

SEQ ID NO: 615921 - protein, 14 aa, Homo sapiens
  CDR3 for alpha chain variable domain of TCR clone 307961 (TRAV34, TRAJ44)
CGADGTGTASKLTF

SEQ ID NO: 615922 - protein, 15 aa, Homo sapiens
  CDR3 for beta chain variable domain of TCR clone 307961 (TRBV19, TRBJ1-1)
CASSKTGSTNTEAFF

SEQ ID NO: 615923 - protein, 14 aa, Homo sapiens
  CDR3 for alpha chain variable domain of TCR clone 307962 (TRAV26-1, TRAJ34)
FIVRVAYNTDKPIF

SEQ ID NO: 615924 - protein, 15 aa, Homo sapiens
  CDR3 for beta chain variable domain of TCR clone 307962 (TRBV20-1, TRBJ2-7)
CSARVPAAYFYEQYF

SEQ ID NO: 615925 - protein, 13 aa, Homo sapiens
  CDR3 for alpha chain variable domain of TCR clone 307963 (TRAV3, TRAJ27)
CAVRPLDAGKSTF

SEQ ID NO: 615926 - protein, 13 aa, Homo sapiens
  CDR3 for beta chain variable domain of TCR clone 307963 (TRBV7-9, TRBJ1-2)
CASSLKQNYGYTF

SEQ ID NO: 615927 - protein, 14 aa, Homo sapiens
  CDR3 for alpha chain variable domain of TCR clone 307964 (TRAV14/DV4, TRAJ48)
CAMRGLFGNEKLTF

SEQ ID NO: 615928 - protein, 16 aa, Homo sapiens
  CDR3 for beta chain variable domain of TCR clone 307964 (TRBV4-3, TRBJ2-3)
CASSLGLAGEGDTQYF

SEQ ID NO: 615929 - protein, 17 aa, Homo sapiens
  CDR3 for alpha chain variable domain of TCR clone 307965 (TRAV3, TRAJ6)
CAVRDGPRAGGSYIPTF

SEQ ID NO: 615930 - protein, 15 aa, Homo sapiens
  CDR3 for beta chain variable domain of TCR clone 307965 (TRBV7-8, TRBJ2-1)
CASSLHGGPYNEQFF

SEQ ID NO: 615931 - protein, 15 aa, Homo sapiens
  CDR3 for alpha chain variable domain of TCR clone 307966 (TRAV21, TRAJ18)
CAVRDRGSTLGRLYF

SEQ ID NO: 615932 - protein, 14 aa, Homo sapiens
  CDR3 for beta chain variable domain of TCR clone 307966 (TRBV7-2, TRBJ1-1)
CASSFLTGTTEAFF

SEQ ID NO: 615933 - protein, 19 aa, Homo sapiens
  CDR3 for alpha chain variable domain of TCR clone 307967 (TRAV2, TRAJ20)
ILQVREADAAVYRDCKLSF

SEQ ID NO: 615934 - protein, 14 aa, Homo sapiens
  CDR3 for beta chain variable domain of TCR clone 307967 (TRBV7-9, TRBJ2-1)
CASSPRDSLYEQFF

SEQ ID NO: 615935 - protein, 13 aa, Homo sapiens
  CDR3 for alpha chain variable domain of TCR clone 307968 (TRAV35, TRAJ48)
CAGHEFGSEKLTF

SEQ ID NO: 615936 - protein, 16 aa, Homo sapiens
  CDR3 for beta chain variable domain of TCR clone 307968 (TRBV12-5, TRBJ2-5)
CASGPRTSGNQETQYF

SEQ ID NO: 615937 - protein, 13 aa, Homo sapiens
  CDR3 for alpha chain variable domain of TCR clone 307969 (TRAV17, TRAJ15)
CATDTRAGTALIF

SEQ ID NO: 615938 - protein, 14 aa, Homo sapiens
  CDR3 for beta chain variable domain of TCR clone 307969 (TRBV7-2, TRBJ2-5)
CASSIRLTQETQYF

SEQ ID NO: 615939 - protein, 13 aa, Homo sapiens
  CDR3 for alpha chain variable domain of TCR clone 307970 (TRAV30, TRAJ6)
CGTEAGGSYIPTF

SEQ ID NO: 615940 - protein, 15 aa, Homo sapiens
  CDR3 for beta chain variable domain of TCR clone 307970 (TRBV29-1, TRBJ2-1)
CSGRDRKSSYNEQFF

SEQ ID NO: 615941 - protein, 14 aa, Homo sapiens
  CDR3 for alpha chain variable domain of TCR clone 307971 (TRAV20, TRAJ22)
CAVALGGSARQLIF

SEQ ID NO: 615942 - protein, 15 aa, Homo sapiens
  CDR3 for beta chain variable domain of TCR clone 307971 (TRBV7-2, TRBJ1-1)
CASSFAGDRDTEAFC

SEQ ID NO: 615943 - protein, 12 aa, Homo sapiens
  CDR3 for alpha chain variable domain of TCR clone 307972 (TRAV8-1, TRAJ26)
CAVNNYGQNFVF

SEQ ID NO: 615944 - protein, 16 aa, Homo sapiens
  CDR3 for beta chain variable domain of TCR clone 307972 (TRBV5-5, TRBJ1-1)
CASRPLDGGGDTEAFF

SEQ ID NO: 615945 - protein, 13 aa, Homo sapiens
  CDR3 for alpha chain variable domain of TCR clone 307973 (TRAV27, TRAJ56)
CAGTPGANSKLTF

SEQ ID NO: 615946 - protein, 15 aa, Homo sapiens
  CDR3 for beta chain variable domain of TCR clone 307973 (TRBV6-1, TRBJ2-3)
CASSERWDSTDTQYF

SEQ ID NO: 615947 - protein, 15 aa, Homo sapiens
  CDR3 for alpha chain variable domain of TCR clone 307974 (TRAV17, TRAJ4)
CATGTWSGGYNKLIF

SEQ ID NO: 615948 - protein, 15 aa, Homo sapiens
  CDR3 for beta chain variable domain of TCR clone 307974 (TRBV11-3, TRBJ2-3)
CASLKDGREGDTQYF

SEQ ID NO: 615949 - protein, 13 aa, Homo sapiens
  CDR3 for alpha chain variable domain of TCR clone 307975 (TRAV27, TRAJ18)
CAGRGSTLGRLYF

SEQ ID NO: 615950 - protein, 18 aa, Homo sapiens
  CDR3 for beta chain variable domain of TCR clone 307975 (TRBV7-2, TRBJ2-7)
CASSLAQGLRDSSYEQYF

SEQ ID NO: 615951 - protein, 14 aa, Homo sapiens
  CDR3 for alpha chain variable domain of TCR clone 307976 (TRAV8-4, TRAJ16)
CAVSPAGRWPEAAL

SEQ ID NO: 615952 - protein, 13 aa, Homo sapiens
  CDR3 for beta chain variable domain of TCR clone 307976 (TRBV12-4, TRBJ1-2)
CASSLRQGKGYTF

SEQ ID NO: 615953 - protein, 14 aa, Homo sapiens
  CDR3 for alpha chain variable domain of TCR clone 307977 (TRAV38-1, TRAJ45)
CAYYSAGGADGLTF

SEQ ID NO: 615954 - protein, 20 aa, Homo sapiens
  CDR3 for beta chain variable domain of TCR clone 307977 (TRBV28, TRBJ2-1)
CASTPIGRSPGLAGGNEQFF

SEQ ID NO: 615955 - protein, 12 aa, Homo sapiens
  CDR3 for alpha chain variable domain of TCR clone 307978 (TRAV8-3, TRAJ26)
CAGDNYGQNFVF

SEQ ID NO: 615956 - protein, 14 aa, Homo sapiens
  CDR3 for beta chain variable domain of TCR clone 307978 (TRBV19, TRBJ2-1)
CASPTFVLTGEQFF

SEQ ID NO: 615957 - protein, 18 aa, Homo sapiens
  CDR3 for alpha chain variable domain of TCR clone 307979 (TRAV21, TRAJ52)
CAVRPSPAGGTSYGKLTF

SEQ ID NO: 615958 - protein, 18 aa, Homo sapiens
  CDR3 for beta chain variable domain of TCR clone 307979 (TRBV11-2, TRBJ2-3)
CASSLGGASRGAPNTQYS

SEQ ID NO: 615959 - protein, 11 aa, Homo sapiens
  CDR3 for alpha chain variable domain of TCR clone 307980 (TRAV12-2, TRAJ33)
CAVGSNYQLVW

SEQ ID NO: 615960 - protein, 16 aa, Homo sapiens
  CDR3 for beta chain variable domain of TCR clone 307980 (TRBV27, TRBJ2-7)
CASSSERRDSAYEQYF

SEQ ID NO: 615961 - protein, 13 aa, Homo sapiens
  CDR3 for alpha chain variable domain of TCR clone 307981 (TRAV8-3, TRAJ48)
CCGCNFGNEKLTF

SEQ ID NO: 615962 - protein, 15 aa, Homo sapiens
  CDR3 for beta chain variable domain of TCR clone 307981 (TRBV19, TRBJ1-1)
CASTSGQIQNTEAFF

SEQ ID NO: 615963 - protein, 13 aa, Homo sapiens
  CDR3 for alpha chain variable domain of TCR clone 307982 (TRAV3, TRAJ29)
CAVRDIIDTPLVF

SEQ ID NO: 615964 - protein, 14 aa, Homo sapiens
  CDR3 for beta chain variable domain of TCR clone 307982 (TRBV7-3, TRBJ1-1)
CASSLKGGNTEAFF

SEQ ID NO: 615965 - protein, 14 aa, Homo sapiens
  CDR3 for alpha chain variable domain of TCR clone 307983 (TRAV12-3, TRAJ10)
SHLPLTGGGNKLTF

SEQ ID NO: 615966 - protein, 19 aa, Homo sapiens
  CDR3 for beta chain variable domain of TCR clone 307983 (TRBV4-1, TRBJ1-1)
CASSRIILTPRGVNNEAFF

SEQ ID NO: 615967 - protein, 12 aa, Homo sapiens
  CDR3 for alpha chain variable domain of TCR clone 307984 (TRAV29/DV5, TRAJ49)
CAATDTGNQFYF

SEQ ID NO: 615968 - protein, 19 aa, Homo sapiens
  CDR3 for beta chain variable domain of TCR clone 307984 (TRBV25-1, TRBJ2-2)
CAILVYRVDRGGKTGELFF

SEQ ID NO: 615969 - protein, 16 aa, Homo sapiens
  CDR3 for alpha chain variable domain of TCR clone 307985 (TRAV12-1, TRAJ42)
CVVTPYYGGSQGNLIF

SEQ ID NO: 615970 - protein, 13 aa, Homo sapiens
  CDR3 for beta chain variable domain of TCR clone 307985 (TRBV4-2, TRBJ1-1)
CASSQAGNTEAFF

SEQ ID NO: 615971 - protein, 14 aa, Homo sapiens
  CDR3 for alpha chain variable domain of TCR clone 307986 (TRAV8-3, TRAJ4)
CAVGAAGGYYKLIF

SEQ ID NO: 615972 - protein, 16 aa, Homo sapiens
  CDR3 for beta chain variable domain of TCR clone 307986 (TRBV13, TRBJ2-2)
CASSPRTGEHTGELFF

SEQ ID NO: 615973 - protein, 14 aa, Homo sapiens
  CDR3 for alpha chain variable domain of TCR clone 307987 (TRAV8-6, TRAJ53)
CAVTSGGSNYKLTF

SEQ ID NO: 615974 - protein, 11 aa, Homo sapiens
  CDR3 for beta chain variable domain of TCR clone 307987 (TRBV24-1, TRBJ2-3)
CATSYLDTQYF

SEQ ID NO: 615975 - protein, 12 aa, Homo sapiens
  CDR3 for alpha chain variable domain of TCR clone 307988 (TRAV1-2, TRAJ24)
YAVGGSWGKFQF

SEQ ID NO: 615976 - protein, 13 aa, Homo sapiens
  CDR3 for beta chain variable domain of TCR clone 307988 (TRBV20-1, TRBJ1-1)
CSASKRGLTEAFF

SEQ ID NO: 615977 - protein, 15 aa, Homo sapiens
  CDR3 for alpha chain variable domain of TCR clone 307989 (TRAV26-2, TRAJ26)
CILRDFDNYGQNFVF

SEQ ID NO: 615978 - protein, 16 aa, Homo sapiens
  CDR3 for beta chain variable domain of TCR clone 307989 (TRBV2, TRBJ2-1)
CASSVGGSLSYNEQFF

SEQ ID NO: 615979 - protein, 15 aa, Homo sapiens
  CDR3 for alpha chain variable domain of TCR clone 307990 (TRAV26-1, TRAJ44)
CIIRIGTGTASKLTF

SEQ ID NO: 615980 - protein, 15 aa, Homo sapiens
  CDR3 for beta chain variable domain of TCR clone 307990 (TRBV7-6, TRBJ2-1)
CASSSLAGEGNEQFF

SEQ ID NO: 615981 - protein, 16 aa, Homo sapiens
  CDR3 for alpha chain variable domain of TCR clone 307991 (TRAV12-1, TRAJ13)
GVVNLEVSGGYQKVTF

SEQ ID NO: 615982 - protein, 16 aa, Homo sapiens
  CDR3 for beta chain variable domain of TCR clone 307991 (TRBV24-1, TRBJ2-6)
CATSDRRASGANVLTF

SEQ ID NO: 615983 - protein, 14 aa, Homo sapiens
  CDR3 for alpha chain variable domain of TCR clone 307992 (TRAV1-1, TRAJ35)
CAVRSIGFGNVLHC

SEQ ID NO: 615984 - protein, 14 aa, Homo sapiens
  CDR3 for beta chain variable domain of TCR clone 307992 (TRBV19, TRBJ2-1)
CDSPTFVLSGEQFF

SEQ ID NO: 615985 - protein, 14 aa, Homo sapiens
  CDR3 for alpha chain variable domain of TCR clone 307993 (TRAV8-3, TRAJ9)
CAVVYKTGGFKTIF

SEQ ID NO: 615986 - protein, 14 aa, Homo sapiens
  CDR3 for beta chain variable domain of TCR clone 307993 (TRBV7-3, TRBJ2-2)
CASSSGGYTGELFF

SEQ ID NO: 615987 - protein, 22 aa, Homo sapiens
  CDR3 for alpha chain variable domain of TCR clone 307994 (TRAV26-1, TRAJ42)
CCVLLHRQYSLDYGGSQGNLIF

SEQ ID NO: 615988 - protein, 15 aa, Homo sapiens
  CDR3 for beta chain variable domain of TCR clone 307994 (TRBV6-6, TRBJ2-7)
CASSYSYGGSYEQYF

SEQ ID NO: 615989 - protein, 13 aa, Homo sapiens
  CDR3 for alpha chain variable domain of TCR clone 307995 (TRAV36/DV7, TRAJ49)
CAVEANTGNQFYF

SEQ ID NO: 615990 - protein, 13 aa, Homo sapiens
  CDR3 for beta chain variable domain of TCR clone 307995 (TRBV10-3, TRBJ2-7)
CASKRAVNYEQYF

SEQ ID NO: 615991 - protein, 13 aa, Homo sapiens
  CDR3 for alpha chain variable domain of TCR clone 307996 (TRAV4, TRAJ31)
CLVALNNNARLMF

SEQ ID NO: 615992 - protein, 16 aa, Homo sapiens
  CDR3 for beta chain variable domain of TCR clone 307996 (TRBV19, TRBJ2-1)
CTSSKAGPSSYNEQFF

SEQ ID NO: 615993 - protein, 17 aa, Homo sapiens
  CDR3 for alpha chain variable domain of TCR clone 307997 (TRAV3, TRAJ42)
CAVRDRDYVGSQGNPIF

SEQ ID NO: 615994 - protein, 15 aa, Homo sapiens
  CDR3 for beta chain variable domain of TCR clone 307997 (TRBV6-6, TRBJ2-7)
CASSYSYGGSYEQYF

SEQ ID NO: 615995 - protein, 17 aa, Homo sapiens
  CDR3 for alpha chain variable domain of TCR clone 307998 (TRAV12-2, TRAJ22)
CAVNRIPFSGSARQLTF

SEQ ID NO: 615996 - protein, 12 aa, Homo sapiens
  CDR3 for beta chain variable domain of TCR clone 307998 (TRBV11-3, TRBJ1-1)
CSSSNRDTEAFF

SEQ ID NO: 615997 - protein, 15 aa, Homo sapiens
  CDR3 for alpha chain variable domain of TCR clone 307999 (TRAV19, TRAJ9)
CALSEARTGGFKTIF

SEQ ID NO: 615998 - protein, 17 aa, Homo sapiens
  CDR3 for beta chain variable domain of TCR clone 307999 (TRBV28, TRBJ2-5)
CASSTPEGDALQETQYC

SEQ ID NO: 615999 - protein, 15 aa, Homo sapiens
  CDR3 for alpha chain variable domain of TCR clone 308000 (TRAV20, TRAJ6)
CAVRLQSGGSYIPTF

SEQ ID NO: 616000 - protein, 14 aa, Homo sapiens
  CDR3 for beta chain variable domain of TCR clone 308000 (TRBV12-4, TRBJ2-7)
CASSASGGRYEQYF

SEQ ID NO: 616001 - protein, 14 aa, Homo sapiens
  CDR3 for alpha chain variable domain of TCR clone 308001 (TRAV27, TRAJ33)
CRSGSRDSNYQLIW

SEQ ID NO: 616002 - protein, 15 aa, Homo sapiens
  CDR3 for beta chain variable domain of TCR clone 308001 (TRBV11-2, TRBJ1-2)
CASSLEGVQRNGYTF

SEQ ID NO: 616003 - protein, 19 aa, Homo sapiens
  CDR3 for alpha chain variable domain of TCR clone 308002 (TRAV29/DV5, TRAJ49)
CSVLLCSKLTVDTGNQFYF

SEQ ID NO: 616004 - protein, 15 aa, Homo sapiens
  CDR3 for beta chain variable domain of TCR clone 308002 (TRBV11-3, TRBJ2-3)
CASLRDGREGDTQYF

SEQ ID NO: 616005 - protein, 17 aa, Homo sapiens
  CDR3 for alpha chain variable domain of TCR clone 308003 (TRAV3, TRAJ38)
CAVRDCLNAGNNRKLIW

SEQ ID NO: 616006 - protein, 15 aa, Homo sapiens
  CDR3 for beta chain variable domain of TCR clone 308003 (TRBV27, TRBJ2-1)
CASSNGGGSSNEQFL

SEQ ID NO: 616007 - protein, 15 aa, Homo sapiens
  CDR3 for alpha chain variable domain of TCR clone 308004 (TRAV8-3, TRAJ45)
CASSYSGGGADGLPF

SEQ ID NO: 616008 - protein, 13 aa, Homo sapiens
  CDR3 for beta chain variable domain of TCR clone 308004 (TRBV10-3, TRBJ2-7)
CASRLAVNYEQYF

SEQ ID NO: 616009 - protein, 14 aa, Homo sapiens
  CDR3 for alpha chain variable domain of TCR clone 308005 (TRAV17, TRAJ31)
CATVLRNNNPRLMF

SEQ ID NO: 616010 - protein, 14 aa, Homo sapiens
  CDR3 for beta chain variable domain of TCR clone 308005 (TRBV12-4, TRBJ2-5)
CASSLWQKQETQYF

SEQ ID NO: 616011 - protein, 14 aa, Homo sapiens
  CDR3 for alpha chain variable domain of TCR clone 308006 (TRAV1-2, TRAJ16)
CAVNRFSDAQKLLF

SEQ ID NO: 616012 - protein, 12 aa, Homo sapiens
  CDR3 for beta chain variable domain of TCR clone 308006 (TRBV27, TRBJ2-5)
CASSPTGETQYF

SEQ ID NO: 616013 - protein, 13 aa, Homo sapiens
  CDR3 for alpha chain variable domain of TCR clone 308007 (TRAV13-1, TRAJ5)
CAASDTGRRALTF

SEQ ID NO: 616014 - protein, 12 aa, Homo sapiens
  CDR3 for beta chain variable domain of TCR clone 308007 (TRBV2, TRBJ2-1)
GRGLPSYNEQLF

SEQ ID NO: 616015 - protein, 10 aa, Homo sapiens
  CDR3 for alpha chain variable domain of TCR clone 308008 (TRAV12-2, TRAJ52)
RSTSYGKLTF

SEQ ID NO: 616016 - protein, 16 aa, Homo sapiens
  CDR3 for beta chain variable domain of TCR clone 308008 (TRBV3-1, TRBJ2-7)
CASSQGATGVAYEQYF

SEQ ID NO: 616017 - protein, 11 aa, Homo sapiens
  CDR3 for alpha chain variable domain of TCR clone 308009 (TRAV3, TRAJ21)
CAVGNFNKFYF

SEQ ID NO: 616018 - protein, 14 aa, Homo sapiens
  CDR3 for beta chain variable domain of TCR clone 308009 (TRBV28, TRBJ2-7)
CASSLGVPTYEQYF

SEQ ID NO: 616019 - protein, 14 aa, Homo sapiens
  CDR3 for alpha chain variable domain of TCR clone 308010 (TRAV26-1, TRAJ21)
CIVRVVYNFNKFYF

SEQ ID NO: 616020 - protein, 11 aa, Homo sapiens
  CDR3 for beta chain variable domain of TCR clone 308010 (TRBV5-6, TRBJ2-5)
CASSLERTRYF

SEQ ID NO: 616021 - protein, 12 aa, Homo sapiens
  CDR3 for alpha chain variable domain of TCR clone 308011 (TRAV12-3, TRAJ17)
WAMTLTGNKLTF

SEQ ID NO: 616022 - protein, 12 aa, Homo sapiens
  CDR3 for beta chain variable domain of TCR clone 308011 (TRBV11-2, TRBJ2-7)
CASSLPTYEQYF

SEQ ID NO: 616023 - protein, 13 aa, Homo sapiens
  CDR3 for alpha chain variable domain of TCR clone 308012 (TRAV3, TRAJ20)
CAVRSLNDYNLSF

SEQ ID NO: 616024 - protein, 13 aa, Homo sapiens
  CDR3 for beta chain variable domain of TCR clone 308012 (TRBV6-1, TRBJ2-1)
CAGMDPTNNEQFF

SEQ ID NO: 616025 - protein, 11 aa, Homo sapiens
  CDR3 for alpha chain variable domain of TCR clone 308013 (TRAV27, TRAJ20)
CAGADDYKLSF

SEQ ID NO: 616026 - protein, 18 aa, Homo sapiens
  CDR3 for beta chain variable domain of TCR clone 308013 (TRBV2, TRBJ2-1)
CASRGLAGGPRTYNEQFF

SEQ ID NO: 616027 - protein, 14 aa, Homo sapiens
  CDR3 for alpha chain variable domain of TCR clone 308014 (TRAV12-3, TRAJ42)
CAMNYGGSQGNLIF

SEQ ID NO: 616028 - protein, 15 aa, Homo sapiens
  CDR3 for beta chain variable domain of TCR clone 308014 (TRBV6-3, TRBJ2-7)
CASSSPGTVFYEQYF

SEQ ID NO: 616029 - protein, 14 aa, Homo sapiens
  CDR3 for alpha chain variable domain of TCR clone 308015 (TRAV12-3, TRAJ6)
CAMSATGGSYIPTF

SEQ ID NO: 616030 - protein, 16 aa, Homo sapiens
  CDR3 for beta chain variable domain of TCR clone 308015 (TRBV4-2, TRBJ2-1)
CASSPGRDRGLMSSPS

SEQ ID NO: 616031 - protein, 15 aa, Homo sapiens
  CDR3 for alpha chain variable domain of TCR clone 308016 (TRAV2, TRAJ15)
CALEDRGQAGTALIF

SEQ ID NO: 616032 - protein, 13 aa, Homo sapiens
  CDR3 for beta chain variable domain of TCR clone 308016 (TRBV10-2, TRBJ2-7)
CASGASGGYEQYY

SEQ ID NO: 616033 - protein, 12 aa, Homo sapiens
  CDR3 for alpha chain variable domain of TCR clone 308017 (TRAV21, TRAJ33)
CAKMDSNYQLIW

SEQ ID NO: 616034 - protein, 12 aa, Homo sapiens
  CDR3 for beta chain variable domain of TCR clone 308017 (TRBV28, TRBJ2-6)
CAIQAGANVLTF

SEQ ID NO: 616035 - protein, 12 aa, Homo sapiens
  CDR3 for alpha chain variable domain of TCR clone 308018 (TRAV12-3, TRAJ31)
CAMSVPNARLMF

SEQ ID NO: 616036 - protein, 12 aa, Homo sapiens
  CDR3 for beta chain variable domain of TCR clone 308018 (TRBV11-2, TRBJ2-1)
CARGVQREGQFF

SEQ ID NO: 616037 - protein, 14 aa, Homo sapiens
  CDR3 for alpha chain variable domain of TCR clone 308019 (TRAV2, TRAJ29)
CAGPFQYGNTPLVF

SEQ ID NO: 616038 - protein, 13 aa, Homo sapiens
  CDR3 for beta chain variable domain of TCR clone 308019 (TRBV18, TRBJ1-1)
CASSGGRNTEAFF

SEQ ID NO: 616039 - protein, 19 aa, Homo sapiens
  CDR3 for alpha chain variable domain of TCR clone 308020 (TRAV27, TRAJ49)
TAAQPGDTGLYPTSNQFYF

SEQ ID NO: 616040 - protein, 16 aa, Homo sapiens
  CDR3 for beta chain variable domain of TCR clone 308020 (TRBV9, TRBJ1-2)
CASSVEEKVSPYGYTF

SEQ ID NO: 616041 - protein, 15 aa, Homo sapiens
  CDR3 for alpha chain variable domain of TCR clone 308021 (TRAV26-1, TRAJ29)
CIVRVEGSGNTPLVF

SEQ ID NO: 616042 - protein, 15 aa, Homo sapiens
  CDR3 for beta chain variable domain of TCR clone 308021 (TRBV11-3, TRBJ2-2)
CASSYFSTGTGELFF

SEQ ID NO: 616043 - protein, 14 aa, Homo sapiens
  CDR3 for alpha chain variable domain of TCR clone 308022 (TRAV13-1, TRAJ44)
GAAKATGPASKLTF

SEQ ID NO: 616044 - protein, 17 aa, Homo sapiens
  CDR3 for beta chain variable domain of TCR clone 308022 (TRBV7-3, TRBJ2-3)
CASSLMKRMRGADTQYF

SEQ ID NO: 616045 - protein, 14 aa, Homo sapiens
  CDR3 for alpha chain variable domain of TCR clone 308023 (TRAV12-2, TRAJ5)
CAVKGDTGRRALTF

SEQ ID NO: 616046 - protein, 16 aa, Homo sapiens
  CDR3 for beta chain variable domain of TCR clone 308023 (TRBV27, TRBJ2-2)
CASSFRGLVRTGELFF

SEQ ID NO: 616047 - protein, 14 aa, Homo sapiens
  CDR3 for alpha chain variable domain of TCR clone 308024 (TRAV13-1, TRAJ44)
CAAKATGTASKLTF

SEQ ID NO: 616048 - protein, 15 aa, Homo sapiens
  CDR3 for beta chain variable domain of TCR clone 308024 (TRBV11-2, TRBJ2-2)
CASSSDRVNAGELFF

SEQ ID NO: 616049 - protein, 18 aa, Homo sapiens
  CDR3 for alpha chain variable domain of TCR clone 308025 (TRAV21, TRAJ52)
CAVRPSPAGGTSYGKLTF

SEQ ID NO: 616050 - protein, 17 aa, Homo sapiens
  CDR3 for beta chain variable domain of TCR clone 308025 (TRBV25-1, TRBJ2-1)
CTSSAYGQGRGVYEQFF

SEQ ID NO: 616051 - protein, 14 aa, Homo sapiens
  CDR3 for alpha chain variable domain of TCR clone 308026 (TRAV1-2, TRAJ8)
CAVREDTGFQKLVF

SEQ ID NO: 616052 - protein, 13 aa, Homo sapiens
  CDR3 for beta chain variable domain of TCR clone 308026 (TRBV19, TRBJ1-2)
CASSPGTGVGYTF

SEQ ID NO: 616053 - protein, 14 aa, Homo sapiens
  CDR3 for alpha chain variable domain of TCR clone 308027 (TRAV12-3, TRAJ12)
CAMSEVDSSYKLIF

SEQ ID NO: 616054 - protein, 12 aa, Homo sapiens
  CDR3 for beta chain variable domain of TCR clone 308027 (TRBV18, TRBJ1-4)
CAISPSREKLFF

SEQ ID NO: 616055 - protein, 14 aa, Homo sapiens
  CDR3 for alpha chain variable domain of TCR clone 308028 (TRAV13-1, TRAJ44)
CAAKATGTASKLTF

SEQ ID NO: 616056 - protein, 14 aa, Homo sapiens
  CDR3 for beta chain variable domain of TCR clone 308028 (TRBV19, TRBJ2-2)
SASSTLHRSGELFF

SEQ ID NO: 616057 - protein, 12 aa, Homo sapiens
  CDR3 for alpha chain variable domain of TCR clone 308029 (TRAV21, TRAJ49)
CAVRNTGNQFYF

SEQ ID NO: 616058 - protein, 12 aa, Homo sapiens
  CDR3 for beta chain variable domain of TCR clone 308029 (TRBV12-4, TRBJ2-1)
CASSPGRNEQFF

SEQ ID NO: 616059 - protein, 13 aa, Homo sapiens
  CDR3 for alpha chain variable domain of TCR clone 308030 (TRAV8-3, TRAJ48)
CAVVPFGNEKLTF

SEQ ID NO: 616060 - protein, 14 aa, Homo sapiens
  CDR3 for beta chain variable domain of TCR clone 308030 (TRBV18, TRBJ2-7)
CASSPRWGAYEQYF

SEQ ID NO: 616061 - protein, 17 aa, Homo sapiens
  CDR3 for alpha chain variable domain of TCR clone 308031 (TRAV3, TRAJ6)
CAVRDGPRAGGSYKPTL

SEQ ID NO: 616062 - protein, 14 aa, Homo sapiens
  CDR3 for beta chain variable domain of TCR clone 308031 (TRBV7-2, TRBJ2-7)
CASSPKTSFYEQYF

SEQ ID NO: 616063 - protein, 12 aa, Homo sapiens
  CDR3 for alpha chain variable domain of TCR clone 308032 (TRAV26-1, TRAJ26)
CIVFIYGQNFVF

SEQ ID NO: 616064 - protein, 17 aa, Homo sapiens
  CDR3 for beta chain variable domain of TCR clone 308032 (TRBV7-6, TRBJ2-5)
CASSPGLADPWGETQYF

SEQ ID NO: 616065 - protein, 13 aa, Homo sapiens
  CDR3 for alpha chain variable domain of TCR clone 308033 (TRAV21, TRAJ57)
CAVTQGGSEKLVF

SEQ ID NO: 616066 - protein, 15 aa, Homo sapiens
  CDR3 for beta chain variable domain of TCR clone 308033 (TRBV4-1, TRBJ2-5)
CASSQLAGGQETQYF

SEQ ID NO: 616067 - protein, 14 aa, Homo sapiens
  CDR3 for alpha chain variable domain of TCR clone 308034 (TRAV8-4, TRAJ17)
CAVSDQAAGNKRTF

SEQ ID NO: 616068 - protein, 15 aa, Homo sapiens
  CDR3 for beta chain variable domain of TCR clone 308034 (TRBV7-2, TRBJ1-2)
CASSLAPDRGLGYTF

SEQ ID NO: 616069 - protein, 14 aa, Homo sapiens
  CDR3 for alpha chain variable domain of TCR clone 308035 (TRAV23/DV6, TRAJ8)
CAASKATGFQKLVF

SEQ ID NO: 616070 - protein, 15 aa, Homo sapiens
  CDR3 for beta chain variable domain of TCR clone 308035 (TRBV28, TRBJ2-3)
CASSPDRQGSNTQYF

SEQ ID NO: 616071 - protein, 15 aa, Homo sapiens
  CDR3 for alpha chain variable domain of TCR clone 308036 (TRAV27, TRAJ38)
CAARRNAGNNRKLLW

SEQ ID NO: 616072 - protein, 14 aa, Homo sapiens
  CDR3 for beta chain variable domain of TCR clone 308036 (TRBV7-2, TRBJ2-7)
CASSPRDGAYEQYF

SEQ ID NO: 616073 - protein, 13 aa, Homo sapiens
  CDR3 for alpha chain variable domain of TCR clone 308037 (TRAV30, TRAJ20)
CGTEDRSDYKLSF

SEQ ID NO: 616074 - protein, 14 aa, Homo sapiens
  CDR3 for beta chain variable domain of TCR clone 308037 (TRBV20-1, TRBJ2-1)
CSAQIGGSANEQFF

SEQ ID NO: 616075 - protein, 11 aa, Homo sapiens
  CDR3 for alpha chain variable domain of TCR clone 308038 (TRAV1-2, TRAJ34)
CAVRATDKLIF

SEQ ID NO: 616076 - protein, 16 aa, Homo sapiens
  CDR3 for beta chain variable domain of TCR clone 308038 (TRBV7-8, TRBJ2-4)
CASSAERTLAKNIQYF

SEQ ID NO: 616077 - protein, 16 aa, Homo sapiens
  CDR3 for alpha chain variable domain of TCR clone 308039 (TRAV1-2, TRAJ10)
CAVRGVLTGGGNKLTF

SEQ ID NO: 616078 - protein, 16 aa, Homo sapiens
  CDR3 for beta chain variable domain of TCR clone 308039 (TRBV7-2, TRBJ2-5)
CASSPFPTGGEETQYF

SEQ ID NO: 616079 - protein, 17 aa, Homo sapiens
  CDR3 for alpha chain variable domain of TCR clone 308040 (TRAV3, TRAJ6)
CAVRDGPRAGGSYIPTF

SEQ ID NO: 616080 - protein, 16 aa, Homo sapiens
  CDR3 for beta chain variable domain of TCR clone 308040 (TRBV27, TRBJ2-5)
CASSLSRTAGVETQYF

SEQ ID NO: 616081 - protein, 10 aa, Homo sapiens
  CDR3 for alpha chain variable domain of TCR clone 308041 (TRAV8-1, TRAJ21)
CAVNGTKFYF

SEQ ID NO: 616082 - protein, 16 aa, Homo sapiens
  CDR3 for beta chain variable domain of TCR clone 308041 (TRBV7-2, TRBJ1-5)
CTSSPWGPEGNQPQHF

SEQ ID NO: 616083 - protein, 14 aa, Homo sapiens
  CDR3 for alpha chain variable domain of TCR clone 308042 (TRAV23/DV6, TRAJ37)
CAASTSSNTRKIIF

SEQ ID NO: 616084 - protein, 13 aa, Homo sapiens
  CDR3 for beta chain variable domain of TCR clone 308042 (TRBV7-7, TRBJ1-1)
CASSLGANTEAFF

SEQ ID NO: 616085 - protein, 14 aa, Homo sapiens
  CDR3 for alpha chain variable domain of TCR clone 308043 (TRAV13-2, TRAJ29)
CAEGTFETNTTLVF

SEQ ID NO: 616086 - protein, 13 aa, Homo sapiens
  CDR3 for beta chain variable domain of TCR clone 308043 (TRBV2, TRBJ1-1)
CASNLLRNTEAFF

SEQ ID NO: 616087 - protein, 13 aa, Homo sapiens
  CDR3 for alpha chain variable domain of TCR clone 308044 (TRAV8-3, TRAJ48)
CAVVLFGNEKLTF

SEQ ID NO: 616088 - protein, 19 aa, Homo sapiens
  CDR3 for beta chain variable domain of TCR clone 308044 (TRBV25-1, TRBJ2-2)
CAILVYRVDRGRKTGELFF

SEQ ID NO: 616089 - protein, 13 aa, Homo sapiens
  CDR3 for alpha chain variable domain of TCR clone 308045 (TRAV27, TRAJ41)
CAGEGNSGYALNF

SEQ ID NO: 616090 - protein, 14 aa, Homo sapiens
  CDR3 for beta chain variable domain of TCR clone 308045 (TRBV7-2, TRBJ1-1)
CASSFLTWTTEAFF

SEQ ID NO: 616091 - protein, 12 aa, Homo sapiens
  CDR3 for alpha chain variable domain of TCR clone 308046 (TRAV12-3, TRAJ17)
CAMTLTGNKLTF

SEQ ID NO: 616092 - protein, 15 aa, Homo sapiens
  CDR3 for beta chain variable domain of TCR clone 308046 (TRBV20-1, TRBJ2-7)
CSARDRISGMDGQYF

SEQ ID NO: 616093 - protein, 12 aa, Homo sapiens
  CDR3 for alpha chain variable domain of TCR clone 308047 (TRAV12-3, TRAJ17)
CAMTLTGNKLTF

SEQ ID NO: 616094 - protein, 15 aa, Homo sapiens
  CDR3 for beta chain variable domain of TCR clone 308047 (TRBV10-2, TRBJ2-6)
CASSEQGTRANVLTF

SEQ ID NO: 616095 - protein, 13 aa, Homo sapiens
  CDR3 for alpha chain variable domain of TCR clone 308048 (TRAV27, TRAJ54)
CAGAGQGAQELVF

SEQ ID NO: 616096 - protein, 15 aa, Homo sapiens
  CDR3 for beta chain variable domain of TCR clone 308048 (TRBV18, TRBJ2-6)
CASSPSYAGANVLTF

SEQ ID NO: 616097 - protein, 19 aa, Homo sapiens
  CDR3 for alpha chain variable domain of TCR clone 308049 (TRAV13-1, TRAJ52)
CAASPYQNAGGTSYGKLTF

SEQ ID NO: 616098 - protein, 16 aa, Homo sapiens
  CDR3 for beta chain variable domain of TCR clone 308049 (TRBV6-1, TRBJ2-5)
CASSETLDRGAETQYF

SEQ ID NO: 616099 - protein, 17 aa, Homo sapiens
  CDR3 for alpha chain variable domain of TCR clone 308050 (TRAV21, TRAJ13)
CAVPRSFWGLPESYLRN

SEQ ID NO: 616100 - protein, 15 aa, Homo sapiens
  CDR3 for beta chain variable domain of TCR clone 308050 (TRBV7-9, TRBJ1-6)
CASSSPGRGNSPLHF

SEQ ID NO: 616101 - protein, 16 aa, Homo sapiens
  CDR3 for alpha chain variable domain of TCR clone 308051 (TRAV23/DV6, TRAJ9)
CAASIGGNTGGFKTIF

SEQ ID NO: 616102 - protein, 13 aa, Homo sapiens
  CDR3 for beta chain variable domain of TCR clone 308051 (TRBV12-4, TRBJ1-5)
CASSPDRAQPQHF

SEQ ID NO: 616103 - protein, 12 aa, Homo sapiens
  CDR3 for alpha chain variable domain of TCR clone 308052 (TRAV17, TRAJ39)
CSTGAAGNILTF

SEQ ID NO: 616104 - protein, 14 aa, Homo sapiens
  CDR3 for beta chain variable domain of TCR clone 308052 (TRBV7-9, TRBJ1-2)
CASSRQGANYGYTF

SEQ ID NO: 616105 - protein, 13 aa, Homo sapiens
  CDR3 for alpha chain variable domain of TCR clone 308053 (TRAV8-6, TRAJ13)
CAVRDGGYQKVTF

SEQ ID NO: 616106 - protein, 15 aa, Homo sapiens
  CDR3 for beta chain variable domain of TCR clone 308053 (TRBV7-9, TRBJ2-2)
CASRPEGTSTGELFS

SEQ ID NO: 616107 - protein, 16 aa, Homo sapiens
  CDR3 for alpha chain variable domain of TCR clone 308054 (TRAV30, TRAJ24)
CGTEIVDADSWGKFKF

SEQ ID NO: 616108 - protein, 14 aa, Homo sapiens
  CDR3 for beta chain variable domain of TCR clone 308054 (TRBV12-5, TRBJ2-5)
CASGSRTHQESQYF

SEQ ID NO: 616109 - protein, 14 aa, Homo sapiens
  CDR3 for alpha chain variable domain of TCR clone 308055 (TRAV23/DV6, TRAJ5)
CAAKRPAGRRALTF

SEQ ID NO: 616110 - protein, 16 aa, Homo sapiens
  CDR3 for beta chain variable domain of TCR clone 308055 (TRBV3-1, TRBJ2-1)
CASSQGGRRSFDEQFF

SEQ ID NO: 616111 - protein, 13 aa, Homo sapiens
  CDR3 for alpha chain variable domain of TCR clone 308056 (TRAV17, TRAJ9)
CSTDYTGGFKTIF

SEQ ID NO: 616112 - protein, 16 aa, Homo sapiens
  CDR3 for beta chain variable domain of TCR clone 308056 (TRBV7-7, TRBJ2-1)
CASSLASGTSYSEQFF

SEQ ID NO: 616113 - protein, 16 aa, Homo sapiens
  CDR3 for alpha chain variable domain of TCR clone 308057 (TRAV20, TRAJ22)
CAVQASSSGSARQLTF

SEQ ID NO: 616114 - protein, 16 aa, Homo sapiens
  CDR3 for beta chain variable domain of TCR clone 308057 (TRBV20-1, TRBJ1-5)
CSASRGTGYSNQPQQF

SEQ ID NO: 616115 - protein, 10 aa, Homo sapiens
  CDR3 for alpha chain variable domain of TCR clone 308058 (TRAV5, TRAJ34)
CAEDTDKLIF

SEQ ID NO: 616116 - protein, 14 aa, Homo sapiens
  CDR3 for beta chain variable domain of TCR clone 308058 (TRBV19, TRBJ2-1)
CATSQGDTYNEQFF

SEQ ID NO: 616117 - protein, 14 aa, Homo sapiens
  CDR3 for alpha chain variable domain of TCR clone 308059 (TRAV27, TRAJ45)
CAGAQEEVLTDYPL

SEQ ID NO: 616118 - protein, 11 aa, Homo sapiens
  CDR3 for beta chain variable domain of TCR clone 308059 (TRBV19, TRBJ1-1)
CASSIGSEAFF

SEQ ID NO: 616119 - protein, 10 aa, Homo sapiens
  CDR3 for alpha chain variable domain of TCR clone 308060 (TRAV29/DV5, TRAJ54)
LIQGAQKLVF

SEQ ID NO: 616120 - protein, 15 aa, Homo sapiens
  CDR3 for beta chain variable domain of TCR clone 308060 (TRBV12-4, TRBJ1-2)
CASSPITGGGYGYTF

SEQ ID NO: 616121 - protein, 16 aa, Homo sapiens
  CDR3 for alpha chain variable domain of TCR clone 308061 (TRAV26-1, TRAJ37)
CIVRGDGSGNTGTLIF

SEQ ID NO: 616122 - protein, 15 aa, Homo sapiens
  CDR3 for beta chain variable domain of TCR clone 308061 (TRBV7-3, TRBJ2-1)
CASSPTGGGEVEQFF

SEQ ID NO: 616123 - protein, 10 aa, Homo sapiens
  CDR3 for alpha chain variable domain of TCR clone 308062 (TRAV21, TRAJ34)
CAADTDKLIF

SEQ ID NO: 616124 - protein, 14 aa, Homo sapiens
  CDR3 for beta chain variable domain of TCR clone 308062 (TRBV5-4, TRBJ1-2)
CDSSSSGSYVGYTF

SEQ ID NO: 616125 - protein, 12 aa, Homo sapiens
  CDR3 for alpha chain variable domain of TCR clone 308063 (TRAV17, TRAJ29)
CYASSGNTPLVF

SEQ ID NO: 616126 - protein, 13 aa, Homo sapiens
  CDR3 for beta chain variable domain of TCR clone 308063 (TRBV7-3, TRBJ1-1)
CASSQDWGAEAFF

SEQ ID NO: 616127 - protein, 16 aa, Homo sapiens
  CDR3 for alpha chain variable domain of TCR clone 308064 (TRAV8-3, TRAJ8)
CAVPRDGNTGFQKLVF

SEQ ID NO: 616128 - protein, 16 aa, Homo sapiens
  CDR3 for beta chain variable domain of TCR clone 308064 (TRBV7-7, TRBJ2-1)
CASSLASGTSYNEQFF

SEQ ID NO: 616129 - protein, 11 aa, Homo sapiens
  CDR3 for alpha chain variable domain of TCR clone 308065 (TRAV1-1, TRAJ37)
CAVSPQGKLIF

SEQ ID NO: 616130 - protein, 13 aa, Homo sapiens
  CDR3 for beta chain variable domain of TCR clone 308065 (TRBV19, TRBJ2-5)
CASSIPYGETQYF

SEQ ID NO: 616131 - protein, 14 aa, Homo sapiens
  CDR3 for alpha chain variable domain of TCR clone 308066 (TRAV12-2, TRAJ44)
CAVNPAGTASKLTF

SEQ ID NO: 616132 - protein, 14 aa, Homo sapiens
  CDR3 for beta chain variable domain of TCR clone 308066 (TRBV6-1, TRBJ1-3)
CASVQGGGGNTIYV

SEQ ID NO: 616133 - protein, 14 aa, Homo sapiens
  CDR3 for alpha chain variable domain of TCR clone 308067 (TRAV20, TRAJ22)
CAVQVSGSARQLTF

SEQ ID NO: 616134 - protein, 13 aa, Homo sapiens
  CDR3 for beta chain variable domain of TCR clone 308067 (TRBV20-1, TRBJ2-5)
GSAREGGKETQYF

SEQ ID NO: 616135 - protein, 15 aa, Homo sapiens
  CDR3 for alpha chain variable domain of TCR clone 308068 (TRAV21, TRAJ24)
CAARSSTDSWGKLQF

SEQ ID NO: 616136 - protein, 13 aa, Homo sapiens
  CDR3 for beta chain variable domain of TCR clone 308068 (TRBV11-2, TRBJ2-1)
CASSSEAYNEQFF

SEQ ID NO: 616137 - protein, 17 aa, Homo sapiens
  CDR3 for alpha chain variable domain of TCR clone 308069 (TRAV3, TRAJ6)
CAVRDGPRAGGSYIPTF

SEQ ID NO: 616138 - protein, 14 aa, Homo sapiens
  CDR3 for beta chain variable domain of TCR clone 308069 (TRBV4-2, TRBJ2-7)
CASSHRTGEYEQYF

SEQ ID NO: 616139 - protein, 16 aa, Homo sapiens
  CDR3 for alpha chain variable domain of TCR clone 308070 (TRAV12-1, TRAJ42)
CVVTPYYGVSQGNLIF

SEQ ID NO: 616140 - protein, 15 aa, Homo sapiens
  CDR3 for beta chain variable domain of TCR clone 308070 (TRBV4-3, TRBJ2-7)
CASSQGGRGIYEQYF

SEQ ID NO: 616141 - protein, 18 aa, Homo sapiens
  CDR3 for alpha chain variable domain of TCR clone 308071 (TRAV13-1, TRAJ52)
CAASKRSAGGTSYGKLIF

SEQ ID NO: 616142 - protein, 11 aa, Homo sapiens
  CDR3 for beta chain variable domain of TCR clone 308071 (TRBV11-2, TRBJ2-2)
CQQPWRRELFF

SEQ ID NO: 616143 - protein, 12 aa, Homo sapiens
  CDR3 for alpha chain variable domain of TCR clone 308072 (TRAV21, TRAJ33)
CAKMDSNYQLIW

SEQ ID NO: 616144 - protein, 13 aa, Homo sapiens
  CDR3 for beta chain variable domain of TCR clone 308072 (TRBV4-1, TRBJ2-2)
CASSQENTGELFF

SEQ ID NO: 616145 - protein, 13 aa, Homo sapiens
  CDR3 for alpha chain variable domain of TCR clone 308073 (TRAV13-1, TRAJ20)
CAARVSNDYKLSF

SEQ ID NO: 616146 - protein, 16 aa, Homo sapiens
  CDR3 for beta chain variable domain of TCR clone 308073 (TRBV11-1, TRBJ1-1)
CATNTRDRAFDTEAFF

SEQ ID NO: 616147 - protein, 15 aa, Homo sapiens
  CDR3 for alpha chain variable domain of TCR clone 308074 (TRAV3, TRAJ20)
CAVRDIKLSDYQLSF

SEQ ID NO: 616148 - protein, 15 aa, Homo sapiens
  CDR3 for beta chain variable domain of TCR clone 308074 (TRBV20-1, TRBJ2-7)
CSARDRVSGMDEQYF

SEQ ID NO: 616149 - protein, 14 aa, Homo sapiens
  CDR3 for alpha chain variable domain of TCR clone 308075 (TRAV8-3, TRAJ37)
CAVGSSGNTGTLIF

SEQ ID NO: 616150 - protein, 15 aa, Homo sapiens
  CDR3 for beta chain variable domain of TCR clone 308075 (TRBV11-2, TRBJ1-3)
CASSLSPLVRDTIYF

SEQ ID NO: 616151 - protein, 12 aa, Homo sapiens
  CDR3 for alpha chain variable domain of TCR clone 308076 (TRAV2, TRAJ31)
CAVEDNNARLMF

SEQ ID NO: 616152 - protein, 16 aa, Homo sapiens
  CDR3 for beta chain variable domain of TCR clone 308076 (TRBV10-3, TRBJ2-1)
CAISGVEDGGGGEQFF

SEQ ID NO: 616153 - protein, 15 aa, Homo sapiens
  CDR3 for alpha chain variable domain of TCR clone 308077 (TRAV4, TRAJ26)
CLVGDMNNYGQNFIF

SEQ ID NO: 616154 - protein, 16 aa, Homo sapiens
  CDR3 for beta chain variable domain of TCR clone 308077 (TRBV28, TRBJ1-4)
CASSSRTGAANEKLFF

SEQ ID NO: 616155 - protein, 12 aa, Homo sapiens
  CDR3 for alpha chain variable domain of TCR clone 308078 (TRAV12-3, TRAJ17)
CAMTLTGNKLTF

SEQ ID NO: 616156 - protein, 15 aa, Homo sapiens
  CDR3 for beta chain variable domain of TCR clone 308078 (TRBV28, TRBJ2-1)
CASSIIAGGISEQFF

SEQ ID NO: 616157 - protein, 15 aa, Homo sapiens
  CDR3 for alpha chain variable domain of TCR clone 308079 (TRAV3, TRAJ20)
CAVRDIKLSDYKPSF

SEQ ID NO: 616158 - protein, 19 aa, Homo sapiens
  CDR3 for beta chain variable domain of TCR clone 308079 (TRBV28, TRBJ2-7)
CASSYSGTSRLGWVYEQYF

SEQ ID NO: 616159 - protein, 12 aa, Homo sapiens
  CDR3 for alpha chain variable domain of TCR clone 308080 (TRAV17, TRAJ30)
CATDARDDKIIF

SEQ ID NO: 616160 - protein, 15 aa, Homo sapiens
  CDR3 for beta chain variable domain of TCR clone 308080 (TRBV4-1, TRBJ2-1)
CASSHGGELYNEQFF

SEQ ID NO: 616161 - protein, 12 aa, Homo sapiens
  CDR3 for alpha chain variable domain of TCR clone 308081 (TRAV12-1, TRAJ34)
CVVTFNTDKLIF

SEQ ID NO: 616162 - protein, 14 aa, Homo sapiens
  CDR3 for beta chain variable domain of TCR clone 308081 (TRBV19, TRBJ1-1)
CASLRTGLTTEAFF

SEQ ID NO: 616163 - protein, 14 aa, Homo sapiens
  CDR3 for alpha chain variable domain of TCR clone 308082 (TRAV12-2, TRAJ17)
CAVLFKAAGNKLTF

SEQ ID NO: 616164 - protein, 18 aa, Homo sapiens
  CDR3 for beta chain variable domain of TCR clone 308082 (TRBV11-2, TRBJ2-6)
CASSLNPFLGTGANVLTF

SEQ ID NO: 616165 - protein, 15 aa, Homo sapiens
  CDR3 for alpha chain variable domain of TCR clone 308083 (TRAV35, TRAJ20)
CAGQLVGSNDYKLSF

SEQ ID NO: 616166 - protein, 16 aa, Homo sapiens
  CDR3 for beta chain variable domain of TCR clone 308083 (TRBV15, TRBJ1-2)
CATSRGPRTGRGGYTF

SEQ ID NO: 616167 - protein, 15 aa, Homo sapiens
  CDR3 for alpha chain variable domain of TCR clone 308084 (TRAV26-2, TRAJ50)
CILRDEETSYDKLIF

SEQ ID NO: 616168 - protein, 16 aa, Homo sapiens
  CDR3 for beta chain variable domain of TCR clone 308084 (TRBV9, TRBJ2-1)
CASSVGGGGNYNEQFF

SEQ ID NO: 616169 - protein, 12 aa, Homo sapiens
  CDR3 for alpha chain variable domain of TCR clone 308085 (TRAV3, TRAJ20)
CAVRDPDYKLSV

SEQ ID NO: 616170 - protein, 14 aa, Homo sapiens
  CDR3 for beta chain variable domain of TCR clone 308085 (TRBV4-2, TRBJ2-1)
CASGLDRAYNEQFF

SEQ ID NO: 616171 - protein, 13 aa, Homo sapiens
  CDR3 for alpha chain variable domain of TCR clone 308086 (TRAV3, TRAJ43)
CAVKARNNNDLRF

SEQ ID NO: 616172 - protein, 16 aa, Homo sapiens
  CDR3 for beta chain variable domain of TCR clone 308086 (TRBV7-9, TRBJ2-3)
CASSFSVAGGTDTQYF

SEQ ID NO: 616173 - protein, 16 aa, Homo sapiens
  CDR3 for alpha chain variable domain of TCR clone 308087 (TRAV8-3, TRAJ44)
CAVGASNTGTASRRTF

SEQ ID NO: 616174 - protein, 15 aa, Homo sapiens
  CDR3 for beta chain variable domain of TCR clone 308087 (TRBV27, TRBJ1-5)
CASTFNRGSNQPQHF

SEQ ID NO: 616175 - protein, 15 aa, Homo sapiens
  CDR3 for alpha chain variable domain of TCR clone 308088 (TRAV9-2, TRAJ28)
CALSISGAGSYQLTF

SEQ ID NO: 616176 - protein, 14 aa, Homo sapiens
  CDR3 for beta chain variable domain of TCR clone 308088 (TRBV19, TRBJ2-1)
CASPTVVLSGEQFF

SEQ ID NO: 616177 - protein, 14 aa, Homo sapiens
  CDR3 for alpha chain variable domain of TCR clone 308089 (TRAV13-1, TRAJ48)
CAASRSFGNEKLTF

SEQ ID NO: 616178 - protein, 14 aa, Homo sapiens
  CDR3 for beta chain variable domain of TCR clone 308089 (TRBV7-9, TRBJ1-6)
CASRPGTVNSPLHF

SEQ ID NO: 616179 - protein, 15 aa, Homo sapiens
  CDR3 for alpha chain variable domain of TCR clone 308090 (TRAV3, TRAJ47)
CAVRDTGEYGNKLVF

SEQ ID NO: 616180 - protein, 14 aa, Homo sapiens
  CDR3 for beta chain variable domain of TCR clone 308090 (TRBV13, TRBJ2-5)
CASSLERVGETQYF

SEQ ID NO: 616181 - protein, 11 aa, Homo sapiens
  CDR3 for alpha chain variable domain of TCR clone 308091 (TRAV23/DV6, TRAJ48)
CAPRWCEKLTF

SEQ ID NO: 616182 - protein, 13 aa, Homo sapiens
  CDR3 for beta chain variable domain of TCR clone 308091 (TRBV12-4, TRBJ2-5)
CASSPGTEETQYF

SEQ ID NO: 616183 - protein, 13 aa, Homo sapiens
  CDR3 for alpha chain variable domain of TCR clone 308092 (TRAV16, TRAJ20)
CALKGGAQGRLQA

SEQ ID NO: 616184 - protein, 16 aa, Homo sapiens
  CDR3 for beta chain variable domain of TCR clone 308092 (TRBV11-3, TRBJ2-2)
CASSSRTSPGTGELFF

SEQ ID NO: 616185 - protein, 12 aa, Homo sapiens
  CDR3 for alpha chain variable domain of TCR clone 308093 (TRAV23/DV6, TRAJ17)
CARGSCRQQANF

SEQ ID NO: 616186 - protein, 14 aa, Homo sapiens
  CDR3 for beta chain variable domain of TCR clone 308093 (TRBV7-2, TRBJ1-2)
CASSQTGSTYGYPF

SEQ ID NO: 616187 - protein, 15 aa, Homo sapiens
  CDR3 for alpha chain variable domain of TCR clone 308094 (TRAV12-1, TRAJ36)
CLVNEHQTGANNLFF

SEQ ID NO: 616188 - protein, 12 aa, Homo sapiens
  CDR3 for beta chain variable domain of TCR clone 308094 (TRBV29-1, TRBJ2-3)
CSVTGGADTQYF

SEQ ID NO: 616189 - protein, 12 aa, Homo sapiens
  CDR3 for alpha chain variable domain of TCR clone 308095 (TRAV12-1, TRAJ40)
SVFYSGTYKYIF

SEQ ID NO: 616190 - protein, 18 aa, Homo sapiens
  CDR3 for beta chain variable domain of TCR clone 308095 (TRBV12-4, TRBJ2-2)
CASSLVAGTRGRTGELFF

SEQ ID NO: 616191 - protein, 14 aa, Homo sapiens
  CDR3 for alpha chain variable domain of TCR clone 308096 (TRAV1-2, TRAJ16)
CAVNRFSDGRKLLF

SEQ ID NO: 616192 - protein, 14 aa, Homo sapiens
  CDR3 for beta chain variable domain of TCR clone 308096 (TRBV13, TRBJ2-5)
CASSLGRGQKTQYF

SEQ ID NO: 616193 - protein, 17 aa, Homo sapiens
  CDR3 for alpha chain variable domain of TCR clone 308097 (TRAV2, TRAJ36)
CAVEDRGNWGKQPLLWD

SEQ ID NO: 616194 - protein, 13 aa, Homo sapiens
  CDR3 for beta chain variable domain of TCR clone 308097 (TRBV7-9, TRBJ1-2)
CASSLKQNYGYTF

SEQ ID NO: 616195 - protein, 14 aa, Homo sapiens
  CDR3 for alpha chain variable domain of TCR clone 308098 (TRAV2, TRAJ3)
CAVPPYSSASKIIF

SEQ ID NO: 616196 - protein, 16 aa, Homo sapiens
  CDR3 for beta chain variable domain of TCR clone 308098 (TRBV7-9, TRBJ1-2)
CASSLGFSSGEDGYTF

SEQ ID NO: 616197 - protein, 13 aa, Homo sapiens
  CDR3 for alpha chain variable domain of TCR clone 308099 (TRAV12-1, TRAJ40)
CVVPTSGTYKYIF

SEQ ID NO: 616198 - protein, 16 aa, Homo sapiens
  CDR3 for beta chain variable domain of TCR clone 308099 (TRBV12-5, TRBJ2-5)
CASGPRTSGNQETQYF

SEQ ID NO: 616199 - protein, 14 aa, Homo sapiens
  CDR3 for alpha chain variable domain of TCR clone 308100 (TRAV3, TRAJ7)
CTVREEEREQQTRF

SEQ ID NO: 616200 - protein, 14 aa, Homo sapiens
  CDR3 for beta chain variable domain of TCR clone 308100 (TRBV7-7, TRBJ2-2)
CASSTRASGGEPFF

SEQ ID NO: 616201 - protein, 15 aa, Homo sapiens
  CDR3 for alpha chain variable domain of TCR clone 308101 (TRAV13-1, TRAJ3)
CAATPGYSSASKIIL

SEQ ID NO: 616202 - protein, 15 aa, Homo sapiens
  CDR3 for beta chain variable domain of TCR clone 308101 (TRBV20-1, TRBJ2-7)
CSARDRVSGMDEQYF

SEQ ID NO: 616203 - protein, 14 aa, Homo sapiens
  CDR3 for alpha chain variable domain of TCR clone 308102 (TRAV1-2, TRAJ8)
CAGREDTGFQKLVF

SEQ ID NO: 616204 - protein, 15 aa, Homo sapiens
  CDR3 for beta chain variable domain of TCR clone 308102 (TRBV27, TRBJ2-1)
CASSNGGGSSNEQFF

SEQ ID NO: 616205 - protein, 12 aa, Homo sapiens
  CDR3 for alpha chain variable domain of TCR clone 308103 (TRAV1-1, TRAJ43)
CAPRVSSNDMRF

SEQ ID NO: 616206 - protein, 15 aa, Homo sapiens
  CDR3 for beta chain variable domain of TCR clone 308103 (TRBV15, TRBJ1-5)
CATSRDPVSNQPQHF

SEQ ID NO: 616207 - protein, 12 aa, Homo sapiens
  CDR3 for alpha chain variable domain of TCR clone 308104 (TRAV8-3, TRAJ4)
PAFSGGYNKLFF

SEQ ID NO: 616208 - protein, 13 aa, Homo sapiens
  CDR3 for beta chain variable domain of TCR clone 308104 (TRBV20-1, TRBJ1-3)
CSAGAYSGNTIYF

SEQ ID NO: 616209 - protein, 15 aa, Homo sapiens
  CDR3 for alpha chain variable domain of TCR clone 308105 (TRAV3, TRAJ3)
CAVRDMSSSASKIIF

SEQ ID NO: 616210 - protein, 14 aa, Homo sapiens
  CDR3 for beta chain variable domain of TCR clone 308105 (TRBV15, TRBJ2-7)
CATSRVARGYEQYF

SEQ ID NO: 616211 - protein, 15 aa, Homo sapiens
  CDR3 for alpha chain variable domain of TCR clone 308106 (TRAV2, TRAJ13)
CASPSYSGGYQKVTF

SEQ ID NO: 616212 - protein, 13 aa, Homo sapiens
  CDR3 for beta chain variable domain of TCR clone 308106 (TRBV14, TRBJ1-5)
CASSQDRRGPQHF

SEQ ID NO: 616213 - protein, 13 aa, Homo sapiens
  CDR3 for alpha chain variable domain of TCR clone 308107 (TRAV21, TRAJ44)
CAADTGTASKLTF

SEQ ID NO: 616214 - protein, 19 aa, Homo sapiens
  CDR3 for beta chain variable domain of TCR clone 308107 (TRBV3-1, TRBJ2-1)
CASSRMIVPGLAGKNEQFF

SEQ ID NO: 616215 - protein, 16 aa, Homo sapiens
  CDR3 for alpha chain variable domain of TCR clone 308108 (TRAV30, TRAJ24)
CGTEIVDADSWGKCQF

SEQ ID NO: 616216 - protein, 14 aa, Homo sapiens
  CDR3 for beta chain variable domain of TCR clone 308108 (TRBV9, TRBJ2-4)
CASSPSGTSGLQYF

SEQ ID NO: 616217 - protein, 11 aa, Homo sapiens
  CDR3 for alpha chain variable domain of TCR clone 308109 (TRAV12-3, TRAJ43)
CAMSVSDDMRF

SEQ ID NO: 616218 - protein, 13 aa, Homo sapiens
  CDR3 for beta chain variable domain of TCR clone 308109 (TRBV20-1, TRBJ1-1)
CSTPLGGGTEAFF

SEQ ID NO: 616219 - protein, 15 aa, Homo sapiens
  CDR3 for alpha chain variable domain of TCR clone 308110 (TRAV12-3, TRAJ11)
CAMSEENSGYSTLTF

SEQ ID NO: 616220 - protein, 14 aa, Homo sapiens
  CDR3 for beta chain variable domain of TCR clone 308110 (TRBV18, TRBJ2-5)
CASSRGVSQETQYF

SEQ ID NO: 616221 - protein, 14 aa, Homo sapiens
  CDR3 for alpha chain variable domain of TCR clone 308111 (TRAV12-3, TRAJ54)
CAMSALQGSQKLVF

SEQ ID NO: 616222 - protein, 15 aa, Homo sapiens
  CDR3 for beta chain variable domain of TCR clone 308111 (TRBV19, TRBJ2-4)
CASSTPGIAKNIQYF

SEQ ID NO: 616223 - protein, 15 aa, Homo sapiens
  CDR3 for alpha chain variable domain of TCR clone 308112 (TRAV26-1, TRAJ44)
CIVRANTGTASKRTV

SEQ ID NO: 616224 - protein, 16 aa, Homo sapiens
  CDR3 for beta chain variable domain of TCR clone 308112 (TRBV7-7, TRBJ2-1)
CARSLASGTSYNEQFF

SEQ ID NO: 616225 - protein, 15 aa, Homo sapiens
  CDR3 for alpha chain variable domain of TCR clone 308113 (TRAV25, TRAJ52)
CAGRPGGTSYGKLTF

SEQ ID NO: 616226 - protein, 17 aa, Homo sapiens
  CDR3 for beta chain variable domain of TCR clone 308113 (TRBV7-8, TRBJ2-6)
CASSSGTGGAGANVLTS

SEQ ID NO: 616227 - protein, 11 aa, Homo sapiens
  CDR3 for alpha chain variable domain of TCR clone 308114 (TRAV12-1, TRAJ41)
CVALSGYALNF

SEQ ID NO: 616228 - protein, 13 aa, Homo sapiens
  CDR3 for beta chain variable domain of TCR clone 308114 (TRBV2, TRBJ1-5)
CASSQGGSQPQHF

SEQ ID NO: 616229 - protein, 15 aa, Homo sapiens
  CDR3 for alpha chain variable domain of TCR clone 308115 (TRAV21, TRAJ32)
CAVNSHGGATNKLIF

SEQ ID NO: 616230 - protein, 18 aa, Homo sapiens
  CDR3 for beta chain variable domain of TCR clone 308115 (TRBV7-9, TRBJ2-1)
CASSTGLAEGSSYNEQFF

SEQ ID NO: 616231 - protein, 16 aa, Homo sapiens
  CDR3 for alpha chain variable domain of TCR clone 308116 (TRAV12-1, TRAJ10)
CVVEKDSGGGGNKLTF

SEQ ID NO: 616232 - protein, 13 aa, Homo sapiens
  CDR3 for beta chain variable domain of TCR clone 308116 (TRBV4-1, TRBJ2-5)
CASSQEVQETQYF

SEQ ID NO: 616233 - protein, 13 aa, Homo sapiens
  CDR3 for alpha chain variable domain of TCR clone 308117 (TRAV20, TRAJ37)
CAGCSSNTGKLIF

SEQ ID NO: 616234 - protein, 15 aa, Homo sapiens
  CDR3 for beta chain variable domain of TCR clone 308117 (TRBV7-3, TRBJ2-1)
CASSLSSGSFDEQFF

SEQ ID NO: 616235 - protein, 14 aa, Homo sapiens
  CDR3 for alpha chain variable domain of TCR clone 308118 (TRAV16, TRAJ15)
CALSCPQAGTALIF

SEQ ID NO: 616236 - protein, 17 aa, Homo sapiens
  CDR3 for beta chain variable domain of TCR clone 308118 (TRBV7-8, TRBJ2-6)
CASSAGTGGAGANVLTF

SEQ ID NO: 616237 - protein, 12 aa, Homo sapiens
  CDR3 for alpha chain variable domain of TCR clone 308119 (TRAV12-3, TRAJ17)
CAMTLTGNKLTF

SEQ ID NO: 616238 - protein, 19 aa, Homo sapiens
  CDR3 for beta chain variable domain of TCR clone 308119 (TRBV12-4, TRBJ2-1)
CASTLAFDPRDKEANEQFF

SEQ ID NO: 616239 - protein, 16 aa, Homo sapiens
  CDR3 for alpha chain variable domain of TCR clone 308120 (TRAV12-3, TRAJ45)
CAMGWGSGGGADGLTF

SEQ ID NO: 616240 - protein, 13 aa, Homo sapiens
  CDR3 for beta chain variable domain of TCR clone 308120 (TRBV7-9, TRBJ1-2)
CASSLKQNYGYTF

SEQ ID NO: 616241 - protein, 13 aa, Homo sapiens
  CDR3 for alpha chain variable domain of TCR clone 308121 (TRAV8-3, TRAJ44)
CAVVPGTASKLTF

SEQ ID NO: 616242 - protein, 14 aa, Homo sapiens
  CDR3 for beta chain variable domain of TCR clone 308121 (TRBV11-2, TRBJ2-3)
CASRRLPRTDTHYF

SEQ ID NO: 616243 - protein, 12 aa, Homo sapiens
  CDR3 for alpha chain variable domain of TCR clone 308122 (TRAV38-2/DV8, TRAJ48)
CALLSGNAKLTF

SEQ ID NO: 616244 - protein, 14 aa, Homo sapiens
  CDR3 for beta chain variable domain of TCR clone 308122 (TRBV11-2, TRBJ2-3)
CASSRLARTDTQYF

SEQ ID NO: 616245 - protein, 12 aa, Homo sapiens
  CDR3 for alpha chain variable domain of TCR clone 308123 (TRAV12-2, TRAJ7)
CAVLRGNNRLAF

SEQ ID NO: 616246 - protein, 12 aa, Homo sapiens
  CDR3 for beta chain variable domain of TCR clone 308123 (TRBV7-8, TRBJ2-7)
CASSLGDREQYF

SEQ ID NO: 616247 - protein, 14 aa, Homo sapiens
  CDR3 for alpha chain variable domain of TCR clone 308124 (TRAV14/DV4, TRAJ58)
CAMMKETSGSRLTF

SEQ ID NO: 616248 - protein, 12 aa, Homo sapiens
  CDR3 for beta chain variable domain of TCR clone 308124 (TRBV12-4, TRBJ2-1)
CASIYVLNEQFF

SEQ ID NO: 616249 - protein, 13 aa, Homo sapiens
  CDR3 for alpha chain variable domain of TCR clone 308125 (TRAV23/DV6, TRAJ15)
CAALPACRNCSDL

SEQ ID NO: 616250 - protein, 14 aa, Homo sapiens
  CDR3 for beta chain variable domain of TCR clone 308125 (TRBV7-9, TRBJ1-2)
CASSRQGANYGYTF

SEQ ID NO: 616251 - protein, 16 aa, Homo sapiens
  CDR3 for alpha chain variable domain of TCR clone 308126 (TRAV26-1, TRAJ6)
CIVRVPRTGGSYIPTF

SEQ ID NO: 616252 - protein, 14 aa, Homo sapiens
  CDR3 for beta chain variable domain of TCR clone 308126 (TRBV13, TRBJ2-7)
CASSLKGASYEQYF

SEQ ID NO: 616253 - protein, 13 aa, Homo sapiens
  CDR3 for alpha chain variable domain of TCR clone 308127 (TRAV1-2, TRAJ9)
CAALNTGGFKTIF

SEQ ID NO: 616254 - protein, 14 aa, Homo sapiens
  CDR3 for beta chain variable domain of TCR clone 308127 (TRBV19, TRBJ1-4)
CASSMGRPNEKLFF

SEQ ID NO: 616255 - protein, 14 aa, Homo sapiens
  CDR3 for alpha chain variable domain of TCR clone 308128 (TRAV26-1, TRAJ38)
CIADNAGNNRKLIW

SEQ ID NO: 616256 - protein, 13 aa, Homo sapiens
  CDR3 for beta chain variable domain of TCR clone 308128 (TRBV10-3, TRBJ1-2)
CAINADLNYGYTF

SEQ ID NO: 616257 - protein, 16 aa, Homo sapiens
  CDR3 for alpha chain variable domain of TCR clone 308129 (TRAV8-3, TRAJ10)
CAVGPILTGGGNKLTF

SEQ ID NO: 616258 - protein, 16 aa, Homo sapiens
  CDR3 for beta chain variable domain of TCR clone 308129 (TRBV29-1, TRBJ2-5)
SAARTERGPILRARHA

SEQ ID NO: 616259 - protein, 14 aa, Homo sapiens
  CDR3 for alpha chain variable domain of TCR clone 308130 (TRAV12-2, TRAJ40)
CAVKIPSGTYKYNF

SEQ ID NO: 616260 - protein, 14 aa, Homo sapiens
  CDR3 for beta chain variable domain of TCR clone 308130 (TRBV20-1, TRBJ1-1)
CSAQTRIGGTEAFC

SEQ ID NO: 616261 - protein, 10 aa, Homo sapiens
  CDR3 for alpha chain variable domain of TCR clone 308131 (TRAV8-6, TRAJ26)
CGGDGQNFVF

SEQ ID NO: 616262 - protein, 14 aa, Homo sapiens
  CDR3 for beta chain variable domain of TCR clone 308131 (TRBV7-2, TRBJ2-5)
CASSPRGSSETQYF

SEQ ID NO: 616263 - protein, 13 aa, Homo sapiens
  CDR3 for alpha chain variable domain of TCR clone 308132 (TRAV20, TRAJ21)
CAVEGYNFNKLYF

SEQ ID NO: 616264 - protein, 14 aa, Homo sapiens
  CDR3 for beta chain variable domain of TCR clone 308132 (TRBV3-1, TRBJ2-5)
CASSKGPDQETQYF

SEQ ID NO: 616265 - protein, 14 aa, Homo sapiens
  CDR3 for alpha chain variable domain of TCR clone 308133 (TRAV27, TRAJ23)
CAGRSYNQGGKLIF

SEQ ID NO: 616266 - protein, 15 aa, Homo sapiens
  CDR3 for beta chain variable domain of TCR clone 308133 (TRBV20-1, TRBJ2-7)
CSARDRVSGMDEQYF

SEQ ID NO: 616267 - protein, 14 aa, Homo sapiens
  CDR3 for alpha chain variable domain of TCR clone 308134 (TRAV1-2, TRAJ6)
CAVSLSGGSYIPTF

SEQ ID NO: 616268 - protein, 17 aa, Homo sapiens
  CDR3 for beta chain variable domain of TCR clone 308134 (TRBV7-9, TRBJ2-3)
CASSPTVAGDLTDTQYF

SEQ ID NO: 616269 - protein, 12 aa, Homo sapiens
  CDR3 for alpha chain variable domain of TCR clone 308135 (TRAV2, TRAJ10)
CASTGAGNKLTF

SEQ ID NO: 616270 - protein, 14 aa, Homo sapiens
  CDR3 for beta chain variable domain of TCR clone 308135 (TRBV7-2, TRBJ2-2)
CASRGQGAAGELFF

SEQ ID NO: 616271 - protein, 16 aa, Homo sapiens
  CDR3 for alpha chain variable domain of TCR clone 308136 (TRAV3, TRAJ10)
CAVRDMSAGGGNKLTF

SEQ ID NO: 616272 - protein, 15 aa, Homo sapiens
  CDR3 for beta chain variable domain of TCR clone 308136 (TRBV5-7, TRBJ1-5)
CASSYGKLWDQPQHF

SEQ ID NO: 616273 - protein, 17 aa, Homo sapiens
  CDR3 for alpha chain variable domain of TCR clone 308137 (TRAV3, TRAJ6)
CAVRDGPRAGGSYIPTF

SEQ ID NO: 616274 - protein, 13 aa, Homo sapiens
  CDR3 for beta chain variable domain of TCR clone 308137 (TRBV12-5, TRBJ2-3)
CASRDRQSDTQYF

SEQ ID NO: 616275 - protein, 11 aa, Homo sapiens
  CDR3 for alpha chain variable domain of TCR clone 308138 (TRAV38-2/DV8, TRAJ24)
CALDSWGKFQF

SEQ ID NO: 616276 - protein, 15 aa, Homo sapiens
  CDR3 for beta chain variable domain of TCR clone 308138 (TRBV9, TRBJ1-6)
CASSVSGTGDSPLHF

SEQ ID NO: 616277 - protein, 16 aa, Homo sapiens
  CDR3 for alpha chain variable domain of TCR clone 308139 (TRAV27, TRAJ13)
CAGAKSDSGGYQKVTF

SEQ ID NO: 616278 - protein, 13 aa, Homo sapiens
  CDR3 for beta chain variable domain of TCR clone 308139 (TRBV7-3, TRBJ2-2)
CASSLWSVGELFF

SEQ ID NO: 616279 - protein, 18 aa, Homo sapiens
  CDR3 for alpha chain variable domain of TCR clone 308140 (TRAV12-3, TRAJ52)
CAMSVGGAGGTSYGKWTF

SEQ ID NO: 616280 - protein, 14 aa, Homo sapiens
  CDR3 for beta chain variable domain of TCR clone 308140 (TRBV7-2, TRBJ2-7)
CASRSQGAAYEQYF

SEQ ID NO: 616281 - protein, 12 aa, Homo sapiens
  CDR3 for alpha chain variable domain of TCR clone 308141 (TRAV16, TRAJ53)
CALRVSNYKLTF

SEQ ID NO: 616282 - protein, 16 aa, Homo sapiens
  CDR3 for beta chain variable domain of TCR clone 308141 (TRBV5-1, TRBJ2-2)
CASSSRTGGRTGELFF

SEQ ID NO: 616283 - protein, 11 aa, Homo sapiens
  CDR3 for alpha chain variable domain of TCR clone 308142 (TRAV8-3, TRAJ16)
CAVVPCQKLLF

SEQ ID NO: 616284 - protein, 12 aa, Homo sapiens
  CDR3 for beta chain variable domain of TCR clone 308142 (TRBV3-1, TRBJ1-1)
CASSQDPTAAFF

SEQ ID NO: 616285 - protein, 11 aa, Homo sapiens
  CDR3 for alpha chain variable domain of TCR clone 308143 (TRAV1-1, TRAJ23)
CAVRHGGKLIF

SEQ ID NO: 616286 - protein, 12 aa, Homo sapiens
  CDR3 for beta chain variable domain of TCR clone 308143 (TRBV19, TRBJ1-5)
CASSIAQQPQHF

SEQ ID NO: 616287 - protein, 18 aa, Homo sapiens
  CDR3 for alpha chain variable domain of TCR clone 308144 (TRAV35, TRAJ45)
CAGQSTMYSGGGADGLTF

SEQ ID NO: 616288 - protein, 12 aa, Homo sapiens
  CDR3 for beta chain variable domain of TCR clone 308144 (TRBV7-9, TRBJ2-2)
CASSLDTGELFF

SEQ ID NO: 616289 - protein, 11 aa, Homo sapiens
  CDR3 for alpha chain variable domain of TCR clone 308145 (TRAV2, TRAJ13)
CDSGGYQKVTF

SEQ ID NO: 616290 - protein, 17 aa, Homo sapiens
  CDR3 for beta chain variable domain of TCR clone 308145 (TRBV28, TRBJ2-5)
CASSTPEGDALQETQYF

SEQ ID NO: 616291 - protein, 15 aa, Homo sapiens
  CDR3 for alpha chain variable domain of TCR clone 308146 (TRAV8-3, TRAJ27)
CAVGPSKTNAGKSTF

SEQ ID NO: 616292 - protein, 15 aa, Homo sapiens
  CDR3 for beta chain variable domain of TCR clone 308146 (TRBV4-1, TRBJ2-7)
CASSQQGQGFDEQYF

SEQ ID NO: 616293 - protein, 13 aa, Homo sapiens
  CDR3 for alpha chain variable domain of TCR clone 308147 (TRAV13-1, TRAJ12)
CAASPNSSYKLIF

SEQ ID NO: 616294 - protein, 16 aa, Homo sapiens
  CDR3 for beta chain variable domain of TCR clone 308147 (TRBV15, TRBJ2-1)
CATSRERLAGAYEQFF

SEQ ID NO: 616295 - protein, 15 aa, Homo sapiens
  CDR3 for alpha chain variable domain of TCR clone 308148 (TRAV17, TRAJ38)
CAMDYNAGNNRKLIW

SEQ ID NO: 616296 - protein, 14 aa, Homo sapiens
  CDR3 for beta chain variable domain of TCR clone 308148 (TRBV7-6, TRBJ2-7)
CASSFRQGADEQYF

SEQ ID NO: 616297 - protein, 19 aa, Homo sapiens
  CDR3 for alpha chain variable domain of TCR clone 308149 (TRAV26-1, TRAJ28)
CIVRVAHAYSGAGSYQLTF

SEQ ID NO: 616298 - protein, 16 aa, Homo sapiens
  CDR3 for beta chain variable domain of TCR clone 308149 (TRBV12-5, TRBJ2-5)
CASGPRTSGNQETQYF

SEQ ID NO: 616299 - protein, 15 aa, Homo sapiens
  CDR3 for alpha chain variable domain of TCR clone 308150 (TRAV25, TRAJ53)
CAATGGGGSNYKLTF

SEQ ID NO: 616300 - protein, 19 aa, Homo sapiens
  CDR3 for beta chain variable domain of TCR clone 308150 (TRBV7-2, TRBJ2-3)
CASSFLSRNWGGGTDTQYV

SEQ ID NO: 616301 - protein, 10 aa, Homo sapiens
  CDR3 for alpha chain variable domain of TCR clone 308151 (TRAV38-2/DV8, TRAJ40)
CASGNYKYIF

SEQ ID NO: 616302 - protein, 14 aa, Homo sapiens
  CDR3 for beta chain variable domain of TCR clone 308151 (TRBV7-9, TRBJ2-1)
CASSPRDSLYEQFF

SEQ ID NO: 616303 - protein, 13 aa, Homo sapiens
  CDR3 for alpha chain variable domain of TCR clone 308152 (TRAV26-2, TRAJ43)
CILRAGNNNDMRF

SEQ ID NO: 616304 - protein, 15 aa, Homo sapiens
  CDR3 for beta chain variable domain of TCR clone 308152 (TRBV7-8, TRBJ2-1)
CASTHGTGIYNEQFF

SEQ ID NO: 616305 - protein, 14 aa, Homo sapiens
  CDR3 for alpha chain variable domain of TCR clone 308153 (TRAV1-2, TRAJ16)
CAVNRFSDGQKLLF

SEQ ID NO: 616306 - protein, 17 aa, Homo sapiens
  CDR3 for beta chain variable domain of TCR clone 308153 (TRBV6-1, TRBJ1-5)
CASSEAEFIRARQPQHF

SEQ ID NO: 616307 - protein, 15 aa, Homo sapiens
  CDR3 for alpha chain variable domain of TCR clone 308154 (TRAV26-1, TRAJ22)
CIVRVSFWFCKATDL

SEQ ID NO: 616308 - protein, 14 aa, Homo sapiens
  CDR3 for beta chain variable domain of TCR clone 308154 (TRBV18, TRBJ1-5)
CASSPGNSNQPQHF

SEQ ID NO: 616309 - protein, 15 aa, Homo sapiens
  CDR3 for alpha chain variable domain of TCR clone 308155 (TRAV13-1, TRAJ44)
CAACRGGGTASKLTF

SEQ ID NO: 616310 - protein, 14 aa, Homo sapiens
  CDR3 for beta chain variable domain of TCR clone 308155 (TRBV7-2, TRBJ2-5)
CASSPRGSSETQYF

SEQ ID NO: 616311 - protein, 16 aa, Homo sapiens
  CDR3 for alpha chain variable domain of TCR clone 308156 (TRAV12-3, TRAJ53)
CAMSPGSGGSNYKLTF

SEQ ID NO: 616312 - protein, 14 aa, Homo sapiens
  CDR3 for beta chain variable domain of TCR clone 308156 (TRBV28, TRBJ2-7)
CASSLLRISYEQYF

SEQ ID NO: 616313 - protein, 12 aa, Homo sapiens
  CDR3 for alpha chain variable domain of TCR clone 308157 (TRAV26-1, TRAJ39)
CIVRAEGNMLTF

SEQ ID NO: 616314 - protein, 14 aa, Homo sapiens
  CDR3 for beta chain variable domain of TCR clone 308157 (TRBV18, TRBJ2-7)
RASSPRGGAYEQYF

SEQ ID NO: 616315 - protein, 14 aa, Homo sapiens
  CDR3 for alpha chain variable domain of TCR clone 308158 (TRAV23/DV6, TRAJ21)
CAAYKSGPREKFYF

SEQ ID NO: 616316 - protein, 15 aa, Homo sapiens
  CDR3 for beta chain variable domain of TCR clone 308158 (TRBV5-4, TRBJ2-2)
CASSLTSRGTGELFF

SEQ ID NO: 616317 - protein, 13 aa, Homo sapiens
  CDR3 for alpha chain variable domain of TCR clone 308159 (TRAV12-1, TRAJ21)
CVVTLYNFNKFYF

SEQ ID NO: 616318 - protein, 20 aa, Homo sapiens
  CDR3 for beta chain variable domain of TCR clone 308159 (TRBV7-8, TRBJ2-1)
CASSLAHRLSGVRSYNEQFF

SEQ ID NO: 616319 - protein, 16 aa, Homo sapiens
  CDR3 for alpha chain variable domain of TCR clone 308160 (TRAV17, TRAJ28)
CSTDEYSGAGSDQLTF

SEQ ID NO: 616320 - protein, 13 aa, Homo sapiens
  CDR3 for beta chain variable domain of TCR clone 308160 (TRBV7-9, TRBJ1-2)
CASRTGPNYGYTF

SEQ ID NO: 616321 - protein, 15 aa, Homo sapiens
  CDR3 for alpha chain variable domain of TCR clone 308161 (TRAV35, TRAJ40)
CPGQLGTSGTYKYIF

SEQ ID NO: 616322 - protein, 14 aa, Homo sapiens
  CDR3 for beta chain variable domain of TCR clone 308161 (TRBV7-3, TRBJ2-1)
CASSLAGGTNEQFF

SEQ ID NO: 616323 - protein, 16 aa, Homo sapiens
  CDR3 for alpha chain variable domain of TCR clone 308162 (TRAV12-2, TRAJ32)
CAVNLGQGGATNKLIF

SEQ ID NO: 616324 - protein, 15 aa, Homo sapiens
  CDR3 for beta chain variable domain of TCR clone 308162 (TRBV20-1, TRBJ2-7)
CSARGTLAGGRERYF

SEQ ID NO: 616325 - protein, 12 aa, Homo sapiens
  CDR3 for alpha chain variable domain of TCR clone 308163 (TRAV25, TRAJ20)
CAGRSNDYKLSF

SEQ ID NO: 616326 - protein, 14 aa, Homo sapiens
  CDR3 for beta chain variable domain of TCR clone 308163 (TRBV7-6, TRBJ2-7)
CRQRPPHTFGEQYF

SEQ ID NO: 616327 - protein, 14 aa, Homo sapiens
  CDR3 for alpha chain variable domain of TCR clone 308164 (TRAV26-2, TRAJ32)
CCVGYGGATNKLIF

SEQ ID NO: 616328 - protein, 15 aa, Homo sapiens
  CDR3 for beta chain variable domain of TCR clone 308164 (TRBV27, TRBJ2-5)
CASSLDPRGGETQYF

SEQ ID NO: 616329 - protein, 12 aa, Homo sapiens
  CDR3 for alpha chain variable domain of TCR clone 308165 (TRAV20, TRAJ39)
CAVGNAGNMLTF

SEQ ID NO: 616330 - protein, 13 aa, Homo sapiens
  CDR3 for beta chain variable domain of TCR clone 308165 (TRBV7-3, TRBJ1-1)
CASSQDWGAEAFF

SEQ ID NO: 616331 - protein, 14 aa, Homo sapiens
  CDR3 for alpha chain variable domain of TCR clone 308166 (TRAV29/DV5, TRAJ22)
CAASDSGSARQLTF

SEQ ID NO: 616332 - protein, 14 aa, Homo sapiens
  CDR3 for beta chain variable domain of TCR clone 308166 (TRBV19, TRBJ2-1)
CASPTFVLSGEQFF

SEQ ID NO: 616333 - protein, 11 aa, Homo sapiens
  CDR3 for alpha chain variable domain of TCR clone 308167 (TRAV13-1, TRAJ39)
CASHAGNMLTF

SEQ ID NO: 616334 - protein, 14 aa, Homo sapiens
  CDR3 for beta chain variable domain of TCR clone 308167 (TRBV11-2, TRBJ1-5)
CSSSLDRGRQHQHF

SEQ ID NO: 616335 - protein, 17 aa, Homo sapiens
  CDR3 for alpha chain variable domain of TCR clone 308168 (TRAV4, TRAJ13)
CLVGDNLGVTRKLPLEL

SEQ ID NO: 616336 - protein, 12 aa, Homo sapiens
  CDR3 for beta chain variable domain of TCR clone 308168 (TRBV7-8, TRBJ2-7)
CASSLGDREQYF

SEQ ID NO: 616337 - protein, 13 aa, Homo sapiens
  CDR3 for alpha chain variable domain of TCR clone 308169 (TRAV6, TRAJ45)
SPFSGGGADGLTF

SEQ ID NO: 616338 - protein, 11 aa, Homo sapiens
  CDR3 for beta chain variable domain of TCR clone 308169 (TRBV12-4, TRBJ2-3)
CASTATDTQYF

SEQ ID NO: 616339 - protein, 12 aa, Homo sapiens
  CDR3 for alpha chain variable domain of TCR clone 308170 (TRAV3, TRAJ43)
CAVRDPNNDMRF

SEQ ID NO: 616340 - protein, 15 aa, Homo sapiens
  CDR3 for beta chain variable domain of TCR clone 308170 (TRBV19, TRBJ1-6)
CASSTQGAVGSPLHF

SEQ ID NO: 616341 - protein, 12 aa, Homo sapiens
  CDR3 for alpha chain variable domain of TCR clone 308171 (TRAV3, TRAJ39)
CAVIEWSNMLTF

SEQ ID NO: 616342 - protein, 14 aa, Homo sapiens
  CDR3 for beta chain variable domain of TCR clone 308171 (TRBV20-1, TRBJ2-7)
CSAPELAGVGEQYF

SEQ ID NO: 616343 - protein, 13 aa, Homo sapiens
  CDR3 for alpha chain variable domain of TCR clone 308172 (TRAV20, TRAJ42)
CAVQGGSQGNLIY

SEQ ID NO: 616344 - protein, 15 aa, Homo sapiens
  CDR3 for beta chain variable domain of TCR clone 308172 (TRBV10-1, TRBJ2-1)
CASSEWRGTYNEQFF

SEQ ID NO: 616345 - protein, 11 aa, Homo sapiens
  CDR3 for alpha chain variable domain of TCR clone 308173 (TRAV21, TRAJ11)
CAVNGYSTLTF

SEQ ID NO: 616346 - protein, 13 aa, Homo sapiens
  CDR3 for beta chain variable domain of TCR clone 308173 (TRBV12-4, TRBJ2-1)
CASSRAGHNEQFF

SEQ ID NO: 616347 - protein, 18 aa, Homo sapiens
  CDR3 for alpha chain variable domain of TCR clone 308174 (TRAV12-3, TRAJ52)
CAMSVGGAGGTSYGKLTF

SEQ ID NO: 616348 - protein, 13 aa, Homo sapiens
  CDR3 for beta chain variable domain of TCR clone 308174 (TRBV20-1, TRBJ2-7)
CSATHTSGYEQYF

SEQ ID NO: 616349 - protein, 11 aa, Homo sapiens
  CDR3 for alpha chain variable domain of TCR clone 308175 (TRAV17, TRAJ9)
CGFTGGFNTIF

SEQ ID NO: 616350 - protein, 14 aa, Homo sapiens
  CDR3 for beta chain variable domain of TCR clone 308175 (TRBV27, TRBJ2-6)
CASSPPGGANVLTF

SEQ ID NO: 616351 - protein, 13 aa, Homo sapiens
  CDR3 for alpha chain variable domain of TCR clone 308176 (TRAV35, TRAJ21)
CAGQLSNFNKFYF

SEQ ID NO: 616352 - protein, 16 aa, Homo sapiens
  CDR3 for beta chain variable domain of TCR clone 308176 (TRBV4-3, TRBJ2-2)
CASSRLQGSGTGELFF

SEQ ID NO: 616353 - protein, 10 aa, Homo sapiens
  CDR3 for alpha chain variable domain of TCR clone 308177 (TRAV38-2/DV8, TRAJ21)
CAYRSNKFYF

SEQ ID NO: 616354 - protein, 11 aa, Homo sapiens
  CDR3 for beta chain variable domain of TCR clone 308177 (TRBV11-3, TRBJ2-3)
CQQLMGDTQYF

SEQ ID NO: 616355 - protein, 13 aa, Homo sapiens
  CDR3 for alpha chain variable domain of TCR clone 308178 (TRAV13-1, TRAJ10)
CAATAEEETNSPL

SEQ ID NO: 616356 - protein, 14 aa, Homo sapiens
  CDR3 for beta chain variable domain of TCR clone 308178 (TRBV12-4, TRBJ2-7)
CASSPAGLKYEQYF

SEQ ID NO: 616357 - protein, 16 aa, Homo sapiens
  CDR3 for alpha chain variable domain of TCR clone 308179 (TRAV13-1, TRAJ52)
CAAIMRGGSSYGKLTF

SEQ ID NO: 616358 - protein, 15 aa, Homo sapiens
  CDR3 for beta chain variable domain of TCR clone 308179 (TRBV3-1, TRBJ2-7)
CAISQVAGAQYEQYV

SEQ ID NO: 616359 - protein, 11 aa, Homo sapiens
  CDR3 for alpha chain variable domain of TCR clone 308180 (TRAV13-1, TRAJ43)
CSASGANDMRF

SEQ ID NO: 616360 - protein, 14 aa, Homo sapiens
  CDR3 for beta chain variable domain of TCR clone 308180 (TRBV4-1, TRBJ1-1)
CASSPPGVNTEAFF

SEQ ID NO: 616361 - protein, 15 aa, Homo sapiens
  CDR3 for alpha chain variable domain of TCR clone 308181 (TRAV38-1, TRAJ30)
CAFMMSYSGDDKIIF

SEQ ID NO: 616362 - protein, 16 aa, Homo sapiens
  CDR3 for beta chain variable domain of TCR clone 308181 (TRBV7-9, TRBJ2-7)
CASSFGLAGPSYEQYF

SEQ ID NO: 616363 - protein, 13 aa, Homo sapiens
  CDR3 for alpha chain variable domain of TCR clone 308182 (TRAV17, TRAJ5)
CAPMDTGRRALTF

SEQ ID NO: 616364 - protein, 17 aa, Homo sapiens
  CDR3 for beta chain variable domain of TCR clone 308182 (TRBV10-3, TRBJ1-2)
CAISETRDRGLEYGYTF

SEQ ID NO: 616365 - protein, 14 aa, Homo sapiens
  CDR3 for alpha chain variable domain of TCR clone 308183 (TRAV1-2, TRAJ16)
CAVNRFSDGQKLLF

SEQ ID NO: 616366 - protein, 17 aa, Homo sapiens
  CDR3 for beta chain variable domain of TCR clone 308183 (TRBV7-8, TRBJ2-1)
CASSPPTRTLAYNEQFF

SEQ ID NO: 616367 - protein, 12 aa, Homo sapiens
  CDR3 for alpha chain variable domain of TCR clone 308184 (TRAV17, TRAJ20)
CATDGDDYKLSF

SEQ ID NO: 616368 - protein, 13 aa, Homo sapiens
  CDR3 for beta chain variable domain of TCR clone 308184 (TRBV24-1, TRBJ2-3)
CATSTGGTDTQYF

SEQ ID NO: 616369 - protein, 14 aa, Homo sapiens
  CDR3 for alpha chain variable domain of TCR clone 308185 (TRAV12-2, TRAJ44)
CAVNKAGTASKLTF

SEQ ID NO: 616370 - protein, 12 aa, Homo sapiens
  CDR3 for beta chain variable domain of TCR clone 308185 (TRBV19, TRAJ31)
CASKDWPGGLFF

SEQ ID NO: 616371 - protein, 14 aa, Homo sapiens
  CDR3 for alpha chain variable domain of TCR clone 308186 (TRAV8-3, TRAJ10)
CAVGNAGGGNKLTF

SEQ ID NO: 616372 - protein, 16 aa, Homo sapiens
  CDR3 for beta chain variable domain of TCR clone 308186 (TRBV7-3, TRBJ2-2)
CASSLKRRTLSGELFF

SEQ ID NO: 616373 - protein, 15 aa, Homo sapiens
  CDR3 for alpha chain variable domain of TCR clone 308187 (TRAV17, TRAJ57)
CATGPSQGGSEKLVF

SEQ ID NO: 616374 - protein, 12 aa, Homo sapiens
  CDR3 for beta chain variable domain of TCR clone 308187 (TRBV11-3, TRBJ1-1)
CASSHRQGEAFF

SEQ ID NO: 616375 - protein, 14 aa, Homo sapiens
  CDR3 for alpha chain variable domain of TCR clone 308188 (TRAV3, TRAJ33)
CAVRDMDSNYQLIW

SEQ ID NO: 616376 - protein, 19 aa, Homo sapiens
  CDR3 for beta chain variable domain of TCR clone 308188 (TRBV7-3, TRBJ1-2)
CASSFPQGNDGELGLHLRF

SEQ ID NO: 616377 - protein, 13 aa, Homo sapiens
  CDR3 for alpha chain variable domain of TCR clone 308189 (TRAV12-1, TRAJ11)
CVVNRAGYSTLTF

SEQ ID NO: 616378 - protein, 13 aa, Homo sapiens
  CDR3 for beta chain variable domain of TCR clone 308189 (TRBV7-2, TRBJ2-7)
CASSSPSGSEQYF

SEQ ID NO: 616379 - protein, 13 aa, Homo sapiens
  CDR3 for alpha chain variable domain of TCR clone 308190 (TRAV12-2, TRAJ35)
CAVSAGFGNVLHC

SEQ ID NO: 616380 - protein, 14 aa, Homo sapiens
  CDR3 for beta chain variable domain of TCR clone 308190 (TRBV28, TRBJ2-5)
CASSLRGLEETKYF

SEQ ID NO: 616381 - protein, 16 aa, Homo sapiens
  CDR3 for alpha chain variable domain of TCR clone 308191 (TRAV27, TRAJ52)
CAGAGAGGTSYGKLKF

SEQ ID NO: 616382 - protein, 17 aa, Homo sapiens
  CDR3 for beta chain variable domain of TCR clone 308191 (TRBV24-1, TRBJ2-3)
CATSDLPSGEDTDTQYF

SEQ ID NO: 616383 - protein, 12 aa, Homo sapiens
  CDR3 for alpha chain variable domain of TCR clone 308192 (TRAV16, TRAJ10)
CSRTGGGNKLTF

SEQ ID NO: 616384 - protein, 13 aa, Homo sapiens
  CDR3 for beta chain variable domain of TCR clone 308192 (TRBV20-1, TRBJ1-1)
CSARGGGNTEASF

SEQ ID NO: 616385 - protein, 16 aa, Homo sapiens
  CDR3 for alpha chain variable domain of TCR clone 308193 (TRAV1-1, TRAJ29)
CAVRSTRNSGNTHLVF

SEQ ID NO: 616386 - protein, 15 aa, Homo sapiens
  CDR3 for beta chain variable domain of TCR clone 308193 (TRBV29-1, TRBJ2-1)
CSVGRHALFYNEQFF

SEQ ID NO: 616387 - protein, 12 aa, Homo sapiens
  CDR3 for alpha chain variable domain of TCR clone 308194 (TRAV13-2, TRAJ39)
CVENNAGNMLTF

SEQ ID NO: 616388 - protein, 12 aa, Homo sapiens
  CDR3 for beta chain variable domain of TCR clone 308194 (TRBV11-2, TRBJ2-2)
CASSLGGGELFF

SEQ ID NO: 616389 - protein, 15 aa, Homo sapiens
  CDR3 for alpha chain variable domain of TCR clone 308195 (TRAV3, TRAJ13)
CAVRDIAGGYQKVTF

SEQ ID NO: 616390 - protein, 13 aa, Homo sapiens
  CDR3 for beta chain variable domain of TCR clone 308195 (TRBV2, TRBJ2-2)
CASSKKNTGGPFF

SEQ ID NO: 616391 - protein, 14 aa, Homo sapiens
  CDR3 for alpha chain variable domain of TCR clone 308196 (TRAV21, TRAJ15)
CATGPNQAGTALIF

SEQ ID NO: 616392 - protein, 13 aa, Homo sapiens
  CDR3 for beta chain variable domain of TCR clone 308196 (TRBV10-3, TRBJ1-1)
CAIIPEGGTEAFF

SEQ ID NO: 616393 - protein, 12 aa, Homo sapiens
  CDR3 for alpha chain variable domain of TCR clone 308197 (TRAV12-1, TRAJ23)
CVVTWGGGKLIF

SEQ ID NO: 616394 - protein, 14 aa, Homo sapiens
  CDR3 for beta chain variable domain of TCR clone 308197 (TRBV27, TRBJ2-7)
CASSPQRGTYEQYF

SEQ ID NO: 616395 - protein, 13 aa, Homo sapiens
  CDR3 for alpha chain variable domain of TCR clone 308198 (TRAV12-3, TRAJ40)
CAISARGTYKYIF

SEQ ID NO: 616396 - protein, 16 aa, Homo sapiens
  CDR3 for beta chain variable domain of TCR clone 308198 (TRBV20-1, TRBJ2-3)
CSGEAGLAGGQDTQYF

SEQ ID NO: 616397 - protein, 13 aa, Homo sapiens
  CDR3 for alpha chain variable domain of TCR clone 308199 (TRAV20, TRAJ21)
CAVEGYNFNKFYF

SEQ ID NO: 616398 - protein, 12 aa, Homo sapiens
  CDR3 for beta chain variable domain of TCR clone 308199 (TRBV20-1, TRBJ2-1)
CSAQYTYNEQFF

SEQ ID NO: 616399 - protein, 15 aa, Homo sapiens
  CDR3 for alpha chain variable domain of TCR clone 308200 (TRAV12-2, TRAJ53)
CAVNGGGGSNHKLTF

SEQ ID NO: 616400 - protein, 15 aa, Homo sapiens
  CDR3 for beta chain variable domain of TCR clone 308200 (TRBV12-4, TRBJ2-5)
CASSPPTGLQETQYF

SEQ ID NO: 616401 - protein, 13 aa, Homo sapiens
  CDR3 for alpha chain variable domain of TCR clone 308201 (TRAV23/DV6, TRAJ47)
CAASSQYGNKLVF

SEQ ID NO: 616402 - protein, 12 aa, Homo sapiens
  CDR3 for beta chain variable domain of TCR clone 308201 (TRBV11-2, TRBJ2-2)
CASSLPTGELFF

SEQ ID NO: 616403 - protein, 14 aa, Homo sapiens
  CDR3 for alpha chain variable domain of TCR clone 308202 (TRAV13-1, TRAJ6)
CAASITGGSYIPTF

SEQ ID NO: 616404 - protein, 16 aa, Homo sapiens
  CDR3 for beta chain variable domain of TCR clone 308202 (TRBV7-9, TRBJ1-2)
CASSLGFSSGEDGYTF

SEQ ID NO: 616405 - protein, 13 aa, Homo sapiens
  CDR3 for alpha chain variable domain of TCR clone 308203 (TRAV12-3, TRAJ46)
CAVKKSSGDKLTF

SEQ ID NO: 616406 - protein, 17 aa, Homo sapiens
  CDR3 for beta chain variable domain of TCR clone 308203 (TRBV13, TRBJ2-3)
CASSLSRVAGGRNTQYF

SEQ ID NO: 616407 - protein, 11 aa, Homo sapiens
  CDR3 for alpha chain variable domain of TCR clone 308204 (TRAV27, TRAJ57)
SAQGGSEKLVF

SEQ ID NO: 616408 - protein, 11 aa, Homo sapiens
  CDR3 for beta chain variable domain of TCR clone 308204 (TRBV11-2, TRBJ1-1)
CSSSINTEAFF

SEQ ID NO: 616409 - protein, 13 aa, Homo sapiens
  CDR3 for alpha chain variable domain of TCR clone 308205 (TRAV21, TRAJ27)
CAARPGNAGKSTF

SEQ ID NO: 616410 - protein, 17 aa, Homo sapiens
  CDR3 for beta chain variable domain of TCR clone 308205 (TRBV7-9, TRBJ2-3)
CASSPTVAGDLTDTQYF

SEQ ID NO: 616411 - protein, 13 aa, Homo sapiens
  CDR3 for alpha chain variable domain of TCR clone 308206 (TRAV3, TRAJ21)
CAVREPDSNKFYF

SEQ ID NO: 616412 - protein, 18 aa, Homo sapiens
  CDR3 for beta chain variable domain of TCR clone 308206 (TRBV11-2, TRBJ2-3)
CASSLGGASRGAPNTQYF

SEQ ID NO: 616413 - protein, 15 aa, Homo sapiens
  CDR3 for alpha chain variable domain of TCR clone 308207 (TRAV35, TRAJ22)
CAGTISSGSARQLTF

SEQ ID NO: 616414 - protein, 15 aa, Homo sapiens
  CDR3 for beta chain variable domain of TCR clone 308207 (TRBV7-2, TRBJ2-1)
CASTHGTGIYNEQFF

SEQ ID NO: 616415 - protein, 13 aa, Homo sapiens
  CDR3 for alpha chain variable domain of TCR clone 308208 (TRAV26-1, TRAJ33)
CIVRVEGNYQLIW

SEQ ID NO: 616416 - protein, 13 aa, Homo sapiens
  CDR3 for beta chain variable domain of TCR clone 308208 (TRBV6-3, TRBJ2-7)
CASTWGSSYEPYF

SEQ ID NO: 616417 - protein, 11 aa, Homo sapiens
  CDR3 for alpha chain variable domain of TCR clone 308209 (TRAV13-1, TRAJ6)
CATLGSYIPTF

SEQ ID NO: 616418 - protein, 13 aa, Homo sapiens
  CDR3 for beta chain variable domain of TCR clone 308209 (TRBV6-6, TRBJ2-1)
CASSLHKGDEQFF

SEQ ID NO: 616419 - protein, 16 aa, Homo sapiens
  CDR3 for alpha chain variable domain of TCR clone 308210 (TRAV1-2, TRAJ10)
CAVRGVLTGGGNILTF

SEQ ID NO: 616420 - protein, 13 aa, Homo sapiens
  CDR3 for beta chain variable domain of TCR clone 308210 (TRBV10-3, TRBJ2-7)
CASKLAVNYEQYF

SEQ ID NO: 616421 - protein, 14 aa, Homo sapiens
  CDR3 for alpha chain variable domain of TCR clone 308211 (TRAV36/DV7, TRAJ57)
CAVGFPGGSDKLVF

SEQ ID NO: 616422 - protein, 12 aa, Homo sapiens
  CDR3 for beta chain variable domain of TCR clone 308211 (TRBV19, TRBJ2-7)
CASTSGTYEQYF

SEQ ID NO: 616423 - protein, 15 aa, Homo sapiens
  CDR3 for alpha chain variable domain of TCR clone 308212 (TRAV26-1, TRAJ44)
CVARVPFGTASKLTF

SEQ ID NO: 616424 - protein, 15 aa, Homo sapiens
  CDR3 for beta chain variable domain of TCR clone 308212 (TRBV20-1, TRBJ1-1)
CSASRGVTGNTEAFF

SEQ ID NO: 616425 - protein, 17 aa, Homo sapiens
  CDR3 for alpha chain variable domain of TCR clone 308213 (TRAV3, TRAJ38)
CAVRDCLNAGNNRKLIW

SEQ ID NO: 616426 - protein, 14 aa, Homo sapiens
  CDR3 for beta chain variable domain of TCR clone 308213 (TRBV11-2, TRBJ2-5)
CASSRTGGIETQYF

SEQ ID NO: 616427 - protein, 16 aa, Homo sapiens
  CDR3 for alpha chain variable domain of TCR clone 308214 (TRAV35, TRAJ28)
CAGQKYSGAGSYQFTF

SEQ ID NO: 616428 - protein, 13 aa, Homo sapiens
  CDR3 for beta chain variable domain of TCR clone 308214 (TRBV19, TRBJ1-2)
CASSQGQVYGYTF

SEQ ID NO: 616429 - protein, 13 aa, Homo sapiens
  CDR3 for alpha chain variable domain of TCR clone 308215 (TRAV1-1, TRAJ9)
CATKNTGGFKTIF

SEQ ID NO: 616430 - protein, 14 aa, Homo sapiens
  CDR3 for beta chain variable domain of TCR clone 308215 (TRBV20-1, TRBJ2-1)
CSAQRGGSANEQFF

SEQ ID NO: 616431 - protein, 14 aa, Homo sapiens
  CDR3 for alpha chain variable domain of TCR clone 308216 (TRAV12-2, TRAJ9)
CAVNMEGGGFKTIF

SEQ ID NO: 616432 - protein, 14 aa, Homo sapiens
  CDR3 for beta chain variable domain of TCR clone 308216 (TRBV2, TRBJ2-5)
CASSDVLAQETQYF

SEQ ID NO: 616433 - protein, 14 aa, Homo sapiens
  CDR3 for alpha chain variable domain of TCR clone 308217 (TRAV12-1, TRAJ12)
CVVTRMDSSYKLIF

SEQ ID NO: 616434 - protein, 13 aa, Homo sapiens
  CDR3 for beta chain variable domain of TCR clone 308217 (TRBV19, TRBJ2-7)
CASSIDRTYEQYF

SEQ ID NO: 616435 - protein, 15 aa, Homo sapiens
  CDR3 for alpha chain variable domain of TCR clone 308218 (TRAV35, TRAJ50)
CAGQLRKTSSDKVLF

SEQ ID NO: 616436 - protein, 12 aa, Homo sapiens
  CDR3 for beta chain variable domain of TCR clone 308218 (TRBV5-1, TRBJ2-5)
CASSLGLETQYF

SEQ ID NO: 616437 - protein, 13 aa, Homo sapiens
  CDR3 for alpha chain variable domain of TCR clone 308219 (TRAV23/DV6, TRAJ12)
CAPRVDSSYKLIF

SEQ ID NO: 616438 - protein, 12 aa, Homo sapiens
  CDR3 for beta chain variable domain of TCR clone 308219 (TRBV7-8, TRBJ2-7)
CASSLGDREQYL

SEQ ID NO: 616439 - protein, 17 aa, Homo sapiens
  CDR3 for alpha chain variable domain of TCR clone 308220 (TRAV38-2/DV8, TRAJ23)
CALSRKLIFGQGTELSV

SEQ ID NO: 616440 - protein, 15 aa, Homo sapiens
  CDR3 for beta chain variable domain of TCR clone 308220 (TRBV5-4, TRBJ2-3)
CASSPSLLSTDTQYF

SEQ ID NO: 616441 - protein, 11 aa, Homo sapiens
  CDR3 for alpha chain variable domain of TCR clone 308221 (TRAV1-2, TRAJ20)
CAVANDYKLSF

SEQ ID NO: 616442 - protein, 12 aa, Homo sapiens
  CDR3 for beta chain variable domain of TCR clone 308221 (TRBV11-2, TRBJ2-1)
CASSPGNNEQFF

SEQ ID NO: 616443 - protein, 11 aa, Homo sapiens
  CDR3 for alpha chain variable domain of TCR clone 308222 (TRAV1-2, TRAJ26)
CAEPLWSEFCL

SEQ ID NO: 616444 - protein, 14 aa, Homo sapiens
  CDR3 for beta chain variable domain of TCR clone 308222 (TRBV5-1, TRBJ2-7)
CASSFASGVNEQYF

SEQ ID NO: 616445 - protein, 15 aa, Homo sapiens
  CDR3 for alpha chain variable domain of TCR clone 308223 (TRAV26-1, TRAJ29)
CIVRVEGSGNTPLVF

SEQ ID NO: 616446 - protein, 15 aa, Homo sapiens
  CDR3 for beta chain variable domain of TCR clone 308223 (TRBV7-9, TRBJ1-5)
CSSSQGHQPKQPQHF

SEQ ID NO: 616447 - protein, 16 aa, Homo sapiens
  CDR3 for alpha chain variable domain of TCR clone 308224 (TRAV38-2/DV8, TRAJ9)
CAYRSLLNTGGFKTIF

SEQ ID NO: 616448 - protein, 13 aa, Homo sapiens
  CDR3 for beta chain variable domain of TCR clone 308224 (TRBV29-1, TRBJ1-1)
CSVHGQGNTEAVF

SEQ ID NO: 616449 - protein, 13 aa, Homo sapiens
  CDR3 for alpha chain variable domain of TCR clone 308225 (TRAV13-1, TRAJ11)
CAASIRGYSTLTF

SEQ ID NO: 616450 - protein, 17 aa, Homo sapiens
  CDR3 for beta chain variable domain of TCR clone 308225 (TRBV4-3, TRBJ1-2)
CASSSRLQAGGSDGYTF

SEQ ID NO: 616451 - protein, 17 aa, Homo sapiens
  CDR3 for alpha chain variable domain of TCR clone 308226 (TRAV13-1, TRAJ28)
CAASPPYSGAGSYQPTF

SEQ ID NO: 616452 - protein, 13 aa, Homo sapiens
  CDR3 for beta chain variable domain of TCR clone 308226 (TRBV12-5, TRBJ2-3)
CASGDRQSDTQYF

SEQ ID NO: 616453 - protein, 16 aa, Homo sapiens
  CDR3 for alpha chain variable domain of TCR clone 308227 (TRAV26-1, TRAJ40)
CIVRALTTSGTYKYIF

SEQ ID NO: 616454 - protein, 16 aa, Homo sapiens
  CDR3 for beta chain variable domain of TCR clone 308227 (TRBV7-9, TRBJ1-2)
CASSLGFSSGEDGYTF

SEQ ID NO: 616455 - protein, 14 aa, Homo sapiens
  CDR3 for alpha chain variable domain of TCR clone 308228 (TRAV8-3, TRAJ44)
CAVGLTGTASKLTF

SEQ ID NO: 616456 - protein, 14 aa, Homo sapiens
  CDR3 for beta chain variable domain of TCR clone 308228 (TRBV13, TRBJ2-3)
CASSLGGPQRPQYF

SEQ ID NO: 616457 - protein, 12 aa, Homo sapiens
  CDR3 for alpha chain variable domain of TCR clone 308229 (TRAV3, TRAJ31)
CAVRPRGPRVMF

SEQ ID NO: 616458 - protein, 17 aa, Homo sapiens
  CDR3 for beta chain variable domain of TCR clone 308229 (TRBV7-9, TRBJ1-5)
CASSASQGGYSNQPQHF

SEQ ID NO: 616459 - protein, 16 aa, Homo sapiens
  CDR3 for alpha chain variable domain of TCR clone 308230 (TRAV1-1, TRAJ29)
CAVRSTRNSGNPPLVF

SEQ ID NO: 616460 - protein, 16 aa, Homo sapiens
  CDR3 for beta chain variable domain of TCR clone 308230 (TRBV27, TRBJ1-1)
CASSSRGRTGYTEAFF

SEQ ID NO: 616461 - protein, 13 aa, Homo sapiens
  CDR3 for alpha chain variable domain of TCR clone 308231 (TRAV35, TRAJ36)
CAGPRIGANNLFF

SEQ ID NO: 616462 - protein, 15 aa, Homo sapiens
  CDR3 for beta chain variable domain of TCR clone 308231 (TRBV28, TRBJ2-5)
CASSPPWSYQENQYF

SEQ ID NO: 616463 - protein, 11 aa, Homo sapiens
  CDR3 for alpha chain variable domain of TCR clone 308232 (TRAV20, TRAJ34)
CRTKGTDKLIF

SEQ ID NO: 616464 - protein, 11 aa, Homo sapiens
  CDR3 for beta chain variable domain of TCR clone 308232 (TRBV29-1, TRBJ2-5)
CSEDRTGTQYF

SEQ ID NO: 616465 - protein, 20 aa, Homo sapiens
  CDR3 for alpha chain variable domain of TCR clone 308233 (TRAV1-1, TRAJ4)
CLLLLRCECFLSGGYNKLTF

SEQ ID NO: 616466 - protein, 16 aa, Homo sapiens
  CDR3 for beta chain variable domain of TCR clone 308233 (TRBV28, TRBJ1-4)
CASSPPYRGRSEKLFF

SEQ ID NO: 616467 - protein, 13 aa, Homo sapiens
  CDR3 for alpha chain variable domain of TCR clone 308234 (TRAV27, TRAJ49)
CAPRPYTGNQFYF

SEQ ID NO: 616468 - protein, 13 aa, Homo sapiens
  CDR3 for beta chain variable domain of TCR clone 308234 (TRBV4-1, TRBJ1-2)
CTSSQDAGQVLYG

SEQ ID NO: 616469 - protein, 13 aa, Homo sapiens
  CDR3 for alpha chain variable domain of TCR clone 308235 (TRAV38-1, TRAJ42)
CVRWGGSQGNLIF

SEQ ID NO: 616470 - protein, 17 aa, Homo sapiens
  CDR3 for beta chain variable domain of TCR clone 308235 (TRBV20-1, TRBJ2-1)
CSARDPLAGVWDNEQVF

SEQ ID NO: 616471 - protein, 15 aa, Homo sapiens
  CDR3 for alpha chain variable domain of TCR clone 308236 (TRAV13-1, TRAJ57)
QVPPLSQVGSEKLVF

SEQ ID NO: 616472 - protein, 17 aa, Homo sapiens
  CDR3 for beta chain variable domain of TCR clone 308236 (TRBV7-3, TRBJ2-3)
CASSLMKRMRGADTQYF

SEQ ID NO: 616473 - protein, 10 aa, Homo sapiens
  CDR3 for alpha chain variable domain of TCR clone 308237 (TRAV8-4, TRAJ43)
CAVSADDMRF

SEQ ID NO: 616474 - protein, 16 aa, Homo sapiens
  CDR3 for beta chain variable domain of TCR clone 308237 (TRBV7-7, TRBJ2-1)
CASSLASGTSYNEQFF

SEQ ID NO: 616475 - protein, 15 aa, Homo sapiens
  CDR3 for alpha chain variable domain of TCR clone 308238 (TRAV3, TRAJ22)
CAVRDRGGSARQLTF

SEQ ID NO: 616476 - protein, 16 aa, Homo sapiens
  CDR3 for beta chain variable domain of TCR clone 308238 (TRBV5-7, TRBJ1-4)
CASSPSGGLKTEKLFF

SEQ ID NO: 616477 - protein, 16 aa, Homo sapiens
  CDR3 for alpha chain variable domain of TCR clone 308239 (TRAV23/DV6, )
CADIQNPDPAVYQLRD

SEQ ID NO: 616478 - protein, 13 aa, Homo sapiens
  CDR3 for beta chain variable domain of TCR clone 308239 (TRBV28, TRBJ2-7)
CASRSIGVYEQYF

SEQ ID NO: 616479 - protein, 13 aa, Homo sapiens
  CDR3 for alpha chain variable domain of TCR clone 308240 (TRAV12-2, TRAJ47)
CAVFMEYGSKLVF

SEQ ID NO: 616480 - protein, 14 aa, Homo sapiens
  CDR3 for beta chain variable domain of TCR clone 308240 (TRBV4-1, TRBJ1-5)
CASSQGPTKQPQHF

SEQ ID NO: 616481 - protein, 10 aa, Homo sapiens
  CDR3 for alpha chain variable domain of TCR clone 308241 (TRAV12-2, TRAJ22)
CAVNETQLTF

SEQ ID NO: 616482 - protein, 14 aa, Homo sapiens
  CDR3 for beta chain variable domain of TCR clone 308241 (TRBV7-3, TRBJ1-1)
CASSLKGGNTEAFF

SEQ ID NO: 616483 - protein, 14 aa, Homo sapiens
  CDR3 for alpha chain variable domain of TCR clone 308242 (TRAV1-2, TRAJ8)
CAVREDTGFQKLVF

SEQ ID NO: 616484 - protein, 13 aa, Homo sapiens
  CDR3 for beta chain variable domain of TCR clone 308242 (TRBV29-1, TRBJ1-1)
CSVGDSRNAEAFF

SEQ ID NO: 616485 - protein, 16 aa, Homo sapiens
  CDR3 for alpha chain variable domain of TCR clone 308243 (TRAV13-1, TRAJ15)
CAANGGPVRAGTALIF

SEQ ID NO: 616486 - protein, 13 aa, Homo sapiens
  CDR3 for beta chain variable domain of TCR clone 308243 (TRBV20-1, TRBJ2-3)
CRATSGSRDTQYF

SEQ ID NO: 616487 - protein, 14 aa, Homo sapiens
  CDR3 for alpha chain variable domain of TCR clone 308244 (TRAV12-3, TRAJ13)
CAMRNSGGYQKVTF

SEQ ID NO: 616488 - protein, 17 aa, Homo sapiens
  CDR3 for beta chain variable domain of TCR clone 308244 (TRBV28, TRBJ2-5)
CASSRQGGLAGAETQYF

SEQ ID NO: 616489 - protein, 15 aa, Homo sapiens
  CDR3 for alpha chain variable domain of TCR clone 308245 (TRAV13-1, TRAJ42)
CAASSYGGSQGNLIF

SEQ ID NO: 616490 - protein, 19 aa, Homo sapiens
  CDR3 for beta chain variable domain of TCR clone 308245 (TRBV28, TRBJ2-7)
CASSKTRTSGRRASYEQYF

SEQ ID NO: 616491 - protein, 14 aa, Homo sapiens
  CDR3 for alpha chain variable domain of TCR clone 308246 (TRAV3, TRAJ22)
CAVRDYVSARQLTF

SEQ ID NO: 616492 - protein, 13 aa, Homo sapiens
  CDR3 for beta chain variable domain of TCR clone 308246 (TRBV11-2, TRBJ2-5)
CASGHGAKETQYF

SEQ ID NO: 616493 - protein, 14 aa, Homo sapiens
  CDR3 for alpha chain variable domain of TCR clone 308247 (TRAV12-2, TRAJ24)
CAVTPADSWGKLPF

SEQ ID NO: 616494 - protein, 12 aa, Homo sapiens
  CDR3 for beta chain variable domain of TCR clone 308247 (TRBV3-1, TRBJ2-1)
CASSEGSSGQFF

SEQ ID NO: 616495 - protein, 17 aa, Homo sapiens
  CDR3 for alpha chain variable domain of TCR clone 308248 (TRAV3, TRAJ6)
CAVRDGPRAGGSYIPTF

SEQ ID NO: 616496 - protein, 15 aa, Homo sapiens
  CDR3 for beta chain variable domain of TCR clone 308248 (TRBV13, TRBJ2-1)
CASSLLSGLNNEQFF

SEQ ID NO: 616497 - protein, 12 aa, Homo sapiens
  CDR3 for alpha chain variable domain of TCR clone 308249 (TRAV13-1, TRAJ49)
CAASPLGNQFYF

SEQ ID NO: 616498 - protein, 16 aa, Homo sapiens
  CDR3 for beta chain variable domain of TCR clone 308249 (TRBV19, TRBJ2-5)
CASSIDGTGLEETQYF

SEQ ID NO: 616499 - protein, 17 aa, Homo sapiens
  CDR3 for alpha chain variable domain of TCR clone 308250 (TRAV3, TRAJ42)
CAVRDRDYGGSKGNLIF

SEQ ID NO: 616500 - protein, 15 aa, Homo sapiens
  CDR3 for beta chain variable domain of TCR clone 308250 (TRBV6-3, TRBJ2-7)
CASSSPGTVFYEQYF

SEQ ID NO: 616501 - protein, 18 aa, Homo sapiens
  CDR3 for alpha chain variable domain of TCR clone 308251 (TRAV13-1, TRAJ52)
CAAKNPNAGGTSYGKLTF

SEQ ID NO: 616502 - protein, 15 aa, Homo sapiens
  CDR3 for beta chain variable domain of TCR clone 308251 (TRBV6-1, TRBJ2-3)
CASCERGGITDTQYF

SEQ ID NO: 616503 - protein, 14 aa, Homo sapiens
  CDR3 for alpha chain variable domain of TCR clone 308252 (TRAV1-2, TRAJ8)
CAVREDTGFQKLAF

SEQ ID NO: 616504 - protein, 14 aa, Homo sapiens
  CDR3 for beta chain variable domain of TCR clone 308252 (TRBV4-2, TRBJ2-1)
CASGLDRAYNEQFF

SEQ ID NO: 616505 - protein, 12 aa, Homo sapiens
  CDR3 for alpha chain variable domain of TCR clone 308253 (TRAV26-1, TRAJ48)
CIVSGGNEKITF

SEQ ID NO: 616506 - protein, 13 aa, Homo sapiens
  CDR3 for beta chain variable domain of TCR clone 308253 (TRBV18, TRBJ2-7)
CASFRDSAYEQYF

SEQ ID NO: 616507 - protein, 14 aa, Homo sapiens
  CDR3 for alpha chain variable domain of TCR clone 308254 (TRAV12-1, TRAJ29)
CVVNQGSGNTPLVF

SEQ ID NO: 616508 - protein, 13 aa, Homo sapiens
  CDR3 for beta chain variable domain of TCR clone 308254 (TRBV7-9, TRBJ2-3)
CASSPGSTDTQYF

SEQ ID NO: 616509 - protein, 10 aa, Homo sapiens
  CDR3 for alpha chain variable domain of TCR clone 308255 (TRAV16, TRAJ22)
SAMYLRQLTF

SEQ ID NO: 616510 - protein, 14 aa, Homo sapiens
  CDR3 for beta chain variable domain of TCR clone 308255 (TRBV7-2, TRBJ2-7)
CASSPKTSFYEQYF

SEQ ID NO: 616511 - protein, 13 aa, Homo sapiens
  CDR3 for alpha chain variable domain of TCR clone 308256 (TRAV8-3, TRAJ43)
CAVGIYNNNDMRF

SEQ ID NO: 616512 - protein, 14 aa, Homo sapiens
  CDR3 for beta chain variable domain of TCR clone 308256 (TRBV19, TRBJ1-6)
CASSSGTGYSLLHF

SEQ ID NO: 616513 - protein, 10 aa, Homo sapiens
  CDR3 for alpha chain variable domain of TCR clone 308257 (TRAV12-3, TRAJ49)
CAMNDEQFYF

SEQ ID NO: 616514 - protein, 15 aa, Homo sapiens
  CDR3 for beta chain variable domain of TCR clone 308257 (TRBV20-1, TRBJ2-7)
CSARGRVSGMDEQYF

SEQ ID NO: 616515 - protein, 12 aa, Homo sapiens
  CDR3 for alpha chain variable domain of TCR clone 308258 (TRAV27, TRAJ37)
CADSGSTGKLIF

SEQ ID NO: 616516 - protein, 13 aa, Homo sapiens
  CDR3 for beta chain variable domain of TCR clone 308258 (TRBV7-9, TRBJ2-3)
CASSPGSTDTQYF

SEQ ID NO: 616517 - protein, 14 aa, Homo sapiens
  CDR3 for alpha chain variable domain of TCR clone 308259 (TRAV12-3, TRAJ10)
SHLPLTGGGNKLTF

SEQ ID NO: 616518 - protein, 15 aa, Homo sapiens
  CDR3 for beta chain variable domain of TCR clone 308259 (TRBV10-2, TRBJ2-6)
CASSEQGTGTNVLTF

SEQ ID NO: 616519 - protein, 13 aa, Homo sapiens
  CDR3 for alpha chain variable domain of TCR clone 308260 (TRAV26-1, TRAJ47)
CILKGEYGSKLVF

SEQ ID NO: 616520 - protein, 16 aa, Homo sapiens
  CDR3 for beta chain variable domain of TCR clone 308260 (TRBV2, TRBJ2-3)
CASSTSVEGVTDTQYF

SEQ ID NO: 616521 - protein, 14 aa, Homo sapiens
  CDR3 for alpha chain variable domain of TCR clone 308261 (TRAV1-2, TRAJ16)
CAANRFSDGQKLLF

SEQ ID NO: 616522 - protein, 15 aa, Homo sapiens
  CDR3 for beta chain variable domain of TCR clone 308261 (TRBV6-3, TRBJ2-7)
CASSPPGTVFYEQYF

SEQ ID NO: 616523 - protein, 13 aa, Homo sapiens
  CDR3 for alpha chain variable domain of TCR clone 308262 (TRAV13-1, TRAJ5)
CAASDTGRRALTF

SEQ ID NO: 616524 - protein, 16 aa, Homo sapiens
  CDR3 for beta chain variable domain of TCR clone 308262 (TRBV11-3, TRBJ2-5)
CASSSVVAGSTETQYF

SEQ ID NO: 616525 - protein, 18 aa, Homo sapiens
  CDR3 for alpha chain variable domain of TCR clone 308263 (TRAV17, TRAJ45)
CATSLDLYSGGGADGLTF

SEQ ID NO: 616526 - protein, 15 aa, Homo sapiens
  CDR3 for beta chain variable domain of TCR clone 308263 (TRBV11-2, TRBJ2-1)
CASSKNRGLTYEQFF

SEQ ID NO: 616527 - protein, 14 aa, Homo sapiens
  CDR3 for alpha chain variable domain of TCR clone 308264 (TRAV26-1, TRAJ38)
CIADNAGNNRKLIW

SEQ ID NO: 616528 - protein, 15 aa, Homo sapiens
  CDR3 for beta chain variable domain of TCR clone 308264 (TRBV28, TRBJ2-1)
CASSGLAEVDNEQFF

SEQ ID NO: 616529 - protein, 14 aa, Homo sapiens
  CDR3 for alpha chain variable domain of TCR clone 308265 (TRAV30, TRAJ26)
CGTEIVSYGQNYVF

SEQ ID NO: 616530 - protein, 13 aa, Homo sapiens
  CDR3 for beta chain variable domain of TCR clone 308265 (TRBV7-3, TRBJ1-1)
CASSQDWGAEAFF

SEQ ID NO: 616531 - protein, 14 aa, Homo sapiens
  CDR3 for alpha chain variable domain of TCR clone 308266 (TRAV36/DV7, TRAJ44)
CCGANTGTASKLTF

SEQ ID NO: 616532 - protein, 13 aa, Homo sapiens
  CDR3 for beta chain variable domain of TCR clone 308266 (TRBV6-5, TRBJ2-5)
CASSPQGGETQYF

SEQ ID NO: 616533 - protein, 18 aa, Homo sapiens
  CDR3 for alpha chain variable domain of TCR clone 308267 (TRAV12-3, TRAJ52)
CAMSVGGAGGTSYGKLTF

SEQ ID NO: 616534 - protein, 16 aa, Homo sapiens
  CDR3 for beta chain variable domain of TCR clone 308267 (TRBV20-1, TRBJ1-4)
CSAPGQGLLTNEKLFF

SEQ ID NO: 616535 - protein, 14 aa, Homo sapiens
  CDR3 for alpha chain variable domain of TCR clone 308268 (TRAV21, TRAJ45)
CAVSSGGGADGLTF

SEQ ID NO: 616536 - protein, 16 aa, Homo sapiens
  CDR3 for beta chain variable domain of TCR clone 308268 (TRBV19, TRBJ1-5)
CASSARGTRSNQPQHF

SEQ ID NO: 616537 - protein, 14 aa, Homo sapiens
  CDR3 for alpha chain variable domain of TCR clone 308269 (TRAV12-1, TRAJ12)
CVVTRMDSSYKSIF

SEQ ID NO: 616538 - protein, 19 aa, Homo sapiens
  CDR3 for beta chain variable domain of TCR clone 308269 (TRBV4-1, TRBJ2-7)
CASSPVAGGGRAVLRAGHQ

SEQ ID NO: 616539 - protein, 14 aa, Homo sapiens
  CDR3 for alpha chain variable domain of TCR clone 308270 (TRAV12-2, TRAJ17)
CAVLFKAAGNKLTF

SEQ ID NO: 616540 - protein, 12 aa, Homo sapiens
  CDR3 for beta chain variable domain of TCR clone 308270 (TRBV20-1, TRBJ1-2)
CSAPGFNYGYTF

SEQ ID NO: 616541 - protein, 16 aa, Homo sapiens
  CDR3 for alpha chain variable domain of TCR clone 308271 (TRAV3, TRAJ10)
CAVRDMRSGGGNKLTF

SEQ ID NO: 616542 - protein, 14 aa, Homo sapiens
  CDR3 for beta chain variable domain of TCR clone 308271 (TRBV7-2, TRBJ1-4)
CASSVVEGGEKLFF

SEQ ID NO: 616543 - protein, 15 aa, Homo sapiens
  CDR3 for alpha chain variable domain of TCR clone 308272 (TRAV2, TRAJ20)
CAPLNSFGAGTTVTV

SEQ ID NO: 616544 - protein, 15 aa, Homo sapiens
  CDR3 for beta chain variable domain of TCR clone 308272 (TRBV20-1, TRBJ2-7)
CSARDRVSGMDEQYF

SEQ ID NO: 616545 - protein, 19 aa, Homo sapiens
  CDR3 for alpha chain variable domain of TCR clone 308273 (TRAV26-1, TRAJ47)
CVLLHRQSSFMEYGNKLVF

SEQ ID NO: 616546 - protein, 14 aa, Homo sapiens
  CDR3 for beta chain variable domain of TCR clone 308273 (TRBV7-2, TRBJ1-2)
CASSRGGTNYGYTF

SEQ ID NO: 616547 - protein, 14 aa, Homo sapiens
  CDR3 for alpha chain variable domain of TCR clone 308274 (TRAV9-2, TRAJ39)
CALYIYNAGNMLTF

SEQ ID NO: 616548 - protein, 15 aa, Homo sapiens
  CDR3 for beta chain variable domain of TCR clone 308274 (TRBV3-1, TRBJ2-7)
CASSQVRQWAYEQYF

SEQ ID NO: 616549 - protein, 15 aa, Homo sapiens
  CDR3 for alpha chain variable domain of TCR clone 308275 (TRAV3, TRAJ20)
CAVRDIKLSDYKLSF

SEQ ID NO: 616550 - protein, 15 aa, Homo sapiens
  CDR3 for beta chain variable domain of TCR clone 308275 (TRBV7-9, TRBJ1-6)
CASSSPGRGNSPLHI

SEQ ID NO: 616551 - protein, 16 aa, Homo sapiens
  CDR3 for alpha chain variable domain of TCR clone 308276 (TRAV3, TRAJ42)
CAVRDIEGGSQGNLIF

SEQ ID NO: 616552 - protein, 14 aa, Homo sapiens
  CDR3 for beta chain variable domain of TCR clone 308276 (TRBV18, TRBJ1-1)
CASSPPAGRTEAFF

SEQ ID NO: 616553 - protein, 16 aa, Homo sapiens
  CDR3 for alpha chain variable domain of TCR clone 308277 (TRAV10, TRAJ41)
CVVSLANSNSGYALNF

SEQ ID NO: 616554 - protein, 13 aa, Homo sapiens
  CDR3 for beta chain variable domain of TCR clone 308277 (TRBV15, TRBJ1-2)
CATSRGQLYGDTF

SEQ ID NO: 616555 - protein, 11 aa, Homo sapiens
  CDR3 for alpha chain variable domain of TCR clone 308278 (TRAV2, TRAJ33)
CAVESNYQLIW

SEQ ID NO: 616556 - protein, 12 aa, Homo sapiens
  CDR3 for beta chain variable domain of TCR clone 308278 (TRBV11-2, TRBJ2-2)
CASSLGGGELFV

SEQ ID NO: 616557 - protein, 14 aa, Homo sapiens
  CDR3 for alpha chain variable domain of TCR clone 308279 (TRAV1-2, TRAJ16)
CAVNLFSDGQKLLF

SEQ ID NO: 616558 - protein, 18 aa, Homo sapiens
  CDR3 for beta chain variable domain of TCR clone 308279 (TRBV20-1, TRBJ2-3)
CSASGLAGGPGTTDTQYF

SEQ ID NO: 616559 - protein, 14 aa, Homo sapiens
  CDR3 for alpha chain variable domain of TCR clone 308280 (TRAV12-2, TRAJ44)
CAVNKAGTASKLTF

SEQ ID NO: 616560 - protein, 12 aa, Homo sapiens
  CDR3 for beta chain variable domain of TCR clone 308280 (TRBV19, TRBJ1-4)
CASKDWAGGLFF

SEQ ID NO: 616561 - protein, 14 aa, Homo sapiens
  CDR3 for alpha chain variable domain of TCR clone 308281 (TRAV8-4, TRAJ48)
CAVSETFGNEKLTF

SEQ ID NO: 616562 - protein, 17 aa, Homo sapiens
  CDR3 for beta chain variable domain of TCR clone 308281 (TRBV11-2, TRBJ2-1)
CASSLYPPGVEYNEQFF

SEQ ID NO: 616563 - protein, 12 aa, Homo sapiens
  CDR3 for alpha chain variable domain of TCR clone 308282 (TRAV1-1, TRAJ39)
CAVPVVGNMLTF

SEQ ID NO: 616564 - protein, 14 aa, Homo sapiens
  CDR3 for beta chain variable domain of TCR clone 308282 (TRBV6-1, TRBJ2-7)
CASTQTGDYYEQYF

SEQ ID NO: 616565 - protein, 15 aa, Homo sapiens
  CDR3 for alpha chain variable domain of TCR clone 308283 (TRAV3, TRAJ3)
CAVRDRDSSASKLIF

SEQ ID NO: 616566 - protein, 12 aa, Homo sapiens
  CDR3 for beta chain variable domain of TCR clone 308283 (TRBV11-2, TRBJ2-2)
CASSLPTGELFF

SEQ ID NO: 616567 - protein, 12 aa, Homo sapiens
  CDR3 for alpha chain variable domain of TCR clone 308284 (TRAV21, TRAJ49)
CAVNDGGNQFYV

SEQ ID NO: 616568 - protein, 14 aa, Homo sapiens
  CDR3 for beta chain variable domain of TCR clone 308284 (TRBV18, TRBJ2-7)
CASSPRGGSYEQYF

SEQ ID NO: 616569 - protein, 14 aa, Homo sapiens
  CDR3 for alpha chain variable domain of TCR clone 308285 (TRAV13-1, TRAJ20)
CAARPGSNDYKLSF

SEQ ID NO: 616570 - protein, 14 aa, Homo sapiens
  CDR3 for beta chain variable domain of TCR clone 308285 (TRBV2, TRBJ2-7)
CASSRDRSSYEQYF

SEQ ID NO: 616571 - protein, 13 aa, Homo sapiens
  CDR3 for alpha chain variable domain of TCR clone 308286 (TRAV3, TRAJ21)
CAVREPDFNKFYF

SEQ ID NO: 616572 - protein, 14 aa, Homo sapiens
  CDR3 for beta chain variable domain of TCR clone 308286 (TRBV7-3, TRBJ2-1)
CASSLGTSANEQFF

SEQ ID NO: 616573 - protein, 13 aa, Homo sapiens
  CDR3 for alpha chain variable domain of TCR clone 308287 (TRAV27, TRAJ45)
CRSSGGGADGLTF

SEQ ID NO: 616574 - protein, 13 aa, Homo sapiens
  CDR3 for beta chain variable domain of TCR clone 308287 (TRBV19, TRBJ2-2)
CASSIWSTGELFF

SEQ ID NO: 616575 - protein, 12 aa, Homo sapiens
  CDR3 for alpha chain variable domain of TCR clone 308288 (TRAV16, TRAJ10)
CSHTGGGNKLTF

SEQ ID NO: 616576 - protein, 15 aa, Homo sapiens
  CDR3 for beta chain variable domain of TCR clone 308288 (TRBV6-3, TRBJ2-7)
CASSSPGTVFYEQYF

SEQ ID NO: 616577 - protein, 12 aa, Homo sapiens
  CDR3 for alpha chain variable domain of TCR clone 308289 (TRAV16, TRAJ27)
CALNHQCRQINL

SEQ ID NO: 616578 - protein, 19 aa, Homo sapiens
  CDR3 for beta chain variable domain of TCR clone 308289 (TRBV4-1, TRBJ2-7)
CASSRDPLGVRGGSSTSGR

SEQ ID NO: 616579 - protein, 15 aa, Homo sapiens
  CDR3 for alpha chain variable domain of TCR clone 308290 (TRAV13-1, TRAJ52)
CAATAPRTSYGKLTF

SEQ ID NO: 616580 - protein, 16 aa, Homo sapiens
  CDR3 for beta chain variable domain of TCR clone 308290 (TRBV7-3, TRBJ2-2)
CASSLKRGTLSGELFF

SEQ ID NO: 616581 - protein, 14 aa, Homo sapiens
  CDR3 for alpha chain variable domain of TCR clone 308291 (TRAV12-2, TRAJ53)
CAVKGGGSNYKRTF

SEQ ID NO: 616582 - protein, 16 aa, Homo sapiens
  CDR3 for beta chain variable domain of TCR clone 308291 (TRBV20-1, TRBJ1-2)
CSASMGQGVANYGYTF

SEQ ID NO: 616583 - protein, 17 aa, Homo sapiens
  CDR3 for alpha chain variable domain of TCR clone 308292 (TRAV3, TRAJ6)
CAVRDGPRAGGSYIPTF

SEQ ID NO: 616584 - protein, 12 aa, Homo sapiens
  CDR3 for beta chain variable domain of TCR clone 308292 (TRBV7-2, TRBJ2-3)
CASSLIGETQYF

SEQ ID NO: 616585 - protein, 16 aa, Homo sapiens
  CDR3 for alpha chain variable domain of TCR clone 308293 (TRAV3, TRAJ5)
CAVRNLMDTGRRALTL

SEQ ID NO: 616586 - protein, 16 aa, Homo sapiens
  CDR3 for beta chain variable domain of TCR clone 308293 (TRBV4-2, TRBJ2-7)
CASGQEGLAISYEQYF

SEQ ID NO: 616587 - protein, 15 aa, Homo sapiens
  CDR3 for alpha chain variable domain of TCR clone 308294 (TRAV2, TRAJ13)
CATPSYSGGYQQVTF

SEQ ID NO: 616588 - protein, 14 aa, Homo sapiens
  CDR3 for beta chain variable domain of TCR clone 308294 (TRBV11-2, TRBJ2-3)
CASSRLARTDTQYF

SEQ ID NO: 616589 - protein, 18 aa, Homo sapiens
  CDR3 for alpha chain variable domain of TCR clone 308295 (TRAV12-3, TRAJ52)
CAMSRTNAGGTSNGKLTF

SEQ ID NO: 616590 - protein, 17 aa, Homo sapiens
  CDR3 for beta chain variable domain of TCR clone 308295 (TRBV7-3, TRBJ2-3)
CDSSLMKRMRGADTQYF

SEQ ID NO: 616591 - protein, 15 aa, Homo sapiens
  CDR3 for alpha chain variable domain of TCR clone 308296 (TRAV8-3, TRAJ45)
CASSYSGGGADGLTF

SEQ ID NO: 616592 - protein, 13 aa, Homo sapiens
  CDR3 for beta chain variable domain of TCR clone 308296 (TRBV20-1, TRBJ2-2)
CSASAAGTWELFF

SEQ ID NO: 616593 - protein, 13 aa, Homo sapiens
  CDR3 for alpha chain variable domain of TCR clone 308297 (TRAV13-2, TRAJ10)
CAENTGGGNKLTF

SEQ ID NO: 616594 - protein, 11 aa, Homo sapiens
  CDR3 for beta chain variable domain of TCR clone 308297 (TRBV10-2, TRBJ2-3)
CASSDLPHGRK

SEQ ID NO: 616595 - protein, 15 aa, Homo sapiens
  CDR3 for alpha chain variable domain of TCR clone 308298 (TRAV13-1, TRAJ32)
CAASIYGGATNKPIL

SEQ ID NO: 616596 - protein, 12 aa, Homo sapiens
  CDR3 for beta chain variable domain of TCR clone 308298 (TRBV7-6, TRBJ2-3)
CASSTGTDTQYF

SEQ ID NO: 616597 - protein, 12 aa, Homo sapiens
  CDR3 for alpha chain variable domain of TCR clone 308299 (TRAV8-3, TRAJ26)
CAGDNYGQNFVS

SEQ ID NO: 616598 - protein, 17 aa, Homo sapiens
  CDR3 for beta chain variable domain of TCR clone 308299 (TRBV12-4, TRBJ2-2)
CQQLVAGTRGRTGELFF

SEQ ID NO: 616599 - protein, 11 aa, Homo sapiens
  CDR3 for alpha chain variable domain of TCR clone 308300 (TRAV1-2, TRAJ20)
CAVANDYKLSF

SEQ ID NO: 616600 - protein, 13 aa, Homo sapiens
  CDR3 for beta chain variable domain of TCR clone 308300 (TRBV12-4, TRBJ1-2)
CASSLRQGKGYTF

SEQ ID NO: 616601 - protein, 11 aa, Homo sapiens
  CDR3 for alpha chain variable domain of TCR clone 308301 (TRAV3, TRAJ21)
CAVGNFNKFYF

SEQ ID NO: 616602 - protein, 16 aa, Homo sapiens
  CDR3 for beta chain variable domain of TCR clone 308301 (TRBV19, TRBJ2-1)
CDSSKAGPNSYNEQFF

SEQ ID NO: 616603 - protein, 15 aa, Homo sapiens
  CDR3 for alpha chain variable domain of TCR clone 308302 (TRAV3, TRAJ47)
CAVRDIGEYGNKLVF

SEQ ID NO: 616604 - protein, 18 aa, Homo sapiens
  CDR3 for beta chain variable domain of TCR clone 308302 (TRBV7-2, TRBJ2-3)
CASSLETSRGRKADTQYF

SEQ ID NO: 616605 - protein, 14 aa, Homo sapiens
  CDR3 for alpha chain variable domain of TCR clone 308303 (TRAV27, TRAJ42)
CAGEKVGSQGNLIF

SEQ ID NO: 616606 - protein, 11 aa, Homo sapiens
  CDR3 for beta chain variable domain of TCR clone 308303 (TRBV12-4, TRBJ2-3)
CASTATDTQYF

SEQ ID NO: 616607 - protein, 10 aa, Homo sapiens
  CDR3 for alpha chain variable domain of TCR clone 308304 (TRAV25, TRAJ20)
CAVNDYKLSF

SEQ ID NO: 616608 - protein, 18 aa, Homo sapiens
  CDR3 for beta chain variable domain of TCR clone 308304 (TRBV20-1, TRBJ2-6)
CSAETTPTHGSGADVLTF

SEQ ID NO: 616609 - protein, 13 aa, Homo sapiens
  CDR3 for alpha chain variable domain of TCR clone 308305 (TRAV12-1, TRAJ13)
CVVTSGGYQKVTF

SEQ ID NO: 616610 - protein, 16 aa, Homo sapiens
  CDR3 for beta chain variable domain of TCR clone 308305 (TRBV12-5, TRBJ2-5)
CASGPRTSGNQETQYF

SEQ ID NO: 616611 - protein, 15 aa, Homo sapiens
  CDR3 for alpha chain variable domain of TCR clone 308306 (TRAV38-1, TRAJ37)
CAFIFGSGNTGKLIF

SEQ ID NO: 616612 - protein, 14 aa, Homo sapiens
  CDR3 for beta chain variable domain of TCR clone 308306 (TRBV7-9, TRBJ2-1)
CASSLVVGADEQFF

SEQ ID NO: 616613 - protein, 14 aa, Homo sapiens
  CDR3 for alpha chain variable domain of TCR clone 308307 (TRAV29/DV5, TRAJ36)
CAARRKTGANNLFF

SEQ ID NO: 616614 - protein, 14 aa, Homo sapiens
  CDR3 for beta chain variable domain of TCR clone 308307 (TRBV19, TRBJ2-1)
CASSGTNLQGEQFF

SEQ ID NO: 616615 - protein, 14 aa, Homo sapiens
  CDR3 for alpha chain variable domain of TCR clone 308308 (TRAV16, TRAJ32)
CALKSGGATNKLIF

SEQ ID NO: 616616 - protein, 12 aa, Homo sapiens
  CDR3 for beta chain variable domain of TCR clone 308308 (TRBV12-4, TRBJ2-7)
CASSLGGYEQYF

SEQ ID NO: 616617 - protein, 13 aa, Homo sapiens
  CDR3 for alpha chain variable domain of TCR clone 308309 (TRAV13-1, TRAJ39)
CAASIVMQATCSP

SEQ ID NO: 616618 - protein, 16 aa, Homo sapiens
  CDR3 for beta chain variable domain of TCR clone 308309 (TRBV7-9, TRBJ2-3)
CASSPWREVGTDTQYF

SEQ ID NO: 616619 - protein, 18 aa, Homo sapiens
  CDR3 for alpha chain variable domain of TCR clone 308310 (TRAV13-1, TRAJ45)
CAANAVADSGGGADGLTF

SEQ ID NO: 616620 - protein, 16 aa, Homo sapiens
  CDR3 for beta chain variable domain of TCR clone 308310 (TRBV19, TRBJ2-1)
CASSMGGGSSYNAQFF

SEQ ID NO: 616621 - protein, 14 aa, Homo sapiens
  CDR3 for alpha chain variable domain of TCR clone 308311 (TRAV38-1, TRAJ43)
CVFMKHNNNNDMRF

SEQ ID NO: 616622 - protein, 17 aa, Homo sapiens
  CDR3 for beta chain variable domain of TCR clone 308311 (TRBV7-7, TRBJ1-4)
CASSLVGQGASNEKLFF

SEQ ID NO: 616623 - protein, 12 aa, Homo sapiens
  CDR3 for alpha chain variable domain of TCR clone 308312 (TRAV21, TRAJ31)
CAVWGNNARLMF

SEQ ID NO: 616624 - protein, 15 aa, Homo sapiens
  CDR3 for beta chain variable domain of TCR clone 308312 (TRBV11-2, TRBJ2-2)
CASSSDRVNAGELFF

SEQ ID NO: 616625 - protein, 13 aa, Homo sapiens
  CDR3 for alpha chain variable domain of TCR clone 308313 (TRAV21, TRAJ21)
CAVRTSTNFTLDL

SEQ ID NO: 616626 - protein, 16 aa, Homo sapiens
  CDR3 for beta chain variable domain of TCR clone 308313 (TRBV7-2, TRBJ2-7)
CASSFPRAGGPLEQYF

SEQ ID NO: 616627 - protein, 22 aa, Homo sapiens
  CDR3 for alpha chain variable domain of TCR clone 308314 (TRAV26-1, TRAJ30)
CIVRVRTEMTRSSLEKGHDFIF

SEQ ID NO: 616628 - protein, 20 aa, Homo sapiens
  CDR3 for beta chain variable domain of TCR clone 308314 (TRBV4-1, TRBJ1-5)
CASSQDPRGQGLISPSILVM

SEQ ID NO: 616629 - protein, 12 aa, Homo sapiens
  CDR3 for alpha chain variable domain of TCR clone 308315 (TRAV12-1, TRAJ40)
CVVYSGTYKYIF

SEQ ID NO: 616630 - protein, 16 aa, Homo sapiens
  CDR3 for beta chain variable domain of TCR clone 308315 (TRBV5-1, TRBJ2-3)
CASSLGLAVYTDTQYF

SEQ ID NO: 616631 - protein, 15 aa, Homo sapiens
  CDR3 for alpha chain variable domain of TCR clone 308316 (TRAV8-2, TRAJ40)
CVVLGTTSGTYKYIF

SEQ ID NO: 616632 - protein, 12 aa, Homo sapiens
  CDR3 for beta chain variable domain of TCR clone 308316 (TRBV7-3, TRBJ1-1)
CQQPGLGAEAFF

SEQ ID NO: 616633 - protein, 11 aa, Homo sapiens
  CDR3 for alpha chain variable domain of TCR clone 308317 (TRAV12-2, TRAJ43)
CAAYNNNDIRF

SEQ ID NO: 616634 - protein, 14 aa, Homo sapiens
  CDR3 for beta chain variable domain of TCR clone 308317 (TRBV7-8, TRBJ1-2)
CASSAGTAIYGYAF

SEQ ID NO: 616635 - protein, 13 aa, Homo sapiens
  CDR3 for alpha chain variable domain of TCR clone 308318 (TRAV13-1, TRAJ9)
CAARGTGGFNTIF

SEQ ID NO: 616636 - protein, 12 aa, Homo sapiens
  CDR3 for beta chain variable domain of TCR clone 308318 (TRBV2, TRBJ2-1)
CAYGPPGNEQFF

SEQ ID NO: 616637 - protein, 16 aa, Homo sapiens
  CDR3 for alpha chain variable domain of TCR clone 308319 (TRAV30, TRAJ24)
CGTEIVDADSWGKSKF

SEQ ID NO: 616638 - protein, 13 aa, Homo sapiens
  CDR3 for beta chain variable domain of TCR clone 308319 (TRBV11-2, TRBJ2-5)
CASSRGPSETQYF

SEQ ID NO: 616639 - protein, 12 aa, Homo sapiens
  CDR3 for alpha chain variable domain of TCR clone 308320 (TRAV20, TRAJ13)
CCVKRGYQKVTF

SEQ ID NO: 616640 - protein, 15 aa, Homo sapiens
  CDR3 for beta chain variable domain of TCR clone 308320 (TRBV3-1, TRBJ2-1)
CASSQDYTPRGEQSF

SEQ ID NO: 616641 - protein, 14 aa, Homo sapiens
  CDR3 for alpha chain variable domain of TCR clone 308321 (TRAV27, TRAJ58)
CAGDGETSGSRLTS

SEQ ID NO: 616642 - protein, 16 aa, Homo sapiens
  CDR3 for beta chain variable domain of TCR clone 308321 (TRBV7-3, TRBJ2-2)
CASSLKQGTLSGELFF

SEQ ID NO: 616643 - protein, 11 aa, Homo sapiens
  CDR3 for alpha chain variable domain of TCR clone 308322 (TRAV2, TRAJ13)
CASGGYQKVTF

SEQ ID NO: 616644 - protein, 11 aa, Homo sapiens
  CDR3 for beta chain variable domain of TCR clone 308322 (TRBV5-6, TRBJ2-5)
CAGSLERTQYF

SEQ ID NO: 616645 - protein, 19 aa, Homo sapiens
  CDR3 for alpha chain variable domain of TCR clone 308323 (TRAV1-2, TRAJ26)
CLLPLCCERPDNYGQNFVF

SEQ ID NO: 616646 - protein, 13 aa, Homo sapiens
  CDR3 for beta chain variable domain of TCR clone 308323 (TRBV7-3, TRBJ2-1)
CASSLDSYNEQFF

SEQ ID NO: 616647 - protein, 12 aa, Homo sapiens
  CDR3 for alpha chain variable domain of TCR clone 308324 (TRAV3, TRAJ20)
CAVRDPDYKLSF

SEQ ID NO: 616648 - protein, 13 aa, Homo sapiens
  CDR3 for beta chain variable domain of TCR clone 308324 (TRBV18, TRBJ1-1)
CASSPETKPETFF

SEQ ID NO: 616649 - protein, 12 aa, Homo sapiens
  CDR3 for alpha chain variable domain of TCR clone 308325 (TRAV13-2, TRAJ23)
CAERHRGGKLII

SEQ ID NO: 616650 - protein, 15 aa, Homo sapiens
  CDR3 for beta chain variable domain of TCR clone 308325 (TRBV7-9, TRBJ1-6)
CASSSPGRGNSPLHF

SEQ ID NO: 616651 - protein, 12 aa, Homo sapiens
  CDR3 for alpha chain variable domain of TCR clone 308326 (TRAV1-1, TRAJ24)
CAVRGSWGQFQF

SEQ ID NO: 616652 - protein, 15 aa, Homo sapiens
  CDR3 for beta chain variable domain of TCR clone 308326 (TRBV9, TRBJ1-6)
CASSVAGTGDSPLHF

SEQ ID NO: 616653 - protein, 12 aa, Homo sapiens
  CDR3 for alpha chain variable domain of TCR clone 308327 (TRAV12-3, TRAJ40)
CAMSSGTYKYIF

SEQ ID NO: 616654 - protein, 13 aa, Homo sapiens
  CDR3 for beta chain variable domain of TCR clone 308327 (TRBV7-2, TRBJ1-1)
CASNLKGAKVAFF

SEQ ID NO: 616655 - protein, 15 aa, Homo sapiens
  CDR3 for alpha chain variable domain of TCR clone 308328 (TRAV8-6, TRAJ26)
CAVSDQSPGGQDVVF

SEQ ID NO: 616656 - protein, 13 aa, Homo sapiens
  CDR3 for beta chain variable domain of TCR clone 308328 (TRBV27, TRBJ2-7)
CASSLRHRYEQYF

SEQ ID NO: 616657 - protein, 14 aa, Homo sapiens
  CDR3 for alpha chain variable domain of TCR clone 308329 (TRAV12-3, TRAJ6)
CAMSASGGSYIPTF

SEQ ID NO: 616658 - protein, 16 aa, Homo sapiens
  CDR3 for beta chain variable domain of TCR clone 308329 (TRBV4-2, TRBJ2-1)
CASSPRAGQGANEQFF

SEQ ID NO: 616659 - protein, 12 aa, Homo sapiens
  CDR3 for alpha chain variable domain of TCR clone 308330 (TRAV8-2, TRAJ6)
CVVSKGSYIPTF

SEQ ID NO: 616660 - protein, 18 aa, Homo sapiens
  CDR3 for beta chain variable domain of TCR clone 308330 (TRBV4-1, TRBJ2-3)
CASSQGGASGGDTDTQYF

SEQ ID NO: 616661 - protein, 13 aa, Homo sapiens
  CDR3 for alpha chain variable domain of TCR clone 308331 (TRAV1-2, TRAJ9)
CAALNTGGFKTIF

SEQ ID NO: 616662 - protein, 12 aa, Homo sapiens
  CDR3 for beta chain variable domain of TCR clone 308331 (TRBV12-4, TRBJ2-3)
CASSSTTDTQYF

SEQ ID NO: 616663 - protein, 13 aa, Homo sapiens
  CDR3 for alpha chain variable domain of TCR clone 308332 (TRAV21, TRAJ20)
CAVGPRVDYKLSF

SEQ ID NO: 616664 - protein, 16 aa, Homo sapiens
  CDR3 for beta chain variable domain of TCR clone 308332 (TRBV9, TRBJ2-2)
CASSAMGKGNTGELFF

SEQ ID NO: 616665 - protein, 16 aa, Homo sapiens
  CDR3 for alpha chain variable domain of TCR clone 308333 (TRAV39, TRAJ32)
CAVDMGYGGATNKLIF

SEQ ID NO: 616666 - protein, 14 aa, Homo sapiens
  CDR3 for beta chain variable domain of TCR clone 308333 (TRBV9, TRBJ2-4)
CASSPSGTSGVRYF

SEQ ID NO: 616667 - protein, 11 aa, Homo sapiens
  CDR3 for alpha chain variable domain of TCR clone 308334 (TRAV1-2, TRAJ20)
CAVANDYKLSF

SEQ ID NO: 616668 - protein, 14 aa, Homo sapiens
  CDR3 for beta chain variable domain of TCR clone 308334 (TRBV11-2, TRBJ1-5)
CASSLDRGRQPQHF

SEQ ID NO: 616669 - protein, 16 aa, Homo sapiens
  CDR3 for alpha chain variable domain of TCR clone 308335 (TRAV8-3, TRAJ44)
CAVGTLMTGTASTLTF

SEQ ID NO: 616670 - protein, 13 aa, Homo sapiens
  CDR3 for beta chain variable domain of TCR clone 308335 (TRBV11-2, TRBJ2-1)
CASSLRLTHEQFF

SEQ ID NO: 616671 - protein, 11 aa, Homo sapiens
  CDR3 for alpha chain variable domain of TCR clone 308336 (TRAV12-1, TRAJ15)
CVVNTGTALIF

SEQ ID NO: 616672 - protein, 16 aa, Homo sapiens
  CDR3 for beta chain variable domain of TCR clone 308336 (TRBV28, TRBJ2-1)
CASSSRVRDSYNEQFF

SEQ ID NO: 616673 - protein, 14 aa, Homo sapiens
  CDR3 for alpha chain variable domain of TCR clone 308337 (TRAV1-2, TRAJ29)
CAVRELTSATPLVF

SEQ ID NO: 616674 - protein, 16 aa, Homo sapiens
  CDR3 for beta chain variable domain of TCR clone 308337 (TRBV7-3, TRBJ2-2)
CASSLKRGTLSGELFF

SEQ ID NO: 616675 - protein, 12 aa, Homo sapiens
  CDR3 for alpha chain variable domain of TCR clone 308338 (TRAV12-3, TRAJ40)
CAMSSGTYKYIF

SEQ ID NO: 616676 - protein, 15 aa, Homo sapiens
  CDR3 for beta chain variable domain of TCR clone 308338 (TRBV7-9, TRBJ2-7)
CASSLALAEAYEQYF

SEQ ID NO: 616677 - protein, 14 aa, Homo sapiens
  CDR3 for alpha chain variable domain of TCR clone 308339 (TRAV12-3, TRAJ47)
CAMSVREFGNKLVF

SEQ ID NO: 616678 - protein, 15 aa, Homo sapiens
  CDR3 for beta chain variable domain of TCR clone 308339 (TRBV20-1, TRBJ2-2)
CSARDTRLNTGELFF

SEQ ID NO: 616679 - protein, 15 aa, Homo sapiens
  CDR3 for alpha chain variable domain of TCR clone 308340 (TRAV21, TRAJ40)
CAVRPQTSGTYKYIF

SEQ ID NO: 616680 - protein, 15 aa, Homo sapiens
  CDR3 for beta chain variable domain of TCR clone 308340 (TRBV18, TRBJ1-1)
CASSPRQGENTEAFF

SEQ ID NO: 616681 - protein, 13 aa, Homo sapiens
  CDR3 for alpha chain variable domain of TCR clone 308341 (TRAV17, TRAJ5)
CALCGTGRRALTF

SEQ ID NO: 616682 - protein, 13 aa, Homo sapiens
  CDR3 for beta chain variable domain of TCR clone 308341 (TRBV4-2, TRBJ1-1)
CASSQAGNTEAFF

SEQ ID NO: 616683 - protein, 10 aa, Homo sapiens
  CDR3 for alpha chain variable domain of TCR clone 308342 (TRAV13-1, TRAJ41)
CAARGPRRTQ

SEQ ID NO: 616684 - protein, 16 aa, Homo sapiens
  CDR3 for beta chain variable domain of TCR clone 308342 (TRBV18, TRBJ2-3)
CASSPPAGGPRKYAVF

SEQ ID NO: 616685 - protein, 13 aa, Homo sapiens
  CDR3 for alpha chain variable domain of TCR clone 308343 (TRAV8-3, TRAJ48)
CAVVPLGNEKLTL

SEQ ID NO: 616686 - protein, 12 aa, Homo sapiens
  CDR3 for beta chain variable domain of TCR clone 308343 (TRBV11-2, TRBJ2-2)
CASSLGGGELFF

SEQ ID NO: 616687 - protein, 14 aa, Homo sapiens
  CDR3 for alpha chain variable domain of TCR clone 308344 (TRAV17, TRAJ33)
CATDARRSNYQLIW

SEQ ID NO: 616688 - protein, 14 aa, Homo sapiens
  CDR3 for beta chain variable domain of TCR clone 308344 (TRBV25-1, TRBJ1-4)
CASSGGGQPETLFF

SEQ ID NO: 616689 - protein, 15 aa, Homo sapiens
  CDR3 for alpha chain variable domain of TCR clone 308345 (TRAV12-2, TRAJ43)
CAFDMRFGAGTRLTV

SEQ ID NO: 616690 - protein, 17 aa, Homo sapiens
  CDR3 for beta chain variable domain of TCR clone 308345 (TRBV13, TRBJ2-3)
CASRLSRVAGGRNTQYF

SEQ ID NO: 616691 - protein, 16 aa, Homo sapiens
  CDR3 for alpha chain variable domain of TCR clone 308346 (TRAV3, TRAJ3)
CAVRDRAKSSASKIIF

SEQ ID NO: 616692 - protein, 13 aa, Homo sapiens
  CDR3 for beta chain variable domain of TCR clone 308346 (TRBV12-5, TRBJ2-3)
CASGDRQSDTQYF

SEQ ID NO: 616693 - protein, 11 aa, Homo sapiens
  CDR3 for alpha chain variable domain of TCR clone 308347 (TRAV1-2, TRAJ20)
CALANDYKLSF

SEQ ID NO: 616694 - protein, 15 aa, Homo sapiens
  CDR3 for beta chain variable domain of TCR clone 308347 (TRBV2, TRBJ2-1)
CASSELAGSYNEQFF

SEQ ID NO: 616695 - protein, 14 aa, Homo sapiens
  CDR3 for alpha chain variable domain of TCR clone 308348 (TRAV13-2, TRAJ17)
CAENSKAAGNKLTF

SEQ ID NO: 616696 - protein, 13 aa, Homo sapiens
  CDR3 for beta chain variable domain of TCR clone 308348 (TRBV7-3, TRBJ1-1)
CASSQGWGAEAFF

SEQ ID NO: 616697 - protein, 12 aa, Homo sapiens
  CDR3 for alpha chain variable domain of TCR clone 308349 (TRAV1-2, TRAJ29)
CAVPSGNTPLVF

SEQ ID NO: 616698 - protein, 14 aa, Homo sapiens
  CDR3 for beta chain variable domain of TCR clone 308349 (TRBV15, TRBJ2-7)
CATSRVARGYEQYF

SEQ ID NO: 616699 - protein, 11 aa, Homo sapiens
  CDR3 for alpha chain variable domain of TCR clone 308350 (TRAV1-2, TRAJ20)
CAVANDYKLSF

SEQ ID NO: 616700 - protein, 15 aa, Homo sapiens
  CDR3 for beta chain variable domain of TCR clone 308350 (TRBV29-1, TRBJ2-1)
CSGRDRKSSYNEQFF

SEQ ID NO: 616701 - protein, 12 aa, Homo sapiens
  CDR3 for alpha chain variable domain of TCR clone 308351 (TRAV12-3, TRAJ17)
CAMTLTGDKLTF

SEQ ID NO: 616702 - protein, 16 aa, Homo sapiens
  CDR3 for beta chain variable domain of TCR clone 308351 (TRBV28, TRBJ1-5)
CASSLTGQGWNQPQHF

SEQ ID NO: 616703 - protein, 14 aa, Homo sapiens
  CDR3 for alpha chain variable domain of TCR clone 308352 (TRAV26-1, TRAJ34)
YIVRESYNTDKLIF

SEQ ID NO: 616704 - protein, 13 aa, Homo sapiens
  CDR3 for beta chain variable domain of TCR clone 308352 (TRBV27, TRBJ2-7)
CASSFVSSYEQYF

SEQ ID NO: 616705 - protein, 17 aa, Homo sapiens
  CDR3 for alpha chain variable domain of TCR clone 308353 (TRAV26-1, TRAJ53)
CIVRVDDSGGRNYKLTF

SEQ ID NO: 616706 - protein, 15 aa, Homo sapiens
  CDR3 for beta chain variable domain of TCR clone 308353 (TRBV7-9, TRBJ1-4)
CAGSRTGGFNEKLFF

SEQ ID NO: 616707 - protein, 13 aa, Homo sapiens
  CDR3 for alpha chain variable domain of TCR clone 308354 (TRAV12-2, TRAJ24)
CAVATDSWGKFQF

SEQ ID NO: 616708 - protein, 14 aa, Homo sapiens
  CDR3 for beta chain variable domain of TCR clone 308354 (TRBV4-1, TRBJ2-2)
CASSLTENTGELFF

SEQ ID NO: 616709 - protein, 13 aa, Homo sapiens
  CDR3 for alpha chain variable domain of TCR clone 308355 (TRAV3, TRAJ21)
CAGREPDFNKFYF

SEQ ID NO: 616710 - protein, 14 aa, Homo sapiens
  CDR3 for beta chain variable domain of TCR clone 308355 (TRBV25-1, TRBJ1-1)
CASTHLGGNTEAFF

SEQ ID NO: 616711 - protein, 16 aa, Homo sapiens
  CDR3 for alpha chain variable domain of TCR clone 308356 (TRAV20, TRAJ10)
CAVLRGLTGGGNKLTF

SEQ ID NO: 616712 - protein, 14 aa, Homo sapiens
  CDR3 for beta chain variable domain of TCR clone 308356 (TRBV19, TRBJ1-5)
CASRSPDSFLSQHF

SEQ ID NO: 616713 - protein, 14 aa, Homo sapiens
  CDR3 for alpha chain variable domain of TCR clone 308357 (TRAV9-2, TRAJ39)
CALYIYNAGNTLTF

SEQ ID NO: 616714 - protein, 22 aa, Homo sapiens
  CDR3 for beta chain variable domain of TCR clone 308357 (TRBV6-1, TRBJ1-3)
CASVQGGGWKHHIFWRGKLAHC

SEQ ID NO: 616715 - protein, 15 aa, Homo sapiens
  CDR3 for alpha chain variable domain of TCR clone 308358 (TRAV25, TRAJ53)
CAATGGGGSNYKLTF

SEQ ID NO: 616716 - protein, 12 aa, Homo sapiens
  CDR3 for beta chain variable domain of TCR clone 308358 (TRBV24-1, TRBJ1-1)
CATLYPDTEAFF

SEQ ID NO: 616717 - protein, 14 aa, Homo sapiens
  CDR3 for alpha chain variable domain of TCR clone 308359 (TRAV17, TRAJ43)
CATDHPYNNNDMRF

SEQ ID NO: 616718 - protein, 12 aa, Homo sapiens
  CDR3 for beta chain variable domain of TCR clone 308359 (TRBV11-2, TRBJ2-2)
CASSLGGGELFF

SEQ ID NO: 616719 - protein, 11 aa, Homo sapiens
  CDR3 for alpha chain variable domain of TCR clone 308360 (TRAV1-1, TRAJ30)
CAQNRDDNIIF

SEQ ID NO: 616720 - protein, 14 aa, Homo sapiens
  CDR3 for beta chain variable domain of TCR clone 308360 (TRBV7-8, TRBJ2-7)
CASSPGLADYEQYF

SEQ ID NO: 616721 - protein, 12 aa, Homo sapiens
  CDR3 for alpha chain variable domain of TCR clone 308361 (TRAV2, TRAJ31)
CAVEDNNARLMF

SEQ ID NO: 616722 - protein, 11 aa, Homo sapiens
  CDR3 for beta chain variable domain of TCR clone 308361 (TRBV12-4, TRBJ2-3)
CASTATDTQYF

SEQ ID NO: 616723 - protein, 11 aa, Homo sapiens
  CDR3 for alpha chain variable domain of TCR clone 308362 (TRAV17, TRAJ36)
CAPTGANNLFF

SEQ ID NO: 616724 - protein, 15 aa, Homo sapiens
  CDR3 for beta chain variable domain of TCR clone 308362 (TRBV20-1, TRBJ2-7)
CSARKGLAESYEQYF

SEQ ID NO: 616725 - protein, 10 aa, Homo sapiens
  CDR3 for alpha chain variable domain of TCR clone 308363 (TRAV23/DV6, TRAJ57)
CAASSTLSQG

SEQ ID NO: 616726 - protein, 15 aa, Homo sapiens
  CDR3 for beta chain variable domain of TCR clone 308363 (TRBV27, TRBJ1-4)
CASSAQQDLNEELFF

SEQ ID NO: 616727 - protein, 15 aa, Homo sapiens
  CDR3 for alpha chain variable domain of TCR clone 308364 (TRAV25, TRAJ52)
CAGRPGGTSYGKLTF

SEQ ID NO: 616728 - protein, 14 aa, Homo sapiens
  CDR3 for beta chain variable domain of TCR clone 308364 (TRBV28, TRBJ1-2)
CASRIQGANYGYTF

SEQ ID NO: 616729 - protein, 14 aa, Homo sapiens
  CDR3 for alpha chain variable domain of TCR clone 308365 (TRAV12-3, TRAJ56)
CAMSVTGANSKLTF

SEQ ID NO: 616730 - protein, 17 aa, Homo sapiens
  CDR3 for beta chain variable domain of TCR clone 308365 (TRBV20-1, TRBJ2-3)
CSASLLSRGGSADTQYF

SEQ ID NO: 616731 - protein, 14 aa, Homo sapiens
  CDR3 for alpha chain variable domain of TCR clone 308366 (TRAV12-2, TRAJ4)
CAEDLSGGYNKLIF

SEQ ID NO: 616732 - protein, 13 aa, Homo sapiens
  CDR3 for beta chain variable domain of TCR clone 308366 (TRBV7-9, TRBJ1-2)
CASSLKGNYGYTF

SEQ ID NO: 616733 - protein, 12 aa, Homo sapiens
  CDR3 for alpha chain variable domain of TCR clone 308367 (TRAV13-2, TRAJ23)
CAERHRGGKLIF

SEQ ID NO: 616734 - protein, 12 aa, Homo sapiens
  CDR3 for beta chain variable domain of TCR clone 308367 (TRBV7-9, TRBJ2-5)
CASSLRGETQYF

SEQ ID NO: 616735 - protein, 16 aa, Homo sapiens
  CDR3 for alpha chain variable domain of TCR clone 308368 (TRAV30, TRAJ24)
CGTEIVDADSWGKFRF

SEQ ID NO: 616736 - protein, 13 aa, Homo sapiens
  CDR3 for beta chain variable domain of TCR clone 308368 (TRBV7-2, TRBJ1-4)
CASSLAGLEKLFF

SEQ ID NO: 616737 - protein, 12 aa, Homo sapiens
  CDR3 for alpha chain variable domain of TCR clone 308369 (TRAV29/DV5, TRAJ49)
CSATDTGNQFYF

SEQ ID NO: 616738 - protein, 15 aa, Homo sapiens
  CDR3 for beta chain variable domain of TCR clone 308369 (TRBV19, TRBJ2-2)
CASRQTGADTGELFF

SEQ ID NO: 616739 - protein, 16 aa, Homo sapiens
  CDR3 for alpha chain variable domain of TCR clone 308370 (TRAV20, TRAJ53)
CAVQGNSGGSNYKLTF

SEQ ID NO: 616740 - protein, 17 aa, Homo sapiens
  CDR3 for beta chain variable domain of TCR clone 308370 (TRBV7-3, TRBJ2-2)
CASSLSGTSGGTGELFF

SEQ ID NO: 616741 - protein, 16 aa, Homo sapiens
  CDR3 for alpha chain variable domain of TCR clone 308371 (TRAV16, TRAJ42)
CARKMNYGGSQGNLIF

SEQ ID NO: 616742 - protein, 14 aa, Homo sapiens
  CDR3 for beta chain variable domain of TCR clone 308371 (TRBV14, TRBJ2-3)
CQQPDDRHTDTQYF

SEQ ID NO: 616743 - protein, 16 aa, Homo sapiens
  CDR3 for alpha chain variable domain of TCR clone 308372 (TRAV1-2, TRAJ10)
CAVRGVLTGGGNKLTF

SEQ ID NO: 616744 - protein, 16 aa, Homo sapiens
  CDR3 for beta chain variable domain of TCR clone 308372 (TRBV4-2, TRBJ2-5)
CASSKELVGSQETQYF

SEQ ID NO: 616745 - protein, 14 aa, Homo sapiens
  CDR3 for alpha chain variable domain of TCR clone 308373 (TRAV1-2, TRAJ8)
CAVREDTGFQKLVF

SEQ ID NO: 616746 - protein, 12 aa, Homo sapiens
  CDR3 for beta chain variable domain of TCR clone 308373 (TRBV2, TRBJ2-1)
CACGPPGNEQFF

SEQ ID NO: 616747 - protein, 18 aa, Homo sapiens
  CDR3 for alpha chain variable domain of TCR clone 308374 (TRAV12-3, TRAJ52)
CAMSVGGAGGTSYGKLTF

SEQ ID NO: 616748 - protein, 15 aa, Homo sapiens
  CDR3 for beta chain variable domain of TCR clone 308374 (TRBV12-4, TRBJ1-2)
CASSPITGGGYGYTF

SEQ ID NO: 616749 - protein, 10 aa, Homo sapiens
  CDR3 for alpha chain variable domain of TCR clone 308375 (TRAV12-1, TRAJ23)
CVVSGGKLIF

SEQ ID NO: 616750 - protein, 15 aa, Homo sapiens
  CDR3 for beta chain variable domain of TCR clone 308375 (TRBV7-9, TRBJ1-6)
CASSSPGRGNSPLHF

SEQ ID NO: 616751 - protein, 12 aa, Homo sapiens
  CDR3 for alpha chain variable domain of TCR clone 308376 (TRAV8-2, TRAJ5)
CVVIDIGRALTF

SEQ ID NO: 616752 - protein, 14 aa, Homo sapiens
  CDR3 for beta chain variable domain of TCR clone 308376 (TRBV7-6, TRBJ2-3)
CASSLGTVTDTQYF

SEQ ID NO: 616753 - protein, 15 aa, Homo sapiens
  CDR3 for alpha chain variable domain of TCR clone 308377 (TRAV8-4, TRAJ39)
CALSHHRGAGNMLTF

SEQ ID NO: 616754 - protein, 15 aa, Homo sapiens
  CDR3 for beta chain variable domain of TCR clone 308377 (TRBV20-1, TRBJ1-1)
CSARPRQGAPTEAFF

SEQ ID NO: 616755 - protein, 12 aa, Homo sapiens
  CDR3 for alpha chain variable domain of TCR clone 308378 (TRAV17, TRAJ20)
CATDSNDYKLSF

SEQ ID NO: 616756 - protein, 14 aa, Homo sapiens
  CDR3 for beta chain variable domain of TCR clone 308378 (TRBV19, TRBJ2-1)
CASSAGLSGNEQFF

SEQ ID NO: 616757 - protein, 13 aa, Homo sapiens
  CDR3 for alpha chain variable domain of TCR clone 308379 (TRAV12-3, TRAJ33)
CAMSVNSNYQLIW

SEQ ID NO: 616758 - protein, 14 aa, Homo sapiens
  CDR3 for beta chain variable domain of TCR clone 308379 (TRBV7-3, TRBJ2-1)
CASSLGTSANEQFF

SEQ ID NO: 616759 - protein, 14 aa, Homo sapiens
  CDR3 for alpha chain variable domain of TCR clone 308380 (TRAV1-2, TRAJ8)
CAVREDTGFQKLVF

SEQ ID NO: 616760 - protein, 16 aa, Homo sapiens
  CDR3 for beta chain variable domain of TCR clone 308380 (TRBV5-7, TRBJ2-5)
CASTLSPAGGRETQYF

SEQ ID NO: 616761 - protein, 15 aa, Homo sapiens
  CDR3 for alpha chain variable domain of TCR clone 308381 (TRAV13-1, TRAJ32)
CAASKYGGATNKLIF

SEQ ID NO: 616762 - protein, 12 aa, Homo sapiens
  CDR3 for beta chain variable domain of TCR clone 308381 (TRBV7-6, TRBJ2-3)
CASSTGTDTQYF

SEQ ID NO: 616763 - protein, 15 aa, Homo sapiens
  CDR3 for alpha chain variable domain of TCR clone 308382 (TRAV3, TRAJ32)
CAVRDPGGATNKLIF

SEQ ID NO: 616764 - protein, 15 aa, Homo sapiens
  CDR3 for beta chain variable domain of TCR clone 308382 (TRBV11-2, TRBJ2-1)
CASSRNRGLMYEQFF

SEQ ID NO: 616765 - protein, 14 aa, Homo sapiens
  CDR3 for alpha chain variable domain of TCR clone 308383 (TRAV4, TRAJ6)
CFVGEAGGSYIPTF

SEQ ID NO: 616766 - protein, 16 aa, Homo sapiens
  CDR3 for beta chain variable domain of TCR clone 308383 (TRBV7-6, TRBJ2-1)
CASSLNEGPSYNEQFF

SEQ ID NO: 616767 - protein, 15 aa, Homo sapiens
  CDR3 for alpha chain variable domain of TCR clone 308384 (TRAV12-2, TRAJ53)
CAVNGGGGSNYKLTF

SEQ ID NO: 616768 - protein, 15 aa, Homo sapiens
  CDR3 for beta chain variable domain of TCR clone 308384 (TRBV7-3, TRBJ2-3)
CASLKDGREGDTQYF

SEQ ID NO: 616769 - protein, 10 aa, Homo sapiens
  CDR3 for alpha chain variable domain of TCR clone 308385 (TRAV30, TRAJ48)
CGIGNEKLTF

SEQ ID NO: 616770 - protein, 15 aa, Homo sapiens
  CDR3 for beta chain variable domain of TCR clone 308385 (TRBV7-8, TRBJ2-1)
CASSLADSLYNEQFF

SEQ ID NO: 616771 - protein, 12 aa, Homo sapiens
  CDR3 for alpha chain variable domain of TCR clone 308386 (TRAV17, TRAJ4)
CATDGGYNKLIF

SEQ ID NO: 616772 - protein, 18 aa, Homo sapiens
  CDR3 for beta chain variable domain of TCR clone 308386 (TRBV7-9, TRBJ1-1)
CASSPRVGTRILRAEAFF

SEQ ID NO: 616773 - protein, 16 aa, Homo sapiens
  CDR3 for alpha chain variable domain of TCR clone 308387 (TRAV4, TRAJ22)
CLVGDLYSGSARQLTF

SEQ ID NO: 616774 - protein, 13 aa, Homo sapiens
  CDR3 for beta chain variable domain of TCR clone 308387 (TRBV7-9, TRBJ2-3)
CASSPGSTDTQYF

SEQ ID NO: 616775 - protein, 12 aa, Homo sapiens
  CDR3 for alpha chain variable domain of TCR clone 308388 (TRAV23/DV6, TRAJ17)
CAQGSCRQQATF

SEQ ID NO: 616776 - protein, 14 aa, Homo sapiens
  CDR3 for beta chain variable domain of TCR clone 308388 (TRBV7-2, TRBJ1-2)
CASSQTGSTYGYTF

SEQ ID NO: 616777 - protein, 13 aa, Homo sapiens
  CDR3 for alpha chain variable domain of TCR clone 308389 (TRAV29/DV5, TRAJ31)
CASSRNNNARLMF

SEQ ID NO: 616778 - protein, 12 aa, Homo sapiens
  CDR3 for beta chain variable domain of TCR clone 308389 (TRBV14, TRBJ2-5)
CASSQLKETQYF

SEQ ID NO: 616779 - protein, 16 aa, Homo sapiens
  CDR3 for alpha chain variable domain of TCR clone 308390 (TRAV12-3, TRAJ53)
CAMSPGRGVSNYKLTF

SEQ ID NO: 616780 - protein, 11 aa, Homo sapiens
  CDR3 for beta chain variable domain of TCR clone 308390 (TRBV29-1, TRBJ2-5)
CSEDRTGTQYF

SEQ ID NO: 616781 - protein, 14 aa, Homo sapiens
  CDR3 for alpha chain variable domain of TCR clone 308391 (TRAV8-3, TRAJ22)
CAVVVFGSARQLTF

SEQ ID NO: 616782 - protein, 13 aa, Homo sapiens
  CDR3 for beta chain variable domain of TCR clone 308391 (TRBV4-2, TRBJ2-5)
CASSQGGWQTQYF

SEQ ID NO: 616783 - protein, 14 aa, Homo sapiens
  CDR3 for alpha chain variable domain of TCR clone 308392 (TRAV8-6, TRAJ4)
CAVTVSGGYNKLMF

SEQ ID NO: 616784 - protein, 13 aa, Homo sapiens
  CDR3 for beta chain variable domain of TCR clone 308392 (TRBV20-1, TRBJ1-1)
CSARGGGNTEAFF

SEQ ID NO: 616785 - protein, 13 aa, Homo sapiens
  CDR3 for alpha chain variable domain of TCR clone 308393 (TRAV27, TRAJ57)
CRSAQGGSEKLVF

SEQ ID NO: 616786 - protein, 16 aa, Homo sapiens
  CDR3 for beta chain variable domain of TCR clone 308393 (TRBV6-6, TRBJ2-1)
CASSYSFSGSYNEQFF

SEQ ID NO: 616787 - protein, 12 aa, Homo sapiens
  CDR3 for alpha chain variable domain of TCR clone 308394 (TRAV8-3, TRAJ26)
CAGDNYGQNFVF

SEQ ID NO: 616788 - protein, 16 aa, Homo sapiens
  CDR3 for beta chain variable domain of TCR clone 308394 (TRBV5-1, TRBJ1-1)
CASSSGGNSLNTEAFF

SEQ ID NO: 616789 - protein, 14 aa, Homo sapiens
  CDR3 for alpha chain variable domain of TCR clone 308395 (TRAV10, TRAJ34)
CVVSRGGDTDKLIF

SEQ ID NO: 616790 - protein, 16 aa, Homo sapiens
  CDR3 for beta chain variable domain of TCR clone 308395 (TRBV4-2, TRBJ1-1)
CASSPSPGRAAPEAFF

SEQ ID NO: 616791 - protein, 17 aa, Homo sapiens
  CDR3 for alpha chain variable domain of TCR clone 308396 (TRAV2, TRAJ36)
CAVEDRGNWGEQPLLWD

SEQ ID NO: 616792 - protein, 13 aa, Homo sapiens
  CDR3 for beta chain variable domain of TCR clone 308396 (TRBV7-9, TRBJ2-5)
CQQLRHGEETQYF

SEQ ID NO: 616793 - protein, 13 aa, Homo sapiens
  CDR3 for alpha chain variable domain of TCR clone 308397 (TRAV3, TRAJ33)
CAVRDRSNYQLIW

SEQ ID NO: 616794 - protein, 16 aa, Homo sapiens
  CDR3 for beta chain variable domain of TCR clone 308397 (TRBV4-2, TRBJ2-7)
CASSQDRGTSSYDQYF

SEQ ID NO: 616795 - protein, 13 aa, Homo sapiens
  CDR3 for alpha chain variable domain of TCR clone 308398 (TRAV12-1, TRAJ49)
CVVTPFTGHQFYF

SEQ ID NO: 616796 - protein, 13 aa, Homo sapiens
  CDR3 for beta chain variable domain of TCR clone 308398 (TRBV20-1, TRBJ1-1)
CSARGGANTEAFF

SEQ ID NO: 616797 - protein, 14 aa, Homo sapiens
  CDR3 for alpha chain variable domain of TCR clone 308399 (TRAV12-3, TRAJ42)
CAMNDGGSQGNLIF

SEQ ID NO: 616798 - protein, 15 aa, Homo sapiens
  CDR3 for beta chain variable domain of TCR clone 308399 (TRBV5-7, TRBJ1-5)
CASSYGKLWDQTQHF

SEQ ID NO: 616799 - protein, 14 aa, Homo sapiens
  CDR3 for alpha chain variable domain of TCR clone 308400 (TRAV1-2, TRAJ8)
CAVREDTGFQKLVF

SEQ ID NO: 616800 - protein, 15 aa, Homo sapiens
  CDR3 for beta chain variable domain of TCR clone 308400 (TRBV12-4, TRBJ2-5)
CSSSPPTGLQKTQYF

SEQ ID NO: 616801 - protein, 12 aa, Homo sapiens
  CDR3 for alpha chain variable domain of TCR clone 308401 (TRAV12-3, TRAJ40)
CAMSPGTYKYIF

SEQ ID NO: 616802 - protein, 15 aa, Homo sapiens
  CDR3 for beta chain variable domain of TCR clone 308401 (TRBV7-3, TRBJ2-2)
SASSETGQGTGELFF

SEQ ID NO: 616803 - protein, 14 aa, Homo sapiens
  CDR3 for alpha chain variable domain of TCR clone 308402 (TRAV12-2, TRAJ13)
CAVKKPGGYQKVTF

SEQ ID NO: 616804 - protein, 15 aa, Homo sapiens
  CDR3 for beta chain variable domain of TCR clone 308402 (TRBV20-1, TRBJ2-7)
CSARDRVSGMDEQYF

SEQ ID NO: 616805 - protein, 13 aa, Homo sapiens
  CDR3 for alpha chain variable domain of TCR clone 308403 (TRAV2, TRAJ15)
CAVEAQAGTALIF

SEQ ID NO: 616806 - protein, 15 aa, Homo sapiens
  CDR3 for beta chain variable domain of TCR clone 308403 (TRBV6-3, TRBJ2-7)
CASSSPGTVFYEQYF

SEQ ID NO: 616807 - protein, 13 aa, Homo sapiens
  CDR3 for alpha chain variable domain of TCR clone 308404 (TRAV21, TRAJ36)
CAVIKTGANNLFF

SEQ ID NO: 616808 - protein, 12 aa, Homo sapiens
  CDR3 for beta chain variable domain of TCR clone 308404 (TRBV28, TRBJ2-3)
CASSLYRDTQYF

SEQ ID NO: 616809 - protein, 12 aa, Homo sapiens
  CDR3 for alpha chain variable domain of TCR clone 308405 (TRAV27, TRAJ36)
ASTPAGAKNVFF

SEQ ID NO: 616810 - protein, 13 aa, Homo sapiens
  CDR3 for beta chain variable domain of TCR clone 308405 (TRBV7-9, TRBJ2-3)
CASSPGSTDTQYF

SEQ ID NO: 616811 - protein, 17 aa, Homo sapiens
  CDR3 for alpha chain variable domain of TCR clone 308406 (TRAV13-1, TRAJ28)
CAASPPSSGAGSYQLPF

SEQ ID NO: 616812 - protein, 12 aa, Homo sapiens
  CDR3 for beta chain variable domain of TCR clone 308406 (TRBV11-2, TRBJ2-2)
CASSLPTGELFF

SEQ ID NO: 616813 - protein, 14 aa, Homo sapiens
  CDR3 for alpha chain variable domain of TCR clone 308407 (TRAV1-2, TRAJ16)
CAVNRFSDGQKLLF

SEQ ID NO: 616814 - protein, 12 aa, Homo sapiens
  CDR3 for beta chain variable domain of TCR clone 308407 (TRBV5-1, TRBJ2-5)
CASSWDEETQYF

SEQ ID NO: 616815 - protein, 23 aa, Homo sapiens
  CDR3 for alpha chain variable domain of TCR clone 308408 (TRAV1-1, TRAJ11)
LLQELQMKDSASYFCAGYSTLTF

SEQ ID NO: 616816 - protein, 13 aa, Homo sapiens
  CDR3 for beta chain variable domain of TCR clone 308408 (TRBV7-3, TRBJ1-1)
CASSQDWGAEAFF

SEQ ID NO: 616817 - protein, 12 aa, Homo sapiens
  CDR3 for alpha chain variable domain of TCR clone 308409 (TRAV12-1, TRAJ29)
CVADSGNTPLVF

SEQ ID NO: 616818 - protein, 12 aa, Homo sapiens
  CDR3 for beta chain variable domain of TCR clone 308409 (TRBV2, TRBJ2-7)
CASKRGSYQQYF

SEQ ID NO: 616819 - protein, 14 aa, Homo sapiens
  CDR3 for alpha chain variable domain of TCR clone 308410 (TRAV12-2, TRAJ11)
CAVEGGSGYSTLTF

SEQ ID NO: 616820 - protein, 15 aa, Homo sapiens
  CDR3 for beta chain variable domain of TCR clone 308410 (TRBV7-8, TRBJ1-5)
CASSLERRGLEPQHF

SEQ ID NO: 616821 - protein, 14 aa, Homo sapiens
  CDR3 for alpha chain variable domain of TCR clone 308411 (TRAV1-2, TRAJ8)
CAVREDTDFQKLVF

SEQ ID NO: 616822 - protein, 12 aa, Homo sapiens
  CDR3 for beta chain variable domain of TCR clone 308411 (TRBV2, TRBJ2-1)
CAYGPPGNEQFF

SEQ ID NO: 616823 - protein, 13 aa, Homo sapiens
  CDR3 for alpha chain variable domain of TCR clone 308412 (TRAV14/DV4, TRAJ23)
CAMRAVKGGKLIF

SEQ ID NO: 616824 - protein, 15 aa, Homo sapiens
  CDR3 for beta chain variable domain of TCR clone 308412 (TRBV6-3, TRBJ2-1)
CASSYASDSYNEQFF

SEQ ID NO: 616825 - protein, 14 aa, Homo sapiens
  CDR3 for alpha chain variable domain of TCR clone 308413 (TRAV8-6, TRAJ4)
CAVTVSGGYNKLIF

SEQ ID NO: 616826 - protein, 12 aa, Homo sapiens
  CDR3 for beta chain variable domain of TCR clone 308413 (TRBV11-2, TRBJ2-2)
CASSLGGGELFF

SEQ ID NO: 616827 - protein, 15 aa, Homo sapiens
  CDR3 for alpha chain variable domain of TCR clone 308414 (TRAV21, TRAJ53)
CATLKSGGSNYKLTC

SEQ ID NO: 616828 - protein, 16 aa, Homo sapiens
  CDR3 for beta chain variable domain of TCR clone 308414 (TRBV9, TRBJ2-1)
CASSVGGGGNYNEQFF

SEQ ID NO: 616829 - protein, 15 aa, Homo sapiens
  CDR3 for alpha chain variable domain of TCR clone 308415 (TRAV12-3, TRAJ49)
CAMAVTPNNGNQFYF

SEQ ID NO: 616830 - protein, 14 aa, Homo sapiens
  CDR3 for beta chain variable domain of TCR clone 308415 (TRBV7-8, TRBJ2-3)
CASSLEAGTDTQYF

SEQ ID NO: 616831 - protein, 12 aa, Homo sapiens
  CDR3 for alpha chain variable domain of TCR clone 308416 (TRAV17, TRAJ4)
CAVSGGYNKLIF

SEQ ID NO: 616832 - protein, 13 aa, Homo sapiens
  CDR3 for beta chain variable domain of TCR clone 308416 (TRBV6-1, TRBJ1-1)
CAISEGWGTEAFF

SEQ ID NO: 616833 - protein, 14 aa, Homo sapiens
  CDR3 for alpha chain variable domain of TCR clone 308417 (TRAV26-1, TRAJ38)
CIADNAGNNRKLIC

SEQ ID NO: 616834 - protein, 14 aa, Homo sapiens
  CDR3 for beta chain variable domain of TCR clone 308417 (TRBV20-1, TRBJ1-3)
CSASPTGAGNTIYF

SEQ ID NO: 616835 - protein, 12 aa, Homo sapiens
  CDR3 for alpha chain variable domain of TCR clone 308418 (TRAV12-2, TRAJ8)
CAVKGGFQKLVF

SEQ ID NO: 616836 - protein, 14 aa, Homo sapiens
  CDR3 for beta chain variable domain of TCR clone 308418 (TRBV11-2, TRBJ1-5)
CASSLDRGRQPQHF

SEQ ID NO: 616837 - protein, 13 aa, Homo sapiens
  CDR3 for alpha chain variable domain of TCR clone 308419 (TRAV35, TRAJ57)
CAGSQGGSEKLVF

SEQ ID NO: 616838 - protein, 15 aa, Homo sapiens
  CDR3 for beta chain variable domain of TCR clone 308419 (TRBV20-1, TRBJ2-7)
CSARDRVSAMDEQYF

SEQ ID NO: 616839 - protein, 16 aa, Homo sapiens
  CDR3 for alpha chain variable domain of TCR clone 308420 (TRAV12-2, TRAJ45)
CAVIFLSGGGADGLTL

SEQ ID NO: 616840 - protein, 19 aa, Homo sapiens
  CDR3 for beta chain variable domain of TCR clone 308420 (TRBV28, TRBJ2-4)
CASSFQPGGPAHSKNIQYF

SEQ ID NO: 616841 - protein, 15 aa, Homo sapiens
  CDR3 for alpha chain variable domain of TCR clone 308421 (TRAV20, TRAJ28)
CAVQYSWAGSYQLTF

SEQ ID NO: 616842 - protein, 12 aa, Homo sapiens
  CDR3 for beta chain variable domain of TCR clone 308421 (TRBV12-4, TRBJ1-3)
CASRASGNTIHF

SEQ ID NO: 616843 - protein, 15 aa, Homo sapiens
  CDR3 for alpha chain variable domain of TCR clone 308422 (TRAV17, TRAJ13)
CATDAGSGGYQKVTF

SEQ ID NO: 616844 - protein, 16 aa, Homo sapiens
  CDR3 for beta chain variable domain of TCR clone 308422 (TRBV19, TRBJ2-1)
CASSKAGPSSYNEQFF

SEQ ID NO: 616845 - protein, 14 aa, Homo sapiens
  CDR3 for alpha chain variable domain of TCR clone 308423 (TRAV10, TRAJ34)
CVVSGGGDTDKLIF

SEQ ID NO: 616846 - protein, 17 aa, Homo sapiens
  CDR3 for beta chain variable domain of TCR clone 308423 (TRBV6-3, TRBJ2-3)
CASRRPLGGGSTDTQYF

SEQ ID NO: 616847 - protein, 15 aa, Homo sapiens
  CDR3 for alpha chain variable domain of TCR clone 308424 (TRAV3, TRAJ22)
CAVRDRGGSARQLTF

SEQ ID NO: 616848 - protein, 12 aa, Homo sapiens
  CDR3 for beta chain variable domain of TCR clone 308424 (TRBV19, TRBJ1-1)
CASSIMNTEAFF

SEQ ID NO: 616849 - protein, 18 aa, Homo sapiens
  CDR3 for alpha chain variable domain of TCR clone 308425 (TRAV1-2, TRAJ10)
CAVRALTPVTGGGNKLTF

SEQ ID NO: 616850 - protein, 14 aa, Homo sapiens
  CDR3 for beta chain variable domain of TCR clone 308425 (TRBV4-1, TRBJ1-1)
CASSQQGDGNEAFF

SEQ ID NO: 616851 - protein, 15 aa, Homo sapiens
  CDR3 for alpha chain variable domain of TCR clone 308426 (TRAV12-2, TRAJ53)
CAVNTGGGCNYKLTF

SEQ ID NO: 616852 - protein, 15 aa, Homo sapiens
  CDR3 for beta chain variable domain of TCR clone 308426 (TRBV5-1, TRBJ2-5)
CASSLGLGEIKTQYF

SEQ ID NO: 616853 - protein, 14 aa, Homo sapiens
  CDR3 for alpha chain variable domain of TCR clone 308427 (TRAV12-2, TRAJ6)
CVPLRPGGSYIPTF

SEQ ID NO: 616854 - protein, 15 aa, Homo sapiens
  CDR3 for beta chain variable domain of TCR clone 308427 (TRBV5-1, TRBJ2-2)
CASSSQGGNTGELFF

SEQ ID NO: 616855 - protein, 16 aa, Homo sapiens
  CDR3 for alpha chain variable domain of TCR clone 308428 (TRAV23/DV6, TRAJ9)
CAASIGGNTGGFKPIF

SEQ ID NO: 616856 - protein, 14 aa, Homo sapiens
  CDR3 for beta chain variable domain of TCR clone 308428 (TRBV9, TRBJ2-7)
CASSVGVGSYGQYF

SEQ ID NO: 616857 - protein, 12 aa, Homo sapiens
  CDR3 for alpha chain variable domain of TCR clone 308429 (TRAV12-2, TRAJ47)
CAVAEYGNKLVF

SEQ ID NO: 616858 - protein, 12 aa, Homo sapiens
  CDR3 for beta chain variable domain of TCR clone 308429 (TRBV11-2, TRBJ2-7)
CASSLPTYEQYF

SEQ ID NO: 616859 - protein, 12 aa, Homo sapiens
  CDR3 for alpha chain variable domain of TCR clone 308430 (TRAV25, TRAJ11)
GAGYSGYSTLTF

SEQ ID NO: 616860 - protein, 13 aa, Homo sapiens
  CDR3 for beta chain variable domain of TCR clone 308430 (TRBV7-9, TRBJ1-2)
CASSLKQNYGYTF

SEQ ID NO: 616861 - protein, 14 aa, Homo sapiens
  CDR3 for alpha chain variable domain of TCR clone 308431 (TRAV38-1, TRAJ45)
CAYYSGGGADGLTF

SEQ ID NO: 616862 - protein, 14 aa, Homo sapiens
  CDR3 for beta chain variable domain of TCR clone 308431 (TRBV25-1, TRBJ1-1)
CASTHLGENTEAFF

SEQ ID NO: 616863 - protein, 17 aa, Homo sapiens
  CDR3 for alpha chain variable domain of TCR clone 308432 (TRAV17, TRAJ23)
CATASPMIYNQGGKLIF

SEQ ID NO: 616864 - protein, 16 aa, Homo sapiens
  CDR3 for beta chain variable domain of TCR clone 308432 (TRBV12-4, TRBJ1-5)
CASSRPVGGSNQPQHF

SEQ ID NO: 616865 - protein, 13 aa, Homo sapiens
  CDR3 for alpha chain variable domain of TCR clone 308433 (TRAV13-1, TRAJ39)
CAAPFECRQHAHL

SEQ ID NO: 616866 - protein, 13 aa, Homo sapiens
  CDR3 for beta chain variable domain of TCR clone 308433 (TRBV7-2, TRBJ1-6)
CASSLKFDSPLHF

SEQ ID NO: 616867 - protein, 15 aa, Homo sapiens
  CDR3 for alpha chain variable domain of TCR clone 308434 (TRAV17, TRAJ45)
TSVLRTGGGADGLTF

SEQ ID NO: 616868 - protein, 15 aa, Homo sapiens
  CDR3 for beta chain variable domain of TCR clone 308434 (TRBV5-7, TRBJ1-5)
CASSYGKLWDQAQHF

SEQ ID NO: 616869 - protein, 12 aa, Homo sapiens
  CDR3 for alpha chain variable domain of TCR clone 308435 (TRAV16, TRAJ27)
CALNTNAGKSTF

SEQ ID NO: 616870 - protein, 16 aa, Homo sapiens
  CDR3 for beta chain variable domain of TCR clone 308435 (TRBV12-5, TRBJ2-5)
CASGPRTSGNQETQYF

SEQ ID NO: 616871 - protein, 12 aa, Homo sapiens
  CDR3 for alpha chain variable domain of TCR clone 308436 (TRAV12-3, TRAJ31)
CAMSVPNARLMF

SEQ ID NO: 616872 - protein, 12 aa, Homo sapiens
  CDR3 for beta chain variable domain of TCR clone 308436 (TRBV11-2, TRBJ2-1)
CASSVQRERQFF

SEQ ID NO: 616873 - protein, 13 aa, Homo sapiens
  CDR3 for alpha chain variable domain of TCR clone 308437 (TRAV1-1, TRAJ9)
CAAKNTGGFKNIF

SEQ ID NO: 616874 - protein, 15 aa, Homo sapiens
  CDR3 for beta chain variable domain of TCR clone 308437 (TRBV3-1, TRBJ2-5)
CASSANLGGPETQYF

SEQ ID NO: 616875 - protein, 17 aa, Homo sapiens
  CDR3 for alpha chain variable domain of TCR clone 308438 (TRAV12-2, TRAJ22)
CAVNRIPFSVSARQLTF

SEQ ID NO: 616876 - protein, 14 aa, Homo sapiens
  CDR3 for beta chain variable domain of TCR clone 308438 (TRBV25-1, TRBJ1-1)
CASTHLGGNTEAFF

SEQ ID NO: 616877 - protein, 13 aa, Homo sapiens
  CDR3 for alpha chain variable domain of TCR clone 308439 (TRAV17, TRAJ57)
CAIYKGGSEKLVF

SEQ ID NO: 616878 - protein, 16 aa, Homo sapiens
  CDR3 for beta chain variable domain of TCR clone 308439 (TRBV4-3, TRBJ2-1)
CASSQERLAGFNEQFF

SEQ ID NO: 616879 - protein, 13 aa, Homo sapiens
  CDR3 for alpha chain variable domain of TCR clone 308440 (TRAV8-3, TRAJ44)
CAVVPGTASKLTF

SEQ ID NO: 616880 - protein, 14 aa, Homo sapiens
  CDR3 for beta chain variable domain of TCR clone 308440 (TRBV11-2, TRBJ2-3)
CASSRLARADTQHF

SEQ ID NO: 616881 - protein, 11 aa, Homo sapiens
  CDR3 for alpha chain variable domain of TCR clone 308441 (TRAV21, TRAJ34)
CAHYNTDKLIF

SEQ ID NO: 616882 - protein, 14 aa, Homo sapiens
  CDR3 for beta chain variable domain of TCR clone 308441 (TRBV20-1, TRBJ2-2)
CSALYRGGTGELFF

SEQ ID NO: 616883 - protein, 15 aa, Homo sapiens
  CDR3 for alpha chain variable domain of TCR clone 308442 (TRAV12-1, TRAJ34)
CVVPPGGGNTDKLIF

SEQ ID NO: 616884 - protein, 17 aa, Homo sapiens
  CDR3 for beta chain variable domain of TCR clone 308442 (TRBV11-2, TRBJ2-1)
CASSLYPPGVEYNEQFF

SEQ ID NO: 616885 - protein, 14 aa, Homo sapiens
  CDR3 for alpha chain variable domain of TCR clone 308443 (TRAV12-2, TRAJ45)
CAVNIGGGADGLTV

SEQ ID NO: 616886 - protein, 17 aa, Homo sapiens
  CDR3 for beta chain variable domain of TCR clone 308443 (TRBV20-1, TRBJ2-2)
CSASGSGQGGLTGELFF

SEQ ID NO: 616887 - protein, 13 aa, Homo sapiens
  CDR3 for alpha chain variable domain of TCR clone 308444 (TRAV1-2, TRAJ9)
CAALNTGGFKTIF

SEQ ID NO: 616888 - protein, 13 aa, Homo sapiens
  CDR3 for beta chain variable domain of TCR clone 308444 (TRBV6-1, TRBJ2-1)
CASREDGGHEQFF

SEQ ID NO: 616889 - protein, 12 aa, Homo sapiens
  CDR3 for alpha chain variable domain of TCR clone 308445 (TRAV13-2, TRAJ49)
CAEISTGNQFYF

SEQ ID NO: 616890 - protein, 13 aa, Homo sapiens
  CDR3 for beta chain variable domain of TCR clone 308445 (TRBV18, TRBJ1-2)
CASSPTGRDGYTF

SEQ ID NO: 616891 - protein, 13 aa, Homo sapiens
  CDR3 for alpha chain variable domain of TCR clone 308446 (TRAV27, TRAJ45)
CRSSGGGADGLTF

SEQ ID NO: 616892 - protein, 17 aa, Homo sapiens
  CDR3 for beta chain variable domain of TCR clone 308446 (TRBV27, TRBJ2-6)
CASSLTGFASGANVLTF

SEQ ID NO: 616893 - protein, 11 aa, Homo sapiens
  CDR3 for alpha chain variable domain of TCR clone 308447 (TRAV12-3, TRAJ43)
CAMSVSNDMLF

SEQ ID NO: 616894 - protein, 11 aa, Homo sapiens
  CDR3 for beta chain variable domain of TCR clone 308447 (TRBV29-1, TRBJ2-5)
CSEDRTGTQYF

SEQ ID NO: 616895 - protein, 15 aa, Homo sapiens
  CDR3 for alpha chain variable domain of TCR clone 308448 (TRAV3, TRAJ4)
CAVRDGTGGYNKLIF

SEQ ID NO: 616896 - protein, 12 aa, Homo sapiens
  CDR3 for beta chain variable domain of TCR clone 308448 (TRBV9, TRBJ2-2)
CASSLVTGELFF

SEQ ID NO: 616897 - protein, 15 aa, Homo sapiens
  CDR3 for alpha chain variable domain of TCR clone 308449 (TRAV23/DV6, TRAJ18)
CAARYRGSTLGRLYF

SEQ ID NO: 616898 - protein, 13 aa, Homo sapiens
  CDR3 for beta chain variable domain of TCR clone 308449 (TRBV15, TRBJ1-6)
CATSGGLNSPLHF

SEQ ID NO: 616899 - protein, 14 aa, Homo sapiens
  CDR3 for alpha chain variable domain of TCR clone 308450 (TRAV8-3, TRAJ13)
CAVGAQEGYQKVTF

SEQ ID NO: 616900 - protein, 14 aa, Homo sapiens
  CDR3 for beta chain variable domain of TCR clone 308450 (TRBV6-1, TRBJ1-3)
CASVQGGGGNTIYF

SEQ ID NO: 616901 - protein, 11 aa, Homo sapiens
  CDR3 for alpha chain variable domain of TCR clone 308451 (TRAV13-1, TRAJ6)
CATLGSYIPTF

SEQ ID NO: 616902 - protein, 12 aa, Homo sapiens
  CDR3 for beta chain variable domain of TCR clone 308451 (TRBV11-2, TRBJ2-1)
CANSPGNNEQFF

SEQ ID NO: 616903 - protein, 12 aa, Homo sapiens
  CDR3 for alpha chain variable domain of TCR clone 308452 (TRAV27, TRAJ36)
CAGTTGANNLFF

SEQ ID NO: 616904 - protein, 14 aa, Homo sapiens
  CDR3 for beta chain variable domain of TCR clone 308452 (TRBV12-4, TRBJ2-3)
CASSLVPSTDTQYF

SEQ ID NO: 616905 - protein, 13 aa, Homo sapiens
  CDR3 for alpha chain variable domain of TCR clone 308453 (TRAV16, TRAJ48)
CSPLNFGNEKLTC

SEQ ID NO: 616906 - protein, 11 aa, Homo sapiens
  CDR3 for beta chain variable domain of TCR clone 308453 (TRBV7-9, TRBJ2-3)
CASSPTDTQYF

SEQ ID NO: 616907 - protein, 13 aa, Homo sapiens
  CDR3 for alpha chain variable domain of TCR clone 308454 (TRAV21, TRAJ37)
CAVSSGNTGKLTF

SEQ ID NO: 616908 - protein, 15 aa, Homo sapiens
  CDR3 for beta chain variable domain of TCR clone 308454 (TRBV12-4, TRBJ1-2)
CASSFVDRGNYGYTF

SEQ ID NO: 616909 - protein, 11 aa, Homo sapiens
  CDR3 for alpha chain variable domain of TCR clone 308455 (TRAV12-1, TRAJ43)
CVEYDNNDMRF

SEQ ID NO: 616910 - protein, 15 aa, Homo sapiens
  CDR3 for beta chain variable domain of TCR clone 308455 (TRBV5-1, TRBJ2-7)
CASSLNGGPAREQYF

SEQ ID NO: 616911 - protein, 14 aa, Homo sapiens
  CDR3 for alpha chain variable domain of TCR clone 308456 (TRAV1-2, TRAJ16)
CAVNRFSDGQKLLF

SEQ ID NO: 616912 - protein, 19 aa, Homo sapiens
  CDR3 for beta chain variable domain of TCR clone 308456 (TRBV25-1, TRBJ2-2)
CAILVYRVDRGRKTGELLF

SEQ ID NO: 616913 - protein, 15 aa, Homo sapiens
  CDR3 for alpha chain variable domain of TCR clone 308457 (TRAV27, TRAJ38)
CAARRNAGNNRKLSR

SEQ ID NO: 616914 - protein, 13 aa, Homo sapiens
  CDR3 for beta chain variable domain of TCR clone 308457 (TRBV12-5, TRBJ2-3)
CASGDRQSDTQYF

SEQ ID NO: 616915 - protein, 13 aa, Homo sapiens
  CDR3 for alpha chain variable domain of TCR clone 308458 (TRAV8-3, TRAJ48)
CAVVPFGNDKLTF

SEQ ID NO: 616916 - protein, 12 aa, Homo sapiens
  CDR3 for beta chain variable domain of TCR clone 308458 (TRBV11-2, TRBJ2-2)
CASSLGGGELFF

SEQ ID NO: 616917 - protein, 13 aa, Homo sapiens
  CDR3 for alpha chain variable domain of TCR clone 308459 (TRAV8-3, TRAJ48)
CAVVPFGNEKLTF

SEQ ID NO: 616918 - protein, 17 aa, Homo sapiens
  CDR3 for beta chain variable domain of TCR clone 308459 (TRBV4-2, TRBJ1-1)
CASTQFGGGSGNTEAFF

SEQ ID NO: 616919 - protein, 14 aa, Homo sapiens
  CDR3 for alpha chain variable domain of TCR clone 308460 (TRAV1-2, TRAJ16)
CSVNRFSDGQKLLF

SEQ ID NO: 616920 - protein, 16 aa, Homo sapiens
  CDR3 for beta chain variable domain of TCR clone 308460 (TRBV12-4, TRBJ2-5)
CASSFFVRGRQETQYF

SEQ ID NO: 616921 - protein, 14 aa, Homo sapiens
  CDR3 for alpha chain variable domain of TCR clone 308461 (TRAV12-1, TRAJ30)
CVVNIGGRDDKSIF

SEQ ID NO: 616922 - protein, 14 aa, Homo sapiens
  CDR3 for beta chain variable domain of TCR clone 308461 (TRBV12-5, TRBJ2-5)
CASGSRTHQETQYF

SEQ ID NO: 616923 - protein, 12 aa, Homo sapiens
  CDR3 for alpha chain variable domain of TCR clone 308462 (TRAV21, TRAJ11)
CAATSGYSTLTF

SEQ ID NO: 616924 - protein, 14 aa, Homo sapiens
  CDR3 for beta chain variable domain of TCR clone 308462 (TRBV7-2, TRBJ2-7)
CASSLPPGQGPQYF

SEQ ID NO: 616925 - protein, 14 aa, Homo sapiens
  CDR3 for alpha chain variable domain of TCR clone 308463 (TRAV1-2, TRAJ16)
CAVNRFSDGQKLLF

SEQ ID NO: 616926 - protein, 12 aa, Homo sapiens
  CDR3 for beta chain variable domain of TCR clone 308463 (TRBV28, TRBJ2-5)
CASSGQTETQYF

SEQ ID NO: 616927 - protein, 13 aa, Homo sapiens
  CDR3 for alpha chain variable domain of TCR clone 308464 (TRAV3, TRAJ20)
CAVRDWAAGKLSF

SEQ ID NO: 616928 - protein, 16 aa, Homo sapiens
  CDR3 for beta chain variable domain of TCR clone 308464 (TRBV20-1, TRBJ1-4)
CSAPGQGLLTNEKLFF

SEQ ID NO: 616929 - protein, 16 aa, Homo sapiens
  CDR3 for alpha chain variable domain of TCR clone 308465 (TRAV30, TRAJ26)
CGTESVGDNYGQNFVL

SEQ ID NO: 616930 - protein, 13 aa, Homo sapiens
  CDR3 for beta chain variable domain of TCR clone 308465 (TRBV19, TRBJ1-2)
CASSISEDYGYTF

SEQ ID NO: 616931 - protein, 13 aa, Homo sapiens
  CDR3 for alpha chain variable domain of TCR clone 308466 (TRAV3, TRAJ20)
CAVRDTGDYKLSF

SEQ ID NO: 616932 - protein, 12 aa, Homo sapiens
  CDR3 for beta chain variable domain of TCR clone 308466 (TRBV29-1, TRBJ2-3)
WSVTGGADTQYF

SEQ ID NO: 616933 - protein, 12 aa, Homo sapiens
  CDR3 for alpha chain variable domain of TCR clone 308467 (TRAV27, TRAJ9)
CAGESGGFKTTF

SEQ ID NO: 616934 - protein, 15 aa, Homo sapiens
  CDR3 for beta chain variable domain of TCR clone 308467 (TRBV20-1, TRBJ2-1)
CSARGIGGTYNEQFF

SEQ ID NO: 616935 - protein, 12 aa, Homo sapiens
  CDR3 for alpha chain variable domain of TCR clone 308468 (TRAV35, TRAJ39)
LAPNNAGNLLTF

SEQ ID NO: 616936 - protein, 16 aa, Homo sapiens
  CDR3 for beta chain variable domain of TCR clone 308468 (TRBV2, TRBJ2-3)
CASSTSVERVTDTHYF

SEQ ID NO: 616937 - protein, 16 aa, Homo sapiens
  CDR3 for alpha chain variable domain of TCR clone 308469 (TRAV1-2, TRAJ18)
CAVRVERGSTLGRRYF

SEQ ID NO: 616938 - protein, 16 aa, Homo sapiens
  CDR3 for beta chain variable domain of TCR clone 308469 (TRBV20-1, TRBJ2-7)
CSASTSGRLSSYEQYF

SEQ ID NO: 616939 - protein, 15 aa, Homo sapiens
  CDR3 for alpha chain variable domain of TCR clone 308470 (TRAV35, TRAJ42)
CAGQLRGGNQGNLIF

SEQ ID NO: 616940 - protein, 12 aa, Homo sapiens
  CDR3 for beta chain variable domain of TCR clone 308470 (TRBV4-3, TRBJ2-1)
CASSLSGYEQFF

SEQ ID NO: 616941 - protein, 13 aa, Homo sapiens
  CDR3 for alpha chain variable domain of TCR clone 308471 (TRAV12-3, TRAJ13)
CAMSSVGYQKVTF

SEQ ID NO: 616942 - protein, 14 aa, Homo sapiens
  CDR3 for beta chain variable domain of TCR clone 308471 (TRBV2, TRBJ2-1)
CASRTGSSYNEQFF

SEQ ID NO: 616943 - protein, 13 aa, Homo sapiens
  CDR3 for alpha chain variable domain of TCR clone 308472 (TRAV2, TRAJ29)
CAAGNLGNTPLVF

SEQ ID NO: 616944 - protein, 16 aa, Homo sapiens
  CDR3 for beta chain variable domain of TCR clone 308472 (TRBV7-9, TRBJ1-2)
CASSPGGGAINYGYTF

SEQ ID NO: 616945 - protein, 23 aa, Homo sapiens
  CDR3 for alpha chain variable domain of TCR clone 308473 (TRAV8-6, TRAJ38)
CAVRNAGNNHIQNPDPAVSPLRD

SEQ ID NO: 616946 - protein, 15 aa, Homo sapiens
  CDR3 for beta chain variable domain of TCR clone 308473 (TRBV4-1, TRBJ2-2)
CASSEGQGITGELFF

SEQ ID NO: 616947 - protein, 14 aa, Homo sapiens
  CDR3 for alpha chain variable domain of TCR clone 308474 (TRAV1-2, TRAJ8)
CAVREDTGFQKLVL

SEQ ID NO: 616948 - protein, 14 aa, Homo sapiens
  CDR3 for beta chain variable domain of TCR clone 308474 (TRBV7-2, TRBJ2-7)
CASSPKTSFYEHYF

SEQ ID NO: 616949 - protein, 14 aa, Homo sapiens
  CDR3 for alpha chain variable domain of TCR clone 308475 (TRAV23/DV6, TRAJ40)
CAARKNSGTYKYII

SEQ ID NO: 616950 - protein, 14 aa, Homo sapiens
  CDR3 for beta chain variable domain of TCR clone 308475 (TRBV10-3, TRBJ2-5)
CAISERDYQETQYF

SEQ ID NO: 616951 - protein, 14 aa, Homo sapiens
  CDR3 for alpha chain variable domain of TCR clone 308476 (TRAV12-3, TRAJ10)
SYLPLTGGGNKLTF

SEQ ID NO: 616952 - protein, 16 aa, Homo sapiens
  CDR3 for beta chain variable domain of TCR clone 308476 (TRBV19, TRBJ2-1)
CASSKAGPSSYNEQFF

SEQ ID NO: 616953 - protein, 21 aa, Homo sapiens
  CDR3 for alpha chain variable domain of TCR clone 308477 (TRAV8-3, TRAJ6)
CAVGGEEATHLHVEEEPALLF

SEQ ID NO: 616954 - protein, 17 aa, Homo sapiens
  CDR3 for beta chain variable domain of TCR clone 308477 (TRBV7-2, TRBJ2-3)
CASSLAGGLTGTAGQYF

SEQ ID NO: 616955 - protein, 14 aa, Homo sapiens
  CDR3 for alpha chain variable domain of TCR clone 308478 (TRAV2, TRAJ9)
CAVEDRSGGFKTIF

SEQ ID NO: 616956 - protein, 18 aa, Homo sapiens
  CDR3 for beta chain variable domain of TCR clone 308478 (TRBV20-1, TRBJ2-6)
CSAETTPTHGSGANVLTF

SEQ ID NO: 616957 - protein, 11 aa, Homo sapiens
  CDR3 for alpha chain variable domain of TCR clone 308479 (TRAV2, TRAJ20)
CTVSDDYKLSF

SEQ ID NO: 616958 - protein, 20 aa, Homo sapiens
  CDR3 for beta chain variable domain of TCR clone 308479 (TRBV19, TRBJ2-1)
CASSISRTVTSTRLNNEQFF

SEQ ID NO: 616959 - protein, 13 aa, Homo sapiens
  CDR3 for alpha chain variable domain of TCR clone 308480 (TRAV13-2, TRAJ13)
CADLSGGYQKVTF

SEQ ID NO: 616960 - protein, 15 aa, Homo sapiens
  CDR3 for beta chain variable domain of TCR clone 308480 (TRBV19, TRBJ1-1)
CARSIGGGRNTEAFF

SEQ ID NO: 616961 - protein, 14 aa, Homo sapiens
  CDR3 for alpha chain variable domain of TCR clone 308481 (TRAV12-3, TRAJ10)
SHLPLTGGGNKLTF

SEQ ID NO: 616962 - protein, 13 aa, Homo sapiens
  CDR3 for beta chain variable domain of TCR clone 308481 (TRBV20-1, TRBJ2-5)
CSAATELQKTQYF

SEQ ID NO: 616963 - protein, 16 aa, Homo sapiens
  CDR3 for alpha chain variable domain of TCR clone 308482 (TRAV12-3, TRAJ53)
CAMSPGSGGSNYKLTF

SEQ ID NO: 616964 - protein, 14 aa, Homo sapiens
  CDR3 for beta chain variable domain of TCR clone 308482 (TRBV27, TRBJ1-2)
CASSLSYTDYGYTF

SEQ ID NO: 616965 - protein, 11 aa, Homo sapiens
  CDR3 for alpha chain variable domain of TCR clone 308483 (TRAV2, TRAJ33)
CAVESNYQLIW

SEQ ID NO: 616966 - protein, 15 aa, Homo sapiens
  CDR3 for beta chain variable domain of TCR clone 308483 (TRBV6-1, TRBJ2-5)
CASPRWGTEGQTQYF

SEQ ID NO: 616967 - protein, 12 aa, Homo sapiens
  CDR3 for alpha chain variable domain of TCR clone 308484 (TRAV29/DV5, TRAJ34)
CASRHNTDKLIF

SEQ ID NO: 616968 - protein, 17 aa, Homo sapiens
  CDR3 for beta chain variable domain of TCR clone 308484 (TRBV4-1, TRBJ2-3)
CASSQGYVSGGTDTQYF

SEQ ID NO: 616969 - protein, 11 aa, Homo sapiens
  CDR3 for alpha chain variable domain of TCR clone 308485 (TRAV12-1, TRAJ21)
CVVNNFNKFYF

SEQ ID NO: 616970 - protein, 12 aa, Homo sapiens
  CDR3 for beta chain variable domain of TCR clone 308485 (TRBV5-1, TRBJ2-7)
CASSFRGYEQYF

SEQ ID NO: 616971 - protein, 17 aa, Homo sapiens
  CDR3 for alpha chain variable domain of TCR clone 308486 (TRAV3, TRAJ42)
CAVRERDYGGSQGNLIF

SEQ ID NO: 616972 - protein, 14 aa, Homo sapiens
  CDR3 for beta chain variable domain of TCR clone 308486 (TRBV7-2, TRBJ2-5)
CASSPRGSSETQYF

SEQ ID NO: 616973 - protein, 13 aa, Homo sapiens
  CDR3 for alpha chain variable domain of TCR clone 308487 (TRAV35, TRAJ44)
CAGLSGTASKLTF

SEQ ID NO: 616974 - protein, 14 aa, Homo sapiens
  CDR3 for beta chain variable domain of TCR clone 308487 (TRBV12-5, TRBJ2-5)
CASGSRTHQETQYF

SEQ ID NO: 616975 - protein, 14 aa, Homo sapiens
  CDR3 for alpha chain variable domain of TCR clone 308488 (TRAV3, TRAJ7)
CAVREEEREQQTRF

SEQ ID NO: 616976 - protein, 12 aa, Homo sapiens
  CDR3 for beta chain variable domain of TCR clone 308488 (TRBV7-8, TRBJ2-7)
CASSLGDRDQYF

SEQ ID NO: 616977 - protein, 15 aa, Homo sapiens
  CDR3 for alpha chain variable domain of TCR clone 308489 (TRAV2, TRAJ9)
CVVEDRGTGGFKTIF

SEQ ID NO: 616978 - protein, 16 aa, Homo sapiens
  CDR3 for beta chain variable domain of TCR clone 308489 (TRBV24-1, TRBJ2-3)
CATSDPGTGATDTQYF

SEQ ID NO: 616979 - protein, 11 aa, Homo sapiens
  CDR3 for alpha chain variable domain of TCR clone 308490 (TRAV3, TRAJ21)
CAVVNFNKFYF

SEQ ID NO: 616980 - protein, 17 aa, Homo sapiens
  CDR3 for beta chain variable domain of TCR clone 308490 (TRBV24-1, TRBJ2-1)
CATSDVSTSGTYNEQFF

SEQ ID NO: 616981 - protein, 16 aa, Homo sapiens
  CDR3 for alpha chain variable domain of TCR clone 308491 (TRAV3, TRAJ37)
CALRPHGSGNTGKLIF

SEQ ID NO: 616982 - protein, 17 aa, Homo sapiens
  CDR3 for beta chain variable domain of TCR clone 308491 (TRBV5-1, TRBJ2-5)
CASSPVALGQNQETQYF

SEQ ID NO: 616983 - protein, 14 aa, Homo sapiens
  CDR3 for alpha chain variable domain of TCR clone 308492 (TRAV29/DV5, TRAJ36)
CAARRKTGANNLLF

SEQ ID NO: 616984 - protein, 15 aa, Homo sapiens
  CDR3 for beta chain variable domain of TCR clone 308492 (TRBV27, TRBJ2-1)
CASSNGGGSSNEQFF

SEQ ID NO: 616985 - protein, 17 aa, Homo sapiens
  CDR3 for alpha chain variable domain of TCR clone 308493 (TRAV27, TRAJ26)
CAGARAPLDNYGQNFVF

SEQ ID NO: 616986 - protein, 15 aa, Homo sapiens
  CDR3 for beta chain variable domain of TCR clone 308493 (TRBV11-2, TRBJ2-5)
CASSLRSGGLETQYF

SEQ ID NO: 616987 - protein, 16 aa, Homo sapiens
  CDR3 for alpha chain variable domain of TCR clone 308494 (TRAV21, TRAJ37)
CAVRTAGSSTTGKLIF

SEQ ID NO: 616988 - protein, 13 aa, Homo sapiens
  CDR3 for beta chain variable domain of TCR clone 308494 (TRBV7-9, TRBJ2-5)
CASLPSGRETQSF

SEQ ID NO: 616989 - protein, 11 aa, Homo sapiens
  CDR3 for alpha chain variable domain of TCR clone 308495 (TRAV3, TRAJ21)
CAVGNFNKFYF

SEQ ID NO: 616990 - protein, 13 aa, Homo sapiens
  CDR3 for beta chain variable domain of TCR clone 308495 (TRBV7-9, TRBJ1-2)
CGSSLKQNYGYTF

SEQ ID NO: 616991 - protein, 16 aa, Homo sapiens
  CDR3 for alpha chain variable domain of TCR clone 308496 (TRAV3, TRAJ37)
CAMRGKGSGNTGKLIF

SEQ ID NO: 616992 - protein, 16 aa, Homo sapiens
  CDR3 for beta chain variable domain of TCR clone 308496 (TRBV12-4, TRBJ1-5)
CASSRPVGGSNQPQHF

SEQ ID NO: 616993 - protein, 14 aa, Homo sapiens
  CDR3 for alpha chain variable domain of TCR clone 308497 (TRAV12-3, TRAJ10)
SHLPLTGGGNKLTF

SEQ ID NO: 616994 - protein, 15 aa, Homo sapiens
  CDR3 for beta chain variable domain of TCR clone 308497 (TRBV6-6, TRBJ1-5)
CASSSIQGTNQHQHF

SEQ ID NO: 616995 - protein, 14 aa, Homo sapiens
  CDR3 for alpha chain variable domain of TCR clone 308498 (TRAV1-2, TRAJ16)
CAVNRFSDGWKLLF

SEQ ID NO: 616996 - protein, 13 aa, Homo sapiens
  CDR3 for beta chain variable domain of TCR clone 308498 (TRBV20-1, TRBJ2-1)
CSAHGSSYNEQFF

SEQ ID NO: 616997 - protein, 16 aa, Homo sapiens
  CDR3 for alpha chain variable domain of TCR clone 308499 (TRAV3, TRAJ37)
CAVRGKGSGNTGHLIF

SEQ ID NO: 616998 - protein, 15 aa, Homo sapiens
  CDR3 for beta chain variable domain of TCR clone 308499 (TRBV7-9, TRBJ1-6)
CASSSPGRGNSPLHF

SEQ ID NO: 616999 - protein, 14 aa, Homo sapiens
  CDR3 for alpha chain variable domain of TCR clone 308500 (TRAV39, TRAJ54)
CAVVLIQEAQKLVF

SEQ ID NO: 617000 - protein, 13 aa, Homo sapiens
  CDR3 for beta chain variable domain of TCR clone 308500 (TRBV12-5, TRBJ2-3)
CASGDRQSDTQYF

SEQ ID NO: 617001 - protein, 14 aa, Homo sapiens
  CDR3 for alpha chain variable domain of TCR clone 308501 (TRAV9-2, TRAJ39)
CALYIYNAGNMLTF

SEQ ID NO: 617002 - protein, 18 aa, Homo sapiens
  CDR3 for beta chain variable domain of TCR clone 308501 (TRBV7-9, TRBJ1-2)
CASSSIAGTSQANYGYTF

SEQ ID NO: 617003 - protein, 12 aa, Homo sapiens
  CDR3 for alpha chain variable domain of TCR clone 308502 (TRAV27, TRAJ13)
CAGVRGYQKVTF

SEQ ID NO: 617004 - protein, 16 aa, Homo sapiens
  CDR3 for beta chain variable domain of TCR clone 308502 (TRBV28, TRBJ2-1)
CASSSPYSGSLNEQFF

SEQ ID NO: 617005 - protein, 12 aa, Homo sapiens
  CDR3 for alpha chain variable domain of TCR clone 308503 (TRAV17, TRAJ4)
CATRGGYNKLIF

SEQ ID NO: 617006 - protein, 13 aa, Homo sapiens
  CDR3 for beta chain variable domain of TCR clone 308503 (TRBV2, TRBJ1-4)
CASSERAGEKLFF

SEQ ID NO: 617007 - protein, 15 aa, Homo sapiens
  CDR3 for alpha chain variable domain of TCR clone 308504 (TRAV3, TRAJ5)
CAVRDLDTGRRALTF

SEQ ID NO: 617008 - protein, 15 aa, Homo sapiens
  CDR3 for beta chain variable domain of TCR clone 308504 (TRBV12-4, TRBJ2-5)
CASSPPTGLQETQYF

SEQ ID NO: 617009 - protein, 14 aa, Homo sapiens
  CDR3 for alpha chain variable domain of TCR clone 308505 (TRAV1-2, TRAJ16)
CAVNRFSDGQKLLF

SEQ ID NO: 617010 - protein, 17 aa, Homo sapiens
  CDR3 for beta chain variable domain of TCR clone 308505 (TRBV13, TRBJ2-3)
CASSLSRVAVGRNTQYF

SEQ ID NO: 617011 - protein, 14 aa, Homo sapiens
  CDR3 for alpha chain variable domain of TCR clone 308506 (TRAV16, TRAJ33)
CALSAMDSNYQLIW

SEQ ID NO: 617012 - protein, 13 aa, Homo sapiens
  CDR3 for beta chain variable domain of TCR clone 308506 (TRBV15, TRBJ1-2)
CATSMTANYGYTF

SEQ ID NO: 617013 - protein, 12 aa, Homo sapiens
  CDR3 for alpha chain variable domain of TCR clone 308507 (TRAV2, TRAJ9)
CAVGAGGFKTIF

SEQ ID NO: 617014 - protein, 16 aa, Homo sapiens
  CDR3 for beta chain variable domain of TCR clone 308507 (TRBV4-3, TRBJ2-1)
CASSPALDRGVNEQFF

SEQ ID NO: 617015 - protein, 14 aa, Homo sapiens
  CDR3 for alpha chain variable domain of TCR clone 308508 (TRAV12-3, TRAJ10)
SHLPLTGGGSKLTF

SEQ ID NO: 617016 - protein, 13 aa, Homo sapiens
  CDR3 for beta chain variable domain of TCR clone 308508 (TRBV9, TRBJ2-1)
CASSPSGGNEQFS

SEQ ID NO: 617017 - protein, 13 aa, Homo sapiens
  CDR3 for alpha chain variable domain of TCR clone 308509 (TRAV1-2, TRAJ42)
CAGFPGSQGNLIF

SEQ ID NO: 617018 - protein, 14 aa, Homo sapiens
  CDR3 for beta chain variable domain of TCR clone 308509 (TRBV19, TRBJ2-1)
CASPTFVLSGEQFF

SEQ ID NO: 617019 - protein, 14 aa, Homo sapiens
  CDR3 for alpha chain variable domain of TCR clone 308510 (TRAV12-2, TRAJ5)
CAVNRSTGRRALTF

SEQ ID NO: 617020 - protein, 15 aa, Homo sapiens
  CDR3 for beta chain variable domain of TCR clone 308510 (TRBV5-5, TRBJ1-5)
CASSSTPGSNQPQHF

SEQ ID NO: 617021 - protein, 16 aa, Homo sapiens
  CDR3 for alpha chain variable domain of TCR clone 308511 (TRAV26-1, TRAJ45)
CIVEKYSGGGADGLTF

SEQ ID NO: 617022 - protein, 17 aa, Homo sapiens
  CDR3 for beta chain variable domain of TCR clone 308511 (TRBV20-1, TRBJ2-3)
CSARGTGGPTGTDTQYF

SEQ ID NO: 617023 - protein, 14 aa, Homo sapiens
  CDR3 for alpha chain variable domain of TCR clone 308512 (TRAV1-1, TRAJ12)
FAVRDQDSSYKLIF

SEQ ID NO: 617024 - protein, 15 aa, Homo sapiens
  CDR3 for beta chain variable domain of TCR clone 308512 (TRBV5-1, TRBJ2-5)
CASSRTGTSGETQYF

SEQ ID NO: 617025 - protein, 16 aa, Homo sapiens
  CDR3 for alpha chain variable domain of TCR clone 308513 (TRAV1-2, TRAJ10)
CAVRGVLTGGGNKHTF

SEQ ID NO: 617026 - protein, 17 aa, Homo sapiens
  CDR3 for beta chain variable domain of TCR clone 308513 (TRBV15, TRBJ1-5)
CATSRAPPGTRNQPQHF

SEQ ID NO: 617027 - protein, 15 aa, Homo sapiens
  CDR3 for alpha chain variable domain of TCR clone 308514 (TRAV12-1, TRAJ44)
CVADLPTGTDSKLTF

SEQ ID NO: 617028 - protein, 13 aa, Homo sapiens
  CDR3 for beta chain variable domain of TCR clone 308514 (TRBV20-1, TRBJ2-5)
CSARGDYQETQYF

SEQ ID NO: 617029 - protein, 13 aa, Homo sapiens
  CDR3 for alpha chain variable domain of TCR clone 308515 (TRAV29/DV5, TRAJ31)
CAASRNNNARPMF

SEQ ID NO: 617030 - protein, 14 aa, Homo sapiens
  CDR3 for beta chain variable domain of TCR clone 308515 (TRBV7-2, TRBJ2-5)
CASSPRGSSETQYF

SEQ ID NO: 617031 - protein, 11 aa, Homo sapiens
  CDR3 for alpha chain variable domain of TCR clone 308516 (TRAV12-2, TRAJ31)
CAILYNARLMF

SEQ ID NO: 617032 - protein, 13 aa, Homo sapiens
  CDR3 for beta chain variable domain of TCR clone 308516 (TRBV20-1, TRBJ1-1)
CSARLGQGTEAFF

SEQ ID NO: 617033 - protein, 18 aa, Homo sapiens
  CDR3 for alpha chain variable domain of TCR clone 308517 (TRAV3, TRAJ17)
CAVRARRGGRSCRQQANF

SEQ ID NO: 617034 - protein, 13 aa, Homo sapiens
  CDR3 for beta chain variable domain of TCR clone 308517 (TRBV7-6, TRBJ1-2)
CASSLVADYGYTF

SEQ ID NO: 617035 - protein, 15 aa, Homo sapiens
  CDR3 for alpha chain variable domain of TCR clone 308518 (TRAV21, TRAJ24)
CAARSSTDSWGKLQF

SEQ ID NO: 617036 - protein, 15 aa, Homo sapiens
  CDR3 for beta chain variable domain of TCR clone 308518 (TRBV4-1, TRBJ1-4)
CASSDTGGTNEKLFF

SEQ ID NO: 617037 - protein, 14 aa, Homo sapiens
  CDR3 for alpha chain variable domain of TCR clone 308519 (TRAV1-2, TRAJ16)
CAVNQFSDGQKLLF

SEQ ID NO: 617038 - protein, 16 aa, Homo sapiens
  CDR3 for beta chain variable domain of TCR clone 308519 (TRBV19, TRBJ2-1)
CASSEILAGDGNEQFF

SEQ ID NO: 617039 - protein, 14 aa, Homo sapiens
  CDR3 for alpha chain variable domain of TCR clone 308520 (TRAV35, TRAJ50)
CAGPRKTSYDKVIF

SEQ ID NO: 617040 - protein, 17 aa, Homo sapiens
  CDR3 for beta chain variable domain of TCR clone 308520 (TRBV7-8, TRBJ2-6)
CASSAGTGGAGANVLTF

SEQ ID NO: 617041 - protein, 12 aa, Homo sapiens
  CDR3 for alpha chain variable domain of TCR clone 308521 (TRAV12-3, TRAJ40)
CAMSSGTYKYIF

SEQ ID NO: 617042 - protein, 15 aa, Homo sapiens
  CDR3 for beta chain variable domain of TCR clone 308521 (TRBV5-5, TRBJ1-5)
CASSSTPGSNQPQHF

SEQ ID NO: 617043 - protein, 13 aa, Homo sapiens
  CDR3 for alpha chain variable domain of TCR clone 308522 (TRAV36/DV7, TRAJ29)
CAGEPSGNTPLVF

SEQ ID NO: 617044 - protein, 11 aa, Homo sapiens
  CDR3 for beta chain variable domain of TCR clone 308522 (TRBV19, TRBJ2-7)
CASGNSYEQYF

SEQ ID NO: 617045 - protein, 12 aa, Homo sapiens
  CDR3 for alpha chain variable domain of TCR clone 308523 (TRAV12-3, TRAJ17)
CAMTLTGNKLTF

SEQ ID NO: 617046 - protein, 22 aa, Homo sapiens
  CDR3 for beta chain variable domain of TCR clone 308523 (TRBV19, TRBJ2-1)
CASSVRDRVTGTSGRIYNEQFF

SEQ ID NO: 617047 - protein, 12 aa, Homo sapiens
  CDR3 for alpha chain variable domain of TCR clone 308524 (TRAV13-1, TRAJ45)
CAATRGADGLTF

SEQ ID NO: 617048 - protein, 16 aa, Homo sapiens
  CDR3 for beta chain variable domain of TCR clone 308524 (TRBV19, TRBJ2-1)
CASSKAGPSSYNEQFF

SEQ ID NO: 617049 - protein, 13 aa, Homo sapiens
  CDR3 for alpha chain variable domain of TCR clone 308525 (TRAV6, TRAJ48)
CALRNFGNEKLTF

SEQ ID NO: 617050 - protein, 14 aa, Homo sapiens
  CDR3 for beta chain variable domain of TCR clone 308525 (TRBV2, TRBJ2-3)
CASNRGTSTDTQYF

SEQ ID NO: 617051 - protein, 13 aa, Homo sapiens
  CDR3 for alpha chain variable domain of TCR clone 308526 (TRAV38-2/DV8, TRAJ34)
CAYRTWNTDKLIF

SEQ ID NO: 617052 - protein, 16 aa, Homo sapiens
  CDR3 for beta chain variable domain of TCR clone 308526 (TRBV19, TRBJ2-1)
CANSKAGPSSYNEQFF

SEQ ID NO: 617053 - protein, 19 aa, Homo sapiens
  CDR3 for alpha chain variable domain of TCR clone 308527 (TRAV26-1, TRAJ28)
CIVRVAHAYSGAGSYQLTF

SEQ ID NO: 617054 - protein, 17 aa, Homo sapiens
  CDR3 for beta chain variable domain of TCR clone 308527 (TRBV11-2, TRBJ2-6)
CASSQRDIFSGANVLTF

SEQ ID NO: 617055 - protein, 14 aa, Homo sapiens
  CDR3 for alpha chain variable domain of TCR clone 308528 (TRAV14/DV4, TRAJ15)
CAMRRDQAGTALIF

SEQ ID NO: 617056 - protein, 12 aa, Homo sapiens
  CDR3 for beta chain variable domain of TCR clone 308528 (TRBV19, TRBJ2-1)
CASSRQGAEQFF

SEQ ID NO: 617057 - protein, 14 aa, Homo sapiens
  CDR3 for alpha chain variable domain of TCR clone 308529 (TRAV38-2/DV8, TRAJ47)
CAYRTLEYGNKLVF

SEQ ID NO: 617058 - protein, 16 aa, Homo sapiens
  CDR3 for beta chain variable domain of TCR clone 308529 (TRBV15, TRBJ2-7)
FATSRDGGIPSYEQYF

SEQ ID NO: 617059 - protein, 13 aa, Homo sapiens
  CDR3 for alpha chain variable domain of TCR clone 308530 (TRAV13-1, TRAJ21)
CAASIYNFIKFYF

SEQ ID NO: 617060 - protein, 13 aa, Homo sapiens
  CDR3 for beta chain variable domain of TCR clone 308530 (TRBV27, TRBJ1-4)
CASSLMGDEKLFF

SEQ ID NO: 617061 - protein, 18 aa, Homo sapiens
  CDR3 for alpha chain variable domain of TCR clone 308531 (TRAV27, TRAJ52)
CAVRPSPAGGTSYGKLTF

SEQ ID NO: 617062 - protein, 15 aa, Homo sapiens
  CDR3 for beta chain variable domain of TCR clone 308531 (TRBV19, TRBJ2-7)
CASSPAGASSYEQYF

SEQ ID NO: 617063 - protein, 14 aa, Homo sapiens
  CDR3 for alpha chain variable domain of TCR clone 308532 (TRAV26-1, TRAJ38)
CIADNAGNNRNLIW

SEQ ID NO: 617064 - protein, 14 aa, Homo sapiens
  CDR3 for beta chain variable domain of TCR clone 308532 (TRBV4-1, TRBJ2-2)
CASSQAVNTGELFF

SEQ ID NO: 617065 - protein, 13 aa, Homo sapiens
  CDR3 for alpha chain variable domain of TCR clone 308533 (TRAV21, TRAJ15)
CAVANQAGTALIF

SEQ ID NO: 617066 - protein, 16 aa, Homo sapiens
  CDR3 for beta chain variable domain of TCR clone 308533 (TRBV27, TRBJ2-2)
CASSLSGFWVTGELFF

SEQ ID NO: 617067 - protein, 11 aa, Homo sapiens
  CDR3 for alpha chain variable domain of TCR clone 308534 (TRAV3, TRAJ21)
CAVGNFNKFYF

SEQ ID NO: 617068 - protein, 13 aa, Homo sapiens
  CDR3 for beta chain variable domain of TCR clone 308534 (TRBV15, TRBJ1-6)
RATSGGLNSPLHF

SEQ ID NO: 617069 - protein, 15 aa, Homo sapiens
  CDR3 for alpha chain variable domain of TCR clone 308535 (TRAV26-1, TRAJ40)
CIVRAVPSGTYKYIF

SEQ ID NO: 617070 - protein, 15 aa, Homo sapiens
  CDR3 for beta chain variable domain of TCR clone 308535 (TRBV20-1, TRBJ2-7)
CSARDRVSGMDERYF

SEQ ID NO: 617071 - protein, 13 aa, Homo sapiens
  CDR3 for alpha chain variable domain of TCR clone 308536 (TRAV12-1, TRAJ40)
CVVPTSGTYKYIF

SEQ ID NO: 617072 - protein, 15 aa, Homo sapiens
  CDR3 for beta chain variable domain of TCR clone 308536 (TRBV7-9, TRBJ2-2)
CASGPLDTFPGELFF

SEQ ID NO: 617073 - protein, 14 aa, Homo sapiens
  CDR3 for alpha chain variable domain of TCR clone 308537 (TRAV13-1, TRAJ9)
FAASALTGGFITIF

SEQ ID NO: 617074 - protein, 13 aa, Homo sapiens
  CDR3 for beta chain variable domain of TCR clone 308537 (TRBV20-1, TRBJ1-1)
CSAGTVGNTEAFF

SEQ ID NO: 617075 - protein, 14 aa, Homo sapiens
  CDR3 for alpha chain variable domain of TCR clone 308538 (TRAV29/DV5, TRAJ36)
CAARRKTGANNLFF

SEQ ID NO: 617076 - protein, 13 aa, Homo sapiens
  CDR3 for beta chain variable domain of TCR clone 308538 (TRBV20-1, TRBJ2-5)
CSARYTGEENQYF

SEQ ID NO: 617077 - protein, 13 aa, Homo sapiens
  CDR3 for alpha chain variable domain of TCR clone 308539 (TRAV1-1, TRAJ15)
CAVVDQAGTALIF

SEQ ID NO: 617078 - protein, 14 aa, Homo sapiens
  CDR3 for beta chain variable domain of TCR clone 308539 (TRBV5-4, TRBJ1-6)
CASSLWTDNSPLHF

SEQ ID NO: 617079 - protein, 13 aa, Homo sapiens
  CDR3 for alpha chain variable domain of TCR clone 308540 (TRAV17, TRAJ11)
CATRNSGYSTLTF

SEQ ID NO: 617080 - protein, 14 aa, Homo sapiens
  CDR3 for beta chain variable domain of TCR clone 308540 (TRBV25-1, TRBJ1-1)
CASTPLGGNTEAFF

SEQ ID NO: 617081 - protein, 12 aa, Homo sapiens
  CDR3 for alpha chain variable domain of TCR clone 308541 (TRAV30, TRAJ43)
CGTEERGNDMRF

SEQ ID NO: 617082 - protein, 13 aa, Homo sapiens
  CDR3 for beta chain variable domain of TCR clone 308541 (TRBV27, TRBJ2-7)
CASSFSQGFEQYF

SEQ ID NO: 617083 - protein, 16 aa, Homo sapiens
  CDR3 for alpha chain variable domain of TCR clone 308542 (TRAV30, TRAJ24)
CSTGIVDADSWGKFQF

SEQ ID NO: 617084 - protein, 14 aa, Homo sapiens
  CDR3 for beta chain variable domain of TCR clone 308542 (TRBV12-5, TRBJ2-5)
CASGSRTHQETQYF

SEQ ID NO: 617085 - protein, 14 aa, Homo sapiens
  CDR3 for alpha chain variable domain of TCR clone 308543 (TRAV17, TRAJ15)
CATGPNQAGTDLIF

SEQ ID NO: 617086 - protein, 15 aa, Homo sapiens
  CDR3 for beta chain variable domain of TCR clone 308543 (TRBV11-2, TRBJ2-2)
CASSSDRVNAGELFF

SEQ ID NO: 617087 - protein, 14 aa, Homo sapiens
  CDR3 for alpha chain variable domain of TCR clone 308544 (TRAV2, TRAJ9)
CAAEDRSGGFKTIF

SEQ ID NO: 617088 - protein, 14 aa, Homo sapiens
  CDR3 for beta chain variable domain of TCR clone 308544 (TRBV18, TRBJ1-5)
RASSRQQRNQPQHF

SEQ ID NO: 617089 - protein, 14 aa, Homo sapiens
  CDR3 for alpha chain variable domain of TCR clone 308545 (TRAV1-2, TRAJ8)
CAAREDTGFQKLVF

SEQ ID NO: 617090 - protein, 16 aa, Homo sapiens
  CDR3 for beta chain variable domain of TCR clone 308545 (TRBV7-3, TRBJ2-2)
CASSLKRGTLSGELFF

SEQ ID NO: 617091 - protein, 13 aa, Homo sapiens
  CDR3 for alpha chain variable domain of TCR clone 308546 (TRAV27, TRAJ6)
CAGGKRGSYIPTF

SEQ ID NO: 617092 - protein, 13 aa, Homo sapiens
  CDR3 for beta chain variable domain of TCR clone 308546 (TRBV4-1, TRBJ2-5)
CASSLTRGETQYF

SEQ ID NO: 617093 - protein, 12 aa, Homo sapiens
  CDR3 for alpha chain variable domain of TCR clone 308547 (TRAV16, TRAJ56)
CAPTGANSKLTF

SEQ ID NO: 617094 - protein, 17 aa, Homo sapiens
  CDR3 for beta chain variable domain of TCR clone 308547 (TRBV27, TRBJ2-6)
CASSSTGFASGANVLTF

SEQ ID NO: 617095 - protein, 18 aa, Homo sapiens
  CDR3 for alpha chain variable domain of TCR clone 308548 (TRAV30, TRAJ29)
RNLLLWHRAFSGNTPLVF

SEQ ID NO: 617096 - protein, 15 aa, Homo sapiens
  CDR3 for beta chain variable domain of TCR clone 308548 (TRBV5-1, TRBJ2-2)
CASSLFGQNTGELFF

SEQ ID NO: 617097 - protein, 15 aa, Homo sapiens
  CDR3 for alpha chain variable domain of TCR clone 308549 (TRAV23/DV6, TRAJ37)
CAAGEGSSNTGKLIF

SEQ ID NO: 617098 - protein, 15 aa, Homo sapiens
  CDR3 for beta chain variable domain of TCR clone 308549 (TRBV11-3, TRBJ2-3)
CASLKDGREGDTQYF

SEQ ID NO: 617099 - protein, 16 aa, Homo sapiens
  CDR3 for alpha chain variable domain of TCR clone 308550 (TRAV30, TRAJ24)
CGTEIVDADSWGKFQF

SEQ ID NO: 617100 - protein, 16 aa, Homo sapiens
  CDR3 for beta chain variable domain of TCR clone 308550 (TRBV27, TRBJ2-2)
CASSSDRGTGTGELFF

SEQ ID NO: 617101 - protein, 15 aa, Homo sapiens
  CDR3 for alpha chain variable domain of TCR clone 308551 (TRAV4, TRAJ39)
CLVGPNNNAGNMLTF

SEQ ID NO: 617102 - protein, 13 aa, Homo sapiens
  CDR3 for beta chain variable domain of TCR clone 308551 (TRBV7-9, TRBJ2-7)
CASSAGLQYEQYF

SEQ ID NO: 617103 - protein, 11 aa, Homo sapiens
  CDR3 for alpha chain variable domain of TCR clone 308552 (TRAV2, TRAJ33)
CAVESNYQLIW

SEQ ID NO: 617104 - protein, 15 aa, Homo sapiens
  CDR3 for beta chain variable domain of TCR clone 308552 (TRBV4-1, TRBJ2-1)
CASSQGGELYNEQFF

SEQ ID NO: 617105 - protein, 20 aa, Homo sapiens
  CDR3 for alpha chain variable domain of TCR clone 308553 (TRAV14/DV4, )
CAMREISRTLTLPCTSWETL

SEQ ID NO: 617106 - protein, 14 aa, Homo sapiens
  CDR3 for beta chain variable domain of TCR clone 308553 (TRBV2, TRBJ2-1)
CASSDRAYYNEQFF

SEQ ID NO: 617107 - protein, 14 aa, Homo sapiens
  CDR3 for alpha chain variable domain of TCR clone 308554 (TRAV30, TRAJ26)
CGTEIVSYGENFVF

SEQ ID NO: 617108 - protein, 13 aa, Homo sapiens
  CDR3 for beta chain variable domain of TCR clone 308554 (TRBV19, TRBJ1-3)
CASRLSLGNTIYF

SEQ ID NO: 617109 - protein, 14 aa, Homo sapiens
  CDR3 for alpha chain variable domain of TCR clone 308555 (TRAV9-2, TRAJ39)
CALYIYNAGNMLTF

SEQ ID NO: 617110 - protein, 15 aa, Homo sapiens
  CDR3 for beta chain variable domain of TCR clone 308555 (TRBV4-2, TRBJ1-4)
CASSLVQREVEKLFF

SEQ ID NO: 617111 - protein, 14 aa, Homo sapiens
  CDR3 for alpha chain variable domain of TCR clone 308556 (TRAV29/DV5, TRAJ47)
CAESSIEYGNKLVF

SEQ ID NO: 617112 - protein, 14 aa, Homo sapiens
  CDR3 for beta chain variable domain of TCR clone 308556 (TRBV12-4, TRBJ1-6)
CASNLQGKGSPLHF

SEQ ID NO: 617113 - protein, 16 aa, Homo sapiens
  CDR3 for alpha chain variable domain of TCR clone 308557 (TRAV3, TRAJ10)
CAVRDMNAGGGNKLTF

SEQ ID NO: 617114 - protein, 11 aa, Homo sapiens
  CDR3 for beta chain variable domain of TCR clone 308557 (TRBV12-4, TRBJ2-2)
CASSSAGELFF

SEQ ID NO: 617115 - protein, 14 aa, Homo sapiens
  CDR3 for alpha chain variable domain of TCR clone 308558 (TRAV12-1, TRAJ54)
CVVNIYQGAQKLVF

SEQ ID NO: 617116 - protein, 19 aa, Homo sapiens
  CDR3 for beta chain variable domain of TCR clone 308558 (TRBV25-1, TRBJ2-2)
CAILVYRVDRGRKTGELFF

SEQ ID NO: 617117 - protein, 16 aa, Homo sapiens
  CDR3 for alpha chain variable domain of TCR clone 308559 (TRAV21, TRAJ37)
CAVRTAGSSNTGKLIF

SEQ ID NO: 617118 - protein, 15 aa, Homo sapiens
  CDR3 for beta chain variable domain of TCR clone 308559 (TRBV7-9, TRBJ2-1)
CASSPAGQSLNEQFF

SEQ ID NO: 617119 - protein, 13 aa, Homo sapiens
  CDR3 for alpha chain variable domain of TCR clone 308560 (TRAV8-3, TRAJ43)
CAVVPYNNNDMRF

SEQ ID NO: 617120 - protein, 14 aa, Homo sapiens
  CDR3 for beta chain variable domain of TCR clone 308560 (TRBV29-1, TRBJ1-4)
CSVTGTGGNEKLFF

SEQ ID NO: 617121 - protein, 14 aa, Homo sapiens
  CDR3 for alpha chain variable domain of TCR clone 308561 (TRAV29/DV5, TRAJ34)
CAASASGNTDKLIF

SEQ ID NO: 617122 - protein, 17 aa, Homo sapiens
  CDR3 for beta chain variable domain of TCR clone 308561 (TRBV20-1, TRBJ2-1)
CSAPPRLAGTRYNEQFF

SEQ ID NO: 617123 - protein, 12 aa, Homo sapiens
  CDR3 for alpha chain variable domain of TCR clone 308562 (TRAV1-2, TRAJ33)
CAALDSNYQLIW

SEQ ID NO: 617124 - protein, 15 aa, Homo sapiens
  CDR3 for beta chain variable domain of TCR clone 308562 (TRBV11-3, TRBJ2-3)
CASLKDGREGDTQYF

SEQ ID NO: 617125 - protein, 16 aa, Homo sapiens
  CDR3 for alpha chain variable domain of TCR clone 308563 (TRAV3, TRAJ10)
CAVRDMRAGGGNKLTF

SEQ ID NO: 617126 - protein, 16 aa, Homo sapiens
  CDR3 for beta chain variable domain of TCR clone 308563 (TRBV5-7, TRBJ1-5)
CASSLQQDREYQHQHF

SEQ ID NO: 617127 - protein, 16 aa, Homo sapiens
  CDR3 for alpha chain variable domain of TCR clone 308564 (TRAV26-2, TRAJ22)
CILRDGASGSARQLTF

SEQ ID NO: 617128 - protein, 13 aa, Homo sapiens
  CDR3 for beta chain variable domain of TCR clone 308564 (TRBV10-3, TRBJ2-7)
CASKLAVNYEQYF

SEQ ID NO: 617129 - protein, 23 aa, Homo sapiens
  CDR3 for alpha chain variable domain of TCR clone 308565 (TRAV30, TRAJ43)
CTLRPPSSVTQEPTSAALSDMRF

SEQ ID NO: 617130 - protein, 14 aa, Homo sapiens
  CDR3 for beta chain variable domain of TCR clone 308565 (TRBV2, TRBJ2-7)
CASSLTSGGYEQYF

SEQ ID NO: 617131 - protein, 13 aa, Homo sapiens
  CDR3 for alpha chain variable domain of TCR clone 308566 (TRAV13-2, TRAJ13)
CAERPGGYQKVTF

SEQ ID NO: 617132 - protein, 15 aa, Homo sapiens
  CDR3 for beta chain variable domain of TCR clone 308566 (TRBV11-3, TRBJ2-7)
CASSPGPASSYELYF

SEQ ID NO: 617133 - protein, 12 aa, Homo sapiens
  CDR3 for alpha chain variable domain of TCR clone 308567 (TRAV3, TRAJ20)
CAVRDPDYKLSF

SEQ ID NO: 617134 - protein, 18 aa, Homo sapiens
  CDR3 for beta chain variable domain of TCR clone 308567 (TRBV2, TRBJ2-2)
CQQSTGTSGGGNTGELFF

SEQ ID NO: 617135 - protein, 13 aa, Homo sapiens
  CDR3 for alpha chain variable domain of TCR clone 308568 (TRAV3, TRAJ21)
CAVREPDFNKFYF

SEQ ID NO: 617136 - protein, 16 aa, Homo sapiens
  CDR3 for beta chain variable domain of TCR clone 308568 (TRBV27, TRBJ2-2)
CASSFRGLVLTGELFF

SEQ ID NO: 617137 - protein, 13 aa, Homo sapiens
  CDR3 for alpha chain variable domain of TCR clone 308569 (TRAV2, TRAJ40)
CAVVSSGTYKYIF

SEQ ID NO: 617138 - protein, 15 aa, Homo sapiens
  CDR3 for beta chain variable domain of TCR clone 308569 (TRBV7-9, TRBJ1-4)
CASSARTGGNEKLFF

SEQ ID NO: 617139 - protein, 13 aa, Homo sapiens
  CDR3 for alpha chain variable domain of TCR clone 308570 (TRAV12-3, TRAJ21)
RAPGPHNFNKFYF

SEQ ID NO: 617140 - protein, 15 aa, Homo sapiens
  CDR3 for beta chain variable domain of TCR clone 308570 (TRBV10-3, TRBJ2-3)
CAISLTSGGTDTQYF

SEQ ID NO: 617141 - protein, 13 aa, Homo sapiens
  CDR3 for alpha chain variable domain of TCR clone 308571 (TRAV12-3, TRAJ43)
CAMIRPNNNDMRY

SEQ ID NO: 617142 - protein, 12 aa, Homo sapiens
  CDR3 for beta chain variable domain of TCR clone 308571 (TRBV11-2, TRBJ2-5)
CASSLGQETQYF

SEQ ID NO: 617143 - protein, 16 aa, Homo sapiens
  CDR3 for alpha chain variable domain of TCR clone 308572 (TRAV13-2, TRAJ32)
CGENMNYGGATNKLIF

SEQ ID NO: 617144 - protein, 14 aa, Homo sapiens
  CDR3 for beta chain variable domain of TCR clone 308572 (TRBV15, TRBJ2-5)
CATSSTGYQETQYF

SEQ ID NO: 617145 - protein, 15 aa, Homo sapiens
  CDR3 for alpha chain variable domain of TCR clone 308573 (TRAV17, TRAJ57)
CATGPSQGGSEKLVF

SEQ ID NO: 617146 - protein, 12 aa, Homo sapiens
  CDR3 for beta chain variable domain of TCR clone 308573 (TRBV11-2, TRBJ2-2)
CASSLPTGELFF

SEQ ID NO: 617147 - protein, 14 aa, Homo sapiens
  CDR3 for alpha chain variable domain of TCR clone 308574 (TRAV3, TRAJ34)
CAVRDINNTDKLIV

SEQ ID NO: 617148 - protein, 13 aa, Homo sapiens
  CDR3 for beta chain variable domain of TCR clone 308574 (TRBV20-1, TRBJ1-1)
CSARGGGNTEAFF

SEQ ID NO: 617149 - protein, 17 aa, Homo sapiens
  CDR3 for alpha chain variable domain of TCR clone 308575 (TRAV26-1, TRAJ27)
CIVSTPWINTNAGESNF

SEQ ID NO: 617150 - protein, 16 aa, Homo sapiens
  CDR3 for beta chain variable domain of TCR clone 308575 (TRBV7-9, TRBJ2-1)
CASSLDPGLSIDEQFF

SEQ ID NO: 617151 - protein, 11 aa, Homo sapiens
  CDR3 for alpha chain variable domain of TCR clone 308576 (TRAV17, TRAJ9)
WGFTGGLKTIF

SEQ ID NO: 617152 - protein, 14 aa, Homo sapiens
  CDR3 for beta chain variable domain of TCR clone 308576 (TRBV7-9, TRBJ2-2)
CASSLVQDTGELFF

SEQ ID NO: 617153 - protein, 16 aa, Homo sapiens
  CDR3 for alpha chain variable domain of TCR clone 308577 (TRAV3, TRAJ37)
CAVRGKGSGNTGKLIF

SEQ ID NO: 617154 - protein, 14 aa, Homo sapiens
  CDR3 for beta chain variable domain of TCR clone 308577 (TRBV7-9, TRBJ1-1)
CASSSGQGDTEAFF

SEQ ID NO: 617155 - protein, 15 aa, Homo sapiens
  CDR3 for alpha chain variable domain of TCR clone 308578 (TRAV8-4, TRAJ3)
CAVTGENLVQECFQD

SEQ ID NO: 617156 - protein, 16 aa, Homo sapiens
  CDR3 for beta chain variable domain of TCR clone 308578 (TRBV4-2, TRBJ1-1)
CASSQAGFGMNTEAFF

SEQ ID NO: 617157 - protein, 16 aa, Homo sapiens
  CDR3 for alpha chain variable domain of TCR clone 308579 (TRAV13-1, TRAJ37)
CAASSLGSSNTGKLIF

SEQ ID NO: 617158 - protein, 12 aa, Homo sapiens
  CDR3 for beta chain variable domain of TCR clone 308579 (TRBV6-1, TRBJ2-5)
CSSSEGRETQYF

SEQ ID NO: 617159 - protein, 15 aa, Homo sapiens
  CDR3 for alpha chain variable domain of TCR clone 308580 (TRAV3, TRAJ47)
CAVGDIGEYGNKLVF

SEQ ID NO: 617160 - protein, 14 aa, Homo sapiens
  CDR3 for beta chain variable domain of TCR clone 308580 (TRBV13, TRBJ2-5)
CASGLERVGETQYF

SEQ ID NO: 617161 - protein, 13 aa, Homo sapiens
  CDR3 for alpha chain variable domain of TCR clone 308581 (TRAV17, TRAJ7)
CATDNYGNNRLAF

SEQ ID NO: 617162 - protein, 14 aa, Homo sapiens
  CDR3 for beta chain variable domain of TCR clone 308581 (TRBV19, TRBJ2-1)
CASPTFVLSGEQFF

SEQ ID NO: 617163 - protein, 13 aa, Homo sapiens
  CDR3 for alpha chain variable domain of TCR clone 308582 (TRAV21, TRAJ3)
CCEPYGSASKIIF

SEQ ID NO: 617164 - protein, 15 aa, Homo sapiens
  CDR3 for beta chain variable domain of TCR clone 308582 (TRBV7-3, TRBJ2-1)
CASSPTGGGEVEQFF

SEQ ID NO: 617165 - protein, 17 aa, Homo sapiens
  CDR3 for alpha chain variable domain of TCR clone 308583 (TRAV26-1, TRAJ53)
CIVRVDERGGSNYKLTF

SEQ ID NO: 617166 - protein, 15 aa, Homo sapiens
  CDR3 for beta chain variable domain of TCR clone 308583 (TRBV20-1, TRBJ2-7)
CSARVPAAYFYEQYF

SEQ ID NO: 617167 - protein, 12 aa, Homo sapiens
  CDR3 for alpha chain variable domain of TCR clone 308584 (TRAV38-2/DV8, TRAJ43)
CAYRSEMGDMRF

SEQ ID NO: 617168 - protein, 14 aa, Homo sapiens
  CDR3 for beta chain variable domain of TCR clone 308584 (TRBV12-4, TRBJ2-5)
CASSLWQKQETQYF

SEQ ID NO: 617169 - protein, 16 aa, Homo sapiens
  CDR3 for alpha chain variable domain of TCR clone 308585 (TRAV12-2, TRAJ32)
CAVNLGQGGATNKLIF

SEQ ID NO: 617170 - protein, 16 aa, Homo sapiens
  CDR3 for beta chain variable domain of TCR clone 308585 (TRBV7-3, TRBJ2-3)
CASSLSGYRPEDTQYF

SEQ ID NO: 617171 - protein, 15 aa, Homo sapiens
  CDR3 for alpha chain variable domain of TCR clone 308586 (TRAV20, TRAJ16)
CAVQIRFSDGQKLLF

SEQ ID NO: 617172 - protein, 14 aa, Homo sapiens
  CDR3 for beta chain variable domain of TCR clone 308586 (TRBV6-5, TRBJ1-2)
CASSYDGTGGGYTF

SEQ ID NO: 617173 - protein, 19 aa, Homo sapiens
  CDR3 for alpha chain variable domain of TCR clone 308587 (TRAV29/DV5, TRAJ49)
CSVLLCSKLTVDTGNQFYF

SEQ ID NO: 617174 - protein, 16 aa, Homo sapiens
  CDR3 for beta chain variable domain of TCR clone 308587 (TRBV7-3, TRBJ2-1)
CASSLEGYRSYNEQFF

SEQ ID NO: 617175 - protein, 15 aa, Homo sapiens
  CDR3 for alpha chain variable domain of TCR clone 308588 (TRAV9-2, TRAJ56)
CALSDVDGANSKLTF

SEQ ID NO: 617176 - protein, 15 aa, Homo sapiens
  CDR3 for beta chain variable domain of TCR clone 308588 (TRBV27, TRBJ1-4)
CASSPRHATNEKLFF

SEQ ID NO: 617177 - protein, 14 aa, Homo sapiens
  CDR3 for alpha chain variable domain of TCR clone 308589 (TRAV12-3, TRAJ15)
CAMIPPQAATALIF

SEQ ID NO: 617178 - protein, 12 aa, Homo sapiens
  CDR3 for beta chain variable domain of TCR clone 308589 (TRBV11-2, TRBJ2-2)
CASSLGGGELFF

SEQ ID NO: 617179 - protein, 16 aa, Homo sapiens
  CDR3 for alpha chain variable domain of TCR clone 308590 (TRAV12-2, TRAJ39)
CAVNRGPNNAGNMLNF

SEQ ID NO: 617180 - protein, 10 aa, Homo sapiens
  CDR3 for beta chain variable domain of TCR clone 308590 (TRBV2, TRBJ2-4)
CASRGSIQYF

SEQ ID NO: 617181 - protein, 10 aa, Homo sapiens
  CDR3 for alpha chain variable domain of TCR clone 308591 (TRAV12-1, TRAJ37)
ARGNTGKLIF

SEQ ID NO: 617182 - protein, 16 aa, Homo sapiens
  CDR3 for beta chain variable domain of TCR clone 308591 (TRBV4-2, TRBJ1-1)
CASSPSPGRAAPEAFF

SEQ ID NO: 617183 - protein, 22 aa, Homo sapiens
  CDR3 for alpha chain variable domain of TCR clone 308592 (TRAV4, )
CLVGPHDYDIQNPDPAVYQLRD

SEQ ID NO: 617184 - protein, 17 aa, Homo sapiens
  CDR3 for beta chain variable domain of TCR clone 308592 (TRBV24-1, TRBJ2-1)
CATSDVSTSGTYNEQFF

SEQ ID NO: 617185 - protein, 13 aa, Homo sapiens
  CDR3 for alpha chain variable domain of TCR clone 308593 (TRAV2, TRAJ15)
CAVASQAGTALIF

SEQ ID NO: 617186 - protein, 23 aa, Homo sapiens
  CDR3 for beta chain variable domain of TCR clone 308593 (TRBV27, TRBJ2-4)
CATLARHGNRETGDPKTFSTSAP

SEQ ID NO: 617187 - protein, 15 aa, Homo sapiens
  CDR3 for alpha chain variable domain of TCR clone 308594 (TRAV14/DV4, TRAJ10)
CAMRELTGGGNKLTF

SEQ ID NO: 617188 - protein, 13 aa, Homo sapiens
  CDR3 for beta chain variable domain of TCR clone 308594 (TRBV4-2, TRBJ1-1)
CAGSQAGNTEAFF

SEQ ID NO: 617189 - protein, 14 aa, Homo sapiens
  CDR3 for alpha chain variable domain of TCR clone 308595 (TRAV17, TRAJ12)
FATDEKDSSYKLIF

SEQ ID NO: 617190 - protein, 16 aa, Homo sapiens
  CDR3 for beta chain variable domain of TCR clone 308595 (TRBV11-2, TRBJ2-1)
CASSPRLAGVYNEQFF

SEQ ID NO: 617191 - protein, 14 aa, Homo sapiens
  CDR3 for alpha chain variable domain of TCR clone 308596 (TRAV13-2, TRAJ4)
CAEKGPKGYNKLIF

SEQ ID NO: 617192 - protein, 13 aa, Homo sapiens
  CDR3 for beta chain variable domain of TCR clone 308596 (TRBV18, TRBJ2-5)
CGSSPPGKETQYF

SEQ ID NO: 617193 - protein, 14 aa, Homo sapiens
  CDR3 for alpha chain variable domain of TCR clone 308597 (TRAV12-3, TRAJ10)
SHLPLTGGGNKLTF

SEQ ID NO: 617194 - protein, 13 aa, Homo sapiens
  CDR3 for beta chain variable domain of TCR clone 308597 (TRBV7-7, TRBJ2-5)
CASSRSGQETHYF

SEQ ID NO: 617195 - protein, 17 aa, Homo sapiens
  CDR3 for alpha chain variable domain of TCR clone 308598 (TRAV2, TRAJ6)
CSVRDGPRAGGSYIPTF

SEQ ID NO: 617196 - protein, 14 aa, Homo sapiens
  CDR3 for beta chain variable domain of TCR clone 308598 (TRBV7-2, TRBJ2-7)
CASSPKTSFYEQYF

SEQ ID NO: 617197 - protein, 16 aa, Homo sapiens
  CDR3 for alpha chain variable domain of TCR clone 308599 (TRAV3, TRAJ10)
RAVSDMRAGGGNKLTF

SEQ ID NO: 617198 - protein, 20 aa, Homo sapiens
  CDR3 for beta chain variable domain of TCR clone 308599 (TRBV11-3, TRBJ2-7)
CASSQRTSGSLRAVLRAGHQ

SEQ ID NO: 617199 - protein, 15 aa, Homo sapiens
  CDR3 for alpha chain variable domain of TCR clone 308600 (TRAV8-3, TRAJ45)
CASSYSGGGADGLPF

SEQ ID NO: 617200 - protein, 13 aa, Homo sapiens
  CDR3 for beta chain variable domain of TCR clone 308600 (TRBV7-9, TRBJ2-7)
CASSFAGAYEQYF

SEQ ID NO: 617201 - protein, 13 aa, Homo sapiens
  CDR3 for alpha chain variable domain of TCR clone 308601 (TRAV12-2, TRAJ20)
CAVYPSNDYKLSF

SEQ ID NO: 617202 - protein, 15 aa, Homo sapiens
  CDR3 for beta chain variable domain of TCR clone 308601 (TRBV18, TRBJ1-2)
CASSPGNGLGYGYPF

SEQ ID NO: 617203 - protein, 12 aa, Homo sapiens
  CDR3 for alpha chain variable domain of TCR clone 308602 (TRAV13-1, TRAJ21)
CAAKEGFNKFYF

SEQ ID NO: 617204 - protein, 20 aa, Homo sapiens
  CDR3 for beta chain variable domain of TCR clone 308602 (TRBV7-8, TRBJ2-2)
CASSHLFPGPTIHITGELVF

SEQ ID NO: 617205 - protein, 12 aa, Homo sapiens
  CDR3 for alpha chain variable domain of TCR clone 308603 (TRAV1-1, TRAJ8)
CAGGTGFQKLVF

SEQ ID NO: 617206 - protein, 15 aa, Homo sapiens
  CDR3 for beta chain variable domain of TCR clone 308603 (TRBV7-3, TRBJ2-1)
CASSLGQGPFGEQFF

SEQ ID NO: 617207 - protein, 17 aa, Homo sapiens
  CDR3 for alpha chain variable domain of TCR clone 308604 (TRAV16, TRAJ58)
CITVLSNGETSGSRLTF

SEQ ID NO: 617208 - protein, 17 aa, Homo sapiens
  CDR3 for beta chain variable domain of TCR clone 308604 (TRBV18, TRBJ2-1)
CASSKGLSGGADNEKFF

SEQ ID NO: 617209 - protein, 14 aa, Homo sapiens
  CDR3 for alpha chain variable domain of TCR clone 308605 (TRAV12-1, TRAJ6)
CVVPTSGGSYIPTF

SEQ ID NO: 617210 - protein, 16 aa, Homo sapiens
  CDR3 for beta chain variable domain of TCR clone 308605 (TRBV2, TRBJ2-7)
CASSEPWTGPSNEQYF

SEQ ID NO: 617211 - protein, 17 aa, Homo sapiens
  CDR3 for alpha chain variable domain of TCR clone 308606 (TRAV8-6, TRAJ58)
CAVSSWVGETSGSRLTF

SEQ ID NO: 617212 - protein, 15 aa, Homo sapiens
  CDR3 for beta chain variable domain of TCR clone 308606 (TRBV9, TRBJ1-6)
CASSVAGTGDSPLHC

SEQ ID NO: 617213 - protein, 13 aa, Homo sapiens
  CDR3 for alpha chain variable domain of TCR clone 308607 (TRAV12-3, TRAJ7)
CAMGASGNNRLAF

SEQ ID NO: 617214 - protein, 14 aa, Homo sapiens
  CDR3 for beta chain variable domain of TCR clone 308607 (TRBV13, TRBJ2-5)
CASSLGPRGETQYF

SEQ ID NO: 617215 - protein, 11 aa, Homo sapiens
  CDR3 for alpha chain variable domain of TCR clone 308608 (TRAV17, TRAJ9)
CGFTGGFKTIF

SEQ ID NO: 617216 - protein, 15 aa, Homo sapiens
  CDR3 for beta chain variable domain of TCR clone 308608 (TRBV18, TRBJ2-1)
CASSPPGLGSTEQFF

SEQ ID NO: 617217 - protein, 11 aa, Homo sapiens
  CDR3 for alpha chain variable domain of TCR clone 308609 (TRAV2, TRAJ33)
CAVDGNYQLIW

SEQ ID NO: 617218 - protein, 14 aa, Homo sapiens
  CDR3 for beta chain variable domain of TCR clone 308609 (TRBV11-2, TRBJ2-3)
CASSRLARTDTQYF

SEQ ID NO: 617219 - protein, 12 aa, Homo sapiens
  CDR3 for alpha chain variable domain of TCR clone 308610 (TRAV8-6, TRAJ43)
CAVRYNNNDMRF

SEQ ID NO: 617220 - protein, 13 aa, Homo sapiens
  CDR3 for beta chain variable domain of TCR clone 308610 (TRBV29-1, TRBJ2-3)
CSATRGGRDTQYF

SEQ ID NO: 617221 - protein, 16 aa, Homo sapiens
  CDR3 for alpha chain variable domain of TCR clone 308611 (TRAV12-3, TRAJ53)
CAMSPGSGGSNYKLTF

SEQ ID NO: 617222 - protein, 20 aa, Homo sapiens
  CDR3 for beta chain variable domain of TCR clone 308611 (TRBV7-8, TRBJ2-2)
CASSQLFPGPTIHITGELFF

SEQ ID NO: 617223 - protein, 11 aa, Homo sapiens
  CDR3 for alpha chain variable domain of TCR clone 308612 (TRAV17, TRAJ43)
CATPRSNDMRF

SEQ ID NO: 617224 - protein, 14 aa, Homo sapiens
  CDR3 for beta chain variable domain of TCR clone 308612 (TRBV7-8, TRBJ2-3)
CASSLEAGTDTQYF

SEQ ID NO: 617225 - protein, 16 aa, Homo sapiens
  CDR3 for alpha chain variable domain of TCR clone 308613 (TRAV30, TRAJ24)
CGTEIADADSWGKFQF

SEQ ID NO: 617226 - protein, 17 aa, Homo sapiens
  CDR3 for beta chain variable domain of TCR clone 308613 (TRBV20-1, TRBJ2-2)
CSASGSGQGGLTGELFF

SEQ ID NO: 617227 - protein, 15 aa, Homo sapiens
  CDR3 for alpha chain variable domain of TCR clone 308614 (TRAV26-1, TRAJ29)
CIVRVEGSGNTPLVF

SEQ ID NO: 617228 - protein, 13 aa, Homo sapiens
  CDR3 for beta chain variable domain of TCR clone 308614 (TRBV28, TRBJ2-7)
CASSPTLKREQYF

SEQ ID NO: 617229 - protein, 13 aa, Homo sapiens
  CDR3 for alpha chain variable domain of TCR clone 308615 (TRAV13-1, TRAJ39)
CAASIWAGNMLTF

SEQ ID NO: 617230 - protein, 12 aa, Homo sapiens
  CDR3 for beta chain variable domain of TCR clone 308615 (TRBV27, TRBJ2-1)
CASRGFYNEQFF

SEQ ID NO: 617231 - protein, 17 aa, Homo sapiens
  CDR3 for alpha chain variable domain of TCR clone 308616 (TRAV3, TRAJ6)
CAVRDGPRAGGSYIPAF

SEQ ID NO: 617232 - protein, 12 aa, Homo sapiens
  CDR3 for beta chain variable domain of TCR clone 308616 (TRBV11-2, TRBJ2-1)
CASSPGNNEQFF

SEQ ID NO: 617233 - protein, 12 aa, Homo sapiens
  CDR3 for alpha chain variable domain of TCR clone 308617 (TRAV12-3, TRAJ17)
CAMTLTGNKLTF

SEQ ID NO: 617234 - protein, 15 aa, Homo sapiens
  CDR3 for beta chain variable domain of TCR clone 308617 (TRBV2, TRBJ2-1)
CAGSGTSGGANEQFF

SEQ ID NO: 617235 - protein, 17 aa, Homo sapiens
  CDR3 for alpha chain variable domain of TCR clone 308618 (TRAV8-6, TRAJ58)
CAVSSWLGETSGSRLTF

SEQ ID NO: 617236 - protein, 17 aa, Homo sapiens
  CDR3 for beta chain variable domain of TCR clone 308618 (TRBV4-3, TRBJ1-2)
CASSSRLQAGGSVGYTF

SEQ ID NO: 617237 - protein, 14 aa, Homo sapiens
  CDR3 for alpha chain variable domain of TCR clone 308619 (TRAV8-4, TRAJ8)
CAVSLNTGFQKLGF

SEQ ID NO: 617238 - protein, 13 aa, Homo sapiens
  CDR3 for beta chain variable domain of TCR clone 308619 (TRBV7-9, TRBJ2-3)
RASSPGSTDTQYF

SEQ ID NO: 617239 - protein, 13 aa, Homo sapiens
  CDR3 for alpha chain variable domain of TCR clone 308620 (TRAV30, TRAJ24)
CGTVTDSWGKLQF

SEQ ID NO: 617240 - protein, 14 aa, Homo sapiens
  CDR3 for beta chain variable domain of TCR clone 308620 (TRBV6-3, TRBJ2-2)
CASTNTPDTGELFF

SEQ ID NO: 617241 - protein, 14 aa, Homo sapiens
  CDR3 for alpha chain variable domain of TCR clone 308621 (TRAV12-1, TRAJ17)
CVVNYKAAGNKLTF

SEQ ID NO: 617242 - protein, 17 aa, Homo sapiens
  CDR3 for beta chain variable domain of TCR clone 308621 (TRBV20-1, TRBJ2-1)
CGASSSGLAVSYNEQFF

SEQ ID NO: 617243 - protein, 11 aa, Homo sapiens
  CDR3 for alpha chain variable domain of TCR clone 308622 (TRAV1-2, TRAJ31)
CAVNNNASLMF

SEQ ID NO: 617244 - protein, 15 aa, Homo sapiens
  CDR3 for beta chain variable domain of TCR clone 308622 (TRBV28, TRBJ2-1)
CASSIIAGGRSEQFF

SEQ ID NO: 617245 - protein, 16 aa, Homo sapiens
  CDR3 for alpha chain variable domain of TCR clone 308623 (TRAV35, TRAJ28)
CAGQRYSGPGSYQLTF

SEQ ID NO: 617246 - protein, 13 aa, Homo sapiens
  CDR3 for beta chain variable domain of TCR clone 308623 (TRBV19, TRBJ1-2)
CASSQGQVYGYTF

SEQ ID NO: 617247 - protein, 17 aa, Homo sapiens
  CDR3 for alpha chain variable domain of TCR clone 308624 (TRAV4, TRAJ18)
CLVGERSVGSTLGRLFF

SEQ ID NO: 617248 - protein, 14 aa, Homo sapiens
  CDR3 for beta chain variable domain of TCR clone 308624 (TRBV6-5, TRBJ1-2)
CASSYDGTGGGYTF

SEQ ID NO: 617249 - protein, 18 aa, Homo sapiens
  CDR3 for alpha chain variable domain of TCR clone 308625 (TRAV26-1, TRAJ52)
CIVRVAGAGGTSYGNLTF

SEQ ID NO: 617250 - protein, 13 aa, Homo sapiens
  CDR3 for beta chain variable domain of TCR clone 308625 (TRBV7-8, TRBJ1-2)
CASSAQSYYGYTF

SEQ ID NO: 617251 - protein, 11 aa, Homo sapiens
  CDR3 for alpha chain variable domain of TCR clone 308626 (TRAV12-1, TRAJ21)
CVVYNFNKFYF

SEQ ID NO: 617252 - protein, 18 aa, Homo sapiens
  CDR3 for beta chain variable domain of TCR clone 308626 (TRBV19, TRBJ2-7)
CASSMGQGDRAVLRAGHQ

SEQ ID NO: 617253 - protein, 13 aa, Homo sapiens
  CDR3 for alpha chain variable domain of TCR clone 308627 (TRAV13-1, TRAJ6)
CAASSGGSYIPTY

SEQ ID NO: 617254 - protein, 13 aa, Homo sapiens
  CDR3 for beta chain variable domain of TCR clone 308627 (TRBV7-8, TRBJ2-7)
CASSLTGGREQYF

SEQ ID NO: 617255 - protein, 14 aa, Homo sapiens
  CDR3 for alpha chain variable domain of TCR clone 308628 (TRAV3, TRAJ28)
CAMRRGAGSYQLTF

SEQ ID NO: 617256 - protein, 13 aa, Homo sapiens
  CDR3 for beta chain variable domain of TCR clone 308628 (TRBV19, TRBJ1-2)
CASSQGQVYGYTF

SEQ ID NO: 617257 - protein, 15 aa, Homo sapiens
  CDR3 for alpha chain variable domain of TCR clone 308629 (TRAV17, TRAJ57)
CATGPSQGGSEKLVF

SEQ ID NO: 617258 - protein, 15 aa, Homo sapiens
  CDR3 for beta chain variable domain of TCR clone 308629 (TRBV10-3, TRBJ2-3)
CASSLTSGGTDTQYF

SEQ ID NO: 617259 - protein, 14 aa, Homo sapiens
  CDR3 for alpha chain variable domain of TCR clone 308630 (TRAV26-1, TRAJ39)
CIVRVDNAGNMLTF

SEQ ID NO: 617260 - protein, 16 aa, Homo sapiens
  CDR3 for beta chain variable domain of TCR clone 308630 (TRBV19, TRBJ2-2)
CASRSPGTGATGELFF

SEQ ID NO: 617261 - protein, 16 aa, Homo sapiens
  CDR3 for alpha chain variable domain of TCR clone 308631 (TRAV3, TRAJ37)
CAVRGKGSGNTGKLSF

SEQ ID NO: 617262 - protein, 16 aa, Homo sapiens
  CDR3 for beta chain variable domain of TCR clone 308631 (TRBV12-5, TRBJ2-5)
CASGPRTSGSQETQYF

SEQ ID NO: 617263 - protein, 17 aa, Homo sapiens
  CDR3 for alpha chain variable domain of TCR clone 308632 (TRAV12-3, TRAJ6)
CAMSARGGAGGSHIPTF

SEQ ID NO: 617264 - protein, 12 aa, Homo sapiens
  CDR3 for beta chain variable domain of TCR clone 308632 (TRBV12-4, TRBJ2-3)
CASSTPPDTQYF

SEQ ID NO: 617265 - protein, 14 aa, Homo sapiens
  CDR3 for alpha chain variable domain of TCR clone 308633 (TRAV3, TRAJ8)
CAVSLNTGFQKLVF

SEQ ID NO: 617266 - protein, 16 aa, Homo sapiens
  CDR3 for beta chain variable domain of TCR clone 308633 (TRBV11-2, TRBJ1-1)
CASSLRQGGEHSKAFF

SEQ ID NO: 617267 - protein, 11 aa, Homo sapiens
  CDR3 for alpha chain variable domain of TCR clone 308634 (TRAV17, TRAJ29)
CYVATDTPLVF

SEQ ID NO: 617268 - protein, 15 aa, Homo sapiens
  CDR3 for beta chain variable domain of TCR clone 308634 (TRBV7-3, TRBJ2-1)
CASSLSSGSFDEQFF

SEQ ID NO: 617269 - protein, 15 aa, Homo sapiens
  CDR3 for alpha chain variable domain of TCR clone 308635 (TRAV12-1, TRAJ34)
CVVPPGGGNTDKLIF

SEQ ID NO: 617270 - protein, 13 aa, Homo sapiens
  CDR3 for beta chain variable domain of TCR clone 308635 (TRBV10-3, TRBJ2-7)
CASKLAVNYEQYF

SEQ ID NO: 617271 - protein, 17 aa, Homo sapiens
  CDR3 for alpha chain variable domain of TCR clone 308636 (TRAV12-2, TRAJ48)
CASNEKLTFGTETRLTI

SEQ ID NO: 617272 - protein, 14 aa, Homo sapiens
  CDR3 for beta chain variable domain of TCR clone 308636 (TRBV5-1, TRBJ2-5)
CASSLAGKQETQYF

SEQ ID NO: 617273 - protein, 13 aa, Homo sapiens
  CDR3 for alpha chain variable domain of TCR clone 308637 (TRAV41, TRAJ49)
CAVYSNTGNQFYF

SEQ ID NO: 617274 - protein, 16 aa, Homo sapiens
  CDR3 for beta chain variable domain of TCR clone 308637 (TRBV12-5, TRBJ2-5)
CASGPRTSGNQETQYF

SEQ ID NO: 617275 - protein, 15 aa, Homo sapiens
  CDR3 for alpha chain variable domain of TCR clone 308638 (TRAV3, TRAJ47)
CAVRDIGENGNKLVF

SEQ ID NO: 617276 - protein, 14 aa, Homo sapiens
  CDR3 for beta chain variable domain of TCR clone 308638 (TRBV13, TRBJ2-5)
CASSLEWVGETQYF

SEQ ID NO: 617277 - protein, 14 aa, Homo sapiens
  CDR3 for alpha chain variable domain of TCR clone 308639 (TRAV16, TRAJ33)
CALSAMDSNYQLIW

SEQ ID NO: 617278 - protein, 17 aa, Homo sapiens
  CDR3 for beta chain variable domain of TCR clone 308639 (TRBV25-1, TRBJ2-7)
CASSDARVFFSSYEQYF

SEQ ID NO: 617279 - protein, 14 aa, Homo sapiens
  CDR3 for alpha chain variable domain of TCR clone 308640 (TRAV25, TRAJ27)
CAGPGNTNAGKSTV

SEQ ID NO: 617280 - protein, 16 aa, Homo sapiens
  CDR3 for beta chain variable domain of TCR clone 308640 (TRBV4-1, TRBJ2-6)
CASSQDGGPGANVLTF

SEQ ID NO: 617281 - protein, 17 aa, Homo sapiens
  CDR3 for alpha chain variable domain of TCR clone 308641 (TRAV1-1, TRAJ32)
CAVRVDELWCCYKQAHL

SEQ ID NO: 617282 - protein, 12 aa, Homo sapiens
  CDR3 for beta chain variable domain of TCR clone 308641 (TRBV7-8, TRBJ2-1)
CASSLGHNEQFF

SEQ ID NO: 617283 - protein, 11 aa, Homo sapiens
  CDR3 for alpha chain variable domain of TCR clone 308642 (TRAV1-2, TRAJ20)
CAVANDSKLSF

SEQ ID NO: 617284 - protein, 16 aa, Homo sapiens
  CDR3 for beta chain variable domain of TCR clone 308642 (TRBV4-3, TRBJ1-6)
CASSQDPGVYNSPLHF

SEQ ID NO: 617285 - protein, 17 aa, Homo sapiens
  CDR3 for alpha chain variable domain of TCR clone 308643 (TRAV8-6, TRAJ58)
CAVSSWVGETSGSRLTF

SEQ ID NO: 617286 - protein, 12 aa, Homo sapiens
  CDR3 for beta chain variable domain of TCR clone 308643 (TRBV7-3, TRBJ2-1)
CASSLGFNEQFF

SEQ ID NO: 617287 - protein, 17 aa, Homo sapiens
  CDR3 for alpha chain variable domain of TCR clone 308644 (TRAV26-1, TRAJ53)
CIVRVDDSGGSNYTLTF

SEQ ID NO: 617288 - protein, 15 aa, Homo sapiens
  CDR3 for beta chain variable domain of TCR clone 308644 (TRBV11-2, TRBJ2-2)
CASSSDRVNAGELFF

SEQ ID NO: 617289 - protein, 15 aa, Homo sapiens
  CDR3 for alpha chain variable domain of TCR clone 308645 (TRAV1-2, TRAJ31)
CLLPLCCENNARLMF

SEQ ID NO: 617290 - protein, 15 aa, Homo sapiens
  CDR3 for beta chain variable domain of TCR clone 308645 (TRBV28, TRBJ2-1)
CASSIIAGGRSEQFF

SEQ ID NO: 617291 - protein, 10 aa, Homo sapiens
  CDR3 for alpha chain variable domain of TCR clone 308646 (TRAV13-1, TRAJ30)
CAARDDKIIF

SEQ ID NO: 617292 - protein, 15 aa, Homo sapiens
  CDR3 for beta chain variable domain of TCR clone 308646 (TRBV7-9, TRBJ1-2)
CASSLDREPNYSYTF

SEQ ID NO: 617293 - protein, 11 aa, Homo sapiens
  CDR3 for alpha chain variable domain of TCR clone 308647 (TRAV4, TRAJ31)
CLVGLNARLMF

SEQ ID NO: 617294 - protein, 16 aa, Homo sapiens
  CDR3 for beta chain variable domain of TCR clone 308647 (TRBV15, TRBJ2-6)
CATGVNGGFLANVLTF

SEQ ID NO: 617295 - protein, 13 aa, Homo sapiens
  CDR3 for alpha chain variable domain of TCR clone 308648 (TRAV12-1, TRAJ22)
CVVPSGSARHLTF

SEQ ID NO: 617296 - protein, 15 aa, Homo sapiens
  CDR3 for beta chain variable domain of TCR clone 308648 (TRBV11-3, TRBJ2-7)
CASSPGPASSYEQYF

SEQ ID NO: 617297 - protein, 14 aa, Homo sapiens
  CDR3 for alpha chain variable domain of TCR clone 308649 (TRAV12-2, TRAJ13)
CAVRKTGGYQKVTF

SEQ ID NO: 617298 - protein, 15 aa, Homo sapiens
  CDR3 for beta chain variable domain of TCR clone 308649 (TRBV5-1, TRBJ2-3)
CASSVTSGSTDTQYF

SEQ ID NO: 617299 - protein, 14 aa, Homo sapiens
  CDR3 for alpha chain variable domain of TCR clone 308650 (TRAV8-3, TRAJ4)
CAVGAAGGYNKLIF

SEQ ID NO: 617300 - protein, 14 aa, Homo sapiens
  CDR3 for beta chain variable domain of TCR clone 308650 (TRBV4-2, TRBJ2-1)
CASGLDRAYNEQFL

SEQ ID NO: 617301 - protein, 10 aa, Homo sapiens
  CDR3 for alpha chain variable domain of TCR clone 308651 (TRAV12-2, TRAJ27)
CGANAGESTF

SEQ ID NO: 617302 - protein, 18 aa, Homo sapiens
  CDR3 for beta chain variable domain of TCR clone 308651 (TRBV4-3, TRBJ1-2)
CASSQDGQSAPSDYGYTF

SEQ ID NO: 617303 - protein, 15 aa, Homo sapiens
  CDR3 for alpha chain variable domain of TCR clone 308652 (TRAV8-6, TRAJ6)
CAVRPPSGGSYIPTF

SEQ ID NO: 617304 - protein, 13 aa, Homo sapiens
  CDR3 for beta chain variable domain of TCR clone 308652 (TRBV9, TRBJ2-1)
CASSPSGGSEQFF

SEQ ID NO: 617305 - protein, 14 aa, Homo sapiens
  CDR3 for alpha chain variable domain of TCR clone 308653 (TRAV20, TRAJ42)
CAVQAGGSQRNLLF

SEQ ID NO: 617306 - protein, 14 aa, Homo sapiens
  CDR3 for beta chain variable domain of TCR clone 308653 (TRBV28, TRBJ1-2)
CASRIQGANYGYTF

SEQ ID NO: 617307 - protein, 13 aa, Homo sapiens
  CDR3 for alpha chain variable domain of TCR clone 308654 (TRAV17, TRAJ35)
CATDYPFGHVLHC

SEQ ID NO: 617308 - protein, 16 aa, Homo sapiens
  CDR3 for beta chain variable domain of TCR clone 308654 (TRBV7-3, TRBJ2-1)
CASSLEGYRSYNEQFF

SEQ ID NO: 617309 - protein, 17 aa, Homo sapiens
  CDR3 for alpha chain variable domain of TCR clone 308655 (TRAV26-1, TRAJ37)
CIVRVITVSSNTGKLIF

SEQ ID NO: 617310 - protein, 14 aa, Homo sapiens
  CDR3 for beta chain variable domain of TCR clone 308655 (TRBV7-2, TRBJ2-2)
CASRGQGAAGELFF

SEQ ID NO: 617311 - protein, 17 aa, Homo sapiens
  CDR3 for alpha chain variable domain of TCR clone 308656 (TRAV3, TRAJ6)
CAVRDGPRAGGSYIPTF

SEQ ID NO: 617312 - protein, 14 aa, Homo sapiens
  CDR3 for beta chain variable domain of TCR clone 308656 (TRBV7-2, TRBJ2-7)
CTGSPKTSFYEQYF

SEQ ID NO: 617313 - protein, 11 aa, Homo sapiens
  CDR3 for alpha chain variable domain of TCR clone 308657 (TRAV1-2, TRAJ20)
CAVANDYKLSF

SEQ ID NO: 617314 - protein, 17 aa, Homo sapiens
  CDR3 for beta chain variable domain of TCR clone 308657 (TRBV28, TRBJ2-1)
CASSFPLTSGKANEQFF

SEQ ID NO: 617315 - protein, 15 aa, Homo sapiens
  CDR3 for alpha chain variable domain of TCR clone 308658 (TRAV8-4, TRAJ7)
CAVSGGNYGNNRLAF

SEQ ID NO: 617316 - protein, 16 aa, Homo sapiens
  CDR3 for beta chain variable domain of TCR clone 308658 (TRBV7-3, TRBJ2-1)
CASSFTGRRSYNEQFF

SEQ ID NO: 617317 - protein, 13 aa, Homo sapiens
  CDR3 for alpha chain variable domain of TCR clone 308659 (TRAV13-1, TRAJ40)
AASMTPGTYKYIF

SEQ ID NO: 617318 - protein, 15 aa, Homo sapiens
  CDR3 for beta chain variable domain of TCR clone 308659 (TRBV7-3, TRBJ2-1)
CASSPTGGGEVEQFF

SEQ ID NO: 617319 - protein, 11 aa, Homo sapiens
  CDR3 for alpha chain variable domain of TCR clone 308660 (TRAV8-4, TRAJ18)
CAVTANGGSTW

SEQ ID NO: 617320 - protein, 14 aa, Homo sapiens
  CDR3 for beta chain variable domain of TCR clone 308660 (TRBV12-4, TRBJ1-2)
CASSSAGHIYGYTF

SEQ ID NO: 617321 - protein, 14 aa, Homo sapiens
  CDR3 for alpha chain variable domain of TCR clone 308661 (TRAV12-2, TRAJ5)
CAVNRSTGRRALTF

SEQ ID NO: 617322 - protein, 13 aa, Homo sapiens
  CDR3 for beta chain variable domain of TCR clone 308661 (TRBV19, TRBJ1-2)
CASSQGQVYGYTF

SEQ ID NO: 617323 - protein, 10 aa, Homo sapiens
  CDR3 for alpha chain variable domain of TCR clone 308662 (TRAV36/DV7, TRAJ48)
CAVGNEELTF

SEQ ID NO: 617324 - protein, 15 aa, Homo sapiens
  CDR3 for beta chain variable domain of TCR clone 308662 (TRBV18, TRBJ1-2)
CASSPGNGLGYGYTF

SEQ ID NO: 617325 - protein, 12 aa, Homo sapiens
  CDR3 for alpha chain variable domain of TCR clone 308663 (TRAV12-1, TRAJ40)
CVFYSGTYKYIF

SEQ ID NO: 617326 - protein, 17 aa, Homo sapiens
  CDR3 for beta chain variable domain of TCR clone 308663 (TRBV2, TRBJ1-4)
CASSKRELTQGEEKLFF

SEQ ID NO: 617327 - protein, 16 aa, Homo sapiens
  CDR3 for alpha chain variable domain of TCR clone 308664 (TRAV12-3, TRAJ53)
CAMSPGSGGSNYKLTF

SEQ ID NO: 617328 - protein, 16 aa, Homo sapiens
  CDR3 for beta chain variable domain of TCR clone 308664 (TRBV7-2, TRBJ1-3)
CASSRLEASSGNTIYF

SEQ ID NO: 617329 - protein, 14 aa, Homo sapiens
  CDR3 for alpha chain variable domain of TCR clone 308665 (TRAV13-1, TRAJ35)
CAASKGGFGNVLHC

SEQ ID NO: 617330 - protein, 14 aa, Homo sapiens
  CDR3 for beta chain variable domain of TCR clone 308665 (TRBV19, TRBJ2-7)
CASSIVDGRGEQYF

SEQ ID NO: 617331 - protein, 14 aa, Homo sapiens
  CDR3 for alpha chain variable domain of TCR clone 308666 (TRAV17, TRAJ53)
CATDAGGSNYKLTF

SEQ ID NO: 617332 - protein, 16 aa, Homo sapiens
  CDR3 for beta chain variable domain of TCR clone 308666 (TRBV4-1, TRBJ1-1)
CASSHDAGMGNTEAFF

SEQ ID NO: 617333 - protein, 11 aa, Homo sapiens
  CDR3 for alpha chain variable domain of TCR clone 308667 (TRAV2, TRAJ33)
CAVDSNYQLIW

SEQ ID NO: 617334 - protein, 15 aa, Homo sapiens
  CDR3 for beta chain variable domain of TCR clone 308667 (TRBV9, TRBJ1-6)
CASSVDGTGDSPLHF

SEQ ID NO: 617335 - protein, 14 aa, Homo sapiens
  CDR3 for alpha chain variable domain of TCR clone 308668 (TRAV35, TRAJ22)
CAGLRPGSERQLTF

SEQ ID NO: 617336 - protein, 13 aa, Homo sapiens
  CDR3 for beta chain variable domain of TCR clone 308668 (TRBV20-1, TRBJ2-7)
CSATHTSGYEQYF

SEQ ID NO: 617337 - protein, 13 aa, Homo sapiens
  CDR3 for alpha chain variable domain of TCR clone 308669 (TRAV35, TRAJ42)
CAGFPGSQGNLIF

SEQ ID NO: 617338 - protein, 17 aa, Homo sapiens
  CDR3 for beta chain variable domain of TCR clone 308669 (TRBV20-1, TRBJ2-2)
CSARGSGQGGLTGELFF

SEQ ID NO: 617339 - protein, 14 aa, Homo sapiens
  CDR3 for alpha chain variable domain of TCR clone 308670 (TRAV1-2, TRAJ6)
CAVRSSGGSYIPTF

SEQ ID NO: 617340 - protein, 16 aa, Homo sapiens
  CDR3 for beta chain variable domain of TCR clone 308670 (TRBV7-3, TRBJ2-2)
CASSVKRGTLSGELFF

SEQ ID NO: 617341 - protein, 14 aa, Homo sapiens
  CDR3 for alpha chain variable domain of TCR clone 308671 (TRAV12-3, TRAJ9)
CAMSVETGGFKTIF

SEQ ID NO: 617342 - protein, 15 aa, Homo sapiens
  CDR3 for beta chain variable domain of TCR clone 308671 (TRBV20-1, TRBJ1-5)
CSATSDRGLGQPQHF

SEQ ID NO: 617343 - protein, 13 aa, Homo sapiens
  CDR3 for alpha chain variable domain of TCR clone 308672 (TRAV8-1, TRAJ23)
CAGRDNQGGKLIF

SEQ ID NO: 617344 - protein, 13 aa, Homo sapiens
  CDR3 for beta chain variable domain of TCR clone 308672 (TRBV20-1, TRBJ2-7)
CSATHTSGYEQYF

SEQ ID NO: 617345 - protein, 14 aa, Homo sapiens
  CDR3 for alpha chain variable domain of TCR clone 308673 (TRAV13-1, TRAJ52)
CAAAGGTSYGKLTF

SEQ ID NO: 617346 - protein, 14 aa, Homo sapiens
  CDR3 for beta chain variable domain of TCR clone 308673 (TRBV7-2, TRBJ2-1)
CASSLVAGRNEQFF

SEQ ID NO: 617347 - protein, 14 aa, Homo sapiens
  CDR3 for alpha chain variable domain of TCR clone 308674 (TRAV9-2, TRAJ39)
CALYIYNAGNMLTF

SEQ ID NO: 617348 - protein, 14 aa, Homo sapiens
  CDR3 for beta chain variable domain of TCR clone 308674 (TRBV7-6, TRBJ2-1)
CASSLGGGADEQFF

SEQ ID NO: 617349 - protein, 14 aa, Homo sapiens
  CDR3 for alpha chain variable domain of TCR clone 308675 (TRAV13-1, TRAJ36)
CAAIYQTGANNPFF

SEQ ID NO: 617350 - protein, 15 aa, Homo sapiens
  CDR3 for beta chain variable domain of TCR clone 308675 (TRBV5-1, TRBJ1-1)
CASSPLGGSNTEAFF

SEQ ID NO: 617351 - protein, 15 aa, Homo sapiens
  CDR3 for alpha chain variable domain of TCR clone 308676 (TRAV3, TRAJ22)
CAVRDRGGSARQLTF

SEQ ID NO: 617352 - protein, 13 aa, Homo sapiens
  CDR3 for beta chain variable domain of TCR clone 308676 (TRBV7-2, TRBJ1-5)
CASSFARNQPQHF

SEQ ID NO: 617353 - protein, 14 aa, Homo sapiens
  CDR3 for alpha chain variable domain of TCR clone 308677 (TRAV4, TRAJ17)
CLVGDMAGGNKPTF

SEQ ID NO: 617354 - protein, 14 aa, Homo sapiens
  CDR3 for beta chain variable domain of TCR clone 308677 (TRBV4-1, TRBJ2-7)
CASSPVAGGDEQYF

SEQ ID NO: 617355 - protein, 15 aa, Homo sapiens
  CDR3 for alpha chain variable domain of TCR clone 308678 (TRAV10, TRAJ6)
CVVSGGSGGSYIPTF

SEQ ID NO: 617356 - protein, 13 aa, Homo sapiens
  CDR3 for beta chain variable domain of TCR clone 308678 (TRBV10-3, TRBJ2-7)
CASKLAVNYEQYF

SEQ ID NO: 617357 - protein, 13 aa, Homo sapiens
  CDR3 for alpha chain variable domain of TCR clone 308679 (TRAV29/DV5, TRAJ47)
CAASAEYGNKLVF

SEQ ID NO: 617358 - protein, 12 aa, Homo sapiens
  CDR3 for beta chain variable domain of TCR clone 308679 (TRBV20-1, TRBJ2-1)
YSARLGTDEQFF

SEQ ID NO: 617359 - protein, 13 aa, Homo sapiens
  CDR3 for alpha chain variable domain of TCR clone 308680 (TRAV12-3, TRAJ7)
CAMSASGNNRLAF

SEQ ID NO: 617360 - protein, 14 aa, Homo sapiens
  CDR3 for beta chain variable domain of TCR clone 308680 (TRBV13, TRBJ2-5)
CASSLGPRGETHDF

SEQ ID NO: 617361 - protein, 13 aa, Homo sapiens
  CDR3 for alpha chain variable domain of TCR clone 308681 (TRAV20, TRAJ21)
CAVEGYNFNKFYF

SEQ ID NO: 617362 - protein, 14 aa, Homo sapiens
  CDR3 for beta chain variable domain of TCR clone 308681 (TRBV5-5, TRBJ1-2)
CASSLDPYNYGYTF

SEQ ID NO: 617363 - protein, 14 aa, Homo sapiens
  CDR3 for alpha chain variable domain of TCR clone 308682 (TRAV1-2, TRAJ16)
CAVNRFSDGQKLLF

SEQ ID NO: 617364 - protein, 15 aa, Homo sapiens
  CDR3 for beta chain variable domain of TCR clone 308682 (TRBV4-1, TRBJ2-5)
CASSQASGEYETQYF

SEQ ID NO: 617365 - protein, 13 aa, Homo sapiens
  CDR3 for alpha chain variable domain of TCR clone 308683 (TRAV12-2, TRAJ9)
CAGGNTGGFKTIF

SEQ ID NO: 617366 - protein, 17 aa, Homo sapiens
  CDR3 for beta chain variable domain of TCR clone 308683 (TRBV4-1, TRBJ2-1)
CASSQGRGGGLYNEQFS

SEQ ID NO: 617367 - protein, 15 aa, Homo sapiens
  CDR3 for alpha chain variable domain of TCR clone 308684 (TRAV17, TRAJ56)
CATEPFTGANSKLAF

SEQ ID NO: 617368 - protein, 14 aa, Homo sapiens
  CDR3 for beta chain variable domain of TCR clone 308684 (TRBV19, TRBJ2-1)
CASPTFVLSGEQFF

SEQ ID NO: 617369 - protein, 15 aa, Homo sapiens
  CDR3 for alpha chain variable domain of TCR clone 308685 (TRAV35, TRAJ58)
CAGRRQETCGSRLTF

SEQ ID NO: 617370 - protein, 16 aa, Homo sapiens
  CDR3 for beta chain variable domain of TCR clone 308685 (TRBV2, TRBJ2-1)
CASSVGGSLSYNEQFF

SEQ ID NO: 617371 - protein, 15 aa, Homo sapiens
  CDR3 for alpha chain variable domain of TCR clone 308686 (TRAV3, TRAJ22)
CAVRDRGGSARQLTF

SEQ ID NO: 617372 - protein, 13 aa, Homo sapiens
  CDR3 for beta chain variable domain of TCR clone 308686 (TRBV24-1, TRBJ2-2)
CATTATRTGELFF

SEQ ID NO: 617373 - protein, 18 aa, Homo sapiens
  CDR3 for alpha chain variable domain of TCR clone 308687 (TRAV12-3, TRAJ52)
CAMSVGGAGGTSYGKLTF

SEQ ID NO: 617374 - protein, 17 aa, Homo sapiens
  CDR3 for beta chain variable domain of TCR clone 308687 (TRBV13, TRBJ2-3)
CASSLSRVAGGRNTQYV

SEQ ID NO: 617375 - protein, 17 aa, Homo sapiens
  CDR3 for alpha chain variable domain of TCR clone 308688 (TRAV4, TRAJ13)
YLVGVQGSSGGYQKVTF

SEQ ID NO: 617376 - protein, 18 aa, Homo sapiens
  CDR3 for beta chain variable domain of TCR clone 308688 (TRBV15, TRBJ2-3)
CATSRDGARSWDTDTQYF

SEQ ID NO: 617377 - protein, 13 aa, Homo sapiens
  CDR3 for alpha chain variable domain of TCR clone 308689 (TRAV16, TRAJ58)
CALSIPSGSRLTF

SEQ ID NO: 617378 - protein, 15 aa, Homo sapiens
  CDR3 for beta chain variable domain of TCR clone 308689 (TRBV7-3, TRBJ1-1)
CASSLIRQGETEAFF

SEQ ID NO: 617379 - protein, 12 aa, Homo sapiens
  CDR3 for alpha chain variable domain of TCR clone 308690 (TRAV13-1, TRAJ21)
CAAKEGFNKFYF

SEQ ID NO: 617380 - protein, 14 aa, Homo sapiens
  CDR3 for beta chain variable domain of TCR clone 308690 (TRBV7-8, TRBJ2-3)
CASSSRDSTDTQYF

SEQ ID NO: 617381 - protein, 14 aa, Homo sapiens
  CDR3 for alpha chain variable domain of TCR clone 308691 (TRAV13-1, TRAJ9)
CAASALTGGFNTIF

SEQ ID NO: 617382 - protein, 13 aa, Homo sapiens
  CDR3 for beta chain variable domain of TCR clone 308691 (TRBV20-1, TRBJ1-1)
CSAGTVGSTEAFF

SEQ ID NO: 617383 - protein, 12 aa, Homo sapiens
  CDR3 for alpha chain variable domain of TCR clone 308692 (TRAV23/DV6, TRAJ30)
CAASKGDDKIII

SEQ ID NO: 617384 - protein, 18 aa, Homo sapiens
  CDR3 for beta chain variable domain of TCR clone 308692 (TRBV10-3, TRBJ2-3)
CAISESRVGPMRGDTQYF

SEQ ID NO: 617385 - protein, 14 aa, Homo sapiens
  CDR3 for alpha chain variable domain of TCR clone 308693 (TRAV8-3, TRAJ17)
CAVGASGGYNKLIF

SEQ ID NO: 617386 - protein, 15 aa, Homo sapiens
  CDR3 for beta chain variable domain of TCR clone 308693 (TRBV20-1, TRBJ2-7)
CSARDRVSGMDEQYF

SEQ ID NO: 617387 - protein, 20 aa, Homo sapiens
  CDR3 for alpha chain variable domain of TCR clone 308694 (TRAV12-2, TRAJ52)
SPVIQPPARAGGTSYGKLTF

SEQ ID NO: 617388 - protein, 11 aa, Homo sapiens
  CDR3 for beta chain variable domain of TCR clone 308694 (TRBV28, TRBJ2-3)
CASSSDPPQYF

SEQ ID NO: 617389 - protein, 14 aa, Homo sapiens
  CDR3 for alpha chain variable domain of TCR clone 308695 (TRAV1-2, TRAJ12)
CAVSGTASSYKLIF

SEQ ID NO: 617390 - protein, 15 aa, Homo sapiens
  CDR3 for beta chain variable domain of TCR clone 308695 (TRBV2, TRBJ2-4)
CASSGTNLAKNIQYF

SEQ ID NO: 617391 - protein, 15 aa, Homo sapiens
  CDR3 for alpha chain variable domain of TCR clone 308696 (TRAV9-2, TRAJ20)
CALSDSFSNDYKLSF

SEQ ID NO: 617392 - protein, 14 aa, Homo sapiens
  CDR3 for beta chain variable domain of TCR clone 308696 (TRBV7-8, TRBJ2-3)
CASSFKSSTDTQYF

SEQ ID NO: 617393 - protein, 15 aa, Homo sapiens
  CDR3 for alpha chain variable domain of TCR clone 308697 (TRAV26-1, TRAJ22)
CIVRLSFWSCKATDL

SEQ ID NO: 617394 - protein, 13 aa, Homo sapiens
  CDR3 for beta chain variable domain of TCR clone 308697 (TRBV7-9, TRBJ1-2)
CASSLKQNYGYTF

SEQ ID NO: 617395 - protein, 14 aa, Homo sapiens
  CDR3 for alpha chain variable domain of TCR clone 308698 (TRAV12-2, TRAJ13)
CAVKKTGGYQKVTF

SEQ ID NO: 617396 - protein, 16 aa, Homo sapiens
  CDR3 for beta chain variable domain of TCR clone 308698 (TRBV2, TRBJ2-1)
CASWSPAGGKYNEQFF

SEQ ID NO: 617397 - protein, 11 aa, Homo sapiens
  CDR3 for alpha chain variable domain of TCR clone 308699 (TRAV12-3, TRAJ49)
CAANTANQFYF

SEQ ID NO: 617398 - protein, 12 aa, Homo sapiens
  CDR3 for beta chain variable domain of TCR clone 308699 (TRBV6-3, TRBJ2-7)
CASSEPGFEQYF

SEQ ID NO: 617399 - protein, 10 aa, Homo sapiens
  CDR3 for alpha chain variable domain of TCR clone 308700 (TRAV1-2, TRAJ31)
CAFFDARLMF

SEQ ID NO: 617400 - protein, 18 aa, Homo sapiens
  CDR3 for beta chain variable domain of TCR clone 308700 (TRBV7-3, TRBJ2-1)
CASSLTLASGRAMVSSSS

SEQ ID NO: 617401 - protein, 14 aa, Homo sapiens
  CDR3 for alpha chain variable domain of TCR clone 308701 (TRAV9-2, TRAJ39)
CALYIYNAGNMLTF

SEQ ID NO: 617402 - protein, 13 aa, Homo sapiens
  CDR3 for beta chain variable domain of TCR clone 308701 (TRBV27, TRBJ1-1)
CASSLSIGAEAFF

SEQ ID NO: 617403 - protein, 15 aa, Homo sapiens
  CDR3 for alpha chain variable domain of TCR clone 308702 (TRAV21, TRAJ45)
CAVSYSGGGADGLTF

SEQ ID NO: 617404 - protein, 14 aa, Homo sapiens
  CDR3 for beta chain variable domain of TCR clone 308702 (TRBV4-1, TRBJ2-2)
CASSQAVNTGELFF

SEQ ID NO: 617405 - protein, 13 aa, Homo sapiens
  CDR3 for alpha chain variable domain of TCR clone 308703 (TRAV21, TRAJ57)
CAVTQGGSGKLVF

SEQ ID NO: 617406 - protein, 11 aa, Homo sapiens
  CDR3 for beta chain variable domain of TCR clone 308703 (TRBV11-2, TRBJ2-2)
CASSLPVELFF

SEQ ID NO: 617407 - protein, 16 aa, Homo sapiens
  CDR3 for alpha chain variable domain of TCR clone 308704 (TRAV30, TRAJ24)
CGTEIVDADSWGKSQF

SEQ ID NO: 617408 - protein, 18 aa, Homo sapiens
  CDR3 for beta chain variable domain of TCR clone 308704 (TRBV11-2, TRBJ2-3)
CASSLGGASRGAPNTQYF

SEQ ID NO: 617409 - protein, 15 aa, Homo sapiens
  CDR3 for alpha chain variable domain of TCR clone 308705 (TRAV8-3, TRAJ15)
CAVGAANQAGTALIF

SEQ ID NO: 617410 - protein, 14 aa, Homo sapiens
  CDR3 for beta chain variable domain of TCR clone 308705 (TRBV20-1, TRBJ2-1)
CSPNDEASYNKQFF

SEQ ID NO: 617411 - protein, 10 aa, Homo sapiens
  CDR3 for alpha chain variable domain of TCR clone 308706 (TRAV16, TRAJ22)
SAMYLRQLTF

SEQ ID NO: 617412 - protein, 17 aa, Homo sapiens
  CDR3 for beta chain variable domain of TCR clone 308706 (TRBV7-9, TRBJ1-6)
CARAPRDVEIHPSTLGT

SEQ ID NO: 617413 - protein, 12 aa, Homo sapiens
  CDR3 for alpha chain variable domain of TCR clone 308707 (TRAV17, TRAJ4)
CTTDGGYNKLIF

SEQ ID NO: 617414 - protein, 13 aa, Homo sapiens
  CDR3 for beta chain variable domain of TCR clone 308707 (TRBV29-1, TRBJ2-2)
CSTTGVNTGELFF

SEQ ID NO: 617415 - protein, 13 aa, Homo sapiens
  CDR3 for alpha chain variable domain of TCR clone 308708 (TRAV2, TRAJ21)
CAVEDLNFIKFYF

SEQ ID NO: 617416 - protein, 15 aa, Homo sapiens
  CDR3 for beta chain variable domain of TCR clone 308708 (TRBV28, TRBJ2-5)
CASSPGQGGIETQYF

SEQ ID NO: 617417 - protein, 16 aa, Homo sapiens
  CDR3 for alpha chain variable domain of TCR clone 308709 (TRAV12-3, TRAJ53)
CAMSPGSGGSNYKLTF

SEQ ID NO: 617418 - protein, 12 aa, Homo sapiens
  CDR3 for beta chain variable domain of TCR clone 308709 (TRBV12-4, TRBJ2-1)
CASSLQGSEQFF

SEQ ID NO: 617419 - protein, 17 aa, Homo sapiens
  CDR3 for alpha chain variable domain of TCR clone 308710 (TRAV12-3, TRAJ26)
CAMSGGRWVNYGQNFVF

SEQ ID NO: 617420 - protein, 12 aa, Homo sapiens
  CDR3 for beta chain variable domain of TCR clone 308710 (TRBV19, TRBJ1-1)
CASSTTGIEAFF

SEQ ID NO: 617421 - protein, 10 aa, Homo sapiens
  CDR3 for alpha chain variable domain of TCR clone 308711 (TRAV1-2, TRAJ18)
CAVRGEAQPW

SEQ ID NO: 617422 - protein, 14 aa, Homo sapiens
  CDR3 for beta chain variable domain of TCR clone 308711 (TRBV7-2, TRBJ2-7)
CASSFEGQDHEQYF

SEQ ID NO: 617423 - protein, 15 aa, Homo sapiens
  CDR3 for alpha chain variable domain of TCR clone 308712 (TRAV3, TRAJ5)
CAVRDLDPGRRALTF

SEQ ID NO: 617424 - protein, 13 aa, Homo sapiens
  CDR3 for beta chain variable domain of TCR clone 308712 (TRBV12-4, TRBJ2-7)
CASSPAETYEQYF

SEQ ID NO: 617425 - protein, 13 aa, Homo sapiens
  CDR3 for alpha chain variable domain of TCR clone 308713 (TRAV35, TRAJ42)
CAGFPGSQGNLIF

SEQ ID NO: 617426 - protein, 14 aa, Homo sapiens
  CDR3 for beta chain variable domain of TCR clone 308713 (TRBV12-4, TRBJ1-6)
CASNLQGKGSPLHF

SEQ ID NO: 617427 - protein, 12 aa, Homo sapiens
  CDR3 for alpha chain variable domain of TCR clone 308714 (TRAV21, TRAJ31)
WAVGGNNARLMF

SEQ ID NO: 617428 - protein, 16 aa, Homo sapiens
  CDR3 for beta chain variable domain of TCR clone 308714 (TRBV27, TRBJ2-5)
CASSYGPGGQKETQYF

SEQ ID NO: 617429 - protein, 14 aa, Homo sapiens
  CDR3 for alpha chain variable domain of TCR clone 308715 (TRAV1-2, TRAJ16)
CAVNRVSDGQKLLF

SEQ ID NO: 617430 - protein, 12 aa, Homo sapiens
  CDR3 for beta chain variable domain of TCR clone 308715 (TRBV28, TRBJ2-6)
CAIQAGANVLTF

SEQ ID NO: 617431 - protein, 15 aa, Homo sapiens
  CDR3 for alpha chain variable domain of TCR clone 308716 (TRAV27, TRAJ38)
CAARRNAGNDRKLIW

SEQ ID NO: 617432 - protein, 14 aa, Homo sapiens
  CDR3 for beta chain variable domain of TCR clone 308716 (TRBV25-1, TRBJ1-1)
CASTHLGGNTEAFF

SEQ ID NO: 617433 - protein, 12 aa, Homo sapiens
  CDR3 for alpha chain variable domain of TCR clone 308717 (TRAV12-3, TRAJ17)
CAMTLTGNKLNF

SEQ ID NO: 617434 - protein, 20 aa, Homo sapiens
  CDR3 for beta chain variable domain of TCR clone 308717 (TRBV7-8, TRBJ2-2)
CASSHLFPGPTIHITGELFF

SEQ ID NO: 617435 - protein, 14 aa, Homo sapiens
  CDR3 for alpha chain variable domain of TCR clone 308718 (TRAV8-6, TRAJ12)
CAVMAADSSYQLIF

SEQ ID NO: 617436 - protein, 15 aa, Homo sapiens
  CDR3 for beta chain variable domain of TCR clone 308718 (TRBV5-1, TRBJ2-5)
CASSLGLAEQETQYF

SEQ ID NO: 617437 - protein, 13 aa, Homo sapiens
  CDR3 for alpha chain variable domain of TCR clone 308719 (TRAV12-2, TRAJ34)
CAVRGYNTDKLIF

SEQ ID NO: 617438 - protein, 14 aa, Homo sapiens
  CDR3 for beta chain variable domain of TCR clone 308719 (TRBV7-2, TRBJ2-5)
CASSFTQGQETQYF

SEQ ID NO: 617439 - protein, 15 aa, Homo sapiens
  CDR3 for alpha chain variable domain of TCR clone 308720 (TRAV8-3, TRAJ45)
CASSYSGGGADGLTF

SEQ ID NO: 617440 - protein, 16 aa, Homo sapiens
  CDR3 for beta chain variable domain of TCR clone 308720 (TRBV28, TRBJ2-1)
CASSLWGRTSGTLQFF

SEQ ID NO: 617441 - protein, 14 aa, Homo sapiens
  CDR3 for alpha chain variable domain of TCR clone 308721 (TRAV1-2, TRAJ15)
CAVRDRQAGTALIF

SEQ ID NO: 617442 - protein, 12 aa, Homo sapiens
  CDR3 for beta chain variable domain of TCR clone 308721 (TRBV7-9, TRBJ1-5)
CASSPQGQPQHF

SEQ ID NO: 617443 - protein, 10 aa, Homo sapiens
  CDR3 for alpha chain variable domain of TCR clone 308722 (TRAV25, TRAJ20)
CAVNDYKLSF

SEQ ID NO: 617444 - protein, 13 aa, Homo sapiens
  CDR3 for beta chain variable domain of TCR clone 308722 (TRBV6-1, TRBJ2-5)
CASTGPRLGTQYF

SEQ ID NO: 617445 - protein, 14 aa, Homo sapiens
  CDR3 for alpha chain variable domain of TCR clone 308723 (TRAV17, TRAJ57)
CATDPQGGSEKLVF

SEQ ID NO: 617446 - protein, 12 aa, Homo sapiens
  CDR3 for beta chain variable domain of TCR clone 308723 (TRBV11-3, TRBJ2-2)
CASSLGGGELFF

SEQ ID NO: 617447 - protein, 14 aa, Homo sapiens
  CDR3 for alpha chain variable domain of TCR clone 308724 (TRAV17, TRAJ22)
CATSPSGSARQLTF

SEQ ID NO: 617448 - protein, 14 aa, Homo sapiens
  CDR3 for beta chain variable domain of TCR clone 308724 (TRBV28, TRBJ2-5)
CASRGSSFWETQYF

SEQ ID NO: 617449 - protein, 17 aa, Homo sapiens
  CDR3 for alpha chain variable domain of TCR clone 308725 (TRAV13-1, TRAJ52)
CAAGRNAGGTSYGKLTF

SEQ ID NO: 617450 - protein, 13 aa, Homo sapiens
  CDR3 for beta chain variable domain of TCR clone 308725 (TRBV7-2, TRBJ1-1)
CASNLKGSKVAFF

SEQ ID NO: 617451 - protein, 15 aa, Homo sapiens
  CDR3 for alpha chain variable domain of TCR clone 308726 (TRAV8-6, TRAJ23)
CAVREFYNQGGKLIF

SEQ ID NO: 617452 - protein, 15 aa, Homo sapiens
  CDR3 for beta chain variable domain of TCR clone 308726 (TRBV20-1, TRBJ2-1)
CSAITGTSGSNEQFF

SEQ ID NO: 617453 - protein, 15 aa, Homo sapiens
  CDR3 for alpha chain variable domain of TCR clone 308727 (TRAV26-2, TRAJ50)
CILRDEETSYDKGIF

SEQ ID NO: 617454 - protein, 14 aa, Homo sapiens
  CDR3 for beta chain variable domain of TCR clone 308727 (TRBV23-1, TRBJ2-7)
CASSPTVTSSTSGR

SEQ ID NO: 617455 - protein, 13 aa, Homo sapiens
  CDR3 for alpha chain variable domain of TCR clone 308728 (TRAV27, TRAJ41)
CAGEGNSGYALNF

SEQ ID NO: 617456 - protein, 14 aa, Homo sapiens
  CDR3 for beta chain variable domain of TCR clone 308728 (TRBV7-2, TRBJ1-1)
CASSFLTATTEAFF

SEQ ID NO: 617457 - protein, 14 aa, Homo sapiens
  CDR3 for alpha chain variable domain of TCR clone 308729 (TRAV16, TRAJ33)
CALSAMASNYQLIW

SEQ ID NO: 617458 - protein, 15 aa, Homo sapiens
  CDR3 for beta chain variable domain of TCR clone 308729 (TRBV28, TRBJ2-7)
CASSLEAYPIYEQYF

SEQ ID NO: 617459 - protein, 14 aa, Homo sapiens
  CDR3 for alpha chain variable domain of TCR clone 308730 (TRAV1-2, TRAJ16)
CAVNRFSDGQKLLF

SEQ ID NO: 617460 - protein, 14 aa, Homo sapiens
  CDR3 for beta chain variable domain of TCR clone 308730 (TRBV7-9, TRBJ2-7)
CASSFAGASSTSGR

SEQ ID NO: 617461 - protein, 15 aa, Homo sapiens
  CDR3 for alpha chain variable domain of TCR clone 308731 (TRAV35, TRAJ40)
CAGQLGTSGTYKYIF

SEQ ID NO: 617462 - protein, 17 aa, Homo sapiens
  CDR3 for beta chain variable domain of TCR clone 308731 (TRBV7-2, TRBJ2-5)
CASSSGLAGDGQETQYF

SEQ ID NO: 617463 - protein, 13 aa, Homo sapiens
  CDR3 for alpha chain variable domain of TCR clone 308732 (TRAV36/DV7, TRAJ57)
CAVGEGGSEKLVF

SEQ ID NO: 617464 - protein, 13 aa, Homo sapiens
  CDR3 for beta chain variable domain of TCR clone 308732 (TRBV7-9, TRBJ2-3)
CASSPGSTDTQYF

SEQ ID NO: 617465 - protein, 12 aa, Homo sapiens
  CDR3 for alpha chain variable domain of TCR clone 308733 (TRAV26-1, TRAJ26)
CIAFIYGQNFVF

SEQ ID NO: 617466 - protein, 14 aa, Homo sapiens
  CDR3 for beta chain variable domain of TCR clone 308733 (TRBV7-2, TRBJ2-7)
CASSPKTSFYEQYF

SEQ ID NO: 617467 - protein, 14 aa, Homo sapiens
  CDR3 for alpha chain variable domain of TCR clone 308734 (TRAV23/DV6, TRAJ22)
CAAIVSGSARQLTF

SEQ ID NO: 617468 - protein, 16 aa, Homo sapiens
  CDR3 for beta chain variable domain of TCR clone 308734 (TRBV19, TRBJ2-2)
CASSFPGQGLAGELFF

SEQ ID NO: 617469 - protein, 14 aa, Homo sapiens
  CDR3 for alpha chain variable domain of TCR clone 308735 (TRAV9-2, TRAJ28)
CASYSGAGSYQLTF

SEQ ID NO: 617470 - protein, 11 aa, Homo sapiens
  CDR3 for beta chain variable domain of TCR clone 308735 (TRBV29-1, TRBJ2-5)
CSEDRTGTQYF

SEQ ID NO: 617471 - protein, 12 aa, Homo sapiens
  CDR3 for alpha chain variable domain of TCR clone 308736 (TRAV35, TRAJ39)
LDPNNAGNMLTF

SEQ ID NO: 617472 - protein, 16 aa, Homo sapiens
  CDR3 for beta chain variable domain of TCR clone 308736 (TRBV2, TRBJ2-3)
SASSTSVEGVTDTQYF

SEQ ID NO: 617473 - protein, 13 aa, Homo sapiens
  CDR3 for alpha chain variable domain of TCR clone 308737 (TRAV20, TRAJ37)
CAGCSSNTGKLIF

SEQ ID NO: 617474 - protein, 13 aa, Homo sapiens
  CDR3 for beta chain variable domain of TCR clone 308737 (TRBV7-3, TRBJ1-2)
CASSLKRGYGYTF

SEQ ID NO: 617475 - protein, 12 aa, Homo sapiens
  CDR3 for alpha chain variable domain of TCR clone 308738 (TRAV13-1, TRAJ21)
CPAKEGFNKFYF

SEQ ID NO: 617476 - protein, 14 aa, Homo sapiens
  CDR3 for beta chain variable domain of TCR clone 308738 (TRBV23-1, TRBJ2-5)
CASSFLRSQETQYF

SEQ ID NO: 617477 - protein, 14 aa, Homo sapiens
  CDR3 for alpha chain variable domain of TCR clone 308739 (TRAV12-3, TRAJ47)
CAMSVMEYGNKLVF

SEQ ID NO: 617478 - protein, 13 aa, Homo sapiens
  CDR3 for beta chain variable domain of TCR clone 308739 (TRBV12-4, TRBJ2-5)
CASSPGTEETQYF

SEQ ID NO: 617479 - protein, 10 aa, Homo sapiens
  CDR3 for alpha chain variable domain of TCR clone 308740 (TRAV23/DV6, TRAJ31)
YARGGARLMF

SEQ ID NO: 617480 - protein, 14 aa, Homo sapiens
  CDR3 for beta chain variable domain of TCR clone 308740 (TRBV7-8, TRBJ1-2)
CASSPDSLSYGYTF

SEQ ID NO: 617481 - protein, 17 aa, Homo sapiens
  CDR3 for alpha chain variable domain of TCR clone 308741 (TRAV26-2, TRAJ42)
CNLRDDGYGGSQGNLIF

SEQ ID NO: 617482 - protein, 16 aa, Homo sapiens
  CDR3 for beta chain variable domain of TCR clone 308741 (TRBV12-4, TRBJ2-7)
CASSLIGGTGTYEQYF

SEQ ID NO: 617483 - protein, 16 aa, Homo sapiens
  CDR3 for alpha chain variable domain of TCR clone 308742 (TRAV17, TRAJ35)
CVTAEGGIGFGNVLHC

SEQ ID NO: 617484 - protein, 19 aa, Homo sapiens
  CDR3 for beta chain variable domain of TCR clone 308742 (TRBV19, TRBJ2-5)
CASSIGQVTDFFLGETQYF

SEQ ID NO: 617485 - protein, 14 aa, Homo sapiens
  CDR3 for alpha chain variable domain of TCR clone 308743 (TRAV2, TRAJ37)
CAVDFTSNTGKLIF

SEQ ID NO: 617486 - protein, 14 aa, Homo sapiens
  CDR3 for beta chain variable domain of TCR clone 308743 (TRBV7-2, TRBJ2-7)
CASSPKTSIYEQYF

SEQ ID NO: 617487 - protein, 12 aa, Homo sapiens
  CDR3 for alpha chain variable domain of TCR clone 308744 (TRAV12-3, TRAJ32)
CAGGGATNKLIF

SEQ ID NO: 617488 - protein, 17 aa, Homo sapiens
  CDR3 for beta chain variable domain of TCR clone 308744 (TRBV28, TRBJ2-5)
CASSTPEGDALQETQNF

SEQ ID NO: 617489 - protein, 15 aa, Homo sapiens
  CDR3 for alpha chain variable domain of TCR clone 308745 (TRAV20, TRAJ6)
CAVWLQSGGSYIPTF

SEQ ID NO: 617490 - protein, 14 aa, Homo sapiens
  CDR3 for beta chain variable domain of TCR clone 308745 (TRBV12-4, TRBJ2-7)
CASSASGGWYEQYF

SEQ ID NO: 617491 - protein, 14 aa, Homo sapiens
  CDR3 for alpha chain variable domain of TCR clone 308746 (TRAV1-2, TRAJ16)
RSVNRFSDGQKLLF

SEQ ID NO: 617492 - protein, 19 aa, Homo sapiens
  CDR3 for beta chain variable domain of TCR clone 308746 (TRBV25-1, TRBJ2-2)
CAILVYRVDRGRKTGELFF

SEQ ID NO: 617493 - protein, 17 aa, Homo sapiens
  CDR3 for alpha chain variable domain of TCR clone 308747 (TRAV26-2, TRAJ42)
CILRDVGYGGSQGNHIF

SEQ ID NO: 617494 - protein, 14 aa, Homo sapiens
  CDR3 for beta chain variable domain of TCR clone 308747 (TRBV19, TRBJ2-3)
CASSEGPRTDTQYF

SEQ ID NO: 617495 - protein, 15 aa, Homo sapiens
  CDR3 for alpha chain variable domain of TCR clone 308748 (TRAV3, TRAJ20)
CAVRDIELSDYKLSF

SEQ ID NO: 617496 - protein, 15 aa, Homo sapiens
  CDR3 for beta chain variable domain of TCR clone 308748 (TRBV7-9, TRBJ1-6)
CASSSPGRGNSPLLF

SEQ ID NO: 617497 - protein, 14 aa, Homo sapiens
  CDR3 for alpha chain variable domain of TCR clone 308749 (TRAV1-1, TRAJ23)
CAVSIYNQGGKLIF

SEQ ID NO: 617498 - protein, 14 aa, Homo sapiens
  CDR3 for beta chain variable domain of TCR clone 308749 (TRBV27, TRBJ2-2)
CASRPGVNTGELFF

SEQ ID NO: 617499 - protein, 14 aa, Homo sapiens
  CDR3 for alpha chain variable domain of TCR clone 308750 (TRAV9-2, TRAJ39)
CALYIYNAGHMLTF

SEQ ID NO: 617500 - protein, 15 aa, Homo sapiens
  CDR3 for beta chain variable domain of TCR clone 308750 (TRBV5-5, TRBJ1-5)
CASSSTPGSNQPQHF

SEQ ID NO: 617501 - protein, 17 aa, Homo sapiens
  CDR3 for alpha chain variable domain of TCR clone 308751 (TRAV21, TRAJ18)
CAVRHQGRGSTLGRLYF

SEQ ID NO: 617502 - protein, 11 aa, Homo sapiens
  CDR3 for beta chain variable domain of TCR clone 308751 (TRBV11-2, TRBJ2-2)
CASSLPGELFF

SEQ ID NO: 617503 - protein, 14 aa, Homo sapiens
  CDR3 for alpha chain variable domain of TCR clone 308752 (TRAV38-1, TRAJ45)
CTYYSGGGADGLTF

SEQ ID NO: 617504 - protein, 20 aa, Homo sapiens
  CDR3 for beta chain variable domain of TCR clone 308752 (TRBV28, TRBJ2-1)
CASTPIGRSPGLAGGNEQFF

SEQ ID NO: 617505 - protein, 14 aa, Homo sapiens
  CDR3 for alpha chain variable domain of TCR clone 308753 (TRAV12-3, TRAJ10)
CAIILTGGGNKLTF

SEQ ID NO: 617506 - protein, 15 aa, Homo sapiens
  CDR3 for beta chain variable domain of TCR clone 308753 (TRBV5-8, TRBJ2-2)
CASSLDRGATGELFF

SEQ ID NO: 617507 - protein, 15 aa, Homo sapiens
  CDR3 for alpha chain variable domain of TCR clone 308754 (TRAV12-3, TRAJ27)
CAMRAYNTTAGKSTF

SEQ ID NO: 617508 - protein, 13 aa, Homo sapiens
  CDR3 for beta chain variable domain of TCR clone 308754 (TRBV20-1, TRBJ1-5)
CSASPRANQPQHF

SEQ ID NO: 617509 - protein, 12 aa, Homo sapiens
  CDR3 for alpha chain variable domain of TCR clone 308755 (TRAV26-1, TRAJ38)
CIADNAGNNHIQ

SEQ ID NO: 617510 - protein, 13 aa, Homo sapiens
  CDR3 for beta chain variable domain of TCR clone 308755 (TRBV20-1, TRBJ1-1)
CSARCGGNTEAFF

SEQ ID NO: 617511 - protein, 14 aa, Homo sapiens
  CDR3 for alpha chain variable domain of TCR clone 308756 (TRAV23/DV6, TRAJ13)
CAAMYSGGYQKVTF

SEQ ID NO: 617512 - protein, 13 aa, Homo sapiens
  CDR3 for beta chain variable domain of TCR clone 308756 (TRBV7-9, TRBJ1-6)
CASSLASLSPLHF

SEQ ID NO: 617513 - protein, 13 aa, Homo sapiens
  CDR3 for alpha chain variable domain of TCR clone 308757 (TRAV1-2, TRAJ9)
CAALNTGGFKTIF

SEQ ID NO: 617514 - protein, 13 aa, Homo sapiens
  CDR3 for beta chain variable domain of TCR clone 308757 (TRBV18, TRBJ1-1)
CASSPGRNTEAFF

SEQ ID NO: 617515 - protein, 14 aa, Homo sapiens
  CDR3 for alpha chain variable domain of TCR clone 308758 (TRAV12-1, TRAJ17)
CTVNYKAAGNKLTF

SEQ ID NO: 617516 - protein, 17 aa, Homo sapiens
  CDR3 for beta chain variable domain of TCR clone 308758 (TRBV20-1, TRBJ2-1)
CSASSSGLAGSYNEQFF

SEQ ID NO: 617517 - protein, 16 aa, Homo sapiens
  CDR3 for alpha chain variable domain of TCR clone 308759 (TRAV17, TRAJ28)
CASYAYSGAGSYQLTF

SEQ ID NO: 617518 - protein, 15 aa, Homo sapiens
  CDR3 for beta chain variable domain of TCR clone 308759 (TRBV4-2, TRBJ2-1)
CARSPSGGLYNEQFF

SEQ ID NO: 617519 - protein, 15 aa, Homo sapiens
  CDR3 for alpha chain variable domain of TCR clone 308760 (TRAV26-2, TRAJ28)
CILVESGAGSYQLTF

SEQ ID NO: 617520 - protein, 11 aa, Homo sapiens
  CDR3 for beta chain variable domain of TCR clone 308760 (TRBV25-1, TRBJ2-7)
CASSPSYEQYF

SEQ ID NO: 617521 - protein, 12 aa, Homo sapiens
  CDR3 for alpha chain variable domain of TCR clone 308761 (TRAV12-3, TRAJ17)
CAMTLTGTKLTF

SEQ ID NO: 617522 - protein, 15 aa, Homo sapiens
  CDR3 for beta chain variable domain of TCR clone 308761 (TRBV20-1, TRBJ2-7)
CSARDRVSGMDEQYC

SEQ ID NO: 617523 - protein, 11 aa, Homo sapiens
  CDR3 for alpha chain variable domain of TCR clone 308762 (TRAV17, TRAJ9)
CATTGGFKTIF

SEQ ID NO: 617524 - protein, 11 aa, Homo sapiens
  CDR3 for beta chain variable domain of TCR clone 308762 (TRBV29-1, TRBJ2-5)
CSEDRTGNQYF

SEQ ID NO: 617525 - protein, 16 aa, Homo sapiens
  CDR3 for alpha chain variable domain of TCR clone 308763 (TRAV3, TRAJ37)
CAVRPHGSGNTGKLIF

SEQ ID NO: 617526 - protein, 11 aa, Homo sapiens
  CDR3 for beta chain variable domain of TCR clone 308763 (TRBV10-3, TRBJ2-7)
CAISEGVEQYF

SEQ ID NO: 617527 - protein, 18 aa, Homo sapiens
  CDR3 for alpha chain variable domain of TCR clone 308764 (TRAV21, TRAJ52)
CAVRPSPAGGTSYGKLTF

SEQ ID NO: 617528 - protein, 14 aa, Homo sapiens
  CDR3 for beta chain variable domain of TCR clone 308764 (TRBV6-6, TRBJ2-7)
CASSDSGAGCEQYF

SEQ ID NO: 617529 - protein, 13 aa, Homo sapiens
  CDR3 for alpha chain variable domain of TCR clone 308765 (TRAV21, TRAJ27)
CAARPGNAGKSTF

SEQ ID NO: 617530 - protein, 16 aa, Homo sapiens
  CDR3 for beta chain variable domain of TCR clone 308765 (TRBV5-4, TRBJ2-1)
CASSLVGSGQDNEQFF

SEQ ID NO: 617531 - protein, 16 aa, Homo sapiens
  CDR3 for alpha chain variable domain of TCR clone 308766 (TRAV3, TRAJ10)
CAVRDMRAGGGNKLTF

SEQ ID NO: 617532 - protein, 17 aa, Homo sapiens
  CDR3 for beta chain variable domain of TCR clone 308766 (TRBV13, TRBJ2-3)
CASSLSRVAGVRNTQYF

SEQ ID NO: 617533 - protein, 13 aa, Homo sapiens
  CDR3 for alpha chain variable domain of TCR clone 308767 (TRAV36/DV7, TRAJ7)
CAGPRYGNNRLAF

SEQ ID NO: 617534 - protein, 15 aa, Homo sapiens
  CDR3 for beta chain variable domain of TCR clone 308767 (TRBV11-3, TRBJ2-7)
CASSPGPASSYEQYF

SEQ ID NO: 617535 - protein, 12 aa, Homo sapiens
  CDR3 for alpha chain variable domain of TCR clone 308768 (TRAV12-3, TRAJ17)
CAMTLTGNKLTF

SEQ ID NO: 617536 - protein, 13 aa, Homo sapiens
  CDR3 for beta chain variable domain of TCR clone 308768 (TRBV28, TRBJ1-2)
CASRQQGDYGYTF

SEQ ID NO: 617537 - protein, 15 aa, Homo sapiens
  CDR3 for alpha chain variable domain of TCR clone 308769 (TRAV3, TRAJ22)
CAVRDRRGSARQLTF

SEQ ID NO: 617538 - protein, 15 aa, Homo sapiens
  CDR3 for beta chain variable domain of TCR clone 308769 (TRBV7-3, TRBJ2-1)
CASSPTGGGEVEQFF

SEQ ID NO: 617539 - protein, 13 aa, Homo sapiens
  CDR3 for alpha chain variable domain of TCR clone 308770 (TRAV12-3, TRAJ7)
CAMSASGNNRLAF

SEQ ID NO: 617540 - protein, 14 aa, Homo sapiens
  CDR3 for beta chain variable domain of TCR clone 308770 (TRBV13, TRBJ2-5)
CDSSLGPRGETQYF

SEQ ID NO: 617541 - protein, 14 aa, Homo sapiens
  CDR3 for alpha chain variable domain of TCR clone 308771 (TRAV8-1, TRAJ39)
CAVNAWNAGNMLTF

SEQ ID NO: 617542 - protein, 15 aa, Homo sapiens
  CDR3 for beta chain variable domain of TCR clone 308771 (TRBV19, TRBJ2-1)
CASSPGPSSYNEQFF

SEQ ID NO: 617543 - protein, 17 aa, Homo sapiens
  CDR3 for alpha chain variable domain of TCR clone 308772 (TRAV3, TRAJ6)
CAVRDGPRAGGSYIPTF

SEQ ID NO: 617544 - protein, 17 aa, Homo sapiens
  CDR3 for beta chain variable domain of TCR clone 308772 (TRBV5-1, TRBJ2-2)
CASSLAGLSGGTGELFF

SEQ ID NO: 617545 - protein, 15 aa, Homo sapiens
  CDR3 for alpha chain variable domain of TCR clone 308773 (TRAV2, TRAJ9)
CAVEDRGTGGFKTIF

SEQ ID NO: 617546 - protein, 16 aa, Homo sapiens
  CDR3 for beta chain variable domain of TCR clone 308773 (TRBV20-1, TRBJ1-4)
CSARPYGGELNEKLFF

SEQ ID NO: 617547 - protein, 14 aa, Homo sapiens
  CDR3 for alpha chain variable domain of TCR clone 308774 (TRAV13-1, TRAJ4)
CAVTLPSGYNKLIF

SEQ ID NO: 617548 - protein, 14 aa, Homo sapiens
  CDR3 for beta chain variable domain of TCR clone 308774 (TRBV19, TRBJ2-1)
CASPTFVLSGEQFF

SEQ ID NO: 617549 - protein, 17 aa, Homo sapiens
  CDR3 for alpha chain variable domain of TCR clone 308775 (TRAV3, TRAJ6)
CAVRDGPRAGGSYIPTF

SEQ ID NO: 617550 - protein, 13 aa, Homo sapiens
  CDR3 for beta chain variable domain of TCR clone 308775 (TRBV4-1, TRBJ2-5)
CASSQGHRETQYF

SEQ ID NO: 617551 - protein, 14 aa, Homo sapiens
  CDR3 for alpha chain variable domain of TCR clone 308776 (TRAV12-1, TRAJ42)
CLVIYGGSQGNLIF

SEQ ID NO: 617552 - protein, 17 aa, Homo sapiens
  CDR3 for beta chain variable domain of TCR clone 308776 (TRBV3-1, TRBJ2-6)
CASSPNTGPAGANVLTF

SEQ ID NO: 617553 - protein, 13 aa, Homo sapiens
  CDR3 for alpha chain variable domain of TCR clone 308777 (TRAV17, TRAJ5)
CAPMDTGRRARTF

SEQ ID NO: 617554 - protein, 13 aa, Homo sapiens
  CDR3 for beta chain variable domain of TCR clone 308777 (TRBV7-9, TRBJ1-2)
CASSLKQNYGYTF

SEQ ID NO: 617555 - protein, 15 aa, Homo sapiens
  CDR3 for alpha chain variable domain of TCR clone 308778 (TRAV8-3, TRAJ45)
CASSYSGGGADGLTF

SEQ ID NO: 617556 - protein, 14 aa, Homo sapiens
  CDR3 for beta chain variable domain of TCR clone 308778 (TRBV12-5, TRBJ2-5)
CASDSRTHQETQYF

SEQ ID NO: 617557 - protein, 11 aa, Homo sapiens
  CDR3 for alpha chain variable domain of TCR clone 308779 (TRAV21, TRAJ39)
LLVNAGNMLTF

SEQ ID NO: 617558 - protein, 14 aa, Homo sapiens
  CDR3 for beta chain variable domain of TCR clone 308779 (TRBV18, TRBJ2-5)
CASSPGVSQETQYF

SEQ ID NO: 617559 - protein, 14 aa, Homo sapiens
  CDR3 for alpha chain variable domain of TCR clone 308780 (TRAV16, TRAJ33)
CALSAMDSNYQLIW

SEQ ID NO: 617560 - protein, 14 aa, Homo sapiens
  CDR3 for beta chain variable domain of TCR clone 308780 (TRBV7-9, TRBJ2-1)
CASSLVVGADEQFF

SEQ ID NO: 617561 - protein, 10 aa, Homo sapiens
  CDR3 for alpha chain variable domain of TCR clone 308781 (TRAV13-1, TRAJ43)
CAASKNDMRF

SEQ ID NO: 617562 - protein, 15 aa, Homo sapiens
  CDR3 for beta chain variable domain of TCR clone 308781 (TRBV10-2, TRBJ2-6)
CASSEQGTGANVLTF

SEQ ID NO: 617563 - protein, 16 aa, Homo sapiens
  CDR3 for alpha chain variable domain of TCR clone 308782 (TRAV3, TRAJ37)
CAVRPHGSGNTGKLIF

SEQ ID NO: 617564 - protein, 15 aa, Homo sapiens
  CDR3 for beta chain variable domain of TCR clone 308782 (TRBV20-1, TRBJ2-1)
CSARGIGGTYNEQFF

SEQ ID NO: 617565 - protein, 13 aa, Homo sapiens
  CDR3 for alpha chain variable domain of TCR clone 308783 (TRAV21, TRAJ56)
CAVSTGANSKLTF

SEQ ID NO: 617566 - protein, 15 aa, Homo sapiens
  CDR3 for beta chain variable domain of TCR clone 308783 (TRBV4-1, TRBJ2-7)
CASSQNTGRLYEQYF

SEQ ID NO: 617567 - protein, 18 aa, Homo sapiens
  CDR3 for alpha chain variable domain of TCR clone 308784 (TRAV26-1, TRAJ23)
CIVRVGLEVWNPGGKLIF

SEQ ID NO: 617568 - protein, 16 aa, Homo sapiens
  CDR3 for beta chain variable domain of TCR clone 308784 (TRBV12-4, TRBJ2-5)
CASSFFVRGRQETQYF

SEQ ID NO: 617569 - protein, 15 aa, Homo sapiens
  CDR3 for alpha chain variable domain of TCR clone 308785 (TRAV12-3, TRAJ6)
CAMSATTGGSYIPTF

SEQ ID NO: 617570 - protein, 14 aa, Homo sapiens
  CDR3 for beta chain variable domain of TCR clone 308785 (TRBV11-3, TRBJ1-6)
CASSFSGGDSPLHF

SEQ ID NO: 617571 - protein, 13 aa, Homo sapiens
  CDR3 for alpha chain variable domain of TCR clone 308786 (TRAV17, TRAJ4)
CATKSGGYNKLIF

SEQ ID NO: 617572 - protein, 12 aa, Homo sapiens
  CDR3 for beta chain variable domain of TCR clone 308786 (TRBV11-2, TRBJ2-7)
CASSLPTYEQYF

SEQ ID NO: 617573 - protein, 14 aa, Homo sapiens
  CDR3 for alpha chain variable domain of TCR clone 308787 (TRAV21, TRAJ35)
CAVMPIGFGNGLHC

SEQ ID NO: 617574 - protein, 15 aa, Homo sapiens
  CDR3 for beta chain variable domain of TCR clone 308787 (TRBV19, TRBJ1-2)
CASSVGQVLNYGYTF

SEQ ID NO: 617575 - protein, 11 aa, Homo sapiens
  CDR3 for alpha chain variable domain of TCR clone 308788 (TRAV12-3, TRAJ27)
CAMANAGKSTF

SEQ ID NO: 617576 - protein, 12 aa, Homo sapiens
  CDR3 for beta chain variable domain of TCR clone 308788 (TRBV11-2, TRBJ2-2)
CVSSLGGGELFF

SEQ ID NO: 617577 - protein, 16 aa, Homo sapiens
  CDR3 for alpha chain variable domain of TCR clone 308789 (TRAV17, TRAJ36)
CATVSLNWGKQPLLWD

SEQ ID NO: 617578 - protein, 13 aa, Homo sapiens
  CDR3 for beta chain variable domain of TCR clone 308789 (TRBV4-1, TRBJ1-1)
CASSQLETGEAFF

SEQ ID NO: 617579 - protein, 12 aa, Homo sapiens
  CDR3 for alpha chain variable domain of TCR clone 308790 (TRAV13-1, TRAJ15)
CAASQAGTALSF

SEQ ID NO: 617580 - protein, 18 aa, Homo sapiens
  CDR3 for beta chain variable domain of TCR clone 308790 (TRBV7-9, TRBJ2-3)
CASSLPINGQISTDTQYF

SEQ ID NO: 617581 - protein, 10 aa, Homo sapiens
  CDR3 for alpha chain variable domain of TCR clone 308791 (TRAV23/DV6, TRAJ57)
CAASSTLSQG

SEQ ID NO: 617582 - protein, 15 aa, Homo sapiens
  CDR3 for beta chain variable domain of TCR clone 308791 (TRBV20-1, TRBJ2-7)
CSAESGTSGAYEQYF

SEQ ID NO: 617583 - protein, 17 aa, Homo sapiens
  CDR3 for alpha chain variable domain of TCR clone 308792 (TRAV3, TRAJ12)
CAVRDGGRLDSSYKFIF

SEQ ID NO: 617584 - protein, 12 aa, Homo sapiens
  CDR3 for beta chain variable domain of TCR clone 308792 (TRBV11-2, TRBJ2-2)
CASSLGGGELFF

SEQ ID NO: 617585 - protein, 12 aa, Homo sapiens
  CDR3 for alpha chain variable domain of TCR clone 308793 (TRAV29/DV5, TRAJ49)
CAATDTGNQFYF

SEQ ID NO: 617586 - protein, 19 aa, Homo sapiens
  CDR3 for beta chain variable domain of TCR clone 308793 (TRBV25-1, TRBJ2-2)
CAILVYRVDRGRKTWELFF

SEQ ID NO: 617587 - protein, 16 aa, Homo sapiens
  CDR3 for alpha chain variable domain of TCR clone 308794 (TRAV30, TRAJ24)
CGTEIVDADSWGKFQF

SEQ ID NO: 617588 - protein, 16 aa, Homo sapiens
  CDR3 for beta chain variable domain of TCR clone 308794 (TRBV7-3, TRBJ2-2)
CASSSKRGTLSGELFF

SEQ ID NO: 617589 - protein, 10 aa, Homo sapiens
  CDR3 for alpha chain variable domain of TCR clone 308795 (TRAV25, TRAJ17)
CQAAGNKLTF

SEQ ID NO: 617590 - protein, 13 aa, Homo sapiens
  CDR3 for beta chain variable domain of TCR clone 308795 (TRBV7-9, TRBJ1-2)
CASSLKQNYGYTF

SEQ ID NO: 617591 - protein, 14 aa, Homo sapiens
  CDR3 for alpha chain variable domain of TCR clone 308796 (TRAV12-1, TRAJ17)
CVVNYKAAGNKLTF

SEQ ID NO: 617592 - protein, 15 aa, Homo sapiens
  CDR3 for beta chain variable domain of TCR clone 308796 (TRBV7-9, TRBJ1-5)
CASSQGHQPNQPQHF

SEQ ID NO: 617593 - protein, 11 aa, Homo sapiens
  CDR3 for alpha chain variable domain of TCR clone 308797 (TRAV29/DV5, TRAJ49)
CAAVPGNQFYF

SEQ ID NO: 617594 - protein, 15 aa, Homo sapiens
  CDR3 for beta chain variable domain of TCR clone 308797 (TRBV5-1, TRBJ2-7)
CASSLNGGPAREQYF

SEQ ID NO: 617595 - protein, 11 aa, Homo sapiens
  CDR3 for alpha chain variable domain of TCR clone 308798 (TRAV12-3, TRAJ43)
CTMSVSNDMRF

SEQ ID NO: 617596 - protein, 14 aa, Homo sapiens
  CDR3 for beta chain variable domain of TCR clone 308798 (TRBV20-1, TRBJ1-1)
SAVLHLGGGTEAFF

SEQ ID NO: 617597 - protein, 14 aa, Homo sapiens
  CDR3 for alpha chain variable domain of TCR clone 308799 (TRAV26-1, TRAJ34)
CIAIVAYNTDKLIF

SEQ ID NO: 617598 - protein, 15 aa, Homo sapiens
  CDR3 for beta chain variable domain of TCR clone 308799 (TRBV20-1, TRBJ2-7)
CSARVPAAYFYKQYF

SEQ ID NO: 617599 - protein, 14 aa, Homo sapiens
  CDR3 for alpha chain variable domain of TCR clone 308800 (TRAV8-3, TRAJ35)
CAVVPQGFGNVLNC

SEQ ID NO: 617600 - protein, 15 aa, Homo sapiens
  CDR3 for beta chain variable domain of TCR clone 308800 (TRBV27, TRBJ2-1)
CASSNGGGSSNEQFF

SEQ ID NO: 617601 - protein, 16 aa, Homo sapiens
  CDR3 for alpha chain variable domain of TCR clone 308801 (TRAV30, TRAJ24)
CGTEIVDADSSGKFQF

SEQ ID NO: 617602 - protein, 18 aa, Homo sapiens
  CDR3 for beta chain variable domain of TCR clone 308801 (TRBV12-5, TRBJ2-5)
CASGSHTSRDPVLRARHA

SEQ ID NO: 617603 - protein, 12 aa, Homo sapiens
  CDR3 for alpha chain variable domain of TCR clone 308802 (TRAV23/DV6, TRAJ11)
CAASWGYSTLTF

SEQ ID NO: 617604 - protein, 13 aa, Homo sapiens
  CDR3 for beta chain variable domain of TCR clone 308802 (TRBV12-5, TRBJ2-3)
CASGDRQSDTQYF

SEQ ID NO: 617605 - protein, 15 aa, Homo sapiens
  CDR3 for alpha chain variable domain of TCR clone 308803 (TRAV8-2, TRAJ42)
CVVSAYMGSQGNLIF

SEQ ID NO: 617606 - protein, 11 aa, Homo sapiens
  CDR3 for beta chain variable domain of TCR clone 308803 (TRBV5-1, TRBJ2-1)
CASSMGQEQFF

SEQ ID NO: 617607 - protein, 12 aa, Homo sapiens
  CDR3 for alpha chain variable domain of TCR clone 308804 (TRAV1-1, TRAJ30)
CAVRGRDDKIIS

SEQ ID NO: 617608 - protein, 14 aa, Homo sapiens
  CDR3 for beta chain variable domain of TCR clone 308804 (TRBV6-1, TRBJ1-3)
CASVQGGGGNTIYF

SEQ ID NO: 617609 - protein, 14 aa, Homo sapiens
  CDR3 for alpha chain variable domain of TCR clone 308805 (TRAV26-1, TRAJ38)
CIADNAGNNRKLIW

SEQ ID NO: 617610 - protein, 13 aa, Homo sapiens
  CDR3 for beta chain variable domain of TCR clone 308805 (TRBV13, TRBJ2-5)
CASSPEVGETQYF

SEQ ID NO: 617611 - protein, 13 aa, Homo sapiens
  CDR3 for alpha chain variable domain of TCR clone 308806 (TRAV27, TRAJ41)
CAGEGNSGYALNF

SEQ ID NO: 617612 - protein, 14 aa, Homo sapiens
  CDR3 for beta chain variable domain of TCR clone 308806 (TRBV7-8, TRBJ2-7)
CASSPRDRVYEQYF

SEQ ID NO: 617613 - protein, 11 aa, Homo sapiens
  CDR3 for alpha chain variable domain of TCR clone 308807 (TRAV21, TRAJ11)
CAVNVYSTLTF

SEQ ID NO: 617614 - protein, 11 aa, Homo sapiens
  CDR3 for beta chain variable domain of TCR clone 308807 (TRBV19, TRBJ1-1)
CASSSGSEAFF

SEQ ID NO: 617615 - protein, 16 aa, Homo sapiens
  CDR3 for alpha chain variable domain of TCR clone 308808 (TRAV30, TRAJ24)
CGTEIVDADSWGKFQF

SEQ ID NO: 617616 - protein, 15 aa, Homo sapiens
  CDR3 for beta chain variable domain of TCR clone 308808 (TRBV6-3, TRBJ2-7)
CASSSPGTAFYEQYF

SEQ ID NO: 617617 - protein, 12 aa, Homo sapiens
  CDR3 for alpha chain variable domain of TCR clone 308809 (TRAV13-1, TRAJ17)
CAARTAGDKLAF

SEQ ID NO: 617618 - protein, 15 aa, Homo sapiens
  CDR3 for beta chain variable domain of TCR clone 308809 (TRBV7-6, TRBJ1-1)
CASSPQGGANTEAFF

SEQ ID NO: 617619 - protein, 14 aa, Homo sapiens
  CDR3 for alpha chain variable domain of TCR clone 308810 (TRAV38-1, TRAJ30)
CDFMPMNRDDKIIF

SEQ ID NO: 617620 - protein, 15 aa, Homo sapiens
  CDR3 for beta chain variable domain of TCR clone 308810 (TRBV7-9, TRBJ2-7)
CASSLDLQGPYEQYF

SEQ ID NO: 617621 - protein, 14 aa, Homo sapiens
  CDR3 for alpha chain variable domain of TCR clone 308811 (TRAV27, TRAJ22)
CAGLPSGSARQLTF

SEQ ID NO: 617622 - protein, 16 aa, Homo sapiens
  CDR3 for beta chain variable domain of TCR clone 308811 (TRBV19, TRBJ2-2)
CASRSPGTGATGGLFF

SEQ ID NO: 617623 - protein, 16 aa, Homo sapiens
  CDR3 for alpha chain variable domain of TCR clone 308812 (TRAV30, TRAJ24)
CGTEMVDADSWGKFQF

SEQ ID NO: 617624 - protein, 16 aa, Homo sapiens
  CDR3 for beta chain variable domain of TCR clone 308812 (TRBV6-1, TRBJ2-1)
CASILRQGSSYNEQFF

SEQ ID NO: 617625 - protein, 13 aa, Homo sapiens
  CDR3 for alpha chain variable domain of TCR clone 308813 (TRAV29/DV5, TRAJ47)
CAASAEYGNKLVF

SEQ ID NO: 617626 - protein, 14 aa, Homo sapiens
  CDR3 for beta chain variable domain of TCR clone 308813 (TRBV7-6, TRBJ2-3)
CASSLGTVTDTQYF

SEQ ID NO: 617627 - protein, 18 aa, Homo sapiens
  CDR3 for alpha chain variable domain of TCR clone 308814 (TRAV40, TRAJ42)
SSGSRLLNYGGSQGNLIF

SEQ ID NO: 617628 - protein, 16 aa, Homo sapiens
  CDR3 for beta chain variable domain of TCR clone 308814 (TRBV10-2, TRBJ2-7)
CASSESPGSSGFEQYF

SEQ ID NO: 617629 - protein, 22 aa, Homo sapiens
  CDR3 for alpha chain variable domain of TCR clone 308815 (TRAV3, TRAJ9)
CAVRLNTGGFKTILEQEQDYLL

SEQ ID NO: 617630 - protein, 16 aa, Homo sapiens
  CDR3 for beta chain variable domain of TCR clone 308815 (TRBV12-5, TRBJ2-5)
CASGPRTSGNQETQYF

SEQ ID NO: 617631 - protein, 15 aa, Homo sapiens
  CDR3 for alpha chain variable domain of TCR clone 308816 (TRAV8-2, TRAJ40)
RVVLGTTSGTYKYIF

SEQ ID NO: 617632 - protein, 12 aa, Homo sapiens
  CDR3 for beta chain variable domain of TCR clone 308816 (TRBV7-8, TRBJ2-7)
CASSLGDREQYF

SEQ ID NO: 617633 - protein, 15 aa, Homo sapiens
  CDR3 for alpha chain variable domain of TCR clone 308817 (TRAV2, TRAJ9)
CAVEDRGTGGFKTIF

SEQ ID NO: 617634 - protein, 12 aa, Homo sapiens
  CDR3 for beta chain variable domain of TCR clone 308817 (TRBV19, TRBJ2-7)
CASTDRGYEQYF

SEQ ID NO: 617635 - protein, 14 aa, Homo sapiens
  CDR3 for alpha chain variable domain of TCR clone 308818 (TRAV12-2, TRAJ40)
CAVKIPSGTYKYIF

SEQ ID NO: 617636 - protein, 16 aa, Homo sapiens
  CDR3 for beta chain variable domain of TCR clone 308818 (TRBV2, TRBJ2-1)
CASSVGGSLSYNEQFF

SEQ ID NO: 617637 - protein, 11 aa, Homo sapiens
  CDR3 for alpha chain variable domain of TCR clone 308819 (TRAV13-1, TRAJ24)
CAASGRGKLQF

SEQ ID NO: 617638 - protein, 15 aa, Homo sapiens
  CDR3 for beta chain variable domain of TCR clone 308819 (TRBV11-2, TRBJ2-2)
CASSLDTGNTGELFF

SEQ ID NO: 617639 - protein, 12 aa, Homo sapiens
  CDR3 for alpha chain variable domain of TCR clone 308820 (TRAV17, TRAJ53)
CATEGSNYKLTF

SEQ ID NO: 617640 - protein, 17 aa, Homo sapiens
  CDR3 for beta chain variable domain of TCR clone 308820 (TRBV11-2, TRBJ2-6)
CASSQRDIFSGANVLTF

SEQ ID NO: 617641 - protein, 14 aa, Homo sapiens
  CDR3 for alpha chain variable domain of TCR clone 308821 (TRAV17, TRAJ6)
CATDASGGSYIPTF

SEQ ID NO: 617642 - protein, 15 aa, Homo sapiens
  CDR3 for beta chain variable domain of TCR clone 308821 (TRBV4-3, TRBJ2-1)
CASSQESAIYNEQFF

SEQ ID NO: 617643 - protein, 15 aa, Homo sapiens
  CDR3 for alpha chain variable domain of TCR clone 308822 (TRAV2, TRAJ42)
CAVEGYGGSQGNLIF

SEQ ID NO: 617644 - protein, 18 aa, Homo sapiens
  CDR3 for beta chain variable domain of TCR clone 308822 (TRBV20-1, TRBJ2-6)
CSAETTPTHGSGANDLTF

SEQ ID NO: 617645 - protein, 10 aa, Homo sapiens
  CDR3 for alpha chain variable domain of TCR clone 308823 (TRAV21, TRAJ43)
CAVRIGDMRL

SEQ ID NO: 617646 - protein, 13 aa, Homo sapiens
  CDR3 for beta chain variable domain of TCR clone 308823 (TRBV20-1, TRBJ2-7)
CSAPGLADYEQYF

SEQ ID NO: 617647 - protein, 10 aa, Homo sapiens
  CDR3 for alpha chain variable domain of TCR clone 308824 (TRAV12-3, TRAJ50)
CAMSAMGNLL

SEQ ID NO: 617648 - protein, 17 aa, Homo sapiens
  CDR3 for beta chain variable domain of TCR clone 308824 (TRBV4-2, TRBJ1-1)
CASTQFGGGSGNTEAFF

SEQ ID NO: 617649 - protein, 15 aa, Homo sapiens
  CDR3 for alpha chain variable domain of TCR clone 308825 (TRAV20, TRAJ41)
CAVQANSNSGYALNF

SEQ ID NO: 617650 - protein, 18 aa, Homo sapiens
  CDR3 for beta chain variable domain of TCR clone 308825 (TRBV7-9, TRBJ2-7)
CASSLTTSGSRTWDEQYF

SEQ ID NO: 617651 - protein, 12 aa, Homo sapiens
  CDR3 for alpha chain variable domain of TCR clone 308826 (TRAV12-3, TRAJ17)
CAMTLTGNTLTF

SEQ ID NO: 617652 - protein, 15 aa, Homo sapiens
  CDR3 for beta chain variable domain of TCR clone 308826 (TRBV19, TRBJ2-1)
CASSILGEGRNEQFF

SEQ ID NO: 617653 - protein, 16 aa, Homo sapiens
  CDR3 for alpha chain variable domain of TCR clone 308827 (TRAV2, TRAJ13)
CAARILGVTRKLPLEL

SEQ ID NO: 617654 - protein, 13 aa, Homo sapiens
  CDR3 for beta chain variable domain of TCR clone 308827 (TRBV19, TRBJ1-5)
CASSLRQNQPQHF

SEQ ID NO: 617655 - protein, 15 aa, Homo sapiens
  CDR3 for alpha chain variable domain of TCR clone 308828 (TRAV2, TRAJ9)
CAVEDRGTGGFKTIF

SEQ ID NO: 617656 - protein, 19 aa, Homo sapiens
  CDR3 for beta chain variable domain of TCR clone 308828 (TRBV11-2, TRBJ2-2)
LRTRPCISVPAAYPGSCFF

SEQ ID NO: 617657 - protein, 14 aa, Homo sapiens
  CDR3 for alpha chain variable domain of TCR clone 308829 (TRAV27, TRAJ22)
CAGVSVLGKRQPTF

SEQ ID NO: 617658 - protein, 17 aa, Homo sapiens
  CDR3 for beta chain variable domain of TCR clone 308829 (TRBV14, TRBJ2-1)
CASSQDRRVTSYNEQFF

SEQ ID NO: 617659 - protein, 14 aa, Homo sapiens
  CDR3 for alpha chain variable domain of TCR clone 308830 (TRAV17, TRAJ6)
CAKNPAGGSYIPTF

SEQ ID NO: 617660 - protein, 15 aa, Homo sapiens
  CDR3 for beta chain variable domain of TCR clone 308830 (TRBV2, TRBJ2-5)
CASSGTVAAGETQYF

SEQ ID NO: 617661 - protein, 11 aa, Homo sapiens
  CDR3 for alpha chain variable domain of TCR clone 308831 (TRAV2, TRAJ23)
CSVETRGKLIF

SEQ ID NO: 617662 - protein, 14 aa, Homo sapiens
  CDR3 for beta chain variable domain of TCR clone 308831 (TRBV2, TRBJ2-3)
CASSEGQNTDTQYF

SEQ ID NO: 617663 - protein, 19 aa, Homo sapiens
  CDR3 for alpha chain variable domain of TCR clone 308832 (TRAV8-4, TRAJ3)
CAVTGENLVQQCFQDHLLI

SEQ ID NO: 617664 - protein, 12 aa, Homo sapiens
  CDR3 for beta chain variable domain of TCR clone 308832 (TRBV11-2, TRBJ2-2)
CASSLGGGELFF

SEQ ID NO: 617665 - protein, 17 aa, Homo sapiens
  CDR3 for alpha chain variable domain of TCR clone 308833 (TRAV3, TRAJ42)
CAVRDRDYGGSQGNLIF

SEQ ID NO: 617666 - protein, 14 aa, Homo sapiens
  CDR3 for beta chain variable domain of TCR clone 308833 (TRBV7-9, TRBJ2-7)
CASSLSQGSYEQYF

SEQ ID NO: 617667 - protein, 14 aa, Homo sapiens
  CDR3 for alpha chain variable domain of TCR clone 308834 (TRAV23/DV6, TRAJ9)
CASKYWRLPNYLWS

SEQ ID NO: 617668 - protein, 14 aa, Homo sapiens
  CDR3 for beta chain variable domain of TCR clone 308834 (TRBV6-1, TRBJ2-7)
CASTRTGDYYEQYF

SEQ ID NO: 617669 - protein, 14 aa, Homo sapiens
  CDR3 for alpha chain variable domain of TCR clone 308835 (TRAV25, TRAJ27)
CAGEHLTNAGKSTF

SEQ ID NO: 617670 - protein, 13 aa, Homo sapiens
  CDR3 for beta chain variable domain of TCR clone 308835 (TRBV28, TRBJ2-7)
CASSPSGTYEQYF

SEQ ID NO: 617671 - protein, 13 aa, Homo sapiens
  CDR3 for alpha chain variable domain of TCR clone 308836 (TRAV12-1, TRAJ6)
CVVYPGGSYIPTF

SEQ ID NO: 617672 - protein, 14 aa, Homo sapiens
  CDR3 for beta chain variable domain of TCR clone 308836 (TRBV7-6, TRBJ2-3)
CASSVAGGTDTQYF

SEQ ID NO: 617673 - protein, 15 aa, Homo sapiens
  CDR3 for alpha chain variable domain of TCR clone 308837 (TRAV12-3, TRAJ11)
CAMSEENSGYSTLTF

SEQ ID NO: 617674 - protein, 16 aa, Homo sapiens
  CDR3 for beta chain variable domain of TCR clone 308837 (TRBV5-1, TRBJ2-7)
CAGSLEGLAGLYEQYF

SEQ ID NO: 617675 - protein, 13 aa, Homo sapiens
  CDR3 for alpha chain variable domain of TCR clone 308838 (TRAV6, TRAJ20)
CALAVSNDYKLSF

SEQ ID NO: 617676 - protein, 15 aa, Homo sapiens
  CDR3 for beta chain variable domain of TCR clone 308838 (TRBV12-4, TRBJ2-7)
CASSQRTSGNYEQYF

SEQ ID NO: 617677 - protein, 15 aa, Homo sapiens
  CDR3 for alpha chain variable domain of TCR clone 308839 (TRAV3, TRAJ22)
CAVRDRGGSARQLTF

SEQ ID NO: 617678 - protein, 16 aa, Homo sapiens
  CDR3 for beta chain variable domain of TCR clone 308839 (TRBV7-9, TRBJ1-2)
CASSISLDRGGYGYTF

SEQ ID NO: 617679 - protein, 16 aa, Homo sapiens
  CDR3 for alpha chain variable domain of TCR clone 308840 (TRAV3, TRAJ37)
CAVRVRGSGNTGKLIF

SEQ ID NO: 617680 - protein, 15 aa, Homo sapiens
  CDR3 for beta chain variable domain of TCR clone 308840 (TRBV3-1, TRBJ2-1)
CASSPRDSGSNEQFF

SEQ ID NO: 617681 - protein, 12 aa, Homo sapiens
  CDR3 for alpha chain variable domain of TCR clone 308841 (TRAV8-3, TRAJ41)
CAVALSGYALNF

SEQ ID NO: 617682 - protein, 17 aa, Homo sapiens
  CDR3 for beta chain variable domain of TCR clone 308841 (TRBV7-3, TRBJ2-2)
CASSLSGTSGGTGELCF

SEQ ID NO: 617683 - protein, 14 aa, Homo sapiens
  CDR3 for alpha chain variable domain of TCR clone 308842 (TRAV35, TRAJ38)
CAGSNAGNNRKLIW

SEQ ID NO: 617684 - protein, 15 aa, Homo sapiens
  CDR3 for beta chain variable domain of TCR clone 308842 (TRBV27, TRBJ2-1)
CASSNGGGSSNEQFF

SEQ ID NO: 617685 - protein, 15 aa, Homo sapiens
  CDR3 for alpha chain variable domain of TCR clone 308843 (TRAV8-3, TRAJ45)
CASSYSVGGADGRTF

SEQ ID NO: 617686 - protein, 13 aa, Homo sapiens
  CDR3 for beta chain variable domain of TCR clone 308843 (TRBV10-3, TRBJ2-7)
CASKLAVNYEQYF

SEQ ID NO: 617687 - protein, 15 aa, Homo sapiens
  CDR3 for alpha chain variable domain of TCR clone 308844 (TRAV20, TRAJ58)
CAVPDLETSGSRLTF

SEQ ID NO: 617688 - protein, 12 aa, Homo sapiens
  CDR3 for beta chain variable domain of TCR clone 308844 (TRBV9, TRBJ2-2)
CASSARTGELFF

SEQ ID NO: 617689 - protein, 19 aa, Homo sapiens
  CDR3 for alpha chain variable domain of TCR clone 308845 (TRAV29/DV5, TRAJ49)
CSVLLCSKLTVDTGNQFYF

SEQ ID NO: 617690 - protein, 13 aa, Homo sapiens
  CDR3 for beta chain variable domain of TCR clone 308845 (TRBV18, TRBJ2-2)
CASSPTRGGELFF

SEQ ID NO: 617691 - protein, 13 aa, Homo sapiens
  CDR3 for alpha chain variable domain of TCR clone 308846 (TRAV1-2, TRAJ36)
CDVDQTGSNNLFF

SEQ ID NO: 617692 - protein, 14 aa, Homo sapiens
  CDR3 for beta chain variable domain of TCR clone 308846 (TRBV20-1, TRBJ2-5)
CSAREMTKQETQYF

SEQ ID NO: 617693 - protein, 16 aa, Homo sapiens
  CDR3 for alpha chain variable domain of TCR clone 308847 (TRAV3, TRAJ37)
CAVRPHGSGNTGKLIF

SEQ ID NO: 617694 - protein, 11 aa, Homo sapiens
  CDR3 for beta chain variable domain of TCR clone 308847 (TRBV29-1, TRBJ2-5)
CSEDRTATQYF

SEQ ID NO: 617695 - protein, 14 aa, Homo sapiens
  CDR3 for alpha chain variable domain of TCR clone 308848 (TRAV12-3, TRAJ42)
CAMNYGGSQGNLIF

SEQ ID NO: 617696 - protein, 15 aa, Homo sapiens
  CDR3 for beta chain variable domain of TCR clone 308848 (TRBV4-1, TRBJ2-1)
CASSQDAGGLYEQFF

SEQ ID NO: 617697 - protein, 12 aa, Homo sapiens
  CDR3 for alpha chain variable domain of TCR clone 308849 (TRAV3, TRAJ31)
CAVRTRGPRLMF

SEQ ID NO: 617698 - protein, 17 aa, Homo sapiens
  CDR3 for beta chain variable domain of TCR clone 308849 (TRBV7-9, TRBJ1-5)
CASSASQGGYSNQPQHF

SEQ ID NO: 617699 - protein, 13 aa, Homo sapiens
  CDR3 for alpha chain variable domain of TCR clone 308850 (TRAV13-1, TRAJ21)
CAASIYNFNKFYF

SEQ ID NO: 617700 - protein, 15 aa, Homo sapiens
  CDR3 for beta chain variable domain of TCR clone 308850 (TRBV13, TRBJ1-2)
CASSLGRQPGYGYTF

SEQ ID NO: 617701 - protein, 14 aa, Homo sapiens
  CDR3 for alpha chain variable domain of TCR clone 308851 (TRAV12-3, TRAJ13)
CAMRNSVGYQKVTF

SEQ ID NO: 617702 - protein, 12 aa, Homo sapiens
  CDR3 for beta chain variable domain of TCR clone 308851 (TRBV29-1, TRBJ2-3)
CSVTGGADTQYF

SEQ ID NO: 617703 - protein, 10 aa, Homo sapiens
  CDR3 for alpha chain variable domain of TCR clone 308852 (TRAV1-2, TRAJ23)
CAGQGGKLIF

SEQ ID NO: 617704 - protein, 14 aa, Homo sapiens
  CDR3 for beta chain variable domain of TCR clone 308852 (TRBV11-2, TRBJ1-1)
CASSLRQWGGTLES

SEQ ID NO: 617705 - protein, 11 aa, Homo sapiens
  CDR3 for alpha chain variable domain of TCR clone 308853 (TRAV3, TRAJ21)
CAVGNFNKFYF

SEQ ID NO: 617706 - protein, 16 aa, Homo sapiens
  CDR3 for beta chain variable domain of TCR clone 308853 (TRBV19, TRBJ2-1)
CAGSKAGPSSYNEKFF

SEQ ID NO: 617707 - protein, 13 aa, Homo sapiens
  CDR3 for alpha chain variable domain of TCR clone 308854 (TRAV27, TRAJ41)
CAGEGNSGYALNF

SEQ ID NO: 617708 - protein, 13 aa, Homo sapiens
  CDR3 for beta chain variable domain of TCR clone 308854 (TRBV19, TRBJ1-2)
CASSVPGQDGYAF

SEQ ID NO: 617709 - protein, 14 aa, Homo sapiens
  CDR3 for alpha chain variable domain of TCR clone 308855 (TRAV1-2, TRAJ16)
CAVNRFSDVQKLLF

SEQ ID NO: 617710 - protein, 12 aa, Homo sapiens
  CDR3 for beta chain variable domain of TCR clone 308855 (TRBV24-1, TRBJ1-1)
CATLYPDTEAFF

SEQ ID NO: 617711 - protein, 14 aa, Homo sapiens
  CDR3 for alpha chain variable domain of TCR clone 308856 (TRAV13-1, TRAJ35)
CAASKGGFGNVLHC

SEQ ID NO: 617712 - protein, 14 aa, Homo sapiens
  CDR3 for beta chain variable domain of TCR clone 308856 (TRBV4-1, TRBJ2-2)
CASSLTENTGELFF

SEQ ID NO: 617713 - protein, 17 aa, Homo sapiens
  CDR3 for alpha chain variable domain of TCR clone 308857 (TRAV3, TRAJ38)
CAVRDCLNAGNNRKLIW

SEQ ID NO: 617714 - protein, 14 aa, Homo sapiens
  CDR3 for beta chain variable domain of TCR clone 308857 (TRBV4-1, TRBJ1-1)
CASSQAGYSTEAFF

SEQ ID NO: 617715 - protein, 14 aa, Homo sapiens
  CDR3 for alpha chain variable domain of TCR clone 308858 (TRAV1-2, TRAJ8)
CAVREDTGFQKLVF

SEQ ID NO: 617716 - protein, 17 aa, Homo sapiens
  CDR3 for beta chain variable domain of TCR clone 308858 (TRBV19, TRBJ2-3)
CASSIDPAGGGTDTQYF

SEQ ID NO: 617717 - protein, 12 aa, Homo sapiens
  CDR3 for alpha chain variable domain of TCR clone 308859 (TRAV13-1, TRAJ48)
CAANSGNEKLTF

SEQ ID NO: 617718 - protein, 12 aa, Homo sapiens
  CDR3 for beta chain variable domain of TCR clone 308859 (TRBV7-8, TRBJ2-7)
CASSPGDREQYF

SEQ ID NO: 617719 - protein, 12 aa, Homo sapiens
  CDR3 for alpha chain variable domain of TCR clone 308860 (TRAV3, TRAJ43)
CAVRDPNNDMRF

SEQ ID NO: 617720 - protein, 13 aa, Homo sapiens
  CDR3 for beta chain variable domain of TCR clone 308860 (TRBV19, TRBJ1-2)
CASSVPGQDGYTV

SEQ ID NO: 617721 - protein, 15 aa, Homo sapiens
  CDR3 for alpha chain variable domain of TCR clone 308861 (TRAV27, TRAJ53)
CRAINRGGSNYKLTF

SEQ ID NO: 617722 - protein, 14 aa, Homo sapiens
  CDR3 for beta chain variable domain of TCR clone 308861 (TRBV7-3, TRBJ2-1)
CASSLAGGTNEQFF

SEQ ID NO: 617723 - protein, 15 aa, Homo sapiens
  CDR3 for alpha chain variable domain of TCR clone 308862 (TRAV27, TRAJ38)
CAARRNASNNRKLIL

SEQ ID NO: 617724 - protein, 13 aa, Homo sapiens
  CDR3 for beta chain variable domain of TCR clone 308862 (TRBV12-5, TRBJ2-3)
CASGDRQSDTQYF

SEQ ID NO: 617725 - protein, 14 aa, Homo sapiens
  CDR3 for alpha chain variable domain of TCR clone 308863 (TRAV8-1, TRAJ5)
CAVSMDTGRRALTF

SEQ ID NO: 617726 - protein, 15 aa, Homo sapiens
  CDR3 for beta chain variable domain of TCR clone 308863 (TRBV19, TRBJ2-4)
CASRGTRRGENIQYF

SEQ ID NO: 617727 - protein, 14 aa, Homo sapiens
  CDR3 for alpha chain variable domain of TCR clone 308864 (TRAV20, TRAJ29)
CAVQAWVGNTPLGF

SEQ ID NO: 617728 - protein, 15 aa, Homo sapiens
  CDR3 for beta chain variable domain of TCR clone 308864 (TRBV29-1, TRBJ2-7)
CSVEFFDRGSYEQYF

SEQ ID NO: 617729 - protein, 11 aa, Homo sapiens
  CDR3 for alpha chain variable domain of TCR clone 308865 (TRAV13-1, TRAJ39)
CASHAGTMLTF

SEQ ID NO: 617730 - protein, 14 aa, Homo sapiens
  CDR3 for beta chain variable domain of TCR clone 308865 (TRBV11-2, TRBJ1-5)
CASSLDRGRQAQHF

SEQ ID NO: 617731 - protein, 16 aa, Homo sapiens
  CDR3 for alpha chain variable domain of TCR clone 308866 (TRAV23/DV6, TRAJ9)
CAASIGGNTGGFKTNF

SEQ ID NO: 617732 - protein, 11 aa, Homo sapiens
  CDR3 for beta chain variable domain of TCR clone 308866 (TRBV11-2, TRBJ2-2)
CASSLPGELFF

SEQ ID NO: 617733 - protein, 14 aa, Homo sapiens
  CDR3 for alpha chain variable domain of TCR clone 308867 (TRAV12-2, TRAJ24)
CAVTPADSWGKLQF

SEQ ID NO: 617734 - protein, 12 aa, Homo sapiens
  CDR3 for beta chain variable domain of TCR clone 308867 (TRBV28, TRBJ2-6)
CAIQAGANVLTF

SEQ ID NO: 617735 - protein, 12 aa, Homo sapiens
  CDR3 for alpha chain variable domain of TCR clone 308868 (TRAV12-1, TRAJ40)
CVVYSGTYKDIF

SEQ ID NO: 617736 - protein, 15 aa, Homo sapiens
  CDR3 for beta chain variable domain of TCR clone 308868 (TRBV7-9, TRBJ1-6)
CASSSPGRGNSPLHF

SEQ ID NO: 617737 - protein, 15 aa, Homo sapiens
  CDR3 for alpha chain variable domain of TCR clone 308869 (TRAV3, TRAJ22)
CAVRDRGGSARQLNF

SEQ ID NO: 617738 - protein, 14 aa, Homo sapiens
  CDR3 for beta chain variable domain of TCR clone 308869 (TRBV4-1, TRBJ2-2)
CASSQAVNTGELFF

SEQ ID NO: 617739 - protein, 16 aa, Homo sapiens
  CDR3 for alpha chain variable domain of TCR clone 308870 (TRAV3, TRAJ37)
CAVRPHGSGNTGKLIF

SEQ ID NO: 617740 - protein, 15 aa, Homo sapiens
  CDR3 for beta chain variable domain of TCR clone 308870 (TRBV5-5, TRBJ2-7)
CASSLAAPLSYEQCF

SEQ ID NO: 617741 - protein, 15 aa, Homo sapiens
  CDR3 for alpha chain variable domain of TCR clone 308871 (TRAV21, TRAJ53)
CATLNSGGSNYEPTF

SEQ ID NO: 617742 - protein, 16 aa, Homo sapiens
  CDR3 for beta chain variable domain of TCR clone 308871 (TRBV7-3, TRBJ2-1)
CASSPNSGSSYNEQFF

SEQ ID NO: 617743 - protein, 10 aa, Homo sapiens
  CDR3 for alpha chain variable domain of TCR clone 308872 (TRAV1-2, TRAJ34)
CALNTDKLIF

SEQ ID NO: 617744 - protein, 16 aa, Homo sapiens
  CDR3 for beta chain variable domain of TCR clone 308872 (TRBV19, TRBJ2-2)
CASRSPGTGATGELFF

SEQ ID NO: 617745 - protein, 15 aa, Homo sapiens
  CDR3 for alpha chain variable domain of TCR clone 308873 (TRAV21, TRAJ53)
CATLNSGGINFKLTF

SEQ ID NO: 617746 - protein, 15 aa, Homo sapiens
  CDR3 for beta chain variable domain of TCR clone 308873 (TRBV20-1, TRBJ2-7)
CSARDRVSGMDEQYF

SEQ ID NO: 617747 - protein, 16 aa, Homo sapiens
  CDR3 for alpha chain variable domain of TCR clone 308874 (TRAV29/DV5, TRAJ39)
CAAILLFNNAGNMLTF

SEQ ID NO: 617748 - protein, 16 aa, Homo sapiens
  CDR3 for beta chain variable domain of TCR clone 308874 (TRBV19, TRBJ2-6)
CASSMSGLSGANVLTF

SEQ ID NO: 617749 - protein, 12 aa, Homo sapiens
  CDR3 for alpha chain variable domain of TCR clone 308875 (TRAV8-6, TRAJ43)
CAVSNNNNDIRF

SEQ ID NO: 617750 - protein, 15 aa, Homo sapiens
  CDR3 for beta chain variable domain of TCR clone 308875 (TRBV7-3, TRBJ2-6)
CASSLGGSGANVLSF

SEQ ID NO: 617751 - protein, 13 aa, Homo sapiens
  CDR3 for alpha chain variable domain of TCR clone 308876 (TRAV2, TRAJ40)
CAAVTSGTYKYIF

SEQ ID NO: 617752 - protein, 15 aa, Homo sapiens
  CDR3 for beta chain variable domain of TCR clone 308876 (TRBV28, TRBJ2-1)
CASSGLAEVDNEQFF

SEQ ID NO: 617753 - protein, 14 aa, Homo sapiens
  CDR3 for alpha chain variable domain of TCR clone 308877 (TRAV12-1, TRAJ30)
CVPTGTNRDDKIIF

SEQ ID NO: 617754 - protein, 15 aa, Homo sapiens
  CDR3 for beta chain variable domain of TCR clone 308877 (TRBV7-2, TRBJ2-1)
CASSSGLAGGNEQFF

SEQ ID NO: 617755 - protein, 13 aa, Homo sapiens
  CDR3 for alpha chain variable domain of TCR clone 308878 (TRAV39, TRAJ58)
CAGEETSGSRLTF

SEQ ID NO: 617756 - protein, 13 aa, Homo sapiens
  CDR3 for beta chain variable domain of TCR clone 308878 (TRBV15, TRBJ2-7)
GATSTTGHYEQYF

SEQ ID NO: 617757 - protein, 14 aa, Homo sapiens
  CDR3 for alpha chain variable domain of TCR clone 308879 (TRAV27, TRAJ45)
CAGAQEEVLTDSPL

SEQ ID NO: 617758 - protein, 13 aa, Homo sapiens
  CDR3 for beta chain variable domain of TCR clone 308879 (TRBV10-3, TRBJ2-7)
CASKLAVNYEQYF

SEQ ID NO: 617759 - protein, 13 aa, Homo sapiens
  CDR3 for alpha chain variable domain of TCR clone 308880 (TRAV13-2, TRAJ8)
CAFMNTGFQKLVF

SEQ ID NO: 617760 - protein, 17 aa, Homo sapiens
  CDR3 for beta chain variable domain of TCR clone 308880 (TRBV28, TRBJ2-1)
CASSSARLALTYNEQFF

SEQ ID NO: 617761 - protein, 10 aa, Homo sapiens
  CDR3 for alpha chain variable domain of TCR clone 308881 (TRAV21, TRAJ43)
CAVRIGDMRF

SEQ ID NO: 617762 - protein, 14 aa, Homo sapiens
  CDR3 for beta chain variable domain of TCR clone 308881 (TRBV7-2, TRBJ2-5)
CASSFTQGQETQYF

SEQ ID NO: 617763 - protein, 11 aa, Homo sapiens
  CDR3 for alpha chain variable domain of TCR clone 308882 (TRAV2, TRAJ33)
CAVDGNYQLIW

SEQ ID NO: 617764 - protein, 15 aa, Homo sapiens
  CDR3 for beta chain variable domain of TCR clone 308882 (TRBV19, TRBJ1-2)
CASSVGQVLNYGVTF

SEQ ID NO: 617765 - protein, 14 aa, Homo sapiens
  CDR3 for alpha chain variable domain of TCR clone 308883 (TRAV21, TRAJ37)
CAVKGSSNTGKLIF

SEQ ID NO: 617766 - protein, 14 aa, Homo sapiens
  CDR3 for beta chain variable domain of TCR clone 308883 (TRBV7-2, TRBJ2-1)
CASSRGVARNEQFF

SEQ ID NO: 617767 - protein, 13 aa, Homo sapiens
  CDR3 for alpha chain variable domain of TCR clone 308884 (TRAV6, TRAJ12)
CPRGGDSSYKLIF

SEQ ID NO: 617768 - protein, 14 aa, Homo sapiens
  CDR3 for beta chain variable domain of TCR clone 308884 (TRBV19, TRBJ2-1)
CASTTARTGNEQFF

SEQ ID NO: 617769 - protein, 15 aa, Homo sapiens
  CDR3 for alpha chain variable domain of TCR clone 308885 (TRAV12-1, TRAJ4)
CVVNGFSGGDNKLIF

SEQ ID NO: 617770 - protein, 18 aa, Homo sapiens
  CDR3 for beta chain variable domain of TCR clone 308885 (TRBV6-5, TRBJ2-1)
CASSYSSRRAGVYNEQFF

SEQ ID NO: 617771 - protein, 13 aa, Homo sapiens
  CDR3 for alpha chain variable domain of TCR clone 308886 (TRAV21, TRAJ27)
CAARPGNAGKSTF

SEQ ID NO: 617772 - protein, 15 aa, Homo sapiens
  CDR3 for beta chain variable domain of TCR clone 308886 (TRBV19, TRBJ1-6)
CASSTQGAVGSPLHF

SEQ ID NO: 617773 - protein, 11 aa, Homo sapiens
  CDR3 for alpha chain variable domain of TCR clone 308887 (TRAV21, TRAJ11)
CAVNGYSTLTF

SEQ ID NO: 617774 - protein, 15 aa, Homo sapiens
  CDR3 for beta chain variable domain of TCR clone 308887 (TRBV7-8, TRBJ1-5)
CASSLEGSGNQPQHF

SEQ ID NO: 617775 - protein, 14 aa, Homo sapiens
  CDR3 for alpha chain variable domain of TCR clone 308888 (TRAV12-2, TRAJ40)
CAVKIPSGTYKYIF

SEQ ID NO: 617776 - protein, 16 aa, Homo sapiens
  CDR3 for beta chain variable domain of TCR clone 308888 (TRBV5-1, TRBJ2-7)
CASSWGTGGRAWEQYF

SEQ ID NO: 617777 - protein, 15 aa, Homo sapiens
  CDR3 for alpha chain variable domain of TCR clone 308889 (TRAV13-1, TRAJ44)
CAASRGGRTASKLTF

SEQ ID NO: 617778 - protein, 12 aa, Homo sapiens
  CDR3 for beta chain variable domain of TCR clone 308889 (TRBV11-2, TRBJ2-2)
CASSLGGGELFF

SEQ ID NO: 617779 - protein, 17 aa, Homo sapiens
  CDR3 for alpha chain variable domain of TCR clone 308890 (TRAV26-2, TRAJ42)
CILRDVGCGGSQGNLIF

SEQ ID NO: 617780 - protein, 16 aa, Homo sapiens
  CDR3 for beta chain variable domain of TCR clone 308890 (TRBV12-4, TRBJ2-7)
CASSLIGGTGTYEQYF

SEQ ID NO: 617781 - protein, 21 aa, Homo sapiens
  CDR3 for alpha chain variable domain of TCR clone 308891 (TRAV12-1, TRAJ37)
CVVNGGLWQHRQTDLWARDNF

SEQ ID NO: 617782 - protein, 12 aa, Homo sapiens
  CDR3 for beta chain variable domain of TCR clone 308891 (TRBV20-1, TRBJ1-2)
CSAPGFNYGDTF

SEQ ID NO: 617783 - protein, 15 aa, Homo sapiens
  CDR3 for alpha chain variable domain of TCR clone 308892 (TRAV38-1, TRAJ57)
CAFMKPSGGSEKLVF

SEQ ID NO: 617784 - protein, 16 aa, Homo sapiens
  CDR3 for beta chain variable domain of TCR clone 308892 (TRBV29-1, TRBJ2-1)
CSVEPLLAGLYNEQFF

SEQ ID NO: 617785 - protein, 18 aa, Homo sapiens
  CDR3 for alpha chain variable domain of TCR clone 308893 (TRAV26-1, TRAJ22)
CIVRVALISSGSARQLTF

SEQ ID NO: 617786 - protein, 17 aa, Homo sapiens
  CDR3 for beta chain variable domain of TCR clone 308893 (TRBV7-8, TRBJ2-6)
CASSAGTGGAGANVLTF

SEQ ID NO: 617787 - protein, 14 aa, Homo sapiens
  CDR3 for alpha chain variable domain of TCR clone 308894 (TRAV1-1, TRAJ27)
CAVIYNTNAGKSTF

SEQ ID NO: 617788 - protein, 13 aa, Homo sapiens
  CDR3 for beta chain variable domain of TCR clone 308894 (TRBV12-4, TRBJ1-2)
CASSSGPNYGYTF

SEQ ID NO: 617789 - protein, 15 aa, Homo sapiens
  CDR3 for alpha chain variable domain of TCR clone 308895 (TRAV21, TRAJ45)
CAVSYSGGGADGLTF

SEQ ID NO: 617790 - protein, 13 aa, Homo sapiens
  CDR3 for beta chain variable domain of TCR clone 308895 (TRBV20-1, TRBJ2-5)
CSAGTELQETQYF

SEQ ID NO: 617791 - protein, 16 aa, Homo sapiens
  CDR3 for alpha chain variable domain of TCR clone 308896 (TRAV17, TRAJ17)
CATALQEEAAGNKLTF

SEQ ID NO: 617792 - protein, 14 aa, Homo sapiens
  CDR3 for beta chain variable domain of TCR clone 308896 (TRBV7-2, TRBJ1-3)
CASSRLRSGNTIYF

SEQ ID NO: 617793 - protein, 13 aa, Homo sapiens
  CDR3 for alpha chain variable domain of TCR clone 308897 (TRAV2, TRAJ40)
CAVVTSGTYKYIF

SEQ ID NO: 617794 - protein, 16 aa, Homo sapiens
  CDR3 for beta chain variable domain of TCR clone 308897 (TRBV19, TRBJ2-2)
CASRSPGTGASGELFF

SEQ ID NO: 617795 - protein, 15 aa, Homo sapiens
  CDR3 for alpha chain variable domain of TCR clone 308898 (TRAV17, TRAJ28)
CATDPSGAGSYQLTF

SEQ ID NO: 617796 - protein, 14 aa, Homo sapiens
  CDR3 for beta chain variable domain of TCR clone 308898 (TRBV7-2, TRBJ2-7)
CASSPKTSFYEQYF

SEQ ID NO: 617797 - protein, 16 aa, Homo sapiens
  CDR3 for alpha chain variable domain of TCR clone 308899 (TRAV30, TRAJ24)
CGTEIVDADNWGKFQF

SEQ ID NO: 617798 - protein, 11 aa, Homo sapiens
  CDR3 for beta chain variable domain of TCR clone 308899 (TRBV29-1, TRBJ2-5)
CSEDRTGTQYF

SEQ ID NO: 617799 - protein, 14 aa, Homo sapiens
  CDR3 for alpha chain variable domain of TCR clone 308900 (TRAV23/DV6, TRAJ11)
CAASLESGYSTLNF

SEQ ID NO: 617800 - protein, 13 aa, Homo sapiens
  CDR3 for beta chain variable domain of TCR clone 308900 (TRBV4-1, TRBJ2-5)
CASSLTRGETQYF

SEQ ID NO: 617801 - protein, 16 aa, Homo sapiens
  CDR3 for alpha chain variable domain of TCR clone 308901 (TRAV3, TRAJ10)
CAVRDMRAGGGIKLTF

SEQ ID NO: 617802 - protein, 15 aa, Homo sapiens
  CDR3 for beta chain variable domain of TCR clone 308901 (TRBV11-2, TRBJ1-6)
CASTGFGTAVSPLHF

SEQ ID NO: 617803 - protein, 11 aa, Homo sapiens
  CDR3 for alpha chain variable domain of TCR clone 308902 (TRAV13-1, TRAJ15)
CAATPGTALSF

SEQ ID NO: 617804 - protein, 17 aa, Homo sapiens
  CDR3 for beta chain variable domain of TCR clone 308902 (TRBV13, TRBJ2-3)
CASSLSRVAGGRNTQYF

SEQ ID NO: 617805 - protein, 14 aa, Homo sapiens
  CDR3 for alpha chain variable domain of TCR clone 308903 (TRAV12-2, TRAJ13)
CAVKKTGGYQKVTF

SEQ ID NO: 617806 - protein, 17 aa, Homo sapiens
  CDR3 for beta chain variable domain of TCR clone 308903 (TRBV13, TRBJ1-2)
CASSLGYRMTESKGYTF

SEQ ID NO: 617807 - protein, 14 aa, Homo sapiens
  CDR3 for alpha chain variable domain of TCR clone 308904 (TRAV2, TRAJ37)
CAVDLTSNTGKLIF

SEQ ID NO: 617808 - protein, 14 aa, Homo sapiens
  CDR3 for beta chain variable domain of TCR clone 308904 (TRBV7-2, TRBJ2-7)
CASSLYPGRYEQYF

SEQ ID NO: 617809 - protein, 15 aa, Homo sapiens
  CDR3 for alpha chain variable domain of TCR clone 308905 (TRAV13-1, TRAJ37)
CAASRTLATQANSSL

SEQ ID NO: 617810 - protein, 15 aa, Homo sapiens
  CDR3 for beta chain variable domain of TCR clone 308905 (TRBV2, TRBJ2-1)
CASSEEREGDNEQFF

SEQ ID NO: 617811 - protein, 17 aa, Homo sapiens
  CDR3 for alpha chain variable domain of TCR clone 308906 (TRAV4, TRAJ18)
CLVVAAGKGSTLGRLYF

SEQ ID NO: 617812 - protein, 17 aa, Homo sapiens
  CDR3 for beta chain variable domain of TCR clone 308906 (TRBV28, TRBJ2-2)
CASSLATGMGDAGELFF

SEQ ID NO: 617813 - protein, 13 aa, Homo sapiens
  CDR3 for alpha chain variable domain of TCR clone 308907 (TRAV2, TRAJ40)
CAVVTSGTYKYIF

SEQ ID NO: 617814 - protein, 16 aa, Homo sapiens
  CDR3 for beta chain variable domain of TCR clone 308907 (TRBV6-5, TRBJ2-7)
CASSYFRVGISDEQYF

SEQ ID NO: 617815 - protein, 18 aa, Homo sapiens
  CDR3 for alpha chain variable domain of TCR clone 308908 (TRAV26-2, TRAJ45)
CILRVDKYSGGGADGLTF

SEQ ID NO: 617816 - protein, 18 aa, Homo sapiens
  CDR3 for beta chain variable domain of TCR clone 308908 (TRBV27, TRBJ2-1)
CASGNRAVGVGSKNEQFF

SEQ ID NO: 617817 - protein, 14 aa, Homo sapiens
  CDR3 for alpha chain variable domain of TCR clone 308909 (TRAV3, TRAJ8)
CAVSLNTGFQKLVF

SEQ ID NO: 617818 - protein, 14 aa, Homo sapiens
  CDR3 for beta chain variable domain of TCR clone 308909 (TRBV6-6, TRBJ1-5)
CASVDSGFNQHQHF

SEQ ID NO: 617819 - protein, 11 aa, Homo sapiens
  CDR3 for alpha chain variable domain of TCR clone 308910 (TRAV35, TRAJ30)
CAPGEDDKIIF

SEQ ID NO: 617820 - protein, 14 aa, Homo sapiens
  CDR3 for beta chain variable domain of TCR clone 308910 (TRBV7-6, TRBJ2-1)
CASSLGGGADEQFF

SEQ ID NO: 617821 - protein, 12 aa, Homo sapiens
  CDR3 for alpha chain variable domain of TCR clone 308911 (TRAV13-1, TRAJ27)
CAAHTNAGKSTF

SEQ ID NO: 617822 - protein, 14 aa, Homo sapiens
  CDR3 for beta chain variable domain of TCR clone 308911 (TRBV19, TRBJ2-2)
CTSSGRGIAGELFF

SEQ ID NO: 617823 - protein, 12 aa, Homo sapiens
  CDR3 for alpha chain variable domain of TCR clone 308912 (TRAV8-3, TRAJ20)
CAVGANDYKLSF

SEQ ID NO: 617824 - protein, 14 aa, Homo sapiens
  CDR3 for beta chain variable domain of TCR clone 308912 (TRBV19, TRBJ2-1)
CASKDPSSYNEQFF

SEQ ID NO: 617825 - protein, 12 aa, Homo sapiens
  CDR3 for alpha chain variable domain of TCR clone 308913 (TRAV1-1, TRAJ39)
CAVPVVGNMLTF

SEQ ID NO: 617826 - protein, 16 aa, Homo sapiens
  CDR3 for beta chain variable domain of TCR clone 308913 (TRBV28, TRBJ2-7)
CASSPWVATGDLAQYF

SEQ ID NO: 617827 - protein, 14 aa, Homo sapiens
  CDR3 for alpha chain variable domain of TCR clone 308914 (TRAV20, TRAJ47)
CAVTFGEYGNKLVF

SEQ ID NO: 617828 - protein, 13 aa, Homo sapiens
  CDR3 for beta chain variable domain of TCR clone 308914 (TRBV10-3, TRBJ2-7)
CASKLAVKYEQYF

SEQ ID NO: 617829 - protein, 16 aa, Homo sapiens
  CDR3 for alpha chain variable domain of TCR clone 308915 (TRAV3, TRAJ10)
CAVRDMRAGGGNKLTF

SEQ ID NO: 617830 - protein, 19 aa, Homo sapiens
  CDR3 for beta chain variable domain of TCR clone 308915 (TRBV6-3, TRBJ1-2)
CVSSYSKGRTGPPNYGYTF

SEQ ID NO: 617831 - protein, 10 aa, Homo sapiens
  CDR3 for alpha chain variable domain of TCR clone 308916 (TRAV23/DV6, TRAJ3)
CSATTFALGG

SEQ ID NO: 617832 - protein, 15 aa, Homo sapiens
  CDR3 for beta chain variable domain of TCR clone 308916 (TRBV19, TRBJ1-6)
CASSTQGAVGSPLHF

SEQ ID NO: 617833 - protein, 11 aa, Homo sapiens
  CDR3 for alpha chain variable domain of TCR clone 308917 (TRAV12-3, TRAJ16)
LTGGDGQKLLF

SEQ ID NO: 617834 - protein, 13 aa, Homo sapiens
  CDR3 for beta chain variable domain of TCR clone 308917 (TRBV12-4, TRBJ1-4)
CASAMGHNETLFF

SEQ ID NO: 617835 - protein, 15 aa, Homo sapiens
  CDR3 for alpha chain variable domain of TCR clone 308918 (TRAV12-2, TRAJ53)
CAVNGGGGSNYKLTF

SEQ ID NO: 617836 - protein, 17 aa, Homo sapiens
  CDR3 for beta chain variable domain of TCR clone 308918 (TRBV28, TRBJ2-3)
CASSPTPAGGRVDTQYF

SEQ ID NO: 617837 - protein, 12 aa, Homo sapiens
  CDR3 for alpha chain variable domain of TCR clone 308919 (TRAV3, TRAJ20)
CAVRDGDYKLSF

SEQ ID NO: 617838 - protein, 14 aa, Homo sapiens
  CDR3 for beta chain variable domain of TCR clone 308919 (TRBV19, TRBJ2-1)
CASSKDRGLDEQFF

SEQ ID NO: 617839 - protein, 13 aa, Homo sapiens
  CDR3 for alpha chain variable domain of TCR clone 308920 (TRAV12-3, TRAJ9)
CAMRNTGGFKTIF

SEQ ID NO: 617840 - protein, 16 aa, Homo sapiens
  CDR3 for beta chain variable domain of TCR clone 308920 (TRBV19, TRBJ2-1)
CASSIDESFAYNEQFF

SEQ ID NO: 617841 - protein, 15 aa, Homo sapiens
  CDR3 for alpha chain variable domain of TCR clone 308921 (TRAV27, TRAJ38)
CAARRNAGNNRKLLW

SEQ ID NO: 617842 - protein, 13 aa, Homo sapiens
  CDR3 for beta chain variable domain of TCR clone 308921 (TRBV20-1, TRBJ1-1)
CSARGGGNTEAFF

SEQ ID NO: 617843 - protein, 17 aa, Homo sapiens
  CDR3 for alpha chain variable domain of TCR clone 308922 (TRAV13-1, TRAJ52)
CAAGRNAGGTSYGKLTF

SEQ ID NO: 617844 - protein, 13 aa, Homo sapiens
  CDR3 for beta chain variable domain of TCR clone 308922 (TRBV7-2, TRBJ1-1)
CSSNLKGAKVAFF

SEQ ID NO: 617845 - protein, 12 aa, Homo sapiens
  CDR3 for alpha chain variable domain of TCR clone 308923 (TRAV26-1, TRAJ17)
CIVRSEGNKLPF

SEQ ID NO: 617846 - protein, 15 aa, Homo sapiens
  CDR3 for beta chain variable domain of TCR clone 308923 (TRBV7-6, TRBJ1-2)
CASSSGGRGGYGDTF

SEQ ID NO: 617847 - protein, 15 aa, Homo sapiens
  CDR3 for alpha chain variable domain of TCR clone 308924 (TRAV12-1, TRAJ41)
CVVNGASNSGYALNF

SEQ ID NO: 617848 - protein, 15 aa, Homo sapiens
  CDR3 for beta chain variable domain of TCR clone 308924 (TRBV11-2, TRBJ1-6)
CASSLDPWAVSPLHF

SEQ ID NO: 617849 - protein, 14 aa, Homo sapiens
  CDR3 for alpha chain variable domain of TCR clone 308925 (TRAV27, TRAJ49)
CAGRPEGTGNQFYF

SEQ ID NO: 617850 - protein, 13 aa, Homo sapiens
  CDR3 for beta chain variable domain of TCR clone 308925 (TRBV20-1, TRBJ1-2)
CSARGTADYGYTF

SEQ ID NO: 617851 - protein, 13 aa, Homo sapiens
  CDR3 for alpha chain variable domain of TCR clone 308926 (TRAV2, TRAJ40)
CAVVTSGTCKYIF

SEQ ID NO: 617852 - protein, 16 aa, Homo sapiens
  CDR3 for beta chain variable domain of TCR clone 308926 (TRBV7-9, TRBJ1-3)
CASSLGAGSSGNTIYF

SEQ ID NO: 617853 - protein, 17 aa, Homo sapiens
  CDR3 for alpha chain variable domain of TCR clone 308927 (TRAV8-6, TRAJ58)
CAVSSWVGETSGSRLTV

SEQ ID NO: 617854 - protein, 15 aa, Homo sapiens
  CDR3 for beta chain variable domain of TCR clone 308927 (TRBV20-1, TRBJ2-7)
CSARDRVSGMDEQYF

SEQ ID NO: 617855 - protein, 13 aa, Homo sapiens
  CDR3 for alpha chain variable domain of TCR clone 308928 (TRAV14/DV4, TRAJ22)
CAMRDLSAWQLTF

SEQ ID NO: 617856 - protein, 18 aa, Homo sapiens
  CDR3 for beta chain variable domain of TCR clone 308928 (TRBV19, TRBJ1-5)
CASSKGQVSIHSNQPQHF

SEQ ID NO: 617857 - protein, 12 aa, Homo sapiens
  CDR3 for alpha chain variable domain of TCR clone 308929 (TRAV12-1, TRAJ40)
CVVPSGTYKYIF

SEQ ID NO: 617858 - protein, 15 aa, Homo sapiens
  CDR3 for beta chain variable domain of TCR clone 308929 (TRBV12-4, TRBJ2-1)
CASSRLSGRNSEQLF

SEQ ID NO: 617859 - protein, 13 aa, Homo sapiens
  CDR3 for alpha chain variable domain of TCR clone 308930 (TRAV12-2, TRAJ52)
SAAHGTSYGKLTF

SEQ ID NO: 617860 - protein, 15 aa, Homo sapiens
  CDR3 for beta chain variable domain of TCR clone 308930 (TRBV10-3, TRBJ2-7)
CAISTFSGVKGEQYF

SEQ ID NO: 617861 - protein, 14 aa, Homo sapiens
  CDR3 for alpha chain variable domain of TCR clone 308931 (TRAV12-2, TRAJ17)
CAVLFKAAGNKLTF

SEQ ID NO: 617862 - protein, 15 aa, Homo sapiens
  CDR3 for beta chain variable domain of TCR clone 308931 (TRBV7-3, TRBJ2-2)
CASSETGQGTGELFF

SEQ ID NO: 617863 - protein, 13 aa, Homo sapiens
  CDR3 for alpha chain variable domain of TCR clone 308932 (TRAV29/DV5, TRAJ58)
CAGEETSGSRLTL

SEQ ID NO: 617864 - protein, 15 aa, Homo sapiens
  CDR3 for beta chain variable domain of TCR clone 308932 (TRBV11-2, TRBJ1-6)
CASTGFGTAVSPLHF

SEQ ID NO: 617865 - protein, 15 aa, Homo sapiens
  CDR3 for alpha chain variable domain of TCR clone 308933 (TRAV8-3, TRAJ45)
WASSYSGGGAAGLTF

SEQ ID NO: 617866 - protein, 13 aa, Homo sapiens
  CDR3 for beta chain variable domain of TCR clone 308933 (TRBV10-3, TRBJ2-7)
CASKLAVNYEQYF

SEQ ID NO: 617867 - protein, 13 aa, Homo sapiens
  CDR3 for alpha chain variable domain of TCR clone 308934 (TRAV12-1, TRAJ20)
CVGQRFNDYKLSF

SEQ ID NO: 617868 - protein, 14 aa, Homo sapiens
  CDR3 for beta chain variable domain of TCR clone 308934 (TRBV6-3, TRBJ1-5)
CASSYSRVAQPQHF

SEQ ID NO: 617869 - protein, 13 aa, Homo sapiens
  CDR3 for alpha chain variable domain of TCR clone 308935 (TRAV13-2, TRAJ5)
CAVMDTGRRALTF

SEQ ID NO: 617870 - protein, 13 aa, Homo sapiens
  CDR3 for beta chain variable domain of TCR clone 308935 (TRBV19, TRBJ1-2)
CASSQGQVYGYTF

SEQ ID NO: 617871 - protein, 11 aa, Homo sapiens
  CDR3 for alpha chain variable domain of TCR clone 308936 (TRAV2, TRAJ13)
CASGGYQKVTF

SEQ ID NO: 617872 - protein, 16 aa, Homo sapiens
  CDR3 for beta chain variable domain of TCR clone 308936 (TRBV18, TRBJ2-1)
CASSPYLSIRGDEQFF

SEQ ID NO: 617873 - protein, 17 aa, Homo sapiens
  CDR3 for alpha chain variable domain of TCR clone 308937 (TRAV12-2, TRAJ6)
GAPQAPPRAGGSYIPTF

SEQ ID NO: 617874 - protein, 16 aa, Homo sapiens
  CDR3 for beta chain variable domain of TCR clone 308937 (TRBV19, TRBJ2-2)
CASSTARASNTGELFF

SEQ ID NO: 617875 - protein, 14 aa, Homo sapiens
  CDR3 for alpha chain variable domain of TCR clone 308938 (TRAV17, TRAJ57)
CATDASGGSEKLVF

SEQ ID NO: 617876 - protein, 14 aa, Homo sapiens
  CDR3 for beta chain variable domain of TCR clone 308938 (TRBV7-2, TRBJ2-7)
CASSPKTSFYEQYF

SEQ ID NO: 617877 - protein, 16 aa, Homo sapiens
  CDR3 for alpha chain variable domain of TCR clone 308939 (TRAV16, TRAJ57)
FAPYLITQGGSEKLVF

SEQ ID NO: 617878 - protein, 14 aa, Homo sapiens
  CDR3 for beta chain variable domain of TCR clone 308939 (TRBV11-2, TRBJ2-7)
CASSSTGEGYEQYF

SEQ ID NO: 617879 - protein, 12 aa, Homo sapiens
  CDR3 for alpha chain variable domain of TCR clone 308940 (TRAV8-4, TRAJ43)
CAVSVNNNDMRF

SEQ ID NO: 617880 - protein, 16 aa, Homo sapiens
  CDR3 for beta chain variable domain of TCR clone 308940 (TRBV19, TRBJ2-1)
CASSSKGTRSYNEQFF

SEQ ID NO: 617881 - protein, 19 aa, Homo sapiens
  CDR3 for alpha chain variable domain of TCR clone 308941 (TRAV2, TRAJ20)
ILQVREADAAVYRDCKLSF

SEQ ID NO: 617882 - protein, 16 aa, Homo sapiens
  CDR3 for beta chain variable domain of TCR clone 308941 (TRBV5-1, TRBJ2-3)
CASSLGLAVYTDTHYF

SEQ ID NO: 617883 - protein, 15 aa, Homo sapiens
  CDR3 for alpha chain variable domain of TCR clone 308942 (TRAV26-1, TRAJ29)
CIVRVEGSGNTPLVF

SEQ ID NO: 617884 - protein, 14 aa, Homo sapiens
  CDR3 for beta chain variable domain of TCR clone 308942 (TRBV13, TRBJ2-5)
CASYRRLAEETQYF

SEQ ID NO: 617885 - protein, 14 aa, Homo sapiens
  CDR3 for alpha chain variable domain of TCR clone 308943 (TRAV12-2, TRAJ40)
CAVKIPSGTYKYIF

SEQ ID NO: 617886 - protein, 14 aa, Homo sapiens
  CDR3 for beta chain variable domain of TCR clone 308943 (TRBV20-1, TRBJ1-1)
CTAQTRIGGTEAFF

SEQ ID NO: 617887 - protein, 13 aa, Homo sapiens
  CDR3 for alpha chain variable domain of TCR clone 308944 (TRAV12-1, TRAJ6)
CVVFPGGSYIPTF

SEQ ID NO: 617888 - protein, 13 aa, Homo sapiens
  CDR3 for beta chain variable domain of TCR clone 308944 (TRBV12-4, TRBJ2-7)
CASSFVPTAEQYF

SEQ ID NO: 617889 - protein, 12 aa, Homo sapiens
  CDR3 for alpha chain variable domain of TCR clone 308945 (TRAV12-1, TRAJ40)
CVVYSGTYKYIF

SEQ ID NO: 617890 - protein, 16 aa, Homo sapiens
  CDR3 for beta chain variable domain of TCR clone 308945 (TRBV20-1, TRBJ2-1)
CSARGLKQGMNNEQFF

SEQ ID NO: 617891 - protein, 13 aa, Homo sapiens
  CDR3 for alpha chain variable domain of TCR clone 308946 (TRAV12-3, TRAJ53)
CAMRGGSNYKLTF

SEQ ID NO: 617892 - protein, 15 aa, Homo sapiens
  CDR3 for beta chain variable domain of TCR clone 308946 (TRBV2, TRBJ2-1)
CATQARLVMIGEQFL

SEQ ID NO: 617893 - protein, 15 aa, Homo sapiens
  CDR3 for alpha chain variable domain of TCR clone 308947 (TRAV3, TRAJ15)
CAVRPANQAGTALIF

SEQ ID NO: 617894 - protein, 15 aa, Homo sapiens
  CDR3 for beta chain variable domain of TCR clone 308947 (TRBV12-4, TRBJ2-5)
CASSPPTGLQETQYF

SEQ ID NO: 617895 - protein, 10 aa, Homo sapiens
  CDR3 for alpha chain variable domain of TCR clone 308948 (TRAV12-1, TRAJ33)
CVASNYQLTW

SEQ ID NO: 617896 - protein, 15 aa, Homo sapiens
  CDR3 for beta chain variable domain of TCR clone 308948 (TRBV5-4, TRBJ1-4)
CASSHGDGENEKLFF

SEQ ID NO: 617897 - protein, 14 aa, Homo sapiens
  CDR3 for alpha chain variable domain of TCR clone 308949 (TRAV16, TRAJ26)
CALSSANYGQNFGF

SEQ ID NO: 617898 - protein, 12 aa, Homo sapiens
  CDR3 for beta chain variable domain of TCR clone 308949 (TRBV6-5, TRBJ2-2)
CASRTGTGELFF

SEQ ID NO: 617899 - protein, 12 aa, Homo sapiens
  CDR3 for alpha chain variable domain of TCR clone 308950 (TRAV29/DV5, TRAJ43)
CAAPYNNNDMRF

SEQ ID NO: 617900 - protein, 17 aa, Homo sapiens
  CDR3 for beta chain variable domain of TCR clone 308950 (TRBV19, TRBJ2-6)
CASSTGQVFSGANVLSF

SEQ ID NO: 617901 - protein, 15 aa, Homo sapiens
  CDR3 for alpha chain variable domain of TCR clone 308951 (TRAV12-3, TRAJ11)
CAMSDENSGYSTLTF

SEQ ID NO: 617902 - protein, 16 aa, Homo sapiens
  CDR3 for beta chain variable domain of TCR clone 308951 (TRBV5-1, TRBJ2-7)
CASSLEGLAGLYEQYF

SEQ ID NO: 617903 - protein, 16 aa, Homo sapiens
  CDR3 for alpha chain variable domain of TCR clone 308952 (TRAV23/DV6, TRAJ9)
CAASIGGTTGGFKTIF

SEQ ID NO: 617904 - protein, 13 aa, Homo sapiens
  CDR3 for beta chain variable domain of TCR clone 308952 (TRBV7-9, TRBJ1-2)
CASSLKQNYGYTF

SEQ ID NO: 617905 - protein, 18 aa, Homo sapiens
  CDR3 for alpha chain variable domain of TCR clone 308953 (TRAV8-3, TRAJ4)
WVRDPTSNDPGGYNKLIF

SEQ ID NO: 617906 - protein, 13 aa, Homo sapiens
  CDR3 for beta chain variable domain of TCR clone 308953 (TRBV20-1, TRBJ1-2)
CSATGLQASGYTF

SEQ ID NO: 617907 - protein, 14 aa, Homo sapiens
  CDR3 for alpha chain variable domain of TCR clone 308954 (TRAV26-2, TRAJ32)
CCVGYGGATNKLIF

SEQ ID NO: 617908 - protein, 14 aa, Homo sapiens
  CDR3 for beta chain variable domain of TCR clone 308954 (TRBV4-2, TRBJ2-1)
CASGLDRAYNEHFF

SEQ ID NO: 617909 - protein, 14 aa, Homo sapiens
  CDR3 for alpha chain variable domain of TCR clone 308955 (TRAV8-4, TRAJ13)
CAVTLSGGYQKVAF

SEQ ID NO: 617910 - protein, 16 aa, Homo sapiens
  CDR3 for beta chain variable domain of TCR clone 308955 (TRBV5-7, TRBJ1-4)
CASSPSGGLKTEKLFF

SEQ ID NO: 617911 - protein, 12 aa, Homo sapiens
  CDR3 for alpha chain variable domain of TCR clone 308956 (TRAV26-1, TRAJ48)
CIAVFGNERLTF

SEQ ID NO: 617912 - protein, 17 aa, Homo sapiens
  CDR3 for beta chain variable domain of TCR clone 308956 (TRBV7-6, TRBJ2-1)
CASSFGLAGGTYNEQFF

SEQ ID NO: 617913 - protein, 15 aa, Homo sapiens
  CDR3 for alpha chain variable domain of TCR clone 308957 (TRAV29/DV5, TRAJ29)
CAASERSSGNTPLVF

SEQ ID NO: 617914 - protein, 16 aa, Homo sapiens
  CDR3 for beta chain variable domain of TCR clone 308957 (TRBV7-6, TRBJ2-1)
CASSAPGPSSYNEQFF

SEQ ID NO: 617915 - protein, 12 aa, Homo sapiens
  CDR3 for alpha chain variable domain of TCR clone 308958 (TRAV8-3, TRAJ41)
CAVALSGYALNF

SEQ ID NO: 617916 - protein, 11 aa, Homo sapiens
  CDR3 for beta chain variable domain of TCR clone 308958 (TRBV2, TRBJ1-4)
CASRENEKLFF

SEQ ID NO: 617917 - protein, 11 aa, Homo sapiens
  CDR3 for alpha chain variable domain of TCR clone 308959 (TRAV26-2, TRAJ8)
CIPTGFQKLVF

SEQ ID NO: 617918 - protein, 13 aa, Homo sapiens
  CDR3 for beta chain variable domain of TCR clone 308959 (TRBV7-9, TRBJ2-3)
CASSPGSTDTQYF

SEQ ID NO: 617919 - protein, 15 aa, Homo sapiens
  CDR3 for alpha chain variable domain of TCR clone 308960 (TRAV13-2, TRAJ22)
CAENSRPGSARQLTF

SEQ ID NO: 617920 - protein, 17 aa, Homo sapiens
  CDR3 for beta chain variable domain of TCR clone 308960 (TRBV20-1, TRBJ2-6)
CSATRDRGPSGANVLTY

SEQ ID NO: 617921 - protein, 15 aa, Homo sapiens
  CDR3 for alpha chain variable domain of TCR clone 308961 (TRAV3, TRAJ5)
CAVRDRKTGRRALTF

SEQ ID NO: 617922 - protein, 15 aa, Homo sapiens
  CDR3 for beta chain variable domain of TCR clone 308961 (TRBV7-9, TRBJ2-2)
CASGPLYTFPGELFF

SEQ ID NO: 617923 - protein, 16 aa, Homo sapiens
  CDR3 for alpha chain variable domain of TCR clone 308962 (TRAV17, TRAJ35)
CATAEGGIGFGNVLHC

SEQ ID NO: 617924 - protein, 16 aa, Homo sapiens
  CDR3 for beta chain variable domain of TCR clone 308962 (TRBV6-5, TRBJ2-7)
CASSSDATSGFYEQYF

SEQ ID NO: 617925 - protein, 14 aa, Homo sapiens
  CDR3 for alpha chain variable domain of TCR clone 308963 (TRAV8-3, TRAJ44)
CAVGLTGTASKLTF

SEQ ID NO: 617926 - protein, 14 aa, Homo sapiens
  CDR3 for beta chain variable domain of TCR clone 308963 (TRBV7-8, TRBJ2-3)
CASSLEAGTDTRYF

SEQ ID NO: 617927 - protein, 12 aa, Homo sapiens
  CDR3 for alpha chain variable domain of TCR clone 308964 (TRAV13-2, TRAJ8)
CAPWLGFQKLVF

SEQ ID NO: 617928 - protein, 13 aa, Homo sapiens
  CDR3 for beta chain variable domain of TCR clone 308964 (TRBV29-1, TRBJ1-3)
CSADVDSGNTIYF

SEQ ID NO: 617929 - protein, 13 aa, Homo sapiens
  CDR3 for alpha chain variable domain of TCR clone 308965 (TRAV12-2, TRAJ39)
CAVNNNTGNMLTF

SEQ ID NO: 617930 - protein, 13 aa, Homo sapiens
  CDR3 for beta chain variable domain of TCR clone 308965 (TRBV2, TRBJ1-5)
CATAGPGNQTQHF

SEQ ID NO: 617931 - protein, 11 aa, Homo sapiens
  CDR3 for alpha chain variable domain of TCR clone 308966 (TRAV2, TRAJ33)
CAVDSNYQLIW

SEQ ID NO: 617932 - protein, 15 aa, Homo sapiens
  CDR3 for beta chain variable domain of TCR clone 308966 (TRBV9, TRBJ1-6)
CASSVAGTGDSTLHF

SEQ ID NO: 617933 - protein, 15 aa, Homo sapiens
  CDR3 for alpha chain variable domain of TCR clone 308967 (TRAV17, TRAJ54)
CATEKLGQGAQKLVF

SEQ ID NO: 617934 - protein, 16 aa, Homo sapiens
  CDR3 for beta chain variable domain of TCR clone 308967 (TRBV9, TRBJ1-2)
CASSVEGKVSPYGYTF

SEQ ID NO: 617935 - protein, 11 aa, Homo sapiens
  CDR3 for alpha chain variable domain of TCR clone 308968 (TRAV39, TRAJ49)
CAVDISTQFYY

SEQ ID NO: 617936 - protein, 11 aa, Homo sapiens
  CDR3 for beta chain variable domain of TCR clone 308968 (TRBV7-8, TRBJ2-7)
CASSLSLEQYF

SEQ ID NO: 617937 - protein, 23 aa, Homo sapiens
  CDR3 for alpha chain variable domain of TCR clone 308969 (TRAV13-1, TRAJ42)
CAASKKAKEISSLEKALNSLLNQ

SEQ ID NO: 617938 - protein, 12 aa, Homo sapiens
  CDR3 for beta chain variable domain of TCR clone 308969 (TRBV7-8, TRBJ2-7)
CAGSLGDREQYF

SEQ ID NO: 617939 - protein, 12 aa, Homo sapiens
  CDR3 for alpha chain variable domain of TCR clone 308970 (TRAV13-1, TRAJ48)
CAANFGNEKLTF

SEQ ID NO: 617940 - protein, 14 aa, Homo sapiens
  CDR3 for beta chain variable domain of TCR clone 308970 (TRBV7-2, TRBJ2-5)
CASSPRGSSETQYF

SEQ ID NO: 617941 - protein, 20 aa, Homo sapiens
  CDR3 for alpha chain variable domain of TCR clone 308971 (TRAV26-1, TRAJ57)
CCVLLHRQVETQGGSEKLVF

SEQ ID NO: 617942 - protein, 16 aa, Homo sapiens
  CDR3 for beta chain variable domain of TCR clone 308971 (TRBV4-2, TRBJ2-7)
CASSQEELAGTYEQYF

SEQ ID NO: 617943 - protein, 15 aa, Homo sapiens
  CDR3 for alpha chain variable domain of TCR clone 308972 (TRAV8-3, TRAJ7)
CAVGSISYGNNRLAF

SEQ ID NO: 617944 - protein, 14 aa, Homo sapiens
  CDR3 for beta chain variable domain of TCR clone 308972 (TRBV5-1, TRBJ2-3)
CASSLFGPTDTQYF

SEQ ID NO: 617945 - protein, 18 aa, Homo sapiens
  CDR3 for alpha chain variable domain of TCR clone 308973 (TRAV26-1, TRAJ22)
CIVRVALISSGSARQLTF

SEQ ID NO: 617946 - protein, 13 aa, Homo sapiens
  CDR3 for beta chain variable domain of TCR clone 308973 (TRBV13, TRBJ2-5)
CASSPEVGGTQYF

SEQ ID NO: 617947 - protein, 12 aa, Homo sapiens
  CDR3 for alpha chain variable domain of TCR clone 308974 (TRAV8-3, TRAJ4)
PAFSGGYNKLIF

SEQ ID NO: 617948 - protein, 13 aa, Homo sapiens
  CDR3 for beta chain variable domain of TCR clone 308974 (TRBV20-1, TRBJ1-3)
CSAGAYSGNTIYV

SEQ ID NO: 617949 - protein, 12 aa, Homo sapiens
  CDR3 for alpha chain variable domain of TCR clone 308975 (TRAV8-3, TRAJ26)
CADDNYGQNFVF

SEQ ID NO: 617950 - protein, 15 aa, Homo sapiens
  CDR3 for beta chain variable domain of TCR clone 308975 (TRBV9, TRBJ2-1)
CASSLAGSSYNEQIF

SEQ ID NO: 617951 - protein, 11 aa, Homo sapiens
  CDR3 for alpha chain variable domain of TCR clone 308976 (TRAV36/DV7, TRAJ43)
CAVERVNDMRF

SEQ ID NO: 617952 - protein, 17 aa, Homo sapiens
  CDR3 for beta chain variable domain of TCR clone 308976 (TRBV28, TRBJ2-5)
CASSRQGGLAGAETQYF

SEQ ID NO: 617953 - protein, 18 aa, Homo sapiens
  CDR3 for alpha chain variable domain of TCR clone 308977 (TRAV21, TRAJ52)
CAVRPSPAGGTSYGKLTF

SEQ ID NO: 617954 - protein, 18 aa, Homo sapiens
  CDR3 for beta chain variable domain of TCR clone 308977 (TRBV7-9, TRBJ2-1)
CASSTGLAEGSSYNEQFF

SEQ ID NO: 617955 - protein, 17 aa, Homo sapiens
  CDR3 for alpha chain variable domain of TCR clone 308978 (TRAV3, TRAJ38)
CAVRDCLNAGNNRKLIL

SEQ ID NO: 617956 - protein, 14 aa, Homo sapiens
  CDR3 for beta chain variable domain of TCR clone 308978 (TRBV12-5, TRBJ2-5)
CASGSRTHQETQYF

SEQ ID NO: 617957 - protein, 14 aa, Homo sapiens
  CDR3 for alpha chain variable domain of TCR clone 308979 (TRAV20, TRAJ42)
CAVQAGGSQGNLIF

SEQ ID NO: 617958 - protein, 13 aa, Homo sapiens
  CDR3 for beta chain variable domain of TCR clone 308979 (TRBV7-3, TRBJ1-5)
CASSLDSNQPQHF

SEQ ID NO: 617959 - protein, 14 aa, Homo sapiens
  CDR3 for alpha chain variable domain of TCR clone 308980 (TRAV13-1, TRAJ6)
CAASITGGSYIPTF

SEQ ID NO: 617960 - protein, 15 aa, Homo sapiens
  CDR3 for beta chain variable domain of TCR clone 308980 (TRBV10-2, TRBJ2-6)
CASSEQGTGANVLTF

SEQ ID NO: 617961 - protein, 14 aa, Homo sapiens
  CDR3 for alpha chain variable domain of TCR clone 308981 (TRAV12-2, TRAJ13)
CAVTKTGGYKKVTF

SEQ ID NO: 617962 - protein, 15 aa, Homo sapiens
  CDR3 for beta chain variable domain of TCR clone 308981 (TRBV27, TRBJ2-1)
CASSNGGGSSNEQFF

SEQ ID NO: 617963 - protein, 13 aa, Homo sapiens
  CDR3 for alpha chain variable domain of TCR clone 308982 (TRAV8-3, TRAJ28)
CAVGAFGSYQLTF

SEQ ID NO: 617964 - protein, 15 aa, Homo sapiens
  CDR3 for beta chain variable domain of TCR clone 308982 (TRBV7-9, TRBJ1-5)
CASSQGHQPNQTQHC

SEQ ID NO: 617965 - protein, 14 aa, Homo sapiens
  CDR3 for alpha chain variable domain of TCR clone 308983 (TRAV35, TRAJ22)
CAGLRPGFARQLTF

SEQ ID NO: 617966 - protein, 14 aa, Homo sapiens
  CDR3 for beta chain variable domain of TCR clone 308983 (TRBV4-1, TRBJ2-7)
CASSPVAGGDEQYF

SEQ ID NO: 617967 - protein, 13 aa, Homo sapiens
  CDR3 for alpha chain variable domain of TCR clone 308984 (TRAV8-3, TRAJ43)
CAVGPDNNDDMRF

SEQ ID NO: 617968 - protein, 12 aa, Homo sapiens
  CDR3 for beta chain variable domain of TCR clone 308984 (TRBV7-2, TRBJ1-6)
CASSLSSSPLHF

SEQ ID NO: 617969 - protein, 13 aa, Homo sapiens
  CDR3 for alpha chain variable domain of TCR clone 308985 (TRAV2, TRAJ15)
CAVASQAGTALIF

SEQ ID NO: 617970 - protein, 17 aa, Homo sapiens
  CDR3 for beta chain variable domain of TCR clone 308985 (TRBV20-1, TRBJ2-2)
FSAGGSGQGGLTGELFF

SEQ ID NO: 617971 - protein, 13 aa, Homo sapiens
  CDR3 for alpha chain variable domain of TCR clone 308986 (TRAV8-6, TRAJ50)
CAVIKTSYDKVIF

SEQ ID NO: 617972 - protein, 13 aa, Homo sapiens
  CDR3 for beta chain variable domain of TCR clone 308986 (TRBV18, TRBJ1-1)
CASSGGRNTGAFF

SEQ ID NO: 617973 - protein, 14 aa, Homo sapiens
  CDR3 for alpha chain variable domain of TCR clone 308987 (TRAV1-2, TRAJ16)
CAVNRFSDGQKLLS

SEQ ID NO: 617974 - protein, 13 aa, Homo sapiens
  CDR3 for beta chain variable domain of TCR clone 308987 (TRBV7-3, TRBJ1-1)
CASSQDWGAEAFF

SEQ ID NO: 617975 - protein, 14 aa, Homo sapiens
  CDR3 for alpha chain variable domain of TCR clone 308988 (TRAV12-2, TRAJ17)
CAVLFKAAGNKLTF

SEQ ID NO: 617976 - protein, 15 aa, Homo sapiens
  CDR3 for beta chain variable domain of TCR clone 308988 (TRBV20-1, TRBJ2-7)
CSARDRVSGMDEQYI

SEQ ID NO: 617977 - protein, 14 aa, Homo sapiens
  CDR3 for alpha chain variable domain of TCR clone 308989 (TRAV8-4, TRAJ13)
CAVTLSGGYQKVTF

SEQ ID NO: 617978 - protein, 14 aa, Homo sapiens
  CDR3 for beta chain variable domain of TCR clone 308989 (TRBV11-2, TRBJ1-2)
CASSLGTANYGYTF

SEQ ID NO: 617979 - protein, 13 aa, Homo sapiens
  CDR3 for alpha chain variable domain of TCR clone 308990 (TRAV12-3, TRAJ13)
SAMSSGGYQKVTF

SEQ ID NO: 617980 - protein, 14 aa, Homo sapiens
  CDR3 for beta chain variable domain of TCR clone 308990 (TRBV2, TRBJ2-1)
CASRTGSSYNEQFF

SEQ ID NO: 617981 - protein, 15 aa, Homo sapiens
  CDR3 for alpha chain variable domain of TCR clone 308991 (TRAV8-3, TRAJ11)
CAVGLLNSGYSTLTF

SEQ ID NO: 617982 - protein, 13 aa, Homo sapiens
  CDR3 for beta chain variable domain of TCR clone 308991 (TRBV12-4, TRBJ2-7)
CASSFQGHYEQYF

SEQ ID NO: 617983 - protein, 15 aa, Homo sapiens
  CDR3 for alpha chain variable domain of TCR clone 308992 (TRAV21, TRAJ24)
CAARSSTDSWGKLQF

SEQ ID NO: 617984 - protein, 19 aa, Homo sapiens
  CDR3 for beta chain variable domain of TCR clone 308992 (TRBV25-1, TRBJ2-2)
CAILVYRVDRGRKTGELFF

SEQ ID NO: 617985 - protein, 12 aa, Homo sapiens
  CDR3 for alpha chain variable domain of TCR clone 308993 (TRAV21, TRAJ11)
CAATSGYSTLTF

SEQ ID NO: 617986 - protein, 15 aa, Homo sapiens
  CDR3 for beta chain variable domain of TCR clone 308993 (TRBV7-3, TRBJ2-5)
CASSAARSLTETQYF

SEQ ID NO: 617987 - protein, 12 aa, Homo sapiens
  CDR3 for alpha chain variable domain of TCR clone 308994 (TRAV13-1, TRAJ9)
CAAHTGGFKTIF

SEQ ID NO: 617988 - protein, 18 aa, Homo sapiens
  CDR3 for beta chain variable domain of TCR clone 308994 (TRBV11-2, TRBJ2-3)
CASSLGGASRGAPNTQYF

SEQ ID NO: 617989 - protein, 12 aa, Homo sapiens
  CDR3 for alpha chain variable domain of TCR clone 308995 (TRAV22, TRAJ22)
CAPGGSARQLTF

SEQ ID NO: 617990 - protein, 14 aa, Homo sapiens
  CDR3 for beta chain variable domain of TCR clone 308995 (TRBV11-3, TRBJ2-7)
CASSPDRSTYEQYF

SEQ ID NO: 617991 - protein, 13 aa, Homo sapiens
  CDR3 for alpha chain variable domain of TCR clone 308996 (TRAV2, TRAJ40)
CAVVTSGTYKYIF

SEQ ID NO: 617992 - protein, 13 aa, Homo sapiens
  CDR3 for beta chain variable domain of TCR clone 308996 (TRBV20-1, TRBJ1-1)
CSARVGGNTEAFF

SEQ ID NO: 617993 - protein, 14 aa, Homo sapiens
  CDR3 for alpha chain variable domain of TCR clone 308997 (TRAV12-3, TRAJ56)
CAMSVTGANSKLTF

SEQ ID NO: 617994 - protein, 15 aa, Homo sapiens
  CDR3 for beta chain variable domain of TCR clone 308997 (TRBV2, TRBJ2-1)
CASSELAGGHNEQFF

SEQ ID NO: 617995 - protein, 14 aa, Homo sapiens
  CDR3 for alpha chain variable domain of TCR clone 308998 (TRAV1-2, TRAJ16)
CAVNRFSDGRKLLF

SEQ ID NO: 617996 - protein, 13 aa, Homo sapiens
  CDR3 for beta chain variable domain of TCR clone 308998 (TRBV10-3, TRBJ2-7)
CASKLAVNYEQYF

SEQ ID NO: 617997 - protein, 14 aa, Homo sapiens
  CDR3 for alpha chain variable domain of TCR clone 308999 (TRAV12-2, TRAJ13)
CAVKKTGGYQKITF

SEQ ID NO: 617998 - protein, 15 aa, Homo sapiens
  CDR3 for beta chain variable domain of TCR clone 308999 (TRBV6-3, TRBJ2-7)
CASSSPGTVFYEQYF

SEQ ID NO: 617999 - protein, 14 aa, Homo sapiens
  CDR3 for alpha chain variable domain of TCR clone 309000 (TRAV17, TRAJ35)
CAMDRPGFGNVLHC

SEQ ID NO: 618000 - protein, 14 aa, Homo sapiens
  CDR3 for beta chain variable domain of TCR clone 309000 (TRBV7-8, TRBJ2-3)
CASSLEAGTDTQYF

SEQ ID NO: 618001 - protein, 12 aa, Homo sapiens
  CDR3 for alpha chain variable domain of TCR clone 309001 (TRAV13-2, TRAJ42)
CAEGGSQGNLIF

SEQ ID NO: 618002 - protein, 15 aa, Homo sapiens
  CDR3 for beta chain variable domain of TCR clone 309001 (TRBV7-9, TRBJ2-5)
CASSDTGRGRETQYF

SEQ ID NO: 618003 - protein, 14 aa, Homo sapiens
  CDR3 for alpha chain variable domain of TCR clone 309002 (TRAV4, TRAJ12)
CLVGYMDSSYKLIF

SEQ ID NO: 618004 - protein, 14 aa, Homo sapiens
  CDR3 for beta chain variable domain of TCR clone 309002 (TRBV27, TRBJ1-1)
CASSPGGGATESFF

SEQ ID NO: 618005 - protein, 12 aa, Homo sapiens
  CDR3 for alpha chain variable domain of TCR clone 309003 (TRAV17, TRAJ57)
CATDGGSEKLVF

SEQ ID NO: 618006 - protein, 13 aa, Homo sapiens
  CDR3 for beta chain variable domain of TCR clone 309003 (TRBV7-9, TRBJ2-7)
CAISFAGAYEQYF

SEQ ID NO: 618007 - protein, 10 aa, Homo sapiens
  CDR3 for alpha chain variable domain of TCR clone 309004 (TRAV13-2, TRAJ20)
CAENICRLQA

SEQ ID NO: 618008 - protein, 13 aa, Homo sapiens
  CDR3 for beta chain variable domain of TCR clone 309004 (TRBV20-1, TRBJ1-1)
CSAGTVGNTEAFF

SEQ ID NO: 618009 - protein, 12 aa, Homo sapiens
  CDR3 for alpha chain variable domain of TCR clone 309005 (TRAV13-1, TRAJ9)
CASHTGGFKTIF

SEQ ID NO: 618010 - protein, 18 aa, Homo sapiens
  CDR3 for beta chain variable domain of TCR clone 309005 (TRBV11-2, TRBJ2-3)
CASSLGGTSRGAPNTQYF

SEQ ID NO: 618011 - protein, 13 aa, Homo sapiens
  CDR3 for alpha chain variable domain of TCR clone 309006 (TRAV8-3, TRAJ48)
CAVVRFRNEKLTF

SEQ ID NO: 618012 - protein, 16 aa, Homo sapiens
  CDR3 for beta chain variable domain of TCR clone 309006 (TRBV20-1, TRBJ2-5)
CSARDFASGIQETQYF

SEQ ID NO: 618013 - protein, 13 aa, Homo sapiens
  CDR3 for alpha chain variable domain of TCR clone 309007 (TRAV12-2, TRAJ18)
CAVRGSTLGRLYF

SEQ ID NO: 618014 - protein, 12 aa, Homo sapiens
  CDR3 for beta chain variable domain of TCR clone 309007 (TRBV2, TRBJ2-1)
CAYGPPGNEQFF

SEQ ID NO: 618015 - protein, 16 aa, Homo sapiens
  CDR3 for alpha chain variable domain of TCR clone 309008 (TRAV30, TRAJ24)
CGTEIVDADSWGKFQF

SEQ ID NO: 618016 - protein, 14 aa, Homo sapiens
  CDR3 for beta chain variable domain of TCR clone 309008 (TRBV3-1, TRBJ2-7)
CASSPSGLPYEQYF

SEQ ID NO: 618017 - protein, 15 aa, Homo sapiens
  CDR3 for alpha chain variable domain of TCR clone 309009 (TRAV3, TRAJ9)
CAVRARNTGGFKTIF

SEQ ID NO: 618018 - protein, 15 aa, Homo sapiens
  CDR3 for beta chain variable domain of TCR clone 309009 (TRBV27, TRBJ1-1)
CASSPYADPHTEAFF

SEQ ID NO: 618019 - protein, 14 aa, Homo sapiens
  CDR3 for alpha chain variable domain of TCR clone 309010 (TRAV13-2, TRAJ54)
CAETAQQGAQKLVF

SEQ ID NO: 618020 - protein, 13 aa, Homo sapiens
  CDR3 for beta chain variable domain of TCR clone 309010 (TRBV7-9, TRBJ1-2)
CASSLKQNYGYTF

SEQ ID NO: 618021 - protein, 19 aa, Homo sapiens
  CDR3 for alpha chain variable domain of TCR clone 309011 (TRAV26-1, TRAJ28)
CIVRVAHAYSGAGSYQLTF

SEQ ID NO: 618022 - protein, 15 aa, Homo sapiens
  CDR3 for beta chain variable domain of TCR clone 309011 (TRBV9, TRBJ1-6)
CASSVAGTGDSPLHF

SEQ ID NO: 618023 - protein, 13 aa, Homo sapiens
  CDR3 for alpha chain variable domain of TCR clone 309012 (TRAV12-2, TRAJ26)
CAVNEHYGQNFVF

SEQ ID NO: 618024 - protein, 13 aa, Homo sapiens
  CDR3 for beta chain variable domain of TCR clone 309012 (TRBV18, TRBJ2-2)
CASSPTRGGELFF

SEQ ID NO: 618025 - protein, 22 aa, Homo sapiens
  CDR3 for alpha chain variable domain of TCR clone 309013 (TRAV4, )
CLVGPRNYDIQNPDPAVSQLRD

SEQ ID NO: 618026 - protein, 17 aa, Homo sapiens
  CDR3 for beta chain variable domain of TCR clone 309013 (TRBV24-1, TRBJ2-1)
CATSDVSTSGTYNEQFF

SEQ ID NO: 618027 - protein, 13 aa, Homo sapiens
  CDR3 for alpha chain variable domain of TCR clone 309014 (TRAV8-3, TRAJ48)
CCGCNFGNEKLTF

SEQ ID NO: 618028 - protein, 12 aa, Homo sapiens
  CDR3 for beta chain variable domain of TCR clone 309014 (TRBV7-2, TRBJ2-5)
CASSQYQETQYC

SEQ ID NO: 618029 - protein, 16 aa, Homo sapiens
  CDR3 for alpha chain variable domain of TCR clone 309015 (TRAV12-2, TRAJ10)
CAVNRGLTGGGNKLTF

SEQ ID NO: 618030 - protein, 13 aa, Homo sapiens
  CDR3 for beta chain variable domain of TCR clone 309015 (TRBV29-1, TRBJ2-7)
CSVKRGGNYEQYF

SEQ ID NO: 618031 - protein, 16 aa, Homo sapiens
  CDR3 for alpha chain variable domain of TCR clone 309016 (TRAV13-1, TRAJ48)
CAASIFGNFGNEKLTF

SEQ ID NO: 618032 - protein, 16 aa, Homo sapiens
  CDR3 for beta chain variable domain of TCR clone 309016 (TRBV7-2, TRBJ2-6)
CASSERRASGANVLTL

SEQ ID NO: 618033 - protein, 15 aa, Homo sapiens
  CDR3 for alpha chain variable domain of TCR clone 309017 (TRAV38-1, TRAJ37)
CAFIFDSGNTGKLIF

SEQ ID NO: 618034 - protein, 12 aa, Homo sapiens
  CDR3 for beta chain variable domain of TCR clone 309017 (TRBV7-9, TRBJ2-7)
CASSSEGYEQYF

SEQ ID NO: 618035 - protein, 13 aa, Homo sapiens
  CDR3 for alpha chain variable domain of TCR clone 309018 (TRAV25, TRAJ10)
CAGRTGGGNKLTF

SEQ ID NO: 618036 - protein, 15 aa, Homo sapiens
  CDR3 for beta chain variable domain of TCR clone 309018 (TRBV19, TRBJ2-1)
YASSSPGVPLDEQFF

SEQ ID NO: 618037 - protein, 15 aa, Homo sapiens
  CDR3 for alpha chain variable domain of TCR clone 309019 (TRAV4, TRAJ39)
CLVGPNNNAGNMLTF

SEQ ID NO: 618038 - protein, 15 aa, Homo sapiens
  CDR3 for beta chain variable domain of TCR clone 309019 (TRBV19, TRBJ2-1)
CASSLETSGYNEQFF

SEQ ID NO: 618039 - protein, 14 aa, Homo sapiens
  CDR3 for alpha chain variable domain of TCR clone 309020 (TRAV29/DV5, TRAJ20)
CEATIRSNDYKLSF

SEQ ID NO: 618040 - protein, 15 aa, Homo sapiens
  CDR3 for beta chain variable domain of TCR clone 309020 (TRBV20-1, TRBJ2-1)
CSASSAGSSYNEQFF

SEQ ID NO: 618041 - protein, 12 aa, Homo sapiens
  CDR3 for alpha chain variable domain of TCR clone 309021 (TRAV27, TRAJ41)
CAGRNSGYALNF

SEQ ID NO: 618042 - protein, 15 aa, Homo sapiens
  CDR3 for beta chain variable domain of TCR clone 309021 (TRBV20-1, TRBJ1-5)
CSATSDRGPGQPQHF

SEQ ID NO: 618043 - protein, 13 aa, Homo sapiens
  CDR3 for alpha chain variable domain of TCR clone 309022 (TRAV1-1, TRAJ9)
CAAKNTGGFKTIF

SEQ ID NO: 618044 - protein, 15 aa, Homo sapiens
  CDR3 for beta chain variable domain of TCR clone 309022 (TRBV28, TRBJ2-7)
CASSPGGRGFYEQYF

SEQ ID NO: 618045 - protein, 15 aa, Homo sapiens
  CDR3 for alpha chain variable domain of TCR clone 309023 (TRAV1-2, TRAJ30)
CAVRPHGNRDDKIIF

SEQ ID NO: 618046 - protein, 13 aa, Homo sapiens
  CDR3 for beta chain variable domain of TCR clone 309023 (TRBV4-1, TRBJ2-7)
CASSQGEAYEQYF

SEQ ID NO: 618047 - protein, 13 aa, Homo sapiens
  CDR3 for alpha chain variable domain of TCR clone 309024 (TRAV2, TRAJ13)
CCPNSGVYQKVTF

SEQ ID NO: 618048 - protein, 14 aa, Homo sapiens
  CDR3 for beta chain variable domain of TCR clone 309024 (TRBV19, TRBJ2-1)
CASEVTGARNEQFF

SEQ ID NO: 618049 - protein, 16 aa, Homo sapiens
  CDR3 for alpha chain variable domain of TCR clone 309025 (TRAV12-3, TRAJ53)
CAMSPGSGGSNYKLTF

SEQ ID NO: 618050 - protein, 20 aa, Homo sapiens
  CDR3 for beta chain variable domain of TCR clone 309025 (TRBV7-8, TRBJ2-2)
CASSHVFPGPTIHIAGELFF

SEQ ID NO: 618051 - protein, 14 aa, Homo sapiens
  CDR3 for alpha chain variable domain of TCR clone 309026 (TRAV13-1, TRAJ24)
CAASRTDSWGKLQF

SEQ ID NO: 618052 - protein, 15 aa, Homo sapiens
  CDR3 for beta chain variable domain of TCR clone 309026 (TRBV7-9, TRBJ1-5)
CASSQGHQPNQPQNF

SEQ ID NO: 618053 - protein, 16 aa, Homo sapiens
  CDR3 for alpha chain variable domain of TCR clone 309027 (TRAV12-2, TRAJ32)
CAVHLGQGGATTKLIF

SEQ ID NO: 618054 - protein, 15 aa, Homo sapiens
  CDR3 for beta chain variable domain of TCR clone 309027 (TRBV20-1, TRBJ2-7)
CSARGPLAGGREQYF

SEQ ID NO: 618055 - protein, 14 aa, Homo sapiens
  CDR3 for alpha chain variable domain of TCR clone 309028 (TRAV16, TRAJ33)
CALSAMDSKYKLIW

SEQ ID NO: 618056 - protein, 12 aa, Homo sapiens
  CDR3 for beta chain variable domain of TCR clone 309028 (TRBV5-1, TRBJ1-2)
CASSQDTYGYTF

SEQ ID NO: 618057 - protein, 13 aa, Homo sapiens
  CDR3 for alpha chain variable domain of TCR clone 309029 (TRAV29/DV5, TRAJ29)
CAASAAGNTPLVF

SEQ ID NO: 618058 - protein, 14 aa, Homo sapiens
  CDR3 for beta chain variable domain of TCR clone 309029 (TRBV19, TRBJ2-3)
CASGAPRGTDTQYF

SEQ ID NO: 618059 - protein, 11 aa, Homo sapiens
  CDR3 for alpha chain variable domain of TCR clone 309030 (TRAV4, TRAJ31)
CLVGVNARLMF

SEQ ID NO: 618060 - protein, 16 aa, Homo sapiens
  CDR3 for beta chain variable domain of TCR clone 309030 (TRBV7-2, TRBJ2-5)
CASSSKWLSGQETQYF

SEQ ID NO: 618061 - protein, 14 aa, Homo sapiens
  CDR3 for alpha chain variable domain of TCR clone 309031 (TRAV1-2, TRAJ16)
CAVNRFSDGQKLLF

SEQ ID NO: 618062 - protein, 14 aa, Homo sapiens
  CDR3 for beta chain variable domain of TCR clone 309031 (TRBV7-2, TRBJ1-1)
CASSFVTGTIEAFF

SEQ ID NO: 618063 - protein, 16 aa, Homo sapiens
  CDR3 for alpha chain variable domain of TCR clone 309032 (TRAV12-2, TRAJ10)
CAVNRVLTGGGNKLTF

SEQ ID NO: 618064 - protein, 12 aa, Homo sapiens
  CDR3 for beta chain variable domain of TCR clone 309032 (TRBV2, TRBJ2-1)
GRGLPSYNEQFF

SEQ ID NO: 618065 - protein, 14 aa, Homo sapiens
  CDR3 for alpha chain variable domain of TCR clone 309033 (TRAV17, TRAJ57)
CATDASGGSEKLDF

SEQ ID NO: 618066 - protein, 14 aa, Homo sapiens
  CDR3 for beta chain variable domain of TCR clone 309033 (TRBV4-2, TRBJ2-1)
CASGLDRAYNEQFF

SEQ ID NO: 618067 - protein, 16 aa, Homo sapiens
  CDR3 for alpha chain variable domain of TCR clone 309034 (TRAV30, TRAJ24)
CGTDIVDADSWGKFQF

SEQ ID NO: 618068 - protein, 15 aa, Homo sapiens
  CDR3 for beta chain variable domain of TCR clone 309034 (TRBV7-3, TRBJ2-1)
CASSLGQGPFGEQFF

SEQ ID NO: 618069 - protein, 11 aa, Homo sapiens
  CDR3 for alpha chain variable domain of TCR clone 309035 (TRAV3, TRAJ21)
CAVGNFNKFYF

SEQ ID NO: 618070 - protein, 15 aa, Homo sapiens
  CDR3 for beta chain variable domain of TCR clone 309035 (TRBV4-3, TRBJ2-1)
CASSQESAIYNEQFF

SEQ ID NO: 618071 - protein, 15 aa, Homo sapiens
  CDR3 for alpha chain variable domain of TCR clone 309036 (TRAV8-3, TRAJ40)
CAAPSLGSGTYKYIF

SEQ ID NO: 618072 - protein, 15 aa, Homo sapiens
  CDR3 for beta chain variable domain of TCR clone 309036 (TRBV7-6, TRBJ2-1)
CASSSLAGEGNEQFF

SEQ ID NO: 618073 - protein, 14 aa, Homo sapiens
  CDR3 for alpha chain variable domain of TCR clone 309037 (TRAV1-2, TRAJ16)
CAANRFSDGQKLLF

SEQ ID NO: 618074 - protein, 16 aa, Homo sapiens
  CDR3 for beta chain variable domain of TCR clone 309037 (TRBV19, TRBJ2-1)
CASSEILAGDGNEQFF

SEQ ID NO: 618075 - protein, 16 aa, Homo sapiens
  CDR3 for alpha chain variable domain of TCR clone 309038 (TRAV8-3, TRAJ10)
CAVGPILTGGGNKLTF

SEQ ID NO: 618076 - protein, 17 aa, Homo sapiens
  CDR3 for beta chain variable domain of TCR clone 309038 (TRBV7-8, TRBJ2-6)
CASSAGTGGAGANVLTF

SEQ ID NO: 618077 - protein, 15 aa, Homo sapiens
  CDR3 for alpha chain variable domain of TCR clone 309039 (TRAV21, TRAJ40)
CAVRPQTSGTYKYIF

SEQ ID NO: 618078 - protein, 13 aa, Homo sapiens
  CDR3 for beta chain variable domain of TCR clone 309039 (TRBV7-2, TRBJ2-2)
CASSSVRAEELFL

SEQ ID NO: 618079 - protein, 13 aa, Homo sapiens
  CDR3 for alpha chain variable domain of TCR clone 309040 (TRAV20, TRAJ34)
CAVRSYNTDKLIF

SEQ ID NO: 618080 - protein, 12 aa, Homo sapiens
  CDR3 for beta chain variable domain of TCR clone 309040 (TRBV11-2, TRBJ2-1)
CASSLGNNEQFF

SEQ ID NO: 618081 - protein, 13 aa, Homo sapiens
  CDR3 for alpha chain variable domain of TCR clone 309041 (TRAV17, TRAJ4)
CATNSGGYNKLIF

SEQ ID NO: 618082 - protein, 14 aa, Homo sapiens
  CDR3 for beta chain variable domain of TCR clone 309041 (TRBV20-1, TRBJ1-5)
CSARDDRGNQPQHF

SEQ ID NO: 618083 - protein, 14 aa, Homo sapiens
  CDR3 for alpha chain variable domain of TCR clone 309042 (TRAV8-4, TRAJ4)
CAVSPSGGYHKLIF

SEQ ID NO: 618084 - protein, 15 aa, Homo sapiens
  CDR3 for beta chain variable domain of TCR clone 309042 (TRBV7-8, TRBJ2-3)
CASSLSADSGGAQYF

SEQ ID NO: 618085 - protein, 11 aa, Homo sapiens
  CDR3 for alpha chain variable domain of TCR clone 309043 (TRAV26-2, TRAJ8)
CILTGFQKLVF

SEQ ID NO: 618086 - protein, 17 aa, Homo sapiens
  CDR3 for beta chain variable domain of TCR clone 309043 (TRBV15, TRBJ2-3)
CATSGTTSEEGTDTQYF

SEQ ID NO: 618087 - protein, 13 aa, Homo sapiens
  CDR3 for alpha chain variable domain of TCR clone 309044 (TRAV21, TRAJ29)
CAGLDSGNTPLVF

SEQ ID NO: 618088 - protein, 12 aa, Homo sapiens
  CDR3 for beta chain variable domain of TCR clone 309044 (TRBV5-1, TRBJ1-2)
CASSQDTYGYTF

SEQ ID NO: 618089 - protein, 13 aa, Homo sapiens
  CDR3 for alpha chain variable domain of TCR clone 309045 (TRAV13-1, TRAJ3)
CAASKSSSASIIF

SEQ ID NO: 618090 - protein, 16 aa, Homo sapiens
  CDR3 for beta chain variable domain of TCR clone 309045 (TRBV15, TRBJ2-3)
CATSRDLGIVTDTQYF

SEQ ID NO: 618091 - protein, 14 aa, Homo sapiens
  CDR3 for alpha chain variable domain of TCR clone 309046 (TRAV1-2, TRAJ8)
CAVREDTGVQQLVF

SEQ ID NO: 618092 - protein, 15 aa, Homo sapiens
  CDR3 for beta chain variable domain of TCR clone 309046 (TRBV6-3, TRBJ2-7)
CASSSPGTVFYEQYF

SEQ ID NO: 618093 - protein, 12 aa, Homo sapiens
  CDR3 for alpha chain variable domain of TCR clone 309047 (TRAV13-1, TRAJ53)
CAAGGSNYKLTF

SEQ ID NO: 618094 - protein, 15 aa, Homo sapiens
  CDR3 for beta chain variable domain of TCR clone 309047 (TRBV7-2, TRBJ2-1)
CASSSGRAGGNEQFF

SEQ ID NO: 618095 - protein, 16 aa, Homo sapiens
  CDR3 for alpha chain variable domain of TCR clone 309048 (TRAV16, TRAJ52)
CALSAAGGTSYGNLTF

SEQ ID NO: 618096 - protein, 16 aa, Homo sapiens
  CDR3 for beta chain variable domain of TCR clone 309048 (TRBV12-4, TRBJ1-5)
CASSRPVGGSNQPQHF

SEQ ID NO: 618097 - protein, 15 aa, Homo sapiens
  CDR3 for alpha chain variable domain of TCR clone 309049 (TRAV3, TRAJ9)
CAVRARNTGGFKTIF

SEQ ID NO: 618098 - protein, 15 aa, Homo sapiens
  CDR3 for beta chain variable domain of TCR clone 309049 (TRBV19, TRBJ2-1)
FASSTGTSSYNEQFF

SEQ ID NO: 618099 - protein, 14 aa, Homo sapiens
  CDR3 for alpha chain variable domain of TCR clone 309050 (TRAV26-1, TRAJ38)
CIADNAGNNRKLMW

SEQ ID NO: 618100 - protein, 13 aa, Homo sapiens
  CDR3 for beta chain variable domain of TCR clone 309050 (TRBV20-1, TRBJ1-1)
CSARGGGNTEAFF

SEQ ID NO: 618101 - protein, 14 aa, Homo sapiens
  CDR3 for alpha chain variable domain of TCR clone 309051 (TRAV23/DV6, TRAJ17)
CAARGLAAGNKLTF

SEQ ID NO: 618102 - protein, 12 aa, Homo sapiens
  CDR3 for beta chain variable domain of TCR clone 309051 (TRBV7-9, TRBJ2-3)
CASSFITDTQYF

SEQ ID NO: 618103 - protein, 13 aa, Homo sapiens
  CDR3 for alpha chain variable domain of TCR clone 309052 (TRAV12-3, TRAJ33)
CAMSLNSNYQLIW

SEQ ID NO: 618104 - protein, 13 aa, Homo sapiens
  CDR3 for beta chain variable domain of TCR clone 309052 (TRBV7-2, TRBJ2-2)
GASSLAVTGELFF

SEQ ID NO: 618105 - protein, 12 aa, Homo sapiens
  CDR3 for alpha chain variable domain of TCR clone 309053 (TRAV3, TRAJ34)
CAVLGNIDKPIF

SEQ ID NO: 618106 - protein, 13 aa, Homo sapiens
  CDR3 for beta chain variable domain of TCR clone 309053 (TRBV19, TRBJ2-1)
CASSIGTGNEQFF

SEQ ID NO: 618107 - protein, 13 aa, Homo sapiens
  CDR3 for alpha chain variable domain of TCR clone 309054 (TRAV1-2, TRAJ36)
CAVDQTGANNLLF

SEQ ID NO: 618108 - protein, 14 aa, Homo sapiens
  CDR3 for beta chain variable domain of TCR clone 309054 (TRBV20-1, TRBJ2-5)
CSAREMTKQETQYF

SEQ ID NO: 618109 - protein, 13 aa, Homo sapiens
  CDR3 for alpha chain variable domain of TCR clone 309055 (TRAV13-1, TRAJ49)
CAAMLYTGNQFYF

SEQ ID NO: 618110 - protein, 15 aa, Homo sapiens
  CDR3 for beta chain variable domain of TCR clone 309055 (TRBV12-4, TRBJ1-5)
CASTRGSGFGQHQHF

SEQ ID NO: 618111 - protein, 14 aa, Homo sapiens
  CDR3 for alpha chain variable domain of TCR clone 309056 (TRAV12-1, TRAJ26)
CVVKGSNYGQNFVS

SEQ ID NO: 618112 - protein, 17 aa, Homo sapiens
  CDR3 for beta chain variable domain of TCR clone 309056 (TRBV11-2, TRBJ2-6)
CASSQRDTFSGANVLTF

SEQ ID NO: 618113 - protein, 16 aa, Homo sapiens
  CDR3 for alpha chain variable domain of TCR clone 309057 (TRAV14/DV4, TRAJ54)
CAMREGRIQGAQKLVF

SEQ ID NO: 618114 - protein, 19 aa, Homo sapiens
  CDR3 for beta chain variable domain of TCR clone 309057 (TRBV7-2, TRBJ2-3)
CASGFLSRNWGGGTDTQYF

SEQ ID NO: 618115 - protein, 12 aa, Homo sapiens
  CDR3 for alpha chain variable domain of TCR clone 309058 (TRAV21, TRAJ31)
CVLAGNNARLMF

SEQ ID NO: 618116 - protein, 15 aa, Homo sapiens
  CDR3 for beta chain variable domain of TCR clone 309058 (TRBV25-1, TRBJ1-4)
CASSKRIATNEKLFF

SEQ ID NO: 618117 - protein, 16 aa, Homo sapiens
  CDR3 for alpha chain variable domain of TCR clone 309059 (TRAV38-1, TRAJ45)
CAFMKGSGGGADGLPF

SEQ ID NO: 618118 - protein, 15 aa, Homo sapiens
  CDR3 for beta chain variable domain of TCR clone 309059 (TRBV20-1, TRBJ2-7)
CSAREGRDSLYEQYF

SEQ ID NO: 618119 - protein, 13 aa, Homo sapiens
  CDR3 for alpha chain variable domain of TCR clone 309060 (TRAV1-1, TRAJ28)
CVTSGAGSYQLTF

SEQ ID NO: 618120 - protein, 17 aa, Homo sapiens
  CDR3 for beta chain variable domain of TCR clone 309060 (TRBV18, TRBJ2-2)
CTSSQRSSGQGPGELFF

SEQ ID NO: 618121 - protein, 13 aa, Homo sapiens
  CDR3 for alpha chain variable domain of TCR clone 309061 (TRAV20, TRAJ29)
CAVQAVGNPPLVF

SEQ ID NO: 618122 - protein, 15 aa, Homo sapiens
  CDR3 for beta chain variable domain of TCR clone 309061 (TRBV10-2, TRBJ2-5)
CASRGSGGPQETQYF

SEQ ID NO: 618123 - protein, 16 aa, Homo sapiens
  CDR3 for alpha chain variable domain of TCR clone 309062 (TRAV12-1, TRAJ45)
CVVIRYSGGGADGLTF

SEQ ID NO: 618124 - protein, 15 aa, Homo sapiens
  CDR3 for beta chain variable domain of TCR clone 309062 (TRBV7-6, TRBJ2-2)
CASSSWTGKAGELFF

SEQ ID NO: 618125 - protein, 21 aa, Homo sapiens
  CDR3 for alpha chain variable domain of TCR clone 309063 (TRAV8-3, TRAJ6)
CAVGGEEATYLHLEEEPALLF

SEQ ID NO: 618126 - protein, 14 aa, Homo sapiens
  CDR3 for beta chain variable domain of TCR clone 309063 (TRBV5-1, TRBJ2-7)
CASSRGESLYEQFF

SEQ ID NO: 618127 - protein, 14 aa, Homo sapiens
  CDR3 for alpha chain variable domain of TCR clone 309064 (TRAV2, TRAJ33)
CAVEDQGSNYQLIW

SEQ ID NO: 618128 - protein, 13 aa, Homo sapiens
  CDR3 for beta chain variable domain of TCR clone 309064 (TRBV4-2, TRBJ1-1)
CASSQAGNTEAFF

SEQ ID NO: 618129 - protein, 12 aa, Homo sapiens
  CDR3 for alpha chain variable domain of TCR clone 309065 (TRAV29/DV5, TRAJ49)
CAATDTGNQFYF

SEQ ID NO: 618130 - protein, 19 aa, Homo sapiens
  CDR3 for beta chain variable domain of TCR clone 309065 (TRBV25-1, TRBJ2-2)
CAILVYPVDRGRKTGELFF

SEQ ID NO: 618131 - protein, 11 aa, Homo sapiens
  CDR3 for alpha chain variable domain of TCR clone 309066 (TRAV2, TRAJ13)
CASGGYQKVIF

SEQ ID NO: 618132 - protein, 17 aa, Homo sapiens
  CDR3 for beta chain variable domain of TCR clone 309066 (TRBV20-1, TRBJ2-7)
CSAAGTSGGGSSYEQYF

SEQ ID NO: 618133 - protein, 13 aa, Homo sapiens
  CDR3 for alpha chain variable domain of TCR clone 309067 (TRAV21, TRAJ27)
RAARPGNAGKSTF

SEQ ID NO: 618134 - protein, 16 aa, Homo sapiens
  CDR3 for beta chain variable domain of TCR clone 309067 (TRBV20-1, TRBJ1-2)
CSASMGQGVANYGYTF

SEQ ID NO: 618135 - protein, 18 aa, Homo sapiens
  CDR3 for alpha chain variable domain of TCR clone 309068 (TRAV29/DV5, TRAJ26)
CSVLLCSKRKLEGKNFVF

SEQ ID NO: 618136 - protein, 17 aa, Homo sapiens
  CDR3 for beta chain variable domain of TCR clone 309068 (TRBV20-1, TRBJ2-2)
CSASGSGQGGLTGELFF

SEQ ID NO: 618137 - protein, 12 aa, Homo sapiens
  CDR3 for alpha chain variable domain of TCR clone 309069 (TRAV8-3, TRAJ20)
CAVGANDYKISF

SEQ ID NO: 618138 - protein, 17 aa, Homo sapiens
  CDR3 for beta chain variable domain of TCR clone 309069 (TRBV13, TRBJ2-3)
CASSLSRVAGGRNTQYF

SEQ ID NO: 618139 - protein, 14 aa, Homo sapiens
  CDR3 for alpha chain variable domain of TCR clone 309070 (TRAV12-3, TRAJ56)
CAMSVTGANSKLTF

SEQ ID NO: 618140 - protein, 12 aa, Homo sapiens
  CDR3 for beta chain variable domain of TCR clone 309070 (TRBV6-3, TRBJ2-7)
CASSLTPYEQYF

SEQ ID NO: 618141 - protein, 14 aa, Homo sapiens
  CDR3 for alpha chain variable domain of TCR clone 309071 (TRAV27, TRAJ22)
CAGVSVLGKRQLTF

SEQ ID NO: 618142 - protein, 18 aa, Homo sapiens
  CDR3 for beta chain variable domain of TCR clone 309071 (TRBV11-2, TRBJ2-3)
CASSLGGASRGAPNTQYF

SEQ ID NO: 618143 - protein, 11 aa, Homo sapiens
  CDR3 for alpha chain variable domain of TCR clone 309072 (TRAV38-1, TRAJ43)
CAFMKHNSGRH

SEQ ID NO: 618144 - protein, 11 aa, Homo sapiens
  CDR3 for beta chain variable domain of TCR clone 309072 (TRBV7-9, TRBJ2-3)
CASSYTYTQYF

SEQ ID NO: 618145 - protein, 14 aa, Homo sapiens
  CDR3 for alpha chain variable domain of TCR clone 309073 (TRAV12-3, TRAJ20)
CAMSARRGDYKLSF

SEQ ID NO: 618146 - protein, 14 aa, Homo sapiens
  CDR3 for beta chain variable domain of TCR clone 309073 (TRBV7-2, TRBJ2-7)
CASSPKTSFYEQYF

SEQ ID NO: 618147 - protein, 18 aa, Homo sapiens
  CDR3 for alpha chain variable domain of TCR clone 309074 (TRAV26-2, TRAJ32)
CILRAPLNYGGSTNKLIF

SEQ ID NO: 618148 - protein, 13 aa, Homo sapiens
  CDR3 for beta chain variable domain of TCR clone 309074 (TRBV7-3, TRBJ2-1)
CASSLWPYNEQFF

SEQ ID NO: 618149 - protein, 15 aa, Homo sapiens
  CDR3 for alpha chain variable domain of TCR clone 309075 (TRAV12-3, TRAJ5)
CAMSGLGTGRSALTF

SEQ ID NO: 618150 - protein, 15 aa, Homo sapiens
  CDR3 for beta chain variable domain of TCR clone 309075 (TRBV19, TRBJ1-1)
CASTSGQIQNTEAFF

SEQ ID NO: 618151 - protein, 11 aa, Homo sapiens
  CDR3 for alpha chain variable domain of TCR clone 309076 (TRAV1-1, TRAJ23)
CAVRQGGKLIL

SEQ ID NO: 618152 - protein, 20 aa, Homo sapiens
  CDR3 for beta chain variable domain of TCR clone 309076 (TRBV7-8, TRBJ2-2)
CASSHLFPGPTIHITGELCF

SEQ ID NO: 618153 - protein, 14 aa, Homo sapiens
  CDR3 for alpha chain variable domain of TCR clone 309077 (TRAV12-2, TRAJ3)
CAVNGYSSASKIIF

SEQ ID NO: 618154 - protein, 13 aa, Homo sapiens
  CDR3 for beta chain variable domain of TCR clone 309077 (TRBV20-1, TRBJ1-1)
CSARAGGNTEAFF

SEQ ID NO: 618155 - protein, 13 aa, Homo sapiens
  CDR3 for alpha chain variable domain of TCR clone 309078 (TRAV25, TRAJ26)
CAGMDNYGQNFVF

SEQ ID NO: 618156 - protein, 15 aa, Homo sapiens
  CDR3 for beta chain variable domain of TCR clone 309078 (TRBV10-3, TRBJ2-1)
CAIGNGTSGHNEQFF

SEQ ID NO: 618157 - protein, 15 aa, Homo sapiens
  CDR3 for alpha chain variable domain of TCR clone 309079 (TRAV25, TRAJ52)
CAGTSGGTGYGKLTF

SEQ ID NO: 618158 - protein, 13 aa, Homo sapiens
  CDR3 for beta chain variable domain of TCR clone 309079 (TRBV4-1, TRBJ2-2)
CASSQENTGELFF

SEQ ID NO: 618159 - protein, 11 aa, Homo sapiens
  CDR3 for alpha chain variable domain of TCR clone 309080 (TRAV4, TRAJ23)
CLVAPGGKLIF

SEQ ID NO: 618160 - protein, 13 aa, Homo sapiens
  CDR3 for beta chain variable domain of TCR clone 309080 (TRBV7-2, TRBJ2-2)
CASSLAVTGELFF

SEQ ID NO: 618161 - protein, 15 aa, Homo sapiens
  CDR3 for alpha chain variable domain of TCR clone 309081 (TRAV3, TRAJ22)
CAVRDRGGSAMQLTF

SEQ ID NO: 618162 - protein, 13 aa, Homo sapiens
  CDR3 for beta chain variable domain of TCR clone 309081 (TRBV7-3, TRBJ2-1)
CASSPVAYNEQFF

SEQ ID NO: 618163 - protein, 14 aa, Homo sapiens
  CDR3 for alpha chain variable domain of TCR clone 309082 (TRAV13-1, TRAJ28)
CAASPGAGSYQLTF

SEQ ID NO: 618164 - protein, 15 aa, Homo sapiens
  CDR3 for beta chain variable domain of TCR clone 309082 (TRBV19, TRBJ2-7)
CASSPAGSGEALRYF

SEQ ID NO: 618165 - protein, 11 aa, Homo sapiens
  CDR3 for alpha chain variable domain of TCR clone 309083 (TRAV39, TRAJ49)
CAVDISTQCYF

SEQ ID NO: 618166 - protein, 11 aa, Homo sapiens
  CDR3 for beta chain variable domain of TCR clone 309083 (TRBV7-8, TRBJ2-7)
CASSLSREQYF

SEQ ID NO: 618167 - protein, 23 aa, Homo sapiens
  CDR3 for alpha chain variable domain of TCR clone 309084 (TRAV26-1, TRAJ38)
CVADNAGNNHIQNPDPAVYQLRD

SEQ ID NO: 618168 - protein, 20 aa, Homo sapiens
  CDR3 for beta chain variable domain of TCR clone 309084 (TRBV28, TRBJ2-1)
CASTPIGRSPGLAGGNERFF

SEQ ID NO: 618169 - protein, 14 aa, Homo sapiens
  CDR3 for alpha chain variable domain of TCR clone 309085 (TRAV8-1, TRAJ15)
CAVNGQQAGTALIF

SEQ ID NO: 618170 - protein, 14 aa, Homo sapiens
  CDR3 for beta chain variable domain of TCR clone 309085 (TRBV3-1, TRBJ2-7)
CASSPSGLPYEQYF

SEQ ID NO: 618171 - protein, 12 aa, Homo sapiens
  CDR3 for alpha chain variable domain of TCR clone 309086 (TRAV21, TRAJ33)
CAKMDSNYQLIW

SEQ ID NO: 618172 - protein, 13 aa, Homo sapiens
  CDR3 for beta chain variable domain of TCR clone 309086 (TRBV6-6, TRBJ2-1)
CASSLHQGDEQFF

SEQ ID NO: 618173 - protein, 17 aa, Homo sapiens
  CDR3 for alpha chain variable domain of TCR clone 309087 (TRAV4, TRAJ18)
CLVGERSVGSTLGRLYF

SEQ ID NO: 618174 - protein, 16 aa, Homo sapiens
  CDR3 for beta chain variable domain of TCR clone 309087 (TRBV15, TRBJ1-4)
CVTSRDSPPGREKLFF

SEQ ID NO: 618175 - protein, 14 aa, Homo sapiens
  CDR3 for alpha chain variable domain of TCR clone 309088 (TRAV3, TRAJ21)
CAVESQANFNKFFF

SEQ ID NO: 618176 - protein, 18 aa, Homo sapiens
  CDR3 for beta chain variable domain of TCR clone 309088 (TRBV7-9, TRBJ2-1)
CASSLAVSGTSGRNEQFF

SEQ ID NO: 618177 - protein, 17 aa, Homo sapiens
  CDR3 for alpha chain variable domain of TCR clone 309089 (TRAV12-2, TRAJ45)
CAVNIWGSGGGADGLTF

SEQ ID NO: 618178 - protein, 15 aa, Homo sapiens
  CDR3 for beta chain variable domain of TCR clone 309089 (TRBV4-1, TRBJ2-1)
CASSQVLAGGDEQFF

SEQ ID NO: 618179 - protein, 13 aa, Homo sapiens
  CDR3 for alpha chain variable domain of TCR clone 309090 (TRAV3, TRAJ21)
CAVREPDFNKFYF

SEQ ID NO: 618180 - protein, 15 aa, Homo sapiens
  CDR3 for beta chain variable domain of TCR clone 309090 (TRBV4-3, TRBJ2-2)
CASSHGQDGTGELFF

SEQ ID NO: 618181 - protein, 13 aa, Homo sapiens
  CDR3 for alpha chain variable domain of TCR clone 309091 (TRAV27, TRAJ57)
CRSAQGGSEKLVF

SEQ ID NO: 618182 - protein, 14 aa, Homo sapiens
  CDR3 for beta chain variable domain of TCR clone 309091 (TRBV7-2, TRBJ1-2)
CASSQTGSTYGYTF

SEQ ID NO: 618183 - protein, 14 aa, Homo sapiens
  CDR3 for alpha chain variable domain of TCR clone 309092 (TRAV13-1, TRAJ48)
CAASTDFENEKLTF

SEQ ID NO: 618184 - protein, 15 aa, Homo sapiens
  CDR3 for beta chain variable domain of TCR clone 309092 (TRBV10-2, TRBJ2-5)
CASKPEDRRQETQYF

SEQ ID NO: 618185 - protein, 15 aa, Homo sapiens
  CDR3 for alpha chain variable domain of TCR clone 309093 (TRAV21, TRAJ53)
CATLNSGGRNYKLTF

SEQ ID NO: 618186 - protein, 16 aa, Homo sapiens
  CDR3 for beta chain variable domain of TCR clone 309093 (TRBV19, TRBJ2-3)
CASSPGAASRTDTQYF

SEQ ID NO: 618187 - protein, 15 aa, Homo sapiens
  CDR3 for alpha chain variable domain of TCR clone 309094 (TRAV3, TRAJ47)
CAVGDIGEYGKKLVF

SEQ ID NO: 618188 - protein, 14 aa, Homo sapiens
  CDR3 for beta chain variable domain of TCR clone 309094 (TRBV13, TRBJ2-5)
CASSLERVGETQYF

SEQ ID NO: 618189 - protein, 13 aa, Homo sapiens
  CDR3 for alpha chain variable domain of TCR clone 309095 (TRAV21, TRAJ20)
CAVSRLGDYKLSV

SEQ ID NO: 618190 - protein, 13 aa, Homo sapiens
  CDR3 for beta chain variable domain of TCR clone 309095 (TRBV7-3, TRBJ1-1)
CASSPAGGLEAFF

SEQ ID NO: 618191 - protein, 15 aa, Homo sapiens
  CDR3 for alpha chain variable domain of TCR clone 309096 (TRAV3, TRAJ17)
CAVRDTGAAGNKLTF

SEQ ID NO: 618192 - protein, 15 aa, Homo sapiens
  CDR3 for beta chain variable domain of TCR clone 309096 (TRBV20-1, TRBJ2-7)
RSARDRVSGMDEQYF

SEQ ID NO: 618193 - protein, 13 aa, Homo sapiens
  CDR3 for alpha chain variable domain of TCR clone 309097 (TRAV30, TRAJ32)
CGIFGGATNKLIF

SEQ ID NO: 618194 - protein, 13 aa, Homo sapiens
  CDR3 for beta chain variable domain of TCR clone 309097 (TRBV7-2, TRBJ1-1)
CAISVQGYTEAFF

SEQ ID NO: 618195 - protein, 11 aa, Homo sapiens
  CDR3 for alpha chain variable domain of TCR clone 309098 (TRAV12-2, TRAJ29)
CAVTLRSPLVF

SEQ ID NO: 618196 - protein, 14 aa, Homo sapiens
  CDR3 for beta chain variable domain of TCR clone 309098 (TRBV9, TRBJ1-2)
CASRVSTRSYGYTF

SEQ ID NO: 618197 - protein, 15 aa, Homo sapiens
  CDR3 for alpha chain variable domain of TCR clone 309099 (TRAV12-1, TRAJ15)
CVVTRANKAGTALIF

SEQ ID NO: 618198 - protein, 14 aa, Homo sapiens
  CDR3 for beta chain variable domain of TCR clone 309099 (TRBV5-1, TRBJ1-1)
CASSLVSINTEAFF

SEQ ID NO: 618199 - protein, 13 aa, Homo sapiens
  CDR3 for alpha chain variable domain of TCR clone 309100 (TRAV12-3, TRAJ9)
CAMSADGGFKTIF

SEQ ID NO: 618200 - protein, 18 aa, Homo sapiens
  CDR3 for beta chain variable domain of TCR clone 309100 (TRBV4-3, TRBJ1-4)
CASSQGSGQGAANEKLFF

SEQ ID NO: 618201 - protein, 12 aa, Homo sapiens
  CDR3 for alpha chain variable domain of TCR clone 309101 (TRAV24, TRAJ39)
CAFANACNMLTF

SEQ ID NO: 618202 - protein, 15 aa, Homo sapiens
  CDR3 for beta chain variable domain of TCR clone 309101 (TRBV5-1, TRBJ2-7)
CASSPQGRPLDEQYF

SEQ ID NO: 618203 - protein, 16 aa, Homo sapiens
  CDR3 for alpha chain variable domain of TCR clone 309102 (TRAV17, TRAJ4)
CATENMFSGGYNKLIF

SEQ ID NO: 618204 - protein, 11 aa, Homo sapiens
  CDR3 for beta chain variable domain of TCR clone 309102 (TRBV28, TRBJ1-5)
CASRSNQPQHF

SEQ ID NO: 618205 - protein, 15 aa, Homo sapiens
  CDR3 for alpha chain variable domain of TCR clone 309103 (TRAV17, TRAJ22)
CATVAPSGSARQLTF

SEQ ID NO: 618206 - protein, 12 aa, Homo sapiens
  CDR3 for beta chain variable domain of TCR clone 309103 (TRBV7-8, TRBJ2-7)
CASSLGDREQYF

SEQ ID NO: 618207 - protein, 18 aa, Homo sapiens
  CDR3 for alpha chain variable domain of TCR clone 309104 (TRAV12-3, TRAJ52)
CAMSVGGAGGTSYGKLTF

SEQ ID NO: 618208 - protein, 15 aa, Homo sapiens
  CDR3 for beta chain variable domain of TCR clone 309104 (TRBV27, TRBJ1-6)
CASSFDRGLRSPLHF

SEQ ID NO: 618209 - protein, 22 aa, Homo sapiens
  CDR3 for alpha chain variable domain of TCR clone 309105 (TRAV3, TRAJ38)
CAVRDCLNAGNNHIQNPDPAVY

SEQ ID NO: 618210 - protein, 13 aa, Homo sapiens
  CDR3 for beta chain variable domain of TCR clone 309105 (TRBV19, TRBJ2-7)
CASRKAGGSEQYF

SEQ ID NO: 618211 - protein, 15 aa, Homo sapiens
  CDR3 for alpha chain variable domain of TCR clone 309106 (TRAV21, TRAJ53)
CATLNSGGSNNKLTF

SEQ ID NO: 618212 - protein, 14 aa, Homo sapiens
  CDR3 for beta chain variable domain of TCR clone 309106 (TRBV15, TRBJ1-2)
CATSRASVNYGYTF

SEQ ID NO: 618213 - protein, 16 aa, Homo sapiens
  CDR3 for alpha chain variable domain of TCR clone 309107 (TRAV12-3, TRAJ53)
CAMSPGSGGSNYKLTL

SEQ ID NO: 618214 - protein, 13 aa, Homo sapiens
  CDR3 for beta chain variable domain of TCR clone 309107 (TRBV7-3, TRBJ1-1)
CASSQDWGAEAFF

SEQ ID NO: 618215 - protein, 16 aa, Homo sapiens
  CDR3 for alpha chain variable domain of TCR clone 309108 (TRAV3, TRAJ37)
CAVRPHGSGNTGKLIF

SEQ ID NO: 618216 - protein, 13 aa, Homo sapiens
  CDR3 for beta chain variable domain of TCR clone 309108 (TRBV7-9, TRBJ2-4)
CATEGLAGNIQYF

SEQ ID NO: 618217 - protein, 12 aa, Homo sapiens
  CDR3 for alpha chain variable domain of TCR clone 309109 (TRAV1-1, TRAJ20)
CSVREDDYKLSF

SEQ ID NO: 618218 - protein, 18 aa, Homo sapiens
  CDR3 for beta chain variable domain of TCR clone 309109 (TRBV20-1, TRBJ2-3)
CSASGLAGGPGTTDTQYF

SEQ ID NO: 618219 - protein, 16 aa, Homo sapiens
  CDR3 for alpha chain variable domain of TCR clone 309110 (TRAV4, TRAJ42)
CLVGPRYGGSQGNLIF

SEQ ID NO: 618220 - protein, 15 aa, Homo sapiens
  CDR3 for beta chain variable domain of TCR clone 309110 (TRBV20-1, TRBJ2-5)
CSAEGTGGLQETQYF

SEQ ID NO: 618221 - protein, 14 aa, Homo sapiens
  CDR3 for alpha chain variable domain of TCR clone 309111 (TRAV1-2, TRAJ6)
CAVSLSGGSYIPTF

SEQ ID NO: 618222 - protein, 15 aa, Homo sapiens
  CDR3 for beta chain variable domain of TCR clone 309111 (TRBV28, TRBJ2-7)
CDSSPGGRGFYEQYF

SEQ ID NO: 618223 - protein, 12 aa, Homo sapiens
  CDR3 for alpha chain variable domain of TCR clone 309112 (TRAV13-2, TRAJ23)
CAERHRGGKLIF

SEQ ID NO: 618224 - protein, 15 aa, Homo sapiens
  CDR3 for beta chain variable domain of TCR clone 309112 (TRBV11-2, TRBJ1-1)
CASSSRSSLLLSLDK

SEQ ID NO: 618225 - protein, 14 aa, Homo sapiens
  CDR3 for alpha chain variable domain of TCR clone 309113 (TRAV13-1, TRAJ44)
CAAKATGTASKLTF

SEQ ID NO: 618226 - protein, 17 aa, Homo sapiens
  CDR3 for beta chain variable domain of TCR clone 309113 (TRBV7-3, TRBJ2-3)
CTSSLMKRMRGADTQYF

SEQ ID NO: 618227 - protein, 16 aa, Homo sapiens
  CDR3 for alpha chain variable domain of TCR clone 309114 (TRAV8-4, TRAJ32)
CAAYMVVLQTSSSLEL

SEQ ID NO: 618228 - protein, 16 aa, Homo sapiens
  CDR3 for beta chain variable domain of TCR clone 309114 (TRBV27, TRBJ2-2)
CASSPLAAANTGELFF

SEQ ID NO: 618229 - protein, 15 aa, Homo sapiens
  CDR3 for alpha chain variable domain of TCR clone 309115 (TRAV23/DV6, TRAJ45)
CAAKNGGGGADGLHF

SEQ ID NO: 618230 - protein, 13 aa, Homo sapiens
  CDR3 for beta chain variable domain of TCR clone 309115 (TRBV20-1, TRBJ1-1)
CSARGGGNTEAFF

SEQ ID NO: 618231 - protein, 14 aa, Homo sapiens
  CDR3 for alpha chain variable domain of TCR clone 309116 (TRAV1-2, TRAJ16)
CAVNRFSDGQKLLF

SEQ ID NO: 618232 - protein, 14 aa, Homo sapiens
  CDR3 for beta chain variable domain of TCR clone 309116 (TRBV7-9, TRBJ2-3)
CASSLEDGTGTHYF

SEQ ID NO: 618233 - protein, 12 aa, Homo sapiens
  CDR3 for alpha chain variable domain of TCR clone 309117 (TRAV21, TRAJ11)
CAATSGYSTLTF

SEQ ID NO: 618234 - protein, 16 aa, Homo sapiens
  CDR3 for beta chain variable domain of TCR clone 309117 (TRBV4-2, TRBJ1-1)
CASSQAGFGMNTEAFF

SEQ ID NO: 618235 - protein, 14 aa, Homo sapiens
  CDR3 for alpha chain variable domain of TCR clone 309118 (TRAV21, TRAJ15)
CAVSLNPAGTALIF

SEQ ID NO: 618236 - protein, 11 aa, Homo sapiens
  CDR3 for beta chain variable domain of TCR clone 309118 (TRBV20-1, TRBJ2-7)
CSARTGYEQYF

SEQ ID NO: 618237 - protein, 12 aa, Homo sapiens
  CDR3 for alpha chain variable domain of TCR clone 309119 (TRAV13-1, TRAJ21)
CAAKEGINKFYF

SEQ ID NO: 618238 - protein, 12 aa, Homo sapiens
  CDR3 for beta chain variable domain of TCR clone 309119 (TRBV11-2, TRBJ2-2)
CASSLGGGELFF

SEQ ID NO: 618239 - protein, 11 aa, Homo sapiens
  CDR3 for alpha chain variable domain of TCR clone 309120 (TRAV12-2, TRAJ33)
CAVGSNYQLIW

SEQ ID NO: 618240 - protein, 14 aa, Homo sapiens
  CDR3 for beta chain variable domain of TCR clone 309120 (TRBV6-1, TRBJ2-2)
CASVEHIESGELSF

SEQ ID NO: 618241 - protein, 14 aa, Homo sapiens
  CDR3 for alpha chain variable domain of TCR clone 309121 (TRAV1-2, TRAJ15)
CAVRDRQAGTALIF

SEQ ID NO: 618242 - protein, 14 aa, Homo sapiens
  CDR3 for beta chain variable domain of TCR clone 309121 (TRBV7-9, TRBJ2-1)
CASSPRDSLYEQFF

SEQ ID NO: 618243 - protein, 11 aa, Homo sapiens
  CDR3 for alpha chain variable domain of TCR clone 309122 (TRAV4, TRAJ31)
CLVGDNARLMF

SEQ ID NO: 618244 - protein, 16 aa, Homo sapiens
  CDR3 for beta chain variable domain of TCR clone 309122 (TRBV7-2, TRBJ2-1)
CASSSKWLSGQETQYF

SEQ ID NO: 618245 - protein, 18 aa, Homo sapiens
  CDR3 for alpha chain variable domain of TCR clone 309123 (TRAV29/DV5, TRAJ52)
CAAGFRGAGGTSYGKLTF

SEQ ID NO: 618246 - protein, 14 aa, Homo sapiens
  CDR3 for beta chain variable domain of TCR clone 309123 (TRBV7-6, TRBJ2-3)
CASSLGTVTDTQYF

SEQ ID NO: 618247 - protein, 13 aa, Homo sapiens
  CDR3 for alpha chain variable domain of TCR clone 309124 (TRAV21, TRAJ45)
CAVMGGGADGLTF

SEQ ID NO: 618248 - protein, 18 aa, Homo sapiens
  CDR3 for beta chain variable domain of TCR clone 309124 (TRBV7-8, TRBJ2-1)
CASSPYLGQRGSNNEQFF

SEQ ID NO: 618249 - protein, 14 aa, Homo sapiens
  CDR3 for alpha chain variable domain of TCR clone 309125 (TRAV9-2, TRAJ39)
CALYIYNASNMLTF

SEQ ID NO: 618250 - protein, 15 aa, Homo sapiens
  CDR3 for beta chain variable domain of TCR clone 309125 (TRBV20-1, TRBJ2-7)
CSARDRVSGMDEQYF

SEQ ID NO: 618251 - protein, 14 aa, Homo sapiens
  CDR3 for alpha chain variable domain of TCR clone 309126 (TRAV26-1, TRAJ40)
CIVRVARGAYKYIF

SEQ ID NO: 618252 - protein, 12 aa, Homo sapiens
  CDR3 for beta chain variable domain of TCR clone 309126 (TRBV11-2, TRBJ2-2)
CASSLGGGELFF

SEQ ID NO: 618253 - protein, 14 aa, Homo sapiens
  CDR3 for alpha chain variable domain of TCR clone 309127 (TRAV1-2, TRAJ16)
CAVNRFSAGKKLLF

SEQ ID NO: 618254 - protein, 16 aa, Homo sapiens
  CDR3 for beta chain variable domain of TCR clone 309127 (TRBV20-1, TRBJ1-4)
CSAPGQGLLTNEKLFF

SEQ ID NO: 618255 - protein, 13 aa, Homo sapiens
  CDR3 for alpha chain variable domain of TCR clone 309128 (TRAV2, TRAJ15)
CAVASQAGTALIF

SEQ ID NO: 618256 - protein, 16 aa, Homo sapiens
  CDR3 for beta chain variable domain of TCR clone 309128 (TRBV20-1, TRBJ2-2)
CSASASGIPGAGELFF

SEQ ID NO: 618257 - protein, 13 aa, Homo sapiens
  CDR3 for alpha chain variable domain of TCR clone 309129 (TRAV8-3, TRAJ36)
CAVGATRANNLFF

SEQ ID NO: 618258 - protein, 13 aa, Homo sapiens
  CDR3 for beta chain variable domain of TCR clone 309129 (TRBV2, TRBJ2-5)
CASGTPYQETQYF

SEQ ID NO: 618259 - protein, 11 aa, Homo sapiens
  CDR3 for alpha chain variable domain of TCR clone 309130 (TRAV12-2, TRAJ49)
CALQGDNQFYF

SEQ ID NO: 618260 - protein, 13 aa, Homo sapiens
  CDR3 for beta chain variable domain of TCR clone 309130 (TRBV4-1, TRBJ1-1)
CASSQLGTGEAFF

SEQ ID NO: 618261 - protein, 14 aa, Homo sapiens
  CDR3 for alpha chain variable domain of TCR clone 309131 (TRAV12-2, TRAJ13)
CAVKKTGGYQKVTF

SEQ ID NO: 618262 - protein, 21 aa, Homo sapiens
  CDR3 for beta chain variable domain of TCR clone 309131 (TRBV7-3, TRBJ2-1)
GGTQPCISVPAAYGLAGAQFF

SEQ ID NO: 618263 - protein, 16 aa, Homo sapiens
  CDR3 for alpha chain variable domain of TCR clone 309132 (TRAV17, TRAJ22)
CATGPISSGSARQLTF

SEQ ID NO: 618264 - protein, 13 aa, Homo sapiens
  CDR3 for beta chain variable domain of TCR clone 309132 (TRBV11-2, TRBJ2-1)
CASSLGLAGGRFF

SEQ ID NO: 618265 - protein, 18 aa, Homo sapiens
  CDR3 for alpha chain variable domain of TCR clone 309133 (TRAV21, TRAJ52)
CAVRPSPAGGTSYGKLTF

SEQ ID NO: 618266 - protein, 15 aa, Homo sapiens
  CDR3 for beta chain variable domain of TCR clone 309133 (TRBV20-1, TRBJ2-2)
CSARGGQGNTGELFF

SEQ ID NO: 618267 - protein, 14 aa, Homo sapiens
  CDR3 for alpha chain variable domain of TCR clone 309134 (TRAV12-2, TRAJ13)
CAAKTTGGYQKVTF

SEQ ID NO: 618268 - protein, 15 aa, Homo sapiens
  CDR3 for beta chain variable domain of TCR clone 309134 (TRBV27, TRBJ2-1)
CASSNGGGSSNEQFF

SEQ ID NO: 618269 - protein, 14 aa, Homo sapiens
  CDR3 for alpha chain variable domain of TCR clone 309135 (TRAV1-2, TRAJ16)
CAVNRFSDGQKLLF

SEQ ID NO: 618270 - protein, 13 aa, Homo sapiens
  CDR3 for beta chain variable domain of TCR clone 309135 (TRBV27, TRBJ1-4)
CASSLMEDEKLFF

SEQ ID NO: 618271 - protein, 16 aa, Homo sapiens
  CDR3 for alpha chain variable domain of TCR clone 309136 (TRAV30, TRAJ24)
CGTEIVDAYSWGKFQF

SEQ ID NO: 618272 - protein, 17 aa, Homo sapiens
  CDR3 for beta chain variable domain of TCR clone 309136 (TRBV20-1, TRBJ2-1)
CSARDRRRASSYNEQFF

SEQ ID NO: 618273 - protein, 12 aa, Homo sapiens
  CDR3 for alpha chain variable domain of TCR clone 309137 (TRAV12-1, TRAJ40)
CVVYSGTYKYIF

SEQ ID NO: 618274 - protein, 16 aa, Homo sapiens
  CDR3 for beta chain variable domain of TCR clone 309137 (TRBV28, TRBJ2-3)
CASSLFTGVSTDTQYF

SEQ ID NO: 618275 - protein, 13 aa, Homo sapiens
  CDR3 for alpha chain variable domain of TCR clone 309138 (TRAV21, TRAJ57)
CAVTQGGSEKLVF

SEQ ID NO: 618276 - protein, 16 aa, Homo sapiens
  CDR3 for beta chain variable domain of TCR clone 309138 (TRBV29-1, TRBJ2-7)
CSVDGAEDGTAYEQYF

SEQ ID NO: 618277 - protein, 16 aa, Homo sapiens
  CDR3 for alpha chain variable domain of TCR clone 309139 (TRAV12-3, TRAJ52)
YAVSNAGGTSYGKLTF

SEQ ID NO: 618278 - protein, 16 aa, Homo sapiens
  CDR3 for beta chain variable domain of TCR clone 309139 (TRBV6-6, TRBJ2-1)
CASSYSCSGSYNEQFF

SEQ ID NO: 618279 - protein, 14 aa, Homo sapiens
  CDR3 for alpha chain variable domain of TCR clone 309140 (TRAV9-2, TRAJ39)
CALYIYNAGNMLTF

SEQ ID NO: 618280 - protein, 15 aa, Homo sapiens
  CDR3 for beta chain variable domain of TCR clone 309140 (TRBV6-1, TRBJ2-3)
CASSERGGITDTQYF

SEQ ID NO: 618281 - protein, 16 aa, Homo sapiens
  CDR3 for alpha chain variable domain of TCR clone 309141 (TRAV23/DV6, TRAJ21)
CAASSGGGATSTNLTL

SEQ ID NO: 618282 - protein, 11 aa, Homo sapiens
  CDR3 for beta chain variable domain of TCR clone 309141 (TRBV7-8, TRBJ2-7)
CASSLSLEQYF

SEQ ID NO: 618283 - protein, 16 aa, Homo sapiens
  CDR3 for alpha chain variable domain of TCR clone 309142 (TRAV13-1, TRAJ48)
CAASIFGNLGNEKLTF

SEQ ID NO: 618284 - protein, 11 aa, Homo sapiens
  CDR3 for beta chain variable domain of TCR clone 309142 (TRBV19, TRBJ1-1)
CASSIGSEAFF

SEQ ID NO: 618285 - protein, 13 aa, Homo sapiens
  CDR3 for alpha chain variable domain of TCR clone 309143 (TRAV21, TRAJ27)
CAARPGNAGKSTS

SEQ ID NO: 618286 - protein, 16 aa, Homo sapiens
  CDR3 for beta chain variable domain of TCR clone 309143 (TRBV12-5, TRBJ2-5)
FASGPRTSGNQETQYF

SEQ ID NO: 618287 - protein, 14 aa, Homo sapiens
  CDR3 for alpha chain variable domain of TCR clone 309144 (TRAV12-2, TRAJ13)
CAVQKTGGYQKVTF

SEQ ID NO: 618288 - protein, 13 aa, Homo sapiens
  CDR3 for beta chain variable domain of TCR clone 309144 (TRBV28, TRBJ2-7)
CASKAGGVYEQYF

SEQ ID NO: 618289 - protein, 16 aa, Homo sapiens
  CDR3 for alpha chain variable domain of TCR clone 309145 (TRAV30, TRAJ24)
CGTEIVDADSWGKFQF

SEQ ID NO: 618290 - protein, 15 aa, Homo sapiens
  CDR3 for beta chain variable domain of TCR clone 309145 (TRBV20-1, TRBJ1-1)
SAVHKHGLGGTEAFF

SEQ ID NO: 618291 - protein, 14 aa, Homo sapiens
  CDR3 for alpha chain variable domain of TCR clone 309146 (TRAV12-2, TRAJ17)
CAVLFKAAGNKLTF

SEQ ID NO: 618292 - protein, 14 aa, Homo sapiens
  CDR3 for beta chain variable domain of TCR clone 309146 (TRBV6-5, TRBJ1-5)
CASSFRQFNQPQHF

SEQ ID NO: 618293 - protein, 15 aa, Homo sapiens
  CDR3 for alpha chain variable domain of TCR clone 309147 (TRAV39, TRAJ32)
CAVDMAGGATNKLIF

SEQ ID NO: 618294 - protein, 13 aa, Homo sapiens
  CDR3 for beta chain variable domain of TCR clone 309147 (TRBV7-9, TRBJ1-2)
CASSLKQNYGYTF

SEQ ID NO: 618295 - protein, 14 aa, Homo sapiens
  CDR3 for alpha chain variable domain of TCR clone 309148 (TRAV8-3, TRAJ15)
CAVGRHQSGTALIF

SEQ ID NO: 618296 - protein, 14 aa, Homo sapiens
  CDR3 for beta chain variable domain of TCR clone 309148 (TRBV6-1, TRBJ1-3)
CASVQGGGGNTIYF

SEQ ID NO: 618297 - protein, 17 aa, Homo sapiens
  CDR3 for alpha chain variable domain of TCR clone 309149 (TRAV3, TRAJ6)
CAVRDGTRAGGSYIPTF

SEQ ID NO: 618298 - protein, 14 aa, Homo sapiens
  CDR3 for beta chain variable domain of TCR clone 309149 (TRBV7-2, TRBJ2-7)
CASSPKTSSYEQYF

SEQ ID NO: 618299 - protein, 14 aa, Homo sapiens
  CDR3 for alpha chain variable domain of TCR clone 309150 (TRAV17, TRAJ22)
CATSPPGYARQLTF

SEQ ID NO: 618300 - protein, 15 aa, Homo sapiens
  CDR3 for beta chain variable domain of TCR clone 309150 (TRBV4-1, TRBJ2-5)
CASSQWDLYQETQYF

SEQ ID NO: 618301 - protein, 14 aa, Homo sapiens
  CDR3 for alpha chain variable domain of TCR clone 309151 (TRAV25, TRAJ35)
CARRMEGFGNVLHC

SEQ ID NO: 618302 - protein, 16 aa, Homo sapiens
  CDR3 for beta chain variable domain of TCR clone 309151 (TRBV12-4, TRBJ1-5)
CASSRPVGGSNQPQHF

SEQ ID NO: 618303 - protein, 16 aa, Homo sapiens
  CDR3 for alpha chain variable domain of TCR clone 309152 (TRAV12-3, TRAJ53)
CAMSPGSGGSNYKLTF

SEQ ID NO: 618304 - protein, 18 aa, Homo sapiens
  CDR3 for beta chain variable domain of TCR clone 309152 (TRBV20-1, TRBJ2-6)
CSAETTPTHGSGANVLTF

SEQ ID NO: 618305 - protein, 12 aa, Homo sapiens
  CDR3 for alpha chain variable domain of TCR clone 309153 (TRAV13-1, TRAJ21)
CAAKEGFNKFYF

SEQ ID NO: 618306 - protein, 17 aa, Homo sapiens
  CDR3 for beta chain variable domain of TCR clone 309153 (TRBV11-3, TRBJ2-3)
CASSLGLTGGGTDTQYF

SEQ ID NO: 618307 - protein, 11 aa, Homo sapiens
  CDR3 for alpha chain variable domain of TCR clone 309154 (TRAV12-2, )
CAVASLPTTIS

SEQ ID NO: 618308 - protein, 16 aa, Homo sapiens
  CDR3 for beta chain variable domain of TCR clone 309154 (TRBV5-1, TRBJ2-2)
CASSSRTGGRTGELFF

SEQ ID NO: 618309 - protein, 14 aa, Homo sapiens
  CDR3 for alpha chain variable domain of TCR clone 309155 (TRAV26-1, TRAJ6)
CIVSPVGGSYIPPF

SEQ ID NO: 618310 - protein, 16 aa, Homo sapiens
  CDR3 for beta chain variable domain of TCR clone 309155 (TRBV4-1, TRBJ2-5)
CASSSGLAGVLGTQYF

SEQ ID NO: 618311 - protein, 10 aa, Homo sapiens
  CDR3 for alpha chain variable domain of TCR clone 309156 (TRAV12-3, TRAJ49)
CAMYDDQFYF

SEQ ID NO: 618312 - protein, 13 aa, Homo sapiens
  CDR3 for beta chain variable domain of TCR clone 309156 (TRBV12-4, TRBJ1-1)
CASSPGTGFEAFF

SEQ ID NO: 618313 - protein, 14 aa, Homo sapiens
  CDR3 for alpha chain variable domain of TCR clone 309157 (TRAV1-2, TRAJ8)
CAVREDTGFQKLVF

SEQ ID NO: 618314 - protein, 15 aa, Homo sapiens
  CDR3 for beta chain variable domain of TCR clone 309157 (TRBV7-8, TRBJ1-5)
CASSLALGGQQPQHF

SEQ ID NO: 618315 - protein, 14 aa, Homo sapiens
  CDR3 for alpha chain variable domain of TCR clone 309158 (TRAV12-2, TRAJ5)
CAVNRSTGRRALTF

SEQ ID NO: 618316 - protein, 18 aa, Homo sapiens
  CDR3 for beta chain variable domain of TCR clone 309158 (TRBV27, TRBJ2-1)
CASGNRAVGVGSKNEQFF

SEQ ID NO: 618317 - protein, 15 aa, Homo sapiens
  CDR3 for alpha chain variable domain of TCR clone 309159 (TRAV21, TRAJ24)
CAARSSTDSWGKLQF

SEQ ID NO: 618318 - protein, 16 aa, Homo sapiens
  CDR3 for beta chain variable domain of TCR clone 309159 (TRBV6-1, TRBJ2-1)
CASILRQGSSYNEQFF

SEQ ID NO: 618319 - protein, 15 aa, Homo sapiens
  CDR3 for alpha chain variable domain of TCR clone 309160 (TRAV14/DV4, TRAJ47)
CAMREAMEYGNKMVF

SEQ ID NO: 618320 - protein, 15 aa, Homo sapiens
  CDR3 for beta chain variable domain of TCR clone 309160 (TRBV7-3, TRBJ2-1)
CASSLGQGPFGEQFF

SEQ ID NO: 618321 - protein, 15 aa, Homo sapiens
  CDR3 for alpha chain variable domain of TCR clone 309161 (TRAV12-1, TRAJ40)
CVVNMHFPGTYKYIF

SEQ ID NO: 618322 - protein, 14 aa, Homo sapiens
  CDR3 for beta chain variable domain of TCR clone 309161 (TRBV4-1, TRBJ2-2)
CASSQAVNTGELFF

SEQ ID NO: 618323 - protein, 11 aa, Homo sapiens
  CDR3 for alpha chain variable domain of TCR clone 309162 (TRAV17, TRAJ9)
CGCTGGFKTIF

SEQ ID NO: 618324 - protein, 14 aa, Homo sapiens
  CDR3 for beta chain variable domain of TCR clone 309162 (TRBV7-9, TRBJ2-2)
CASSLVRDTGELFF

SEQ ID NO: 618325 - protein, 14 aa, Homo sapiens
  CDR3 for alpha chain variable domain of TCR clone 309163 (TRAV23/DV6, TRAJ11)
CAASLESGYSTLIF

SEQ ID NO: 618326 - protein, 15 aa, Homo sapiens
  CDR3 for beta chain variable domain of TCR clone 309163 (TRBV28, TRBJ2-7)
CASSSPGTEPFEQYF

SEQ ID NO: 618327 - protein, 14 aa, Homo sapiens
  CDR3 for alpha chain variable domain of TCR clone 309164 (TRAV12-2, TRAJ40)
CTVKIPSGTYKYIF

SEQ ID NO: 618328 - protein, 14 aa, Homo sapiens
  CDR3 for beta chain variable domain of TCR clone 309164 (TRBV18, TRBJ2-5)
CASSPLRVQETQYF

SEQ ID NO: 618329 - protein, 14 aa, Homo sapiens
  CDR3 for alpha chain variable domain of TCR clone 309165 (TRAV8-3, TRAJ39)
CAVGANNAGNTLTF

SEQ ID NO: 618330 - protein, 12 aa, Homo sapiens
  CDR3 for beta chain variable domain of TCR clone 309165 (TRBV28, TRBJ1-3)
CASVSSGNTIYF

SEQ ID NO: 618331 - protein, 15 aa, Homo sapiens
  CDR3 for alpha chain variable domain of TCR clone 309166 (TRAV17, TRAJ29)
CATDAFRKHTSCLWK

SEQ ID NO: 618332 - protein, 13 aa, Homo sapiens
  CDR3 for beta chain variable domain of TCR clone 309166 (TRBV11-2, TRBJ2-1)
CASSSEAYNEQFF

SEQ ID NO: 618333 - protein, 11 aa, Homo sapiens
  CDR3 for alpha chain variable domain of TCR clone 309167 (TRAV1-2, TRAJ11)
CAVRGYSTLTF

SEQ ID NO: 618334 - protein, 14 aa, Homo sapiens
  CDR3 for beta chain variable domain of TCR clone 309167 (TRBV3-1, TRBJ2-2)
ASSQDWTRAGELFF

SEQ ID NO: 618335 - protein, 14 aa, Homo sapiens
  CDR3 for alpha chain variable domain of TCR clone 309168 (TRAV26-1, TRAJ38)
CIADNAGNNRKLIW

SEQ ID NO: 618336 - protein, 20 aa, Homo sapiens
  CDR3 for beta chain variable domain of TCR clone 309168 (TRBV7-8, TRBJ2-2)
CASSHLFPGPTIHIAGELFF

SEQ ID NO: 618337 - protein, 12 aa, Homo sapiens
  CDR3 for alpha chain variable domain of TCR clone 309169 (TRAV20, TRAJ39)
CAVGNAGNMLTF

SEQ ID NO: 618338 - protein, 16 aa, Homo sapiens
  CDR3 for beta chain variable domain of TCR clone 309169 (TRBV15, TRBJ1-2)
CATSRGPSTGGGGYTF

SEQ ID NO: 618339 - protein, 11 aa, Homo sapiens
  CDR3 for alpha chain variable domain of TCR clone 309170 (TRAV3, TRAJ21)
CAMGNFNKFYF

SEQ ID NO: 618340 - protein, 16 aa, Homo sapiens
  CDR3 for beta chain variable domain of TCR clone 309170 (TRBV19, TRBJ2-1)
SASSKAGPSSYNEQFF

SEQ ID NO: 618341 - protein, 14 aa, Homo sapiens
  CDR3 for alpha chain variable domain of TCR clone 309171 (TRAV26-1, TRAJ45)
CIEVTGGGADGLTF

SEQ ID NO: 618342 - protein, 14 aa, Homo sapiens
  CDR3 for beta chain variable domain of TCR clone 309171 (TRBV19, TRBJ1-5)
CASSKMTGPQPQHF

SEQ ID NO: 618343 - protein, 14 aa, Homo sapiens
  CDR3 for alpha chain variable domain of TCR clone 309172 (TRAV12-2, TRAJ39)
CAVTPNNAGNMLTF

SEQ ID NO: 618344 - protein, 15 aa, Homo sapiens
  CDR3 for beta chain variable domain of TCR clone 309172 (TRBV29-1, TRBJ2-1)
CSGRDRKSSYNEQFF

SEQ ID NO: 618345 - protein, 16 aa, Homo sapiens
  CDR3 for alpha chain variable domain of TCR clone 309173 (TRAV30, TRAJ24)
CGTEIVDADSWGKCQF

SEQ ID NO: 618346 - protein, 14 aa, Homo sapiens
  CDR3 for beta chain variable domain of TCR clone 309173 (TRBV12-5, TRBJ2-5)
CASGPRTHQETQYF

SEQ ID NO: 618347 - protein, 14 aa, Homo sapiens
  CDR3 for alpha chain variable domain of TCR clone 309174 (TRAV16, TRAJ17)
RALSGRAAGNKLTF

SEQ ID NO: 618348 - protein, 15 aa, Homo sapiens
  CDR3 for beta chain variable domain of TCR clone 309174 (TRBV3-1, TRBJ1-2)
CASRPTRLPEGGYTF

SEQ ID NO: 618349 - protein, 15 aa, Homo sapiens
  CDR3 for alpha chain variable domain of TCR clone 309175 (TRAV23/DV6, TRAJ33)
CAASNSGGGNYQLIW

SEQ ID NO: 618350 - protein, 15 aa, Homo sapiens
  CDR3 for beta chain variable domain of TCR clone 309175 (TRBV5-1, TRBJ2-7)
CASSLNGGPAREQYF

SEQ ID NO: 618351 - protein, 14 aa, Homo sapiens
  CDR3 for alpha chain variable domain of TCR clone 309176 (TRAV8-6, TRAJ29)
CAVSDQAGNTPLVF

SEQ ID NO: 618352 - protein, 16 aa, Homo sapiens
  CDR3 for beta chain variable domain of TCR clone 309176 (TRBV4-2, TRBJ2-3)
CASSQELAGDTDTQYF

SEQ ID NO: 618353 - protein, 14 aa, Homo sapiens
  CDR3 for alpha chain variable domain of TCR clone 309177 (TRAV29/DV5, TRAJ36)
CAARRKTEANNLFF

SEQ ID NO: 618354 - protein, 14 aa, Homo sapiens
  CDR3 for beta chain variable domain of TCR clone 309177 (TRBV9, TRBJ1-2)
CASSVSGTLYGYTF

SEQ ID NO: 618355 - protein, 14 aa, Homo sapiens
  CDR3 for alpha chain variable domain of TCR clone 309178 (TRAV12-3, TRAJ10)
SHLPLAGGGNKLTF

SEQ ID NO: 618356 - protein, 13 aa, Homo sapiens
  CDR3 for beta chain variable domain of TCR clone 309178 (TRBV20-1, TRBJ1-6)
CSAPLGVGSPLHF

SEQ ID NO: 618357 - protein, 14 aa, Homo sapiens
  CDR3 for alpha chain variable domain of TCR clone 309179 (TRAV17, TRAJ35)
CATWTIGFGNVLHF

SEQ ID NO: 618358 - protein, 15 aa, Homo sapiens
  CDR3 for beta chain variable domain of TCR clone 309179 (TRBV7-2, TRBJ2-5)
CASSPLGLDKETQYF

SEQ ID NO: 618359 - protein, 12 aa, Homo sapiens
  CDR3 for alpha chain variable domain of TCR clone 309180 (TRAV4, TRAJ6)
CLAPGGSYTPKF

SEQ ID NO: 618360 - protein, 12 aa, Homo sapiens
  CDR3 for beta chain variable domain of TCR clone 309180 (TRBV6-5, TRBJ2-3)
CASSDTTDTQYF

SEQ ID NO: 618361 - protein, 14 aa, Homo sapiens
  CDR3 for alpha chain variable domain of TCR clone 309181 (TRAV12-2, TRAJ13)
CAVKKTGGYQKVTF

SEQ ID NO: 618362 - protein, 15 aa, Homo sapiens
  CDR3 for beta chain variable domain of TCR clone 309181 (TRBV4-1, TRBJ2-7)
CASGQNTGRLYEQYF

SEQ ID NO: 618363 - protein, 16 aa, Homo sapiens
  CDR3 for alpha chain variable domain of TCR clone 309182 (TRAV35, TRAJ28)
CARQRYSGAGSYQLTF

SEQ ID NO: 618364 - protein, 14 aa, Homo sapiens
  CDR3 for beta chain variable domain of TCR clone 309182 (TRBV18, TRBJ2-7)
CASSPRGGAYEQYF

SEQ ID NO: 618365 - protein, 14 aa, Homo sapiens
  CDR3 for alpha chain variable domain of TCR clone 309183 (TRAV35, TRAJ33)
CAGSSQDSNYQLLW

SEQ ID NO: 618366 - protein, 15 aa, Homo sapiens
  CDR3 for beta chain variable domain of TCR clone 309183 (TRBV20-1, TRBJ2-7)
CSAESGTSGAYERYF

SEQ ID NO: 618367 - protein, 19 aa, Homo sapiens
  CDR3 for alpha chain variable domain of TCR clone 309184 (TRAV2, TRAJ20)
ILQVREADAAVYRDCKLSF

SEQ ID NO: 618368 - protein, 13 aa, Homo sapiens
  CDR3 for beta chain variable domain of TCR clone 309184 (TRBV7-6, TRBJ1-2)
CASSLVADYGYTF

SEQ ID NO: 618369 - protein, 13 aa, Homo sapiens
  CDR3 for alpha chain variable domain of TCR clone 309185 (TRAV12-3, TRAJ50)
CARGGTSYDKVIF

SEQ ID NO: 618370 - protein, 13 aa, Homo sapiens
  CDR3 for beta chain variable domain of TCR clone 309185 (TRBV12-5, TRBJ2-3)
CASGDRQSDTQYF

SEQ ID NO: 618371 - protein, 10 aa, Homo sapiens
  CDR3 for alpha chain variable domain of TCR clone 309186 (TRAV5, TRAJ34)
CAEDTDKLIF

SEQ ID NO: 618372 - protein, 12 aa, Homo sapiens
  CDR3 for beta chain variable domain of TCR clone 309186 (TRBV11-2, TRBJ2-2)
CASSLGGGELVF

SEQ ID NO: 618373 - protein, 14 aa, Homo sapiens
  CDR3 for alpha chain variable domain of TCR clone 309187 (TRAV12-2, TRAJ13)
CDVKKTGGYQKVTF

SEQ ID NO: 618374 - protein, 16 aa, Homo sapiens
  CDR3 for beta chain variable domain of TCR clone 309187 (TRBV20-1, TRBJ1-1)
CSARALTQGMNTEAFF

SEQ ID NO: 618375 - protein, 17 aa, Homo sapiens
  CDR3 for alpha chain variable domain of TCR clone 309188 (TRAV38-2/DV8, TRAJ38)
CAYRSARGASNNRKLIW

SEQ ID NO: 618376 - protein, 13 aa, Homo sapiens
  CDR3 for beta chain variable domain of TCR clone 309188 (TRBV6-5, TRBJ2-1)
CASRGRVGNEQFF

SEQ ID NO: 618377 - protein, 14 aa, Homo sapiens
  CDR3 for alpha chain variable domain of TCR clone 309189 (TRAV1-2, TRAJ8)
CAVREDTGFHKLVF

SEQ ID NO: 618378 - protein, 15 aa, Homo sapiens
  CDR3 for beta chain variable domain of TCR clone 309189 (TRBV12-4, TRBJ2-5)
CASSPPTGLQETQYF

SEQ ID NO: 618379 - protein, 12 aa, Homo sapiens
  CDR3 for alpha chain variable domain of TCR clone 309190 (TRAV1-1, TRAJ39)
CAVPVVGNMLTF

SEQ ID NO: 618380 - protein, 16 aa, Homo sapiens
  CDR3 for beta chain variable domain of TCR clone 309190 (TRBV19, TRBJ2-1)
CASSKAGPSAYNEQFF

SEQ ID NO: 618381 - protein, 13 aa, Homo sapiens
  CDR3 for alpha chain variable domain of TCR clone 309191 (TRAV5, TRAJ30)
CAEIANRDAKTIF

SEQ ID NO: 618382 - protein, 14 aa, Homo sapiens
  CDR3 for beta chain variable domain of TCR clone 309191 (TRBV4-1, TRBJ2-2)
CASSQAVNTGELFF

SEQ ID NO: 618383 - protein, 14 aa, Homo sapiens
  CDR3 for alpha chain variable domain of TCR clone 309192 (TRAV12-1, TRAJ3)
CGAARYSSASKIIF

SEQ ID NO: 618384 - protein, 21 aa, Homo sapiens
  CDR3 for beta chain variable domain of TCR clone 309192 (TRBV7-2, TRBJ2-6)
CASSRRLWGQRPDFRGRQQAD

SEQ ID NO: 618385 - protein, 17 aa, Homo sapiens
  CDR3 for alpha chain variable domain of TCR clone 309193 (TRAV13-2, TRAJ28)
CAEEPAGSGAGSYQLTF

SEQ ID NO: 618386 - protein, 19 aa, Homo sapiens
  CDR3 for beta chain variable domain of TCR clone 309193 (TRBV25-1, TRBJ2-2)
CAILVYRVDRGRKTGELFF

SEQ ID NO: 618387 - protein, 15 aa, Homo sapiens
  CDR3 for alpha chain variable domain of TCR clone 309194 (TRAV3, TRAJ3)
CAVRDMSSSASKIIF

SEQ ID NO: 618388 - protein, 16 aa, Homo sapiens
  CDR3 for beta chain variable domain of TCR clone 309194 (TRBV7-9, TRBJ2-3)
CASSPWREVGTDTQYL

SEQ ID NO: 618389 - protein, 13 aa, Homo sapiens
  CDR3 for alpha chain variable domain of TCR clone 309195 (TRAV8-3, TRAJ44)
CAVVPGTASQLTF

SEQ ID NO: 618390 - protein, 12 aa, Homo sapiens
  CDR3 for beta chain variable domain of TCR clone 309195 (TRBV11-2, TRBJ2-1)
CASSPGNNEQFF

SEQ ID NO: 618391 - protein, 13 aa, Homo sapiens
  CDR3 for alpha chain variable domain of TCR clone 309196 (TRAV21, TRAJ27)
CAARPGNAGKSTF

SEQ ID NO: 618392 - protein, 12 aa, Homo sapiens
  CDR3 for beta chain variable domain of TCR clone 309196 (TRBV18, TRBJ2-1)
CASSSDEGEQFF

SEQ ID NO: 618393 - protein, 14 aa, Homo sapiens
  CDR3 for alpha chain variable domain of TCR clone 309197 (TRAV1-2, TRAJ16)
CAVNRFSDGQKLLF

SEQ ID NO: 618394 - protein, 14 aa, Homo sapiens
  CDR3 for beta chain variable domain of TCR clone 309197 (TRBV13, TRBJ2-5)
CASSLGRGQDTQYF

SEQ ID NO: 618395 - protein, 14 aa, Homo sapiens
  CDR3 for alpha chain variable domain of TCR clone 309198 (TRAV12-2, TRAJ45)
CAVYSGGGADGLTF

SEQ ID NO: 618396 - protein, 18 aa, Homo sapiens
  CDR3 for beta chain variable domain of TCR clone 309198 (TRBV3-1, TRBJ2-7)
SASSRISAGGRSSYEQYF

SEQ ID NO: 618397 - protein, 18 aa, Homo sapiens
  CDR3 for alpha chain variable domain of TCR clone 309199 (TRAV13-1, TRAJ52)
CAAKNPNAGGTSHGKLTF

SEQ ID NO: 618398 - protein, 15 aa, Homo sapiens
  CDR3 for beta chain variable domain of TCR clone 309199 (TRBV27, TRBJ2-1)
CASSNGGGSSNEQFF

SEQ ID NO: 618399 - protein, 15 aa, Homo sapiens
  CDR3 for alpha chain variable domain of TCR clone 309200 (TRAV21, TRAJ53)
CATLNSGGSHYKLTF

SEQ ID NO: 618400 - protein, 14 aa, Homo sapiens
  CDR3 for beta chain variable domain of TCR clone 309200 (TRBV7-2, TRBJ2-7)
CASRSQGAAYEQYF

SEQ ID NO: 618401 - protein, 15 aa, Homo sapiens
  CDR3 for alpha chain variable domain of TCR clone 309201 (TRAV26-1, TRAJ40)
CIVRVTTSGTYKYIF

SEQ ID NO: 618402 - protein, 14 aa, Homo sapiens
  CDR3 for beta chain variable domain of TCR clone 309201 (TRBV7-2, TRBJ2-1)
CASSPGTFYNEQFF

SEQ ID NO: 618403 - protein, 13 aa, Homo sapiens
  CDR3 for alpha chain variable domain of TCR clone 309202 (TRAV26-1, )
CIVSHGVEGFWNQ

SEQ ID NO: 618404 - protein, 14 aa, Homo sapiens
  CDR3 for beta chain variable domain of TCR clone 309202 (TRBV20-1, TRBJ2-7)
CSAWTALSSYEQYF

SEQ ID NO: 618405 - protein, 12 aa, Homo sapiens
  CDR3 for alpha chain variable domain of TCR clone 309203 (TRAV13-2, TRAJ23)
CAERHRGGKLIF

SEQ ID NO: 618406 - protein, 16 aa, Homo sapiens
  CDR3 for beta chain variable domain of TCR clone 309203 (TRBV15, TRBJ2-1)
CATSRERLAGAYEQFF

SEQ ID NO: 618407 - protein, 13 aa, Homo sapiens
  CDR3 for alpha chain variable domain of TCR clone 309204 (TRAV21, TRAJ11)
CAVPNSGYSTLTF

SEQ ID NO: 618408 - protein, 16 aa, Homo sapiens
  CDR3 for beta chain variable domain of TCR clone 309204 (TRBV19, TRBJ2-4)
CATGGLAGGTKNIQYF

SEQ ID NO: 618409 - protein, 16 aa, Homo sapiens
  CDR3 for alpha chain variable domain of TCR clone 309205 (TRAV14/DV4, TRAJ38)
CAMRESNAGNNRKLIW

SEQ ID NO: 618410 - protein, 15 aa, Homo sapiens
  CDR3 for beta chain variable domain of TCR clone 309205 (TRBV7-3, TRBJ2-1)
CASSPTGGGEVEQFF

SEQ ID NO: 618411 - protein, 16 aa, Homo sapiens
  CDR3 for alpha chain variable domain of TCR clone 309206 (TRAV12-2, TRAJ32)
PLRPHPDSGATNKLIF

SEQ ID NO: 618412 - protein, 14 aa, Homo sapiens
  CDR3 for beta chain variable domain of TCR clone 309206 (TRBV4-2, TRBJ2-3)
CASRETRAPGMQYF

SEQ ID NO: 618413 - protein, 18 aa, Homo sapiens
  CDR3 for alpha chain variable domain of TCR clone 309207 (TRAV21, TRAJ52)
CAVWPSPAGGTSSGKLTF

SEQ ID NO: 618414 - protein, 17 aa, Homo sapiens
  CDR3 for beta chain variable domain of TCR clone 309207 (TRBV13, TRBJ2-3)
CASSLSRVAGGRNTQYF

SEQ ID NO: 618415 - protein, 13 aa, Homo sapiens
  CDR3 for alpha chain variable domain of TCR clone 309208 (TRAV16, TRAJ54)
RALMVQGAQKLVF

SEQ ID NO: 618416 - protein, 12 aa, Homo sapiens
  CDR3 for beta chain variable domain of TCR clone 309208 (TRBV18, TRBJ2-7)
CASSTAMGEQYF

SEQ ID NO: 618417 - protein, 13 aa, Homo sapiens
  CDR3 for alpha chain variable domain of TCR clone 309209 (TRAV27, TRAJ41)
CAGEGNSGYALNF

SEQ ID NO: 618418 - protein, 14 aa, Homo sapiens
  CDR3 for beta chain variable domain of TCR clone 309209 (TRBV25-1, TRBJ1-1)
CASTHLEGNTEAFF

SEQ ID NO: 618419 - protein, 14 aa, Homo sapiens
  CDR3 for alpha chain variable domain of TCR clone 309210 (TRAV12-2, TRAJ8)
CAVKENTGFQKLVF

SEQ ID NO: 618420 - protein, 16 aa, Homo sapiens
  CDR3 for beta chain variable domain of TCR clone 309210 (TRBV7-2, TRBJ2-7)
CASSNRQGDTSSTSGR

SEQ ID NO: 618421 - protein, 13 aa, Homo sapiens
  CDR3 for alpha chain variable domain of TCR clone 309211 (TRAV3, TRAJ21)
CAVREPDFNKFYF

SEQ ID NO: 618422 - protein, 18 aa, Homo sapiens
  CDR3 for beta chain variable domain of TCR clone 309211 (TRBV20-1, TRBJ2-6)
CSAETTPTHGSGANDLTF

SEQ ID NO: 618423 - protein, 16 aa, Homo sapiens
  CDR3 for alpha chain variable domain of TCR clone 309212 (TRAV3, TRAJ10)
CAVRDMNAGGGNKLTF

SEQ ID NO: 618424 - protein, 15 aa, Homo sapiens
  CDR3 for beta chain variable domain of TCR clone 309212 (TRBV20-1, TRBJ2-7)
CSASDRVSGMDEQYF

SEQ ID NO: 618425 - protein, 16 aa, Homo sapiens
  CDR3 for alpha chain variable domain of TCR clone 309213 (TRAV1-1, TRAJ22)
CAVNDALSGSARQLTF

SEQ ID NO: 618426 - protein, 16 aa, Homo sapiens
  CDR3 for beta chain variable domain of TCR clone 309213 (TRBV4-3, TRBJ2-2)
CASSHLQGSGTGELFF

SEQ ID NO: 618427 - protein, 14 aa, Homo sapiens
  CDR3 for alpha chain variable domain of TCR clone 309214 (TRAV23/DV6, TRAJ4)
CAAPSSGGYNKLIF

SEQ ID NO: 618428 - protein, 16 aa, Homo sapiens
  CDR3 for beta chain variable domain of TCR clone 309214 (TRBV19, TRBJ1-1)
CASRFGGPVTGTKAFF

SEQ ID NO: 618429 - protein, 14 aa, Homo sapiens
  CDR3 for alpha chain variable domain of TCR clone 309215 (TRAV9-2, TRAJ39)
CALYIYNAGDMLTF

SEQ ID NO: 618430 - protein, 14 aa, Homo sapiens
  CDR3 for beta chain variable domain of TCR clone 309215 (TRBV6-1, TRBJ1-3)
CASVQGGGGNTIYF

SEQ ID NO: 618431 - protein, 14 aa, Homo sapiens
  CDR3 for alpha chain variable domain of TCR clone 309216 (TRAV23/DV6, TRAJ37)
CAARTSSNTGKLIF

SEQ ID NO: 618432 - protein, 12 aa, Homo sapiens
  CDR3 for beta chain variable domain of TCR clone 309216 (TRBV27, TRBJ2-2)
CASKLFTGELFF

SEQ ID NO: 618433 - protein, 12 aa, Homo sapiens
  CDR3 for alpha chain variable domain of TCR clone 309217 (TRAV2, TRAJ33)
CAVPDSNYQLIC

SEQ ID NO: 618434 - protein, 15 aa, Homo sapiens
  CDR3 for beta chain variable domain of TCR clone 309217 (TRBV10-2, TRBJ2-6)
CASSEQGTGANDLTF

SEQ ID NO: 618435 - protein, 12 aa, Homo sapiens
  CDR3 for alpha chain variable domain of TCR clone 309218 (TRAV17, TRAJ30)
CVPARRDDKIIF

SEQ ID NO: 618436 - protein, 11 aa, Homo sapiens
  CDR3 for beta chain variable domain of TCR clone 309218 (TRBV20-1, TRBJ1-2)
CSVQGAGGYTF

SEQ ID NO: 618437 - protein, 15 aa, Homo sapiens
  CDR3 for alpha chain variable domain of TCR clone 309219 (TRAV17, TRAJ57)
CATGPSQGGSDKLVF

SEQ ID NO: 618438 - protein, 15 aa, Homo sapiens
  CDR3 for beta chain variable domain of TCR clone 309219 (TRBV7-2, TRBJ1-2)
CASSPRAGWNYGYTF

SEQ ID NO: 618439 - protein, 12 aa, Homo sapiens
  CDR3 for alpha chain variable domain of TCR clone 309220 (TRAV13-1, TRAJ21)
CATKEGFNKFYF

SEQ ID NO: 618440 - protein, 14 aa, Homo sapiens
  CDR3 for beta chain variable domain of TCR clone 309220 (TRBV5-4, TRBJ1-1)
CASSLDSRRDEAFF

SEQ ID NO: 618441 - protein, 12 aa, Homo sapiens
  CDR3 for alpha chain variable domain of TCR clone 309221 (TRAV13-2, TRAJ8)
CAPWLGFQKLVF

SEQ ID NO: 618442 - protein, 13 aa, Homo sapiens
  CDR3 for beta chain variable domain of TCR clone 309221 (TRBV10-2, TRBJ2-3)
CASSESGDHTQYF

SEQ ID NO: 618443 - protein, 15 aa, Homo sapiens
  CDR3 for alpha chain variable domain of TCR clone 309222 (TRAV12-3, TRAJ27)
CAMRAYNTNAGKSTF

SEQ ID NO: 618444 - protein, 14 aa, Homo sapiens
  CDR3 for beta chain variable domain of TCR clone 309222 (TRBV19, TRBJ1-2)
CASSIGAGSYGYTF

SEQ ID NO: 618445 - protein, 14 aa, Homo sapiens
  CDR3 for alpha chain variable domain of TCR clone 309223 (TRAV4, TRAJ9)
CHVGSGTGGFKTIF

SEQ ID NO: 618446 - protein, 19 aa, Homo sapiens
  CDR3 for beta chain variable domain of TCR clone 309223 (TRBV25-1, TRBJ2-2)
CAILVYRVDRGRKTGELFF

SEQ ID NO: 618447 - protein, 20 aa, Homo sapiens
  CDR3 for alpha chain variable domain of TCR clone 309224 (TRAV1-1, TRAJ4)
CLLLLRCEGFLSGGYNKLIF

SEQ ID NO: 618448 - protein, 16 aa, Homo sapiens
  CDR3 for beta chain variable domain of TCR clone 309224 (TRBV28, TRBJ1-4)
CASIPPYRGRSEKLFF

SEQ ID NO: 618449 - protein, 17 aa, Homo sapiens
  CDR3 for alpha chain variable domain of TCR clone 309225 (TRAV23/DV6, TRAJ57)
CAASSTLSQRGSEKLVV

SEQ ID NO: 618450 - protein, 14 aa, Homo sapiens
  CDR3 for beta chain variable domain of TCR clone 309225 (TRBV25-1, TRBJ1-1)
CASTHLGGNTEAFF

SEQ ID NO: 618451 - protein, 10 aa, Homo sapiens
  CDR3 for alpha chain variable domain of TCR clone 309226 (TRAV12-3, TRAJ49)
CAMNDDKFYF

SEQ ID NO: 618452 - protein, 16 aa, Homo sapiens
  CDR3 for beta chain variable domain of TCR clone 309226 (TRBV27, TRBJ2-2)
CASSFRGLVRTGELFF

SEQ ID NO: 618453 - protein, 14 aa, Homo sapiens
  CDR3 for alpha chain variable domain of TCR clone 309227 (TRAV1-2, TRAJ16)
CAVNRFSDSQKLLF

SEQ ID NO: 618454 - protein, 16 aa, Homo sapiens
  CDR3 for beta chain variable domain of TCR clone 309227 (TRBV20-1, TRBJ1-4)
CSAPGQGLLTNEKLFF

SEQ ID NO: 618455 - protein, 13 aa, Homo sapiens
  CDR3 for alpha chain variable domain of TCR clone 309228 (TRAV3, TRAJ21)
CAVREPDFNKFFF

SEQ ID NO: 618456 - protein, 18 aa, Homo sapiens
  CDR3 for beta chain variable domain of TCR clone 309228 (TRBV11-2, TRBJ2-3)
CASSLGGASRGAPNTQYF

SEQ ID NO: 618457 - protein, 18 aa, Homo sapiens
  CDR3 for alpha chain variable domain of TCR clone 309229 (TRAV13-1, TRAJ52)
CAAKNPNAGGTSYGKMTF

SEQ ID NO: 618458 - protein, 13 aa, Homo sapiens
  CDR3 for beta chain variable domain of TCR clone 309229 (TRBV7-8, TRBJ2-1)
CASTRDAVDEQFF

SEQ ID NO: 618459 - protein, 18 aa, Homo sapiens
  CDR3 for alpha chain variable domain of TCR clone 309230 (TRAV26-2, TRAJ45)
CILRVDKYSGGGADGLTF

SEQ ID NO: 618460 - protein, 16 aa, Homo sapiens
  CDR3 for beta chain variable domain of TCR clone 309230 (TRBV15, TRBJ2-3)
CATSRDLGIVTDTQYF

SEQ ID NO: 618461 - protein, 15 aa, Homo sapiens
  CDR3 for alpha chain variable domain of TCR clone 309231 (TRAV38-2/DV8, TRAJ47)
CAYRSAKGYGNKLVF

SEQ ID NO: 618462 - protein, 15 aa, Homo sapiens
  CDR3 for beta chain variable domain of TCR clone 309231 (TRBV19, TRBJ2-4)
CHGGTSGGTKNIQYF

SEQ ID NO: 618463 - protein, 17 aa, Homo sapiens
  CDR3 for alpha chain variable domain of TCR clone 309232 (TRAV36/DV7, TRAJ52)
CAVAQRAGGTSYGKLTF

SEQ ID NO: 618464 - protein, 18 aa, Homo sapiens
  CDR3 for beta chain variable domain of TCR clone 309232 (TRBV7-3, TRBJ2-1)
CASSLTDPRVAAYNEQFF

SEQ ID NO: 618465 - protein, 18 aa, Homo sapiens
  CDR3 for alpha chain variable domain of TCR clone 309233 (TRAV26-1, TRAJ27)
CIVRPSFNYNTNAGKSIF

SEQ ID NO: 618466 - protein, 14 aa, Homo sapiens
  CDR3 for beta chain variable domain of TCR clone 309233 (TRBV10-3, TRBJ1-6)
CAISVDGDESPLHF

SEQ ID NO: 618467 - protein, 14 aa, Homo sapiens
  CDR3 for alpha chain variable domain of TCR clone 309234 (TRAV1-2, TRAJ16)
CAVNRFSDGQKLLF

SEQ ID NO: 618468 - protein, 13 aa, Homo sapiens
  CDR3 for beta chain variable domain of TCR clone 309234 (TRBV6-5, TRBJ1-1)
QTSVYFFALRAFF

SEQ ID NO: 618469 - protein, 13 aa, Homo sapiens
  CDR3 for alpha chain variable domain of TCR clone 309235 (TRAV8-3, TRAJ28)
CAVGAVGSYQLTF

SEQ ID NO: 618470 - protein, 21 aa, Homo sapiens
  CDR3 for beta chain variable domain of TCR clone 309235 (TRBV7-2, TRBJ2-7)
RRTRPCISVPAGQGAAYEQYF

SEQ ID NO: 618471 - protein, 13 aa, Homo sapiens
  CDR3 for alpha chain variable domain of TCR clone 309236 (TRAV2, TRAJ15)
CAVASQAGTALIF

SEQ ID NO: 618472 - protein, 15 aa, Homo sapiens
  CDR3 for beta chain variable domain of TCR clone 309236 (TRBV7-9, TRBJ1-4)
CASSATGGNNEKLFF

SEQ ID NO: 618473 - protein, 15 aa, Homo sapiens
  CDR3 for alpha chain variable domain of TCR clone 309237 (TRAV23/DV6, TRAJ37)
CAVGRGSSNTGKLIF

SEQ ID NO: 618474 - protein, 14 aa, Homo sapiens
  CDR3 for beta chain variable domain of TCR clone 309237 (TRBV20-1, TRBJ1-4)
CSAPPGQGNEKLFF

SEQ ID NO: 618475 - protein, 16 aa, Homo sapiens
  CDR3 for alpha chain variable domain of TCR clone 309238 (TRAV3, TRAJ37)
CAVRPHGSGNTGKLIF

SEQ ID NO: 618476 - protein, 16 aa, Homo sapiens
  CDR3 for beta chain variable domain of TCR clone 309238 (TRBV9, TRBJ1-2)
CASSVEEKISPYGYTF

SEQ ID NO: 618477 - protein, 14 aa, Homo sapiens
  CDR3 for alpha chain variable domain of TCR clone 309239 (TRAV12-2, TRAJ11)
CAVNRESGYSTLTF

SEQ ID NO: 618478 - protein, 10 aa, Homo sapiens
  CDR3 for beta chain variable domain of TCR clone 309239 (TRBV20-1, TRBJ2-5)
CSARFETQSF

SEQ ID NO: 618479 - protein, 15 aa, Homo sapiens
  CDR3 for alpha chain variable domain of TCR clone 309240 (TRAV3, TRAJ47)
CAVRDIGEYGNKLVF

SEQ ID NO: 618480 - protein, 13 aa, Homo sapiens
  CDR3 for beta chain variable domain of TCR clone 309240 (TRBV4-1, TRBJ2-5)
CASSQEVQETQYF

SEQ ID NO: 618481 - protein, 14 aa, Homo sapiens
  CDR3 for alpha chain variable domain of TCR clone 309241 (TRAV9-2, TRAJ39)
CALYIYNEGNMLTF

SEQ ID NO: 618482 - protein, 20 aa, Homo sapiens
  CDR3 for beta chain variable domain of TCR clone 309241 (TRBV28, TRBJ2-1)
CASTPIGRSPGLAGGNEQFF

SEQ ID NO: 618483 - protein, 14 aa, Homo sapiens
  CDR3 for alpha chain variable domain of TCR clone 309242 (TRAV30, TRAJ33)
RGTVAPRSNYQLIL

SEQ ID NO: 618484 - protein, 14 aa, Homo sapiens
  CDR3 for beta chain variable domain of TCR clone 309242 (TRBV13, TRBJ1-1)
CASTVITVNTEAFF

SEQ ID NO: 618485 - protein, 12 aa, Homo sapiens
  CDR3 for alpha chain variable domain of TCR clone 309243 (TRAV8-3, TRAJ26)
CAGDHYGQNFVF

SEQ ID NO: 618486 - protein, 13 aa, Homo sapiens
  CDR3 for beta chain variable domain of TCR clone 309243 (TRBV20-1, TRBJ2-5)
CSARGDYQETQYF

SEQ ID NO: 618487 - protein, 14 aa, Homo sapiens
  CDR3 for alpha chain variable domain of TCR clone 309244 (TRAV2, TRAJ9)
CAVEDRGGGFKTIF

SEQ ID NO: 618488 - protein, 15 aa, Homo sapiens
  CDR3 for beta chain variable domain of TCR clone 309244 (TRBV7-2, TRBJ2-1)
CASSSGLAGGNEQFF

SEQ ID NO: 618489 - protein, 14 aa, Homo sapiens
  CDR3 for alpha chain variable domain of TCR clone 309245 (TRAV17, TRAJ57)
CAADPQGGSEKLVF

SEQ ID NO: 618490 - protein, 15 aa, Homo sapiens
  CDR3 for beta chain variable domain of TCR clone 309245 (TRBV5-1, TRBJ2-7)
CASSLDLTSSYEQYF

SEQ ID NO: 618491 - protein, 14 aa, Homo sapiens
  CDR3 for alpha chain variable domain of TCR clone 309246 (TRAV8-4, TRAJ13)
CAVTLSGGYQKVTF

SEQ ID NO: 618492 - protein, 14 aa, Homo sapiens
  CDR3 for beta chain variable domain of TCR clone 309246 (TRBV7-2, TRBJ1-2)
CAISQTGSTYGYTF

SEQ ID NO: 618493 - protein, 13 aa, Homo sapiens
  CDR3 for alpha chain variable domain of TCR clone 309247 (TRAV17, TRAJ9)
CATDYTGGFKTIF

SEQ ID NO: 618494 - protein, 14 aa, Homo sapiens
  CDR3 for beta chain variable domain of TCR clone 309247 (TRBV19, TRBJ2-7)
CASSMTGQQETQYF

SEQ ID NO: 618495 - protein, 17 aa, Homo sapiens
  CDR3 for alpha chain variable domain of TCR clone 309248 (TRAV36/DV7, TRAJ52)
CAVAQRAGGTSYGKLRF

SEQ ID NO: 618496 - protein, 14 aa, Homo sapiens
  CDR3 for beta chain variable domain of TCR clone 309248 (TRBV7-9, TRBJ2-5)
CASSLDTAQETQYF

SEQ ID NO: 618497 - protein, 11 aa, Homo sapiens
  CDR3 for alpha chain variable domain of TCR clone 309249 (TRAV12-1, TRAJ43)
CVEYDNNDMRF

SEQ ID NO: 618498 - protein, 15 aa, Homo sapiens
  CDR3 for beta chain variable domain of TCR clone 309249 (TRBV18, TRBJ2-5)
CPSSPRASEAETQYF

SEQ ID NO: 618499 - protein, 12 aa, Homo sapiens
  CDR3 for alpha chain variable domain of TCR clone 309250 (TRAV27, TRAJ35)
CAGADFGNVLHC

SEQ ID NO: 618500 - protein, 15 aa, Homo sapiens
  CDR3 for beta chain variable domain of TCR clone 309250 (TRBV20-1, TRBJ2-7)
CSARDRVSGMDEQYL

SEQ ID NO: 618501 - protein, 13 aa, Homo sapiens
  CDR3 for alpha chain variable domain of TCR clone 309251 (TRAV17, TRAJ26)
CATVDNYGQNFVF

SEQ ID NO: 618502 - protein, 16 aa, Homo sapiens
  CDR3 for beta chain variable domain of TCR clone 309251 (TRBV2, TRBJ2-1)
CASSVEWSLSYNEQFF

SEQ ID NO: 618503 - protein, 12 aa, Homo sapiens
  CDR3 for alpha chain variable domain of TCR clone 309252 (TRAV1-1, TRAJ8)
CAGCTGFQKLVF

SEQ ID NO: 618504 - protein, 13 aa, Homo sapiens
  CDR3 for beta chain variable domain of TCR clone 309252 (TRBV11-3, TRBJ2-1)
CTSSSRRVDEQFF

SEQ ID NO: 618505 - protein, 12 aa, Homo sapiens
  CDR3 for alpha chain variable domain of TCR clone 309253 (TRAV21, TRAJ13)
PGPSGGYLKVTF

SEQ ID NO: 618506 - protein, 13 aa, Homo sapiens
  CDR3 for beta chain variable domain of TCR clone 309253 (TRBV7-9, TRBJ1-2)
CASSLKQNYGYTF

SEQ ID NO: 618507 - protein, 16 aa, Homo sapiens
  CDR3 for alpha chain variable domain of TCR clone 309254 (TRAV3, TRAJ3)
CAVRDRAKSSASKIIF

SEQ ID NO: 618508 - protein, 17 aa, Homo sapiens
  CDR3 for beta chain variable domain of TCR clone 309254 (TRBV5-4, TRBJ2-1)
CASSSAGGRGPYNEQFF

SEQ ID NO: 618509 - protein, 11 aa, Homo sapiens
  CDR3 for alpha chain variable domain of TCR clone 309255 (TRAV21, TRAJ34)
CTVTNTDKLIF

SEQ ID NO: 618510 - protein, 14 aa, Homo sapiens
  CDR3 for beta chain variable domain of TCR clone 309255 (TRBV4-2, TRBJ2-1)
CASGLDRAYNEQFF

SEQ ID NO: 618511 - protein, 10 aa, Homo sapiens
  CDR3 for alpha chain variable domain of TCR clone 309256 (TRAV21, TRAJ31)
CAVDNARLMF

SEQ ID NO: 618512 - protein, 15 aa, Homo sapiens
  CDR3 for beta chain variable domain of TCR clone 309256 (TRBV13, TRBJ2-3)
CASSLSGGRTDTQYF

SEQ ID NO: 618513 - protein, 14 aa, Homo sapiens
  CDR3 for alpha chain variable domain of TCR clone 309257 (TRAV20, TRAJ42)
CAVQAGGSQVNIIF

SEQ ID NO: 618514 - protein, 14 aa, Homo sapiens
  CDR3 for beta chain variable domain of TCR clone 309257 (TRBV28, TRBJ1-2)
CASRIQGANYGYTF

SEQ ID NO: 618515 - protein, 14 aa, Homo sapiens
  CDR3 for alpha chain variable domain of TCR clone 309258 (TRAV1-2, TRAJ16)
CAVNRFSDGRKLLF

SEQ ID NO: 618516 - protein, 16 aa, Homo sapiens
  CDR3 for beta chain variable domain of TCR clone 309258 (TRBV3-1, TRBJ2-5)
CASSPGQFNGFGTQYF

SEQ ID NO: 618517 - protein, 14 aa, Homo sapiens
  CDR3 for alpha chain variable domain of TCR clone 309259 (TRAV23/DV6, TRAJ4)
CAAPSSGGYNRLIF

SEQ ID NO: 618518 - protein, 16 aa, Homo sapiens
  CDR3 for beta chain variable domain of TCR clone 309259 (TRBV2, TRBJ2-1)
CASSVGGSLSYNEQFF

SEQ ID NO: 618519 - protein, 14 aa, Homo sapiens
  CDR3 for alpha chain variable domain of TCR clone 309260 (TRAV2, TRAJ39)
CAVEGDNAGNMLTF

SEQ ID NO: 618520 - protein, 14 aa, Homo sapiens
  CDR3 for beta chain variable domain of TCR clone 309260 (TRBV28, TRBJ2-7)
YASSLRARGNEQYF

SEQ ID NO: 618521 - protein, 14 aa, Homo sapiens
  CDR3 for alpha chain variable domain of TCR clone 309261 (TRAV16, TRAJ31)
CALSGRNNNARLTF

SEQ ID NO: 618522 - protein, 12 aa, Homo sapiens
  CDR3 for beta chain variable domain of TCR clone 309261 (TRBV11-2, TRBJ1-2)
CASSREGDGYTF

SEQ ID NO: 618523 - protein, 14 aa, Homo sapiens
  CDR3 for alpha chain variable domain of TCR clone 309262 (TRAV1-2, TRAJ16)
CVVNRFSDGQKLLF

SEQ ID NO: 618524 - protein, 14 aa, Homo sapiens
  CDR3 for beta chain variable domain of TCR clone 309262 (TRBV20-1, TRBJ2-1)
CSARGGSSDNEQFF

SEQ ID NO: 618525 - protein, 12 aa, Homo sapiens
  CDR3 for alpha chain variable domain of TCR clone 309263 (TRAV12-3, TRAJ42)
CAPGGSQGNLIF

SEQ ID NO: 618526 - protein, 14 aa, Homo sapiens
  CDR3 for beta chain variable domain of TCR clone 309263 (TRBV25-1, TRBJ1-1)
CASTHLGGITEAFF

SEQ ID NO: 618527 - protein, 14 aa, Homo sapiens
  CDR3 for alpha chain variable domain of TCR clone 309264 (TRAV12-2, TRAJ17)
CAVLFKAAGNKLTF

SEQ ID NO: 618528 - protein, 14 aa, Homo sapiens
  CDR3 for beta chain variable domain of TCR clone 309264 (TRBV15, TRBJ1-2)
CATSRDFDRVAYTF

SEQ ID NO: 618529 - protein, 17 aa, Homo sapiens
  CDR3 for alpha chain variable domain of TCR clone 309265 (TRAV38-1, TRAJ45)
CAFIKHYMGGGADGLTF

SEQ ID NO: 618530 - protein, 19 aa, Homo sapiens
  CDR3 for beta chain variable domain of TCR clone 309265 (TRBV6-1, TRBJ2-5)
CASSEQGLAGGLYQETQYF

SEQ ID NO: 618531 - protein, 11 aa, Homo sapiens
  CDR3 for alpha chain variable domain of TCR clone 309266 (TRAV12-3, TRAJ49)
CAANTGNQICF

SEQ ID NO: 618532 - protein, 12 aa, Homo sapiens
  CDR3 for beta chain variable domain of TCR clone 309266 (TRBV6-3, TRBJ2-7)
CASSEPGFEQYF

SEQ ID NO: 618533 - protein, 15 aa, Homo sapiens
  CDR3 for alpha chain variable domain of TCR clone 309267 (TRAV3, TRAJ22)
CAVRDRGGSERQLTF

SEQ ID NO: 618534 - protein, 13 aa, Homo sapiens
  CDR3 for beta chain variable domain of TCR clone 309267 (TRBV7-3, TRBJ2-1)
CASSPVAYNEQFF

SEQ ID NO: 618535 - protein, 16 aa, Homo sapiens
  CDR3 for alpha chain variable domain of TCR clone 309268 (TRAV3, TRAJ10)
CAVRDMRAGGGNKLTF

SEQ ID NO: 618536 - protein, 14 aa, Homo sapiens
  CDR3 for beta chain variable domain of TCR clone 309268 (TRBV7-8, TRBJ2-7)
CASSQTQGADEQYF

SEQ ID NO: 618537 - protein, 12 aa, Homo sapiens
  CDR3 for alpha chain variable domain of TCR clone 309269 (TRAV13-1, TRAJ20)
CAASMGDYKLSF

SEQ ID NO: 618538 - protein, 13 aa, Homo sapiens
  CDR3 for beta chain variable domain of TCR clone 309269 (TRBV10-3, TRBJ2-7)
CASKLAVNYEQYF

SEQ ID NO: 618539 - protein, 14 aa, Homo sapiens
  CDR3 for alpha chain variable domain of TCR clone 309270 (TRAV12-3, TRAJ9)
CAMSVETGGFKTIF

SEQ ID NO: 618540 - protein, 18 aa, Homo sapiens
  CDR3 for beta chain variable domain of TCR clone 309270 (TRBV11-2, TRBJ2-3)
CASSLGGASRGAPNTQYF

SEQ ID NO: 618541 - protein, 17 aa, Homo sapiens
  CDR3 for alpha chain variable domain of TCR clone 309271 (TRAV4, TRAJ13)
SLVGVQGSSGGYKKVTF

SEQ ID NO: 618542 - protein, 18 aa, Homo sapiens
  CDR3 for beta chain variable domain of TCR clone 309271 (TRBV15, TRBJ2-3)
CATSRDGARSWDTDTQYF

SEQ ID NO: 618543 - protein, 14 aa, Homo sapiens
  CDR3 for alpha chain variable domain of TCR clone 309272 (TRAV13-1, TRAJ20)
CAARSGSNDYKLSF

SEQ ID NO: 618544 - protein, 13 aa, Homo sapiens
  CDR3 for beta chain variable domain of TCR clone 309272 (TRBV20-1, TRBJ1-1)
CSAPPGGHTEAFF

SEQ ID NO: 618545 - protein, 13 aa, Homo sapiens
  CDR3 for alpha chain variable domain of TCR clone 309273 (TRAV12-2, TRAJ47)
CAVFMEDGNKLVC

SEQ ID NO: 618546 - protein, 13 aa, Homo sapiens
  CDR3 for beta chain variable domain of TCR clone 309273 (TRBV6-5, TRBJ2-5)
CASSPQGGETQYF

SEQ ID NO: 618547 - protein, 12 aa, Homo sapiens
  CDR3 for alpha chain variable domain of TCR clone 309274 (TRAV13-1, TRAJ49)
CAAPNTGNQFYF

SEQ ID NO: 618548 - protein, 16 aa, Homo sapiens
  CDR3 for beta chain variable domain of TCR clone 309274 (TRBV12-4, TRBJ1-5)
CASSRPVGGSNQPQHF

SEQ ID NO: 618549 - protein, 15 aa, Homo sapiens
  CDR3 for alpha chain variable domain of TCR clone 309275 (TRAV13-1, TRAJ32)
CAASNGWGCYKQAHL

SEQ ID NO: 618550 - protein, 17 aa, Homo sapiens
  CDR3 for beta chain variable domain of TCR clone 309275 (TRBV15, TRBJ1-2)
CATSGREIDVVNYGYIF

SEQ ID NO: 618551 - protein, 11 aa, Homo sapiens
  CDR3 for alpha chain variable domain of TCR clone 309276 (TRAV16, TRAJ33)
CALHSNDQLIW

SEQ ID NO: 618552 - protein, 15 aa, Homo sapiens
  CDR3 for beta chain variable domain of TCR clone 309276 (TRBV4-1, TRBJ2-7)
CASSQQGQGFDEQYF

SEQ ID NO: 618553 - protein, 13 aa, Homo sapiens
  CDR3 for alpha chain variable domain of TCR clone 309277 (TRAV12-3, TRAJ13)
CAMSSGGYQKVTF

SEQ ID NO: 618554 - protein, 19 aa, Homo sapiens
  CDR3 for beta chain variable domain of TCR clone 309277 (TRBV25-1, TRBJ2-2)
CAILVYRVDRGRKTGELFF

SEQ ID NO: 618555 - protein, 13 aa, Homo sapiens
  CDR3 for alpha chain variable domain of TCR clone 309278 (TRAV21, TRAJ27)
CAVRPGNAGKSTF

SEQ ID NO: 618556 - protein, 13 aa, Homo sapiens
  CDR3 for beta chain variable domain of TCR clone 309278 (TRBV7-3, TRBJ2-7)
CASSQAGGYEQYF

SEQ ID NO: 618557 - protein, 14 aa, Homo sapiens
  CDR3 for alpha chain variable domain of TCR clone 309279 (TRAV1-1, TRAJ27)
CAVIYTPMQANQPL

SEQ ID NO: 618558 - protein, 14 aa, Homo sapiens
  CDR3 for beta chain variable domain of TCR clone 309279 (TRBV25-1, TRBJ1-1)
CASTHLGGNTEAFF

SEQ ID NO: 618559 - protein, 14 aa, Homo sapiens
  CDR3 for alpha chain variable domain of TCR clone 309280 (TRAV38-1, TRAJ45)
CAYYSGGGAYGLTF

SEQ ID NO: 618560 - protein, 20 aa, Homo sapiens
  CDR3 for beta chain variable domain of TCR clone 309280 (TRBV28, TRBJ2-1)
CASTPLGRSPGLAGGNEQFF

SEQ ID NO: 618561 - protein, 13 aa, Homo sapiens
  CDR3 for alpha chain variable domain of TCR clone 309281 (TRAV8-3, TRAJ21)
CAVGAYNFNKFYF

SEQ ID NO: 618562 - protein, 17 aa, Homo sapiens
  CDR3 for beta chain variable domain of TCR clone 309281 (TRBV11-2, TRBJ2-1)
CASSLYPPGVEYNEQFF

SEQ ID NO: 618563 - protein, 13 aa, Homo sapiens
  CDR3 for alpha chain variable domain of TCR clone 309282 (TRAV17, TRAJ13)
CATDSGGYQKVTF

SEQ ID NO: 618564 - protein, 15 aa, Homo sapiens
  CDR3 for beta chain variable domain of TCR clone 309282 (TRBV7-6, TRBJ2-1)
CASSSLAGEGNEQFF

SEQ ID NO: 618565 - protein, 13 aa, Homo sapiens
  CDR3 for alpha chain variable domain of TCR clone 309283 (TRAV24, TRAJ42)
CPELWRKQGNLIF

SEQ ID NO: 618566 - protein, 15 aa, Homo sapiens
  CDR3 for beta chain variable domain of TCR clone 309283 (TRBV19, TRBJ1-5)
CASSIPGGAGQPQHF

SEQ ID NO: 618567 - protein, 14 aa, Homo sapiens
  CDR3 for alpha chain variable domain of TCR clone 309284 (TRAV14/DV4, TRAJ42)
CPRGSLRSQGNPIF

SEQ ID NO: 618568 - protein, 17 aa, Homo sapiens
  CDR3 for beta chain variable domain of TCR clone 309284 (TRBV20-1, TRBJ2-2)
CSASGSGQGGLTGELFF

SEQ ID NO: 618569 - protein, 13 aa, Homo sapiens
  CDR3 for alpha chain variable domain of TCR clone 309285 (TRAV21, TRAJ27)
CAARPGNAGKSTF

SEQ ID NO: 618570 - protein, 13 aa, Homo sapiens
  CDR3 for beta chain variable domain of TCR clone 309285 (TRBV7-6, TRBJ2-5)
CASLPSGRETQYF

SEQ ID NO: 618571 - protein, 15 aa, Homo sapiens
  CDR3 for alpha chain variable domain of TCR clone 309286 (TRAV17, TRAJ57)
CATGPSQGGSEKLVF

SEQ ID NO: 618572 - protein, 15 aa, Homo sapiens
  CDR3 for beta chain variable domain of TCR clone 309286 (TRBV2, TRBJ2-1)
CASSELAGSYNEQFF

SEQ ID NO: 618573 - protein, 14 aa, Homo sapiens
  CDR3 for alpha chain variable domain of TCR clone 309287 (TRAV21, TRAJ38)
CAVMGAGTNRKLIW

SEQ ID NO: 618574 - protein, 13 aa, Homo sapiens
  CDR3 for beta chain variable domain of TCR clone 309287 (TRBV7-3, TRBJ2-5)
CASSIGFFETQYF

SEQ ID NO: 618575 - protein, 14 aa, Homo sapiens
  CDR3 for alpha chain variable domain of TCR clone 309288 (TRAV1-2, TRAJ16)
CAVNRFSDGQKLLF

SEQ ID NO: 618576 - protein, 17 aa, Homo sapiens
  CDR3 for beta chain variable domain of TCR clone 309288 (TRBV13, TRBJ2-7)
CASSLKPGASGTYEQYF

SEQ ID NO: 618577 - protein, 15 aa, Homo sapiens
  CDR3 for alpha chain variable domain of TCR clone 309289 (TRAV8-3, TRAJ27)
CAVGPSKTNACKSTF

SEQ ID NO: 618578 - protein, 16 aa, Homo sapiens
  CDR3 for beta chain variable domain of TCR clone 309289 (TRBV7-3, TRBJ2-1)
CASSLEGYRSYNEQFF

SEQ ID NO: 618579 - protein, 16 aa, Homo sapiens
  CDR3 for alpha chain variable domain of TCR clone 309290 (TRAV3, TRAJ27)
CAVRDPQGTNAGKSTF

SEQ ID NO: 618580 - protein, 17 aa, Homo sapiens
  CDR3 for beta chain variable domain of TCR clone 309290 (TRBV4-1, TRBJ2-7)
CASGQGRGLQTSYEQYF

SEQ ID NO: 618581 - protein, 14 aa, Homo sapiens
  CDR3 for alpha chain variable domain of TCR clone 309291 (TRAV17, TRAJ31)
CATVLRNNNARLMF

SEQ ID NO: 618582 - protein, 14 aa, Homo sapiens
  CDR3 for beta chain variable domain of TCR clone 309291 (TRBV12-4, TRBJ2-5)
CASSLCQKQETQYF

SEQ ID NO: 618583 - protein, 14 aa, Homo sapiens
  CDR3 for alpha chain variable domain of TCR clone 309292 (TRAV13-2, TRAJ32)
CAESLGGATNKLIF

SEQ ID NO: 618584 - protein, 12 aa, Homo sapiens
  CDR3 for beta chain variable domain of TCR clone 309292 (TRBV11-2, TRBJ2-2)
CASSLGGGELFF

SEQ ID NO: 618585 - protein, 13 aa, Homo sapiens
  CDR3 for alpha chain variable domain of TCR clone 309293 (TRAV1-2, TRAJ20)
CAVRDGNDYKLSF

SEQ ID NO: 618586 - protein, 19 aa, Homo sapiens
  CDR3 for beta chain variable domain of TCR clone 309293 (TRBV7-2, TRBJ2-3)
CASSLGGGERYAVLWPRHQ

SEQ ID NO: 618587 - protein, 11 aa, Homo sapiens
  CDR3 for alpha chain variable domain of TCR clone 309294 (TRAV3, TRAJ21)
CAAGNFNKFYF

SEQ ID NO: 618588 - protein, 16 aa, Homo sapiens
  CDR3 for beta chain variable domain of TCR clone 309294 (TRBV19, TRBJ2-1)
CASSKAGPSSYNGQFF

SEQ ID NO: 618589 - protein, 18 aa, Homo sapiens
  CDR3 for alpha chain variable domain of TCR clone 309295 (TRAV21, TRAJ52)
CAVRPSPAGGTSYGKLTF

SEQ ID NO: 618590 - protein, 14 aa, Homo sapiens
  CDR3 for beta chain variable domain of TCR clone 309295 (TRBV6-5, TRBJ2-1)
CASTSPGVKSEQFF

SEQ ID NO: 618591 - protein, 13 aa, Homo sapiens
  CDR3 for alpha chain variable domain of TCR clone 309296 (TRAV21, TRAJ27)
CAARPGHAGKSTF

SEQ ID NO: 618592 - protein, 14 aa, Homo sapiens
  CDR3 for beta chain variable domain of TCR clone 309296 (TRBV7-6, TRBJ2-3)
CASILGTVTDTQYF

SEQ ID NO: 618593 - protein, 18 aa, Homo sapiens
  CDR3 for alpha chain variable domain of TCR clone 309297 (TRAV1-2, TRAJ8)
CLLPLCCERGQGFQKLVF

SEQ ID NO: 618594 - protein, 11 aa, Homo sapiens
  CDR3 for beta chain variable domain of TCR clone 309297 (TRBV29-1, TRBJ1-4)
CSVSSGEKLFF

SEQ ID NO: 618595 - protein, 14 aa, Homo sapiens
  CDR3 for alpha chain variable domain of TCR clone 309298 (TRAV2, TRAJ9)
CAVEDRSGGFKTIF

SEQ ID NO: 618596 - protein, 16 aa, Homo sapiens
  CDR3 for beta chain variable domain of TCR clone 309298 (TRBV7-3, TRBJ2-1)
CASSLAGYRSYNEQFF

SEQ ID NO: 618597 - protein, 15 aa, Homo sapiens
  CDR3 for alpha chain variable domain of TCR clone 309299 (TRAV8-4, TRAJ40)
CAVSSITSGTYKYIF

SEQ ID NO: 618598 - protein, 17 aa, Homo sapiens
  CDR3 for beta chain variable domain of TCR clone 309299 (TRBV7-9, TRBJ1-5)
CASSASQGGYSNQPQHF

SEQ ID NO: 618599 - protein, 23 aa, Homo sapiens
  CDR3 for alpha chain variable domain of TCR clone 309300 (TRAV26-1, TRAJ38)
CITDNAGNNHIQNPDPAVYQLRD

SEQ ID NO: 618600 - protein, 12 aa, Homo sapiens
  CDR3 for beta chain variable domain of TCR clone 309300 (TRBV11-2, TRBJ2-2)
CASSLGGGELFF

SEQ ID NO: 618601 - protein, 12 aa, Homo sapiens
  CDR3 for alpha chain variable domain of TCR clone 309301 (TRAV13-2, TRAJ23)
CAERHRGGKLIF

SEQ ID NO: 618602 - protein, 17 aa, Homo sapiens
  CDR3 for beta chain variable domain of TCR clone 309301 (TRBV24-1, TRBJ2-4)
CATSDAEARGVRNIQYF

SEQ ID NO: 618603 - protein, 16 aa, Homo sapiens
  CDR3 for alpha chain variable domain of TCR clone 309302 (TRAV26-1, TRAJ13)
CIVSPKDSGGYQKVTF

SEQ ID NO: 618604 - protein, 15 aa, Homo sapiens
  CDR3 for beta chain variable domain of TCR clone 309302 (TRBV20-1, TRBJ2-7)
CSARGLWTGVGEQYF

SEQ ID NO: 618605 - protein, 14 aa, Homo sapiens
  CDR3 for alpha chain variable domain of TCR clone 309303 (TRAV10, TRAJ32)
CGEPRGGATNKLIF

SEQ ID NO: 618606 - protein, 14 aa, Homo sapiens
  CDR3 for beta chain variable domain of TCR clone 309303 (TRBV5-4, TRBJ2-2)
CASRLVGGTGELFF

SEQ ID NO: 618607 - protein, 13 aa, Homo sapiens
  CDR3 for alpha chain variable domain of TCR clone 309304 (TRAV8-3, TRAJ28)
CAVGAVGSYQLTF

SEQ ID NO: 618608 - protein, 19 aa, Homo sapiens
  CDR3 for beta chain variable domain of TCR clone 309304 (TRBV11-3, TRBJ2-1)
CASSLGTRKARSPYNEQFF

SEQ ID NO: 618609 - protein, 15 aa, Homo sapiens
  CDR3 for alpha chain variable domain of TCR clone 309305 (TRAV29/DV5, TRAJ8)
CAASGRNTGFQKLVL

SEQ ID NO: 618610 - protein, 15 aa, Homo sapiens
  CDR3 for beta chain variable domain of TCR clone 309305 (TRBV5-1, TRBJ2-1)
CASTGSGRTYNEQFF

SEQ ID NO: 618611 - protein, 21 aa, Homo sapiens
  CDR3 for alpha chain variable domain of TCR clone 309306 (TRAV13-1, TRAJ37)
CAATPKEIKHRHTNLWARDNF

SEQ ID NO: 618612 - protein, 13 aa, Homo sapiens
  CDR3 for beta chain variable domain of TCR clone 309306 (TRBV20-1, TRBJ2-7)
CSATSEDSYEQYF

SEQ ID NO: 618613 - protein, 14 aa, Homo sapiens
  CDR3 for alpha chain variable domain of TCR clone 309307 (TRAV35, TRAJ22)
CAGLRPGSAKQLTF

SEQ ID NO: 618614 - protein, 13 aa, Homo sapiens
  CDR3 for beta chain variable domain of TCR clone 309307 (TRBV20-1, TRBJ2-7)
CSATHTSEYEQYF

SEQ ID NO: 618615 - protein, 13 aa, Homo sapiens
  CDR3 for alpha chain variable domain of TCR clone 309308 (TRAV38-1, TRAJ42)
CARWGVSQGNLIF

SEQ ID NO: 618616 - protein, 17 aa, Homo sapiens
  CDR3 for beta chain variable domain of TCR clone 309308 (TRBV20-1, TRBJ2-1)
CSARDPLAGVWDDEQFF

SEQ ID NO: 618617 - protein, 14 aa, Homo sapiens
  CDR3 for alpha chain variable domain of TCR clone 309309 (TRAV13-1, TRAJ20)
CAARPGSNDYKLSF

SEQ ID NO: 618618 - protein, 13 aa, Homo sapiens
  CDR3 for beta chain variable domain of TCR clone 309309 (TRBV20-1, TRBJ1-1)
CSAPPGGHAEAFF

SEQ ID NO: 618619 - protein, 13 aa, Homo sapiens
  CDR3 for alpha chain variable domain of TCR clone 309310 (TRAV27, TRAJ40)
YAGPPSGTYKYIF

SEQ ID NO: 618620 - protein, 14 aa, Homo sapiens
  CDR3 for beta chain variable domain of TCR clone 309310 (TRBV23-1, TRBJ2-5)
CASSFLRSQETQYF

SEQ ID NO: 618621 - protein, 16 aa, Homo sapiens
  CDR3 for alpha chain variable domain of TCR clone 309311 (TRAV13-2, TRAJ32)
CAENMNYGGATNKLIF

SEQ ID NO: 618622 - protein, 14 aa, Homo sapiens
  CDR3 for beta chain variable domain of TCR clone 309311 (TRBV15, TRBJ2-5)
CATSSTGYQEAPYF

SEQ ID NO: 618623 - protein, 13 aa, Homo sapiens
  CDR3 for alpha chain variable domain of TCR clone 309312 (TRAV27, TRAJ6)
CAGGTRGSYIPTF

SEQ ID NO: 618624 - protein, 13 aa, Homo sapiens
  CDR3 for beta chain variable domain of TCR clone 309312 (TRBV4-1, TRBJ2-2)
CASSQENTVELFF

SEQ ID NO: 618625 - protein, 17 aa, Homo sapiens
  CDR3 for alpha chain variable domain of TCR clone 309313 (TRAV13-1, TRAJ28)
CAASPPYSVAGSYQLTF

SEQ ID NO: 618626 - protein, 19 aa, Homo sapiens
  CDR3 for beta chain variable domain of TCR clone 309313 (TRBV25-1, TRBJ2-2)
CAILVYRVDRGRKTGELFF

SEQ ID NO: 618627 - protein, 13 aa, Homo sapiens
  CDR3 for alpha chain variable domain of TCR clone 309314 (TRAV3, TRAJ15)
CAVRDQAGTALIF

SEQ ID NO: 618628 - protein, 15 aa, Homo sapiens
  CDR3 for beta chain variable domain of TCR clone 309314 (TRBV11-1, TRBJ2-7)
CASSLNYGASYEQYC

SEQ ID NO: 618629 - protein, 15 aa, Homo sapiens
  CDR3 for alpha chain variable domain of TCR clone 309315 (TRAV26-1, TRAJ15)
CIVRAANQAETALIF

SEQ ID NO: 618630 - protein, 15 aa, Homo sapiens
  CDR3 for beta chain variable domain of TCR clone 309315 (TRBV20-1, TRBJ1-1)
CSARSAATSNTEAFF

SEQ ID NO: 618631 - protein, 17 aa, Homo sapiens
  CDR3 for alpha chain variable domain of TCR clone 309316 (TRAV12-3, TRAJ6)
CAMSARGGAGGSYIPTF

SEQ ID NO: 618632 - protein, 13 aa, Homo sapiens
  CDR3 for beta chain variable domain of TCR clone 309316 (TRBV13, TRBJ2-5)
CASSPEVGETQYF

SEQ ID NO: 618633 - protein, 15 aa, Homo sapiens
  CDR3 for alpha chain variable domain of TCR clone 309317 (TRAV12-1, TRAJ9)
CVVSFGDTGGFKTIF

SEQ ID NO: 618634 - protein, 13 aa, Homo sapiens
  CDR3 for beta chain variable domain of TCR clone 309317 (TRBV14, TRBJ1-2)
CASSEDRRYGYTF

SEQ ID NO: 618635 - protein, 14 aa, Homo sapiens
  CDR3 for alpha chain variable domain of TCR clone 309318 (TRAV13-1, TRAJ20)
CAARPGSNDYKLSF

SEQ ID NO: 618636 - protein, 13 aa, Homo sapiens
  CDR3 for beta chain variable domain of TCR clone 309318 (TRBV20-1, TRBJ1-1)
CNAPPGGHTEAFF

SEQ ID NO: 618637 - protein, 13 aa, Homo sapiens
  CDR3 for alpha chain variable domain of TCR clone 309319 (TRAV13-1, TRAJ12)
CSKYMGSSYKLIF

SEQ ID NO: 618638 - protein, 14 aa, Homo sapiens
  CDR3 for beta chain variable domain of TCR clone 309319 (TRBV11-2, TRBJ2-7)
CASSLGAGAYEQYF

SEQ ID NO: 618639 - protein, 15 aa, Homo sapiens
  CDR3 for alpha chain variable domain of TCR clone 309320 (TRAV13-1, TRAJ5)
FAVSPIDTGRRALTF

SEQ ID NO: 618640 - protein, 18 aa, Homo sapiens
  CDR3 for beta chain variable domain of TCR clone 309320 (TRBV4-1, TRBJ2-2)
CASSFRTSGGEGPGELFF

SEQ ID NO: 618641 - protein, 15 aa, Homo sapiens
  CDR3 for alpha chain variable domain of TCR clone 309321 (TRAV2, TRAJ36)
CAVEDRGNWGKQLLL

SEQ ID NO: 618642 - protein, 14 aa, Homo sapiens
  CDR3 for beta chain variable domain of TCR clone 309321 (TRBV7-9, TRBJ2-5)
CASSLDTAQETQYF

SEQ ID NO: 618643 - protein, 14 aa, Homo sapiens
  CDR3 for alpha chain variable domain of TCR clone 309322 (TRAV34, TRAJ22)
CGADTSGSARQLTF

SEQ ID NO: 618644 - protein, 20 aa, Homo sapiens
  CDR3 for beta chain variable domain of TCR clone 309322 (TRBV7-8, TRBJ2-1)
CASSLAHRLAGVRSYNEQFF

SEQ ID NO: 618645 - protein, 14 aa, Homo sapiens
  CDR3 for alpha chain variable domain of TCR clone 309323 (TRAV8-3, TRAJ13)
CAVGAAGGYHKGTF

SEQ ID NO: 618646 - protein, 14 aa, Homo sapiens
  CDR3 for beta chain variable domain of TCR clone 309323 (TRBV7-8, TRBJ2-2)
CASSLDPNTGELFF

SEQ ID NO: 618647 - protein, 16 aa, Homo sapiens
  CDR3 for alpha chain variable domain of TCR clone 309324 (TRAV8-3, TRAJ38)
CAVGASNAGNNRKLSW

SEQ ID NO: 618648 - protein, 15 aa, Homo sapiens
  CDR3 for beta chain variable domain of TCR clone 309324 (TRBV11-3, TRBJ1-3)
CASSLFGPSGNTIYF

SEQ ID NO: 618649 - protein, 14 aa, Homo sapiens
  CDR3 for alpha chain variable domain of TCR clone 309325 (TRAV3, TRAJ26)
CAVRDYNYGQNFVF

SEQ ID NO: 618650 - protein, 15 aa, Homo sapiens
  CDR3 for beta chain variable domain of TCR clone 309325 (TRBV28, TRBJ2-1)
CASSIIAGGRSEQFF

SEQ ID NO: 618651 - protein, 13 aa, Homo sapiens
  CDR3 for alpha chain variable domain of TCR clone 309326 (TRAV13-1, TRAJ49)
CAASVLRGNQFYF

SEQ ID NO: 618652 - protein, 13 aa, Homo sapiens
  CDR3 for beta chain variable domain of TCR clone 309326 (TRBV7-6, TRBJ1-2)
CASSLVADYGYTF

SEQ ID NO: 618653 - protein, 13 aa, Homo sapiens
  CDR3 for alpha chain variable domain of TCR clone 309327 (TRAV17, TRAJ40)
CAGARGGTYKYIF

SEQ ID NO: 618654 - protein, 16 aa, Homo sapiens
  CDR3 for beta chain variable domain of TCR clone 309327 (TRBV11-2, TRBJ1-2)
CASSLDTGGADYGYTF

SEQ ID NO: 618655 - protein, 14 aa, Homo sapiens
  CDR3 for alpha chain variable domain of TCR clone 309328 (TRAV12-2, TRAJ36)
CAVNPPTGANNLFF

SEQ ID NO: 618656 - protein, 13 aa, Homo sapiens
  CDR3 for beta chain variable domain of TCR clone 309328 (TRBV19, TRBJ1-1)
CASSFGRMPEAFF

SEQ ID NO: 618657 - protein, 13 aa, Homo sapiens
  CDR3 for alpha chain variable domain of TCR clone 309329 (TRAV1-2, TRAJ27)
CAVFNTNAGKSTF

SEQ ID NO: 618658 - protein, 17 aa, Homo sapiens
  CDR3 for beta chain variable domain of TCR clone 309329 (TRBV11-2, TRBJ2-4)
CASSLGEGEGGKNMQYF

SEQ ID NO: 618659 - protein, 15 aa, Homo sapiens
  CDR3 for alpha chain variable domain of TCR clone 309330 (TRAV3, TRAJ4)
CAVRDGTGAYNKLIF

SEQ ID NO: 618660 - protein, 16 aa, Homo sapiens
  CDR3 for beta chain variable domain of TCR clone 309330 (TRBV27, TRBJ2-2)
CASSSSGVSNTGELFF

SEQ ID NO: 618661 - protein, 15 aa, Homo sapiens
  CDR3 for alpha chain variable domain of TCR clone 309331 (TRAV3, TRAJ3)
CAVRDGHSSPSKIIF

SEQ ID NO: 618662 - protein, 14 aa, Homo sapiens
  CDR3 for beta chain variable domain of TCR clone 309331 (TRBV28, TRBJ1-4)
CASSFGTFDEKLFF

SEQ ID NO: 618663 - protein, 18 aa, Homo sapiens
  CDR3 for alpha chain variable domain of TCR clone 309332 (TRAV13-1, TRAJ52)
CAAKNPNAGGTSYGKLTF

SEQ ID NO: 618664 - protein, 12 aa, Homo sapiens
  CDR3 for beta chain variable domain of TCR clone 309332 (TRBV28, TRBJ2-7)
CASTGNHYEQYF

SEQ ID NO: 618665 - protein, 13 aa, Homo sapiens
  CDR3 for alpha chain variable domain of TCR clone 309333 (TRAV36/DV7, TRAJ57)
CAVVLGGSEKLVF

SEQ ID NO: 618666 - protein, 12 aa, Homo sapiens
  CDR3 for beta chain variable domain of TCR clone 309333 (TRBV11-2, TRBJ2-2)
CASSLPTGELFF

SEQ ID NO: 618667 - protein, 14 aa, Homo sapiens
  CDR3 for alpha chain variable domain of TCR clone 309334 (TRAV1-2, TRAJ16)
CAVNRFSDGQKLLF

SEQ ID NO: 618668 - protein, 13 aa, Homo sapiens
  CDR3 for beta chain variable domain of TCR clone 309334 (TRBV7-3, TRBJ2-1)
CASSLWPYNEQFF

SEQ ID NO: 618669 - protein, 18 aa, Homo sapiens
  CDR3 for alpha chain variable domain of TCR clone 309335 (TRAV13-1, TRAJ52)
CAASKRSAGGTSYGKLTF

SEQ ID NO: 618670 - protein, 14 aa, Homo sapiens
  CDR3 for beta chain variable domain of TCR clone 309335 (TRBV15, TRBJ1-5)
CATSKAGDNQPQHF

SEQ ID NO: 618671 - protein, 18 aa, Homo sapiens
  CDR3 for alpha chain variable domain of TCR clone 309336 (TRAV26-1, TRAJ23)
CIVRVGLEVWNQGGTLIF

SEQ ID NO: 618672 - protein, 14 aa, Homo sapiens
  CDR3 for beta chain variable domain of TCR clone 309336 (TRBV7-6, TRBJ2-3)
CASSLGTVTDTQYF

SEQ ID NO: 618673 - protein, 14 aa, Homo sapiens
  CDR3 for alpha chain variable domain of TCR clone 309337 (TRAV12-2, TRAJ13)
CAVKKTGGYLKVTF

SEQ ID NO: 618674 - protein, 15 aa, Homo sapiens
  CDR3 for beta chain variable domain of TCR clone 309337 (TRBV28, TRBJ2-5)
CASSPPWSYQETQYF

SEQ ID NO: 618675 - protein, 13 aa, Homo sapiens
  CDR3 for alpha chain variable domain of TCR clone 309338 (TRAV8-2, TRAJ43)
CVGSDQGDNDMRF

SEQ ID NO: 618676 - protein, 12 aa, Homo sapiens
  CDR3 for beta chain variable domain of TCR clone 309338 (TRBV7-9, TRBJ2-7)
CASRTGFDEQYF

SEQ ID NO: 618677 - protein, 13 aa, Homo sapiens
  CDR3 for alpha chain variable domain of TCR clone 309339 (TRAV17, TRAJ5)
CALRGTGRRALTF

SEQ ID NO: 618678 - protein, 14 aa, Homo sapiens
  CDR3 for beta chain variable domain of TCR clone 309339 (TRBV4-1, TRBJ2-3)
CASSQDWSTDTQYF

SEQ ID NO: 618679 - protein, 13 aa, Homo sapiens
  CDR3 for alpha chain variable domain of TCR clone 309340 (TRAV1-2, TRAJ9)
RAALNTGGFKTIF

SEQ ID NO: 618680 - protein, 12 aa, Homo sapiens
  CDR3 for beta chain variable domain of TCR clone 309340 (TRBV11-2, TRBJ2-2)
CASSLGGGELFF

SEQ ID NO: 618681 - protein, 14 aa, Homo sapiens
  CDR3 for alpha chain variable domain of TCR clone 309341 (TRAV16, TRAJ33)
CALSAMDSNYQLIW

SEQ ID NO: 618682 - protein, 14 aa, Homo sapiens
  CDR3 for beta chain variable domain of TCR clone 309341 (TRBV18, TRBJ2-7)
CASSPRGGAYEQYF

SEQ ID NO: 618683 - protein, 16 aa, Homo sapiens
  CDR3 for alpha chain variable domain of TCR clone 309342 (TRAV26-1, TRAJ32)
CIVRTNYGGATNKLIF

SEQ ID NO: 618684 - protein, 15 aa, Homo sapiens
  CDR3 for beta chain variable domain of TCR clone 309342 (TRBV27, TRBJ2-1)
CASSNGGGSSNEQFF

SEQ ID NO: 618685 - protein, 10 aa, Homo sapiens
  CDR3 for alpha chain variable domain of TCR clone 309343 (TRAV30, TRAJ32)
CGTEKDMVVL

SEQ ID NO: 618686 - protein, 13 aa, Homo sapiens
  CDR3 for beta chain variable domain of TCR clone 309343 (TRBV10-3, TRBJ2-7)
CASTLAVTYEQYF

SEQ ID NO: 618687 - protein, 15 aa, Homo sapiens
  CDR3 for alpha chain variable domain of TCR clone 309344 (TRAV2, TRAJ39)
CAVEDRRTAGNMPTF

SEQ ID NO: 618688 - protein, 16 aa, Homo sapiens
  CDR3 for beta chain variable domain of TCR clone 309344 (TRBV7-8, TRBJ2-7)
CASSLASGTSVYEQYF

SEQ ID NO: 618689 - protein, 13 aa, Homo sapiens
  CDR3 for alpha chain variable domain of TCR clone 309345 (TRAV26-1, TRAJ48)
CIVRVVGDEQLTF

SEQ ID NO: 618690 - protein, 17 aa, Homo sapiens
  CDR3 for beta chain variable domain of TCR clone 309345 (TRBV7-3, TRBJ2-2)
CASSLSGTSGGTGELFF

SEQ ID NO: 618691 - protein, 14 aa, Homo sapiens
  CDR3 for alpha chain variable domain of TCR clone 309346 (TRAV12-1, TRAJ17)
CVGNYKAAGNKLTF

SEQ ID NO: 618692 - protein, 15 aa, Homo sapiens
  CDR3 for beta chain variable domain of TCR clone 309346 (TRBV7-6, TRBJ2-3)
CASSYLAGEADTQYF

SEQ ID NO: 618693 - protein, 16 aa, Homo sapiens
  CDR3 for alpha chain variable domain of TCR clone 309347 (TRAV13-1, TRAJ52)
CAAIMRGGTSYGKLTF

SEQ ID NO: 618694 - protein, 15 aa, Homo sapiens
  CDR3 for beta chain variable domain of TCR clone 309347 (TRBV3-1, TRBJ2-7)
CASSQVAGAKYEQYF

SEQ ID NO: 618695 - protein, 10 aa, Homo sapiens
  CDR3 for alpha chain variable domain of TCR clone 309348 (TRAV26-1, TRAJ40)
CIAGTYKYIF

SEQ ID NO: 618696 - protein, 14 aa, Homo sapiens
  CDR3 for beta chain variable domain of TCR clone 309348 (TRBV7-3, TRBJ1-1)
CASSLKGGNTEAFF

SEQ ID NO: 618697 - protein, 16 aa, Homo sapiens
  CDR3 for alpha chain variable domain of TCR clone 309349 (TRAV16, TRAJ52)
CALRAAGGTRYGKLTF

SEQ ID NO: 618698 - protein, 16 aa, Homo sapiens
  CDR3 for beta chain variable domain of TCR clone 309349 (TRBV12-4, TRBJ1-5)
CASSRPVGGSNQPQHF

SEQ ID NO: 618699 - protein, 15 aa, Homo sapiens
  CDR3 for alpha chain variable domain of TCR clone 309350 (TRAV38-1, TRAJ57)
CAFMDSQGGSEKLVF

SEQ ID NO: 618700 - protein, 14 aa, Homo sapiens
  CDR3 for beta chain variable domain of TCR clone 309350 (TRBV19, TRBJ2-1)
CASPTFVLSGEQFF

SEQ ID NO: 618701 - protein, 13 aa, Homo sapiens
  CDR3 for alpha chain variable domain of TCR clone 309351 (TRAV2, TRAJ24)
CAVTSDSWGRLQF

SEQ ID NO: 618702 - protein, 14 aa, Homo sapiens
  CDR3 for beta chain variable domain of TCR clone 309351 (TRBV13, TRBJ2-5)
CASSLGRGQETQYF

SEQ ID NO: 618703 - protein, 14 aa, Homo sapiens
  CDR3 for alpha chain variable domain of TCR clone 309352 (TRAV8-3, TRAJ18)
CAVFQRLNPGEAIL

SEQ ID NO: 618704 - protein, 13 aa, Homo sapiens
  CDR3 for beta chain variable domain of TCR clone 309352 (TRBV10-3, TRBJ2-7)
CASKLAVNYEQYF

SEQ ID NO: 618705 - protein, 12 aa, Homo sapiens
  CDR3 for alpha chain variable domain of TCR clone 309353 (TRAV3, TRAJ20)
CAVRDPDYKLSF

SEQ ID NO: 618706 - protein, 13 aa, Homo sapiens
  CDR3 for beta chain variable domain of TCR clone 309353 (TRBV10-3, TRBJ1-2)
CAISERDSYGYTF

SEQ ID NO: 618707 - protein, 12 aa, Homo sapiens
  CDR3 for alpha chain variable domain of TCR clone 309354 (TRAV27, TRAJ22)
CAGDGAGVEIWF

SEQ ID NO: 618708 - protein, 17 aa, Homo sapiens
  CDR3 for beta chain variable domain of TCR clone 309354 (TRBV5-5, TRBJ1-1)
CASSLPFRGLMNTEAFF

SEQ ID NO: 618709 - protein, 12 aa, Homo sapiens
  CDR3 for alpha chain variable domain of TCR clone 309355 (TRAV30, TRAJ15)
CGTNQAGTALIC

SEQ ID NO: 618710 - protein, 13 aa, Homo sapiens
  CDR3 for beta chain variable domain of TCR clone 309355 (TRBV24-1, TRBJ2-7)
CATSDLGPYEQYF

SEQ ID NO: 618711 - protein, 16 aa, Homo sapiens
  CDR3 for alpha chain variable domain of TCR clone 309356 (TRAV30, TRAJ24)
CGTEMVDADSWEKFQF

SEQ ID NO: 618712 - protein, 14 aa, Homo sapiens
  CDR3 for beta chain variable domain of TCR clone 309356 (TRBV12-5, TRBJ2-5)
CASGSRTHQETQYF

SEQ ID NO: 618713 - protein, 14 aa, Homo sapiens
  CDR3 for alpha chain variable domain of TCR clone 309357 (TRAV29/DV5, TRAJ11)
CAAISNSGYSTLTF

SEQ ID NO: 618714 - protein, 15 aa, Homo sapiens
  CDR3 for beta chain variable domain of TCR clone 309357 (TRBV28, TRBJ2-1)
CASSLSGQGCDEQFF

SEQ ID NO: 618715 - protein, 14 aa, Homo sapiens
  CDR3 for alpha chain variable domain of TCR clone 309358 (TRAV4, TRAJ17)
CLVGDMAAGNKLTF

SEQ ID NO: 618716 - protein, 11 aa, Homo sapiens
  CDR3 for beta chain variable domain of TCR clone 309358 (TRBV11-2, TRBJ2-2)
CASSLPGELFF

SEQ ID NO: 618717 - protein, 14 aa, Homo sapiens
  CDR3 for alpha chain variable domain of TCR clone 309359 (TRAV8-2, TRAJ4)
CVVSPSGGYNKLIF

SEQ ID NO: 618718 - protein, 12 aa, Homo sapiens
  CDR3 for beta chain variable domain of TCR clone 309359 (TRBV5-1, TRBJ2-7)
CASSLDSYEQYF

SEQ ID NO: 618719 - protein, 16 aa, Homo sapiens
  CDR3 for alpha chain variable domain of TCR clone 309360 (TRAV27, TRAJ52)
CAGAPAGGTSYGKLTF

SEQ ID NO: 618720 - protein, 12 aa, Homo sapiens
  CDR3 for beta chain variable domain of TCR clone 309360 (TRBV27, TRBJ2-1)
CDSRGFYNEQFF

SEQ ID NO: 618721 - protein, 12 aa, Homo sapiens
  CDR3 for alpha chain variable domain of TCR clone 309361 (TRAV26-1, TRAJ31)
CIVRNNNARLMF

SEQ ID NO: 618722 - protein, 16 aa, Homo sapiens
  CDR3 for beta chain variable domain of TCR clone 309361 (TRBV7-3, TRBJ2-1)
CASGLEGYRSYNEQFF

SEQ ID NO: 618723 - protein, 14 aa, Homo sapiens
  CDR3 for alpha chain variable domain of TCR clone 309362 (TRAV26-1, TRAJ34)
CIVRVAYNNAKLIF

SEQ ID NO: 618724 - protein, 15 aa, Homo sapiens
  CDR3 for beta chain variable domain of TCR clone 309362 (TRBV20-1, TRBJ2-7)
CSARVPAAYFYEQYF

SEQ ID NO: 618725 - protein, 15 aa, Homo sapiens
  CDR3 for alpha chain variable domain of TCR clone 309363 (TRAV25, TRAJ52)
CAGRPGGTSYGKLTF

SEQ ID NO: 618726 - protein, 17 aa, Homo sapiens
  CDR3 for beta chain variable domain of TCR clone 309363 (TRBV7-8, TRBJ2-6)
CASSAGTGGAGANLLTF

SEQ ID NO: 618727 - protein, 13 aa, Homo sapiens
  CDR3 for alpha chain variable domain of TCR clone 309364 (TRAV3, TRAJ21)
CAVREPDFNKFYF

SEQ ID NO: 618728 - protein, 14 aa, Homo sapiens
  CDR3 for beta chain variable domain of TCR clone 309364 (TRBV4-1, TRBJ2-2)
CASSQAVNTGELFL

SEQ ID NO: 618729 - protein, 15 aa, Homo sapiens
  CDR3 for alpha chain variable domain of TCR clone 309365 (TRAV4, TRAJ8)
CLVGEQHTGFQKLVF

SEQ ID NO: 618730 - protein, 15 aa, Homo sapiens
  CDR3 for beta chain variable domain of TCR clone 309365 (TRBV7-9, TRBJ2-5)
CASSNRDYLQETQYV

SEQ ID NO: 618731 - protein, 16 aa, Homo sapiens
  CDR3 for alpha chain variable domain of TCR clone 309366 (TRAV38-2/DV8, TRAJ45)
CAYRGNSGGGADGLTF

SEQ ID NO: 618732 - protein, 21 aa, Homo sapiens
  CDR3 for beta chain variable domain of TCR clone 309366 (TRBV5-1, TRBJ2-7)
CASSGQPGTDSLRALLRAGHQ

SEQ ID NO: 618733 - protein, 14 aa, Homo sapiens
  CDR3 for alpha chain variable domain of TCR clone 309367 (TRAV25, TRAJ35)
CARRMEGFGNVLHC

SEQ ID NO: 618734 - protein, 13 aa, Homo sapiens
  CDR3 for beta chain variable domain of TCR clone 309367 (TRBV7-2, TRBJ1-4)
CASSLAGLGKLFF

SEQ ID NO: 618735 - protein, 14 aa, Homo sapiens
  CDR3 for alpha chain variable domain of TCR clone 309368 (TRAV13-1, TRAJ35)
CAASKGGFGNVLHC

SEQ ID NO: 618736 - protein, 16 aa, Homo sapiens
  CDR3 for beta chain variable domain of TCR clone 309368 (TRBV2, TRBJ2-3)
CQHRGAARRWTDTQYF

SEQ ID NO: 618737 - protein, 10 aa, Homo sapiens
  CDR3 for alpha chain variable domain of TCR clone 309369 (TRAV1-2, TRAJ31)
CAFFDARLMF

SEQ ID NO: 618738 - protein, 13 aa, Homo sapiens
  CDR3 for beta chain variable domain of TCR clone 309369 (TRBV7-9, TRBJ1-2)
CASSLKQNYGYTF

SEQ ID NO: 618739 - protein, 11 aa, Homo sapiens
  CDR3 for alpha chain variable domain of TCR clone 309370 (TRAV2, TRAJ13)
CASGGYQKVTF

SEQ ID NO: 618740 - protein, 13 aa, Homo sapiens
  CDR3 for beta chain variable domain of TCR clone 309370 (TRBV12-4, TRBJ1-2)
CASSLRQGKGYAF

SEQ ID NO: 618741 - protein, 12 aa, Homo sapiens
  CDR3 for alpha chain variable domain of TCR clone 309371 (TRAV12-3, TRAJ17)
CAMTLTGNKLTF

SEQ ID NO: 618742 - protein, 13 aa, Homo sapiens
  CDR3 for beta chain variable domain of TCR clone 309371 (TRBV4-1, TRBJ1-5)
CSSSQDYNGPQHF

SEQ ID NO: 618743 - protein, 14 aa, Homo sapiens
  CDR3 for alpha chain variable domain of TCR clone 309372 (TRAV1-2, TRAJ16)
CAVNRFSDGQKLLF

SEQ ID NO: 618744 - protein, 17 aa, Homo sapiens
  CDR3 for beta chain variable domain of TCR clone 309372 (TRBV7-8, TRBJ2-6)
CASSAGAGGAGANVLTF

SEQ ID NO: 618745 - protein, 17 aa, Homo sapiens
  CDR3 for alpha chain variable domain of TCR clone 309373 (TRAV1-2, TRAJ28)
CAFGPDTLGLGVTNSLS

SEQ ID NO: 618746 - protein, 16 aa, Homo sapiens
  CDR3 for beta chain variable domain of TCR clone 309373 (TRBV27, TRBJ2-7)
CASSKQGRGWAYEQYF

SEQ ID NO: 618747 - protein, 16 aa, Homo sapiens
  CDR3 for alpha chain variable domain of TCR clone 309374 (TRAV8-3, TRAJ44)
CAVGASNTGTASKLTF

SEQ ID NO: 618748 - protein, 15 aa, Homo sapiens
  CDR3 for beta chain variable domain of TCR clone 309374 (TRBV27, TRBJ1-5)
CASSFNRGSNQPQHF

SEQ ID NO: 618749 - protein, 15 aa, Homo sapiens
  CDR3 for alpha chain variable domain of TCR clone 309375 (TRAV17, TRAJ57)
CATVPSQGGSEKLVF

SEQ ID NO: 618750 - protein, 16 aa, Homo sapiens
  CDR3 for beta chain variable domain of TCR clone 309375 (TRBV12-4, TRBJ1-5)
CASSRPVVGSNQPQHF

SEQ ID NO: 618751 - protein, 17 aa, Homo sapiens
  CDR3 for alpha chain variable domain of TCR clone 309376 (TRAV3, TRAJ6)
CAVRDGPRAGGSYIPTF

SEQ ID NO: 618752 - protein, 13 aa, Homo sapiens
  CDR3 for beta chain variable domain of TCR clone 309376 (TRBV27, TRBJ2-1)
CASMTLGVGEQFF

SEQ ID NO: 618753 - protein, 14 aa, Homo sapiens
  CDR3 for alpha chain variable domain of TCR clone 309377 (TRAV13-1, TRAJ44)
CAAKATGTASKLTF

SEQ ID NO: 618754 - protein, 17 aa, Homo sapiens
  CDR3 for beta chain variable domain of TCR clone 309377 (TRBV7-3, TRBJ2-3)
RASSLMKRMRGANTQYF

SEQ ID NO: 618755 - protein, 12 aa, Homo sapiens
  CDR3 for alpha chain variable domain of TCR clone 309378 (TRAV8-3, TRAJ26)
CAGDNYGQHFVF

SEQ ID NO: 618756 - protein, 13 aa, Homo sapiens
  CDR3 for beta chain variable domain of TCR clone 309378 (TRBV10-3, TRBJ2-7)
CASKLAVNYEQYF

SEQ ID NO: 618757 - protein, 14 aa, Homo sapiens
  CDR3 for alpha chain variable domain of TCR clone 309379 (TRAV1-2, TRAJ16)
CAVNRFSDGQKLLF

SEQ ID NO: 618758 - protein, 13 aa, Homo sapiens
  CDR3 for beta chain variable domain of TCR clone 309379 (TRBV2, TRBJ1-1)
CASSVSGYTEAFF

SEQ ID NO: 618759 - protein, 13 aa, Homo sapiens
  CDR3 for alpha chain variable domain of TCR clone 309380 (TRAV21, TRAJ44)
CAAHTGTPSKLTF

SEQ ID NO: 618760 - protein, 18 aa, Homo sapiens
  CDR3 for beta chain variable domain of TCR clone 309380 (TRBV25-1, TRBJ1-2)
CASSGLQNGQGLIFGYSF

SEQ ID NO: 618761 - protein, 11 aa, Homo sapiens
  CDR3 for alpha chain variable domain of TCR clone 309381 (TRAV29/DV5, TRAJ43)
CAARKNNYMRF

SEQ ID NO: 618762 - protein, 15 aa, Homo sapiens
  CDR3 for beta chain variable domain of TCR clone 309381 (TRBV5-1, TRBJ1-2)
CASSLGQVSGRGYTF

SEQ ID NO: 618763 - protein, 15 aa, Homo sapiens
  CDR3 for alpha chain variable domain of TCR clone 309382 (TRAV21, TRAJ40)
CAVRPQTSGTYKYIF

SEQ ID NO: 618764 - protein, 12 aa, Homo sapiens
  CDR3 for beta chain variable domain of TCR clone 309382 (TRBV2, TRBJ1-1)
CATPSRGTEAFF

SEQ ID NO: 618765 - protein, 14 aa, Homo sapiens
  CDR3 for alpha chain variable domain of TCR clone 309383 (TRAV1-2, TRAJ8)
CAVREDTGFQKLVF

SEQ ID NO: 618766 - protein, 16 aa, Homo sapiens
  CDR3 for beta chain variable domain of TCR clone 309383 (TRBV20-1, TRBJ2-1)
CSARDLTQGMNNEQFF

SEQ ID NO: 618767 - protein, 16 aa, Homo sapiens
  CDR3 for alpha chain variable domain of TCR clone 309384 (TRAV16, TRAJ52)
CALRGVGGTRYGKLTF

SEQ ID NO: 618768 - protein, 14 aa, Homo sapiens
  CDR3 for beta chain variable domain of TCR clone 309384 (TRBV19, TRBJ1-2)
CASSLQGQAYGYTF

SEQ ID NO: 618769 - protein, 11 aa, Homo sapiens
  CDR3 for alpha chain variable domain of TCR clone 309385 (TRAV3, TRAJ17)
PRGAAGNKLTF

SEQ ID NO: 618770 - protein, 17 aa, Homo sapiens
  CDR3 for beta chain variable domain of TCR clone 309385 (TRBV13, TRBJ2-3)
CASSLSRVAGGRNTQYF

SEQ ID NO: 618771 - protein, 14 aa, Homo sapiens
  CDR3 for alpha chain variable domain of TCR clone 309386 (TRAV38-1, TRAJ45)
CAYYSRGSADGLTF

SEQ ID NO: 618772 - protein, 20 aa, Homo sapiens
  CDR3 for beta chain variable domain of TCR clone 309386 (TRBV28, TRBJ2-1)
CASTPIGRSPGLAGGNEQFF

SEQ ID NO: 618773 - protein, 16 aa, Homo sapiens
  CDR3 for alpha chain variable domain of TCR clone 309387 (TRAV26-1, TRAJ37)
CIVRGDGSGNTGKLIF

SEQ ID NO: 618774 - protein, 17 aa, Homo sapiens
  CDR3 for beta chain variable domain of TCR clone 309387 (TRBV4-1, TRBJ2-7)
CASSRDPLGVRGVEQYF

SEQ ID NO: 618775 - protein, 21 aa, Homo sapiens
  CDR3 for alpha chain variable domain of TCR clone 309388 (TRAV25, TRAJ53)
TATQTTDVGTGSGGSNYKLTF

SEQ ID NO: 618776 - protein, 19 aa, Homo sapiens
  CDR3 for beta chain variable domain of TCR clone 309388 (TRBV28, TRBJ2-4)
CASSFQPGWPAHSKNIQYF

SEQ ID NO: 618777 - protein, 13 aa, Homo sapiens
  CDR3 for alpha chain variable domain of TCR clone 309389 (TRAV17, TRAJ26)
CATVDNYGQNFVF

SEQ ID NO: 618778 - protein, 15 aa, Homo sapiens
  CDR3 for beta chain variable domain of TCR clone 309389 (TRBV7-2, TRBJ1-5)
CASSPGTGADQPQHF

SEQ ID NO: 618779 - protein, 17 aa, Homo sapiens
  CDR3 for alpha chain variable domain of TCR clone 309390 (TRAV13-1, TRAJ31)
CAPRDRLMFGDGTQLVV

SEQ ID NO: 618780 - protein, 12 aa, Homo sapiens
  CDR3 for beta chain variable domain of TCR clone 309390 (TRBV7-9, TRBJ2-7)
CAWSVEGYEQYF

SEQ ID NO: 618781 - protein, 13 aa, Homo sapiens
  CDR3 for alpha chain variable domain of TCR clone 309391 (TRAV2, TRAJ40)
CAVVTSGTYKYIF

SEQ ID NO: 618782 - protein, 15 aa, Homo sapiens
  CDR3 for beta chain variable domain of TCR clone 309391 (TRBV11-2, TRBJ1-6)
CASSLDPWAVSPLHF

SEQ ID NO: 618783 - protein, 11 aa, Homo sapiens
  CDR3 for alpha chain variable domain of TCR clone 309392 (TRAV13-1, TRAJ20)
CAASNDYKLSF

SEQ ID NO: 618784 - protein, 13 aa, Homo sapiens
  CDR3 for beta chain variable domain of TCR clone 309392 (TRBV7-3, TRBJ1-1)
CASSQDWGAEAFF

SEQ ID NO: 618785 - protein, 13 aa, Homo sapiens
  CDR3 for alpha chain variable domain of TCR clone 309393 (TRAV12-2, TRAJ39)
CAVTNNAGNMLTF

SEQ ID NO: 618786 - protein, 13 aa, Homo sapiens
  CDR3 for beta chain variable domain of TCR clone 309393 (TRBV2, TRBJ1-5)
CATAGPGNRPQHF

SEQ ID NO: 618787 - protein, 15 aa, Homo sapiens
  CDR3 for alpha chain variable domain of TCR clone 309394 (TRAV1-2, TRAJ35)
CAVRDPGALGMCCIA

SEQ ID NO: 618788 - protein, 14 aa, Homo sapiens
  CDR3 for beta chain variable domain of TCR clone 309394 (TRBV5-1, TRBJ2-1)
CASSLDDRFDEQFS

SEQ ID NO: 618789 - protein, 14 aa, Homo sapiens
  CDR3 for alpha chain variable domain of TCR clone 309395 (TRAV8-4, TRAJ13)
CAVTFPGGYQKVTF

SEQ ID NO: 618790 - protein, 14 aa, Homo sapiens
  CDR3 for beta chain variable domain of TCR clone 309395 (TRBV7-2, TRBJ1-2)
CASSQTGSTYGYTF

SEQ ID NO: 618791 - protein, 14 aa, Homo sapiens
  CDR3 for alpha chain variable domain of TCR clone 309396 (TRAV12-2, TRAJ45)
CAVYSGGGADGLTF

SEQ ID NO: 618792 - protein, 16 aa, Homo sapiens
  CDR3 for beta chain variable domain of TCR clone 309396 (TRBV2, TRBJ2-1)
CASSVGGSLSYNEQFF

SEQ ID NO: 618793 - protein, 14 aa, Homo sapiens
  CDR3 for alpha chain variable domain of TCR clone 309397 (TRAV12-3, TRAJ44)
CAMTPQGTASKLTF

SEQ ID NO: 618794 - protein, 17 aa, Homo sapiens
  CDR3 for beta chain variable domain of TCR clone 309397 (TRBV7-8, TRBJ2-6)
CASSAGTGGAGANVLTF

SEQ ID NO: 618795 - protein, 10 aa, Homo sapiens
  CDR3 for alpha chain variable domain of TCR clone 309398 (TRAV8-3, TRAJ44)
GAGTASKLTF

SEQ ID NO: 618796 - protein, 12 aa, Homo sapiens
  CDR3 for beta chain variable domain of TCR clone 309398 (TRBV7-8, TRBJ2-4)
CASSLGGNIQYF

SEQ ID NO: 618797 - protein, 10 aa, Homo sapiens
  CDR3 for alpha chain variable domain of TCR clone 309399 (TRAV12-2, TRAJ43)
RAVKILSMRF

SEQ ID NO: 618798 - protein, 14 aa, Homo sapiens
  CDR3 for beta chain variable domain of TCR clone 309399 (TRBV11-2, TRBJ2-7)
CASSLGNSLYEQYF

SEQ ID NO: 618799 - protein, 13 aa, Homo sapiens
  CDR3 for alpha chain variable domain of TCR clone 309400 (TRAV23/DV6, TRAJ24)
CSGSACSWGKLQF

SEQ ID NO: 618800 - protein, 16 aa, Homo sapiens
  CDR3 for beta chain variable domain of TCR clone 309400 (TRBV28, TRBJ2-7)
CASSPWVATGDLSQYF

SEQ ID NO: 618801 - protein, 16 aa, Homo sapiens
  CDR3 for alpha chain variable domain of TCR clone 309401 (TRAV4, TRAJ22)
CLVGDLYSGSARQLTF

SEQ ID NO: 618802 - protein, 18 aa, Homo sapiens
  CDR3 for beta chain variable domain of TCR clone 309401 (TRBV7-9, TRBJ2-7)
CASSLTTSGSRTWYEQYF

SEQ ID NO: 618803 - protein, 13 aa, Homo sapiens
  CDR3 for alpha chain variable domain of TCR clone 309402 (TRAV13-1, TRAJ21)
CAARIYNFNKFYF

SEQ ID NO: 618804 - protein, 20 aa, Homo sapiens
  CDR3 for beta chain variable domain of TCR clone 309402 (TRBV7-8, TRBJ2-2)
CASSHLFPGPTIHITGELFF

SEQ ID NO: 618805 - protein, 14 aa, Homo sapiens
  CDR3 for alpha chain variable domain of TCR clone 309403 (TRAV9-2, TRAJ27)
CALYIYNAGNMLTF

SEQ ID NO: 618806 - protein, 12 aa, Homo sapiens
  CDR3 for beta chain variable domain of TCR clone 309403 (TRBV7-8, TRBJ2-7)
CASSLGDREQYF

SEQ ID NO: 618807 - protein, 15 aa, Homo sapiens
  CDR3 for alpha chain variable domain of TCR clone 309404 (TRAV8-3, TRAJ45)
CASSYAGGGADGLTF

SEQ ID NO: 618808 - protein, 13 aa, Homo sapiens
  CDR3 for beta chain variable domain of TCR clone 309404 (TRBV20-1, TRBJ2-2)
CSASAAGTGELFF

SEQ ID NO: 618809 - protein, 17 aa, Homo sapiens
  CDR3 for alpha chain variable domain of TCR clone 309405 (TRAV23/DV6, TRAJ58)
CAARLLRGETSDSRLTF

SEQ ID NO: 618810 - protein, 14 aa, Homo sapiens
  CDR3 for beta chain variable domain of TCR clone 309405 (TRBV2, TRBJ2-7)
CASSLTSGGYEQYF

SEQ ID NO: 618811 - protein, 13 aa, Homo sapiens
  CDR3 for alpha chain variable domain of TCR clone 309406 (TRAV27, TRAJ45)
CRSSGGGADGLTF

SEQ ID NO: 618812 - protein, 18 aa, Homo sapiens
  CDR3 for beta chain variable domain of TCR clone 309406 (TRBV25-1, TRBJ2-1)
CASSESRAGGPGYNEQFF

SEQ ID NO: 618813 - protein, 12 aa, Homo sapiens
  CDR3 for alpha chain variable domain of TCR clone 309407 (TRAV1-2, TRAJ29)
CAVPSGNTPLVF

SEQ ID NO: 618814 - protein, 16 aa, Homo sapiens
  CDR3 for beta chain variable domain of TCR clone 309407 (TRBV7-6, TRBJ2-1)
CIAVPAAWGGADEQFF

SEQ ID NO: 618815 - protein, 14 aa, Homo sapiens
  CDR3 for alpha chain variable domain of TCR clone 309408 (TRAV13-1, TRAJ44)
CAAKATGTAGKLTF

SEQ ID NO: 618816 - protein, 22 aa, Homo sapiens
  CDR3 for beta chain variable domain of TCR clone 309408 (TRBV19, TRBJ2-1)
CANSVRDRVTGTSGRIYNEQFF

SEQ ID NO: 618817 - protein, 16 aa, Homo sapiens
  CDR3 for alpha chain variable domain of TCR clone 309409 (TRAV23/DV6, TRAJ9)
CAASIGGNTGGFKTIF

SEQ ID NO: 618818 - protein, 16 aa, Homo sapiens
  CDR3 for beta chain variable domain of TCR clone 309409 (TRBV9, TRBJ2-1)
CASSVGGGGNYNEQFF

SEQ ID NO: 618819 - protein, 17 aa, Homo sapiens
  CDR3 for alpha chain variable domain of TCR clone 309410 (TRAV3, TRAJ6)
CAVRYVPRAGGSYIPTF

SEQ ID NO: 618820 - protein, 14 aa, Homo sapiens
  CDR3 for beta chain variable domain of TCR clone 309410 (TRBV7-2, TRBJ2-7)
CASSPETSFYEQYF

SEQ ID NO: 618821 - protein, 16 aa, Homo sapiens
  CDR3 for alpha chain variable domain of TCR clone 309411 (TRAV8-3, TRAJ13)
CAVGAYPSGGYQKVTF

SEQ ID NO: 618822 - protein, 13 aa, Homo sapiens
  CDR3 for beta chain variable domain of TCR clone 309411 (TRBV27, TRBJ1-1)
CASSLSIGAEAFF

SEQ ID NO: 618823 - protein, 11 aa, Homo sapiens
  CDR3 for alpha chain variable domain of TCR clone 309412 (TRAV17, TRAJ31)
CAMSNNARLMF

SEQ ID NO: 618824 - protein, 14 aa, Homo sapiens
  CDR3 for beta chain variable domain of TCR clone 309412 (TRBV18, TRBJ2-7)
CASSPRGGAYEQYF

SEQ ID NO: 618825 - protein, 16 aa, Homo sapiens
  CDR3 for alpha chain variable domain of TCR clone 309413 (TRAV30, TRAJ24)
CGTEIVDADSWGRSRF

SEQ ID NO: 618826 - protein, 14 aa, Homo sapiens
  CDR3 for beta chain variable domain of TCR clone 309413 (TRBV12-5, TRBJ2-5)
CASGSRTHQETQYF

SEQ ID NO: 618827 - protein, 14 aa, Homo sapiens
  CDR3 for alpha chain variable domain of TCR clone 309414 (TRAV13-1, TRAJ10)
CAAKEPGGGNKLNF

SEQ ID NO: 618828 - protein, 14 aa, Homo sapiens
  CDR3 for beta chain variable domain of TCR clone 309414 (TRBV7-8, TRBJ2-3)
CASSLEAGTDTQYF

SEQ ID NO: 618829 - protein, 15 aa, Homo sapiens
  CDR3 for alpha chain variable domain of TCR clone 309415 (TRAV20, TRAJ37)
CAVQARSSNTGKLIF

SEQ ID NO: 618830 - protein, 14 aa, Homo sapiens
  CDR3 for beta chain variable domain of TCR clone 309415 (TRBV6-1, TRBJ1-3)
CASVQGGGGNTIYF

SEQ ID NO: 618831 - protein, 16 aa, Homo sapiens
  CDR3 for alpha chain variable domain of TCR clone 309416 (TRAV1-2, TRAJ16)
CAVNRFQMARSCSLQG

SEQ ID NO: 618832 - protein, 16 aa, Homo sapiens
  CDR3 for beta chain variable domain of TCR clone 309416 (TRBV9, TRBJ2-1)
CASSVGGGGNYNEQFF

SEQ ID NO: 618833 - protein, 13 aa, Homo sapiens
  CDR3 for alpha chain variable domain of TCR clone 309417 (TRAV20, TRAJ20)
CAVRWVRDYKLSC

SEQ ID NO: 618834 - protein, 14 aa, Homo sapiens
  CDR3 for beta chain variable domain of TCR clone 309417 (TRBV19, TRBJ2-2)
CASTVTANTGELFF

SEQ ID NO: 618835 - protein, 16 aa, Homo sapiens
  CDR3 for alpha chain variable domain of TCR clone 309418 (TRAV4, TRAJ37)
CLVGDMAGSNTGKLIF

SEQ ID NO: 618836 - protein, 16 aa, Homo sapiens
  CDR3 for beta chain variable domain of TCR clone 309418 (TRBV5-4, TRBJ2-3)
CASQQPGAGGADTQYF

SEQ ID NO: 618837 - protein, 13 aa, Homo sapiens
  CDR3 for alpha chain variable domain of TCR clone 309419 (TRAV12-2, TRAJ39)
CAVNNNAGNMLTF

SEQ ID NO: 618838 - protein, 13 aa, Homo sapiens
  CDR3 for beta chain variable domain of TCR clone 309419 (TRBV24-1, TRBJ2-2)
CATSETNTGELFF

SEQ ID NO: 618839 - protein, 13 aa, Homo sapiens
  CDR3 for alpha chain variable domain of TCR clone 309420 (TRAV27, TRAJ53)
CAPSGGSNYKLTF

SEQ ID NO: 618840 - protein, 15 aa, Homo sapiens
  CDR3 for beta chain variable domain of TCR clone 309420 (TRBV6-1, TRBJ2-3)
CDSSENWNGGGRQYF

SEQ ID NO: 618841 - protein, 14 aa, Homo sapiens
  CDR3 for alpha chain variable domain of TCR clone 309421 (TRAV8-3, TRAJ9)
CALVYNTGGFKTIV

SEQ ID NO: 618842 - protein, 14 aa, Homo sapiens
  CDR3 for beta chain variable domain of TCR clone 309421 (TRBV7-3, TRBJ2-2)
CASSSGGYTGELFF

SEQ ID NO: 618843 - protein, 10 aa, Homo sapiens
  CDR3 for alpha chain variable domain of TCR clone 309422 (TRAV16, TRAJ22)
SAMYLRQLTF

SEQ ID NO: 618844 - protein, 14 aa, Homo sapiens
  CDR3 for beta chain variable domain of TCR clone 309422 (TRBV7-9, TRBJ2-7)
CASSLVAGPYEQYF

SEQ ID NO: 618845 - protein, 15 aa, Homo sapiens
  CDR3 for alpha chain variable domain of TCR clone 309423 (TRAV29/DV5, TRAJ29)
CAASERSSGNTPLVF

SEQ ID NO: 618846 - protein, 17 aa, Homo sapiens
  CDR3 for beta chain variable domain of TCR clone 309423 (TRBV4-1, TRBJ1-4)
CASSQEWPRGVEEKLFF

SEQ ID NO: 618847 - protein, 15 aa, Homo sapiens
  CDR3 for alpha chain variable domain of TCR clone 309424 (TRAV8-4, TRAJ37)
CAVSRGSGNTGKLIF

SEQ ID NO: 618848 - protein, 13 aa, Homo sapiens
  CDR3 for beta chain variable domain of TCR clone 309424 (TRBV7-3, TRBJ1-1)
CASSQDWGAEAFF

SEQ ID NO: 618849 - protein, 12 aa, Homo sapiens
  CDR3 for alpha chain variable domain of TCR clone 309425 (TRAV22, TRAJ22)
CAPGGSARQLTF

SEQ ID NO: 618850 - protein, 14 aa, Homo sapiens
  CDR3 for beta chain variable domain of TCR clone 309425 (TRBV6-5, TRBJ1-2)
CASSYTRDRGRYTF

SEQ ID NO: 618851 - protein, 12 aa, Homo sapiens
  CDR3 for alpha chain variable domain of TCR clone 309426 (TRAV27, TRAJ35)
CAGADFGNVLHC

SEQ ID NO: 618852 - protein, 12 aa, Homo sapiens
  CDR3 for beta chain variable domain of TCR clone 309426 (TRBV29-1, TRBJ2-7)
CSARDRPYEQYF

SEQ ID NO: 618853 - protein, 12 aa, Homo sapiens
  CDR3 for alpha chain variable domain of TCR clone 309427 (TRAV20, TRAJ39)
CAVGNAGNMLTF

SEQ ID NO: 618854 - protein, 18 aa, Homo sapiens
  CDR3 for beta chain variable domain of TCR clone 309427 (TRBV12-4, TRBJ2-2)
CASSLVAGTRGRTGELFF

SEQ ID NO: 618855 - protein, 13 aa, Homo sapiens
  CDR3 for alpha chain variable domain of TCR clone 309428 (TRAV20, TRAJ26)
CAVPTSYGKNFVF

SEQ ID NO: 618856 - protein, 16 aa, Homo sapiens
  CDR3 for beta chain variable domain of TCR clone 309428 (TRBV28, TRBJ2-7)
CASSSPQGRDVYEQYF

SEQ ID NO: 618857 - protein, 15 aa, Homo sapiens
  CDR3 for alpha chain variable domain of TCR clone 309429 (TRAV21, TRAJ53)
CATLNSGGSNYKLTF

SEQ ID NO: 618858 - protein, 12 aa, Homo sapiens
  CDR3 for beta chain variable domain of TCR clone 309429 (TRBV7-8, TRBJ2-7)
CASSLGDREQSF

SEQ ID NO: 618859 - protein, 16 aa, Homo sapiens
  CDR3 for alpha chain variable domain of TCR clone 309430 (TRAV23/DV6, TRAJ9)
CSASIGGNTGGFKTIF

SEQ ID NO: 618860 - protein, 16 aa, Homo sapiens
  CDR3 for beta chain variable domain of TCR clone 309430 (TRBV7-3, TRBJ2-2)
CASSLKRGTLSGELFF

SEQ ID NO: 618861 - protein, 11 aa, Homo sapiens
  CDR3 for alpha chain variable domain of TCR clone 309431 (TRAV13-1, TRAJ5)
CAPKGRRAITF

SEQ ID NO: 618862 - protein, 15 aa, Homo sapiens
  CDR3 for beta chain variable domain of TCR clone 309431 (TRBV11-2, TRBJ1-1)
CASSSRSSLLLSLDK

SEQ ID NO: 618863 - protein, 14 aa, Homo sapiens
  CDR3 for alpha chain variable domain of TCR clone 309432 (TRAV29/DV5, TRAJ36)
GAARRKTGANNLFF

SEQ ID NO: 618864 - protein, 14 aa, Homo sapiens
  CDR3 for beta chain variable domain of TCR clone 309432 (TRBV12-5, TRBJ2-5)
CASGSRTHQETQYF

SEQ ID NO: 618865 - protein, 15 aa, Homo sapiens
  CDR3 for alpha chain variable domain of TCR clone 309433 (TRAV27, TRAJ38)
CAARRNAGNNRKLIW

SEQ ID NO: 618866 - protein, 15 aa, Homo sapiens
  CDR3 for beta chain variable domain of TCR clone 309433 (TRBV11-1, TRBJ2-7)
CASSLNYGASYEQYF

SEQ ID NO: 618867 - protein, 11 aa, Homo sapiens
  CDR3 for alpha chain variable domain of TCR clone 309434 (TRAV12-2, TRAJ39)
CAVNNMLTLGG

SEQ ID NO: 618868 - protein, 16 aa, Homo sapiens
  CDR3 for beta chain variable domain of TCR clone 309434 (TRBV5-3, TRBJ2-2)
CGRSFGTGTNTGELFF

SEQ ID NO: 618869 - protein, 14 aa, Homo sapiens
  CDR3 for alpha chain variable domain of TCR clone 309435 (TRAV21, TRAJ21)
CAVGVEDNFNKFYF

SEQ ID NO: 618870 - protein, 15 aa, Homo sapiens
  CDR3 for beta chain variable domain of TCR clone 309435 (TRBV9, TRBJ1-6)
CASSVAGTGDSPLHF

SEQ ID NO: 618871 - protein, 12 aa, Homo sapiens
  CDR3 for alpha chain variable domain of TCR clone 309436 (TRAV17, TRAJ20)
CATDGDDYKLSF

SEQ ID NO: 618872 - protein, 15 aa, Homo sapiens
  CDR3 for beta chain variable domain of TCR clone 309436 (TRBV20-1, TRBJ2-7)
CSARDRVSGMDEQYF

SEQ ID NO: 618873 - protein, 11 aa, Homo sapiens
  CDR3 for alpha chain variable domain of TCR clone 309437 (TRAV8-6, TRAJ20)
CAVSYDYKLSF

SEQ ID NO: 618874 - protein, 14 aa, Homo sapiens
  CDR3 for beta chain variable domain of TCR clone 309437 (TRBV10-2, TRBJ2-2)
CASSERSNTGELVF

SEQ ID NO: 618875 - protein, 13 aa, Homo sapiens
  CDR3 for alpha chain variable domain of TCR clone 309438 (TRAV12-1, TRAJ6)
CVVFPGGSYIPTF

SEQ ID NO: 618876 - protein, 20 aa, Homo sapiens
  CDR3 for beta chain variable domain of TCR clone 309438 (TRBV7-8, TRBJ2-2)
CASSHLFPGPTIHITGELFF

SEQ ID NO: 618877 - protein, 15 aa, Homo sapiens
  CDR3 for alpha chain variable domain of TCR clone 309439 (TRAV8-3, TRAJ15)
CAVGAPNQAGTALIF

SEQ ID NO: 618878 - protein, 14 aa, Homo sapiens
  CDR3 for beta chain variable domain of TCR clone 309439 (TRBV20-1, TRBJ2-1)
CSPDDEASYNEQLF

SEQ ID NO: 618879 - protein, 13 aa, Homo sapiens
  CDR3 for alpha chain variable domain of TCR clone 309440 (TRAV2, TRAJ39)
TTVHNNAGNMLTF

SEQ ID NO: 618880 - protein, 11 aa, Homo sapiens
  CDR3 for beta chain variable domain of TCR clone 309440 (TRBV24-1, TRBJ2-3)
CATASTDTQYF

SEQ ID NO: 618881 - protein, 12 aa, Homo sapiens
  CDR3 for alpha chain variable domain of TCR clone 309441 (TRAV3, TRAJ31)
CAVRDGNARLMF

SEQ ID NO: 618882 - protein, 13 aa, Homo sapiens
  CDR3 for beta chain variable domain of TCR clone 309441 (TRBV20-1, TRBJ1-1)
CSARVGGNTEAFF

SEQ ID NO: 618883 - protein, 12 aa, Homo sapiens
  CDR3 for alpha chain variable domain of TCR clone 309442 (TRAV12-2, TRAJ10)
WGVTGGGNKLTF

SEQ ID NO: 618884 - protein, 17 aa, Homo sapiens
  CDR3 for beta chain variable domain of TCR clone 309442 (TRBV27, TRBJ1-6)
CASSLDKLSSYNSPLHF

SEQ ID NO: 618885 - protein, 16 aa, Homo sapiens
  CDR3 for alpha chain variable domain of TCR clone 309443 (TRAV20, TRAJ28)
CAVRGPSGAGSYQLTF

SEQ ID NO: 618886 - protein, 15 aa, Homo sapiens
  CDR3 for beta chain variable domain of TCR clone 309443 (TRBV7-3, TRBJ2-1)
CASSLAGAGADEQFF

SEQ ID NO: 618887 - protein, 12 aa, Homo sapiens
  CDR3 for alpha chain variable domain of TCR clone 309444 (TRAV20, TRAJ39)
CAVGNAGNMLTF

SEQ ID NO: 618888 - protein, 14 aa, Homo sapiens
  CDR3 for beta chain variable domain of TCR clone 309444 (TRBV2, TRBJ2-1)
CASGTSGGLNEQFF

SEQ ID NO: 618889 - protein, 14 aa, Homo sapiens
  CDR3 for alpha chain variable domain of TCR clone 309445 (TRAV12-2, TRAJ40)
YAVKIPSGTYKYIF

SEQ ID NO: 618890 - protein, 13 aa, Homo sapiens
  CDR3 for beta chain variable domain of TCR clone 309445 (TRBV7-9, TRBJ1-2)
CASSVKQDYGYTF

SEQ ID NO: 618891 - protein, 14 aa, Homo sapiens
  CDR3 for alpha chain variable domain of TCR clone 309446 (TRAV1-2, TRAJ8)
CTVREDTGFQKLVF

SEQ ID NO: 618892 - protein, 14 aa, Homo sapiens
  CDR3 for beta chain variable domain of TCR clone 309446 (TRBV19, TRBJ1-5)
CASSKMTGPQPQHF

SEQ ID NO: 618893 - protein, 14 aa, Homo sapiens
  CDR3 for alpha chain variable domain of TCR clone 309447 (TRAV20, TRAJ10)
CAVRVEGGGYKLTF

SEQ ID NO: 618894 - protein, 13 aa, Homo sapiens
  CDR3 for beta chain variable domain of TCR clone 309447 (TRBV13, TRBJ2-2)
CASSPGLTGELFF

SEQ ID NO: 618895 - protein, 13 aa, Homo sapiens
  CDR3 for alpha chain variable domain of TCR clone 309448 (TRAV12-3, TRAJ33)
CAMSVNSNYQLIW

SEQ ID NO: 618896 - protein, 14 aa, Homo sapiens
  CDR3 for beta chain variable domain of TCR clone 309448 (TRBV11-2, TRBJ2-5)
CASSRTGGIETQYF

SEQ ID NO: 618897 - protein, 14 aa, Homo sapiens
  CDR3 for alpha chain variable domain of TCR clone 309449 (TRAV8-3, TRAJ4)
CAVGAAGGYNKLIF

SEQ ID NO: 618898 - protein, 21 aa, Homo sapiens
  CDR3 for beta chain variable domain of TCR clone 309449 (TRBV24-1, TRBJ2-5)
ESAIPNQTALYFCATRETQYF

SEQ ID NO: 618899 - protein, 16 aa, Homo sapiens
  CDR3 for alpha chain variable domain of TCR clone 309450 (TRAV1-2, TRAJ10)
CSVRGVLTGGGNKLNF

SEQ ID NO: 618900 - protein, 12 aa, Homo sapiens
  CDR3 for beta chain variable domain of TCR clone 309450 (TRBV7-8, TRBJ2-7)
CASSLGDREQYF

SEQ ID NO: 618901 - protein, 14 aa, Homo sapiens
  CDR3 for alpha chain variable domain of TCR clone 309451 (TRAV38-1, TRAJ40)
RALRPTSGTYKYIF

SEQ ID NO: 618902 - protein, 14 aa, Homo sapiens
  CDR3 for beta chain variable domain of TCR clone 309451 (TRBV25-1, TRBJ1-1)
CASTHLGGNTEAFS

SEQ ID NO: 618903 - protein, 15 aa, Homo sapiens
  CDR3 for alpha chain variable domain of TCR clone 309452 (TRAV35, TRAJ38)
CAGFSNAGNNRKLIW

SEQ ID NO: 618904 - protein, 13 aa, Homo sapiens
  CDR3 for beta chain variable domain of TCR clone 309452 (TRBV11-2, TRBJ2-5)
CASSSTGEETQYF

SEQ ID NO: 618905 - protein, 14 aa, Homo sapiens
  CDR3 for alpha chain variable domain of TCR clone 309453 (TRAV1-2, TRAJ16)
CAVNRFSDSQKLLF

SEQ ID NO: 618906 - protein, 10 aa, Homo sapiens
  CDR3 for beta chain variable domain of TCR clone 309453 (TRBV20-1, TRBJ2-5)
CSARFETQYF

SEQ ID NO: 618907 - protein, 15 aa, Homo sapiens
  CDR3 for alpha chain variable domain of TCR clone 309454 (TRAV26-1, TRAJ29)
CIVRVEGPGNKPLVF

SEQ ID NO: 618908 - protein, 15 aa, Homo sapiens
  CDR3 for beta chain variable domain of TCR clone 309454 (TRBV7-9, TRBJ1-5)
CASSQGHQPNQPQHF

SEQ ID NO: 618909 - protein, 15 aa, Homo sapiens
  CDR3 for alpha chain variable domain of TCR clone 309455 (TRAV3, TRAJ22)
CAVRDRGGSARQLTF

SEQ ID NO: 618910 - protein, 13 aa, Homo sapiens
  CDR3 for beta chain variable domain of TCR clone 309455 (TRBV14, TRBJ2-1)
CASSREGGTEQFF

SEQ ID NO: 618911 - protein, 14 aa, Homo sapiens
  CDR3 for alpha chain variable domain of TCR clone 309456 (TRAV12-2, TRAJ17)
CAVNIKAAGNKLTF

SEQ ID NO: 618912 - protein, 16 aa, Homo sapiens
  CDR3 for beta chain variable domain of TCR clone 309456 (TRBV20-1, TRBJ2-1)
CSARDLAGHSYNEQFF

SEQ ID NO: 618913 - protein, 15 aa, Homo sapiens
  CDR3 for alpha chain variable domain of TCR clone 309457 (TRAV8-6, TRAJ45)
CAVSEQGGGADGRTF

SEQ ID NO: 618914 - protein, 14 aa, Homo sapiens
  CDR3 for beta chain variable domain of TCR clone 309457 (TRBV28, TRBJ2-5)
CASRGSSFWETQYF

SEQ ID NO: 618915 - protein, 12 aa, Homo sapiens
  CDR3 for alpha chain variable domain of TCR clone 309458 (TRAV3, TRAJ31)
CAVRDGNARLLF

SEQ ID NO: 618916 - protein, 18 aa, Homo sapiens
  CDR3 for beta chain variable domain of TCR clone 309458 (TRBV7-2, TRBJ2-3)
CASSLKREGGGITDTQYF

SEQ ID NO: 618917 - protein, 13 aa, Homo sapiens
  CDR3 for alpha chain variable domain of TCR clone 309459 (TRAV1-2, TRAJ9)
CAALNTGGLKTIF

SEQ ID NO: 618918 - protein, 15 aa, Homo sapiens
  CDR3 for beta chain variable domain of TCR clone 309459 (TRBV28, TRBJ1-1)
CASSPPGGLGTEAFF

SEQ ID NO: 618919 - protein, 12 aa, Homo sapiens
  CDR3 for alpha chain variable domain of TCR clone 309460 (TRAV12-3, TRAJ17)
CAMTLTGNKLTF

SEQ ID NO: 618920 - protein, 13 aa, Homo sapiens
  CDR3 for beta chain variable domain of TCR clone 309460 (TRBV20-1, TRBJ2-7)
CSASPLSSYEQYF

SEQ ID NO: 618921 - protein, 12 aa, Homo sapiens
  CDR3 for alpha chain variable domain of TCR clone 309461 (TRAV13-1, TRAJ15)
CAASQAGTALIF

SEQ ID NO: 618922 - protein, 18 aa, Homo sapiens
  CDR3 for beta chain variable domain of TCR clone 309461 (TRBV7-9, TRBJ2-3)
YASSLPINGQISTDTQYF

SEQ ID NO: 618923 - protein, 14 aa, Homo sapiens
  CDR3 for alpha chain variable domain of TCR clone 309462 (TRAV8-2, TRAJ11)
CVVSGKSGYSTLTF

SEQ ID NO: 618924 - protein, 16 aa, Homo sapiens
  CDR3 for beta chain variable domain of TCR clone 309462 (TRBV28, TRBJ2-1)
CARSSPEYPRDNEQFF

SEQ ID NO: 618925 - protein, 10 aa, Homo sapiens
  CDR3 for alpha chain variable domain of TCR clone 309463 (TRAV16, TRAJ26)
CALSGQNFVF

SEQ ID NO: 618926 - protein, 12 aa, Homo sapiens
  CDR3 for beta chain variable domain of TCR clone 309463 (TRBV11-2, TRBJ2-1)
CASSPGNNEQFF

SEQ ID NO: 618927 - protein, 11 aa, Homo sapiens
  CDR3 for alpha chain variable domain of TCR clone 309464 (TRAV35, TRAJ30)
CVGPGDDKIIF

SEQ ID NO: 618928 - protein, 14 aa, Homo sapiens
  CDR3 for beta chain variable domain of TCR clone 309464 (TRBV7-6, TRBJ1-6)
CASSQAVGGSPLHF

SEQ ID NO: 618929 - protein, 13 aa, Homo sapiens
  CDR3 for alpha chain variable domain of TCR clone 309465 (TRAV17, TRAJ4)
CATKSGGYNKMIF

SEQ ID NO: 618930 - protein, 14 aa, Homo sapiens
  CDR3 for beta chain variable domain of TCR clone 309465 (TRBV20-1, TRBJ1-5)
CSARDDRGNQPQHF

SEQ ID NO: 618931 - protein, 14 aa, Homo sapiens
  CDR3 for alpha chain variable domain of TCR clone 309466 (TRAV16, TRAJ44)
CALRTTGTASKLTF

SEQ ID NO: 618932 - protein, 14 aa, Homo sapiens
  CDR3 for beta chain variable domain of TCR clone 309466 (TRBV20-1, TRBJ2-7)
CSAISREASYEQYF

SEQ ID NO: 618933 - protein, 13 aa, Homo sapiens
  CDR3 for alpha chain variable domain of TCR clone 309467 (TRAV12-3, TRAJ13)
CAMTTGGYQKVTF

SEQ ID NO: 618934 - protein, 13 aa, Homo sapiens
  CDR3 for beta chain variable domain of TCR clone 309467 (TRBV20-1, TRBJ2-2)
CSALSGGAGELFF

SEQ ID NO: 618935 - protein, 18 aa, Homo sapiens
  CDR3 for alpha chain variable domain of TCR clone 309468 (TRAV21, TRAJ52)
CAVRPSPAGGTSYGKLTF

SEQ ID NO: 618936 - protein, 16 aa, Homo sapiens
  CDR3 for beta chain variable domain of TCR clone 309468 (TRBV7-3, TRBJ2-1)
CASRLEGYRSYNEQFF

SEQ ID NO: 618937 - protein, 13 aa, Homo sapiens
  CDR3 for alpha chain variable domain of TCR clone 309469 (TRAV12-1, TRAJ26)
CVVNINYGQNFVF

SEQ ID NO: 618938 - protein, 13 aa, Homo sapiens
  CDR3 for beta chain variable domain of TCR clone 309469 (TRBV12-4, TRBJ2-7)
CASSSGRSYEQYF

SEQ ID NO: 618939 - protein, 12 aa, Homo sapiens
  CDR3 for alpha chain variable domain of TCR clone 309470 (TRAV27, TRAJ35)
CAGADFGNVLHC

SEQ ID NO: 618940 - protein, 15 aa, Homo sapiens
  CDR3 for beta chain variable domain of TCR clone 309470 (TRBV18, TRBJ1-1)
CASSPRQGENTEAFF

SEQ ID NO: 618941 - protein, 16 aa, Homo sapiens
  CDR3 for alpha chain variable domain of TCR clone 309471 (TRAV3, TRAJ37)
CAVRGKGSGNTGKLIF

SEQ ID NO: 618942 - protein, 15 aa, Homo sapiens
  CDR3 for beta chain variable domain of TCR clone 309471 (TRBV7-3, TRBJ2-2)
CASSETGQGTGGLFF

SEQ ID NO: 618943 - protein, 12 aa, Homo sapiens
  CDR3 for alpha chain variable domain of TCR clone 309472 (TRAV13-1, TRAJ21)
CAAKEGFNKFYF

SEQ ID NO: 618944 - protein, 12 aa, Homo sapiens
  CDR3 for beta chain variable domain of TCR clone 309472 (TRBV7-9, TRBJ2-7)
CASSLEGYEQYF

SEQ ID NO: 618945 - protein, 13 aa, Homo sapiens
  CDR3 for alpha chain variable domain of TCR clone 309473 (TRAV26-1, TRAJ34)
CIVRVGNTDKLIF

SEQ ID NO: 618946 - protein, 21 aa, Homo sapiens
  CDR3 for beta chain variable domain of TCR clone 309473 (TRBV4-2, TRBJ2-3)
PCSQKTRPCISVPAAPDTQYF

SEQ ID NO: 618947 - protein, 16 aa, Homo sapiens
  CDR3 for alpha chain variable domain of TCR clone 309474 (TRAV27, TRAJ13)
CAGAKSDSGGYQKVTF

SEQ ID NO: 618948 - protein, 15 aa, Homo sapiens
  CDR3 for beta chain variable domain of TCR clone 309474 (TRBV3-1, TRBJ1-2)
CASSPTRLPEGGYSF

SEQ ID NO: 618949 - protein, 14 aa, Homo sapiens
  CDR3 for alpha chain variable domain of TCR clone 309475 (TRAV12-3, TRAJ57)
CAMSAWGGAEKLVF

SEQ ID NO: 618950 - protein, 16 aa, Homo sapiens
  CDR3 for beta chain variable domain of TCR clone 309475 (TRBV7-3, TRBJ2-2)
CASSLKRGTLSGELFF

SEQ ID NO: 618951 - protein, 14 aa, Homo sapiens
  CDR3 for alpha chain variable domain of TCR clone 309476 (TRAV35, TRAJ22)
CAGLRPGSARQLPF

SEQ ID NO: 618952 - protein, 13 aa, Homo sapiens
  CDR3 for beta chain variable domain of TCR clone 309476 (TRBV7-9, TRBJ1-2)
CASSLKQNYGYTF

SEQ ID NO: 618953 - protein, 13 aa, Homo sapiens
  CDR3 for alpha chain variable domain of TCR clone 309477 (TRAV12-1, TRAJ39)
CVALNNAGNMLTF

SEQ ID NO: 618954 - protein, 14 aa, Homo sapiens
  CDR3 for beta chain variable domain of TCR clone 309477 (TRBV7-9, TRBJ2-5)
CASSLVGGEETQYF

SEQ ID NO: 618955 - protein, 17 aa, Homo sapiens
  CDR3 for alpha chain variable domain of TCR clone 309478 (TRAV4, TRAJ18)
CLVGERSVGPTLGRRYF

SEQ ID NO: 618956 - protein, 14 aa, Homo sapiens
  CDR3 for beta chain variable domain of TCR clone 309478 (TRBV6-5, TRBJ1-2)
CASSYDGTGGGYTF

SEQ ID NO: 618957 - protein, 17 aa, Homo sapiens
  CDR3 for alpha chain variable domain of TCR clone 309479 (TRAV3, TRAJ6)
FAVRDGPRAGGSYIPTF

SEQ ID NO: 618958 - protein, 13 aa, Homo sapiens
  CDR3 for beta chain variable domain of TCR clone 309479 (TRBV3-1, TRBJ1-1)
CASSPGVITEAFF

SEQ ID NO: 618959 - protein, 11 aa, Homo sapiens
  CDR3 for alpha chain variable domain of TCR clone 309480 (TRAV12-3, TRAJ17)
CAMTLTGKLTF

SEQ ID NO: 618960 - protein, 15 aa, Homo sapiens
  CDR3 for beta chain variable domain of TCR clone 309480 (TRBV20-1, TRBJ2-7)
CSARDLVSGMDEQYF

SEQ ID NO: 618961 - protein, 13 aa, Homo sapiens
  CDR3 for alpha chain variable domain of TCR clone 309481 (TRAV1-2, TRAJ9)
CAALNTGGFKTIF

SEQ ID NO: 618962 - protein, 14 aa, Homo sapiens
  CDR3 for beta chain variable domain of TCR clone 309481 (TRBV11-2, TRBJ2-5)
CASRPLAGRETQYF

SEQ ID NO: 618963 - protein, 14 aa, Homo sapiens
  CDR3 for alpha chain variable domain of TCR clone 309482 (TRAV12-2, TRAJ13)
CAVKKTGGYQKVTF

SEQ ID NO: 618964 - protein, 15 aa, Homo sapiens
  CDR3 for beta chain variable domain of TCR clone 309482 (TRBV27, TRBJ2-1)
CARSNGGGSSNGQFF

SEQ ID NO: 618965 - protein, 15 aa, Homo sapiens
  CDR3 for alpha chain variable domain of TCR clone 309483 (TRAV17, TRAJ56)
CATEHFTGANSKLTF

SEQ ID NO: 618966 - protein, 15 aa, Homo sapiens
  CDR3 for beta chain variable domain of TCR clone 309483 (TRBV28, TRBJ1-5)
CASSRTGGYVQPQHF

SEQ ID NO: 618967 - protein, 13 aa, Homo sapiens
  CDR3 for alpha chain variable domain of TCR clone 309484 (TRAV20, TRAJ42)
CAVQGGSQGDLIF

SEQ ID NO: 618968 - protein, 13 aa, Homo sapiens
  CDR3 for beta chain variable domain of TCR clone 309484 (TRBV12-4, TRBJ2-5)
CASSQTRGETQYF

SEQ ID NO: 618969 - protein, 16 aa, Homo sapiens
  CDR3 for alpha chain variable domain of TCR clone 309485 (TRAV3, TRAJ37)
CAVRGKGSGNTGKLIF

SEQ ID NO: 618970 - protein, 15 aa, Homo sapiens
  CDR3 for beta chain variable domain of TCR clone 309485 (TRBV27, TRBJ1-4)
CASSAQQDLNEKLFF

SEQ ID NO: 618971 - protein, 14 aa, Homo sapiens
  CDR3 for alpha chain variable domain of TCR clone 309486 (TRAV12-2, TRAJ4)
CAVLIGGGYNKLIF

SEQ ID NO: 618972 - protein, 15 aa, Homo sapiens
  CDR3 for beta chain variable domain of TCR clone 309486 (TRBV28, TRBJ1-3)
CASSMGWASGNTIYF

SEQ ID NO: 618973 - protein, 12 aa, Homo sapiens
  CDR3 for alpha chain variable domain of TCR clone 309487 (TRAV12-3, TRAJ17)
CALTLTGSKLTC

SEQ ID NO: 618974 - protein, 15 aa, Homo sapiens
  CDR3 for beta chain variable domain of TCR clone 309487 (TRBV20-1, TRBJ2-7)
CSASARVSGLDEQYF

SEQ ID NO: 618975 - protein, 10 aa, Homo sapiens
  CDR3 for alpha chain variable domain of TCR clone 309488 (TRAV8-3, TRAJ43)
CAVALADMRF

SEQ ID NO: 618976 - protein, 14 aa, Homo sapiens
  CDR3 for beta chain variable domain of TCR clone 309488 (TRBV4-2, TRBJ2-1)
CASGLDREYNEQFF

SEQ ID NO: 618977 - protein, 15 aa, Homo sapiens
  CDR3 for alpha chain variable domain of TCR clone 309489 (TRAV12-3, TRAJ42)
CAMSGHGGSQGNLIF

SEQ ID NO: 618978 - protein, 15 aa, Homo sapiens
  CDR3 for beta chain variable domain of TCR clone 309489 (TRBV4-2, TRBJ1-2)
CASSQRTGGRDGYTF

SEQ ID NO: 618979 - protein, 11 aa, Homo sapiens
  CDR3 for alpha chain variable domain of TCR clone 309490 (TRAV1-1, TRAJ23)
CAVRQGGKLIF

SEQ ID NO: 618980 - protein, 15 aa, Homo sapiens
  CDR3 for beta chain variable domain of TCR clone 309490 (TRBV7-9, TRBJ2-7)
CASSSSGLAVYEQYF

SEQ ID NO: 618981 - protein, 13 aa, Homo sapiens
  CDR3 for alpha chain variable domain of TCR clone 309491 (TRAV12-3, TRAJ40)
FAMSARGTYKYIF

SEQ ID NO: 618982 - protein, 16 aa, Homo sapiens
  CDR3 for beta chain variable domain of TCR clone 309491 (TRBV20-1, TRBJ2-3)
CSGEAGLAGGQDTQYF

SEQ ID NO: 618983 - protein, 15 aa, Homo sapiens
  CDR3 for alpha chain variable domain of TCR clone 309492 (TRAV26-1, TRAJ29)
CIVRVEGSGNTPLVF

SEQ ID NO: 618984 - protein, 14 aa, Homo sapiens
  CDR3 for beta chain variable domain of TCR clone 309492 (TRBV19, TRBJ2-1)
CASSEPGGHGEQFF

SEQ ID NO: 618985 - protein, 14 aa, Homo sapiens
  CDR3 for alpha chain variable domain of TCR clone 309493 (TRAV1-2, TRAJ16)
CAVNRFSDGRKLLS

SEQ ID NO: 618986 - protein, 15 aa, Homo sapiens
  CDR3 for beta chain variable domain of TCR clone 309493 (TRBV9, TRBJ1-6)
CASSVAGTGDSPLHF

SEQ ID NO: 618987 - protein, 15 aa, Homo sapiens
  CDR3 for alpha chain variable domain of TCR clone 309494 (TRAV8-4, TRAJ37)
CAVTYGSSNTGKLIF

SEQ ID NO: 618988 - protein, 12 aa, Homo sapiens
  CDR3 for beta chain variable domain of TCR clone 309494 (TRBV7-8, TRBJ2-7)
CASSLGDREQYF

SEQ ID NO: 618989 - protein, 12 aa, Homo sapiens
  CDR3 for alpha chain variable domain of TCR clone 309495 (TRAV25, TRAJ38)
CAGTGNNRKLIW

SEQ ID NO: 618990 - protein, 14 aa, Homo sapiens
  CDR3 for beta chain variable domain of TCR clone 309495 (TRBV5-4, TRBJ1-1)
CTSSLDSRRDEAFF

SEQ ID NO: 618991 - protein, 15 aa, Homo sapiens
  CDR3 for alpha chain variable domain of TCR clone 309496 (TRAV3, TRAJ5)
CAVRDGKTGRRALTF

SEQ ID NO: 618992 - protein, 15 aa, Homo sapiens
  CDR3 for beta chain variable domain of TCR clone 309496 (TRBV7-9, TRBJ2-2)
CASGPLDTFPGELFF

SEQ ID NO: 618993 - protein, 13 aa, Homo sapiens
  CDR3 for alpha chain variable domain of TCR clone 309497 (TRAV8-6, TRAJ49)
CAVITNTGNQFYF

SEQ ID NO: 618994 - protein, 17 aa, Homo sapiens
  CDR3 for beta chain variable domain of TCR clone 309497 (TRBV4-2, TRBJ2-5)
CASSPGRWRNFQETQYF

SEQ ID NO: 618995 - protein, 13 aa, Homo sapiens
  CDR3 for alpha chain variable domain of TCR clone 309498 (TRAV35, TRAJ42)
CAGFPGSQGNLIF

SEQ ID NO: 618996 - protein, 12 aa, Homo sapiens
  CDR3 for beta chain variable domain of TCR clone 309498 (TRBV29-1, TRBJ1-3)
CSTRDSGNTIYF

SEQ ID NO: 618997 - protein, 12 aa, Homo sapiens
  CDR3 for alpha chain variable domain of TCR clone 309499 (TRAV23/DV6, TRAJ17)
CARGSCRQQANF

SEQ ID NO: 618998 - protein, 17 aa, Homo sapiens
  CDR3 for beta chain variable domain of TCR clone 309499 (TRBV4-1, TRBJ1-4)
CASSQEGPRGVEEKLFF

SEQ ID NO: 618999 - protein, 18 aa, Homo sapiens
  CDR3 for alpha chain variable domain of TCR clone 309500 (TRAV2, TRAJ13)
CCLLLFCPNSGGYQKVTF

SEQ ID NO: 619000 - protein, 14 aa, Homo sapiens
  CDR3 for beta chain variable domain of TCR clone 309500 (TRBV19, TRBJ2-1)
CASEVTGARNEQFF

SEQ ID NO: 619001 - protein, 15 aa, Homo sapiens
  CDR3 for alpha chain variable domain of TCR clone 309501 (TRAV13-1, TRAJ36)
CAASIRQTGANNLFF

SEQ ID NO: 619002 - protein, 17 aa, Homo sapiens
  CDR3 for beta chain variable domain of TCR clone 309501 (TRBV20-1, TRBJ2-2)
CSSRDRTSGRHTGELFF

SEQ ID NO: 619003 - protein, 11 aa, Homo sapiens
  CDR3 for alpha chain variable domain of TCR clone 309502 (TRAV2, TRAJ13)
CASGGYQKITF

SEQ ID NO: 619004 - protein, 14 aa, Homo sapiens
  CDR3 for beta chain variable domain of TCR clone 309502 (TRBV7-2, TRBJ2-7)
CASSPKTSFYEQYF

SEQ ID NO: 619005 - protein, 14 aa, Homo sapiens
  CDR3 for alpha chain variable domain of TCR clone 309503 (TRAV17, TRAJ37)
CATDGSSNTGKLIF

SEQ ID NO: 619006 - protein, 14 aa, Homo sapiens
  CDR3 for beta chain variable domain of TCR clone 309503 (TRBV5-1, TRBJ2-7)
CASSATGGYDEQYF

SEQ ID NO: 619007 - protein, 11 aa, Homo sapiens
  CDR3 for alpha chain variable domain of TCR clone 309504 (TRAV12-2, TRAJ26)
CAVEGGQNFVF

SEQ ID NO: 619008 - protein, 17 aa, Homo sapiens
  CDR3 for beta chain variable domain of TCR clone 309504 (TRBV20-1, TRBJ2-1)
RSASGGENTGAYNEQFF

SEQ ID NO: 619009 - protein, 14 aa, Homo sapiens
  CDR3 for alpha chain variable domain of TCR clone 309505 (TRAV27, TRAJ22)
CAGVSVLGKRQLTF

SEQ ID NO: 619010 - protein, 12 aa, Homo sapiens
  CDR3 for beta chain variable domain of TCR clone 309505 (TRBV11-2, TRBJ2-2)
CASSLGGGELFF

SEQ ID NO: 619011 - protein, 15 aa, Homo sapiens
  CDR3 for alpha chain variable domain of TCR clone 309506 (TRAV1-1, TRAJ10)
CLLLLRGGGGNKLTF

SEQ ID NO: 619012 - protein, 16 aa, Homo sapiens
  CDR3 for beta chain variable domain of TCR clone 309506 (TRBV19, TRBJ1-1)
CASRFGGPVTGTEAFF

SEQ ID NO: 619013 - protein, 15 aa, Homo sapiens
  CDR3 for alpha chain variable domain of TCR clone 309507 (TRAV27, TRAJ33)
CAGADIMDSKYQLIW

SEQ ID NO: 619014 - protein, 13 aa, Homo sapiens
  CDR3 for beta chain variable domain of TCR clone 309507 (TRBV28, TRBJ1-2)
CASSLQGRGGYTF

SEQ ID NO: 619015 - protein, 15 aa, Homo sapiens
  CDR3 for alpha chain variable domain of TCR clone 309508 (TRAV12-3, TRAJ6)
YAMSATTGGSYIPTF

SEQ ID NO: 619016 - protein, 15 aa, Homo sapiens
  CDR3 for beta chain variable domain of TCR clone 309508 (TRBV5-4, TRBJ1-1)
CASSSLGWANTEAFF

SEQ ID NO: 619017 - protein, 14 aa, Homo sapiens
  CDR3 for alpha chain variable domain of TCR clone 309509 (TRAV35, TRAJ10)
CAGILTGGGNKLTF

SEQ ID NO: 619018 - protein, 14 aa, Homo sapiens
  CDR3 for beta chain variable domain of TCR clone 309509 (TRBV15, TRBJ2-3)
CATRSGTSTDTQYF

SEQ ID NO: 619019 - protein, 14 aa, Homo sapiens
  CDR3 for alpha chain variable domain of TCR clone 309510 (TRAV12-3, TRAJ10)
SHLPLTGGGNKLTF

SEQ ID NO: 619020 - protein, 15 aa, Homo sapiens
  CDR3 for beta chain variable domain of TCR clone 309510 (TRBV11-2, TRBJ1-3)
CDSSLDGTVGNTIYF

SEQ ID NO: 619021 - protein, 12 aa, Homo sapiens
  CDR3 for alpha chain variable domain of TCR clone 309511 (TRAV12-2, TRAJ10)
WGVTGGGNKLTF

SEQ ID NO: 619022 - protein, 11 aa, Homo sapiens
  CDR3 for beta chain variable domain of TCR clone 309511 (TRBV6-3, TRBJ2-3)
CATGQADTQYF

SEQ ID NO: 619023 - protein, 17 aa, Homo sapiens
  CDR3 for alpha chain variable domain of TCR clone 309512 (TRAV3, TRAJ6)
CAVRDGPRAGGSYIPTF

SEQ ID NO: 619024 - protein, 11 aa, Homo sapiens
  CDR3 for beta chain variable domain of TCR clone 309512 (TRBV7-9, TRBJ2-5)
CASSLGETQYF

SEQ ID NO: 619025 - protein, 14 aa, Homo sapiens
  CDR3 for alpha chain variable domain of TCR clone 309513 (TRAV26-1, TRAJ21)
CIVRPPYNFNKFYF

SEQ ID NO: 619026 - protein, 14 aa, Homo sapiens
  CDR3 for beta chain variable domain of TCR clone 309513 (TRBV19, TRBJ2-1)
CASPTCVLSGEQFF

SEQ ID NO: 619027 - protein, 16 aa, Homo sapiens
  CDR3 for alpha chain variable domain of TCR clone 309514 (TRAV1-2, TRAJ10)
CAVRGVLTGGGNKLTF

SEQ ID NO: 619028 - protein, 15 aa, Homo sapiens
  CDR3 for beta chain variable domain of TCR clone 309514 (TRBV6-4, TRBJ2-1)
CASSDSTGGYNEQFF

SEQ ID NO: 619029 - protein, 14 aa, Homo sapiens
  CDR3 for alpha chain variable domain of TCR clone 309515 (TRAV1-2, TRAJ16)
CAVNRFSDGQKLLF

SEQ ID NO: 619030 - protein, 16 aa, Homo sapiens
  CDR3 for beta chain variable domain of TCR clone 309515 (TRBV20-1, TRBJ1-4)
CSAIGGPRGANEKLFF

SEQ ID NO: 619031 - protein, 14 aa, Homo sapiens
  CDR3 for alpha chain variable domain of TCR clone 309516 (TRAV8-3, TRAJ39)
CAVGANNAGNMLTF

SEQ ID NO: 619032 - protein, 17 aa, Homo sapiens
  CDR3 for beta chain variable domain of TCR clone 309516 (TRBV5-1, TRBJ2-2)
CASSLAGLSGGTGELFF

SEQ ID NO: 619033 - protein, 14 aa, Homo sapiens
  CDR3 for alpha chain variable domain of TCR clone 309517 (TRAV12-1, TRAJ23)
CVVIVYNQGGKLIF

SEQ ID NO: 619034 - protein, 13 aa, Homo sapiens
  CDR3 for beta chain variable domain of TCR clone 309517 (TRBV7-9, TRBJ1-2)
CASRTGPNYGYTF

SEQ ID NO: 619035 - protein, 11 aa, Homo sapiens
  CDR3 for alpha chain variable domain of TCR clone 309518 (TRAV3, TRAJ32)
CAVSPKGMVVL

SEQ ID NO: 619036 - protein, 13 aa, Homo sapiens
  CDR3 for beta chain variable domain of TCR clone 309518 (TRBV19, TRBJ1-1)
CASSYGRDTEAFF

SEQ ID NO: 619037 - protein, 14 aa, Homo sapiens
  CDR3 for alpha chain variable domain of TCR clone 309519 (TRAV20, TRAJ29)
CAVQAWVGNTPLVF

SEQ ID NO: 619038 - protein, 15 aa, Homo sapiens
  CDR3 for beta chain variable domain of TCR clone 309519 (TRBV29-1, TRBJ2-7)
CSVAFFDRGSYEQYF

SEQ ID NO: 619039 - protein, 15 aa, Homo sapiens
  CDR3 for alpha chain variable domain of TCR clone 309520 (TRAV12-1, TRAJ44)
CVVFVNTGTASKLTF

SEQ ID NO: 619040 - protein, 15 aa, Homo sapiens
  CDR3 for beta chain variable domain of TCR clone 309520 (TRBV29-1, TRBJ2-7)
CSVEFFDRGSYEQYF

SEQ ID NO: 619041 - protein, 15 aa, Homo sapiens
  CDR3 for alpha chain variable domain of TCR clone 309521 (TRAV21, TRAJ38)
CAVRQDAGNNRKLIW

SEQ ID NO: 619042 - protein, 14 aa, Homo sapiens
  CDR3 for beta chain variable domain of TCR clone 309521 (TRBV7-8, TRBJ2-3)
CASSLEAGTDTQYF

SEQ ID NO: 619043 - protein, 14 aa, Homo sapiens
  CDR3 for alpha chain variable domain of TCR clone 309522 (TRAV8-3, TRAJ9)
CAVIYNTGGFKTIF

SEQ ID NO: 619044 - protein, 14 aa, Homo sapiens
  CDR3 for beta chain variable domain of TCR clone 309522 (TRBV7-3, TRBJ2-2)
CASSSGGYTEELFF

SEQ ID NO: 619045 - protein, 13 aa, Homo sapiens
  CDR3 for alpha chain variable domain of TCR clone 309523 (TRAV30, TRAJ16)
CGPFGGDGQKLLF

SEQ ID NO: 619046 - protein, 13 aa, Homo sapiens
  CDR3 for beta chain variable domain of TCR clone 309523 (TRBV7-3, TRBJ2-1)
CASSLDSYNEQFF

SEQ ID NO: 619047 - protein, 17 aa, Homo sapiens
  CDR3 for alpha chain variable domain of TCR clone 309524 (TRAV3, TRAJ12)
CAVRDGGRMDSSYKLVF

SEQ ID NO: 619048 - protein, 14 aa, Homo sapiens
  CDR3 for beta chain variable domain of TCR clone 309524 (TRBV7-9, TRBJ1-2)
CASSRQGANYGYTF

SEQ ID NO: 619049 - protein, 12 aa, Homo sapiens
  CDR3 for alpha chain variable domain of TCR clone 309525 (TRAV9-2, TRAJ26)
CALRSYGQNFVF

SEQ ID NO: 619050 - protein, 12 aa, Homo sapiens
  CDR3 for beta chain variable domain of TCR clone 309525 (TRBV29-1, TRBJ2-3)
CSVTGGADTQYF

SEQ ID NO: 619051 - protein, 12 aa, Homo sapiens
  CDR3 for alpha chain variable domain of TCR clone 309526 (TRAV1-1, TRAJ39)
CAVPVVGNMLTF

SEQ ID NO: 619052 - protein, 16 aa, Homo sapiens
  CDR3 for beta chain variable domain of TCR clone 309526 (TRBV7-9, TRBJ2-1)
CASSDVAGGSYNEQFF

SEQ ID NO: 619053 - protein, 13 aa, Homo sapiens
  CDR3 for alpha chain variable domain of TCR clone 309527 (TRAV35, TRAJ57)
CAGSQGGSEKLVF

SEQ ID NO: 619054 - protein, 13 aa, Homo sapiens
  CDR3 for beta chain variable domain of TCR clone 309527 (TRBV6-1, TRBJ2-2)
CANSGHNTGELFF

SEQ ID NO: 619055 - protein, 15 aa, Homo sapiens
  CDR3 for alpha chain variable domain of TCR clone 309528 (TRAV20, TRAJ53)
CAVQASGGSSYKLTF

SEQ ID NO: 619056 - protein, 12 aa, Homo sapiens
  CDR3 for beta chain variable domain of TCR clone 309528 (TRBV7-6, TRBJ2-5)
CASSLSQETQYF

SEQ ID NO: 619057 - protein, 13 aa, Homo sapiens
  CDR3 for alpha chain variable domain of TCR clone 309529 (TRAV13-1, TRAJ33)
CAASRAGNYQLIW

SEQ ID NO: 619058 - protein, 15 aa, Homo sapiens
  CDR3 for beta chain variable domain of TCR clone 309529 (TRBV2, TRBJ2-7)
EDSAMYFGASSEQYF

SEQ ID NO: 619059 - protein, 14 aa, Homo sapiens
  CDR3 for alpha chain variable domain of TCR clone 309530 (TRAV1-2, TRAJ16)
CAVNRLSDGQKLLF

SEQ ID NO: 619060 - protein, 14 aa, Homo sapiens
  CDR3 for beta chain variable domain of TCR clone 309530 (TRBV10-2, TRBJ1-5)
CASSSTGRNQPQHF

SEQ ID NO: 619061 - protein, 15 aa, Homo sapiens
  CDR3 for alpha chain variable domain of TCR clone 309531 (TRAV8-4, TRAJ29)
CAVSEDFRGNTPLVF

SEQ ID NO: 619062 - protein, 12 aa, Homo sapiens
  CDR3 for beta chain variable domain of TCR clone 309531 (TRBV14, TRBJ2-7)
CASSSLNGEQYF

SEQ ID NO: 619063 - protein, 15 aa, Homo sapiens
  CDR3 for alpha chain variable domain of TCR clone 309532 (TRAV20, TRAJ4)
CAVEGSSGGYDKLIF

SEQ ID NO: 619064 - protein, 14 aa, Homo sapiens
  CDR3 for beta chain variable domain of TCR clone 309532 (TRBV7-8, TRBJ2-7)
CASTLGGALGEQYF

SEQ ID NO: 619065 - protein, 14 aa, Homo sapiens
  CDR3 for alpha chain variable domain of TCR clone 309533 (TRAV12-1, TRAJ17)
CVVNYKAAGNKLTF

SEQ ID NO: 619066 - protein, 15 aa, Homo sapiens
  CDR3 for beta chain variable domain of TCR clone 309533 (TRBV19, TRBJ1-6)
CASSTQGAVGSPLHF

SEQ ID NO: 619067 - protein, 16 aa, Homo sapiens
  CDR3 for alpha chain variable domain of TCR clone 309534 (TRAV3, TRAJ37)
CAVRGKGSGNTGKLIF

SEQ ID NO: 619068 - protein, 14 aa, Homo sapiens
  CDR3 for beta chain variable domain of TCR clone 309534 (TRBV6-5, TRBJ2-7)
CASSLFPGGYEQYF

SEQ ID NO: 619069 - protein, 16 aa, Homo sapiens
  CDR3 for alpha chain variable domain of TCR clone 309535 (TRAV17, TRAJ35)
CATAEGGIGFGNVLHC

SEQ ID NO: 619070 - protein, 16 aa, Homo sapiens
  CDR3 for beta chain variable domain of TCR clone 309535 (TRBV6-5, TRBJ2-7)
CASSSDPTSGFYKQYF

SEQ ID NO: 619071 - protein, 14 aa, Homo sapiens
  CDR3 for alpha chain variable domain of TCR clone 309536 (TRAV8-6, TRAJ29)
FAVSRASGKTPLVF

SEQ ID NO: 619072 - protein, 13 aa, Homo sapiens
  CDR3 for beta chain variable domain of TCR clone 309536 (TRBV19, TRBJ1-5)
CASSEGSNQPQHF

SEQ ID NO: 619073 - protein, 14 aa, Homo sapiens
  CDR3 for alpha chain variable domain of TCR clone 309537 (TRAV8-3, TRAJ39)
CAVGAWGVGNMLTF

SEQ ID NO: 619074 - protein, 16 aa, Homo sapiens
  CDR3 for beta chain variable domain of TCR clone 309537 (TRBV7-2, TRBJ1-3)
CASSSGRVLSGNTIYF

SEQ ID NO: 619075 - protein, 14 aa, Homo sapiens
  CDR3 for alpha chain variable domain of TCR clone 309538 (TRAV8-3, TRAJ4)
CAVGAAGGYNKLIF

SEQ ID NO: 619076 - protein, 15 aa, Homo sapiens
  CDR3 for beta chain variable domain of TCR clone 309538 (TRBV4-1, TRBJ2-7)
CASSQNTGRLYEQYF

SEQ ID NO: 619077 - protein, 16 aa, Homo sapiens
  CDR3 for alpha chain variable domain of TCR clone 309539 (TRAV30, TRAJ24)
CGTEIVDADSWGKFQF

SEQ ID NO: 619078 - protein, 15 aa, Homo sapiens
  CDR3 for beta chain variable domain of TCR clone 309539 (TRBV18, TRBJ2-5)
CASTDRGPRQETQYF

SEQ ID NO: 619079 - protein, 16 aa, Homo sapiens
  CDR3 for alpha chain variable domain of TCR clone 309540 (TRAV22, TRAJ45)
CAVERGKRGGADGFTF

SEQ ID NO: 619080 - protein, 17 aa, Homo sapiens
  CDR3 for beta chain variable domain of TCR clone 309540 (TRBV20-1, TRBJ1-5)
CSAREIPQGVGNQPQHF

SEQ ID NO: 619081 - protein, 11 aa, Homo sapiens
  CDR3 for alpha chain variable domain of TCR clone 309541 (TRAV26-1, TRAJ27)
CIDPNAGKSTF

SEQ ID NO: 619082 - protein, 15 aa, Homo sapiens
  CDR3 for beta chain variable domain of TCR clone 309541 (TRBV11-2, TRBJ1-3)
CASSLSPLVRDTIYF

SEQ ID NO: 619083 - protein, 13 aa, Homo sapiens
  CDR3 for alpha chain variable domain of TCR clone 309542 (TRAV13-1, TRAJ5)
CAASDTGRRALTF

SEQ ID NO: 619084 - protein, 15 aa, Homo sapiens
  CDR3 for beta chain variable domain of TCR clone 309542 (TRBV27, TRBJ1-6)
CASSFDRGLGSPLHF

SEQ ID NO: 619085 - protein, 14 aa, Homo sapiens
  CDR3 for alpha chain variable domain of TCR clone 309543 (TRAV12-2, TRAJ37)
CVSEGSSNTGELIF

SEQ ID NO: 619086 - protein, 14 aa, Homo sapiens
  CDR3 for beta chain variable domain of TCR clone 309543 (TRBV20-1, TRBJ1-1)
CSAQTRIGGTEAFF

SEQ ID NO: 619087 - protein, 13 aa, Homo sapiens
  CDR3 for alpha chain variable domain of TCR clone 309544 (TRAV3, TRAJ27)
CAVRPLGPGKSNF

SEQ ID NO: 619088 - protein, 13 aa, Homo sapiens
  CDR3 for beta chain variable domain of TCR clone 309544 (TRBV7-9, TRBJ2-3)
CASSPGSTDTQYF

SEQ ID NO: 619089 - protein, 11 aa, Homo sapiens
  CDR3 for alpha chain variable domain of TCR clone 309545 (TRAV3, TRAJ20)
CAVRPSVTTTS

SEQ ID NO: 619090 - protein, 15 aa, Homo sapiens
  CDR3 for beta chain variable domain of TCR clone 309545 (TRBV19, TRBJ2-6)
CASVRRDSGANDLTF

SEQ ID NO: 619091 - protein, 14 aa, Homo sapiens
  CDR3 for alpha chain variable domain of TCR clone 309546 (TRAV17, TRAJ45)
CATASGGGADGLTF

SEQ ID NO: 619092 - protein, 15 aa, Homo sapiens
  CDR3 for beta chain variable domain of TCR clone 309546 (TRBV11-2, TRBJ2-1)
CASSRNRGLRYEQFF

SEQ ID NO: 619093 - protein, 12 aa, Homo sapiens
  CDR3 for alpha chain variable domain of TCR clone 309547 (TRAV3, TRAJ31)
CAAQMANARLMF

SEQ ID NO: 619094 - protein, 16 aa, Homo sapiens
  CDR3 for beta chain variable domain of TCR clone 309547 (TRBV4-2, TRBJ1-1)
CASSPSPGRAAPEAFF

SEQ ID NO: 619095 - protein, 10 aa, Homo sapiens
  CDR3 for alpha chain variable domain of TCR clone 309548 (TRAV25, TRAJ21)
CLYNFNKFYF

SEQ ID NO: 619096 - protein, 18 aa, Homo sapiens
  CDR3 for beta chain variable domain of TCR clone 309548 (TRBV12-4, TRBJ2-2)
CASRPFGAGALNTGELFF

SEQ ID NO: 619097 - protein, 12 aa, Homo sapiens
  CDR3 for alpha chain variable domain of TCR clone 309549 (TRAV20, TRAJ56)
CAVTGANSKLTF

SEQ ID NO: 619098 - protein, 17 aa, Homo sapiens
  CDR3 for beta chain variable domain of TCR clone 309549 (TRBV6-3, TRBJ2-2)
CANSYRGRDFYTGELFF

SEQ ID NO: 619099 - protein, 14 aa, Homo sapiens
  CDR3 for alpha chain variable domain of TCR clone 309550 (TRAV8-3, TRAJ27)
CAGGRNTNAGKSTF

SEQ ID NO: 619100 - protein, 16 aa, Homo sapiens
  CDR3 for beta chain variable domain of TCR clone 309550 (TRBV7-6, TRBJ1-1)
CASSSAPWYRNTEAFF

SEQ ID NO: 619101 - protein, 14 aa, Homo sapiens
  CDR3 for alpha chain variable domain of TCR clone 309551 (TRAV3, TRAJ33)
CAVRDMNSNYQLIW

SEQ ID NO: 619102 - protein, 19 aa, Homo sapiens
  CDR3 for beta chain variable domain of TCR clone 309551 (TRBV7-3, TRBJ1-2)
CASSFPQGNDGELWLHLRF

SEQ ID NO: 619103 - protein, 18 aa, Homo sapiens
  CDR3 for alpha chain variable domain of TCR clone 309552 (TRAV21, TRAJ52)
CAVRPSPAGGTSYGKLTF

SEQ ID NO: 619104 - protein, 15 aa, Homo sapiens
  CDR3 for beta chain variable domain of TCR clone 309552 (TRBV7-9, TRBJ2-7)
CASSISGLAVYEQYV

SEQ ID NO: 619105 - protein, 14 aa, Homo sapiens
  CDR3 for alpha chain variable domain of TCR clone 309553 (TRAV2, TRAJ37)
CAVDFTSNTGKLIF

SEQ ID NO: 619106 - protein, 13 aa, Homo sapiens
  CDR3 for beta chain variable domain of TCR clone 309553 (TRBV20-1, TRBJ1-4)
CSAILINGEKLFF

SEQ ID NO: 619107 - protein, 21 aa, Homo sapiens
  CDR3 for alpha chain variable domain of TCR clone 309554 (TRAV8-3, TRAJ6)
CAVGGEEATYLHLEEEPALLF

SEQ ID NO: 619108 - protein, 14 aa, Homo sapiens
  CDR3 for beta chain variable domain of TCR clone 309554 (TRBV5-1, TRBJ2-7)
CASSSGESLYEQYF

SEQ ID NO: 619109 - protein, 11 aa, Homo sapiens
  CDR3 for alpha chain variable domain of TCR clone 309555 (TRAV12-1, TRAJ8)
CVVTGFQKLVF

SEQ ID NO: 619110 - protein, 12 aa, Homo sapiens
  CDR3 for beta chain variable domain of TCR clone 309555 (TRBV11-2, TRBJ2-1)
CASSPGNNEQFF

SEQ ID NO: 619111 - protein, 13 aa, Homo sapiens
  CDR3 for alpha chain variable domain of TCR clone 309556 (TRAV12-2, TRAJ24)
CAVSTDSWGKLQF

SEQ ID NO: 619112 - protein, 12 aa, Homo sapiens
  CDR3 for beta chain variable domain of TCR clone 309556 (TRBV7-6, TRBJ2-7)
CASSLAYSEQYF

SEQ ID NO: 619113 - protein, 22 aa, Homo sapiens
  CDR3 for alpha chain variable domain of TCR clone 309557 (TRAV39, TRAJ49)
PCMTSLPHTSVPWTNTGNQFYF

SEQ ID NO: 619114 - protein, 17 aa, Homo sapiens
  CDR3 for beta chain variable domain of TCR clone 309557 (TRBV20-1, TRBJ2-1)
CSARDRRRASSYNEQFF

SEQ ID NO: 619115 - protein, 16 aa, Homo sapiens
  CDR3 for alpha chain variable domain of TCR clone 309558 (TRAV30, TRAJ24)
CGTEIVDADSWGKFQF

SEQ ID NO: 619116 - protein, 15 aa, Homo sapiens
  CDR3 for beta chain variable domain of TCR clone 309558 (TRBV7-9, TRBJ1-4)
CASSAQTGGNEKLFF

SEQ ID NO: 619117 - protein, 18 aa, Homo sapiens
  CDR3 for alpha chain variable domain of TCR clone 309559 (TRAV13-1, TRAJ52)
CAAKNPNAGGTSYGKLTF

SEQ ID NO: 619118 - protein, 15 aa, Homo sapiens
  CDR3 for beta chain variable domain of TCR clone 309559 (TRBV11-2, TRBJ2-2)
CASRGLAANTGELFF

SEQ ID NO: 619119 - protein, 13 aa, Homo sapiens
  CDR3 for alpha chain variable domain of TCR clone 309560 (TRAV21, TRAJ57)
CAVIEGGAEKLVF

SEQ ID NO: 619120 - protein, 15 aa, Homo sapiens
  CDR3 for beta chain variable domain of TCR clone 309560 (TRBV10-3, TRBJ2-5)
CTISEFGRGQETQYF

SEQ ID NO: 619121 - protein, 14 aa, Homo sapiens
  CDR3 for alpha chain variable domain of TCR clone 309561 (TRAV12-2, TRAJ13)
CAVKKTGGYQKVTF

SEQ ID NO: 619122 - protein, 17 aa, Homo sapiens
  CDR3 for beta chain variable domain of TCR clone 309561 (TRBV25-1, TRBJ1-6)
CASSEYIGERGNSPLHF

SEQ ID NO: 619123 - protein, 14 aa, Homo sapiens
  CDR3 for alpha chain variable domain of TCR clone 309562 (TRAV5, TRAJ21)
CAESILDNFNKFYF

SEQ ID NO: 619124 - protein, 14 aa, Homo sapiens
  CDR3 for beta chain variable domain of TCR clone 309562 (TRBV19, TRBJ2-1)
CASPTFVLSGEQFF

SEQ ID NO: 619125 - protein, 18 aa, Homo sapiens
  CDR3 for alpha chain variable domain of TCR clone 309563 (TRAV9-2, TRAJ52)
CALSRHNAGGTSYGKLTF

SEQ ID NO: 619126 - protein, 16 aa, Homo sapiens
  CDR3 for beta chain variable domain of TCR clone 309563 (TRBV19, TRBJ2-1)
CASSKAGPGSYNEQFF

SEQ ID NO: 619127 - protein, 13 aa, Homo sapiens
  CDR3 for alpha chain variable domain of TCR clone 309564 (TRAV2, TRAJ40)
CAVVTSGTYKYIF

SEQ ID NO: 619128 - protein, 16 aa, Homo sapiens
  CDR3 for beta chain variable domain of TCR clone 309564 (TRBV7-9, TRBJ1-3)
CASSLGAGSSGNTIDF

SEQ ID NO: 619129 - protein, 13 aa, Homo sapiens
  CDR3 for alpha chain variable domain of TCR clone 309565 (TRAV8-2, TRAJ5)
CVVSGAGRRALTF

SEQ ID NO: 619130 - protein, 16 aa, Homo sapiens
  CDR3 for beta chain variable domain of TCR clone 309565 (TRBV11-2, TRBJ2-1)
CASARGSYSHHNEQFF

SEQ ID NO: 619131 - protein, 13 aa, Homo sapiens
  CDR3 for alpha chain variable domain of TCR clone 309566 (TRAV2, TRAJ40)
CAVVASGTYKYIF

SEQ ID NO: 619132 - protein, 15 aa, Homo sapiens
  CDR3 for beta chain variable domain of TCR clone 309566 (TRBV18, TRBJ1-1)
CASSPRQGENTEAFF

SEQ ID NO: 619133 - protein, 12 aa, Homo sapiens
  CDR3 for alpha chain variable domain of TCR clone 309567 (TRAV12-3, TRAJ17)
CAMTRTGNKLTF

SEQ ID NO: 619134 - protein, 15 aa, Homo sapiens
  CDR3 for beta chain variable domain of TCR clone 309567 (TRBV12-4, TRBJ2-5)
CASSPPTGLQETQYF

SEQ ID NO: 619135 - protein, 13 aa, Homo sapiens
  CDR3 for alpha chain variable domain of TCR clone 309568 (TRAV25, TRAJ26)
CAGMDNYSQNFVF

SEQ ID NO: 619136 - protein, 15 aa, Homo sapiens
  CDR3 for beta chain variable domain of TCR clone 309568 (TRBV10-3, TRBJ2-1)
CAIRNGTSGHDEQFF

SEQ ID NO: 619137 - protein, 14 aa, Homo sapiens
  CDR3 for alpha chain variable domain of TCR clone 309569 (TRAV9-2, TRAJ39)
CALYIYNAGNMITF

SEQ ID NO: 619138 - protein, 13 aa, Homo sapiens
  CDR3 for beta chain variable domain of TCR clone 309569 (TRBV4-2, TRBJ1-1)
CASSQAGNTEAFF

SEQ ID NO: 619139 - protein, 14 aa, Homo sapiens
  CDR3 for alpha chain variable domain of TCR clone 309570 (TRAV12-2, TRAJ40)
CAVKVPSGTYKYIF

SEQ ID NO: 619140 - protein, 15 aa, Homo sapiens
  CDR3 for beta chain variable domain of TCR clone 309570 (TRBV11-2, TRBJ2-2)
CASSSDRVNAGELFF

SEQ ID NO: 619141 - protein, 11 aa, Homo sapiens
  CDR3 for alpha chain variable domain of TCR clone 309571 (TRAV17, TRAJ31)
CATSNNARLMF

SEQ ID NO: 619142 - protein, 15 aa, Homo sapiens
  CDR3 for beta chain variable domain of TCR clone 309571 (TRBV4-1, TRBJ2-2)
CASSQLGAAKGELFF

SEQ ID NO: 619143 - protein, 15 aa, Homo sapiens
  CDR3 for alpha chain variable domain of TCR clone 309572 (TRAV8-1, TRAJ6)
CAVNVGAGGSYIPTF

SEQ ID NO: 619144 - protein, 14 aa, Homo sapiens
  CDR3 for beta chain variable domain of TCR clone 309572 (TRBV25-1, TRBJ1-6)
CASSLSADISPLHF

SEQ ID NO: 619145 - protein, 14 aa, Homo sapiens
  CDR3 for alpha chain variable domain of TCR clone 309573 (TRAV26-1, TRAJ34)
CIVRESYNTDKLIF

SEQ ID NO: 619146 - protein, 16 aa, Homo sapiens
  CDR3 for beta chain variable domain of TCR clone 309573 (TRBV13, TRBJ2-2)
CASSPRTGEHTGELFF

SEQ ID NO: 619147 - protein, 12 aa, Homo sapiens
  CDR3 for alpha chain variable domain of TCR clone 309574 (TRAV21, TRAJ33)
CAQMDSNYQLIW

SEQ ID NO: 619148 - protein, 15 aa, Homo sapiens
  CDR3 for beta chain variable domain of TCR clone 309574 (TRBV9, TRBJ1-6)
CASSVAGTGDSPLHF

SEQ ID NO: 619149 - protein, 23 aa, Homo sapiens
  CDR3 for alpha chain variable domain of TCR clone 309575 (TRAV12-2, TRAJ36)
SLLIRDSQPSDSATLERANNLFF

SEQ ID NO: 619150 - protein, 16 aa, Homo sapiens
  CDR3 for beta chain variable domain of TCR clone 309575 (TRBV7-8, TRBJ2-4)
CASSAERTLAKNIQYF

SEQ ID NO: 619151 - protein, 17 aa, Homo sapiens
  CDR3 for alpha chain variable domain of TCR clone 309576 (TRAV3, TRAJ6)
CAVRDGPRAGVSYIPTF

SEQ ID NO: 619152 - protein, 13 aa, Homo sapiens
  CDR3 for beta chain variable domain of TCR clone 309576 (TRBV20-1, TRBJ1-6)
CSAPLGVGSPLHF

SEQ ID NO: 619153 - protein, 14 aa, Homo sapiens
  CDR3 for alpha chain variable domain of TCR clone 309577 (TRAV1-2, TRAJ16)
CAVNPFSDGQKLLF

SEQ ID NO: 619154 - protein, 14 aa, Homo sapiens
  CDR3 for beta chain variable domain of TCR clone 309577 (TRBV25-1, TRBJ1-1)
CASTHLGGNTEAFF

SEQ ID NO: 619155 - protein, 14 aa, Homo sapiens
  CDR3 for alpha chain variable domain of TCR clone 309578 (TRAV17, TRAJ48)
CATEGNFGNEKLTF

SEQ ID NO: 619156 - protein, 14 aa, Homo sapiens
  CDR3 for beta chain variable domain of TCR clone 309578 (TRBV4-1, TRBJ2-5)
CASSQDLALETQYF

SEQ ID NO: 619157 - protein, 16 aa, Homo sapiens
  CDR3 for alpha chain variable domain of TCR clone 309579 (TRAV8-3, TRAJ8)
CAVPRDGNTGFQILVF

SEQ ID NO: 619158 - protein, 15 aa, Homo sapiens
  CDR3 for beta chain variable domain of TCR clone 309579 (TRBV6-1, TRBJ2-6)
CASSSRPSGANVLTF

SEQ ID NO: 619159 - protein, 18 aa, Homo sapiens
  CDR3 for alpha chain variable domain of TCR clone 309580 (TRAV13-1, TRAJ52)
CAAKNPNAGGTSYGKLTF

SEQ ID NO: 619160 - protein, 15 aa, Homo sapiens
  CDR3 for beta chain variable domain of TCR clone 309580 (TRBV5-1, TRBJ2-7)
CASSLNGGPAREQYF

SEQ ID NO: 619161 - protein, 17 aa, Homo sapiens
  CDR3 for alpha chain variable domain of TCR clone 309581 (TRAV3, TRAJ38)
CAVRDCLNAGNNRKLIW

SEQ ID NO: 619162 - protein, 16 aa, Homo sapiens
  CDR3 for beta chain variable domain of TCR clone 309581 (TRBV20-1, TRBJ1-4)
CSARPYRGELNERLFF

SEQ ID NO: 619163 - protein, 14 aa, Homo sapiens
  CDR3 for alpha chain variable domain of TCR clone 309582 (TRAV29/DV5, TRAJ37)
CAASGSGNTGKLIF

SEQ ID NO: 619164 - protein, 17 aa, Homo sapiens
  CDR3 for beta chain variable domain of TCR clone 309582 (TRBV4-1, TRBJ2-7)
CASSPCLTSGGVVEQYF

SEQ ID NO: 619165 - protein, 14 aa, Homo sapiens
  CDR3 for alpha chain variable domain of TCR clone 309583 (TRAV1-2, TRAJ8)
CAVREDTGFQNLVF

SEQ ID NO: 619166 - protein, 16 aa, Homo sapiens
  CDR3 for beta chain variable domain of TCR clone 309583 (TRBV19, TRBJ2-1)
CASSKAGPSSYNEQFF

SEQ ID NO: 619167 - protein, 12 aa, Homo sapiens
  CDR3 for alpha chain variable domain of TCR clone 309584 (TRAV35, TRAJ49)
CAGWNTGNQYYF

SEQ ID NO: 619168 - protein, 16 aa, Homo sapiens
  CDR3 for beta chain variable domain of TCR clone 309584 (TRBV5-1, TRBJ2-2)
CASSLWDTTNTGELFF

SEQ ID NO: 619169 - protein, 13 aa, Homo sapiens
  CDR3 for alpha chain variable domain of TCR clone 309585 (TRAV1-2, TRAJ9)
CAALNTGGFKTTF

SEQ ID NO: 619170 - protein, 13 aa, Homo sapiens
  CDR3 for beta chain variable domain of TCR clone 309585 (TRBV19, TRBJ1-2)
CASSVPGQDGYAF

SEQ ID NO: 619171 - protein, 13 aa, Homo sapiens
  CDR3 for alpha chain variable domain of TCR clone 309586 (TRAV16, TRAJ48)
CSPLNFGNEKLTF

SEQ ID NO: 619172 - protein, 13 aa, Homo sapiens
  CDR3 for beta chain variable domain of TCR clone 309586 (TRBV29-1, TRBJ2-2)
CSTTGVNTGELFF

SEQ ID NO: 619173 - protein, 11 aa, Homo sapiens
  CDR3 for alpha chain variable domain of TCR clone 309587 (TRAV12-3, TRAJ49)
CAANTGNQFYV

SEQ ID NO: 619174 - protein, 15 aa, Homo sapiens
  CDR3 for beta chain variable domain of TCR clone 309587 (TRBV11-2, TRBJ2-1)
CASSLGTSGLNEQFF

SEQ ID NO: 619175 - protein, 16 aa, Homo sapiens
  CDR3 for alpha chain variable domain of TCR clone 309588 (TRAV17, TRAJ28)
CATDEYSGAGSYQLTL

SEQ ID NO: 619176 - protein, 19 aa, Homo sapiens
  CDR3 for beta chain variable domain of TCR clone 309588 (TRBV7-9, TRBJ2-1)
CASSHNRGALLRSYNEQFF

SEQ ID NO: 619177 - protein, 17 aa, Homo sapiens
  CDR3 for alpha chain variable domain of TCR clone 309589 (TRAV23/DV6, TRAJ28)
CAALLAYSGAGSYQLTF

SEQ ID NO: 619178 - protein, 15 aa, Homo sapiens
  CDR3 for beta chain variable domain of TCR clone 309589 (TRBV7-2, TRBJ2-1)
CASSVVAGRYNEQFF

SEQ ID NO: 619179 - protein, 13 aa, Homo sapiens
  CDR3 for alpha chain variable domain of TCR clone 309590 (TRAV12-2, TRAJ20)
CAVYPSNDYKLSF

SEQ ID NO: 619180 - protein, 15 aa, Homo sapiens
  CDR3 for beta chain variable domain of TCR clone 309590 (TRBV27, TRBJ2-5)
CDSSLYPRGGETQYF

SEQ ID NO: 619181 - protein, 13 aa, Homo sapiens
  CDR3 for alpha chain variable domain of TCR clone 309591 (TRAV21, TRAJ27)
CAARPGNAGNSTF

SEQ ID NO: 619182 - protein, 14 aa, Homo sapiens
  CDR3 for beta chain variable domain of TCR clone 309591 (TRBV7-6, TRBJ2-3)
CASSLETVTDTQYF

SEQ ID NO: 619183 - protein, 14 aa, Homo sapiens
  CDR3 for alpha chain variable domain of TCR clone 309592 (TRAV2, TRAJ29)
CAVEDRVGNTPLVF

SEQ ID NO: 619184 - protein, 16 aa, Homo sapiens
  CDR3 for beta chain variable domain of TCR clone 309592 (TRBV7-2, TRBJ1-3)
CASSRLEASSGNTIYF

SEQ ID NO: 619185 - protein, 15 aa, Homo sapiens
  CDR3 for alpha chain variable domain of TCR clone 309593 (TRAV3, TRAJ22)
CAVRDRGGSARQLTF

SEQ ID NO: 619186 - protein, 18 aa, Homo sapiens
  CDR3 for beta chain variable domain of TCR clone 309593 (TRBV28, TRBJ2-1)
CASNSTSGRANSYNEQFF

SEQ ID NO: 619187 - protein, 13 aa, Homo sapiens
  CDR3 for alpha chain variable domain of TCR clone 309594 (TRAV3, TRAJ41)
CAVSSNSGYALNF

SEQ ID NO: 619188 - protein, 14 aa, Homo sapiens
  CDR3 for beta chain variable domain of TCR clone 309594 (TRBV7-2, TRBJ2-7)
CASSPKTRFYEQYF

SEQ ID NO: 619189 - protein, 17 aa, Homo sapiens
  CDR3 for alpha chain variable domain of TCR clone 309595 (TRAV35, TRAJ28)
CAGLQVYSGAGSYQLTF

SEQ ID NO: 619190 - protein, 15 aa, Homo sapiens
  CDR3 for beta chain variable domain of TCR clone 309595 (TRBV2, TRBJ1-2)
CASSEVGGANYGYTF

SEQ ID NO: 619191 - protein, 13 aa, Homo sapiens
  CDR3 for alpha chain variable domain of TCR clone 309596 (TRAV8-3, TRAJ48)
CAVVPFGNEKLTC

SEQ ID NO: 619192 - protein, 15 aa, Homo sapiens
  CDR3 for beta chain variable domain of TCR clone 309596 (TRBV11-2, TRBJ2-1)
CASSSPSARYNEQLF

SEQ ID NO: 619193 - protein, 15 aa, Homo sapiens
  CDR3 for alpha chain variable domain of TCR clone 309597 (TRAV21, TRAJ32)
CAAAPYGGATNKLIF

SEQ ID NO: 619194 - protein, 17 aa, Homo sapiens
  CDR3 for beta chain variable domain of TCR clone 309597 (TRBV18, TRBJ2-3)
CASSPFGDGGFTGTQYF

SEQ ID NO: 619195 - protein, 12 aa, Homo sapiens
  CDR3 for alpha chain variable domain of TCR clone 309598 (TRAV27, TRAJ34)
CAGSKNTDKLIF

SEQ ID NO: 619196 - protein, 13 aa, Homo sapiens
  CDR3 for beta chain variable domain of TCR clone 309598 (TRBV4-1, TRBJ2-1)
CASSQEVQYEQFF

SEQ ID NO: 619197 - protein, 16 aa, Homo sapiens
  CDR3 for alpha chain variable domain of TCR clone 309599 (TRAV27, TRAJ56)
CAGVSRKDGANSKLTF

SEQ ID NO: 619198 - protein, 14 aa, Homo sapiens
  CDR3 for beta chain variable domain of TCR clone 309599 (TRBV5-1, TRBJ2-7)
CASSRGESLYEQYF

SEQ ID NO: 619199 - protein, 13 aa, Homo sapiens
  CDR3 for alpha chain variable domain of TCR clone 309600 (TRAV12-3, TRAJ13)
CAMTSGGYQKVTF

SEQ ID NO: 619200 - protein, 13 aa, Homo sapiens
  CDR3 for beta chain variable domain of TCR clone 309600 (TRBV20-1, TRBJ2-2)
CSALSGGAEELFF

SEQ ID NO: 619201 - protein, 19 aa, Homo sapiens
  CDR3 for alpha chain variable domain of TCR clone 309601 (TRAV2, TRAJ8)
CAVEHRLSETCIWNLHPTS

SEQ ID NO: 619202 - protein, 15 aa, Homo sapiens
  CDR3 for beta chain variable domain of TCR clone 309601 (TRBV15, TRBJ2-7)
CATSSRQESSYEQYF

SEQ ID NO: 619203 - protein, 12 aa, Homo sapiens
  CDR3 for alpha chain variable domain of TCR clone 309602 (TRAV17, TRAJ4)
CATEGGYNKLIF

SEQ ID NO: 619204 - protein, 14 aa, Homo sapiens
  CDR3 for beta chain variable domain of TCR clone 309602 (TRBV25-1, TRBJ2-5)
CASSVGGVQETQYF

SEQ ID NO: 619205 - protein, 14 aa, Homo sapiens
  CDR3 for alpha chain variable domain of TCR clone 309603 (TRAV19, TRAJ45)
CALKGGGGADGITF

SEQ ID NO: 619206 - protein, 14 aa, Homo sapiens
  CDR3 for beta chain variable domain of TCR clone 309603 (TRBV4-2, TRBJ2-3)
CASSQERGTDTQYF

SEQ ID NO: 619207 - protein, 14 aa, Homo sapiens
  CDR3 for alpha chain variable domain of TCR clone 309604 (TRAV27, TRAJ22)
CAGLPSGSARQLTF

SEQ ID NO: 619208 - protein, 15 aa, Homo sapiens
  CDR3 for beta chain variable domain of TCR clone 309604 (TRBV20-1, TRBJ2-7)
CSARVPAAYFYEQYF

SEQ ID NO: 619209 - protein, 18 aa, Homo sapiens
  CDR3 for alpha chain variable domain of TCR clone 309605 (TRAV9-2, TRAJ13)
CQTQRCTEPSGRYQKVTF

SEQ ID NO: 619210 - protein, 12 aa, Homo sapiens
  CDR3 for beta chain variable domain of TCR clone 309605 (TRBV5-7, TRBJ2-5)
CQQIERGGTQYF

SEQ ID NO: 619211 - protein, 15 aa, Homo sapiens
  CDR3 for alpha chain variable domain of TCR clone 309606 (TRAV3, TRAJ22)
CAVRDRGGSARQLNF

SEQ ID NO: 619212 - protein, 15 aa, Homo sapiens
  CDR3 for beta chain variable domain of TCR clone 309606 (TRBV10-3, TRBJ2-3)
CAISLTSGGTDTQYF

SEQ ID NO: 619213 - protein, 11 aa, Homo sapiens
  CDR3 for alpha chain variable domain of TCR clone 309607 (TRAV25, TRAJ47)
CAGLYGSKLVF

SEQ ID NO: 619214 - protein, 15 aa, Homo sapiens
  CDR3 for beta chain variable domain of TCR clone 309607 (TRBV5-1, TRBJ2-5)
CAGSFKGGDQETQYF

SEQ ID NO: 619215 - protein, 17 aa, Homo sapiens
  CDR3 for alpha chain variable domain of TCR clone 309608 (TRAV3, TRAJ6)
CAVRDGPRAGGSYLPTI

SEQ ID NO: 619216 - protein, 13 aa, Homo sapiens
  CDR3 for beta chain variable domain of TCR clone 309608 (TRBV12-5, TRBJ2-3)
CASGDRQSDTQYF

SEQ ID NO: 619217 - protein, 12 aa, Homo sapiens
  CDR3 for alpha chain variable domain of TCR clone 309609 (TRAV17, TRAJ57)
CATDGGSEKLVF

SEQ ID NO: 619218 - protein, 12 aa, Homo sapiens
  CDR3 for beta chain variable domain of TCR clone 309609 (TRBV12-4, TRBJ1-2)
CASSFIWLRLRF

SEQ ID NO: 619219 - protein, 23 aa, Homo sapiens
  CDR3 for alpha chain variable domain of TCR clone 309610 (TRAV26-1, TRAJ38)
CIADNAGNNHIQNPDPAAYQLRD

SEQ ID NO: 619220 - protein, 14 aa, Homo sapiens
  CDR3 for beta chain variable domain of TCR clone 309610 (TRBV4-2, TRBJ1-5)
CASSQDSINQPQHF

SEQ ID NO: 619221 - protein, 14 aa, Homo sapiens
  CDR3 for alpha chain variable domain of TCR clone 309611 (TRAV26-1, TRAJ49)
CIVRLTNTGNEFYF

SEQ ID NO: 619222 - protein, 13 aa, Homo sapiens
  CDR3 for beta chain variable domain of TCR clone 309611 (TRBV4-1, TRBJ2-7)
CASSQGQAYEQYF

SEQ ID NO: 619223 - protein, 16 aa, Homo sapiens
  CDR3 for alpha chain variable domain of TCR clone 309612 (TRAV26-1, TRAJ45)
CIVEKYSGGGADGLTF

SEQ ID NO: 619224 - protein, 13 aa, Homo sapiens
  CDR3 for beta chain variable domain of TCR clone 309612 (TRBV15, TRBJ2-7)
QQRPIQQAYEQYF

SEQ ID NO: 619225 - protein, 15 aa, Homo sapiens
  CDR3 for alpha chain variable domain of TCR clone 309613 (TRAV1-2, TRAJ30)
CAVRPHGNRDDKIIF

SEQ ID NO: 619226 - protein, 15 aa, Homo sapiens
  CDR3 for beta chain variable domain of TCR clone 309613 (TRBV27, TRBJ2-1)
CASSNGGGSSNEQFF

SEQ ID NO: 619227 - protein, 14 aa, Homo sapiens
  CDR3 for alpha chain variable domain of TCR clone 309614 (TRAV1-2, TRAJ8)
CAVREDTGFQKLVF

SEQ ID NO: 619228 - protein, 13 aa, Homo sapiens
  CDR3 for beta chain variable domain of TCR clone 309614 (TRBV2, TRBJ1-1)
CARNPTGGFHAFV

SEQ ID NO: 619229 - protein, 13 aa, Homo sapiens
  CDR3 for alpha chain variable domain of TCR clone 309615 (TRAV21, TRAJ45)
CAVMGGGADGLAF

SEQ ID NO: 619230 - protein, 14 aa, Homo sapiens
  CDR3 for beta chain variable domain of TCR clone 309615 (TRBV4-3, TRBJ1-4)
CASSPLQRNEKLFF

SEQ ID NO: 619231 - protein, 14 aa, Homo sapiens
  CDR3 for alpha chain variable domain of TCR clone 309616 (TRAV13-1, TRAJ35)
CAASKGGSGNVLHC

SEQ ID NO: 619232 - protein, 13 aa, Homo sapiens
  CDR3 for beta chain variable domain of TCR clone 309616 (TRBV7-3, TRBJ1-1)
CASSQDWGAEALF

SEQ ID NO: 619233 - protein, 11 aa, Homo sapiens
  CDR3 for alpha chain variable domain of TCR clone 309617 (TRAV3, TRAJ21)
CAVGNFNKFYF

SEQ ID NO: 619234 - protein, 16 aa, Homo sapiens
  CDR3 for beta chain variable domain of TCR clone 309617 (TRBV7-6, TRBJ2-1)
CSSSAPGPSSYNEQFF

SEQ ID NO: 619235 - protein, 15 aa, Homo sapiens
  CDR3 for alpha chain variable domain of TCR clone 309618 (TRAV8-4, TRAJ10)
CAVSDGTGGGNKITF

SEQ ID NO: 619236 - protein, 13 aa, Homo sapiens
  CDR3 for beta chain variable domain of TCR clone 309618 (TRBV28, TRBJ1-3)
CASSFLGSGTIYF

SEQ ID NO: 619237 - protein, 11 aa, Homo sapiens
  CDR3 for alpha chain variable domain of TCR clone 309619 (TRAV1-2, TRAJ20)
CAVSNDYKLSF

SEQ ID NO: 619238 - protein, 16 aa, Homo sapiens
  CDR3 for beta chain variable domain of TCR clone 309619 (TRBV29-1, TRBJ2-6)
CSVEDITYSGDNVLTF

SEQ ID NO: 619239 - protein, 12 aa, Homo sapiens
  CDR3 for alpha chain variable domain of TCR clone 309620 (TRAV16, TRAJ10)
CSRTGEGNKLTF

SEQ ID NO: 619240 - protein, 13 aa, Homo sapiens
  CDR3 for beta chain variable domain of TCR clone 309620 (TRBV7-3, TRBJ1-1)
CASSQDWGAEAFF

SEQ ID NO: 619241 - protein, 11 aa, Homo sapiens
  CDR3 for alpha chain variable domain of TCR clone 309621 (TRAV2, TRAJ13)
CASGGYQKVTF

SEQ ID NO: 619242 - protein, 17 aa, Homo sapiens
  CDR3 for beta chain variable domain of TCR clone 309621 (TRBV11-2, TRBJ2-1)
CASSLYPPGVEYDEQFF

SEQ ID NO: 619243 - protein, 13 aa, Homo sapiens
  CDR3 for alpha chain variable domain of TCR clone 309622 (TRAV21, TRAJ20)
CAVGLRVDYKLSF

SEQ ID NO: 619244 - protein, 13 aa, Homo sapiens
  CDR3 for beta chain variable domain of TCR clone 309622 (TRBV6-1, TRBJ1-1)
CASSRQGNTEAFI

SEQ ID NO: 619245 - protein, 14 aa, Homo sapiens
  CDR3 for alpha chain variable domain of TCR clone 309623 (TRAV17, TRAJ54)
CATDANQGAQKLVF

SEQ ID NO: 619246 - protein, 11 aa, Homo sapiens
  CDR3 for beta chain variable domain of TCR clone 309623 (TRBV25-1, TRBJ1-1)
PTWGGNTEAFF

SEQ ID NO: 619247 - protein, 19 aa, Homo sapiens
  CDR3 for alpha chain variable domain of TCR clone 309624 (TRAV27, TRAJ17)
ASTSVQEYDDQAAGNKLTF

SEQ ID NO: 619248 - protein, 13 aa, Homo sapiens
  CDR3 for beta chain variable domain of TCR clone 309624 (TRBV18, TRBJ2-7)
CASQSGGGYEQYF

SEQ ID NO: 619249 - protein, 14 aa, Homo sapiens
  CDR3 for alpha chain variable domain of TCR clone 309625 (TRAV9-2, TRAJ39)
CALYIYNAGNMLTF

SEQ ID NO: 619250 - protein, 13 aa, Homo sapiens
  CDR3 for beta chain variable domain of TCR clone 309625 (TRBV4-2, TRBJ1-1)
CPSSQAGNTEAFF

SEQ ID NO: 619251 - protein, 12 aa, Homo sapiens
  CDR3 for alpha chain variable domain of TCR clone 309626 (TRAV13-1, TRAJ21)
RAAKEGFNKFYF

SEQ ID NO: 619252 - protein, 13 aa, Homo sapiens
  CDR3 for beta chain variable domain of TCR clone 309626 (TRBV19, TRBJ1-2)
CASSVPGQDGYTF

SEQ ID NO: 619253 - protein, 14 aa, Homo sapiens
  CDR3 for alpha chain variable domain of TCR clone 309627 (TRAV17, TRAJ31)
CATVLRNNNARLMF

SEQ ID NO: 619254 - protein, 14 aa, Homo sapiens
  CDR3 for beta chain variable domain of TCR clone 309627 (TRBV12-4, TRBJ2-5)
CASILWQKQETQYF

SEQ ID NO: 619255 - protein, 15 aa, Homo sapiens
  CDR3 for alpha chain variable domain of TCR clone 309628 (TRAV13-1, TRAJ50)
CAAKGSETSYDKVLF

SEQ ID NO: 619256 - protein, 13 aa, Homo sapiens
  CDR3 for beta chain variable domain of TCR clone 309628 (TRBV20-1, TRBJ2-3)
CSARAGGRDTQYF

SEQ ID NO: 619257 - protein, 13 aa, Homo sapiens
  CDR3 for alpha chain variable domain of TCR clone 309629 (TRAV29/DV5, TRAJ31)
CAASRNNHARLMF

SEQ ID NO: 619258 - protein, 16 aa, Homo sapiens
  CDR3 for beta chain variable domain of TCR clone 309629 (TRBV20-1, TRBJ1-4)
CSAPGQGLLTNEKLFF

SEQ ID NO: 619259 - protein, 14 aa, Homo sapiens
  CDR3 for alpha chain variable domain of TCR clone 309630 (TRAV29/DV5, TRAJ28)
CAATEGAVSYQLTF

SEQ ID NO: 619260 - protein, 15 aa, Homo sapiens
  CDR3 for beta chain variable domain of TCR clone 309630 (TRBV7-8, TRBJ2-1)
CASSLHGGPYNEQFF

SEQ ID NO: 619261 - protein, 15 aa, Homo sapiens
  CDR3 for alpha chain variable domain of TCR clone 309631 (TRAV26-1, TRAJ42)
CIVRVKGGSQGNLIF

SEQ ID NO: 619262 - protein, 14 aa, Homo sapiens
  CDR3 for beta chain variable domain of TCR clone 309631 (TRBV19, TRBJ2-2)
CATTGHANTRELFF

SEQ ID NO: 619263 - protein, 23 aa, Homo sapiens
  CDR3 for alpha chain variable domain of TCR clone 309632 (TRAV8-4, TRAJ38)
CARLNAGNNHIQNPDPAGYQLTD

SEQ ID NO: 619264 - protein, 14 aa, Homo sapiens
  CDR3 for beta chain variable domain of TCR clone 309632 (TRBV7-8, TRBJ2-3)
CASSLEAGTDTQYF

SEQ ID NO: 619265 - protein, 12 aa, Homo sapiens
  CDR3 for alpha chain variable domain of TCR clone 309633 (TRAV21, TRAJ49)
CAVTNTGNQFYF

SEQ ID NO: 619266 - protein, 14 aa, Homo sapiens
  CDR3 for beta chain variable domain of TCR clone 309633 (TRBV7-2, TRBJ2-7)
CASRSQGAAYEQYF

SEQ ID NO: 619267 - protein, 14 aa, Homo sapiens
  CDR3 for alpha chain variable domain of TCR clone 309634 (TRAV1-2, TRAJ16)
CAVNRFSDGQKLLF

SEQ ID NO: 619268 - protein, 15 aa, Homo sapiens
  CDR3 for beta chain variable domain of TCR clone 309634 (TRBV7-2, TRBJ2-2)
CASSTRTGCTGELFF

SEQ ID NO: 619269 - protein, 14 aa, Homo sapiens
  CDR3 for alpha chain variable domain of TCR clone 309635 (TRAV8-3, TRAJ4)
CAVGAAGGYNKLIF

SEQ ID NO: 619270 - protein, 13 aa, Homo sapiens
  CDR3 for beta chain variable domain of TCR clone 309635 (TRBV5-1, TRBJ1-2)
CASSFQDGYGYTF

SEQ ID NO: 619271 - protein, 14 aa, Homo sapiens
  CDR3 for alpha chain variable domain of TCR clone 309636 (TRAV12-2, TRAJ13)
CAGKKTGGYQKVTV

SEQ ID NO: 619272 - protein, 15 aa, Homo sapiens
  CDR3 for beta chain variable domain of TCR clone 309636 (TRBV27, TRBJ2-1)
CASSNGGGSSNEQFL

SEQ ID NO: 619273 - protein, 15 aa, Homo sapiens
  CDR3 for alpha chain variable domain of TCR clone 309637 (TRAV8-4, TRAJ37)
CAVSRGSGNTGKLIF

SEQ ID NO: 619274 - protein, 15 aa, Homo sapiens
  CDR3 for beta chain variable domain of TCR clone 309637 (TRBV5-1, TRBJ2-7)
CVSSLDLTSSYEQYF

SEQ ID NO: 619275 - protein, 15 aa, Homo sapiens
  CDR3 for alpha chain variable domain of TCR clone 309638 (TRAV12-2, TRAJ50)
CAVNGLETSYDKVIF

SEQ ID NO: 619276 - protein, 14 aa, Homo sapiens
  CDR3 for beta chain variable domain of TCR clone 309638 (TRBV7-2, TRBJ1-1)
CASSFVTGTTEAFL

SEQ ID NO: 619277 - protein, 16 aa, Homo sapiens
  CDR3 for alpha chain variable domain of TCR clone 309639 (TRAV13-1, TRAJ22)
CAAKGGRSGSARQLTF

SEQ ID NO: 619278 - protein, 15 aa, Homo sapiens
  CDR3 for beta chain variable domain of TCR clone 309639 (TRBV9, TRBJ1-6)
CASSVAGTGDSPLLL

SEQ ID NO: 619279 - protein, 15 aa, Homo sapiens
  CDR3 for alpha chain variable domain of TCR clone 309640 (TRAV12-1, TRAJ36)
CVVNEHQTGANNLFF

SEQ ID NO: 619280 - protein, 12 aa, Homo sapiens
  CDR3 for beta chain variable domain of TCR clone 309640 (TRBV29-1, TRBJ2-3)
CSVTRGADTQYF

SEQ ID NO: 619281 - protein, 16 aa, Homo sapiens
  CDR3 for alpha chain variable domain of TCR clone 309641 (TRAV23/DV6, TRAJ9)
CAARIGGTTGGFKTIF

SEQ ID NO: 619282 - protein, 15 aa, Homo sapiens
  CDR3 for beta chain variable domain of TCR clone 309641 (TRBV20-1, TRBJ2-7)
CSARDRVSGMDEQYF

SEQ ID NO: 619283 - protein, 14 aa, Homo sapiens
  CDR3 for alpha chain variable domain of TCR clone 309642 (TRAV19, TRAJ15)
CALSEDQAGTAPIF

SEQ ID NO: 619284 - protein, 16 aa, Homo sapiens
  CDR3 for beta chain variable domain of TCR clone 309642 (TRBV7-9, TRBJ2-3)
CASSPWREVGTDTQYF

SEQ ID NO: 619285 - protein, 16 aa, Homo sapiens
  CDR3 for alpha chain variable domain of TCR clone 309643 (TRAV38-2/DV8, TRAJ45)
CAYRGNSGGGADGLTF

SEQ ID NO: 619286 - protein, 14 aa, Homo sapiens
  CDR3 for beta chain variable domain of TCR clone 309643 (TRBV7-2, TRBJ1-1)
CASSFLTGTTEAFF

SEQ ID NO: 619287 - protein, 13 aa, Homo sapiens
  CDR3 for alpha chain variable domain of TCR clone 309644 (TRAV29/DV5, TRAJ49)
CAASTNTGNQFYF

SEQ ID NO: 619288 - protein, 13 aa, Homo sapiens
  CDR3 for beta chain variable domain of TCR clone 309644 (TRBV7-2, TRBJ1-4)
CASSVAGLEKLFF

SEQ ID NO: 619289 - protein, 12 aa, Homo sapiens
  CDR3 for alpha chain variable domain of TCR clone 309645 (TRAV8-1, TRAJ6)
CASSGGSYIPTF

SEQ ID NO: 619290 - protein, 12 aa, Homo sapiens
  CDR3 for beta chain variable domain of TCR clone 309645 (TRBV19, TRBJ1-1)
CASMNIYTEAFF

SEQ ID NO: 619291 - protein, 15 aa, Homo sapiens
  CDR3 for alpha chain variable domain of TCR clone 309646 (TRAV3, TRAJ26)
CAVRDGDNYGQNFFF

SEQ ID NO: 619292 - protein, 14 aa, Homo sapiens
  CDR3 for beta chain variable domain of TCR clone 309646 (TRBV19, TRBJ2-1)
CASPTFVLSGEQFF

SEQ ID NO: 619293 - protein, 16 aa, Homo sapiens
  CDR3 for alpha chain variable domain of TCR clone 309647 (TRAV16, TRAJ4)
CALSRMFSGGYNKLIF

SEQ ID NO: 619294 - protein, 13 aa, Homo sapiens
  CDR3 for beta chain variable domain of TCR clone 309647 (TRBV4-1, TRBJ2-7)
CASSQQATYEQYF

SEQ ID NO: 619295 - protein, 14 aa, Homo sapiens
  CDR3 for alpha chain variable domain of TCR clone 309648 (TRAV21, TRAJ35)
CAVMPIGFGNVLHC

SEQ ID NO: 619296 - protein, 12 aa, Homo sapiens
  CDR3 for beta chain variable domain of TCR clone 309648 (TRBV7-9, TRBJ2-7)
CASSIKREEQSF

SEQ ID NO: 619297 - protein, 13 aa, Homo sapiens
  CDR3 for alpha chain variable domain of TCR clone 309649 (TRAV21, TRAJ27)
CAVRPGNAGKLTF

SEQ ID NO: 619298 - protein, 15 aa, Homo sapiens
  CDR3 for beta chain variable domain of TCR clone 309649 (TRBV11-3, TRBJ2-7)
CASSPGPASSYEQYF

SEQ ID NO: 619299 - protein, 12 aa, Homo sapiens
  CDR3 for alpha chain variable domain of TCR clone 309650 (TRAV13-1, TRAJ21)
CAAKEGFNKFYF

SEQ ID NO: 619300 - protein, 12 aa, Homo sapiens
  CDR3 for beta chain variable domain of TCR clone 309650 (TRBV7-6, TRBJ2-5)
CASSLSQETQYF

SEQ ID NO: 619301 - protein, 14 aa, Homo sapiens
  CDR3 for alpha chain variable domain of TCR clone 309651 (TRAV35, TRAJ50)
CACHRKTPYDKVIF

SEQ ID NO: 619302 - protein, 13 aa, Homo sapiens
  CDR3 for beta chain variable domain of TCR clone 309651 (TRBV7-7, TRBJ2-3)
CASSLSRADTQYF

SEQ ID NO: 619303 - protein, 14 aa, Homo sapiens
  CDR3 for alpha chain variable domain of TCR clone 309652 (TRAV17, TRAJ42)
CATAGGGSQGNLIF

SEQ ID NO: 619304 - protein, 14 aa, Homo sapiens
  CDR3 for beta chain variable domain of TCR clone 309652 (TRBV7-2, TRBJ2-3)
CASRFSRPSETQYF

SEQ ID NO: 619305 - protein, 15 aa, Homo sapiens
  CDR3 for alpha chain variable domain of TCR clone 309653 (TRAV25, TRAJ53)
CAATGGGGSNYKLTF

SEQ ID NO: 619306 - protein, 11 aa, Homo sapiens
  CDR3 for beta chain variable domain of TCR clone 309653 (TRBV29-1, TRBJ2-5)
CSEDRTGTQYF

SEQ ID NO: 619307 - protein, 15 aa, Homo sapiens
  CDR3 for alpha chain variable domain of TCR clone 309654 (TRAV4, TRAJ39)
CLVGPNNNAGNMLTF

SEQ ID NO: 619308 - protein, 13 aa, Homo sapiens
  CDR3 for beta chain variable domain of TCR clone 309654 (TRBV19, TRBJ1-3)
CASRLSLGNTIYF

SEQ ID NO: 619309 - protein, 11 aa, Homo sapiens
  CDR3 for alpha chain variable domain of TCR clone 309655 (TRAV27, TRAJ20)
CAGADDYKLSF

SEQ ID NO: 619310 - protein, 13 aa, Homo sapiens
  CDR3 for beta chain variable domain of TCR clone 309655 (TRBV19, TRBJ2-7)
CASSPRQSYEQYF

SEQ ID NO: 619311 - protein, 15 aa, Homo sapiens
  CDR3 for alpha chain variable domain of TCR clone 309656 (TRAV16, TRAJ20)
CALKGGLRADYKISF

SEQ ID NO: 619312 - protein, 16 aa, Homo sapiens
  CDR3 for beta chain variable domain of TCR clone 309656 (TRBV11-3, TRBJ2-2)
CASSSRTSPGTGELFF

SEQ ID NO: 619313 - protein, 13 aa, Homo sapiens
  CDR3 for alpha chain variable domain of TCR clone 309657 (TRAV2, TRAJ40)
CAVVTSGTYNYIF

SEQ ID NO: 619314 - protein, 16 aa, Homo sapiens
  CDR3 for beta chain variable domain of TCR clone 309657 (TRBV29-1, TRBJ2-6)
CSVEDITYSGANVLTF

SEQ ID NO: 619315 - protein, 11 aa, Homo sapiens
  CDR3 for alpha chain variable domain of TCR clone 309658 (TRAV12-1, TRAJ30)
CVVNGQDKIII

SEQ ID NO: 619316 - protein, 15 aa, Homo sapiens
  CDR3 for beta chain variable domain of TCR clone 309658 (TRBV28, TRBJ2-5)
CASSSGRTIQETQYF

SEQ ID NO: 619317 - protein, 15 aa, Homo sapiens
  CDR3 for alpha chain variable domain of TCR clone 309659 (TRAV12-3, TRAJ13)
CAMSARSGGYQKVTF

SEQ ID NO: 619318 - protein, 18 aa, Homo sapiens
  CDR3 for beta chain variable domain of TCR clone 309659 (TRBV3-1, TRBJ2-7)
CASSHDGGGRSWHYEQYF

SEQ ID NO: 619319 - protein, 14 aa, Homo sapiens
  CDR3 for alpha chain variable domain of TCR clone 309660 (TRAV12-2, TRAJ15)
CTPHTGQAGTALIF

SEQ ID NO: 619320 - protein, 14 aa, Homo sapiens
  CDR3 for beta chain variable domain of TCR clone 309660 (TRBV6-1, TRBJ1-3)
CASVQGGGGNTIYF

SEQ ID NO: 619321 - protein, 14 aa, Homo sapiens
  CDR3 for alpha chain variable domain of TCR clone 309661 (TRAV9-2, TRAJ39)
CALYIYNAGNILTF

SEQ ID NO: 619322 - protein, 12 aa, Homo sapiens
  CDR3 for beta chain variable domain of TCR clone 309661 (TRBV2, TRBJ2-7)
CASSDPDYEQYF

SEQ ID NO: 619323 - protein, 13 aa, Homo sapiens
  CDR3 for alpha chain variable domain of TCR clone 309662 (TRAV2, TRAJ15)
CAVASQAGTALIF

SEQ ID NO: 619324 - protein, 15 aa, Homo sapiens
  CDR3 for beta chain variable domain of TCR clone 309662 (TRBV10-3, TRBJ2-3)
CAISLTSGGTDTQYF

SEQ ID NO: 619325 - protein, 13 aa, Homo sapiens
  CDR3 for alpha chain variable domain of TCR clone 309663 (TRAV26-1, TRAJ34)
CIVRPWITDKLIF

SEQ ID NO: 619326 - protein, 14 aa, Homo sapiens
  CDR3 for beta chain variable domain of TCR clone 309663 (TRBV18, TRBJ2-5)
CASSPGVSQETQYF

SEQ ID NO: 619327 - protein, 11 aa, Homo sapiens
  CDR3 for alpha chain variable domain of TCR clone 309664 (TRAV13-1, TRAJ43)
CAASMRNDMRF

SEQ ID NO: 619328 - protein, 15 aa, Homo sapiens
  CDR3 for beta chain variable domain of TCR clone 309664 (TRBV7-2, TRBJ2-2)
CASSTTGANTGELFF

SEQ ID NO: 619329 - protein, 12 aa, Homo sapiens
  CDR3 for alpha chain variable domain of TCR clone 309665 (TRAV13-1, TRAJ21)
CAAKEGFNKFYF

SEQ ID NO: 619330 - protein, 15 aa, Homo sapiens
  CDR3 for beta chain variable domain of TCR clone 309665 (TRBV4-1, TRBJ2-5)
CASSQWDLYQETQYF

SEQ ID NO: 619331 - protein, 13 aa, Homo sapiens
  CDR3 for alpha chain variable domain of TCR clone 309666 (TRAV13-1, TRAJ20)
CAARVSNDYKLSS

SEQ ID NO: 619332 - protein, 12 aa, Homo sapiens
  CDR3 for beta chain variable domain of TCR clone 309666 (TRBV20-1, TRBJ2-1)
CSARLGTDEQLF

SEQ ID NO: 619333 - protein, 18 aa, Homo sapiens
  CDR3 for alpha chain variable domain of TCR clone 309667 (TRAV26-1, TRAJ22)
CIVRVALISSGSARQLTC

SEQ ID NO: 619334 - protein, 13 aa, Homo sapiens
  CDR3 for beta chain variable domain of TCR clone 309667 (TRBV13, TRBJ2-5)
CARRPEVGETQYF

SEQ ID NO: 619335 - protein, 12 aa, Homo sapiens
  CDR3 for alpha chain variable domain of TCR clone 309668 (TRAV2, TRAJ31)
CAAEDNNARLMF

SEQ ID NO: 619336 - protein, 13 aa, Homo sapiens
  CDR3 for beta chain variable domain of TCR clone 309668 (TRBV12-4, TRBJ1-2)
CASSLRQGKGYTF

SEQ ID NO: 619337 - protein, 15 aa, Homo sapiens
  CDR3 for alpha chain variable domain of TCR clone 309669 (TRAV12-1, TRAJ44)
CVVFVNTGTASKLTF

SEQ ID NO: 619338 - protein, 13 aa, Homo sapiens
  CDR3 for beta chain variable domain of TCR clone 309669 (TRBV12-5, TRBJ2-3)
CASGDRQSDTQYF

SEQ ID NO: 619339 - protein, 13 aa, Homo sapiens
  CDR3 for alpha chain variable domain of TCR clone 309670 (TRAV8-3, TRAJ21)
CAVGLDNFNKFYF

SEQ ID NO: 619340 - protein, 14 aa, Homo sapiens
  CDR3 for beta chain variable domain of TCR clone 309670 (TRBV14, TRBJ2-7)
CASRHRDKPYEQYF

SEQ ID NO: 619341 - protein, 14 aa, Homo sapiens
  CDR3 for alpha chain variable domain of TCR clone 309671 (TRAV25, TRAJ22)
CAVRSSGSARQLTF

SEQ ID NO: 619342 - protein, 15 aa, Homo sapiens
  CDR3 for beta chain variable domain of TCR clone 309671 (TRBV11-3, TRBJ2-3)
CASLKDGREGDTQYF

SEQ ID NO: 619343 - protein, 15 aa, Homo sapiens
  CDR3 for alpha chain variable domain of TCR clone 309672 (TRAV26-1, TRAJ29)
CIVRVEGSGNTPLVF

SEQ ID NO: 619344 - protein, 14 aa, Homo sapiens
  CDR3 for beta chain variable domain of TCR clone 309672 (TRBV18, TRBJ2-5)
CGSLPGVSQETQYF

SEQ ID NO: 619345 - protein, 16 aa, Homo sapiens
  CDR3 for alpha chain variable domain of TCR clone 309673 (TRAV30, TRAJ24)
CGIEIVDADSWGKFQF

SEQ ID NO: 619346 - protein, 14 aa, Homo sapiens
  CDR3 for beta chain variable domain of TCR clone 309673 (TRBV7-2, TRBJ2-7)
CASSPKTSFYEQYF

SEQ ID NO: 619347 - protein, 14 aa, Homo sapiens
  CDR3 for alpha chain variable domain of TCR clone 309674 (TRAV12-2, TRAJ40)
CAVKIPPGTYKYIF

SEQ ID NO: 619348 - protein, 17 aa, Homo sapiens
  CDR3 for beta chain variable domain of TCR clone 309674 (TRBV20-1, TRBJ2-1)
CSAFSGTSGSLYNEQFF

SEQ ID NO: 619349 - protein, 14 aa, Homo sapiens
  CDR3 for alpha chain variable domain of TCR clone 309675 (TRAV14/DV4, TRAJ7)
CAMREAYGNHRLAF

SEQ ID NO: 619350 - protein, 15 aa, Homo sapiens
  CDR3 for beta chain variable domain of TCR clone 309675 (TRBV19, TRBJ2-1)
CASSINREPSHEQFF

SEQ ID NO: 619351 - protein, 15 aa, Homo sapiens
  CDR3 for alpha chain variable domain of TCR clone 309676 (TRAV8-3, TRAJ37)
CAVGARASNTGKVIF

SEQ ID NO: 619352 - protein, 15 aa, Homo sapiens
  CDR3 for beta chain variable domain of TCR clone 309676 (TRBV5-4, TRBJ2-3)
CASSLAGRVTDTQYF

SEQ ID NO: 619353 - protein, 11 aa, Homo sapiens
  CDR3 for alpha chain variable domain of TCR clone 309677 (TRAV1-2, TRAJ10)
CFTGGGNKLAF

SEQ ID NO: 619354 - protein, 14 aa, Homo sapiens
  CDR3 for beta chain variable domain of TCR clone 309677 (TRBV4-1, TRBJ2-2)
CASSQAVNTGELFF

SEQ ID NO: 619355 - protein, 14 aa, Homo sapiens
  CDR3 for alpha chain variable domain of TCR clone 309678 (TRAV12-2, TRAJ13)
CAVKKTGGYQKVTF

SEQ ID NO: 619356 - protein, 14 aa, Homo sapiens
  CDR3 for beta chain variable domain of TCR clone 309678 (TRBV5-5, TRBJ2-7)
GASSLGQGTYEQYF

SEQ ID NO: 619357 - protein, 14 aa, Homo sapiens
  CDR3 for alpha chain variable domain of TCR clone 309679 (TRAV16, TRAJ15)
CALSFNQAGTALIF

SEQ ID NO: 619358 - protein, 12 aa, Homo sapiens
  CDR3 for beta chain variable domain of TCR clone 309679 (TRBV7-8, TRBJ2-7)
CASSLGDREQYF

SEQ ID NO: 619359 - protein, 12 aa, Homo sapiens
  CDR3 for alpha chain variable domain of TCR clone 309680 (TRAV3, TRAJ43)
CAVRDPNTDMRF

SEQ ID NO: 619360 - protein, 14 aa, Homo sapiens
  CDR3 for beta chain variable domain of TCR clone 309680 (TRBV19, TRBJ2-5)
CASSMTGQQETQYF

SEQ ID NO: 619361 - protein, 16 aa, Homo sapiens
  CDR3 for alpha chain variable domain of TCR clone 309681 (TRAV23/DV6, TRAJ21)
CTASSGGGTTSTNFTL

SEQ ID NO: 619362 - protein, 11 aa, Homo sapiens
  CDR3 for beta chain variable domain of TCR clone 309681 (TRBV7-8, TRBJ2-7)
CASSPSLEQYF

SEQ ID NO: 619363 - protein, 16 aa, Homo sapiens
  CDR3 for alpha chain variable domain of TCR clone 309682 (TRAV12-3, TRAJ53)
CAMSPGSGGSNYKLTF

SEQ ID NO: 619364 - protein, 17 aa, Homo sapiens
  CDR3 for beta chain variable domain of TCR clone 309682 (TRBV11-2, TRBJ2-1)
CSSSLYPPGVEYNEQFF

SEQ ID NO: 619365 - protein, 15 aa, Homo sapiens
  CDR3 for alpha chain variable domain of TCR clone 309683 (TRAV8-3, TRAJ27)
CAGGPSKTNAGKSTF

SEQ ID NO: 619366 - protein, 12 aa, Homo sapiens
  CDR3 for beta chain variable domain of TCR clone 309683 (TRBV11-2, TRBJ2-2)
CASSLGGGELFF

SEQ ID NO: 619367 - protein, 17 aa, Homo sapiens
  CDR3 for alpha chain variable domain of TCR clone 309684 (TRAV3, TRAJ6)
CAVRDGPRAGGSYIPTF

SEQ ID NO: 619368 - protein, 19 aa, Homo sapiens
  CDR3 for beta chain variable domain of TCR clone 309684 (TRBV7-2, TRBJ2-3)
CASSPGLAGGGLTTDTQYF

SEQ ID NO: 619369 - protein, 15 aa, Homo sapiens
  CDR3 for alpha chain variable domain of TCR clone 309685 (TRAV3, TRAJ3)
CAVRNGHSSASKIIF

SEQ ID NO: 619370 - protein, 17 aa, Homo sapiens
  CDR3 for beta chain variable domain of TCR clone 309685 (TRBV25-1, TRBJ2-7)
CASSDARVVFSSYEQYF

SEQ ID NO: 619371 - protein, 13 aa, Homo sapiens
  CDR3 for alpha chain variable domain of TCR clone 309686 (TRAV30, TRAJ49)
CGTESQPVTSSIL

SEQ ID NO: 619372 - protein, 14 aa, Homo sapiens
  CDR3 for beta chain variable domain of TCR clone 309686 (TRBV20-1, TRBJ2-7)
CSAPELAGVGEQYF

SEQ ID NO: 619373 - protein, 15 aa, Homo sapiens
  CDR3 for alpha chain variable domain of TCR clone 309687 (TRAV17, TRAJ56)
CATEPCTGANSKLTF

SEQ ID NO: 619374 - protein, 15 aa, Homo sapiens
  CDR3 for beta chain variable domain of TCR clone 309687 (TRBV28, TRBJ1-5)
CASSRTGGYVQPQHF

SEQ ID NO: 619375 - protein, 15 aa, Homo sapiens
  CDR3 for alpha chain variable domain of TCR clone 309688 (TRAV3, TRAJ22)
CAVRDRGGSARQLTF

SEQ ID NO: 619376 - protein, 14 aa, Homo sapiens
  CDR3 for beta chain variable domain of TCR clone 309688 (TRBV19, TRBJ1-5)
CASSRGLIGQPQHF

SEQ ID NO: 619377 - protein, 14 aa, Homo sapiens
  CDR3 for alpha chain variable domain of TCR clone 309689 (TRAV12-1, TRAJ30)
CVVNIGNRDDKIIF

SEQ ID NO: 619378 - protein, 14 aa, Homo sapiens
  CDR3 for beta chain variable domain of TCR clone 309689 (TRBV7-9, TRBJ2-5)
CGSSPRPSGETQYF

SEQ ID NO: 619379 - protein, 11 aa, Homo sapiens
  CDR3 for alpha chain variable domain of TCR clone 309690 (TRAV3, TRAJ21)
CAVGNFNKFYF

SEQ ID NO: 619380 - protein, 16 aa, Homo sapiens
  CDR3 for beta chain variable domain of TCR clone 309690 (TRBV19, TRBJ2-1)
CASSKAGPGCYDEQFF

SEQ ID NO: 619381 - protein, 16 aa, Homo sapiens
  CDR3 for alpha chain variable domain of TCR clone 309691 (TRAV12-2, TRAJ40)
CAVIRGGTSGTYKYIF

SEQ ID NO: 619382 - protein, 18 aa, Homo sapiens
  CDR3 for beta chain variable domain of TCR clone 309691 (TRBV7-6, TRBJ1-3)
CASSSPIGGDSSGNTIYF

SEQ ID NO: 619383 - protein, 15 aa, Homo sapiens
  CDR3 for alpha chain variable domain of TCR clone 309692 (TRAV8-3, TRAJ6)
CAVGPLGGGSYIPTF

SEQ ID NO: 619384 - protein, 14 aa, Homo sapiens
  CDR3 for beta chain variable domain of TCR clone 309692 (TRBV19, TRBJ2-2)
CASSTGQGAGDLFF

SEQ ID NO: 619385 - protein, 12 aa, Homo sapiens
  CDR3 for alpha chain variable domain of TCR clone 309693 (TRAV8-3, TRAJ20)
CAVGANDYKLSF

SEQ ID NO: 619386 - protein, 13 aa, Homo sapiens
  CDR3 for beta chain variable domain of TCR clone 309693 (TRBV12-4, TRBJ2-4)
CASSNLRGNIRYF

SEQ ID NO: 619387 - protein, 14 aa, Homo sapiens
  CDR3 for alpha chain variable domain of TCR clone 309694 (TRAV3, TRAJ36)
CAVRDWTGANNLFF

SEQ ID NO: 619388 - protein, 16 aa, Homo sapiens
  CDR3 for beta chain variable domain of TCR clone 309694 (TRBV7-3, TRBJ2-5)
CASIQPGGSVQETQYF

SEQ ID NO: 619389 - protein, 15 aa, Homo sapiens
  CDR3 for alpha chain variable domain of TCR clone 309695 (TRAV12-3, TRAJ6)
CAVSATTGGSYIPTF

SEQ ID NO: 619390 - protein, 17 aa, Homo sapiens
  CDR3 for beta chain variable domain of TCR clone 309695 (TRBV11-2, TRBJ2-1)
CASSLYPPGVEYNEQFF

SEQ ID NO: 619391 - protein, 16 aa, Homo sapiens
  CDR3 for alpha chain variable domain of TCR clone 309696 (TRAV3, TRAJ37)
CAVRGKGSGNTGKLIF

SEQ ID NO: 619392 - protein, 22 aa, Homo sapiens
  CDR3 for beta chain variable domain of TCR clone 309696 (TRBV11-2, TRBJ1-4)
CASSLDITRRGIPRKDNEKLFF

SEQ ID NO: 619393 - protein, 14 aa, Homo sapiens
  CDR3 for alpha chain variable domain of TCR clone 309697 (TRAV8-3, TRAJ31)
CAVGRGLNNARPRF

SEQ ID NO: 619394 - protein, 15 aa, Homo sapiens
  CDR3 for beta chain variable domain of TCR clone 309697 (TRBV7-2, TRBJ2-2)
CASSLAGGLTGELFF

SEQ ID NO: 619395 - protein, 16 aa, Homo sapiens
  CDR3 for alpha chain variable domain of TCR clone 309698 (TRAV25, TRAJ53)
CRPGLYSGGSNYKLTF

SEQ ID NO: 619396 - protein, 15 aa, Homo sapiens
  CDR3 for beta chain variable domain of TCR clone 309698 (TRBV20-1, TRBJ2-7)
CSARDRVSGMDEQYF

SEQ ID NO: 619397 - protein, 13 aa, Homo sapiens
  CDR3 for alpha chain variable domain of TCR clone 309699 (TRAV29/DV5, TRAJ29)
CAASAAGNTPLVF

SEQ ID NO: 619398 - protein, 15 aa, Homo sapiens
  CDR3 for beta chain variable domain of TCR clone 309699 (TRBV27, TRBJ2-1)
CASSNGGGSSNEQFF

SEQ ID NO: 619399 - protein, 18 aa, Homo sapiens
  CDR3 for alpha chain variable domain of TCR clone 309700 (TRAV29/DV5, TRAJ52)
QCTSVQQADGTSYGKPTF

SEQ ID NO: 619400 - protein, 13 aa, Homo sapiens
  CDR3 for beta chain variable domain of TCR clone 309700 (TRBV7-2, TRBJ1-1)
CASNLKGAKVAFF

SEQ ID NO: 619401 - protein, 13 aa, Homo sapiens
  CDR3 for alpha chain variable domain of TCR clone 309701 (TRAV21, TRAJ29)
CAVRSSGNTPLVF

SEQ ID NO: 619402 - protein, 14 aa, Homo sapiens
  CDR3 for beta chain variable domain of TCR clone 309701 (TRBV7-2, TRBJ2-7)
CASSPKTSFYEQYF

SEQ ID NO: 619403 - protein, 12 aa, Homo sapiens
  CDR3 for alpha chain variable domain of TCR clone 309702 (TRAV25, TRAJ29)
CAGHSGNTPLVF

SEQ ID NO: 619404 - protein, 15 aa, Homo sapiens
  CDR3 for beta chain variable domain of TCR clone 309702 (TRBV7-3, TRBJ2-1)
CASSQRGGALIEQFF

SEQ ID NO: 619405 - protein, 15 aa, Homo sapiens
  CDR3 for alpha chain variable domain of TCR clone 309703 (TRAV26-1, TRAJ44)
CIVRANTGTASKLTF

SEQ ID NO: 619406 - protein, 14 aa, Homo sapiens
  CDR3 for beta chain variable domain of TCR clone 309703 (TRBV20-1, TRBJ2-5)
CSAHRQGLWETQYV

SEQ ID NO: 619407 - protein, 12 aa, Homo sapiens
  CDR3 for alpha chain variable domain of TCR clone 309704 (TRAV14/DV4, TRAJ27)
CAMREANQPLVM

SEQ ID NO: 619408 - protein, 15 aa, Homo sapiens
  CDR3 for beta chain variable domain of TCR clone 309704 (TRBV4-1, TRBJ1-4)
CASSDTGGTNEKLFF

SEQ ID NO: 619409 - protein, 14 aa, Homo sapiens
  CDR3 for alpha chain variable domain of TCR clone 309705 (TRAV1-2, TRAJ16)
CAVNRFSDGQKLLF

SEQ ID NO: 619410 - protein, 13 aa, Homo sapiens
  CDR3 for beta chain variable domain of TCR clone 309705 (TRBV11-2, TRBJ2-5)
CASSATGEETQYF

SEQ ID NO: 619411 - protein, 16 aa, Homo sapiens
  CDR3 for alpha chain variable domain of TCR clone 309706 (TRAV12-3, TRAJ52)
CAVSNAGGTSYGKLTF

SEQ ID NO: 619412 - protein, 16 aa, Homo sapiens
  CDR3 for beta chain variable domain of TCR clone 309706 (TRBV6-6, TRBJ2-1)
CASSYSFSGSYNEQFV

SEQ ID NO: 619413 - protein, 17 aa, Homo sapiens
  CDR3 for alpha chain variable domain of TCR clone 309707 (TRAV13-1, )
CAANIQNPDPAVYQLRD

SEQ ID NO: 619414 - protein, 13 aa, Homo sapiens
  CDR3 for beta chain variable domain of TCR clone 309707 (TRBV7-7, TRBJ2-3)
CASSLSRADTQYF

SEQ ID NO: 619415 - protein, 16 aa, Homo sapiens
  CDR3 for alpha chain variable domain of TCR clone 309708 (TRAV3, TRAJ37)
CAVRGMGSGNTGKLIF

SEQ ID NO: 619416 - protein, 20 aa, Homo sapiens
  CDR3 for beta chain variable domain of TCR clone 309708 (TRBV7-8, TRBJ2-2)
CASSHLFPGPTIHITGELFF

SEQ ID NO: 619417 - protein, 14 aa, Homo sapiens
  CDR3 for alpha chain variable domain of TCR clone 309709 (TRAV23/DV6, TRAJ24)
CAASLSDSWGKLQF

SEQ ID NO: 619418 - protein, 16 aa, Homo sapiens
  CDR3 for beta chain variable domain of TCR clone 309709 (TRBV7-9, TRBJ2-6)
WASSLKGPLRANVLTF

SEQ ID NO: 619419 - protein, 16 aa, Homo sapiens
  CDR3 for alpha chain variable domain of TCR clone 309710 (TRAV4, TRAJ9)
CLVGDPNSPGGFKTIF

SEQ ID NO: 619420 - protein, 16 aa, Homo sapiens
  CDR3 for beta chain variable domain of TCR clone 309710 (TRBV28, TRBJ1-4)
CASSPPYRGRSEKLFF

SEQ ID NO: 619421 - protein, 18 aa, Homo sapiens
  CDR3 for alpha chain variable domain of TCR clone 309711 (TRAV13-1, TRAJ52)
CAASKRSAGGTSYGKLTF

SEQ ID NO: 619422 - protein, 13 aa, Homo sapiens
  CDR3 for beta chain variable domain of TCR clone 309711 (TRBV12-4, TRBJ1-2)
CANSLRQGKGYTF

SEQ ID NO: 619423 - protein, 13 aa, Homo sapiens
  CDR3 for alpha chain variable domain of TCR clone 309712 (TRAV8-1, TRAJ30)
CAVIMNRDDKFIF

SEQ ID NO: 619424 - protein, 14 aa, Homo sapiens
  CDR3 for beta chain variable domain of TCR clone 309712 (TRBV7-2, TRBJ1-6)
CASSLQGANSPLHF

SEQ ID NO: 619425 - protein, 13 aa, Homo sapiens
  CDR3 for alpha chain variable domain of TCR clone 309713 (TRAV1-2, TRAJ9)
CAALNTGGFKTIF

SEQ ID NO: 619426 - protein, 14 aa, Homo sapiens
  CDR3 for beta chain variable domain of TCR clone 309713 (TRBV15, TRBJ2-3)
CATRSGTSTDTQYF

SEQ ID NO: 619427 - protein, 16 aa, Homo sapiens
  CDR3 for alpha chain variable domain of TCR clone 309714 (TRAV22, TRAJ45)
CAVERGKRGGADGLTF

SEQ ID NO: 619428 - protein, 13 aa, Homo sapiens
  CDR3 for beta chain variable domain of TCR clone 309714 (TRBV27, TRBJ1-1)
FASSLSIGAEAFF

SEQ ID NO: 619429 - protein, 12 aa, Homo sapiens
  CDR3 for alpha chain variable domain of TCR clone 309715 (TRAV1-1, TRAJ30)
CAVRGRDDKIIF

SEQ ID NO: 619430 - protein, 15 aa, Homo sapiens
  CDR3 for beta chain variable domain of TCR clone 309715 (TRBV11-3, TRBJ2-7)
CASSPGPASSYEQYF

SEQ ID NO: 619431 - protein, 14 aa, Homo sapiens
  CDR3 for alpha chain variable domain of TCR clone 309716 (TRAV2, TRAJ37)
TTVPGSSNTGKLIF

SEQ ID NO: 619432 - protein, 14 aa, Homo sapiens
  CDR3 for beta chain variable domain of TCR clone 309716 (TRBV7-8, TRBJ2-7)
CASSVWQSSYEQYF

SEQ ID NO: 619433 - protein, 14 aa, Homo sapiens
  CDR3 for alpha chain variable domain of TCR clone 309717 (TRAV12-2, TRAJ13)
CAVKKAGGSQKVTF

SEQ ID NO: 619434 - protein, 15 aa, Homo sapiens
  CDR3 for beta chain variable domain of TCR clone 309717 (TRBV27, TRBJ2-1)
CASSNGGGSSNEQFF

SEQ ID NO: 619435 - protein, 15 aa, Homo sapiens
  CDR3 for alpha chain variable domain of TCR clone 309718 (TRAV4, TRAJ39)
CLVGPNNNAGNMLTF

SEQ ID NO: 619436 - protein, 15 aa, Homo sapiens
  CDR3 for beta chain variable domain of TCR clone 309718 (TRBV27, TRBJ1-6)
CASSFDRGLGSPLHF

SEQ ID NO: 619437 - protein, 11 aa, Homo sapiens
  CDR3 for alpha chain variable domain of TCR clone 309719 (TRAV1-1, TRAJ23)
CAVRQGGKLIF

SEQ ID NO: 619438 - protein, 14 aa, Homo sapiens
  CDR3 for beta chain variable domain of TCR clone 309719 (TRBV7-9, TRBJ2-7)
CASSLVAGPYEQYF

SEQ ID NO: 619439 - protein, 17 aa, Homo sapiens
  CDR3 for alpha chain variable domain of TCR clone 309720 (TRAV3, TRAJ42)
CAVRDRDYGGSQGNLIF

SEQ ID NO: 619440 - protein, 14 aa, Homo sapiens
  CDR3 for beta chain variable domain of TCR clone 309720 (TRBV19, TRBJ2-5)
CASSMTGQQQTRYF

SEQ ID NO: 619441 - protein, 12 aa, Homo sapiens
  CDR3 for alpha chain variable domain of TCR clone 309721 (TRAV12-3, TRAJ17)
CAMTLTGNKLTF

SEQ ID NO: 619442 - protein, 15 aa, Homo sapiens
  CDR3 for beta chain variable domain of TCR clone 309721 (TRBV20-1, TRBJ2-7)
CSARDRVYGVDEQYF

SEQ ID NO: 619443 - protein, 12 aa, Homo sapiens
  CDR3 for alpha chain variable domain of TCR clone 309722 (TRAV21, TRAJ27)
CAANTNAGKSTF

SEQ ID NO: 619444 - protein, 17 aa, Homo sapiens
  CDR3 for beta chain variable domain of TCR clone 309722 (TRBV4-1, TRBJ2-5)
CASSQDLTGWPIETQYF

SEQ ID NO: 619445 - protein, 14 aa, Homo sapiens
  CDR3 for alpha chain variable domain of TCR clone 309723 (TRAV12-2, TRAJ13)
CAVKKTGGYQKVTF

SEQ ID NO: 619446 - protein, 15 aa, Homo sapiens
  CDR3 for beta chain variable domain of TCR clone 309723 (TRBV7-2, TRBJ2-3)
CASSFEGPPGDTQYF

SEQ ID NO: 619447 - protein, 12 aa, Homo sapiens
  CDR3 for alpha chain variable domain of TCR clone 309724 (TRAV23/DV6, TRAJ31)
CAARRIGARLMF

SEQ ID NO: 619448 - protein, 21 aa, Homo sapiens
  CDR3 for beta chain variable domain of TCR clone 309724 (TRBV28, TRBJ2-7)
HQPDIYVPPCQQSGGVYEQYF

SEQ ID NO: 619449 - protein, 12 aa, Homo sapiens
  CDR3 for alpha chain variable domain of TCR clone 309725 (TRAV13-1, TRAJ21)
CAAKECFNKFSF

SEQ ID NO: 619450 - protein, 14 aa, Homo sapiens
  CDR3 for beta chain variable domain of TCR clone 309725 (TRBV5-4, TRBJ1-1)
CASSLDSRRDEAFF

SEQ ID NO: 619451 - protein, 16 aa, Homo sapiens
  CDR3 for alpha chain variable domain of TCR clone 309726 (TRAV12-2, TRAJ32)
CAVNLGQGGATSKLIF

SEQ ID NO: 619452 - protein, 15 aa, Homo sapiens
  CDR3 for beta chain variable domain of TCR clone 309726 (TRBV20-1, TRBJ2-7)
CSARGPLAGGREQYF

SEQ ID NO: 619453 - protein, 15 aa, Homo sapiens
  CDR3 for alpha chain variable domain of TCR clone 309727 (TRAV21, TRAJ10)
CAVRGLTGGGNKLTF

SEQ ID NO: 619454 - protein, 15 aa, Homo sapiens
  CDR3 for beta chain variable domain of TCR clone 309727 (TRBV27, TRBJ2-1)
CASSNGGGSSNEQFF

SEQ ID NO: 619455 - protein, 15 aa, Homo sapiens
  CDR3 for alpha chain variable domain of TCR clone 309728 (TRAV26-1, TRAJ44)
CIVRANTGTASKLTF

SEQ ID NO: 619456 - protein, 15 aa, Homo sapiens
  CDR3 for beta chain variable domain of TCR clone 309728 (TRBV7-9, TRBJ2-7)
CASSLALAEAYEQYF

SEQ ID NO: 619457 - protein, 16 aa, Homo sapiens
  CDR3 for alpha chain variable domain of TCR clone 309729 (TRAV12-1, TRAJ4)
CVVRRLPAGGYNKLIF

SEQ ID NO: 619458 - protein, 15 aa, Homo sapiens
  CDR3 for beta chain variable domain of TCR clone 309729 (TRBV27, TRBJ2-1)
CASSNGGGSSNEQFF

SEQ ID NO: 619459 - protein, 13 aa, Homo sapiens
  CDR3 for alpha chain variable domain of TCR clone 309730 (TRAV3, TRAJ27)
CAVRPLGAGKSTF

SEQ ID NO: 619460 - protein, 11 aa, Homo sapiens
  CDR3 for beta chain variable domain of TCR clone 309730 (TRBV29-1, TRBJ2-5)
CSEDRTGTQYF

SEQ ID NO: 619461 - protein, 11 aa, Homo sapiens
  CDR3 for alpha chain variable domain of TCR clone 309731 (TRAV12-1, TRAJ21)
CVVYNFNKFYF

SEQ ID NO: 619462 - protein, 16 aa, Homo sapiens
  CDR3 for beta chain variable domain of TCR clone 309731 (TRBV9, TRBJ2-2)
CASSAMGKGNTGELFF

SEQ ID NO: 619463 - protein, 12 aa, Homo sapiens
  CDR3 for alpha chain variable domain of TCR clone 309732 (TRAV21, TRAJ49)
CPVNDGGNQSYF

SEQ ID NO: 619464 - protein, 14 aa, Homo sapiens
  CDR3 for beta chain variable domain of TCR clone 309732 (TRBV18, TRBJ2-7)
CASSPRGGSYEQYF

SEQ ID NO: 619465 - protein, 14 aa, Homo sapiens
  CDR3 for alpha chain variable domain of TCR clone 309733 (TRAV12-3, TRAJ10)
SHLPLTGGGNKLTF

SEQ ID NO: 619466 - protein, 13 aa, Homo sapiens
  CDR3 for beta chain variable domain of TCR clone 309733 (TRBV11-2, TRBJ2-3)
CASSPGSTDTQYF

SEQ ID NO: 619467 - protein, 11 aa, Homo sapiens
  CDR3 for alpha chain variable domain of TCR clone 309734 (TRAV12-2, TRAJ49)
CALQGGNQIYF

SEQ ID NO: 619468 - protein, 13 aa, Homo sapiens
  CDR3 for beta chain variable domain of TCR clone 309734 (TRBV4-1, TRBJ1-1)
CASSQLGTGEAFF

SEQ ID NO: 619469 - protein, 14 aa, Homo sapiens
  CDR3 for alpha chain variable domain of TCR clone 309735 (TRAV12-2, TRAJ13)
CAVKKTGGYQKVTF

SEQ ID NO: 619470 - protein, 10 aa, Homo sapiens
  CDR3 for beta chain variable domain of TCR clone 309735 (TRBV11-2, TRBJ2-2)
CASSSDRVNA

SEQ ID NO: 619471 - protein, 15 aa, Homo sapiens
  CDR3 for alpha chain variable domain of TCR clone 309736 (TRAV8-6, TRAJ10)
CAVSDQAGGGNKLTF

SEQ ID NO: 619472 - protein, 15 aa, Homo sapiens
  CDR3 for beta chain variable domain of TCR clone 309736 (TRBV10-2, TRBJ2-6)
CASSEQGTGANVLTF

SEQ ID NO: 619473 - protein, 11 aa, Homo sapiens
  CDR3 for alpha chain variable domain of TCR clone 309737 (TRAV13-2, TRAJ57)
CAGGGSEKLVF

SEQ ID NO: 619474 - protein, 17 aa, Homo sapiens
  CDR3 for beta chain variable domain of TCR clone 309737 (TRBV7-3, TRBJ2-2)
CASSLSGTSGGTGELFF

SEQ ID NO: 619475 - protein, 15 aa, Homo sapiens
  CDR3 for alpha chain variable domain of TCR clone 309738 (TRAV8-3, TRAJ27)
CAVGPSKTNAGKSTF

SEQ ID NO: 619476 - protein, 13 aa, Homo sapiens
  CDR3 for beta chain variable domain of TCR clone 309738 (TRBV6-1, TRBJ1-1)
CASSRQGNTEAFF

SEQ ID NO: 619477 - protein, 12 aa, Homo sapiens
  CDR3 for alpha chain variable domain of TCR clone 309739 (TRAV21, TRAJ37)
CAARGNTGKLIF

SEQ ID NO: 619478 - protein, 15 aa, Homo sapiens
  CDR3 for beta chain variable domain of TCR clone 309739 (TRBV20-1, TRBJ2-1)
CSARGGTRYYNEQFF

SEQ ID NO: 619479 - protein, 11 aa, Homo sapiens
  CDR3 for alpha chain variable domain of TCR clone 309740 (TRAV21, TRAJ9)
CAVPGGFKTIF

SEQ ID NO: 619480 - protein, 15 aa, Homo sapiens
  CDR3 for beta chain variable domain of TCR clone 309740 (TRBV20-1, TRBJ2-1)
CSARGIGGTYNEQFF

SEQ ID NO: 619481 - protein, 14 aa, Homo sapiens
  CDR3 for alpha chain variable domain of TCR clone 309741 (TRAV3, TRAJ6)
CALRYPWGSYIPTF

SEQ ID NO: 619482 - protein, 15 aa, Homo sapiens
  CDR3 for beta chain variable domain of TCR clone 309741 (TRBV19, TRBJ1-6)
CASSTQGAVGSPLHF

SEQ ID NO: 619483 - protein, 15 aa, Homo sapiens
  CDR3 for alpha chain variable domain of TCR clone 309742 (TRAV3, TRAJ20)
CAVRDIKLSDYKLSF

SEQ ID NO: 619484 - protein, 15 aa, Homo sapiens
  CDR3 for beta chain variable domain of TCR clone 309742 (TRBV11-3, TRBJ2-7)
CASSPGPASSYEQYF

SEQ ID NO: 619485 - protein, 12 aa, Homo sapiens
  CDR3 for alpha chain variable domain of TCR clone 309743 (TRAV8-3, TRAJ20)
CAVGANDYKLGF

SEQ ID NO: 619486 - protein, 15 aa, Homo sapiens
  CDR3 for beta chain variable domain of TCR clone 309743 (TRBV11-2, TRBJ2-1)
CASSLGTSGLNEQFF

SEQ ID NO: 619487 - protein, 14 aa, Homo sapiens
  CDR3 for alpha chain variable domain of TCR clone 309744 (TRAV19, TRAJ5)
CALKKDTGRRALTF

SEQ ID NO: 619488 - protein, 13 aa, Homo sapiens
  CDR3 for beta chain variable domain of TCR clone 309744 (TRBV7-3, TRBJ1-1)
CASSQDWGAEAFF

SEQ ID NO: 619489 - protein, 14 aa, Homo sapiens
  CDR3 for alpha chain variable domain of TCR clone 309745 (TRAV1-2, TRAJ16)
CAVNRCSDGQKLLF

SEQ ID NO: 619490 - protein, 14 aa, Homo sapiens
  CDR3 for beta chain variable domain of TCR clone 309745 (TRBV6-1, TRBJ1-3)
CASVQGGGGNTIYF

SEQ ID NO: 619491 - protein, 16 aa, Homo sapiens
  CDR3 for alpha chain variable domain of TCR clone 309746 (TRAV26-1, TRAJ37)
CIVRGDGSGNTGKLIF

SEQ ID NO: 619492 - protein, 17 aa, Homo sapiens
  CDR3 for beta chain variable domain of TCR clone 309746 (TRBV20-1, TRBJ2-1)
CSASSSGLAGFYNEQFF

SEQ ID NO: 619493 - protein, 14 aa, Homo sapiens
  CDR3 for alpha chain variable domain of TCR clone 309747 (TRAV12-3, TRAJ10)
SHLPLPGGGNKLTF

SEQ ID NO: 619494 - protein, 13 aa, Homo sapiens
  CDR3 for beta chain variable domain of TCR clone 309747 (TRBV6-3, TRBJ2-1)
CASSYDNYNEQFF

SEQ ID NO: 619495 - protein, 15 aa, Homo sapiens
  CDR3 for alpha chain variable domain of TCR clone 309748 (TRAV8-3, TRAJ45)
CASSYSGGGADGITF

SEQ ID NO: 619496 - protein, 18 aa, Homo sapiens
  CDR3 for beta chain variable domain of TCR clone 309748 (TRBV18, TRBJ1-3)
CASSPRGGAGPSGNTIYF

SEQ ID NO: 619497 - protein, 12 aa, Homo sapiens
  CDR3 for alpha chain variable domain of TCR clone 309749 (TRAV12-2, TRAJ9)
CAVYNGGFKTIF

SEQ ID NO: 619498 - protein, 13 aa, Homo sapiens
  CDR3 for beta chain variable domain of TCR clone 309749 (TRBV7-3, TRBJ1-1)
CASSQDWGAEAFF

SEQ ID NO: 619499 - protein, 18 aa, Homo sapiens
  CDR3 for alpha chain variable domain of TCR clone 309750 (TRAV21, TRAJ52)
RAVRPSPAGGPSYGKLTF

SEQ ID NO: 619500 - protein, 15 aa, Homo sapiens
  CDR3 for beta chain variable domain of TCR clone 309750 (TRBV19, TRBJ1-1)
CASTSGQIQNTEAFF

SEQ ID NO: 619501 - protein, 13 aa, Homo sapiens
  CDR3 for alpha chain variable domain of TCR clone 309751 (TRAV2, TRAJ40)
CAVVPSGTYKYIF

SEQ ID NO: 619502 - protein, 14 aa, Homo sapiens
  CDR3 for beta chain variable domain of TCR clone 309751 (TRBV19, TRBJ2-1)
CASPIFVLSGEQFF

SEQ ID NO: 619503 - protein, 14 aa, Homo sapiens
  CDR3 for alpha chain variable domain of TCR clone 309752 (TRAV3, TRAJ21)
CAVRDAYNFNKFYF

SEQ ID NO: 619504 - protein, 17 aa, Homo sapiens
  CDR3 for beta chain variable domain of TCR clone 309752 (TRBV20-1, TRBJ1-6)
CGARGGYTVSYNSPLHF

SEQ ID NO: 619505 - protein, 15 aa, Homo sapiens
  CDR3 for alpha chain variable domain of TCR clone 309753 (TRAV35, TRAJ34)
CAGTSIVRNTDKLIF

SEQ ID NO: 619506 - protein, 15 aa, Homo sapiens
  CDR3 for beta chain variable domain of TCR clone 309753 (TRBV6-1, TRBJ2-3)
CASSECGGITDTQYF

SEQ ID NO: 619507 - protein, 14 aa, Homo sapiens
  CDR3 for alpha chain variable domain of TCR clone 309754 (TRAV4, TRAJ17)
CLVGPRAAGNKLTF

SEQ ID NO: 619508 - protein, 13 aa, Homo sapiens
  CDR3 for beta chain variable domain of TCR clone 309754 (TRBV20-1, TRBJ2-7)
CSATHTSGYEQYF

SEQ ID NO: 619509 - protein, 18 aa, Homo sapiens
  CDR3 for alpha chain variable domain of TCR clone 309755 (TRAV26-1, TRAJ22)
CIVRVALISSGFARQLTF

SEQ ID NO: 619510 - protein, 13 aa, Homo sapiens
  CDR3 for beta chain variable domain of TCR clone 309755 (TRBV13, TRBJ2-5)
CASSPEVGETQYF

SEQ ID NO: 619511 - protein, 13 aa, Homo sapiens
  CDR3 for alpha chain variable domain of TCR clone 309756 (TRAV2, TRAJ40)
CAVVTTGTYEYIF

SEQ ID NO: 619512 - protein, 14 aa, Homo sapiens
  CDR3 for beta chain variable domain of TCR clone 309756 (TRBV19, TRBJ2-1)
CASPTFVLSGEQFF

SEQ ID NO: 619513 - protein, 16 aa, Homo sapiens
  CDR3 for alpha chain variable domain of TCR clone 309757 (TRAV8-1, TRAJ42)
GAVTSRYGGSQGNLIF

SEQ ID NO: 619514 - protein, 12 aa, Homo sapiens
  CDR3 for beta chain variable domain of TCR clone 309757 (TRBV6-3, TRBJ2-7)
CASSLGRRGLYF

SEQ ID NO: 619515 - protein, 14 aa, Homo sapiens
  CDR3 for alpha chain variable domain of TCR clone 309758 (TRAV17, TRAJ6)
CATDASGGPYIPTF

SEQ ID NO: 619516 - protein, 19 aa, Homo sapiens
  CDR3 for beta chain variable domain of TCR clone 309758 (TRBV4-3, TRBJ2-7)
CASSQEFIGWQVTPYEQYF

SEQ ID NO: 619517 - protein, 14 aa, Homo sapiens
  CDR3 for alpha chain variable domain of TCR clone 309759 (TRAV2, TRAJ9)
CAVEDRSGGFKTIF

SEQ ID NO: 619518 - protein, 16 aa, Homo sapiens
  CDR3 for beta chain variable domain of TCR clone 309759 (TRBV7-6, TRBJ2-7)
CASSPWLDIREDEQYF

SEQ ID NO: 619519 - protein, 14 aa, Homo sapiens
  CDR3 for alpha chain variable domain of TCR clone 309760 (TRAV29/DV5, TRAJ28)
CAARAGAGVNNLLS

SEQ ID NO: 619520 - protein, 13 aa, Homo sapiens
  CDR3 for beta chain variable domain of TCR clone 309760 (TRBV7-2, TRBJ1-5)
CASSFARNQPQHF

SEQ ID NO: 619521 - protein, 14 aa, Homo sapiens
  CDR3 for alpha chain variable domain of TCR clone 309761 (TRAV8-1, TRAJ36)
CALNSPTGANNLFF

SEQ ID NO: 619522 - protein, 15 aa, Homo sapiens
  CDR3 for beta chain variable domain of TCR clone 309761 (TRBV7-2, TRBJ2-3)
CASSLEQGGTDTQYF

SEQ ID NO: 619523 - protein, 12 aa, Homo sapiens
  CDR3 for alpha chain variable domain of TCR clone 309762 (TRAV13-2, TRAJ42)
CAEGGSQGNLIF

SEQ ID NO: 619524 - protein, 12 aa, Homo sapiens
  CDR3 for beta chain variable domain of TCR clone 309762 (TRBV11-2, TRBJ2-2)
CASSLGGGELFF

SEQ ID NO: 619525 - protein, 14 aa, Homo sapiens
  CDR3 for alpha chain variable domain of TCR clone 309763 (TRAV26-1, TRAJ38)
CIADNAGNNRKLSW

SEQ ID NO: 619526 - protein, 13 aa, Homo sapiens
  CDR3 for beta chain variable domain of TCR clone 309763 (TRBV7-9, TRBJ2-3)
CASSPGSTDTQYF

SEQ ID NO: 619527 - protein, 14 aa, Homo sapiens
  CDR3 for alpha chain variable domain of TCR clone 309764 (TRAV26-1, TRAJ38)
CIADNAGNNRKLIW

SEQ ID NO: 619528 - protein, 15 aa, Homo sapiens
  CDR3 for beta chain variable domain of TCR clone 309764 (TRBV4-1, TRBJ2-3)
CASGRGQGIPDTQYF

SEQ ID NO: 619529 - protein, 12 aa, Homo sapiens
  CDR3 for alpha chain variable domain of TCR clone 309765 (TRAV3, TRAJ31)
CAVRDGNARLMF

SEQ ID NO: 619530 - protein, 18 aa, Homo sapiens
  CDR3 for beta chain variable domain of TCR clone 309765 (TRBV7-2, TRBJ2-3)
CASSLKRECSGITDTQYF

SEQ ID NO: 619531 - protein, 18 aa, Homo sapiens
  CDR3 for alpha chain variable domain of TCR clone 309766 (TRAV13-1, TRAJ52)
CAADFPNAGGTSYGKLTF

SEQ ID NO: 619532 - protein, 13 aa, Homo sapiens
  CDR3 for beta chain variable domain of TCR clone 309766 (TRBV12-5, TRBJ2-3)
CASGDRQSDTQYL

SEQ ID NO: 619533 - protein, 14 aa, Homo sapiens
  CDR3 for alpha chain variable domain of TCR clone 309767 (TRAV12-3, TRAJ7)
CAMSEIGGNNRLAF

SEQ ID NO: 619534 - protein, 13 aa, Homo sapiens
  CDR3 for beta chain variable domain of TCR clone 309767 (TRBV9, TRBJ1-1)
CASSVARNPEAYF

SEQ ID NO: 619535 - protein, 15 aa, Homo sapiens
  CDR3 for alpha chain variable domain of TCR clone 309768 (TRAV26-1, TRAJ48)
CIVRVGDFGNEKLTF

SEQ ID NO: 619536 - protein, 16 aa, Homo sapiens
  CDR3 for beta chain variable domain of TCR clone 309768 (TRBV4-1, TRBJ2-3)
CASSQRAEGLTDTQYF

SEQ ID NO: 619537 - protein, 16 aa, Homo sapiens
  CDR3 for alpha chain variable domain of TCR clone 309769 (TRAV30, TRAJ24)
CGTEIVDADSWGEFQF

SEQ ID NO: 619538 - protein, 13 aa, Homo sapiens
  CDR3 for beta chain variable domain of TCR clone 309769 (TRBV11-2, TRBJ1-1)
CASSLGNGAEAFF

SEQ ID NO: 619539 - protein, 16 aa, Homo sapiens
  CDR3 for alpha chain variable domain of TCR clone 309770 (TRAV30, TRAJ24)
CGTEIVDADRWGKFQF

SEQ ID NO: 619540 - protein, 13 aa, Homo sapiens
  CDR3 for beta chain variable domain of TCR clone 309770 (TRBV18, TRBJ1-1)
CASSGGRNTEAFF

SEQ ID NO: 619541 - protein, 13 aa, Homo sapiens
  CDR3 for alpha chain variable domain of TCR clone 309771 (TRAV27, TRAJ57)
CAGFQGGSEKLVF

SEQ ID NO: 619542 - protein, 14 aa, Homo sapiens
  CDR3 for beta chain variable domain of TCR clone 309771 (TRBV20-1, TRBJ1-2)
CSGRKDGRAYGDTF

SEQ ID NO: 619543 - protein, 20 aa, Homo sapiens
  CDR3 for alpha chain variable domain of TCR clone 309772 (TRAV12-1, TRAJ42)
SSEIQPPTSVKGGSQGNLSF

SEQ ID NO: 619544 - protein, 14 aa, Homo sapiens
  CDR3 for beta chain variable domain of TCR clone 309772 (TRBV25-1, TRBJ1-2)
CASSDTTGVVGYTF

SEQ ID NO: 619545 - protein, 14 aa, Homo sapiens
  CDR3 for alpha chain variable domain of TCR clone 309773 (TRAV1-2, TRAJ6)
CAVSLSGGSYIPTF

SEQ ID NO: 619546 - protein, 14 aa, Homo sapiens
  CDR3 for beta chain variable domain of TCR clone 309773 (TRBV7-2, TRBJ2-7)
CASSLPPGQGPQYF

SEQ ID NO: 619547 - protein, 13 aa, Homo sapiens
  CDR3 for alpha chain variable domain of TCR clone 309774 (TRAV19, TRAJ57)
CALLQAGSGKLVF

SEQ ID NO: 619548 - protein, 13 aa, Homo sapiens
  CDR3 for beta chain variable domain of TCR clone 309774 (TRBV28, TRBJ2-1)
CASRSRGLNEHFF

SEQ ID NO: 619549 - protein, 16 aa, Homo sapiens
  CDR3 for alpha chain variable domain of TCR clone 309775 (TRAV12-2, TRAJ32)
CAVNLGQGSATNKLIF

SEQ ID NO: 619550 - protein, 15 aa, Homo sapiens
  CDR3 for beta chain variable domain of TCR clone 309775 (TRBV20-1, TRBJ2-7)
CSARGPLAGGREQDF

SEQ ID NO: 619551 - protein, 16 aa, Homo sapiens
  CDR3 for alpha chain variable domain of TCR clone 309776 (TRAV13-1, TRAJ48)
CAASIFGNFGNEKLTF

SEQ ID NO: 619552 - protein, 12 aa, Homo sapiens
  CDR3 for beta chain variable domain of TCR clone 309776 (TRBV14, TRBJ2-4)
CASSNLKSIQYV

SEQ ID NO: 619553 - protein, 18 aa, Homo sapiens
  CDR3 for alpha chain variable domain of TCR clone 309777 (TRAV29/DV5, TRAJ52)
CAAGFRGARGTSYGKLTF

SEQ ID NO: 619554 - protein, 16 aa, Homo sapiens
  CDR3 for beta chain variable domain of TCR clone 309777 (TRBV7-3, TRBJ2-2)
CASSLKRGTLSGELFF

SEQ ID NO: 619555 - protein, 15 aa, Homo sapiens
  CDR3 for alpha chain variable domain of TCR clone 309778 (TRAV13-1, TRAJ11)
CAASIGIQDTAPSPL

SEQ ID NO: 619556 - protein, 11 aa, Homo sapiens
  CDR3 for beta chain variable domain of TCR clone 309778 (TRBV20-1, TRBJ2-7)
CSARLSYEQYF

SEQ ID NO: 619557 - protein, 14 aa, Homo sapiens
  CDR3 for alpha chain variable domain of TCR clone 309779 (TRAV12-1, TRAJ23)
CVVIVYNQGGKLIF

SEQ ID NO: 619558 - protein, 13 aa, Homo sapiens
  CDR3 for beta chain variable domain of TCR clone 309779 (TRBV20-1, TRBJ2-7)
CSATHTSGYEQYF

SEQ ID NO: 619559 - protein, 15 aa, Homo sapiens
  CDR3 for alpha chain variable domain of TCR clone 309780 (TRAV21, TRAJ37)
CAVRPTLSNTGKLIF

SEQ ID NO: 619560 - protein, 16 aa, Homo sapiens
  CDR3 for beta chain variable domain of TCR clone 309780 (TRBV24-1, TRBJ2-3)
CATSDRRQDLTDTQYS

SEQ ID NO: 619561 - protein, 14 aa, Homo sapiens
  CDR3 for alpha chain variable domain of TCR clone 309781 (TRAV2, TRAJ9)
CAVADRSGGFKTIF

SEQ ID NO: 619562 - protein, 16 aa, Homo sapiens
  CDR3 for beta chain variable domain of TCR clone 309781 (TRBV7-3, TRBJ2-1)
CASSLEGYRSYNEQFF

SEQ ID NO: 619563 - protein, 15 aa, Homo sapiens
  CDR3 for alpha chain variable domain of TCR clone 309782 (TRAV12-1, TRAJ36)
CVVNEHQTWANNLFF

SEQ ID NO: 619564 - protein, 12 aa, Homo sapiens
  CDR3 for beta chain variable domain of TCR clone 309782 (TRBV29-1, TRBJ2-3)
CSVTGGADTQYF

SEQ ID NO: 619565 - protein, 14 aa, Homo sapiens
  CDR3 for alpha chain variable domain of TCR clone 309783 (TRAV29/DV5, TRAJ47)
CAASSIEYGNKLVF

SEQ ID NO: 619566 - protein, 15 aa, Homo sapiens
  CDR3 for beta chain variable domain of TCR clone 309783 (TRBV7-2, TRBJ1-2)
CASSPRAGWNYGYTF

SEQ ID NO: 619567 - protein, 15 aa, Homo sapiens
  CDR3 for alpha chain variable domain of TCR clone 309784 (TRAV26-1, TRAJ44)
CIVRANNGTDSKLTF

SEQ ID NO: 619568 - protein, 16 aa, Homo sapiens
  CDR3 for beta chain variable domain of TCR clone 309784 (TRBV7-7, TRBJ2-1)
CASSLASGTSYNEQFF

SEQ ID NO: 619569 - protein, 16 aa, Homo sapiens
  CDR3 for alpha chain variable domain of TCR clone 309785 (TRAV1-2, TRAJ10)
CAVRGVLTGGGKKLTF

SEQ ID NO: 619570 - protein, 15 aa, Homo sapiens
  CDR3 for beta chain variable domain of TCR clone 309785 (TRBV7-9, TRBJ1-6)
CASSSPGRGNSPLHF

SEQ ID NO: 619571 - protein, 14 aa, Homo sapiens
  CDR3 for alpha chain variable domain of TCR clone 309786 (TRAV1-2, TRAJ16)
CAVNRFSDGQKLLF

SEQ ID NO: 619572 - protein, 15 aa, Homo sapiens
  CDR3 for beta chain variable domain of TCR clone 309786 (TRBV12-4, TRBJ2-1)
CASRHRDRVNNEQFF

SEQ ID NO: 619573 - protein, 16 aa, Homo sapiens
  CDR3 for alpha chain variable domain of TCR clone 309787 (TRAV30, TRAJ24)
CGTEIVDADSWGKFQF

SEQ ID NO: 619574 - protein, 13 aa, Homo sapiens
  CDR3 for beta chain variable domain of TCR clone 309787 (TRBV10-3, TRBJ1-2)
CAISERDSYGYAL

SEQ ID NO: 619575 - protein, 12 aa, Homo sapiens
  CDR3 for alpha chain variable domain of TCR clone 309788 (TRAV29/DV5, TRAJ49)
CAATDTGNQFYF

SEQ ID NO: 619576 - protein, 19 aa, Homo sapiens
  CDR3 for beta chain variable domain of TCR clone 309788 (TRBV25-1, TRBJ2-2)
CAILVYRVDRGRKTGERFF

SEQ ID NO: 619577 - protein, 14 aa, Homo sapiens
  CDR3 for alpha chain variable domain of TCR clone 309789 (TRAV27, TRAJ44)
CAGEGAGTASKLTF

SEQ ID NO: 619578 - protein, 15 aa, Homo sapiens
  CDR3 for beta chain variable domain of TCR clone 309789 (TRBV12-4, TRBJ2-1)
CASSLLATGNNEQFF

SEQ ID NO: 619579 - protein, 13 aa, Homo sapiens
  CDR3 for alpha chain variable domain of TCR clone 309790 (TRAV17, TRAJ7)
CATDNYGNNRLAF

SEQ ID NO: 619580 - protein, 16 aa, Homo sapiens
  CDR3 for beta chain variable domain of TCR clone 309790 (TRBV4-1, TRBJ2-5)
CASSQAIAASSATQDF

SEQ ID NO: 619581 - protein, 13 aa, Homo sapiens
  CDR3 for alpha chain variable domain of TCR clone 309791 (TRAV1-2, TRAJ17)
CAVGKAAGNKLTF

SEQ ID NO: 619582 - protein, 14 aa, Homo sapiens
  CDR3 for beta chain variable domain of TCR clone 309791 (TRBV19, TRBJ2-1)
CASPTFVLSGEQFF

SEQ ID NO: 619583 - protein, 23 aa, Homo sapiens
  CDR3 for alpha chain variable domain of TCR clone 309792 (TRAV26-1, TRAJ38)
CIADNAGNNHIQNPDPAVYQLRD

SEQ ID NO: 619584 - protein, 19 aa, Homo sapiens
  CDR3 for beta chain variable domain of TCR clone 309792 (TRBV11-2, TRBJ2-2)
LRTRPCISVPAALEAELFF

SEQ ID NO: 619585 - protein, 14 aa, Homo sapiens
  CDR3 for alpha chain variable domain of TCR clone 309793 (TRAV21, TRAJ21)
CAVKGFGNFNKFYF

SEQ ID NO: 619586 - protein, 13 aa, Homo sapiens
  CDR3 for beta chain variable domain of TCR clone 309793 (TRBV18, TRBJ1-1)
FASSPETKPEAFF

SEQ ID NO: 619587 - protein, 13 aa, Homo sapiens
  CDR3 for alpha chain variable domain of TCR clone 309794 (TRAV35, TRAJ21)
CAGQLSNFNKFYF

SEQ ID NO: 619588 - protein, 14 aa, Homo sapiens
  CDR3 for beta chain variable domain of TCR clone 309794 (TRBV11-2, TRBJ2-5)
CASSRTGGIETQYF

SEQ ID NO: 619589 - protein, 11 aa, Homo sapiens
  CDR3 for alpha chain variable domain of TCR clone 309795 (TRAV13-1, TRAJ6)
CATLGSSIPTF

SEQ ID NO: 619590 - protein, 12 aa, Homo sapiens
  CDR3 for beta chain variable domain of TCR clone 309795 (TRBV11-2, TRBJ2-1)
CASSPGNNEQFF

SEQ ID NO: 619591 - protein, 13 aa, Homo sapiens
  CDR3 for alpha chain variable domain of TCR clone 309796 (TRAV8-4, TRAJ10)
CAAFTGGGNKLTF

SEQ ID NO: 619592 - protein, 14 aa, Homo sapiens
  CDR3 for beta chain variable domain of TCR clone 309796 (TRBV12-4, TRBJ2-7)
CASTFGLSTYEQYF

SEQ ID NO: 619593 - protein, 17 aa, Homo sapiens
  CDR3 for alpha chain variable domain of TCR clone 309797 (TRAV3, TRAJ38)
CAVRDCRNAGNNRKLIW

SEQ ID NO: 619594 - protein, 14 aa, Homo sapiens
  CDR3 for beta chain variable domain of TCR clone 309797 (TRBV5-5, TRBJ1-5)
CASSGQGVDQPQHF

SEQ ID NO: 619595 - protein, 12 aa, Homo sapiens
  CDR3 for alpha chain variable domain of TCR clone 309798 (TRAV21, TRAJ13)
PGPSGGYQKVTF

SEQ ID NO: 619596 - protein, 16 aa, Homo sapiens
  CDR3 for beta chain variable domain of TCR clone 309798 (TRBV5-1, TRBJ2-1)
CASSIRSGGSYNEQFF

SEQ ID NO: 619597 - protein, 13 aa, Homo sapiens
  CDR3 for alpha chain variable domain of TCR clone 309799 (TRAV20, TRAJ29)
CAVKAVGNTPLVF

SEQ ID NO: 619598 - protein, 15 aa, Homo sapiens
  CDR3 for beta chain variable domain of TCR clone 309799 (TRBV10-2, TRBJ2-5)
CASRGSGGPQETQYF

SEQ ID NO: 619599 - protein, 15 aa, Homo sapiens
  CDR3 for alpha chain variable domain of TCR clone 309800 (TRAV3, TRAJ5)
CALRDRKTGRRALTF

SEQ ID NO: 619600 - protein, 15 aa, Homo sapiens
  CDR3 for beta chain variable domain of TCR clone 309800 (TRBV7-9, TRBJ2-2)
CASGPLDTFPGELFF

SEQ ID NO: 619601 - protein, 15 aa, Homo sapiens
  CDR3 for alpha chain variable domain of TCR clone 309801 (TRAV13-1, TRAJ32)
CAASKYGGATNKLIF

SEQ ID NO: 619602 - protein, 17 aa, Homo sapiens
  CDR3 for beta chain variable domain of TCR clone 309801 (TRBV7-3, TRBJ2-5)
CASSLGSGRSGSETQYF

SEQ ID NO: 619603 - protein, 16 aa, Homo sapiens
  CDR3 for alpha chain variable domain of TCR clone 309802 (TRAV21, TRAJ45)
CAVRWGSGGGADGLTF

SEQ ID NO: 619604 - protein, 14 aa, Homo sapiens
  CDR3 for beta chain variable domain of TCR clone 309802 (TRBV4-2, TRBJ1-2)
CASSPGGSNYGYTF

SEQ ID NO: 619605 - protein, 14 aa, Homo sapiens
  CDR3 for alpha chain variable domain of TCR clone 309803 (TRAV16, TRAJ33)
CALSAMDSNYQLIW

SEQ ID NO: 619606 - protein, 16 aa, Homo sapiens
  CDR3 for beta chain variable domain of TCR clone 309803 (TRBV20-1, TRBJ2-3)
CSAVRDRGPIADTQYF

SEQ ID NO: 619607 - protein, 14 aa, Homo sapiens
  CDR3 for alpha chain variable domain of TCR clone 309804 (TRAV26-1, TRAJ21)
CIAHTPSTNFTLDL

SEQ ID NO: 619608 - protein, 15 aa, Homo sapiens
  CDR3 for beta chain variable domain of TCR clone 309804 (TRBV20-1, TRBJ2-7)
CSARDRVSGMDEQYF

SEQ ID NO: 619609 - protein, 12 aa, Homo sapiens
  CDR3 for alpha chain variable domain of TCR clone 309805 (TRAV12-3, TRAJ17)
CAMTLTGNKLTS

SEQ ID NO: 619610 - protein, 17 aa, Homo sapiens
  CDR3 for beta chain variable domain of TCR clone 309805 (TRBV7-8, TRBJ2-6)
CASSAGTGGAGANVLTF

SEQ ID NO: 619611 - protein, 11 aa, Homo sapiens
  CDR3 for alpha chain variable domain of TCR clone 309806 (TRAV3, TRAJ21)
CAVGNFNKFYF

SEQ ID NO: 619612 - protein, 16 aa, Homo sapiens
  CDR3 for beta chain variable domain of TCR clone 309806 (TRBV11-2, TRBJ2-3)
CASSSRTSGGAGTQYF

SEQ ID NO: 619613 - protein, 11 aa, Homo sapiens
  CDR3 for alpha chain variable domain of TCR clone 309807 (TRAV13-2, TRAJ20)
SADSNDYKLSF

SEQ ID NO: 619614 - protein, 12 aa, Homo sapiens
  CDR3 for beta chain variable domain of TCR clone 309807 (TRBV5-1, TRBJ2-3)
CASSLAADTQYF

SEQ ID NO: 619615 - protein, 16 aa, Homo sapiens
  CDR3 for alpha chain variable domain of TCR clone 309808 (TRAV27, TRAJ48)
TAAQPGDTGLYLPLTF

SEQ ID NO: 619616 - protein, 13 aa, Homo sapiens
  CDR3 for beta chain variable domain of TCR clone 309808 (TRBV7-9, TRBJ1-2)
CASSLKQNYGYTF

SEQ ID NO: 619617 - protein, 14 aa, Homo sapiens
  CDR3 for alpha chain variable domain of TCR clone 309809 (TRAV26-1, TRAJ29)
CIVRVGIRKHTSCL

SEQ ID NO: 619618 - protein, 14 aa, Homo sapiens
  CDR3 for beta chain variable domain of TCR clone 309809 (TRBV25-1, TRBJ1-1)
CASTHLGGNTEAFF

SEQ ID NO: 619619 - protein, 14 aa, Homo sapiens
  CDR3 for alpha chain variable domain of TCR clone 309810 (TRAV38-1, TRAJ45)
CAYYSGGGADGLTF

SEQ ID NO: 619620 - protein, 14 aa, Homo sapiens
  CDR3 for beta chain variable domain of TCR clone 309810 (TRBV12-4, TRBJ2-3)
CASSGQGSTDTRYF

SEQ ID NO: 619621 - protein, 14 aa, Homo sapiens
  CDR3 for alpha chain variable domain of TCR clone 309811 (TRAV12-2, TRAJ4)
CAVLIGGGYNKLIF

SEQ ID NO: 619622 - protein, 15 aa, Homo sapiens
  CDR3 for beta chain variable domain of TCR clone 309811 (TRBV2, TRBJ2-1)
CASSEARSAYNEQFF

SEQ ID NO: 619623 - protein, 14 aa, Homo sapiens
  CDR3 for alpha chain variable domain of TCR clone 309812 (TRAV26-1, TRAJ38)
CIADNAGNNRKLIW

SEQ ID NO: 619624 - protein, 15 aa, Homo sapiens
  CDR3 for beta chain variable domain of TCR clone 309812 (TRBV28, TRBJ1-1)
CASTSTRGLNTEAFF

SEQ ID NO: 619625 - protein, 12 aa, Homo sapiens
  CDR3 for alpha chain variable domain of TCR clone 309813 (TRAV13-1, TRAJ15)
CAASQAGTALIF

SEQ ID NO: 619626 - protein, 13 aa, Homo sapiens
  CDR3 for beta chain variable domain of TCR clone 309813 (TRBV10-3, TRBJ1-2)
CAISERDSYGYAF

SEQ ID NO: 619627 - protein, 16 aa, Homo sapiens
  CDR3 for alpha chain variable domain of TCR clone 309814 (TRAV12-3, TRAJ4)
CAMTRLFSGGYHKLIF

SEQ ID NO: 619628 - protein, 16 aa, Homo sapiens
  CDR3 for beta chain variable domain of TCR clone 309814 (TRBV27, TRBJ2-1)
CASSARLAGVYNEQFF

SEQ ID NO: 619629 - protein, 17 aa, Homo sapiens
  CDR3 for alpha chain variable domain of TCR clone 309815 (TRAV26-1, TRAJ53)
CIVRVDDSGCSNYQLTF

SEQ ID NO: 619630 - protein, 15 aa, Homo sapiens
  CDR3 for beta chain variable domain of TCR clone 309815 (TRBV7-9, TRBJ1-4)
CASSRTGGFNEKLFF

SEQ ID NO: 619631 - protein, 11 aa, Homo sapiens
  CDR3 for alpha chain variable domain of TCR clone 309816 (TRAV13-2, TRAJ23)
CAESPRGKLIF

SEQ ID NO: 619632 - protein, 18 aa, Homo sapiens
  CDR3 for beta chain variable domain of TCR clone 309816 (TRBV6-5, TRBJ1-1)
CASSYSAPGGTGGTGAFF

SEQ ID NO: 619633 - protein, 15 aa, Homo sapiens
  CDR3 for alpha chain variable domain of TCR clone 309817 (TRAV26-1, TRAJ29)
SIVRVEGAGNTPLVF

SEQ ID NO: 619634 - protein, 15 aa, Homo sapiens
  CDR3 for beta chain variable domain of TCR clone 309817 (TRBV7-9, TRBJ1-5)
CASSQGHQPNQPQHF

SEQ ID NO: 619635 - protein, 15 aa, Homo sapiens
  CDR3 for alpha chain variable domain of TCR clone 309818 (TRAV34, TRAJ38)
CGADFTPGNNRKLIW

SEQ ID NO: 619636 - protein, 16 aa, Homo sapiens
  CDR3 for beta chain variable domain of TCR clone 309818 (TRBV6-1, TRBJ2-3)
CASSEVIVQGTDTHYF

SEQ ID NO: 619637 - protein, 14 aa, Homo sapiens
  CDR3 for alpha chain variable domain of TCR clone 309819 (TRAV2, TRAJ37)
CAVDFTSNTGKLIF

SEQ ID NO: 619638 - protein, 14 aa, Homo sapiens
  CDR3 for beta chain variable domain of TCR clone 309819 (TRBV7-2, TRBJ2-7)
CASSPKTSFCEQYF

SEQ ID NO: 619639 - protein, 14 aa, Homo sapiens
  CDR3 for alpha chain variable domain of TCR clone 309820 (TRAV1-2, TRAJ8)
CAVREDTGFQKLVF

SEQ ID NO: 619640 - protein, 15 aa, Homo sapiens
  CDR3 for beta chain variable domain of TCR clone 309820 (TRBV20-1, TRBJ2-7)
CSAEAGTSGAYEQYF

SEQ ID NO: 619641 - protein, 14 aa, Homo sapiens
  CDR3 for alpha chain variable domain of TCR clone 309821 (TRAV8-3, TRAJ4)
CAVGASGGYNKLIF

SEQ ID NO: 619642 - protein, 16 aa, Homo sapiens
  CDR3 for beta chain variable domain of TCR clone 309821 (TRBV9, TRBJ2-1)
CASSVGGGGNYNEQFF

SEQ ID NO: 619643 - protein, 12 aa, Homo sapiens
  CDR3 for alpha chain variable domain of TCR clone 309822 (TRAV1-1, TRAJ8)
CAGGPGFQKLVF

SEQ ID NO: 619644 - protein, 12 aa, Homo sapiens
  CDR3 for beta chain variable domain of TCR clone 309822 (TRBV12-4, TRBJ2-7)
CASSLGGYEQYF

SEQ ID NO: 619645 - protein, 13 aa, Homo sapiens
  CDR3 for alpha chain variable domain of TCR clone 309823 (TRAV39, TRAJ58)
CAGEETSGSMLTF

SEQ ID NO: 619646 - protein, 13 aa, Homo sapiens
  CDR3 for beta chain variable domain of TCR clone 309823 (TRBV15, TRBJ2-7)
CATSTTGHYEQYF

SEQ ID NO: 619647 - protein, 14 aa, Homo sapiens
  CDR3 for alpha chain variable domain of TCR clone 309824 (TRAV2, TRAJ3)
CAVYRYSSASKIIF

SEQ ID NO: 619648 - protein, 16 aa, Homo sapiens
  CDR3 for beta chain variable domain of TCR clone 309824 (TRBV20-1, TRBJ1-5)
CSAELPGKQTNQPQHF

SEQ ID NO: 619649 - protein, 15 aa, Homo sapiens
  CDR3 for alpha chain variable domain of TCR clone 309825 (TRAV20, TRAJ4)
CAVEGASGGYNKLIF

SEQ ID NO: 619650 - protein, 14 aa, Homo sapiens
  CDR3 for beta chain variable domain of TCR clone 309825 (TRBV7-8, TRBJ2-7)
RASTLGGALGEQYF

SEQ ID NO: 619651 - protein, 15 aa, Homo sapiens
  CDR3 for alpha chain variable domain of TCR clone 309826 (TRAV23/DV6, TRAJ38)
CAASGGAGNNRKLIW

SEQ ID NO: 619652 - protein, 13 aa, Homo sapiens
  CDR3 for beta chain variable domain of TCR clone 309826 (TRBV7-2, TRBJ1-2)
CASSLPGLYGYAF

SEQ ID NO: 619653 - protein, 12 aa, Homo sapiens
  CDR3 for alpha chain variable domain of TCR clone 309827 (TRAV8-3, TRAJ26)
CAGDNYGQNFVF

SEQ ID NO: 619654 - protein, 16 aa, Homo sapiens
  CDR3 for beta chain variable domain of TCR clone 309827 (TRBV19, TRBJ1-6)
CASSVAPVAGNSPLHF

SEQ ID NO: 619655 - protein, 17 aa, Homo sapiens
  CDR3 for alpha chain variable domain of TCR clone 309828 (TRAV26-1, TRAJ58)
CIVRFGAEETSGSRLTF

SEQ ID NO: 619656 - protein, 18 aa, Homo sapiens
  CDR3 for beta chain variable domain of TCR clone 309828 (TRBV7-9, TRBJ2-7)
CASSLTTSGSRTWYEQYF

SEQ ID NO: 619657 - protein, 13 aa, Homo sapiens
  CDR3 for alpha chain variable domain of TCR clone 309829 (TRAV1-1, TRAJ9)
CAAKNTGGFKTIF

SEQ ID NO: 619658 - protein, 16 aa, Homo sapiens
  CDR3 for beta chain variable domain of TCR clone 309829 (TRBV7-9, TRBJ2-3)
CASSLDYPDLTDTQYF

SEQ ID NO: 619659 - protein, 14 aa, Homo sapiens
  CDR3 for alpha chain variable domain of TCR clone 309830 (TRAV29/DV5, TRAJ36)
CAARRKTGADNLFF

SEQ ID NO: 619660 - protein, 15 aa, Homo sapiens
  CDR3 for beta chain variable domain of TCR clone 309830 (TRBV4-1, TRBJ1-4)
CASSDTGGTNEKLFF

SEQ ID NO: 619661 - protein, 12 aa, Homo sapiens
  CDR3 for alpha chain variable domain of TCR clone 309831 (TRAV13-2, TRAJ31)
CAESYNNARLMF

SEQ ID NO: 619662 - protein, 11 aa, Homo sapiens
  CDR3 for beta chain variable domain of TCR clone 309831 (TRBV24-1, TRBJ2-3)
CATASTDTQYF

SEQ ID NO: 619663 - protein, 14 aa, Homo sapiens
  CDR3 for alpha chain variable domain of TCR clone 309832 (TRAV12-3, TRAJ10)
IHLPLTGGGNKLTF

SEQ ID NO: 619664 - protein, 15 aa, Homo sapiens
  CDR3 for beta chain variable domain of TCR clone 309832 (TRBV29-1, TRBJ2-6)
CSVGDRGSGANVLTF

SEQ ID NO: 619665 - protein, 18 aa, Homo sapiens
  CDR3 for alpha chain variable domain of TCR clone 309833 (TRAV4, TRAJ20)
CCVLLPRGRRSNDYKLSF

SEQ ID NO: 619666 - protein, 18 aa, Homo sapiens
  CDR3 for beta chain variable domain of TCR clone 309833 (TRBV2, TRBJ2-5)
CASSGDPQGRGAQETQYF

SEQ ID NO: 619667 - protein, 14 aa, Homo sapiens
  CDR3 for alpha chain variable domain of TCR clone 309834 (TRAV4, TRAJ12)
CLVGYMDSSYKLIF

SEQ ID NO: 619668 - protein, 14 aa, Homo sapiens
  CDR3 for beta chain variable domain of TCR clone 309834 (TRBV27, TRBJ1-1)
CASCPGGGATEAFF

SEQ ID NO: 619669 - protein, 14 aa, Homo sapiens
  CDR3 for alpha chain variable domain of TCR clone 309835 (TRAV1-2, TRAJ16)
CAVNRVSDGQKLLF

SEQ ID NO: 619670 - protein, 13 aa, Homo sapiens
  CDR3 for beta chain variable domain of TCR clone 309835 (TRBV10-3, TRBJ2-1)
CATGLADNNEQFF

SEQ ID NO: 619671 - protein, 11 aa, Homo sapiens
  CDR3 for alpha chain variable domain of TCR clone 309836 (TRAV3, TRAJ17)
PRGAAGNKLTF

SEQ ID NO: 619672 - protein, 16 aa, Homo sapiens
  CDR3 for beta chain variable domain of TCR clone 309836 (TRBV7-6, TRBJ2-1)
CASSAPGPSSYNQQFF

SEQ ID NO: 619673 - protein, 12 aa, Homo sapiens
  CDR3 for alpha chain variable domain of TCR clone 309837 (TRAV3, TRAJ20)
CAVRDGDYKLSF

SEQ ID NO: 619674 - protein, 12 aa, Homo sapiens
  CDR3 for beta chain variable domain of TCR clone 309837 (TRBV7-9, TRBJ2-7)
CASSIKREEQYF

SEQ ID NO: 619675 - protein, 14 aa, Homo sapiens
  CDR3 for alpha chain variable domain of TCR clone 309838 (TRAV26-1, TRAJ38)
CIADNAGNNRKLIW

SEQ ID NO: 619676 - protein, 17 aa, Homo sapiens
  CDR3 for beta chain variable domain of TCR clone 309838 (TRBV7-9, TRBJ2-3)
CASSPTVAGDLTATQYF

SEQ ID NO: 619677 - protein, 15 aa, Homo sapiens
  CDR3 for alpha chain variable domain of TCR clone 309839 (TRAV19, TRAJ9)
CALSEARTGGFKTIF

SEQ ID NO: 619678 - protein, 17 aa, Homo sapiens
  CDR3 for beta chain variable domain of TCR clone 309839 (TRBV28, TRBJ2-5)
CASSTPEGDAVQETQYF

SEQ ID NO: 619679 - protein, 12 aa, Homo sapiens
  CDR3 for alpha chain variable domain of TCR clone 309840 (TRAV16, TRAJ10)
CSRTGGGNKLTF

SEQ ID NO: 619680 - protein, 14 aa, Homo sapiens
  CDR3 for beta chain variable domain of TCR clone 309840 (TRBV7-2, TRBJ1-2)
CASSQTGSTYGYTV

SEQ ID NO: 619681 - protein, 13 aa, Homo sapiens
  CDR3 for alpha chain variable domain of TCR clone 309841 (TRAV20, TRAJ20)
CAVQALNDYKLSF

SEQ ID NO: 619682 - protein, 13 aa, Homo sapiens
  CDR3 for beta chain variable domain of TCR clone 309841 (TRBV7-9, TRBJ1-4)
CASSLPGIETLFF

SEQ ID NO: 619683 - protein, 16 aa, Homo sapiens
  CDR3 for alpha chain variable domain of TCR clone 309842 (TRAV1-1, TRAJ29)
CAVRSTRNSGNTPLVF

SEQ ID NO: 619684 - protein, 15 aa, Homo sapiens
  CDR3 for beta chain variable domain of TCR clone 309842 (TRBV29-1, TRBJ2-1)
CSVGRHALVYNEQFF

SEQ ID NO: 619685 - protein, 23 aa, Homo sapiens
  CDR3 for alpha chain variable domain of TCR clone 309843 (TRAV26-1, TRAJ38)
CIADNAGNNHIQNPDPAVYQLRD

SEQ ID NO: 619686 - protein, 13 aa, Homo sapiens
  CDR3 for beta chain variable domain of TCR clone 309843 (TRBV10-3, TRBJ2-7)
CASKLVVNYEQYF

SEQ ID NO: 619687 - protein, 13 aa, Homo sapiens
  CDR3 for alpha chain variable domain of TCR clone 309844 (TRAV12-2, TRAJ34)
CGVRGYNTDKLIF

SEQ ID NO: 619688 - protein, 15 aa, Homo sapiens
  CDR3 for beta chain variable domain of TCR clone 309844 (TRBV28, TRBJ2-1)
CASRTGAGVIARQFF

SEQ ID NO: 619689 - protein, 12 aa, Homo sapiens
  CDR3 for alpha chain variable domain of TCR clone 309845 (TRAV21, TRAJ31)
CAVWGNNARLMF

SEQ ID NO: 619690 - protein, 16 aa, Homo sapiens
  CDR3 for beta chain variable domain of TCR clone 309845 (TRBV6-7, TRBJ2-5)
CASSYGPGGQKETQYF

SEQ ID NO: 619691 - protein, 11 aa, Homo sapiens
  CDR3 for alpha chain variable domain of TCR clone 309846 (TRAV21, TRAJ7)
CAAYGNNRIAV

SEQ ID NO: 619692 - protein, 14 aa, Homo sapiens
  CDR3 for beta chain variable domain of TCR clone 309846 (TRBV4-1, TRBJ2-7)
CASSRTGVAFEQYF

SEQ ID NO: 619693 - protein, 13 aa, Homo sapiens
  CDR3 for alpha chain variable domain of TCR clone 309847 (TRAV13-1, TRAJ39)
CAASIWAGNRLTF

SEQ ID NO: 619694 - protein, 14 aa, Homo sapiens
  CDR3 for beta chain variable domain of TCR clone 309847 (TRBV7-7, TRBJ2-2)
CATRQDSDTGELFF

SEQ ID NO: 619695 - protein, 12 aa, Homo sapiens
  CDR3 for alpha chain variable domain of TCR clone 309848 (TRAV8-3, TRAJ7)
CAVEGGSNRLAF

SEQ ID NO: 619696 - protein, 15 aa, Homo sapiens
  CDR3 for beta chain variable domain of TCR clone 309848 (TRBV10-3, TRBJ2-1)
CAISDVQDRAYEQFF

SEQ ID NO: 619697 - protein, 12 aa, Homo sapiens
  CDR3 for alpha chain variable domain of TCR clone 309849 (TRAV4, TRAJ26)
CLVGDYGQNFDF

SEQ ID NO: 619698 - protein, 13 aa, Homo sapiens
  CDR3 for beta chain variable domain of TCR clone 309849 (TRBV7-9, TRBJ1-2)
CASSLKQNYGYTF

SEQ ID NO: 619699 - protein, 16 aa, Homo sapiens
  CDR3 for alpha chain variable domain of TCR clone 309850 (TRAV3, TRAJ10)
CAVRDMRAGGGNKLTF

SEQ ID NO: 619700 - protein, 16 aa, Homo sapiens
  CDR3 for beta chain variable domain of TCR clone 309850 (TRBV12-4, TRBJ2-5)
CASSFFVRGRQETRYF

SEQ ID NO: 619701 - protein, 13 aa, Homo sapiens
  CDR3 for alpha chain variable domain of TCR clone 309851 (TRAV2, TRAJ15)
CAVASQAGTALIF

SEQ ID NO: 619702 - protein, 14 aa, Homo sapiens
  CDR3 for beta chain variable domain of TCR clone 309851 (TRBV18, TRBJ1-2)
CASSPDRVVYGYTF

SEQ ID NO: 619703 - protein, 15 aa, Homo sapiens
  CDR3 for alpha chain variable domain of TCR clone 309852 (TRAV23/DV6, TRAJ33)
CAASNSGGGNYQLIW

SEQ ID NO: 619704 - protein, 11 aa, Homo sapiens
  CDR3 for beta chain variable domain of TCR clone 309852 (TRBV7-8, TRBJ2-7)
CASSLSLEQYF

SEQ ID NO: 619705 - protein, 14 aa, Homo sapiens
  CDR3 for alpha chain variable domain of TCR clone 309853 (TRAV8-3, TRAJ4)
CAVGAAGGYNKLIF

SEQ ID NO: 619706 - protein, 17 aa, Homo sapiens
  CDR3 for beta chain variable domain of TCR clone 309853 (TRBV25-1, TRBJ2-7)
CASSDARVVFSSYEQYF

SEQ ID NO: 619707 - protein, 14 aa, Homo sapiens
  CDR3 for alpha chain variable domain of TCR clone 309854 (TRAV1-2, TRAJ8)
CAVREDTGLQKLVF

SEQ ID NO: 619708 - protein, 12 aa, Homo sapiens
  CDR3 for beta chain variable domain of TCR clone 309854 (TRBV2, TRBJ2-1)
CAYGPPGNEQFF

SEQ ID NO: 619709 - protein, 15 aa, Homo sapiens
  CDR3 for alpha chain variable domain of TCR clone 309855 (TRAV8-4, TRAJ6)
CAVSAPSGGSYIPTF

SEQ ID NO: 619710 - protein, 10 aa, Homo sapiens
  CDR3 for beta chain variable domain of TCR clone 309855 (TRBV2, TRBJ2-4)
CASRGSIQYF

SEQ ID NO: 619711 - protein, 14 aa, Homo sapiens
  CDR3 for alpha chain variable domain of TCR clone 309856 (TRAV1-2, TRAJ8)
CAVREDTGFQKLVF

SEQ ID NO: 619712 - protein, 16 aa, Homo sapiens
  CDR3 for beta chain variable domain of TCR clone 309856 (TRBV12-5, TRBJ2-5)
CSSGPRTSGNQETQYF

SEQ ID NO: 619713 - protein, 14 aa, Homo sapiens
  CDR3 for alpha chain variable domain of TCR clone 309857 (TRAV26-1, TRAJ38)
CVADNAGNNRKLIW

SEQ ID NO: 619714 - protein, 13 aa, Homo sapiens
  CDR3 for beta chain variable domain of TCR clone 309857 (TRBV15, TRBJ1-6)
CATSGGLNSPLHF

SEQ ID NO: 619715 - protein, 14 aa, Homo sapiens
  CDR3 for alpha chain variable domain of TCR clone 309858 (TRAV1-2, TRAJ16)
CAVNRFSDGQELLF

SEQ ID NO: 619716 - protein, 16 aa, Homo sapiens
  CDR3 for beta chain variable domain of TCR clone 309858 (TRBV19, TRBJ2-2)
CASSTARASNTGELFF

SEQ ID NO: 619717 - protein, 11 aa, Homo sapiens
  CDR3 for alpha chain variable domain of TCR clone 309859 (TRAV16, TRAJ31)
CALFNNARLMF

SEQ ID NO: 619718 - protein, 15 aa, Homo sapiens
  CDR3 for beta chain variable domain of TCR clone 309859 (TRBV18, TRBJ1-1)
CASSPRQGENTEAFF

SEQ ID NO: 619719 - protein, 13 aa, Homo sapiens
  CDR3 for alpha chain variable domain of TCR clone 309860 (TRAV16, TRAJ7)
CAPLLGGNNRLAF

SEQ ID NO: 619720 - protein, 16 aa, Homo sapiens
  CDR3 for beta chain variable domain of TCR clone 309860 (TRBV13, TRBJ2-2)
CASSPRTGEHTGELFF

SEQ ID NO: 619721 - protein, 15 aa, Homo sapiens
  CDR3 for alpha chain variable domain of TCR clone 309861 (TRAV20, TRAJ53)
RAVQASGGSNYKLTF

SEQ ID NO: 619722 - protein, 12 aa, Homo sapiens
  CDR3 for beta chain variable domain of TCR clone 309861 (TRBV7-2, TRBJ2-1)
CASSPQDIEQFF

SEQ ID NO: 619723 - protein, 14 aa, Homo sapiens
  CDR3 for alpha chain variable domain of TCR clone 309862 (TRAV16, TRAJ42)
CALLAGGSQGNLIL

SEQ ID NO: 619724 - protein, 13 aa, Homo sapiens
  CDR3 for beta chain variable domain of TCR clone 309862 (TRBV7-9, TRBJ1-2)
CASSLKQNYGYTF

SEQ ID NO: 619725 - protein, 16 aa, Homo sapiens
  CDR3 for alpha chain variable domain of TCR clone 309863 (TRAV29/DV5, TRAJ36)
GAASAHYQSGANNLFF

SEQ ID NO: 619726 - protein, 16 aa, Homo sapiens
  CDR3 for beta chain variable domain of TCR clone 309863 (TRBV4-2, TRBJ2-3)
CASSQELAGDTDTQYF

SEQ ID NO: 619727 - protein, 14 aa, Homo sapiens
  CDR3 for alpha chain variable domain of TCR clone 309864 (TRAV38-1, TRAJ26)
CAFMPDNYGQNFVF

SEQ ID NO: 619728 - protein, 14 aa, Homo sapiens
  CDR3 for beta chain variable domain of TCR clone 309864 (TRBV7-2, TRBJ2-7)
CASSPKTSFYEQYF

SEQ ID NO: 619729 - protein, 15 aa, Homo sapiens
  CDR3 for alpha chain variable domain of TCR clone 309865 (TRAV12-3, TRAJ42)
CAMSGHGGSQGNLIF

SEQ ID NO: 619730 - protein, 13 aa, Homo sapiens
  CDR3 for beta chain variable domain of TCR clone 309865 (TRBV19, TRBJ2-5)
CASSWRAGETQYF

SEQ ID NO: 619731 - protein, 14 aa, Homo sapiens
  CDR3 for alpha chain variable domain of TCR clone 309866 (TRAV8-4, TRAJ13)
CAVTLSGGYQKVTF

SEQ ID NO: 619732 - protein, 14 aa, Homo sapiens
  CDR3 for beta chain variable domain of TCR clone 309866 (TRBV7-2, TRBJ1-2)
CASSQTGSTFGYTF

SEQ ID NO: 619733 - protein, 13 aa, Homo sapiens
  CDR3 for alpha chain variable domain of TCR clone 309867 (TRAV8-1, TRAJ13)
CAVSKGGYQKVTF

SEQ ID NO: 619734 - protein, 18 aa, Homo sapiens
  CDR3 for beta chain variable domain of TCR clone 309867 (TRBV11-2, TRBJ2-7)
CASSRRTVQTGQSYEQYF

SEQ ID NO: 619735 - protein, 14 aa, Homo sapiens
  CDR3 for alpha chain variable domain of TCR clone 309868 (TRAV1-2, TRAJ16)
CAVNRFSDGEKLLF

SEQ ID NO: 619736 - protein, 16 aa, Homo sapiens
  CDR3 for beta chain variable domain of TCR clone 309868 (TRBV5-1, TRBJ2-5)
CASSLRRTSGQETQYF

SEQ ID NO: 619737 - protein, 14 aa, Homo sapiens
  CDR3 for alpha chain variable domain of TCR clone 309869 (TRAV17, TRAJ31)
CATALRNNNARLMF

SEQ ID NO: 619738 - protein, 14 aa, Homo sapiens
  CDR3 for beta chain variable domain of TCR clone 309869 (TRBV12-4, TRBJ2-5)
CASSLWQKQETQCF

SEQ ID NO: 619739 - protein, 15 aa, Homo sapiens
  CDR3 for alpha chain variable domain of TCR clone 309870 (TRAV35, TRAJ32)
CWAAKDGGATNKLIF

SEQ ID NO: 619740 - protein, 14 aa, Homo sapiens
  CDR3 for beta chain variable domain of TCR clone 309870 (TRBV5-4, TRBJ1-3)
CASSSQSAGNTIYF

SEQ ID NO: 619741 - protein, 14 aa, Homo sapiens
  CDR3 for alpha chain variable domain of TCR clone 309871 (TRAV16, TRAJ16)
CALSVLSDGQKLLC

SEQ ID NO: 619742 - protein, 15 aa, Homo sapiens
  CDR3 for beta chain variable domain of TCR clone 309871 (TRBV18, TRBJ2-1)
CASSPPSASYNEQFF

SEQ ID NO: 619743 - protein, 14 aa, Homo sapiens
  CDR3 for alpha chain variable domain of TCR clone 309872 (TRAV1-2, TRAJ16)
CAVNRFSDGQKLLF

SEQ ID NO: 619744 - protein, 15 aa, Homo sapiens
  CDR3 for beta chain variable domain of TCR clone 309872 (TRBV10-2, TRBJ2-5)
CASKPEDRRQETQYF

SEQ ID NO: 619745 - protein, 17 aa, Homo sapiens
  CDR3 for alpha chain variable domain of TCR clone 309873 (TRAV26-1, TRAJ58)
CIVRVGAEETSGSRLTF

SEQ ID NO: 619746 - protein, 15 aa, Homo sapiens
  CDR3 for beta chain variable domain of TCR clone 309873 (TRBV5-1, TRBJ2-1)
CASSPPRAPYNEQFF

SEQ ID NO: 619747 - protein, 18 aa, Homo sapiens
  CDR3 for alpha chain variable domain of TCR clone 309874 (TRAV8-4, TRAJ52)
CAVTRANAGGTSYGKLTF

SEQ ID NO: 619748 - protein, 20 aa, Homo sapiens
  CDR3 for beta chain variable domain of TCR clone 309874 (TRBV19, TRBJ2-1)
CASSISRTVTSARLNNEQFF

SEQ ID NO: 619749 - protein, 14 aa, Homo sapiens
  CDR3 for alpha chain variable domain of TCR clone 309875 (TRAV2, TRAJ37)
CAVDFTSNTGKLIF

SEQ ID NO: 619750 - protein, 14 aa, Homo sapiens
  CDR3 for beta chain variable domain of TCR clone 309875 (TRBV18, TRBJ2-5)
CASSPRASSETQYF

SEQ ID NO: 619751 - protein, 15 aa, Homo sapiens
  CDR3 for alpha chain variable domain of TCR clone 309876 (TRAV26-1, TRAJ29)
CIVRVEGAGNTPLVF

SEQ ID NO: 619752 - protein, 15 aa, Homo sapiens
  CDR3 for beta chain variable domain of TCR clone 309876 (TRBV7-9, TRBJ1-5)
CASSQGHQPKHPQHF

SEQ ID NO: 619753 - protein, 19 aa, Homo sapiens
  CDR3 for alpha chain variable domain of TCR clone 309877 (TRAV1-1, TRAJ37)
CAVPSSGRYGSGNTGKLMF

SEQ ID NO: 619754 - protein, 14 aa, Homo sapiens
  CDR3 for beta chain variable domain of TCR clone 309877 (TRBV7-6, TRBJ2-7)
CASSLGDRGYEQYF

SEQ ID NO: 619755 - protein, 11 aa, Homo sapiens
  CDR3 for alpha chain variable domain of TCR clone 309878 (TRAV2, TRAJ13)
SASGGYQKVTF

SEQ ID NO: 619756 - protein, 14 aa, Homo sapiens
  CDR3 for beta chain variable domain of TCR clone 309878 (TRBV18, TRBJ1-2)
CASSPDRVVYGYTF

SEQ ID NO: 619757 - protein, 14 aa, Homo sapiens
  CDR3 for alpha chain variable domain of TCR clone 309879 (TRAV38-2/DV8, TRAJ54)
AAMYQIQGAQKLVF

SEQ ID NO: 619758 - protein, 14 aa, Homo sapiens
  CDR3 for beta chain variable domain of TCR clone 309879 (TRBV7-2, TRBJ2-7)
CASSLYPGRYEQYF

SEQ ID NO: 619759 - protein, 14 aa, Homo sapiens
  CDR3 for alpha chain variable domain of TCR clone 309880 (TRAV1-2, TRAJ8)
CAVREDTGFQKLVF

SEQ ID NO: 619760 - protein, 13 aa, Homo sapiens
  CDR3 for beta chain variable domain of TCR clone 309880 (TRBV7-2, TRBJ2-2)
CASSSVRAGELFF

SEQ ID NO: 619761 - protein, 13 aa, Homo sapiens
  CDR3 for alpha chain variable domain of TCR clone 309881 (TRAV8-3, TRAJ28)
CAVGAVGSYQLTF

SEQ ID NO: 619762 - protein, 15 aa, Homo sapiens
  CDR3 for beta chain variable domain of TCR clone 309881 (TRBV7-9, TRBJ1-5)
CVSSQGHKPNQPQHF

SEQ ID NO: 619763 - protein, 12 aa, Homo sapiens
  CDR3 for alpha chain variable domain of TCR clone 309882 (TRAV13-1, TRAJ53)
AASGGSNHKLTF

SEQ ID NO: 619764 - protein, 12 aa, Homo sapiens
  CDR3 for beta chain variable domain of TCR clone 309882 (TRBV18, TRBJ1-4)
CASSPSREKLFF

SEQ ID NO: 619765 - protein, 13 aa, Homo sapiens
  CDR3 for alpha chain variable domain of TCR clone 309883 (TRAV27, TRAJ53)
CAGQGGTNYKLTF

SEQ ID NO: 619766 - protein, 13 aa, Homo sapiens
  CDR3 for beta chain variable domain of TCR clone 309883 (TRBV29-1, TRBJ1-1)
CSVESGFGTEAFF

SEQ ID NO: 619767 - protein, 19 aa, Homo sapiens
  CDR3 for alpha chain variable domain of TCR clone 309884 (TRAV25, TRAJ20)
TATQTTDVGILPHDYKLSF

SEQ ID NO: 619768 - protein, 16 aa, Homo sapiens
  CDR3 for beta chain variable domain of TCR clone 309884 (TRBV19, TRBJ2-2)
CAIRSPGTGATGELFF

SEQ ID NO: 619769 - protein, 16 aa, Homo sapiens
  CDR3 for alpha chain variable domain of TCR clone 309885 (TRAV30, TRAJ24)
CGTEIVDADSWGKFQF

SEQ ID NO: 619770 - protein, 14 aa, Homo sapiens
  CDR3 for beta chain variable domain of TCR clone 309885 (TRBV13, TRBJ2-5)
CASYRRLAEETQYF

SEQ ID NO: 619771 - protein, 10 aa, Homo sapiens
  CDR3 for alpha chain variable domain of TCR clone 309886 (TRAV12-1, TRAJ33)
CVASNYQLIC

SEQ ID NO: 619772 - protein, 15 aa, Homo sapiens
  CDR3 for beta chain variable domain of TCR clone 309886 (TRBV5-4, TRBJ1-4)
CASSHGDGENEKLFF

SEQ ID NO: 619773 - protein, 17 aa, Homo sapiens
  CDR3 for alpha chain variable domain of TCR clone 309887 (TRAV3, TRAJ6)
CAVRDGPRAGGSYIPTF

SEQ ID NO: 619774 - protein, 13 aa, Homo sapiens
  CDR3 for beta chain variable domain of TCR clone 309887 (TRBV6-4, TRBJ1-5)
CASSADLNQPQHF

SEQ ID NO: 619775 - protein, 18 aa, Homo sapiens
  CDR3 for alpha chain variable domain of TCR clone 309888 (TRAV21, TRAJ52)
CAVRPSPAGGTSDGKLTF

SEQ ID NO: 619776 - protein, 15 aa, Homo sapiens
  CDR3 for beta chain variable domain of TCR clone 309888 (TRBV19, TRBJ1-1)
CASTSGQIQNTEAFF

SEQ ID NO: 619777 - protein, 12 aa, Homo sapiens
  CDR3 for alpha chain variable domain of TCR clone 309889 (TRAV23/DV6, TRAJ30)
CAASKGDEKIIF

SEQ ID NO: 619778 - protein, 18 aa, Homo sapiens
  CDR3 for beta chain variable domain of TCR clone 309889 (TRBV10-3, TRBJ2-3)
CAISESRVGPRRGDTQYF

SEQ ID NO: 619779 - protein, 12 aa, Homo sapiens
  CDR3 for alpha chain variable domain of TCR clone 309890 (TRAV1-1, TRAJ39)
CAVPVVGNMLTF

SEQ ID NO: 619780 - protein, 13 aa, Homo sapiens
  CDR3 for beta chain variable domain of TCR clone 309890 (TRBV7-9, TRBJ2-1)
CASSSSNFNEQLF

SEQ ID NO: 619781 - protein, 17 aa, Homo sapiens
  CDR3 for alpha chain variable domain of TCR clone 309891 (TRAV4, )
CLVDIQNPDPAVYQLRD

SEQ ID NO: 619782 - protein, 15 aa, Homo sapiens
  CDR3 for beta chain variable domain of TCR clone 309891 (TRBV4-1, TRBJ1-4)
CASSDTGGTNEKLFF

SEQ ID NO: 619783 - protein, 14 aa, Homo sapiens
  CDR3 for alpha chain variable domain of TCR clone 309892 (TRAV3, TRAJ7)
CAVREEEREQQTRF

SEQ ID NO: 619784 - protein, 17 aa, Homo sapiens
  CDR3 for beta chain variable domain of TCR clone 309892 (TRBV7-2, TRBJ2-3)
CASSARSSGSPTDTQYF

SEQ ID NO: 619785 - protein, 14 aa, Homo sapiens
  CDR3 for alpha chain variable domain of TCR clone 309893 (TRAV35, TRAJ50)
CAGHRKTSYDKVIF

SEQ ID NO: 619786 - protein, 15 aa, Homo sapiens
  CDR3 for beta chain variable domain of TCR clone 309893 (TRBV7-3, TRBJ2-1)
CASSPTGGGEVEQFF

SEQ ID NO: 619787 - protein, 13 aa, Homo sapiens
  CDR3 for alpha chain variable domain of TCR clone 309894 (TRAV13-2, TRAJ53)
CAENMGSNYKLTF

SEQ ID NO: 619788 - protein, 14 aa, Homo sapiens
  CDR3 for beta chain variable domain of TCR clone 309894 (TRBV7-2, TRBJ2-7)
CASRSQGAAYEQYF

SEQ ID NO: 619789 - protein, 13 aa, Homo sapiens
  CDR3 for alpha chain variable domain of TCR clone 309895 (TRAV29/DV5, TRAJ31)
CAASRNNNARLMF

SEQ ID NO: 619790 - protein, 15 aa, Homo sapiens
  CDR3 for beta chain variable domain of TCR clone 309895 (TRBV9, TRBJ2-1)
CASSVGTGELNEQFF

SEQ ID NO: 619791 - protein, 15 aa, Homo sapiens
  CDR3 for alpha chain variable domain of TCR clone 309896 (TRAV13-2, TRAJ16)
CAENDRFSDGQKLPF

SEQ ID NO: 619792 - protein, 14 aa, Homo sapiens
  CDR3 for beta chain variable domain of TCR clone 309896 (TRBV4-2, TRBJ1-5)
CASSRDRGNQPQHF

SEQ ID NO: 619793 - protein, 14 aa, Homo sapiens
  CDR3 for alpha chain variable domain of TCR clone 309897 (TRAV35, TRAJ38)
CAGFNAGNNRKLIW

SEQ ID NO: 619794 - protein, 12 aa, Homo sapiens
  CDR3 for beta chain variable domain of TCR clone 309897 (TRBV11-2, TRBJ2-1)
CASSPGNNEQFF

SEQ ID NO: 619795 - protein, 11 aa, Homo sapiens
  CDR3 for alpha chain variable domain of TCR clone 309898 (TRAV13-1, TRAJ33)
CAANSNYQSIW

SEQ ID NO: 619796 - protein, 14 aa, Homo sapiens
  CDR3 for beta chain variable domain of TCR clone 309898 (TRBV20-1, TRBJ2-1)
CSAQIGGSANEQFF

SEQ ID NO: 619797 - protein, 14 aa, Homo sapiens
  CDR3 for alpha chain variable domain of TCR clone 309899 (TRAV12-2, TRAJ9)
CAVNMEGGGFKTIF

SEQ ID NO: 619798 - protein, 12 aa, Homo sapiens
  CDR3 for beta chain variable domain of TCR clone 309899 (TRBV11-2, TRBJ2-2)
CASSLGGGELFF

SEQ ID NO: 619799 - protein, 17 aa, Homo sapiens
  CDR3 for alpha chain variable domain of TCR clone 309900 (TRAV35, TRAJ52)
CAGQLAAGGTSYGKLTF

SEQ ID NO: 619800 - protein, 13 aa, Homo sapiens
  CDR3 for beta chain variable domain of TCR clone 309900 (TRBV20-1, TRBJ1-6)
CSAPLGVGSPLHF

SEQ ID NO: 619801 - protein, 14 aa, Homo sapiens
  CDR3 for alpha chain variable domain of TCR clone 309901 (TRAV13-1, TRAJ40)
CAASMTSGTYKYIF

SEQ ID NO: 619802 - protein, 19 aa, Homo sapiens
  CDR3 for beta chain variable domain of TCR clone 309901 (TRBV4-1, TRBJ2-1)
CASSQGPLPGLGSRNEQFF

SEQ ID NO: 619803 - protein, 14 aa, Homo sapiens
  CDR3 for alpha chain variable domain of TCR clone 309902 (TRAV2, TRAJ37)
CAVDFTSNTGKLIF

SEQ ID NO: 619804 - protein, 15 aa, Homo sapiens
  CDR3 for beta chain variable domain of TCR clone 309902 (TRBV7-2, TRBJ1-2)
CASSLVAGGDYGYTF

SEQ ID NO: 619805 - protein, 14 aa, Homo sapiens
  CDR3 for alpha chain variable domain of TCR clone 309903 (TRAV26-1, TRAJ38)
CIADNAGNNRKLIW

SEQ ID NO: 619806 - protein, 13 aa, Homo sapiens
  CDR3 for beta chain variable domain of TCR clone 309903 (TRBV20-1, TRBJ1-1)
CSARGGGNTEEFF

SEQ ID NO: 619807 - protein, 12 aa, Homo sapiens
  CDR3 for alpha chain variable domain of TCR clone 309904 (TRAV12-3, TRAJ17)
CAMTLTGNKLTF

SEQ ID NO: 619808 - protein, 14 aa, Homo sapiens
  CDR3 for beta chain variable domain of TCR clone 309904 (TRBV25-1, TRBJ1-1)
CASTHLGGNTEAFS

SEQ ID NO: 619809 - protein, 14 aa, Homo sapiens
  CDR3 for alpha chain variable domain of TCR clone 309905 (TRAV12-2, TRAJ40)
CAVKIPSGTYKYIF

SEQ ID NO: 619810 - protein, 15 aa, Homo sapiens
  CDR3 for beta chain variable domain of TCR clone 309905 (TRBV20-1, TRBJ1-4)
CSARREWGVNEKLVF

SEQ ID NO: 619811 - protein, 15 aa, Homo sapiens
  CDR3 for alpha chain variable domain of TCR clone 309906 (TRAV38-1, TRAJ37)
CAFIHGSGNTGRLIF

SEQ ID NO: 619812 - protein, 12 aa, Homo sapiens
  CDR3 for beta chain variable domain of TCR clone 309906 (TRBV7-9, TRBJ2-7)
CASSFSSYEQYF

SEQ ID NO: 619813 - protein, 16 aa, Homo sapiens
  CDR3 for alpha chain variable domain of TCR clone 309907 (TRAV16, TRAJ42)
CARKMNYGGSHGNLIF

SEQ ID NO: 619814 - protein, 13 aa, Homo sapiens
  CDR3 for beta chain variable domain of TCR clone 309907 (TRBV20-1, TRBJ2-7)
CSASPPSSYEQYF

SEQ ID NO: 619815 - protein, 13 aa, Homo sapiens
  CDR3 for alpha chain variable domain of TCR clone 309908 (TRAV12-3, TRAJ43)
CAMIRPNNNDMRF

SEQ ID NO: 619816 - protein, 12 aa, Homo sapiens
  CDR3 for beta chain variable domain of TCR clone 309908 (TRBV11-2, TRBJ2-5)
WASSLGQETQYF

SEQ ID NO: 619817 - protein, 18 aa, Homo sapiens
  CDR3 for alpha chain variable domain of TCR clone 309909 (TRAV21, TRAJ52)
CAVRPSPAGGTSYGKLTF

SEQ ID NO: 619818 - protein, 19 aa, Homo sapiens
  CDR3 for beta chain variable domain of TCR clone 309909 (TRBV7-2, TRBJ2-3)
CASSFLSRNWGGGKDTQYF

SEQ ID NO: 619819 - protein, 17 aa, Homo sapiens
  CDR3 for alpha chain variable domain of TCR clone 309910 (TRAV36/DV7, TRAJ52)
CAVAQRAGGTSYGKLTF

SEQ ID NO: 619820 - protein, 15 aa, Homo sapiens
  CDR3 for beta chain variable domain of TCR clone 309910 (TRBV6-5, TRBJ1-2)
CTSSYSQAFNYGYTF

SEQ ID NO: 619821 - protein, 14 aa, Homo sapiens
  CDR3 for alpha chain variable domain of TCR clone 309911 (TRAV12-1, TRAJ30)
CVPTGTNRDDKIIF

SEQ ID NO: 619822 - protein, 11 aa, Homo sapiens
  CDR3 for beta chain variable domain of TCR clone 309911 (TRBV4-1, TRBJ2-2)
CASEHTGELFF

SEQ ID NO: 619823 - protein, 14 aa, Homo sapiens
  CDR3 for alpha chain variable domain of TCR clone 309912 (TRAV2, TRAJ37)
CAVDFTSNTGKLIF

SEQ ID NO: 619824 - protein, 13 aa, Homo sapiens
  CDR3 for beta chain variable domain of TCR clone 309912 (TRBV4-1, TRBJ2-2)
CASSQEDTGELFF

SEQ ID NO: 619825 - protein, 14 aa, Homo sapiens
  CDR3 for alpha chain variable domain of TCR clone 309913 (TRAV20, TRAJ4)
CAVRLGGGYNKLIF

SEQ ID NO: 619826 - protein, 14 aa, Homo sapiens
  CDR3 for beta chain variable domain of TCR clone 309913 (TRBV27, TRBJ2-5)
CASSSLKGWETQYF

SEQ ID NO: 619827 - protein, 14 aa, Homo sapiens
  CDR3 for alpha chain variable domain of TCR clone 309914 (TRAV3, TRAJ15)
CAVRDDQAGTALIF

SEQ ID NO: 619828 - protein, 14 aa, Homo sapiens
  CDR3 for beta chain variable domain of TCR clone 309914 (TRBV27, TRBJ1-1)
CASSPQGKRAEAFF

SEQ ID NO: 619829 - protein, 14 aa, Homo sapiens
  CDR3 for alpha chain variable domain of TCR clone 309915 (TRAV12-3, TRAJ10)
RHLPLTGGGNKLTF

SEQ ID NO: 619830 - protein, 15 aa, Homo sapiens
  CDR3 for beta chain variable domain of TCR clone 309915 (TRBV10-2, TRBJ2-6)
CASSEQGTGANVLTF

SEQ ID NO: 619831 - protein, 13 aa, Homo sapiens
  CDR3 for alpha chain variable domain of TCR clone 309916 (TRAV27, TRAJ11)
CAGGGSGYSTLTF

SEQ ID NO: 619832 - protein, 17 aa, Homo sapiens
  CDR3 for beta chain variable domain of TCR clone 309916 (TRBV5-1, TRBJ1-1)
CASSLGQGGFAELSLDK

SEQ ID NO: 619833 - protein, 13 aa, Homo sapiens
  CDR3 for alpha chain variable domain of TCR clone 309917 (TRAV21, TRAJ20)
CAVGVFADYKLSF

SEQ ID NO: 619834 - protein, 14 aa, Homo sapiens
  CDR3 for beta chain variable domain of TCR clone 309917 (TRBV4-2, TRBJ1-4)
CASSPSSGNDKLFF

SEQ ID NO: 619835 - protein, 14 aa, Homo sapiens
  CDR3 for alpha chain variable domain of TCR clone 309918 (TRAV1-2, TRAJ16)
CAVNRFSYGQKLLF

SEQ ID NO: 619836 - protein, 15 aa, Homo sapiens
  CDR3 for beta chain variable domain of TCR clone 309918 (TRBV4-1, TRBJ2-5)
CASSQWDLYQETQYF

SEQ ID NO: 619837 - protein, 14 aa, Homo sapiens
  CDR3 for alpha chain variable domain of TCR clone 309919 (TRAV2, TRAJ9)
CAVEDRSGGFKTIF

SEQ ID NO: 619838 - protein, 13 aa, Homo sapiens
  CDR3 for beta chain variable domain of TCR clone 309919 (TRBV19, TRBJ2-7)
CASSIDRTYEQYF

SEQ ID NO: 619839 - protein, 14 aa, Homo sapiens
  CDR3 for alpha chain variable domain of TCR clone 309920 (TRAV12-2, TRAJ13)
CAVKKTGGYQKVTF

SEQ ID NO: 619840 - protein, 14 aa, Homo sapiens
  CDR3 for beta chain variable domain of TCR clone 309920 (TRBV25-1, TRBJ1-1)
CASTPLGGNTEAFF

SEQ ID NO: 619841 - protein, 12 aa, Homo sapiens
  CDR3 for alpha chain variable domain of TCR clone 309921 (TRAV1-2, TRAJ24)
FAVGGSWGKFQF

SEQ ID NO: 619842 - protein, 15 aa, Homo sapiens
  CDR3 for beta chain variable domain of TCR clone 309921 (TRBV6-1, TRBJ2-7)
CASSEGVGNPYEQYF

SEQ ID NO: 619843 - protein, 16 aa, Homo sapiens
  CDR3 for alpha chain variable domain of TCR clone 309922 (TRAV30, TRAJ24)
CGTEIVDADSWGKFQF

SEQ ID NO: 619844 - protein, 13 aa, Homo sapiens
  CDR3 for beta chain variable domain of TCR clone 309922 (TRBV7-2, TRBJ1-5)
CASTPTVNQPQHF

SEQ ID NO: 619845 - protein, 16 aa, Homo sapiens
  CDR3 for alpha chain variable domain of TCR clone 309923 (TRAV26-2, TRAJ52)
CIRGPAGGTSYGKRTF

SEQ ID NO: 619846 - protein, 15 aa, Homo sapiens
  CDR3 for beta chain variable domain of TCR clone 309923 (TRBV5-1, TRBJ2-1)
CASSWGPGPGGEQFF

SEQ ID NO: 619847 - protein, 14 aa, Homo sapiens
  CDR3 for alpha chain variable domain of TCR clone 309924 (TRAV23/DV6, TRAJ8)
CAASKNTVFQKLVF

SEQ ID NO: 619848 - protein, 16 aa, Homo sapiens
  CDR3 for beta chain variable domain of TCR clone 309924 (TRBV4-1, TRBJ2-6)
CASSQVGDPGANVLTF

SEQ ID NO: 619849 - protein, 16 aa, Homo sapiens
  CDR3 for alpha chain variable domain of TCR clone 309925 (TRAV27, TRAJ52)
CAGAPAGGTSYGKLTF

SEQ ID NO: 619850 - protein, 12 aa, Homo sapiens
  CDR3 for beta chain variable domain of TCR clone 309925 (TRBV27, TRBJ2-1)
CASRGFYHGQFF

SEQ ID NO: 619851 - protein, 14 aa, Homo sapiens
  CDR3 for alpha chain variable domain of TCR clone 309926 (TRAV17, TRAJ16)
CATADFSDGQKLLS

SEQ ID NO: 619852 - protein, 12 aa, Homo sapiens
  CDR3 for beta chain variable domain of TCR clone 309926 (TRBV24-1, TRBJ1-1)
CATLYPDTEAFF

SEQ ID NO: 619853 - protein, 14 aa, Homo sapiens
  CDR3 for alpha chain variable domain of TCR clone 309927 (TRAV2, TRAJ9)
CAVEDRSGGFKTIL

SEQ ID NO: 619854 - protein, 11 aa, Homo sapiens
  CDR3 for beta chain variable domain of TCR clone 309927 (TRBV6-1, TRBJ2-1)
CASISSNEQFF

SEQ ID NO: 619855 - protein, 11 aa, Homo sapiens
  CDR3 for alpha chain variable domain of TCR clone 309928 (TRAV29/DV5, TRAJ49)
CAAVPGNQFYF

SEQ ID NO: 619856 - protein, 17 aa, Homo sapiens
  CDR3 for beta chain variable domain of TCR clone 309928 (TRBV13, TRBJ2-3)
CASSLSRVAGGRNTQYF

SEQ ID NO: 619857 - protein, 17 aa, Homo sapiens
  CDR3 for alpha chain variable domain of TCR clone 309929 (TRAV3, TRAJ6)
CAVRDGPRAGGSYIPTC

SEQ ID NO: 619858 - protein, 16 aa, Homo sapiens
  CDR3 for beta chain variable domain of TCR clone 309929 (TRBV7-8, TRBJ2-3)
CASSTEGQRETDTQYF

SEQ ID NO: 619859 - protein, 15 aa, Homo sapiens
  CDR3 for alpha chain variable domain of TCR clone 309930 (TRAV26-1, TRAJ29)
CIVRVEGSGNTPLVF

SEQ ID NO: 619860 - protein, 13 aa, Homo sapiens
  CDR3 for beta chain variable domain of TCR clone 309930 (TRBV7-3, TRBJ1-2)
CASSLKRGYGYTF

SEQ ID NO: 619861 - protein, 17 aa, Homo sapiens
  CDR3 for alpha chain variable domain of TCR clone 309931 (TRAV3, TRAJ6)
CAVRDGHRAGGSYIPTF

SEQ ID NO: 619862 - protein, 14 aa, Homo sapiens
  CDR3 for beta chain variable domain of TCR clone 309931 (TRBV7-2, TRBJ2-7)
CASSPKTSSYEQYF

SEQ ID NO: 619863 - protein, 10 aa, Homo sapiens
  CDR3 for alpha chain variable domain of TCR clone 309932 (TRAV13-1, TRAJ7)
LIGGNNRLAF

SEQ ID NO: 619864 - protein, 16 aa, Homo sapiens
  CDR3 for beta chain variable domain of TCR clone 309932 (TRBV4-1, TRBJ1-2)
CASSQDAGQALYGYTF

SEQ ID NO: 619865 - protein, 12 aa, Homo sapiens
  CDR3 for alpha chain variable domain of TCR clone 309933 (TRAV35, TRAJ12)
CAGMDSSYKWIF

SEQ ID NO: 619866 - protein, 14 aa, Homo sapiens
  CDR3 for beta chain variable domain of TCR clone 309933 (TRBV28, TRBJ2-5)
CASSLYRGTETQYF

SEQ ID NO: 619867 - protein, 16 aa, Homo sapiens
  CDR3 for alpha chain variable domain of TCR clone 309934 (TRAV12-2, TRAJ28)
CAVITDSGAGSYQLTF

SEQ ID NO: 619868 - protein, 12 aa, Homo sapiens
  CDR3 for beta chain variable domain of TCR clone 309934 (TRBV9, TRBJ2-2)
CASSLVTGELSF

SEQ ID NO: 619869 - protein, 22 aa, Homo sapiens
  CDR3 for alpha chain variable domain of TCR clone 309935 (TRAV34, )
CGADFTPGNNHIQNPDPAVYQL

SEQ ID NO: 619870 - protein, 14 aa, Homo sapiens
  CDR3 for beta chain variable domain of TCR clone 309935 (TRBV12-4, TRBJ1-1)
CASSLGTGGTEAFF

SEQ ID NO: 619871 - protein, 15 aa, Homo sapiens
  CDR3 for alpha chain variable domain of TCR clone 309936 (TRAV8-4, TRAJ10)
CAVSYGPGGGNKLTF

SEQ ID NO: 619872 - protein, 13 aa, Homo sapiens
  CDR3 for beta chain variable domain of TCR clone 309936 (TRBV28, TRBJ1-3)
CASSFLGSGTIYF

SEQ ID NO: 619873 - protein, 12 aa, Homo sapiens
  CDR3 for alpha chain variable domain of TCR clone 309937 (TRAV13-1, TRAJ21)
CAAKEGFNKFYF

SEQ ID NO: 619874 - protein, 14 aa, Homo sapiens
  CDR3 for beta chain variable domain of TCR clone 309937 (TRBV12-4, TRBJ2-5)
CQQSPTGLQGTQYF

SEQ ID NO: 619875 - protein, 11 aa, Homo sapiens
  CDR3 for alpha chain variable domain of TCR clone 309938 (TRAV2, TRAJ33)
CAVDSNYQLIW

SEQ ID NO: 619876 - protein, 14 aa, Homo sapiens
  CDR3 for beta chain variable domain of TCR clone 309938 (TRBV4-2, TRBJ2-1)
CASGLNRAYNEQFF

SEQ ID NO: 619877 - protein, 15 aa, Homo sapiens
  CDR3 for alpha chain variable domain of TCR clone 309939 (TRAV2, TRAJ24)
CAVEVLTDSWGKFQF

SEQ ID NO: 619878 - protein, 15 aa, Homo sapiens
  CDR3 for beta chain variable domain of TCR clone 309939 (TRBV20-1, TRBJ2-5)
CSAEGTGGLQETQYF

SEQ ID NO: 619879 - protein, 12 aa, Homo sapiens
  CDR3 for alpha chain variable domain of TCR clone 309940 (TRAV1-2, TRAJ33)
CAALDSSYQLIW

SEQ ID NO: 619880 - protein, 16 aa, Homo sapiens
  CDR3 for beta chain variable domain of TCR clone 309940 (TRBV7-9, TRBJ1-2)
CASSLGFSSGEDGYTF

SEQ ID NO: 619881 - protein, 14 aa, Homo sapiens
  CDR3 for alpha chain variable domain of TCR clone 309941 (TRAV12-2, TRAJ45)
CAVNIGGGADGLTF

SEQ ID NO: 619882 - protein, 13 aa, Homo sapiens
  CDR3 for beta chain variable domain of TCR clone 309941 (TRBV10-3, TRBJ2-7)
CASKLAVNYEQYF

SEQ ID NO: 619883 - protein, 11 aa, Homo sapiens
  CDR3 for alpha chain variable domain of TCR clone 309942 (TRAV17, TRAJ31)
CATDRTARLMF

SEQ ID NO: 619884 - protein, 12 aa, Homo sapiens
  CDR3 for beta chain variable domain of TCR clone 309942 (TRBV12-4, TRBJ2-1)
CASSPGRNEQFF

SEQ ID NO: 619885 - protein, 13 aa, Homo sapiens
  CDR3 for alpha chain variable domain of TCR clone 309943 (TRAV2, TRAJ15)
CAVASQAGTALIF

SEQ ID NO: 619886 - protein, 13 aa, Homo sapiens
  CDR3 for beta chain variable domain of TCR clone 309943 (TRBV9, TRBJ2-1)
CASSPSGGNEQFF

SEQ ID NO: 619887 - protein, 17 aa, Homo sapiens
  CDR3 for alpha chain variable domain of TCR clone 309944 (TRAV13-1, TRAJ28)
CAASPPYSGAGSYQLTF

SEQ ID NO: 619888 - protein, 17 aa, Homo sapiens
  CDR3 for beta chain variable domain of TCR clone 309944 (TRBV7-3, TRBJ2-3)
CASSLTKRMRGADTQYF

SEQ ID NO: 619889 - protein, 18 aa, Homo sapiens
  CDR3 for alpha chain variable domain of TCR clone 309945 (TRAV14/DV4, TRAJ15)
CAMREFPPTGQAGTALIF

SEQ ID NO: 619890 - protein, 13 aa, Homo sapiens
  CDR3 for beta chain variable domain of TCR clone 309945 (TRBV14, TRBJ1-1)
CASSQEAGTEAFF

SEQ ID NO: 619891 - protein, 14 aa, Homo sapiens
  CDR3 for alpha chain variable domain of TCR clone 309946 (TRAV23/DV6, TRAJ4)
CAANLSGGYNKLIF

SEQ ID NO: 619892 - protein, 17 aa, Homo sapiens
  CDR3 for beta chain variable domain of TCR clone 309946 (TRBV4-1, TRBJ1-3)
CASSPQRGIRFGNTIYF

SEQ ID NO: 619893 - protein, 14 aa, Homo sapiens
  CDR3 for alpha chain variable domain of TCR clone 309947 (TRAV1-2, TRAJ16)
CAVNRFSDGQKLLF

SEQ ID NO: 619894 - protein, 15 aa, Homo sapiens
  CDR3 for beta chain variable domain of TCR clone 309947 (TRBV29-1, TRBJ2-7)
CSVEFFDRRSYEQYF

SEQ ID NO: 619895 - protein, 13 aa, Homo sapiens
  CDR3 for alpha chain variable domain of TCR clone 309948 (TRAV1-2, TRAJ12)
CAVSMDSSYKLIF

SEQ ID NO: 619896 - protein, 18 aa, Homo sapiens
  CDR3 for beta chain variable domain of TCR clone 309948 (TRBV6-6, TRBJ1-3)
CASSYSKWDSISGNTIYF

SEQ ID NO: 619897 - protein, 23 aa, Homo sapiens
  CDR3 for alpha chain variable domain of TCR clone 309949 (TRAV12-2, TRAJ36)
SLLIRDSQPSDSATLERANNLFF

SEQ ID NO: 619898 - protein, 15 aa, Homo sapiens
  CDR3 for beta chain variable domain of TCR clone 309949 (TRBV7-2, TRBJ2-1)
CASSLVGSSYNEQFS

SEQ ID NO: 619899 - protein, 10 aa, Homo sapiens
  CDR3 for alpha chain variable domain of TCR clone 309950 (TRAV20, TRAJ22)
CAAPARKLTF

SEQ ID NO: 619900 - protein, 14 aa, Homo sapiens
  CDR3 for beta chain variable domain of TCR clone 309950 (TRBV19, TRBJ2-1)
CASNMGSGATEQFF

SEQ ID NO: 619901 - protein, 12 aa, Homo sapiens
  CDR3 for alpha chain variable domain of TCR clone 309951 (TRAV12-2, TRAJ7)
CAVPQGNNRLAF

SEQ ID NO: 619902 - protein, 15 aa, Homo sapiens
  CDR3 for beta chain variable domain of TCR clone 309951 (TRBV5-1, TRBJ2-1)
CASSLDLAEDNEQFF

SEQ ID NO: 619903 - protein, 14 aa, Homo sapiens
  CDR3 for alpha chain variable domain of TCR clone 309952 (TRAV26-1, TRAJ45)
CIEVTGGGADGLTF

SEQ ID NO: 619904 - protein, 15 aa, Homo sapiens
  CDR3 for beta chain variable domain of TCR clone 309952 (TRBV6-3, TRBJ2-2)
CASRGMTVDTGELFF

SEQ ID NO: 619905 - protein, 12 aa, Homo sapiens
  CDR3 for alpha chain variable domain of TCR clone 309953 (TRAV21, TRAJ31)
CAVSPARGRLIF

SEQ ID NO: 619906 - protein, 14 aa, Homo sapiens
  CDR3 for beta chain variable domain of TCR clone 309953 (TRBV28, TRBJ2-7)
CASSLLRISYEQYF

SEQ ID NO: 619907 - protein, 12 aa, Homo sapiens
  CDR3 for alpha chain variable domain of TCR clone 309954 (TRAV22, TRAJ29)
CAPPSGNTPLVF

SEQ ID NO: 619908 - protein, 15 aa, Homo sapiens
  CDR3 for beta chain variable domain of TCR clone 309954 (TRBV11-2, TRBJ2-5)
CQQLRGGGYRETQYF

SEQ ID NO: 619909 - protein, 15 aa, Homo sapiens
  CDR3 for alpha chain variable domain of TCR clone 309955 (TRAV21, TRAJ24)
CAARYSTDSWGKLQF

SEQ ID NO: 619910 - protein, 15 aa, Homo sapiens
  CDR3 for beta chain variable domain of TCR clone 309955 (TRBV6-5, TRBJ2-7)
CASSYSTSGNYEQYF

SEQ ID NO: 619911 - protein, 16 aa, Homo sapiens
  CDR3 for alpha chain variable domain of TCR clone 309956 (TRAV3, TRAJ10)
CAVRDMNAGGGNKLTF

SEQ ID NO: 619912 - protein, 16 aa, Homo sapiens
  CDR3 for beta chain variable domain of TCR clone 309956 (TRBV6-3, TRBJ1-2)
CASSYSKRASNYGYTF

SEQ ID NO: 619913 - protein, 14 aa, Homo sapiens
  CDR3 for alpha chain variable domain of TCR clone 309957 (TRAV35, TRAJ13)
CAGSPSGGYQKVTF

SEQ ID NO: 619914 - protein, 12 aa, Homo sapiens
  CDR3 for beta chain variable domain of TCR clone 309957 (TRBV7-8, TRBJ2-7)
CASSLGDREQYF

SEQ ID NO: 619915 - protein, 14 aa, Homo sapiens
  CDR3 for alpha chain variable domain of TCR clone 309958 (TRAV1-1, TRAJ27)
CAVIYNTNAGKFTF

SEQ ID NO: 619916 - protein, 15 aa, Homo sapiens
  CDR3 for beta chain variable domain of TCR clone 309958 (TRBV7-2, TRBJ2-1)
CASSSGLAGGNEQFF

SEQ ID NO: 619917 - protein, 13 aa, Homo sapiens
  CDR3 for alpha chain variable domain of TCR clone 309959 (TRAV17, TRAJ15)
CATDARAGTALIF

SEQ ID NO: 619918 - protein, 15 aa, Homo sapiens
  CDR3 for beta chain variable domain of TCR clone 309959 (TRBV27, TRBJ2-7)
CASSLRNEQGYEQYF

SEQ ID NO: 619919 - protein, 14 aa, Homo sapiens
  CDR3 for alpha chain variable domain of TCR clone 309960 (TRAV12-3, TRAJ10)
SHLPLMGGGNKLTF

SEQ ID NO: 619920 - protein, 14 aa, Homo sapiens
  CDR3 for beta chain variable domain of TCR clone 309960 (TRBV7-9, TRBJ2-1)
CASSPRDSLYEQFF

SEQ ID NO: 619921 - protein, 14 aa, Homo sapiens
  CDR3 for alpha chain variable domain of TCR clone 309961 (TRAV35, TRAJ33)
CAGSSQDSNYQLIW

SEQ ID NO: 619922 - protein, 17 aa, Homo sapiens
  CDR3 for beta chain variable domain of TCR clone 309961 (TRBV7-8, TRBJ2-6)
CASSAGTGGAGANVLTF

SEQ ID NO: 619923 - protein, 16 aa, Homo sapiens
  CDR3 for alpha chain variable domain of TCR clone 309962 (TRAV30, TRAJ24)
CGTEIVDADSWGKFQF

SEQ ID NO: 619924 - protein, 13 aa, Homo sapiens
  CDR3 for beta chain variable domain of TCR clone 309962 (TRBV7-9, TRBJ2-1)
CASSWESYNEQFF

SEQ ID NO: 619925 - protein, 12 aa, Homo sapiens
  CDR3 for alpha chain variable domain of TCR clone 309963 (TRAV21, TRAJ10)
PAVTGGGNKLTF

SEQ ID NO: 619926 - protein, 14 aa, Homo sapiens
  CDR3 for beta chain variable domain of TCR clone 309963 (TRBV11-3, TRBJ2-3)
CASSLVASTDTQYF

SEQ ID NO: 619927 - protein, 15 aa, Homo sapiens
  CDR3 for alpha chain variable domain of TCR clone 309964 (TRAV34, TRAJ38)
CGADFTPGNNRKLIW

SEQ ID NO: 619928 - protein, 13 aa, Homo sapiens
  CDR3 for beta chain variable domain of TCR clone 309964 (TRBV12-4, TRBJ1-1)
CASSPGTGFEAFF

SEQ ID NO: 619929 - protein, 19 aa, Homo sapiens
  CDR3 for alpha chain variable domain of TCR clone 309965 (TRAV2, TRAJ20)
IPQVREADAAVYRDCKLSF

SEQ ID NO: 619930 - protein, 14 aa, Homo sapiens
  CDR3 for beta chain variable domain of TCR clone 309965 (TRBV6-1, TRBJ1-3)
CASVQGGGGNTIYF

SEQ ID NO: 619931 - protein, 18 aa, Homo sapiens
  CDR3 for alpha chain variable domain of TCR clone 309966 (TRAV26-2, TRAJ52)
CILREGDAGGTSYGKLTF

SEQ ID NO: 619932 - protein, 14 aa, Homo sapiens
  CDR3 for beta chain variable domain of TCR clone 309966 (TRBV7-2, TRBJ1-1)
CASSFLTGTTEAVF

SEQ ID NO: 619933 - protein, 14 aa, Homo sapiens
  CDR3 for alpha chain variable domain of TCR clone 309967 (TRAV23/DV6, TRAJ40)
CAASLTSGTYKYIF

SEQ ID NO: 619934 - protein, 15 aa, Homo sapiens
  CDR3 for beta chain variable domain of TCR clone 309967 (TRBV20-1, TRBJ2-7)
CSARDRVSGMDEQYF

SEQ ID NO: 619935 - protein, 14 aa, Homo sapiens
  CDR3 for alpha chain variable domain of TCR clone 309968 (TRAV12-1, TRAJ3)
CVVNPGSSAYKIIF

SEQ ID NO: 619936 - protein, 14 aa, Homo sapiens
  CDR3 for beta chain variable domain of TCR clone 309968 (TRBV20-1, TRBJ2-3)
CSARGGTSTDTQYF

SEQ ID NO: 619937 - protein, 14 aa, Homo sapiens
  CDR3 for alpha chain variable domain of TCR clone 309969 (TRAV13-1, TRAJ35)
CAASKGGFGNVLHC

SEQ ID NO: 619938 - protein, 16 aa, Homo sapiens
  CDR3 for beta chain variable domain of TCR clone 309969 (TRBV7-9, TRBJ2-3)
CASSPWREVGTDTQYF

SEQ ID NO: 619939 - protein, 12 aa, Homo sapiens
  CDR3 for alpha chain variable domain of TCR clone 309970 (TRAV13-1, TRAJ21)
CAAKEGFNKFYF

SEQ ID NO: 619940 - protein, 15 aa, Homo sapiens
  CDR3 for beta chain variable domain of TCR clone 309970 (TRBV28, TRBJ1-3)
CASSLAGSSGNTIYV

SEQ ID NO: 619941 - protein, 17 aa, Homo sapiens
  CDR3 for alpha chain variable domain of TCR clone 309971 (TRAV1-1, TRAJ3)
CLLLLRCPYSSASKITF

SEQ ID NO: 619942 - protein, 13 aa, Homo sapiens
  CDR3 for beta chain variable domain of TCR clone 309971 (TRBV20-1, TRBJ1-1)
CSARAGGNTEAFF

SEQ ID NO: 619943 - protein, 15 aa, Homo sapiens
  CDR3 for alpha chain variable domain of TCR clone 309972 (TRAV8-2, TRAJ16)
CVVSDGFSDGQKLLF

SEQ ID NO: 619944 - protein, 14 aa, Homo sapiens
  CDR3 for beta chain variable domain of TCR clone 309972 (TRBV7-3, TRBJ1-1)
CASSSGTGYTEAFF

SEQ ID NO: 619945 - protein, 13 aa, Homo sapiens
  CDR3 for alpha chain variable domain of TCR clone 309973 (TRAV8-4, TRAJ10)
CAAFTGGGNKLTF

SEQ ID NO: 619946 - protein, 12 aa, Homo sapiens
  CDR3 for beta chain variable domain of TCR clone 309973 (TRBV2, TRBJ2-3)
VIFEKATDTQYF

SEQ ID NO: 619947 - protein, 15 aa, Homo sapiens
  CDR3 for alpha chain variable domain of TCR clone 309974 (TRAV38-1, TRAJ37)
CAFIFGSGNTGRLIF

SEQ ID NO: 619948 - protein, 11 aa, Homo sapiens
  CDR3 for beta chain variable domain of TCR clone 309974 (TRBV12-4, TRBJ2-3)
CASTATDTQYF

SEQ ID NO: 619949 - protein, 14 aa, Homo sapiens
  CDR3 for alpha chain variable domain of TCR clone 309975 (TRAV12-2, TRAJ6)
CASKWGGGSYIPTF

SEQ ID NO: 619950 - protein, 16 aa, Homo sapiens
  CDR3 for beta chain variable domain of TCR clone 309975 (TRBV25-1, TRBJ1-1)
CASSGDRDRGRIEAFF

SEQ ID NO: 619951 - protein, 13 aa, Homo sapiens
  CDR3 for alpha chain variable domain of TCR clone 309976 (TRAV13-1, TRAJ5)
CAASDTGRRALTF

SEQ ID NO: 619952 - protein, 15 aa, Homo sapiens
  CDR3 for beta chain variable domain of TCR clone 309976 (TRBV12-4, TRBJ1-2)
CASSKTAGAIYGYTF

SEQ ID NO: 619953 - protein, 11 aa, Homo sapiens
  CDR3 for alpha chain variable domain of TCR clone 309977 (TRAV2, TRAJ13)
CASGGYQKVTF

SEQ ID NO: 619954 - protein, 14 aa, Homo sapiens
  CDR3 for beta chain variable domain of TCR clone 309977 (TRBV19, TRBJ2-1)
CASPTFVLSGVQFF

SEQ ID NO: 619955 - protein, 15 aa, Homo sapiens
  CDR3 for alpha chain variable domain of TCR clone 309978 (TRAV38-1, TRAJ37)
CAFIYGFGNTGKLIF

SEQ ID NO: 619956 - protein, 12 aa, Homo sapiens
  CDR3 for beta chain variable domain of TCR clone 309978 (TRBV7-9, TRBJ2-7)
CASSFGSYEQYF

SEQ ID NO: 619957 - protein, 15 aa, Homo sapiens
  CDR3 for alpha chain variable domain of TCR clone 309979 (TRAV8-3, TRAJ11)
CAVGLLNSGYSTLTF

SEQ ID NO: 619958 - protein, 16 aa, Homo sapiens
  CDR3 for beta chain variable domain of TCR clone 309979 (TRBV10-3, TRBJ2-1)
CAISGVGDGGGGEQFF

SEQ ID NO: 619959 - protein, 13 aa, Homo sapiens
  CDR3 for alpha chain variable domain of TCR clone 309980 (TRAV1-2, TRAJ33)
CAVSEDSNYQLIC

SEQ ID NO: 619960 - protein, 16 aa, Homo sapiens
  CDR3 for beta chain variable domain of TCR clone 309980 (TRBV4-2, TRBJ2-7)
CASSQDGVERGYEQYF

SEQ ID NO: 619961 - protein, 15 aa, Homo sapiens
  CDR3 for alpha chain variable domain of TCR clone 309981 (TRAV17, TRAJ22)
CATVTPSGSARQLTF

SEQ ID NO: 619962 - protein, 16 aa, Homo sapiens
  CDR3 for beta chain variable domain of TCR clone 309981 (TRBV10-3, TRBJ2-7)
CAISADFADRPYEQYF

SEQ ID NO: 619963 - protein, 11 aa, Homo sapiens
  CDR3 for alpha chain variable domain of TCR clone 309982 (TRAV1-1, TRAJ23)
CAVRHGGKLIF

SEQ ID NO: 619964 - protein, 20 aa, Homo sapiens
  CDR3 for beta chain variable domain of TCR clone 309982 (TRBV7-8, TRBJ2-2)
CASSHLFPVPTIHITGELFF

SEQ ID NO: 619965 - protein, 13 aa, Homo sapiens
  CDR3 for alpha chain variable domain of TCR clone 309983 (TRAV21, TRAJ20)
CAVGLRVDYKLSF

SEQ ID NO: 619966 - protein, 21 aa, Homo sapiens
  CDR3 for beta chain variable domain of TCR clone 309983 (TRBV15, TRBJ2-1)
AWGTQPCTCVPAAEVDTARFF

SEQ ID NO: 619967 - protein, 16 aa, Homo sapiens
  CDR3 for alpha chain variable domain of TCR clone 309984 (TRAV3, TRAJ10)
CGVRDMRAGGGNKLTF

SEQ ID NO: 619968 - protein, 14 aa, Homo sapiens
  CDR3 for beta chain variable domain of TCR clone 309984 (TRBV25-1, TRBJ1-1)
CASTHLGGNTEAFF

SEQ ID NO: 619969 - protein, 17 aa, Homo sapiens
  CDR3 for alpha chain variable domain of TCR clone 309985 (TRAV2, TRAJ22)
ILQVREADAAEQRQLSF

SEQ ID NO: 619970 - protein, 16 aa, Homo sapiens
  CDR3 for beta chain variable domain of TCR clone 309985 (TRBV2, TRBJ2-5)
CASSETQGVGEETQYF

SEQ ID NO: 619971 - protein, 14 aa, Homo sapiens
  CDR3 for alpha chain variable domain of TCR clone 309986 (TRAV21, TRAJ45)
CAVRSGGSADGLTF

SEQ ID NO: 619972 - protein, 15 aa, Homo sapiens
  CDR3 for beta chain variable domain of TCR clone 309986 (TRBV6-1, TRBJ2-4)
CASSEAVWTINIQYF

SEQ ID NO: 619973 - protein, 13 aa, Homo sapiens
  CDR3 for alpha chain variable domain of TCR clone 309987 (TRAV8-3, TRAJ36)
CAVGATGANNLFF

SEQ ID NO: 619974 - protein, 17 aa, Homo sapiens
  CDR3 for beta chain variable domain of TCR clone 309987 (TRBV7-2, TRBJ2-1)
CASSLYPPGVEYNEQFF

SEQ ID NO: 619975 - protein, 14 aa, Homo sapiens
  CDR3 for alpha chain variable domain of TCR clone 309988 (TRAV29/DV5, TRAJ45)
CAASFRGGVDGHTF

SEQ ID NO: 619976 - protein, 11 aa, Homo sapiens
  CDR3 for beta chain variable domain of TCR clone 309988 (TRBV11-2, TRBJ2-2)
CASSLPGELFF

SEQ ID NO: 619977 - protein, 14 aa, Homo sapiens
  CDR3 for alpha chain variable domain of TCR clone 309989 (TRAV26-1, TRAJ45)
CIVRVVGGADGLTF

SEQ ID NO: 619978 - protein, 16 aa, Homo sapiens
  CDR3 for beta chain variable domain of TCR clone 309989 (TRBV7-9, TRBJ1-1)
CASSLTQVLSNTEAFF

SEQ ID NO: 619979 - protein, 13 aa, Homo sapiens
  CDR3 for alpha chain variable domain of TCR clone 309990 (TRAV1-1, TRAJ9)
CAANNTGGFTTIF

SEQ ID NO: 619980 - protein, 14 aa, Homo sapiens
  CDR3 for beta chain variable domain of TCR clone 309990 (TRBV20-1, TRBJ2-1)
CSAQIGGSANEQFF

SEQ ID NO: 619981 - protein, 15 aa, Homo sapiens
  CDR3 for alpha chain variable domain of TCR clone 309991 (TRAV3, TRAJ20)
CAVRDSRSNDYKLSF

SEQ ID NO: 619982 - protein, 14 aa, Homo sapiens
  CDR3 for beta chain variable domain of TCR clone 309991 (TRBV20-1, TRBJ2-7)
CSARRGNGSYEQYF

SEQ ID NO: 619983 - protein, 19 aa, Homo sapiens
  CDR3 for alpha chain variable domain of TCR clone 309992 (TRAV34, TRAJ52)
VAQTRRSNAGGTSYGKLTF

SEQ ID NO: 619984 - protein, 15 aa, Homo sapiens
  CDR3 for beta chain variable domain of TCR clone 309992 (TRBV5-1, TRBJ2-7)
CASSLNGGPAREQYF

SEQ ID NO: 619985 - protein, 15 aa, Homo sapiens
  CDR3 for alpha chain variable domain of TCR clone 309993 (TRAV25, TRAJ52)
CAGRPGGTSYGKLTF

SEQ ID NO: 619986 - protein, 17 aa, Homo sapiens
  CDR3 for beta chain variable domain of TCR clone 309993 (TRBV11-2, TRBJ2-3)
CQQLRGASRGAPNTQYF

SEQ ID NO: 619987 - protein, 11 aa, Homo sapiens
  CDR3 for alpha chain variable domain of TCR clone 309994 (TRAV21, TRAJ34)
CASYNTDKLIF

SEQ ID NO: 619988 - protein, 15 aa, Homo sapiens
  CDR3 for beta chain variable domain of TCR clone 309994 (TRBV27, TRBJ2-1)
CASSNGGGSSNEQFF

SEQ ID NO: 619989 - protein, 10 aa, Homo sapiens
  CDR3 for alpha chain variable domain of TCR clone 309995 (TRAV12-2, TRAJ41)
CAVTGNALNF

SEQ ID NO: 619990 - protein, 15 aa, Homo sapiens
  CDR3 for beta chain variable domain of TCR clone 309995 (TRBV4-2, TRBJ2-1)
CASSQDVGPAGEQFF

SEQ ID NO: 619991 - protein, 14 aa, Homo sapiens
  CDR3 for alpha chain variable domain of TCR clone 309996 (TRAV1-2, TRAJ8)
CAVREDTGFQKLVF

SEQ ID NO: 619992 - protein, 16 aa, Homo sapiens
  CDR3 for beta chain variable domain of TCR clone 309996 (TRBV29-1, TRBJ2-6)
CSVDDITYSGANVLTF

SEQ ID NO: 619993 - protein, 14 aa, Homo sapiens
  CDR3 for alpha chain variable domain of TCR clone 309997 (TRAV12-2, TRAJ13)
CAVKKTGGYQKVTF

SEQ ID NO: 619994 - protein, 13 aa, Homo sapiens
  CDR3 for beta chain variable domain of TCR clone 309997 (TRBV20-1, TRBJ1-2)
CSARDRVYGGDTF

SEQ ID NO: 619995 - protein, 13 aa, Homo sapiens
  CDR3 for alpha chain variable domain of TCR clone 309998 (TRAV1-1, TRAJ30)
CAVRSDRDDKILF

SEQ ID NO: 619996 - protein, 14 aa, Homo sapiens
  CDR3 for beta chain variable domain of TCR clone 309998 (TRBV28, TRBJ2-7)
CASTFYGRAHEQYF

SEQ ID NO: 619997 - protein, 17 aa, Homo sapiens
  CDR3 for alpha chain variable domain of TCR clone 309999 (TRAV26-2, TRAJ42)
CILRDVGYGGSQGNLIF

SEQ ID NO: 619998 - protein, 16 aa, Homo sapiens
  CDR3 for beta chain variable domain of TCR clone 309999 (TRBV20-1, TRBJ1-4)
RSAPGQGLLTNEKLFF

SEQ ID NO: 619999 - protein, 14 aa, Homo sapiens
  CDR3 for alpha chain variable domain of TCR clone 310000 (TRAV8-1, TRAJ31)
CAVTSWNNNARLMF

SEQ ID NO: 620000 - protein, 16 aa, Homo sapiens
  CDR3 for beta chain variable domain of TCR clone 310000 (TRBV12-5, TRBJ2-5)
CASGPRTSGNQETQYF

SEQ ID NO: 620001 - protein, 11 aa, Homo sapiens
  CDR3 for alpha chain variable domain of TCR clone 310001 (TRAV17, TRAJ31)
CATSNNARLMF

SEQ ID NO: 620002 - protein, 15 aa, Homo sapiens
  CDR3 for beta chain variable domain of TCR clone 310001 (TRBV5-1, TRBJ2-3)
CASSVTSGSADTQYF

SEQ ID NO: 620003 - protein, 14 aa, Homo sapiens
  CDR3 for alpha chain variable domain of TCR clone 310002 (TRAV30, TRAJ33)
CGTERRFSNYQLIW

SEQ ID NO: 620004 - protein, 13 aa, Homo sapiens
  CDR3 for beta chain variable domain of TCR clone 310002 (TRBV10-2, TRBJ2-7)
CASGASGGYEQYF

SEQ ID NO: 620005 - protein, 13 aa, Homo sapiens
  CDR3 for alpha chain variable domain of TCR clone 310003 (TRAV35, TRAJ13)
CWFPFWGFQKVTF

SEQ ID NO: 620006 - protein, 17 aa, Homo sapiens
  CDR3 for beta chain variable domain of TCR clone 310003 (TRBV18, TRBJ1-5)
CQLTTCRVRQNNQPQHF

SEQ ID NO: 620007 - protein, 11 aa, Homo sapiens
  CDR3 for alpha chain variable domain of TCR clone 310004 (TRAV13-2, TRAJ23)
CAESPRGKLIF

SEQ ID NO: 620008 - protein, 13 aa, Homo sapiens
  CDR3 for beta chain variable domain of TCR clone 310004 (TRBV4-1, TRBJ2-1)
CASSQAGGDEQFF

SEQ ID NO: 620009 - protein, 14 aa, Homo sapiens
  CDR3 for alpha chain variable domain of TCR clone 310005 (TRAV26-1, TRAJ21)
CIAHTTSTNFTLDL

SEQ ID NO: 620010 - protein, 15 aa, Homo sapiens
  CDR3 for beta chain variable domain of TCR clone 310005 (TRBV7-3, TRBJ2-1)
CASSPTGGGEVEQFF

SEQ ID NO: 620011 - protein, 14 aa, Homo sapiens
  CDR3 for alpha chain variable domain of TCR clone 310006 (TRAV1-2, TRAJ16)
CSVNRFSDGQKLLF

SEQ ID NO: 620012 - protein, 13 aa, Homo sapiens
  CDR3 for beta chain variable domain of TCR clone 310006 (TRBV7-2, TRBJ2-7)
CASSSPSGSEQYF

SEQ ID NO: 620013 - protein, 12 aa, Homo sapiens
  CDR3 for alpha chain variable domain of TCR clone 310007 (TRAV12-3, TRAJ17)
CTMTLTGNKLPF

SEQ ID NO: 620014 - protein, 15 aa, Homo sapiens
  CDR3 for beta chain variable domain of TCR clone 310007 (TRBV20-1, TRBJ2-7)
CSARDRVSGMDEQYF

SEQ ID NO: 620015 - protein, 14 aa, Homo sapiens
  CDR3 for alpha chain variable domain of TCR clone 310008 (TRAV1-2, TRAJ15)
CAVRDRQAGTALIF

SEQ ID NO: 620016 - protein, 18 aa, Homo sapiens
  CDR3 for beta chain variable domain of TCR clone 310008 (TRBV7-9, TRBJ2-1)
CASSLAVSGTSGRNEQFF

SEQ ID NO: 620017 - protein, 16 aa, Homo sapiens
  CDR3 for alpha chain variable domain of TCR clone 310009 (TRAV30, TRAJ24)
CGTEIVDADSWGKFQF

SEQ ID NO: 620018 - protein, 13 aa, Homo sapiens
  CDR3 for beta chain variable domain of TCR clone 310009 (TRBV7-2, TRBJ1-4)
CASSLAALEKLFF

SEQ ID NO: 620019 - protein, 13 aa, Homo sapiens
  CDR3 for alpha chain variable domain of TCR clone 310010 (TRAV22, TRAJ29)
CAVGGSGNTPLVF

SEQ ID NO: 620020 - protein, 13 aa, Homo sapiens
  CDR3 for beta chain variable domain of TCR clone 310010 (TRBV19, TRBJ2-2)
CASSIWSTGELFF

SEQ ID NO: 620021 - protein, 12 aa, Homo sapiens
  CDR3 for alpha chain variable domain of TCR clone 310011 (TRAV8-3, TRAJ26)
CAGDNYGQNFVF

SEQ ID NO: 620022 - protein, 15 aa, Homo sapiens
  CDR3 for beta chain variable domain of TCR clone 310011 (TRBV20-1, TRBJ2-3)
CSATGTSGFTDTQYF

SEQ ID NO: 620023 - protein, 13 aa, Homo sapiens
  CDR3 for alpha chain variable domain of TCR clone 310012 (TRAV21, TRAJ27)
CAARPGNAGKTTF

SEQ ID NO: 620024 - protein, 15 aa, Homo sapiens
  CDR3 for beta chain variable domain of TCR clone 310012 (TRBV20-1, TRBJ2-7)
CSARDRVSGMDEQYF

SEQ ID NO: 620025 - protein, 14 aa, Homo sapiens
  CDR3 for alpha chain variable domain of TCR clone 310013 (TRAV13-1, TRAJ35)
CAASQGGFGIVLHC

SEQ ID NO: 620026 - protein, 13 aa, Homo sapiens
  CDR3 for beta chain variable domain of TCR clone 310013 (TRBV7-3, TRBJ1-1)
CASSQDWGAEAFF

SEQ ID NO: 620027 - protein, 13 aa, Homo sapiens
  CDR3 for alpha chain variable domain of TCR clone 310014 (TRAV12-2, TRAJ20)
CAVNDLNDYKLSF

SEQ ID NO: 620028 - protein, 12 aa, Homo sapiens
  CDR3 for beta chain variable domain of TCR clone 310014 (TRBV29-1, TRBJ1-3)
CSVVLSGNTIYF

SEQ ID NO: 620029 - protein, 11 aa, Homo sapiens
  CDR3 for alpha chain variable domain of TCR clone 310015 (TRAV2, TRAJ33)
CAVESNYQLIW

SEQ ID NO: 620030 - protein, 14 aa, Homo sapiens
  CDR3 for beta chain variable domain of TCR clone 310015 (TRBV3-1, TRBJ2-2)
CASSLPDNTGELFF

SEQ ID NO: 620031 - protein, 15 aa, Homo sapiens
  CDR3 for alpha chain variable domain of TCR clone 310016 (TRAV3, TRAJ30)
CAVRDRIERGDKIIF

SEQ ID NO: 620032 - protein, 13 aa, Homo sapiens
  CDR3 for beta chain variable domain of TCR clone 310016 (TRBV29-1, TRBJ2-5)
CSACSSRRETQYF

SEQ ID NO: 620033 - protein, 14 aa, Homo sapiens
  CDR3 for alpha chain variable domain of TCR clone 310017 (TRAV1-2, TRAJ8)
CAVREDTGFQKLVF

SEQ ID NO: 620034 - protein, 15 aa, Homo sapiens
  CDR3 for beta chain variable domain of TCR clone 310017 (TRBV7-9, TRBJ2-2)
CVSGPLDTFPGELFF

SEQ ID NO: 620035 - protein, 11 aa, Homo sapiens
  CDR3 for alpha chain variable domain of TCR clone 310018 (TRAV21, TRAJ41)
CAVRSGYALNF

SEQ ID NO: 620036 - protein, 13 aa, Homo sapiens
  CDR3 for beta chain variable domain of TCR clone 310018 (TRBV7-9, TRBJ1-2)
CASSLKQNYDYTF

SEQ ID NO: 620037 - protein, 16 aa, Homo sapiens
  CDR3 for alpha chain variable domain of TCR clone 310019 (TRAV26-1, TRAJ52)
CIVSNAGRTSYGKLTF

SEQ ID NO: 620038 - protein, 16 aa, Homo sapiens
  CDR3 for beta chain variable domain of TCR clone 310019 (TRBV5-1, TRBJ2-1)
CASSLEGRGLYNEQFF

SEQ ID NO: 620039 - protein, 15 aa, Homo sapiens
  CDR3 for alpha chain variable domain of TCR clone 310020 (TRAV2, TRAJ11)
CAVGGRNSGYSTITF

SEQ ID NO: 620040 - protein, 12 aa, Homo sapiens
  CDR3 for beta chain variable domain of TCR clone 310020 (TRBV5-4, TRBJ2-7)
CASSLEAYEQYF

SEQ ID NO: 620041 - protein, 11 aa, Homo sapiens
  CDR3 for alpha chain variable domain of TCR clone 310021 (TRAV13-2, TRAJ20)
CSDSNDYKLSF

SEQ ID NO: 620042 - protein, 14 aa, Homo sapiens
  CDR3 for beta chain variable domain of TCR clone 310021 (TRBV11-2, TRBJ1-5)
CASSLDRGRQPQHF

SEQ ID NO: 620043 - protein, 18 aa, Homo sapiens
  CDR3 for alpha chain variable domain of TCR clone 310022 (TRAV12-3, TRAJ52)
CAMSVGGAGGTSYGKLTF

SEQ ID NO: 620044 - protein, 14 aa, Homo sapiens
  CDR3 for beta chain variable domain of TCR clone 310022 (TRBV7-2, TRBJ2-7)
CASSLYPGRYEQYF

SEQ ID NO: 620045 - protein, 15 aa, Homo sapiens
  CDR3 for alpha chain variable domain of TCR clone 310023 (TRAV12-3, TRAJ6)
CAMSATTGGSYIPTY

SEQ ID NO: 620046 - protein, 17 aa, Homo sapiens
  CDR3 for beta chain variable domain of TCR clone 310023 (TRBV13, TRBJ2-3)
CASSLSRVAGGRNTQYF

SEQ ID NO: 620047 - protein, 12 aa, Homo sapiens
  CDR3 for alpha chain variable domain of TCR clone 310024 (TRAV13-1, TRAJ15)
CAASQAGTALIF

SEQ ID NO: 620048 - protein, 14 aa, Homo sapiens
  CDR3 for beta chain variable domain of TCR clone 310024 (TRBV7-2, TRBJ2-7)
CASSLDPGGGEQYF

SEQ ID NO: 620049 - protein, 12 aa, Homo sapiens
  CDR3 for alpha chain variable domain of TCR clone 310025 (TRAV16, TRAJ10)
CSRTGGGNKLTF

SEQ ID NO: 620050 - protein, 14 aa, Homo sapiens
  CDR3 for beta chain variable domain of TCR clone 310025 (TRBV19, TRBJ1-5)
CASRAPDSFLSQHF

SEQ ID NO: 620051 - protein, 14 aa, Homo sapiens
  CDR3 for alpha chain variable domain of TCR clone 310026 (TRAV12-2, TRAJ13)
CAVKKSGGYQKVTF

SEQ ID NO: 620052 - protein, 15 aa, Homo sapiens
  CDR3 for beta chain variable domain of TCR clone 310026 (TRBV18, TRBJ2-1)
CASSPPSASYNEQFF

SEQ ID NO: 620053 - protein, 14 aa, Homo sapiens
  CDR3 for alpha chain variable domain of TCR clone 310027 (TRAV23/DV6, TRAJ37)
CAASTSSNTGKLIC

SEQ ID NO: 620054 - protein, 15 aa, Homo sapiens
  CDR3 for beta chain variable domain of TCR clone 310027 (TRBV7-9, TRBJ2-7)
CASSPGGGSTYEQYF

SEQ ID NO: 620055 - protein, 11 aa, Homo sapiens
  CDR3 for alpha chain variable domain of TCR clone 310028 (TRAV35, TRAJ30)
CAPGGDDKIIF

SEQ ID NO: 620056 - protein, 16 aa, Homo sapiens
  CDR3 for beta chain variable domain of TCR clone 310028 (TRBV7-3, TRBJ2-2)
CASSLKRGALSGELFF

SEQ ID NO: 620057 - protein, 15 aa, Homo sapiens
  CDR3 for alpha chain variable domain of TCR clone 310029 (TRAV13-1, TRAJ32)
CAASIYGGATNKLLF

SEQ ID NO: 620058 - protein, 17 aa, Homo sapiens
  CDR3 for beta chain variable domain of TCR clone 310029 (TRBV7-3, TRBJ2-5)
CASSLGSGRSGSETQYF

SEQ ID NO: 620059 - protein, 17 aa, Homo sapiens
  CDR3 for alpha chain variable domain of TCR clone 310030 (TRAV12-3, TRAJ6)
CAMSARGGAGGSYIPTF

SEQ ID NO: 620060 - protein, 15 aa, Homo sapiens
  CDR3 for beta chain variable domain of TCR clone 310030 (TRBV27, TRBJ2-7)
CASSPQREGQREQYF

SEQ ID NO: 620061 - protein, 13 aa, Homo sapiens
  CDR3 for alpha chain variable domain of TCR clone 310031 (TRAV35, TRAJ47)
CAGQLQPGHKLVF

SEQ ID NO: 620062 - protein, 14 aa, Homo sapiens
  CDR3 for beta chain variable domain of TCR clone 310031 (TRBV7-2, TRBJ1-2)
CASSQTGSTYGYTF

SEQ ID NO: 620063 - protein, 15 aa, Homo sapiens
  CDR3 for alpha chain variable domain of TCR clone 310032 (TRAV12-1, TRAJ44)
CVVDEYTGTASKLTF

SEQ ID NO: 620064 - protein, 14 aa, Homo sapiens
  CDR3 for beta chain variable domain of TCR clone 310032 (TRBV5-1, TRBJ1-2)
CASSLEPVNFGYTF

SEQ ID NO: 620065 - protein, 14 aa, Homo sapiens
  CDR3 for alpha chain variable domain of TCR clone 310033 (TRAV1-1, TRAJ27)
CAVIYNTNAGKSTF

SEQ ID NO: 620066 - protein, 13 aa, Homo sapiens
  CDR3 for beta chain variable domain of TCR clone 310033 (TRBV7-3, TRBJ1-1)
CASSQDWGAEDFF

SEQ ID NO: 620067 - protein, 13 aa, Homo sapiens
  CDR3 for alpha chain variable domain of TCR clone 310034 (TRAV13-1, TRAJ5)
CAASDTGRRALTF

SEQ ID NO: 620068 - protein, 12 aa, Homo sapiens
  CDR3 for beta chain variable domain of TCR clone 310034 (TRBV28, TRBJ2-3)
CASSLYLDTQYF

SEQ ID NO: 620069 - protein, 13 aa, Homo sapiens
  CDR3 for alpha chain variable domain of TCR clone 310035 (TRAV1-2, TRAJ9)
CAALNTGGFKTIF

SEQ ID NO: 620070 - protein, 14 aa, Homo sapiens
  CDR3 for beta chain variable domain of TCR clone 310035 (TRBV7-2, TRBJ2-2)
CASRGQGAAGELFF

SEQ ID NO: 620071 - protein, 16 aa, Homo sapiens
  CDR3 for alpha chain variable domain of TCR clone 310036 (TRAV1-1, TRAJ29)
CAVRSTRNSGNTPLVF

SEQ ID NO: 620072 - protein, 12 aa, Homo sapiens
  CDR3 for beta chain variable domain of TCR clone 310036 (TRBV27, TRBJ2-2)
CASKLFTGELFF

SEQ ID NO: 620073 - protein, 13 aa, Homo sapiens
  CDR3 for alpha chain variable domain of TCR clone 310037 (TRAV29/DV5, TRAJ29)
CAASAAGNNPLVF

SEQ ID NO: 620074 - protein, 13 aa, Homo sapiens
  CDR3 for beta chain variable domain of TCR clone 310037 (TRBV7-2, TRBJ2-7)
CASSSPSGSEQYF

SEQ ID NO: 620075 - protein, 19 aa, Homo sapiens
  CDR3 for alpha chain variable domain of TCR clone 310038 (TRAV26-1, TRAJ42)
CALLHRQTYYGGSQGSLIF

SEQ ID NO: 620076 - protein, 16 aa, Homo sapiens
  CDR3 for beta chain variable domain of TCR clone 310038 (TRBV7-3, TRBJ2-2)
CASSLKRGTLSGELFF

SEQ ID NO: 620077 - protein, 15 aa, Homo sapiens
  CDR3 for alpha chain variable domain of TCR clone 310039 (TRAV2, TRAJ9)
CAVEDRGTGGFKTIF

SEQ ID NO: 620078 - protein, 13 aa, Homo sapiens
  CDR3 for beta chain variable domain of TCR clone 310039 (TRBV2, TRBJ1-1)
CASSVLMNTEAFF

SEQ ID NO: 620079 - protein, 15 aa, Homo sapiens
  CDR3 for alpha chain variable domain of TCR clone 310040 (TRAV12-3, TRAJ6)
CAMSATTGGSYIPTF

SEQ ID NO: 620080 - protein, 12 aa, Homo sapiens
  CDR3 for beta chain variable domain of TCR clone 310040 (TRBV7-8, TRBJ1-1)
CASGTATTEAFF

SEQ ID NO: 620081 - protein, 17 aa, Homo sapiens
  CDR3 for alpha chain variable domain of TCR clone 310041 (TRAV3, TRAJ6)
CAVGDGPRTGGSYIPTF

SEQ ID NO: 620082 - protein, 20 aa, Homo sapiens
  CDR3 for beta chain variable domain of TCR clone 310041 (TRBV28, TRBJ2-1)
CASTPIGRSPGLAGGNEQFF

SEQ ID NO: 620083 - protein, 14 aa, Homo sapiens
  CDR3 for alpha chain variable domain of TCR clone 310042 (TRAV3, TRAJ28)
CAVRRGAGSYQLTF

SEQ ID NO: 620084 - protein, 16 aa, Homo sapiens
  CDR3 for beta chain variable domain of TCR clone 310042 (TRBV4-1, TRBJ2-7)
WASSQEWTSGPLEQYF

SEQ ID NO: 620085 - protein, 13 aa, Homo sapiens
  CDR3 for alpha chain variable domain of TCR clone 310043 (TRAV12-1, TRAJ33)
CGDAPDSNSQLIW

SEQ ID NO: 620086 - protein, 15 aa, Homo sapiens
  CDR3 for beta chain variable domain of TCR clone 310043 (TRBV27, TRBJ2-1)
CASSNGGGSSNEQFF

SEQ ID NO: 620087 - protein, 14 aa, Homo sapiens
  CDR3 for alpha chain variable domain of TCR clone 310044 (TRAV13-1, TRAJ44)
CAAKSTGTASTLTF

SEQ ID NO: 620088 - protein, 13 aa, Homo sapiens
  CDR3 for beta chain variable domain of TCR clone 310044 (TRBV5-5, TRBJ1-2)
CASSFWRGEDYTF

SEQ ID NO: 620089 - protein, 12 aa, Homo sapiens
  CDR3 for alpha chain variable domain of TCR clone 310045 (TRAV17, TRAJ12)
CATLRSSYKLIF

SEQ ID NO: 620090 - protein, 16 aa, Homo sapiens
  CDR3 for beta chain variable domain of TCR clone 310045 (TRBV15, TRBJ1-2)
CATSRGPRTGGGGYTF

SEQ ID NO: 620091 - protein, 14 aa, Homo sapiens
  CDR3 for alpha chain variable domain of TCR clone 310046 (TRAV35, TRAJ13)
CAVSPSGGYQKVTF

SEQ ID NO: 620092 - protein, 17 aa, Homo sapiens
  CDR3 for beta chain variable domain of TCR clone 310046 (TRBV7-6, TRBJ2-5)
CASSPGLADPWGETQYF

SEQ ID NO: 620093 - protein, 12 aa, Homo sapiens
  CDR3 for alpha chain variable domain of TCR clone 310047 (TRAV13-2, TRAJ23)
CAERHRGGKLIL

SEQ ID NO: 620094 - protein, 15 aa, Homo sapiens
  CDR3 for beta chain variable domain of TCR clone 310047 (TRBV15, TRBJ2-1)
CATSRPGQGLHEQYF

SEQ ID NO: 620095 - protein, 13 aa, Homo sapiens
  CDR3 for alpha chain variable domain of TCR clone 310048 (TRAV12-2, TRAJ4)
CAGFSGGYTKLIF

SEQ ID NO: 620096 - protein, 14 aa, Homo sapiens
  CDR3 for beta chain variable domain of TCR clone 310048 (TRBV24-1, TRBJ1-1)
CATSIPRGDTEAFF

SEQ ID NO: 620097 - protein, 16 aa, Homo sapiens
  CDR3 for alpha chain variable domain of TCR clone 310049 (TRAV30, TRAJ24)
CGTEIEDADSWGKFQF

SEQ ID NO: 620098 - protein, 15 aa, Homo sapiens
  CDR3 for beta chain variable domain of TCR clone 310049 (TRBV7-9, TRBJ1-4)
CASSARTGGNEKLFF

SEQ ID NO: 620099 - protein, 11 aa, Homo sapiens
  CDR3 for alpha chain variable domain of TCR clone 310050 (TRAV1-1, TRAJ23)
RAVRQGGKLIF

SEQ ID NO: 620100 - protein, 14 aa, Homo sapiens
  CDR3 for beta chain variable domain of TCR clone 310050 (TRBV11-2, TRBJ2-3)
CASSRLARTDTQYF

SEQ ID NO: 620101 - protein, 12 aa, Homo sapiens
  CDR3 for alpha chain variable domain of TCR clone 310051 (TRAV12-1, TRAJ40)
CVLYSGTYKYIF

SEQ ID NO: 620102 - protein, 17 aa, Homo sapiens
  CDR3 for beta chain variable domain of TCR clone 310051 (TRBV5-5, TRBJ1-2)
CASSLGSLDGQSEGYTF

SEQ ID NO: 620103 - protein, 18 aa, Homo sapiens
  CDR3 for alpha chain variable domain of TCR clone 310052 (TRAV26-2, TRAJ45)
CILRLWGYSVGGADGLTF

SEQ ID NO: 620104 - protein, 13 aa, Homo sapiens
  CDR3 for beta chain variable domain of TCR clone 310052 (TRBV7-8, TRBJ2-7)
CASSLTGGREQYF

SEQ ID NO: 620105 - protein, 15 aa, Homo sapiens
  CDR3 for alpha chain variable domain of TCR clone 310053 (TRAV3, TRAJ29)
CAVRAPLSGNTPPVF

SEQ ID NO: 620106 - protein, 15 aa, Homo sapiens
  CDR3 for beta chain variable domain of TCR clone 310053 (TRBV28, TRBJ1-1)
CASRIKGGLNTEAFF

SEQ ID NO: 620107 - protein, 13 aa, Homo sapiens
  CDR3 for alpha chain variable domain of TCR clone 310054 (TRAV4, TRAJ42)
CLVGGGSQGNLIF

SEQ ID NO: 620108 - protein, 15 aa, Homo sapiens
  CDR3 for beta chain variable domain of TCR clone 310054 (TRBV29-1, TRBJ2-7)
CSVGCFDRGSYEQYF

SEQ ID NO: 620109 - protein, 11 aa, Homo sapiens
  CDR3 for alpha chain variable domain of TCR clone 310055 (TRAV12-3, TRAJ27)
CAMANAGKSTF

SEQ ID NO: 620110 - protein, 13 aa, Homo sapiens
  CDR3 for beta chain variable domain of TCR clone 310055 (TRBV7-2, TRBJ2-1)
CASSSQTSGEQFF

SEQ ID NO: 620111 - protein, 14 aa, Homo sapiens
  CDR3 for alpha chain variable domain of TCR clone 310056 (TRAV8-3, TRAJ4)
CAVGASGGYNKLIF

SEQ ID NO: 620112 - protein, 12 aa, Homo sapiens
  CDR3 for beta chain variable domain of TCR clone 310056 (TRBV14, TRBJ2-7)
CASSRLKGEQYF

SEQ ID NO: 620113 - protein, 13 aa, Homo sapiens
  CDR3 for alpha chain variable domain of TCR clone 310057 (TRAV8-3, TRAJ48)
CAVVPFGNEKLTF

SEQ ID NO: 620114 - protein, 19 aa, Homo sapiens
  CDR3 for beta chain variable domain of TCR clone 310057 (TRBV25-1, TRBJ2-2)
CAILVYRMDRGRKTGELFF

SEQ ID NO: 620115 - protein, 16 aa, Homo sapiens
  CDR3 for alpha chain variable domain of TCR clone 310058 (TRAV8-6, TRAJ32)
CAVSYPYGGATNKLIF

SEQ ID NO: 620116 - protein, 18 aa, Homo sapiens
  CDR3 for beta chain variable domain of TCR clone 310058 (TRBV4-2, TRBJ2-6)
CASSQLQGVLTGANVLTF

SEQ ID NO: 620117 - protein, 14 aa, Homo sapiens
  CDR3 for alpha chain variable domain of TCR clone 310059 (TRAV12-1, TRAJ3)
CVVILYSSASNIIF

SEQ ID NO: 620118 - protein, 18 aa, Homo sapiens
  CDR3 for beta chain variable domain of TCR clone 310059 (TRBV12-4, TRBJ2-2)
CASSRSGGAIPNTGELFF

SEQ ID NO: 620119 - protein, 12 aa, Homo sapiens
  CDR3 for alpha chain variable domain of TCR clone 310060 (TRAV3, TRAJ43)
CAVRGPNNDMRF

SEQ ID NO: 620120 - protein, 15 aa, Homo sapiens
  CDR3 for beta chain variable domain of TCR clone 310060 (TRBV27, TRBJ1-5)
CASSLGTGCDQPQHF

SEQ ID NO: 620121 - protein, 13 aa, Homo sapiens
  CDR3 for alpha chain variable domain of TCR clone 310061 (TRAV30, TRAJ24)
CGTVTDSWGKWQF

SEQ ID NO: 620122 - protein, 15 aa, Homo sapiens
  CDR3 for beta chain variable domain of TCR clone 310061 (TRBV25-1, TRBJ1-4)
CASSPGDSTNEKLFF

SEQ ID NO: 620123 - protein, 19 aa, Homo sapiens
  CDR3 for alpha chain variable domain of TCR clone 310062 (TRAV13-1, TRAJ52)
CAASPYQNAGGTSYGKLTF

SEQ ID NO: 620124 - protein, 14 aa, Homo sapiens
  CDR3 for beta chain variable domain of TCR clone 310062 (TRBV19, TRBJ2-7)
CASTVQGRPYEQDF

SEQ ID NO: 620125 - protein, 14 aa, Homo sapiens
  CDR3 for alpha chain variable domain of TCR clone 310063 (TRAV26-1, TRAJ38)
CIADNAGNNRKLIW

SEQ ID NO: 620126 - protein, 19 aa, Homo sapiens
  CDR3 for beta chain variable domain of TCR clone 310063 (TRBV11-3, TRBJ2-2)
CASSTRPGAKTTNTGELFF

SEQ ID NO: 620127 - protein, 15 aa, Homo sapiens
  CDR3 for alpha chain variable domain of TCR clone 310064 (TRAV36/DV7, TRAJ44)
CAVCRNTGTASKLTF

SEQ ID NO: 620128 - protein, 13 aa, Homo sapiens
  CDR3 for beta chain variable domain of TCR clone 310064 (TRBV18, TRBJ2-3)
CARSTGRTDTQYF

SEQ ID NO: 620129 - protein, 17 aa, Homo sapiens
  CDR3 for alpha chain variable domain of TCR clone 310065 (TRAV3, TRAJ42)
CAVRARDYGGSQGNLIF

SEQ ID NO: 620130 - protein, 16 aa, Homo sapiens
  CDR3 for beta chain variable domain of TCR clone 310065 (TRBV7-3, TRBJ2-2)
CASSLKRGTLSGELFF

SEQ ID NO: 620131 - protein, 16 aa, Homo sapiens
  CDR3 for alpha chain variable domain of TCR clone 310066 (TRAV8-4, TRAJ52)
CAVSDPVGTSYGKLTF

SEQ ID NO: 620132 - protein, 15 aa, Homo sapiens
  CDR3 for beta chain variable domain of TCR clone 310066 (TRBV12-4, TRBJ2-7)
CASSQRTSGNYEQYF

SEQ ID NO: 620133 - protein, 19 aa, Homo sapiens
  CDR3 for alpha chain variable domain of TCR clone 310067 (TRAV17, TRAJ40)
TASRAADTASYFCASQYIF

SEQ ID NO: 620134 - protein, 17 aa, Homo sapiens
  CDR3 for beta chain variable domain of TCR clone 310067 (TRBV11-2, TRBJ2-4)
CASSFLALGGAGDIQYF

SEQ ID NO: 620135 - protein, 16 aa, Homo sapiens
  CDR3 for alpha chain variable domain of TCR clone 310068 (TRAV3, TRAJ37)
CAVRGKGSGNTGKLIV

SEQ ID NO: 620136 - protein, 16 aa, Homo sapiens
  CDR3 for beta chain variable domain of TCR clone 310068 (TRBV12-5, TRBJ2-5)
CASGPRTSGSQETQYF

SEQ ID NO: 620137 - protein, 12 aa, Homo sapiens
  CDR3 for alpha chain variable domain of TCR clone 310069 (TRAV17, TRAJ57)
CATDGGSEKLSL

SEQ ID NO: 620138 - protein, 13 aa, Homo sapiens
  CDR3 for beta chain variable domain of TCR clone 310069 (TRBV7-9, TRBJ2-7)
CASSFAGAYEQYF

SEQ ID NO: 620139 - protein, 15 aa, Homo sapiens
  CDR3 for alpha chain variable domain of TCR clone 310070 (TRAV1-2, TRAJ30)
CAVRPHGNRDDKIIF

SEQ ID NO: 620140 - protein, 23 aa, Homo sapiens
  CDR3 for beta chain variable domain of TCR clone 310070 (TRBV4-1, TRBJ2-7)
PCSQKTQPCISAPAAKGRPKQYF

SEQ ID NO: 620141 - protein, 14 aa, Homo sapiens
  CDR3 for alpha chain variable domain of TCR clone 310071 (TRAV17, TRAJ57)
CATDPQGGSEKLVF

SEQ ID NO: 620142 - protein, 17 aa, Homo sapiens
  CDR3 for beta chain variable domain of TCR clone 310071 (TRBV13, TRBJ2-3)
CASSLSRVAGGRNSQYF

SEQ ID NO: 620143 - protein, 14 aa, Homo sapiens
  CDR3 for alpha chain variable domain of TCR clone 310072 (TRAV23/DV6, TRAJ4)
CAANLSGGDNKLIF

SEQ ID NO: 620144 - protein, 15 aa, Homo sapiens
  CDR3 for beta chain variable domain of TCR clone 310072 (TRBV20-1, TRBJ1-1)
CSASRGVTGNTEAFF

SEQ ID NO: 620145 - protein, 14 aa, Homo sapiens
  CDR3 for alpha chain variable domain of TCR clone 310073 (TRAV27, TRAJ22)
CAGLPSGSARQLTF

SEQ ID NO: 620146 - protein, 14 aa, Homo sapiens
  CDR3 for beta chain variable domain of TCR clone 310073 (TRBV19, TRBJ2-1)
CASPTFVLSGEKFF

SEQ ID NO: 620147 - protein, 16 aa, Homo sapiens
  CDR3 for alpha chain variable domain of TCR clone 310074 (TRAV2, TRAJ23)
CVVGKLIFGQGTELSV

SEQ ID NO: 620148 - protein, 20 aa, Homo sapiens
  CDR3 for beta chain variable domain of TCR clone 310074 (TRBV20-1, TRBJ2-5)
CSARAGLAGRLAGHLETQYF

SEQ ID NO: 620149 - protein, 13 aa, Homo sapiens
  CDR3 for alpha chain variable domain of TCR clone 310075 (TRAV26-1, TRAJ54)
GIVRVKGAQKLVF

SEQ ID NO: 620150 - protein, 15 aa, Homo sapiens
  CDR3 for beta chain variable domain of TCR clone 310075 (TRBV20-1, TRBJ2-1)
CSAQPGGGPYNEQFF

SEQ ID NO: 620151 - protein, 18 aa, Homo sapiens
  CDR3 for alpha chain variable domain of TCR clone 310076 (TRAV29/DV5, TRAJ52)
CAAGFRGAGGTSYGKLTF

SEQ ID NO: 620152 - protein, 12 aa, Homo sapiens
  CDR3 for beta chain variable domain of TCR clone 310076 (TRBV11-2, TRBJ2-5)
CASSLGQETQYF

SEQ ID NO: 620153 - protein, 14 aa, Homo sapiens
  CDR3 for alpha chain variable domain of TCR clone 310077 (TRAV1-2, TRAJ8)
CAVREDTGFQKLVF

SEQ ID NO: 620154 - protein, 15 aa, Homo sapiens
  CDR3 for beta chain variable domain of TCR clone 310077 (TRBV9, TRBJ1-6)
CASSVAGTGDSPLNF

SEQ ID NO: 620155 - protein, 13 aa, Homo sapiens
  CDR3 for alpha chain variable domain of TCR clone 310078 (TRAV12-3, TRAJ13)
CAMTSGGYQKVTF

SEQ ID NO: 620156 - protein, 15 aa, Homo sapiens
  CDR3 for beta chain variable domain of TCR clone 310078 (TRBV12-4, TRBJ2-5)
CASSPPTGLQETQYF

SEQ ID NO: 620157 - protein, 12 aa, Homo sapiens
  CDR3 for alpha chain variable domain of TCR clone 310079 (TRAV12-3, TRAJ29)
CAAREGNTPLVF

SEQ ID NO: 620158 - protein, 17 aa, Homo sapiens
  CDR3 for beta chain variable domain of TCR clone 310079 (TRBV18, TRBJ2-1)
CASSPSAAGAGDNEQFF

SEQ ID NO: 620159 - protein, 12 aa, Homo sapiens
  CDR3 for alpha chain variable domain of TCR clone 310080 (TRAV12-2, TRAJ10)
WGVTGGGNKLTF

SEQ ID NO: 620160 - protein, 17 aa, Homo sapiens
  CDR3 for beta chain variable domain of TCR clone 310080 (TRBV24-1, TRBJ2-4)
CATSDAEARGVRNIQYF

SEQ ID NO: 620161 - protein, 12 aa, Homo sapiens
  CDR3 for alpha chain variable domain of TCR clone 310081 (TRAV35, TRAJ49)
CAGWNTGNQFYF

SEQ ID NO: 620162 - protein, 16 aa, Homo sapiens
  CDR3 for beta chain variable domain of TCR clone 310081 (TRBV2, TRBJ2-1)
CASRSPAVGKYNEQFF

SEQ ID NO: 620163 - protein, 13 aa, Homo sapiens
  CDR3 for alpha chain variable domain of TCR clone 310082 (TRAV21, TRAJ27)
CAARPGNAGKSTV

SEQ ID NO: 620164 - protein, 14 aa, Homo sapiens
  CDR3 for beta chain variable domain of TCR clone 310082 (TRBV7-6, TRBJ2-1)
CASSLGGGQMSSSS

SEQ ID NO: 620165 - protein, 12 aa, Homo sapiens
  CDR3 for alpha chain variable domain of TCR clone 310083 (TRAV12-1, TRAJ20)
RVVNPDDYKLSF

SEQ ID NO: 620166 - protein, 17 aa, Homo sapiens
  CDR3 for beta chain variable domain of TCR clone 310083 (TRBV5-1, TRBJ2-3)
CASSLGASTSGTDTQYF

SEQ ID NO: 620167 - protein, 13 aa, Homo sapiens
  CDR3 for alpha chain variable domain of TCR clone 310084 (TRAV20, TRAJ37)
CAGCSSNTGKLIF

SEQ ID NO: 620168 - protein, 13 aa, Homo sapiens
  CDR3 for beta chain variable domain of TCR clone 310084 (TRBV7-9, TRBJ1-2)
CASSLEQNYGYTF

SEQ ID NO: 620169 - protein, 17 aa, Homo sapiens
  CDR3 for alpha chain variable domain of TCR clone 310085 (TRAV3, TRAJ6)
CAVGDGPRAGGSYIPTF

SEQ ID NO: 620170 - protein, 14 aa, Homo sapiens
  CDR3 for beta chain variable domain of TCR clone 310085 (TRBV7-2, TRBJ2-7)
CASNPKTSFYEQYF

SEQ ID NO: 620171 - protein, 19 aa, Homo sapiens
  CDR3 for alpha chain variable domain of TCR clone 310086 (TRAV25, TRAJ20)
TATQTTDVGILPHDYKLSF

SEQ ID NO: 620172 - protein, 17 aa, Homo sapiens
  CDR3 for beta chain variable domain of TCR clone 310086 (TRBV4-3, TRBJ2-1)
CASSHFSSGRASGEQFF

SEQ ID NO: 620173 - protein, 11 aa, Homo sapiens
  CDR3 for alpha chain variable domain of TCR clone 310087 (TRAV4, TRAJ31)
CLEGLNARLMF

SEQ ID NO: 620174 - protein, 16 aa, Homo sapiens
  CDR3 for beta chain variable domain of TCR clone 310087 (TRBV15, TRBJ2-6)
CATSVNGGFLANVLTF

SEQ ID NO: 620175 - protein, 11 aa, Homo sapiens
  CDR3 for alpha chain variable domain of TCR clone 310088 (TRAV23/DV6, TRAJ43)
CAASSGNDLRF

SEQ ID NO: 620176 - protein, 14 aa, Homo sapiens
  CDR3 for beta chain variable domain of TCR clone 310088 (TRBV4-1, TRBJ1-2)
CASSQDPLPYGYTF

SEQ ID NO: 620177 - protein, 11 aa, Homo sapiens
  CDR3 for alpha chain variable domain of TCR clone 310089 (TRAV3, TRAJ21)
CAVGNFNKFYF

SEQ ID NO: 620178 - protein, 17 aa, Homo sapiens
  CDR3 for beta chain variable domain of TCR clone 310089 (TRBV11-3, TRBJ2-3)
CASSLGLTGGGTDTQYF

SEQ ID NO: 620179 - protein, 11 aa, Homo sapiens
  CDR3 for alpha chain variable domain of TCR clone 310090 (TRAV12-1, TRAJ15)
CVVNAGTALIF

SEQ ID NO: 620180 - protein, 16 aa, Homo sapiens
  CDR3 for beta chain variable domain of TCR clone 310090 (TRBV28, TRBJ2-1)
CAISSRVRDSYNEQFF

SEQ ID NO: 620181 - protein, 14 aa, Homo sapiens
  CDR3 for alpha chain variable domain of TCR clone 310091 (TRAV1-2, TRAJ16)
CAVNRVSDGQKLLF

SEQ ID NO: 620182 - protein, 14 aa, Homo sapiens
  CDR3 for beta chain variable domain of TCR clone 310091 (TRBV11-2, TRBJ1-2)
CASSLGTANYGYTF

SEQ ID NO: 620183 - protein, 12 aa, Homo sapiens
  CDR3 for alpha chain variable domain of TCR clone 310092 (TRAV27, TRAJ58)
CAGARDTSRLTF

SEQ ID NO: 620184 - protein, 14 aa, Homo sapiens
  CDR3 for beta chain variable domain of TCR clone 310092 (TRBV25-1, TRBJ1-1)
CASTHLGGNTEAFF

SEQ ID NO: 620185 - protein, 14 aa, Homo sapiens
  CDR3 for alpha chain variable domain of TCR clone 310093 (TRAV26-1, TRAJ49)
CIVRPSNTGNQFYY

SEQ ID NO: 620186 - protein, 15 aa, Homo sapiens
  CDR3 for beta chain variable domain of TCR clone 310093 (TRBV19, TRBJ1-1)
CASMGFRDVNTEAFF

SEQ ID NO: 620187 - protein, 12 aa, Homo sapiens
  CDR3 for alpha chain variable domain of TCR clone 310094 (TRAV9-2, TRAJ5)
CVVDTGRRALTF

SEQ ID NO: 620188 - protein, 14 aa, Homo sapiens
  CDR3 for beta chain variable domain of TCR clone 310094 (TRBV5-1, TRBJ1-1)
YASSSTGEDTEAFF

SEQ ID NO: 620189 - protein, 18 aa, Homo sapiens
  CDR3 for alpha chain variable domain of TCR clone 310095 (TRAV12-3, TRAJ52)
CAMSVGGAGGPSYGKLTF

SEQ ID NO: 620190 - protein, 17 aa, Homo sapiens
  CDR3 for beta chain variable domain of TCR clone 310095 (TRBV13, TRBJ2-3)
CASSLSRVAGGRNTQYF

SEQ ID NO: 620191 - protein, 18 aa, Homo sapiens
  CDR3 for alpha chain variable domain of TCR clone 310096 (TRAV13-1, TRAJ52)
CAASKRSAGGTSYGKLTF

SEQ ID NO: 620192 - protein, 15 aa, Homo sapiens
  CDR3 for beta chain variable domain of TCR clone 310096 (TRBV13, TRBJ2-1)
CASSLLSGLNNEQFF

SEQ ID NO: 620193 - protein, 14 aa, Homo sapiens
  CDR3 for alpha chain variable domain of TCR clone 310097 (TRAV12-1, TRAJ10)
CVAILTGGGNKLAF

SEQ ID NO: 620194 - protein, 15 aa, Homo sapiens
  CDR3 for beta chain variable domain of TCR clone 310097 (TRBV20-1, TRBJ2-7)
CSARGFRPQAYEQYF

SEQ ID NO: 620195 - protein, 12 aa, Homo sapiens
  CDR3 for alpha chain variable domain of TCR clone 310098 (TRAV12-3, TRAJ17)
CAMTLTGIELTF

SEQ ID NO: 620196 - protein, 15 aa, Homo sapiens
  CDR3 for beta chain variable domain of TCR clone 310098 (TRBV20-1, TRBJ2-7)
CSARDRVSGMDEQYF

SEQ ID NO: 620197 - protein, 18 aa, Homo sapiens
  CDR3 for alpha chain variable domain of TCR clone 310099 (TRAV26-1, TRAJ22)
CIVIVALISSGSARQPTF

SEQ ID NO: 620198 - protein, 13 aa, Homo sapiens
  CDR3 for beta chain variable domain of TCR clone 310099 (TRBV13, TRBJ2-5)
CASSPEVGETQYF

SEQ ID NO: 620199 - protein, 15 aa, Homo sapiens
  CDR3 for alpha chain variable domain of TCR clone 310100 (TRAV1-2, TRAJ15)
CAVDVMGSAGTALIF

SEQ ID NO: 620200 - protein, 14 aa, Homo sapiens
  CDR3 for beta chain variable domain of TCR clone 310100 (TRBV7-2, TRBJ2-7)
CASSPKTSFYEQYF

SEQ ID NO: 620201 - protein, 14 aa, Homo sapiens
  CDR3 for alpha chain variable domain of TCR clone 310101 (TRAV1-1, TRAJ27)
CAVIYNTNAGKSTF

SEQ ID NO: 620202 - protein, 15 aa, Homo sapiens
  CDR3 for beta chain variable domain of TCR clone 310101 (TRBV7-2, TRBJ2-1)
CASSSGLAGGNEQIF

SEQ ID NO: 620203 - protein, 15 aa, Homo sapiens
  CDR3 for alpha chain variable domain of TCR clone 310102 (TRAV3, TRAJ3)
CAVRDRDSSASKIVF

SEQ ID NO: 620204 - protein, 18 aa, Homo sapiens
  CDR3 for beta chain variable domain of TCR clone 310102 (TRBV25-1, TRBJ1-2)
CASTGLQNGQGLIFGYTF

SEQ ID NO: 620205 - protein, 14 aa, Homo sapiens
  CDR3 for alpha chain variable domain of TCR clone 310103 (TRAV12-2, TRAJ5)
CAVNRSTGRRALTF

SEQ ID NO: 620206 - protein, 14 aa, Homo sapiens
  CDR3 for beta chain variable domain of TCR clone 310103 (TRBV18, TRBJ2-5)
CASSPGVSQETQYC

SEQ ID NO: 620207 - protein, 15 aa, Homo sapiens
  CDR3 for alpha chain variable domain of TCR clone 310104 (TRAV8-3, TRAJ7)
CAVGSISYGNNRLVF

SEQ ID NO: 620208 - protein, 15 aa, Homo sapiens
  CDR3 for beta chain variable domain of TCR clone 310104 (TRBV4-2, TRBJ1-1)
CASSQEDLPRTEAFF

SEQ ID NO: 620209 - protein, 15 aa, Homo sapiens
  CDR3 for alpha chain variable domain of TCR clone 310105 (TRAV12-1, TRAJ9)
CVVSFGDTGGFKTIF

SEQ ID NO: 620210 - protein, 13 aa, Homo sapiens
  CDR3 for beta chain variable domain of TCR clone 310105 (TRBV2, TRBJ1-4)
CASSERAGEKLFL

SEQ ID NO: 620211 - protein, 14 aa, Homo sapiens
  CDR3 for alpha chain variable domain of TCR clone 310106 (TRAV13-2, TRAJ10)
CAENITGGGNKLTF

SEQ ID NO: 620212 - protein, 13 aa, Homo sapiens
  CDR3 for beta chain variable domain of TCR clone 310106 (TRBV7-2, TRBJ2-2)
CASSSVRAGELFF

SEQ ID NO: 620213 - protein, 13 aa, Homo sapiens
  CDR3 for alpha chain variable domain of TCR clone 310107 (TRAV2, TRAJ40)
CAVVTSGTYKYIF

SEQ ID NO: 620214 - protein, 12 aa, Homo sapiens
  CDR3 for beta chain variable domain of TCR clone 310107 (TRBV28, TRBJ2-7)
CASSFSSYEQYF

SEQ ID NO: 620215 - protein, 13 aa, Homo sapiens
  CDR3 for alpha chain variable domain of TCR clone 310108 (TRAV1-2, TRAJ9)
CAVPNTGGFKTIF

SEQ ID NO: 620216 - protein, 17 aa, Homo sapiens
  CDR3 for beta chain variable domain of TCR clone 310108 (TRBV13, TRBJ2-3)
CASSLSRVAGGRNTQYF

SEQ ID NO: 620217 - protein, 14 aa, Homo sapiens
  CDR3 for alpha chain variable domain of TCR clone 310109 (TRAV26-1, TRAJ34)
CIVRVAYNTDKIIF

SEQ ID NO: 620218 - protein, 13 aa, Homo sapiens
  CDR3 for beta chain variable domain of TCR clone 310109 (TRBV4-2, TRBJ1-1)
CASSQAGNTEAFF

SEQ ID NO: 620219 - protein, 13 aa, Homo sapiens
  CDR3 for alpha chain variable domain of TCR clone 310110 (TRAV12-1, TRAJ33)
CGDAPDSNYQLIW

SEQ ID NO: 620220 - protein, 13 aa, Homo sapiens
  CDR3 for beta chain variable domain of TCR clone 310110 (TRBV4-1, TRBJ2-7)
CASSQGQAYEQYF

SEQ ID NO: 620221 - protein, 13 aa, Homo sapiens
  CDR3 for alpha chain variable domain of TCR clone 310111 (TRAV13-1, TRAJ12)
CAASPDSSYKLIF

SEQ ID NO: 620222 - protein, 16 aa, Homo sapiens
  CDR3 for beta chain variable domain of TCR clone 310111 (TRBV15, TRBJ2-1)
CATSRERRAGAYEQFF

SEQ ID NO: 620223 - protein, 17 aa, Homo sapiens
  CDR3 for alpha chain variable domain of TCR clone 310112 (TRAV17, TRAJ23)
CATGGKLIFGQGTELSV

SEQ ID NO: 620224 - protein, 16 aa, Homo sapiens
  CDR3 for beta chain variable domain of TCR clone 310112 (TRBV12-5, TRBJ2-5)
CASGPRTSGNQETQYF

SEQ ID NO: 620225 - protein, 10 aa, Homo sapiens
  CDR3 for alpha chain variable domain of TCR clone 310113 (TRAV36/DV7, TRAJ38)
CAANNRKLIR

SEQ ID NO: 620226 - protein, 15 aa, Homo sapiens
  CDR3 for beta chain variable domain of TCR clone 310113 (TRBV20-1, TRBJ2-7)
CSARDRVSGMDEQYF

SEQ ID NO: 620227 - protein, 15 aa, Homo sapiens
  CDR3 for alpha chain variable domain of TCR clone 310114 (TRAV13-1, TRAJ6)
CAALHPSGGSYIPTF

SEQ ID NO: 620228 - protein, 14 aa, Homo sapiens
  CDR3 for beta chain variable domain of TCR clone 310114 (TRBV7-9, TRBJ2-2)
CASGLAINTGELFF

SEQ ID NO: 620229 - protein, 12 aa, Homo sapiens
  CDR3 for alpha chain variable domain of TCR clone 310115 (TRAV12-2, TRAJ20)
CAVRPSDYKLSF

SEQ ID NO: 620230 - protein, 15 aa, Homo sapiens
  CDR3 for beta chain variable domain of TCR clone 310115 (TRBV9, TRBJ2-7)
CASSPTGTSGYEQYF

SEQ ID NO: 620231 - protein, 15 aa, Homo sapiens
  CDR3 for alpha chain variable domain of TCR clone 310116 (TRAV30, TRAJ32)
CGTVILGGATNKPIF

SEQ ID NO: 620232 - protein, 17 aa, Homo sapiens
  CDR3 for beta chain variable domain of TCR clone 310116 (TRBV5-4, TRBJ2-1)
CASSSAGGRGPYNEQFF

SEQ ID NO: 620233 - protein, 12 aa, Homo sapiens
  CDR3 for alpha chain variable domain of TCR clone 310117 (TRAV35, TRAJ30)
CAGLNRDDKIIV

SEQ ID NO: 620234 - protein, 15 aa, Homo sapiens
  CDR3 for beta chain variable domain of TCR clone 310117 (TRBV9, TRBJ1-6)
CASSVAGTGDSPLHF

SEQ ID NO: 620235 - protein, 14 aa, Homo sapiens
  CDR3 for alpha chain variable domain of TCR clone 310118 (TRAV13-2, TRAJ43)
CAEIPTYNNNDMRF

SEQ ID NO: 620236 - protein, 15 aa, Homo sapiens
  CDR3 for beta chain variable domain of TCR clone 310118 (TRBV7-9, TRBJ2-2)
CASGPLGTFPGELFF

SEQ ID NO: 620237 - protein, 14 aa, Homo sapiens
  CDR3 for alpha chain variable domain of TCR clone 310119 (TRAV1-2, TRAJ8)
CAVRADTGFQKLVF

SEQ ID NO: 620238 - protein, 12 aa, Homo sapiens
  CDR3 for beta chain variable domain of TCR clone 310119 (TRBV11-2, TRBJ2-2)
CASSLPTGELFF

SEQ ID NO: 620239 - protein, 14 aa, Homo sapiens
  CDR3 for alpha chain variable domain of TCR clone 310120 (TRAV8-3, TRAJ35)
CAVVPQGFGNVLHC

SEQ ID NO: 620240 - protein, 15 aa, Homo sapiens
  CDR3 for beta chain variable domain of TCR clone 310120 (TRBV6-1, TRBJ2-2)
CARSAGQGYTGELFF

SEQ ID NO: 620241 - protein, 13 aa, Homo sapiens
  CDR3 for alpha chain variable domain of TCR clone 310121 (TRAV13-2, TRAJ48)
CAEMDFGNEKLTF

SEQ ID NO: 620242 - protein, 12 aa, Homo sapiens
  CDR3 for beta chain variable domain of TCR clone 310121 (TRBV12-4, TRBJ2-1)
CASSKDRRWQFC

SEQ ID NO: 620243 - protein, 14 aa, Homo sapiens
  CDR3 for alpha chain variable domain of TCR clone 310122 (TRAV12-3, TRAJ58)
CAMSTETSGSRFTF

SEQ ID NO: 620244 - protein, 13 aa, Homo sapiens
  CDR3 for beta chain variable domain of TCR clone 310122 (TRBV27, TRBJ2-3)
CASSWGRTDTQYF

SEQ ID NO: 620245 - protein, 13 aa, Homo sapiens
  CDR3 for alpha chain variable domain of TCR clone 310123 (TRAV12-1, TRAJ43)
CVVSHHNNNDMRF

SEQ ID NO: 620246 - protein, 14 aa, Homo sapiens
  CDR3 for beta chain variable domain of TCR clone 310123 (TRBV5-5, TRBJ2-2)
CASSLLGDTVELFF

SEQ ID NO: 620247 - protein, 10 aa, Homo sapiens
  CDR3 for alpha chain variable domain of TCR clone 310124 (TRAV30, TRAJ48)
CGIGNEKLTF

SEQ ID NO: 620248 - protein, 14 aa, Homo sapiens
  CDR3 for beta chain variable domain of TCR clone 310124 (TRBV7-6, TRBJ2-3)
CASSVAGGTDKQYF

SEQ ID NO: 620249 - protein, 15 aa, Homo sapiens
  CDR3 for alpha chain variable domain of TCR clone 310125 (TRAV8-4, TRAJ52)
CAVSYGGTSYGKLTF

SEQ ID NO: 620250 - protein, 12 aa, Homo sapiens
  CDR3 for beta chain variable domain of TCR clone 310125 (TRBV29-1, TRBJ2-3)
CSVTSGGDTQYF

SEQ ID NO: 620251 - protein, 15 aa, Homo sapiens
  CDR3 for alpha chain variable domain of TCR clone 310126 (TRAV17, TRAJ57)
CATGPSQGGSEKLVF

SEQ ID NO: 620252 - protein, 14 aa, Homo sapiens
  CDR3 for beta chain variable domain of TCR clone 310126 (TRBV7-3, TRBJ2-3)
CASSLLATSDTQYF

SEQ ID NO: 620253 - protein, 11 aa, Homo sapiens
  CDR3 for alpha chain variable domain of TCR clone 310127 (TRAV12-1, TRAJ30)
CVVNGQDKIIF

SEQ ID NO: 620254 - protein, 12 aa, Homo sapiens
  CDR3 for beta chain variable domain of TCR clone 310127 (TRBV6-1, TRBJ2-7)
CASSDYSYEQYF

SEQ ID NO: 620255 - protein, 11 aa, Homo sapiens
  CDR3 for alpha chain variable domain of TCR clone 310128 (TRAV23/DV6, TRAJ58)
CAARLLRGETS

SEQ ID NO: 620256 - protein, 11 aa, Homo sapiens
  CDR3 for beta chain variable domain of TCR clone 310128 (TRBV24-1, TRBJ2-3)
CATSDLDTQYF

SEQ ID NO: 620257 - protein, 14 aa, Homo sapiens
  CDR3 for alpha chain variable domain of TCR clone 310129 (TRAV1-2, TRAJ16)
CAVNRFSDGQKLLF

SEQ ID NO: 620258 - protein, 14 aa, Homo sapiens
  CDR3 for beta chain variable domain of TCR clone 310129 (TRBV11-1, TRBJ2-7)
CDSSFRQGSYEQYF

SEQ ID NO: 620259 - protein, 16 aa, Homo sapiens
  CDR3 for alpha chain variable domain of TCR clone 310130 (TRAV29/DV5, TRAJ28)
CAADAYSGAGSFQLTF

SEQ ID NO: 620260 - protein, 15 aa, Homo sapiens
  CDR3 for beta chain variable domain of TCR clone 310130 (TRBV24-1, TRBJ1-4)
CATSDPQGAYEKLFF

SEQ ID NO: 620261 - protein, 11 aa, Homo sapiens
  CDR3 for alpha chain variable domain of TCR clone 310131 (TRAV38-1, TRAJ22)
CAFLLARQLTF

SEQ ID NO: 620262 - protein, 15 aa, Homo sapiens
  CDR3 for beta chain variable domain of TCR clone 310131 (TRBV19, TRBJ2-1)
CASSIQATSYNEQFF

SEQ ID NO: 620263 - protein, 12 aa, Homo sapiens
  CDR3 for alpha chain variable domain of TCR clone 310132 (TRAV17, TRAJ57)
CATDGGSEKLVF

SEQ ID NO: 620264 - protein, 13 aa, Homo sapiens
  CDR3 for beta chain variable domain of TCR clone 310132 (TRBV7-9, TRBJ2-7)
CASSFAGAYDQYF

SEQ ID NO: 620265 - protein, 17 aa, Homo sapiens
  CDR3 for alpha chain variable domain of TCR clone 310133 (TRAV3, TRAJ6)
CAVRDGPRGGGSYIPPF

SEQ ID NO: 620266 - protein, 20 aa, Homo sapiens
  CDR3 for beta chain variable domain of TCR clone 310133 (TRBV28, TRBJ2-1)
CASTPIGRSPGLAGGNEQFF

SEQ ID NO: 620267 - protein, 15 aa, Homo sapiens
  CDR3 for alpha chain variable domain of TCR clone 310134 (TRAV21, TRAJ40)
CAVRPQPSGTYKYIF

SEQ ID NO: 620268 - protein, 15 aa, Homo sapiens
  CDR3 for beta chain variable domain of TCR clone 310134 (TRBV5-1, TRBJ2-1)
CASSPPRAPYNEQFF

SEQ ID NO: 620269 - protein, 11 aa, Homo sapiens
  CDR3 for alpha chain variable domain of TCR clone 310135 (TRAV2, TRAJ33)
CAVDSNYQLIW

SEQ ID NO: 620270 - protein, 16 aa, Homo sapiens
  CDR3 for beta chain variable domain of TCR clone 310135 (TRBV11-2, TRBJ2-5)
CASSGQGYSPQETQYF

SEQ ID NO: 620271 - protein, 12 aa, Homo sapiens
  CDR3 for alpha chain variable domain of TCR clone 310136 (TRAV2, TRAJ9)
CAVGAGGFKTIF

SEQ ID NO: 620272 - protein, 21 aa, Homo sapiens
  CDR3 for beta chain variable domain of TCR clone 310136 (TRBV6-1, TRBJ1-3)
CASVQGGWKHHIFWRGKLAHC

SEQ ID NO: 620273 - protein, 14 aa, Homo sapiens
  CDR3 for alpha chain variable domain of TCR clone 310137 (TRAV12-2, TRAJ44)
CAVNPAGTASKLTF

SEQ ID NO: 620274 - protein, 18 aa, Homo sapiens
  CDR3 for beta chain variable domain of TCR clone 310137 (TRBV10-2, TRBJ2-2)
CISAPAVHRQADAGELFF

SEQ ID NO: 620275 - protein, 11 aa, Homo sapiens
  CDR3 for alpha chain variable domain of TCR clone 310138 (TRAV23/DV6, TRAJ49)
CAAETGNQFYF

SEQ ID NO: 620276 - protein, 14 aa, Homo sapiens
  CDR3 for beta chain variable domain of TCR clone 310138 (TRBV7-2, TRBJ1-1)
CASSFLTGTTEAFF

SEQ ID NO: 620277 - protein, 12 aa, Homo sapiens
  CDR3 for alpha chain variable domain of TCR clone 310139 (TRAV21, TRAJ11)
CAATSGYSTLTF

SEQ ID NO: 620278 - protein, 16 aa, Homo sapiens
  CDR3 for beta chain variable domain of TCR clone 310139 (TRBV7-2, TRBJ2-6)
CASSERRASGANVLTF

SEQ ID NO: 620279 - protein, 16 aa, Homo sapiens
  CDR3 for alpha chain variable domain of TCR clone 310140 (TRAV30, TRAJ24)
CGTEIAYADSWGKFQL

SEQ ID NO: 620280 - protein, 14 aa, Homo sapiens
  CDR3 for beta chain variable domain of TCR clone 310140 (TRBV12-5, TRBJ2-5)
CASGSRTHQETQYF

SEQ ID NO: 620281 - protein, 15 aa, Homo sapiens
  CDR3 for alpha chain variable domain of TCR clone 310141 (TRAV8-6, TRAJ45)
CAVSEQGGGADGLTF

SEQ ID NO: 620282 - protein, 14 aa, Homo sapiens
  CDR3 for beta chain variable domain of TCR clone 310141 (TRBV28, TRBJ2-5)
CASRGSSFCETQYF

SEQ ID NO: 620283 - protein, 15 aa, Homo sapiens
  CDR3 for alpha chain variable domain of TCR clone 310142 (TRAV12-3, TRAJ49)
CAMAVTPNTGNQFYF

SEQ ID NO: 620284 - protein, 18 aa, Homo sapiens
  CDR3 for beta chain variable domain of TCR clone 310142 (TRBV4-1, TRBJ1-5)
CASSQDRRGQGLNQPQHF

SEQ ID NO: 620285 - protein, 14 aa, Homo sapiens
  CDR3 for alpha chain variable domain of TCR clone 310143 (TRAV23/DV6, TRAJ4)
CAANLSGGFNKLIF

SEQ ID NO: 620286 - protein, 11 aa, Homo sapiens
  CDR3 for beta chain variable domain of TCR clone 310143 (TRBV7-9, TRBJ2-3)
CASSPTDTQYF

SEQ ID NO: 620287 - protein, 12 aa, Homo sapiens
  CDR3 for alpha chain variable domain of TCR clone 310144 (TRAV8-4, TRAJ37)
CAVSGDTGKLIF

SEQ ID NO: 620288 - protein, 17 aa, Homo sapiens
  CDR3 for beta chain variable domain of TCR clone 310144 (TRBV7-2, TRBJ2-3)
CASSPQGRARVQDTQYS

SEQ ID NO: 620289 - protein, 15 aa, Homo sapiens
  CDR3 for alpha chain variable domain of TCR clone 310145 (TRAV3, TRAJ22)
CAVRDRGGSARQLTF

SEQ ID NO: 620290 - protein, 16 aa, Homo sapiens
  CDR3 for beta chain variable domain of TCR clone 310145 (TRBV19, TRBJ1-2)
CASSKFRDTTNYGYTF

SEQ ID NO: 620291 - protein, 13 aa, Homo sapiens
  CDR3 for alpha chain variable domain of TCR clone 310146 (TRAV21, TRAJ15)
CAVANQAGTALTV

SEQ ID NO: 620292 - protein, 14 aa, Homo sapiens
  CDR3 for beta chain variable domain of TCR clone 310146 (TRBV27, TRBJ2-2)
CASSLGAATGELFF

SEQ ID NO: 620293 - protein, 13 aa, Homo sapiens
  CDR3 for alpha chain variable domain of TCR clone 310147 (TRAV8-6, TRAJ13)
CAVRDGGYQKVTI

SEQ ID NO: 620294 - protein, 15 aa, Homo sapiens
  CDR3 for beta chain variable domain of TCR clone 310147 (TRBV7-9, TRBJ2-2)
CASRPEGTSTGELFF

SEQ ID NO: 620295 - protein, 13 aa, Homo sapiens
  CDR3 for alpha chain variable domain of TCR clone 310148 (TRAV12-3, TRAJ56)
CAMRFGANSKLTF

SEQ ID NO: 620296 - protein, 11 aa, Homo sapiens
  CDR3 for beta chain variable domain of TCR clone 310148 (TRBV19, TRBJ1-1)
CASSIGSEAFF

SEQ ID NO: 620297 - protein, 13 aa, Homo sapiens
  CDR3 for alpha chain variable domain of TCR clone 310149 (TRAV20, TRAJ37)
CAGCSSNTGKLIF

SEQ ID NO: 620298 - protein, 16 aa, Homo sapiens
  CDR3 for beta chain variable domain of TCR clone 310149 (TRBV7-8, TRBJ2-6)
CASRVGDSSGANVLTF

SEQ ID NO: 620299 - protein, 14 aa, Homo sapiens
  CDR3 for alpha chain variable domain of TCR clone 310150 (TRAV27, TRAJ36)
CAGPPNRGANNLFF

SEQ ID NO: 620300 - protein, 15 aa, Homo sapiens
  CDR3 for beta chain variable domain of TCR clone 310150 (TRBV18, TRBJ2-7)
CASSPASTPNYEQYF

SEQ ID NO: 620301 - protein, 10 aa, Homo sapiens
  CDR3 for alpha chain variable domain of TCR clone 310151 (TRAV1-2, TRAJ18)
CAVRGEAQPW

SEQ ID NO: 620302 - protein, 14 aa, Homo sapiens
  CDR3 for beta chain variable domain of TCR clone 310151 (TRBV7-2, TRBJ2-7)
CASSFKGQDNEQFF

SEQ ID NO: 620303 - protein, 14 aa, Homo sapiens
  CDR3 for alpha chain variable domain of TCR clone 310152 (TRAV26-1, TRAJ38)
CIADNAGNNRKLIW

SEQ ID NO: 620304 - protein, 20 aa, Homo sapiens
  CDR3 for beta chain variable domain of TCR clone 310152 (TRBV7-8, TRBJ2-2)
CASSHLFPRPTIHITGELFF

SEQ ID NO: 620305 - protein, 12 aa, Homo sapiens
  CDR3 for alpha chain variable domain of TCR clone 310153 (TRAV12-1, TRAJ40)
CVVYSGTYKYIF

SEQ ID NO: 620306 - protein, 15 aa, Homo sapiens
  CDR3 for beta chain variable domain of TCR clone 310153 (TRBV7-9, TRBJ1-6)
CASSFPGRGNSPLHF

SEQ ID NO: 620307 - protein, 17 aa, Homo sapiens
  CDR3 for alpha chain variable domain of TCR clone 310154 (TRAV23/DV6, TRAJ57)
CAASSTLSQGGSEKLVF

SEQ ID NO: 620308 - protein, 16 aa, Homo sapiens
  CDR3 for beta chain variable domain of TCR clone 310154 (TRBV2, TRBJ2-1)
CASSVGGSLSYNEQFF

SEQ ID NO: 620309 - protein, 13 aa, Homo sapiens
  CDR3 for alpha chain variable domain of TCR clone 310155 (TRAV12-2, TRAJ42)
CAVKRGSQGNLIF

SEQ ID NO: 620310 - protein, 13 aa, Homo sapiens
  CDR3 for beta chain variable domain of TCR clone 310155 (TRBV12-4, TRBJ1-2)
CASSLRQGKGYTF

SEQ ID NO: 620311 - protein, 14 aa, Homo sapiens
  CDR3 for alpha chain variable domain of TCR clone 310156 (TRAV12-1, TRAJ23)
CVEIVYNQGGKLIF

SEQ ID NO: 620312 - protein, 15 aa, Homo sapiens
  CDR3 for beta chain variable domain of TCR clone 310156 (TRBV20-1, TRBJ1-5)
CSAKPPGQGPQPQHF

SEQ ID NO: 620313 - protein, 15 aa, Homo sapiens
  CDR3 for alpha chain variable domain of TCR clone 310157 (TRAV3, TRAJ32)
CAVSSYGGATNTLIF

SEQ ID NO: 620314 - protein, 13 aa, Homo sapiens
  CDR3 for beta chain variable domain of TCR clone 310157 (TRBV20-1, TRBJ2-7)
CSARPSTNYEQYF

SEQ ID NO: 620315 - protein, 13 aa, Homo sapiens
  CDR3 for alpha chain variable domain of TCR clone 310158 (TRAV12-1, TRAJ11)
CVVTRGGYSTLTF

SEQ ID NO: 620316 - protein, 16 aa, Homo sapiens
  CDR3 for beta chain variable domain of TCR clone 310158 (TRBV2, TRBJ2-1)
CASSVGGSLSYNEQFF

SEQ ID NO: 620317 - protein, 16 aa, Homo sapiens
  CDR3 for alpha chain variable domain of TCR clone 310159 (TRAV30, TRAJ24)
CGTEIVDADSWGNSSL

SEQ ID NO: 620318 - protein, 13 aa, Homo sapiens
  CDR3 for beta chain variable domain of TCR clone 310159 (TRBV7-3, TRBJ1-2)
CASSLKRGYGYTF

SEQ ID NO: 620319 - protein, 20 aa, Homo sapiens
  CDR3 for alpha chain variable domain of TCR clone 310160 (TRAV4, TRAJ31)
CLVGERLQQCQAHVWRWNSA

SEQ ID NO: 620320 - protein, 19 aa, Homo sapiens
  CDR3 for beta chain variable domain of TCR clone 310160 (TRBV12-4, TRBJ2-1)
CASTLAFDPRDKEANEQFF

SEQ ID NO: 620321 - protein, 19 aa, Homo sapiens
  CDR3 for alpha chain variable domain of TCR clone 310161 (TRAV3, TRAJ6)
CAVRDGPRQEEAPYLHLEE

SEQ ID NO: 620322 - protein, 14 aa, Homo sapiens
  CDR3 for beta chain variable domain of TCR clone 310161 (TRBV7-2, TRBJ2-7)
CASSPKTSFYEQYF

SEQ ID NO: 620323 - protein, 16 aa, Homo sapiens
  CDR3 for alpha chain variable domain of TCR clone 310162 (TRAV17, TRAJ36)
CATVSLNWGKQPLLWD

SEQ ID NO: 620324 - protein, 13 aa, Homo sapiens
  CDR3 for beta chain variable domain of TCR clone 310162 (TRBV4-1, TRBJ1-1)
CASSQLATGEAFY

SEQ ID NO: 620325 - protein, 12 aa, Homo sapiens
  CDR3 for alpha chain variable domain of TCR clone 310163 (TRAV12-3, TRAJ17)
CAMTLTVNELTF

SEQ ID NO: 620326 - protein, 15 aa, Homo sapiens
  CDR3 for beta chain variable domain of TCR clone 310163 (TRBV20-1, TRBJ2-7)
CSARDQVSGMDEQYF

SEQ ID NO: 620327 - protein, 13 aa, Homo sapiens
  CDR3 for alpha chain variable domain of TCR clone 310164 (TRAV12-2, TRAJ12)
CAVNWDSSYKLIF

SEQ ID NO: 620328 - protein, 14 aa, Homo sapiens
  CDR3 for beta chain variable domain of TCR clone 310164 (TRBV4-2, TRBJ2-5)
CASSQDRGRETQYF

SEQ ID NO: 620329 - protein, 15 aa, Homo sapiens
  CDR3 for alpha chain variable domain of TCR clone 310165 (TRAV34, TRAJ38)
CGADFTPGNNRKLIW

SEQ ID NO: 620330 - protein, 16 aa, Homo sapiens
  CDR3 for beta chain variable domain of TCR clone 310165 (TRBV12-5, TRBJ2-5)
CASRPRTSGNQETQYF

SEQ ID NO: 620331 - protein, 14 aa, Homo sapiens
  CDR3 for alpha chain variable domain of TCR clone 310166 (TRAV8-4, TRAJ17)
CAVSDPAAGNKLTF

SEQ ID NO: 620332 - protein, 14 aa, Homo sapiens
  CDR3 for beta chain variable domain of TCR clone 310166 (TRBV7-2, TRBJ2-7)
CASRSQGAAYEQYF

SEQ ID NO: 620333 - protein, 14 aa, Homo sapiens
  CDR3 for alpha chain variable domain of TCR clone 310167 (TRAV12-2, TRAJ17)
CAVLFKAAGNKLTF

SEQ ID NO: 620334 - protein, 16 aa, Homo sapiens
  CDR3 for beta chain variable domain of TCR clone 310167 (TRBV19, TRBJ2-2)
CASSTARASNTGELFF

SEQ ID NO: 620335 - protein, 14 aa, Homo sapiens
  CDR3 for alpha chain variable domain of TCR clone 310168 (TRAV13-2, TRAJ43)
CAEIPTYNNNDMRF

SEQ ID NO: 620336 - protein, 15 aa, Homo sapiens
  CDR3 for beta chain variable domain of TCR clone 310168 (TRBV7-9, TRBJ2-2)
CASGPLDTFPGELFL

SEQ ID NO: 620337 - protein, 14 aa, Homo sapiens
  CDR3 for alpha chain variable domain of TCR clone 310169 (TRAV12-2, TRAJ45)
CAVNIGGGADGLTF

SEQ ID NO: 620338 - protein, 16 aa, Homo sapiens
  CDR3 for beta chain variable domain of TCR clone 310169 (TRBV12-4, TRBJ2-7)
CASSLIGGTGTYEQYF

SEQ ID NO: 620339 - protein, 15 aa, Homo sapiens
  CDR3 for alpha chain variable domain of TCR clone 310170 (TRAV3, TRAJ22)
CAVRDRGGSARHLTF

SEQ ID NO: 620340 - protein, 14 aa, Homo sapiens
  CDR3 for beta chain variable domain of TCR clone 310170 (TRBV20-1, TRBJ2-5)
CSALVPGYQETQYF

SEQ ID NO: 620341 - protein, 16 aa, Homo sapiens
  CDR3 for alpha chain variable domain of TCR clone 310171 (TRAV3, TRAJ37)
CAVRGKGSGNTGKLIC

SEQ ID NO: 620342 - protein, 15 aa, Homo sapiens
  CDR3 for beta chain variable domain of TCR clone 310171 (TRBV5-1, TRBJ2-7)
CASSLNGGPAREQYF

SEQ ID NO: 620343 - protein, 18 aa, Homo sapiens
  CDR3 for alpha chain variable domain of TCR clone 310172 (TRAV1-2, TRAJ16)
CLLPLCSTWFSDGQKLLF

SEQ ID NO: 620344 - protein, 15 aa, Homo sapiens
  CDR3 for beta chain variable domain of TCR clone 310172 (TRBV7-2, TRBJ2-5)
CASTPRGASGETQYF

SEQ ID NO: 620345 - protein, 15 aa, Homo sapiens
  CDR3 for alpha chain variable domain of TCR clone 310173 (TRAV12-3, TRAJ42)
CAMSGHGGSQGNLIF

SEQ ID NO: 620346 - protein, 17 aa, Homo sapiens
  CDR3 for beta chain variable domain of TCR clone 310173 (TRBV7-2, TRBJ2-3)
CASSLAGGLAGTAGQYF

SEQ ID NO: 620347 - protein, 16 aa, Homo sapiens
  CDR3 for alpha chain variable domain of TCR clone 310174 (TRAV8-3, TRAJ18)
CAVALDRGSTLGMLYF

SEQ ID NO: 620348 - protein, 11 aa, Homo sapiens
  CDR3 for beta chain variable domain of TCR clone 310174 (TRBV29-1, TRBJ1-1)
CSVEILTEAFF

SEQ ID NO: 620349 - protein, 15 aa, Homo sapiens
  CDR3 for alpha chain variable domain of TCR clone 310175 (TRAV13-1, TRAJ50)
CAAKGSETSYDKVIF

SEQ ID NO: 620350 - protein, 18 aa, Homo sapiens
  CDR3 for beta chain variable domain of TCR clone 310175 (TRBV10-3, TRBJ2-1)
CTYVPSVSLRGGVDEQFF

SEQ ID NO: 620351 - protein, 15 aa, Homo sapiens
  CDR3 for alpha chain variable domain of TCR clone 310176 (TRAV12-2, TRAJ53)
CAVNGGGGSNYKLTF

SEQ ID NO: 620352 - protein, 17 aa, Homo sapiens
  CDR3 for beta chain variable domain of TCR clone 310176 (TRBV7-9, TRBJ2-7)
CASSFDGSRGGAYEQYF

SEQ ID NO: 620353 - protein, 15 aa, Homo sapiens
  CDR3 for alpha chain variable domain of TCR clone 310177 (TRAV3, TRAJ10)
CAVRDGTGGGNKLTF

SEQ ID NO: 620354 - protein, 12 aa, Homo sapiens
  CDR3 for beta chain variable domain of TCR clone 310177 (TRBV7-2, TRBJ2-5)
CASSQYQETQYF

SEQ ID NO: 620355 - protein, 13 aa, Homo sapiens
  CDR3 for alpha chain variable domain of TCR clone 310178 (TRAV24, TRAJ15)
CAFKDQAGTALLF

SEQ ID NO: 620356 - protein, 14 aa, Homo sapiens
  CDR3 for beta chain variable domain of TCR clone 310178 (TRBV2, TRBJ2-1)
CASGLSGSQGEQFF

SEQ ID NO: 620357 - protein, 14 aa, Homo sapiens
  CDR3 for alpha chain variable domain of TCR clone 310179 (TRAV12-2, TRAJ17)
CAVLFKAAGNKLTF

SEQ ID NO: 620358 - protein, 17 aa, Homo sapiens
  CDR3 for beta chain variable domain of TCR clone 310179 (TRBV11-2, TRBJ2-1)
CASSLYPPGVEYNERFF

SEQ ID NO: 620359 - protein, 22 aa, Homo sapiens
  CDR3 for alpha chain variable domain of TCR clone 310180 (TRAV8-3, TRAJ35)
CAVVPQGFGNVLHCGSVPQVIV

SEQ ID NO: 620360 - protein, 15 aa, Homo sapiens
  CDR3 for beta chain variable domain of TCR clone 310180 (TRBV6-1, TRBJ2-2)
CASSAGQGYTGELFF

SEQ ID NO: 620361 - protein, 19 aa, Homo sapiens
  CDR3 for alpha chain variable domain of TCR clone 310181 (TRAV26-1, TRAJ52)
CIVRAHRNAGGTSYGKLTF

SEQ ID NO: 620362 - protein, 15 aa, Homo sapiens
  CDR3 for beta chain variable domain of TCR clone 310181 (TRBV29-1, TRBJ2-1)
CSGRDRRSAYNEQFF

SEQ ID NO: 620363 - protein, 14 aa, Homo sapiens
  CDR3 for alpha chain variable domain of TCR clone 310182 (TRAV12-2, TRAJ13)
CAVKKTGGYQKVTF

SEQ ID NO: 620364 - protein, 13 aa, Homo sapiens
  CDR3 for beta chain variable domain of TCR clone 310182 (TRBV10-3, TRBJ2-1)
CHQSDLAYNEQFF

SEQ ID NO: 620365 - protein, 12 aa, Homo sapiens
  CDR3 for alpha chain variable domain of TCR clone 310183 (TRAV36/DV7, TRAJ54)
CAVVRGAQELVF

SEQ ID NO: 620366 - protein, 14 aa, Homo sapiens
  CDR3 for beta chain variable domain of TCR clone 310183 (TRBV7-3, TRBJ1-1)
CASNLKGGNTEAFF

SEQ ID NO: 620367 - protein, 17 aa, Homo sapiens
  CDR3 for alpha chain variable domain of TCR clone 310184 (TRAV26-1, TRAJ53)
CIVRVDDSGGSNYTLTF

SEQ ID NO: 620368 - protein, 15 aa, Homo sapiens
  CDR3 for beta chain variable domain of TCR clone 310184 (TRBV20-1, TRBJ2-7)
CSARVPAAYFYEQYF

SEQ ID NO: 620369 - protein, 14 aa, Homo sapiens
  CDR3 for alpha chain variable domain of TCR clone 310185 (TRAV2, TRAJ9)
CAVENRSGGFKTIF

SEQ ID NO: 620370 - protein, 15 aa, Homo sapiens
  CDR3 for beta chain variable domain of TCR clone 310185 (TRBV19, TRBJ2-1)
CASSSPGVPLDEQFF

SEQ ID NO: 620371 - protein, 11 aa, Homo sapiens
  CDR3 for alpha chain variable domain of TCR clone 310186 (TRAV12-3, TRAJ43)
CAMIVSNDIRF

SEQ ID NO: 620372 - protein, 13 aa, Homo sapiens
  CDR3 for beta chain variable domain of TCR clone 310186 (TRBV20-1, TRBJ1-1)
CSAPLGGGTEAFF

SEQ ID NO: 620373 - protein, 17 aa, Homo sapiens
  CDR3 for alpha chain variable domain of TCR clone 310187 (TRAV4, TRAJ13)
CLVGVQGSSGGYQKVTF

SEQ ID NO: 620374 - protein, 17 aa, Homo sapiens
  CDR3 for beta chain variable domain of TCR clone 310187 (TRBV15, TRBJ2-3)
CHQQRWRQELGHDTQYF

SEQ ID NO: 620375 - protein, 11 aa, Homo sapiens
  CDR3 for alpha chain variable domain of TCR clone 310188 (TRAV12-2, TRAJ49)
CALQGGNQFHF

SEQ ID NO: 620376 - protein, 13 aa, Homo sapiens
  CDR3 for beta chain variable domain of TCR clone 310188 (TRBV4-1, TRBJ1-1)
CASSQLGTGEAFF

SEQ ID NO: 620377 - protein, 13 aa, Homo sapiens
  CDR3 for alpha chain variable domain of TCR clone 310189 (TRAV12-1, TRAJ26)
CVVIRNYGQNFVF

SEQ ID NO: 620378 - protein, 14 aa, Homo sapiens
  CDR3 for beta chain variable domain of TCR clone 310189 (TRBV6-3, TRBJ1-1)
CASRYTGESTEAFF

SEQ ID NO: 620379 - protein, 12 aa, Homo sapiens
  CDR3 for alpha chain variable domain of TCR clone 310190 (TRAV13-1, TRAJ27)
CADHTNAGKATF

SEQ ID NO: 620380 - protein, 14 aa, Homo sapiens
  CDR3 for beta chain variable domain of TCR clone 310190 (TRBV12-5, TRBJ2-5)
CASGSRTHQETQYF

SEQ ID NO: 620381 - protein, 18 aa, Homo sapiens
  CDR3 for alpha chain variable domain of TCR clone 310191 (TRAV12-3, TRAJ52)
CAMSVGGAGGTSYGKLTF

SEQ ID NO: 620382 - protein, 15 aa, Homo sapiens
  CDR3 for beta chain variable domain of TCR clone 310191 (TRBV7-2, TRBJ2-1)
CASTHGTGIYNEQFF

SEQ ID NO: 620383 - protein, 14 aa, Homo sapiens
  CDR3 for alpha chain variable domain of TCR clone 310192 (TRAV16, TRAJ32)
CALKSGGATNKLIF

SEQ ID NO: 620384 - protein, 16 aa, Homo sapiens
  CDR3 for beta chain variable domain of TCR clone 310192 (TRBV12-4, TRBJ1-5)
CASSRPVGGSNQPHHF

SEQ ID NO: 620385 - protein, 12 aa, Homo sapiens
  CDR3 for alpha chain variable domain of TCR clone 310193 (TRAV12-3, TRAJ5)
CAMDTGRRALTF

SEQ ID NO: 620386 - protein, 18 aa, Homo sapiens
  CDR3 for beta chain variable domain of TCR clone 310193 (TRBV7-9, TRBJ2-3)
CASSLDLAGLATPDTQYF

SEQ ID NO: 620387 - protein, 14 aa, Homo sapiens
  CDR3 for alpha chain variable domain of TCR clone 310194 (TRAV2, TRAJ9)
CAVEDRGGGFKTIF

SEQ ID NO: 620388 - protein, 15 aa, Homo sapiens
  CDR3 for beta chain variable domain of TCR clone 310194 (TRBV6-3, TRBJ2-7)
CASSSPGTVFYEQYF

SEQ ID NO: 620389 - protein, 15 aa, Homo sapiens
  CDR3 for alpha chain variable domain of TCR clone 310195 (TRAV3, TRAJ12)
CAVRDIRDSSYKLIF

SEQ ID NO: 620390 - protein, 15 aa, Homo sapiens
  CDR3 for beta chain variable domain of TCR clone 310195 (TRBV18, TRBJ1-5)
CASSPSDRSNQPQHF

SEQ ID NO: 620391 - protein, 17 aa, Homo sapiens
  CDR3 for alpha chain variable domain of TCR clone 310196 (TRAV4, )
CLVDIQNPDTAVYQLRD

SEQ ID NO: 620392 - protein, 15 aa, Homo sapiens
  CDR3 for beta chain variable domain of TCR clone 310196 (TRBV20-1, TRBJ1-5)
CSARVGRVVSQPQHF

SEQ ID NO: 620393 - protein, 14 aa, Homo sapiens
  CDR3 for alpha chain variable domain of TCR clone 310197 (TRAV16, TRAJ33)
CALSAMDSNYQLIW

SEQ ID NO: 620394 - protein, 13 aa, Homo sapiens
  CDR3 for beta chain variable domain of TCR clone 310197 (TRBV4-1, TRBJ2-1)
CASSQAGGDEQFF

SEQ ID NO: 620395 - protein, 16 aa, Homo sapiens
  CDR3 for alpha chain variable domain of TCR clone 310198 (TRAV21, TRAJ37)
CAVRTAGSSNTGKLIF

SEQ ID NO: 620396 - protein, 18 aa, Homo sapiens
  CDR3 for beta chain variable domain of TCR clone 310198 (TRBV7-9, TRBJ2-1)
CASSPRTSGMSSYNEQFF

SEQ ID NO: 620397 - protein, 15 aa, Homo sapiens
  CDR3 for alpha chain variable domain of TCR clone 310199 (TRAV8-3, TRAJ45)
CASSYSGGGADGLTF

SEQ ID NO: 620398 - protein, 14 aa, Homo sapiens
  CDR3 for beta chain variable domain of TCR clone 310199 (TRBV2, TRBJ2-1)
CASSEALIYNEQFF

SEQ ID NO: 620399 - protein, 15 aa, Homo sapiens
  CDR3 for alpha chain variable domain of TCR clone 310200 (TRAV4, TRAJ39)
CLVGPNNNSGNMLTF

SEQ ID NO: 620400 - protein, 15 aa, Homo sapiens
  CDR3 for beta chain variable domain of TCR clone 310200 (TRBV19, TRBJ1-6)
CASSTQGAVGSPLHF

SEQ ID NO: 620401 - protein, 10 aa, Homo sapiens
  CDR3 for alpha chain variable domain of TCR clone 310201 (TRAV23/DV6, TRAJ10)
CAASRLLYSR

SEQ ID NO: 620402 - protein, 17 aa, Homo sapiens
  CDR3 for beta chain variable domain of TCR clone 310201 (TRBV20-1, TRBJ2-2)
CSASGSGQGGLTGELFF

SEQ ID NO: 620403 - protein, 14 aa, Homo sapiens
  CDR3 for alpha chain variable domain of TCR clone 310202 (TRAV25, TRAJ22)
CTVRSSGSARQLTF

SEQ ID NO: 620404 - protein, 16 aa, Homo sapiens
  CDR3 for beta chain variable domain of TCR clone 310202 (TRBV4-2, TRBJ1-1)
CASSPSPGRAAPEAFF

SEQ ID NO: 620405 - protein, 15 aa, Homo sapiens
  CDR3 for alpha chain variable domain of TCR clone 310203 (TRAV29/DV5, TRAJ29)
CAASERSTGNTPLVF

SEQ ID NO: 620406 - protein, 17 aa, Homo sapiens
  CDR3 for beta chain variable domain of TCR clone 310203 (TRBV4-1, TRBJ1-4)
CASSQEGPRGVEEKLFF

SEQ ID NO: 620407 - protein, 11 aa, Homo sapiens
  CDR3 for alpha chain variable domain of TCR clone 310204 (TRAV12-2, TRAJ29)
CAVTHRSPLVF

SEQ ID NO: 620408 - protein, 16 aa, Homo sapiens
  CDR3 for beta chain variable domain of TCR clone 310204 (TRBV19, TRBJ1-5)
CASSIDRGGPRQPQHF

SEQ ID NO: 620409 - protein, 14 aa, Homo sapiens
  CDR3 for alpha chain variable domain of TCR clone 310205 (TRAV14/DV4, TRAJ15)
CAMRRDKAGTALIF

SEQ ID NO: 620410 - protein, 11 aa, Homo sapiens
  CDR3 for beta chain variable domain of TCR clone 310205 (TRBV7-2, TRBJ2-7)
CASSSGLWQYF

SEQ ID NO: 620411 - protein, 10 aa, Homo sapiens
  CDR3 for alpha chain variable domain of TCR clone 310206 (TRAV12-2, TRAJ58)
CAPSGSRLTF

SEQ ID NO: 620412 - protein, 12 aa, Homo sapiens
  CDR3 for beta chain variable domain of TCR clone 310206 (TRBV7-9, TRBJ2-7)
CASSLEGYERYF

SEQ ID NO: 620413 - protein, 18 aa, Homo sapiens
  CDR3 for alpha chain variable domain of TCR clone 310207 (TRAV12-3, TRAJ52)
CAMSVGGAGGTSYGKLTF

SEQ ID NO: 620414 - protein, 15 aa, Homo sapiens
  CDR3 for beta chain variable domain of TCR clone 310207 (TRBV4-3, TRBJ2-7)
CASSQGDWGDYEQYF

SEQ ID NO: 620415 - protein, 12 aa, Homo sapiens
  CDR3 for alpha chain variable domain of TCR clone 310208 (TRAV17, TRAJ12)
CAGGDSSYNLIF

SEQ ID NO: 620416 - protein, 12 aa, Homo sapiens
  CDR3 for beta chain variable domain of TCR clone 310208 (TRBV29-1, TRBJ1-1)
CSESDGNTEAFF

SEQ ID NO: 620417 - protein, 13 aa, Homo sapiens
  CDR3 for alpha chain variable domain of TCR clone 310209 (TRAV24, TRAJ44)
CALLTGTASNLTF

SEQ ID NO: 620418 - protein, 16 aa, Homo sapiens
  CDR3 for beta chain variable domain of TCR clone 310209 (TRBV2, TRBJ2-3)
CASSTSVEGVTDTQYF

SEQ ID NO: 620419 - protein, 15 aa, Homo sapiens
  CDR3 for alpha chain variable domain of TCR clone 310210 (TRAV38-2/DV8, TRAJ43)
CAYRSWGAMPTDMRF

SEQ ID NO: 620420 - protein, 12 aa, Homo sapiens
  CDR3 for beta chain variable domain of TCR clone 310210 (TRBV28, TRBJ1-1)
CASNSGDTEAFF

SEQ ID NO: 620421 - protein, 15 aa, Homo sapiens
  CDR3 for alpha chain variable domain of TCR clone 310211 (TRAV17, TRAJ16)
CATALRFSDGQKLLL

SEQ ID NO: 620422 - protein, 15 aa, Homo sapiens
  CDR3 for beta chain variable domain of TCR clone 310211 (TRBV13, TRBJ1-5)
CASSFGQGGVQPQHF

SEQ ID NO: 620423 - protein, 14 aa, Homo sapiens
  CDR3 for alpha chain variable domain of TCR clone 310212 (TRAV12-2, TRAJ32)
CAHPERCATNKLIF

SEQ ID NO: 620424 - protein, 14 aa, Homo sapiens
  CDR3 for beta chain variable domain of TCR clone 310212 (TRBV4-2, TRBJ2-3)
CASRETRAPGMQYF

SEQ ID NO: 620425 - protein, 13 aa, Homo sapiens
  CDR3 for alpha chain variable domain of TCR clone 310213 (TRAV8-4, TRAJ36)
CAVSVAGANKLFF

SEQ ID NO: 620426 - protein, 15 aa, Homo sapiens
  CDR3 for beta chain variable domain of TCR clone 310213 (TRBV7-2, TRBJ2-5)
CASSLEGRGVETQYF

SEQ ID NO: 620427 - protein, 13 aa, Homo sapiens
  CDR3 for alpha chain variable domain of TCR clone 310214 (TRAV25, TRAJ29)
CAGRFVGNKPLVF

SEQ ID NO: 620428 - protein, 15 aa, Homo sapiens
  CDR3 for beta chain variable domain of TCR clone 310214 (TRBV29-1, TRBJ2-1)
CSVRTSLSSYNEQFF

SEQ ID NO: 620429 - protein, 12 aa, Homo sapiens
  CDR3 for alpha chain variable domain of TCR clone 310215 (TRAV12-1, TRAJ9)
RVVNPASFKTIF

SEQ ID NO: 620430 - protein, 15 aa, Homo sapiens
  CDR3 for beta chain variable domain of TCR clone 310215 (TRBV4-3, TRBJ2-2)
CASSQGTGGTGELFF

SEQ ID NO: 620431 - protein, 14 aa, Homo sapiens
  CDR3 for alpha chain variable domain of TCR clone 310216 (TRAV8-2, TRAJ13)
CVVSDSGGYQKVTF

SEQ ID NO: 620432 - protein, 14 aa, Homo sapiens
  CDR3 for beta chain variable domain of TCR clone 310216 (TRBV11-2, TRBJ2-5)
CASSRTGGIETQYF

SEQ ID NO: 620433 - protein, 16 aa, Homo sapiens
  CDR3 for alpha chain variable domain of TCR clone 310217 (TRAV4, TRAJ32)
CLVVPEEGGATNKLIF

SEQ ID NO: 620434 - protein, 13 aa, Homo sapiens
  CDR3 for beta chain variable domain of TCR clone 310217 (TRBV12-4, TRBJ2-2)
CASSPLPPGELFF

SEQ ID NO: 620435 - protein, 14 aa, Homo sapiens
  CDR3 for alpha chain variable domain of TCR clone 310218 (TRAV12-2, TRAJ40)
CAVKIPSGTYKYIF

SEQ ID NO: 620436 - protein, 15 aa, Homo sapiens
  CDR3 for beta chain variable domain of TCR clone 310218 (TRBV13, TRBJ1-2)
CASSLGRQPGYGYTF

SEQ ID NO: 620437 - protein, 14 aa, Homo sapiens
  CDR3 for alpha chain variable domain of TCR clone 310219 (TRAV12-3, TRAJ20)
CAMSARRGDYKLSF

SEQ ID NO: 620438 - protein, 14 aa, Homo sapiens
  CDR3 for beta chain variable domain of TCR clone 310219 (TRBV7-3, TRBJ1-1)
CASSPTGGVSEAFF

SEQ ID NO: 620439 - protein, 10 aa, Homo sapiens
  CDR3 for alpha chain variable domain of TCR clone 310220 (TRAV21, TRAJ44)
PTGTASKLTF

SEQ ID NO: 620440 - protein, 12 aa, Homo sapiens
  CDR3 for beta chain variable domain of TCR clone 310220 (TRBV11-2, TRBJ2-2)
CASSLGGGELFF

SEQ ID NO: 620441 - protein, 13 aa, Homo sapiens
  CDR3 for alpha chain variable domain of TCR clone 310221 (TRAV12-1, TRAJ39)
CVVNDNAGNMLTF

SEQ ID NO: 620442 - protein, 14 aa, Homo sapiens
  CDR3 for beta chain variable domain of TCR clone 310221 (TRBV27, TRBJ2-3)
CASSPLGTTDTQYF

SEQ ID NO: 620443 - protein, 17 aa, Homo sapiens
  CDR3 for alpha chain variable domain of TCR clone 310222 (TRAV3, TRAJ12)
CAVRDGGRMDSSYKLIF

SEQ ID NO: 620444 - protein, 16 aa, Homo sapiens
  CDR3 for beta chain variable domain of TCR clone 310222 (TRBV28, TRBJ1-2)
CASSLYGQEANYGYTF

SEQ ID NO: 620445 - protein, 14 aa, Homo sapiens
  CDR3 for alpha chain variable domain of TCR clone 310223 (TRAV1-2, TRAJ10)
CAVRVTGGGNKLTF

SEQ ID NO: 620446 - protein, 15 aa, Homo sapiens
  CDR3 for beta chain variable domain of TCR clone 310223 (TRBV20-1, TRBJ2-7)
CSARDRVSGMDEQYF

SEQ ID NO: 620447 - protein, 17 aa, Homo sapiens
  CDR3 for alpha chain variable domain of TCR clone 310224 (TRAV2, TRAJ36)
CAVEDRGNWGKQPLLWD

SEQ ID NO: 620448 - protein, 14 aa, Homo sapiens
  CDR3 for beta chain variable domain of TCR clone 310224 (TRBV7-9, TRBJ2-5)
CASSLDTAQETQFF

SEQ ID NO: 620449 - protein, 13 aa, Homo sapiens
  CDR3 for alpha chain variable domain of TCR clone 310225 (TRAV13-1, TRAJ6)
CAASSGGSYIPTF

SEQ ID NO: 620450 - protein, 12 aa, Homo sapiens
  CDR3 for beta chain variable domain of TCR clone 310225 (TRBV11-3, TRBJ1-1)
CASSHRQGEAFF

SEQ ID NO: 620451 - protein, 17 aa, Homo sapiens
  CDR3 for alpha chain variable domain of TCR clone 310226 (TRAV3, TRAJ6)
CAVRDGPRAGGSYIPTF

SEQ ID NO: 620452 - protein, 14 aa, Homo sapiens
  CDR3 for beta chain variable domain of TCR clone 310226 (TRBV7-2, TRBJ2-7)
CGSSPKTSFYERYF

SEQ ID NO: 620453 - protein, 14 aa, Homo sapiens
  CDR3 for alpha chain variable domain of TCR clone 310227 (TRAV3, TRAJ40)
CAVRDRRGTYKYIF

SEQ ID NO: 620454 - protein, 13 aa, Homo sapiens
  CDR3 for beta chain variable domain of TCR clone 310227 (TRBV4-1, TRBJ2-3)
CASSLDFTDTQYF

SEQ ID NO: 620455 - protein, 16 aa, Homo sapiens
  CDR3 for alpha chain variable domain of TCR clone 310228 (TRAV8-3, TRAJ44)
CAVGSSNTGTASKLTF

SEQ ID NO: 620456 - protein, 15 aa, Homo sapiens
  CDR3 for beta chain variable domain of TCR clone 310228 (TRBV27, TRBJ1-5)
CASTFNRGSNQPQHF

SEQ ID NO: 620457 - protein, 14 aa, Homo sapiens
  CDR3 for alpha chain variable domain of TCR clone 310229 (TRAV1-2, TRAJ16)
CAVNRFSYGQKLLF

SEQ ID NO: 620458 - protein, 12 aa, Homo sapiens
  CDR3 for beta chain variable domain of TCR clone 310229 (TRBV7-6, TRBJ2-7)
CASSLADSEQYF

SEQ ID NO: 620459 - protein, 14 aa, Homo sapiens
  CDR3 for alpha chain variable domain of TCR clone 310230 (TRAV29/DV5, TRAJ49)
CAASARILGNQFYL

SEQ ID NO: 620460 - protein, 15 aa, Homo sapiens
  CDR3 for beta chain variable domain of TCR clone 310230 (TRBV7-2, TRBJ2-2)
CASSSLTGGTGELFF

SEQ ID NO: 620461 - protein, 14 aa, Homo sapiens
  CDR3 for alpha chain variable domain of TCR clone 310231 (TRAV13-1, TRAJ20)
CAARPGSNDYKLSF

SEQ ID NO: 620462 - protein, 16 aa, Homo sapiens
  CDR3 for beta chain variable domain of TCR clone 310231 (TRBV19, TRBJ2-1)
CASSKAGPSSYNEQFF

SEQ ID NO: 620463 - protein, 15 aa, Homo sapiens
  CDR3 for alpha chain variable domain of TCR clone 310232 (TRAV29/DV5, TRAJ24)
CAASGATDSWGKYQF

SEQ ID NO: 620464 - protein, 12 aa, Homo sapiens
  CDR3 for beta chain variable domain of TCR clone 310232 (TRBV11-2, TRBJ2-2)
CASSLPTGELFF

SEQ ID NO: 620465 - protein, 13 aa, Homo sapiens
  CDR3 for alpha chain variable domain of TCR clone 310233 (TRAV2, TRAJ40)
CAVVTSGTYKYIF

SEQ ID NO: 620466 - protein, 13 aa, Homo sapiens
  CDR3 for beta chain variable domain of TCR clone 310233 (TRBV11-2, TRBJ1-3)
CASSPTGGNTIYF

SEQ ID NO: 620467 - protein, 13 aa, Homo sapiens
  CDR3 for alpha chain variable domain of TCR clone 310234 (TRAV1-2, TRAJ31)
CAVRHNNNARLMF

SEQ ID NO: 620468 - protein, 14 aa, Homo sapiens
  CDR3 for beta chain variable domain of TCR clone 310234 (TRBV11-2, TRBJ2-1)
CASSLSEPYNEQFF

SEQ ID NO: 620469 - protein, 13 aa, Homo sapiens
  CDR3 for alpha chain variable domain of TCR clone 310235 (TRAV12-3, TRAJ33)
CAMRVNSNYQLIW

SEQ ID NO: 620470 - protein, 16 aa, Homo sapiens
  CDR3 for beta chain variable domain of TCR clone 310235 (TRBV13, TRBJ2-5)
CASSLRTGGSWETQYF

SEQ ID NO: 620471 - protein, 12 aa, Homo sapiens
  CDR3 for alpha chain variable domain of TCR clone 310236 (TRAV8-6, TRAJ43)
CAVSHNNNDMRF

SEQ ID NO: 620472 - protein, 15 aa, Homo sapiens
  CDR3 for beta chain variable domain of TCR clone 310236 (TRBV27, TRBJ2-1)
CASSNGGGSSNEQFF

SEQ ID NO: 620473 - protein, 16 aa, Homo sapiens
  CDR3 for alpha chain variable domain of TCR clone 310237 (TRAV30, TRAJ24)
CGTEIVDADSWGQFQF

SEQ ID NO: 620474 - protein, 12 aa, Homo sapiens
  CDR3 for beta chain variable domain of TCR clone 310237 (TRBV11-2, TRBJ2-1)
CASSPGNNEQFF

SEQ ID NO: 620475 - protein, 14 aa, Homo sapiens
  CDR3 for alpha chain variable domain of TCR clone 310238 (TRAV12-3, TRAJ13)
CAPYPSGGYQKVTF

SEQ ID NO: 620476 - protein, 17 aa, Homo sapiens
  CDR3 for beta chain variable domain of TCR clone 310238 (TRBV13, TRBJ2-3)
CASSLSRVAGGRNTQYF

SEQ ID NO: 620477 - protein, 11 aa, Homo sapiens
  CDR3 for alpha chain variable domain of TCR clone 310239 (TRAV12-3, TRAJ43)
CAMSVSNDMRF

SEQ ID NO: 620478 - protein, 15 aa, Homo sapiens
  CDR3 for beta chain variable domain of TCR clone 310239 (TRBV20-1, TRBJ1-1)
CSAPLGGGTEASLDK

SEQ ID NO: 620479 - protein, 12 aa, Homo sapiens
  CDR3 for alpha chain variable domain of TCR clone 310240 (TRAV26-1, TRAJ36)
CIVRVRANNLFF

SEQ ID NO: 620480 - protein, 14 aa, Homo sapiens
  CDR3 for beta chain variable domain of TCR clone 310240 (TRBV14, TRBJ2-3)
CASSRKLAADTQYF

SEQ ID NO: 620481 - protein, 14 aa, Homo sapiens
  CDR3 for alpha chain variable domain of TCR clone 310241 (TRAV12-2, TRAJ13)
CAVKKTGGYQKVTF

SEQ ID NO: 620482 - protein, 15 aa, Homo sapiens
  CDR3 for beta chain variable domain of TCR clone 310241 (TRBV15, TRBJ1-2)
CATSRVRASGSGYTF

SEQ ID NO: 620483 - protein, 12 aa, Homo sapiens
  CDR3 for alpha chain variable domain of TCR clone 310242 (TRAV2, TRAJ9)
CAVGAGGFKTIL

SEQ ID NO: 620484 - protein, 11 aa, Homo sapiens
  CDR3 for beta chain variable domain of TCR clone 310242 (TRBV13, TRBJ2-2)
CASSPRTGEHT

SEQ ID NO: 620485 - protein, 23 aa, Homo sapiens
  CDR3 for alpha chain variable domain of TCR clone 310243 (TRAV9-2, )
CALSRAGNNHIQNPDPAVYQLRD

SEQ ID NO: 620486 - protein, 14 aa, Homo sapiens
  CDR3 for beta chain variable domain of TCR clone 310243 (TRBV11-2, TRBJ2-1)
CASSPSRQGGGQFF

SEQ ID NO: 620487 - protein, 13 aa, Homo sapiens
  CDR3 for alpha chain variable domain of TCR clone 310244 (TRAV21, TRAJ20)
CAVGLMVDYKLSF

SEQ ID NO: 620488 - protein, 13 aa, Homo sapiens
  CDR3 for beta chain variable domain of TCR clone 310244 (TRBV6-1, TRBJ1-1)
CASSRQGNTGAFF

SEQ ID NO: 620489 - protein, 18 aa, Homo sapiens
  CDR3 for alpha chain variable domain of TCR clone 310245 (TRAV26-1, TRAJ52)
CIARVAGAGGTSYGKLTF

SEQ ID NO: 620490 - protein, 15 aa, Homo sapiens
  CDR3 for beta chain variable domain of TCR clone 310245 (TRBV9, TRBJ1-6)
CASSVAGTGDSPLHF

SEQ ID NO: 620491 - protein, 14 aa, Homo sapiens
  CDR3 for alpha chain variable domain of TCR clone 310246 (TRAV1-2, TRAJ16)
CAVNRFSDGQKLLF

SEQ ID NO: 620492 - protein, 16 aa, Homo sapiens
  CDR3 for beta chain variable domain of TCR clone 310246 (TRBV7-3, TRBJ2-1)
CASSLVSGSSNNEQFF

SEQ ID NO: 620493 - protein, 16 aa, Homo sapiens
  CDR3 for alpha chain variable domain of TCR clone 310247 (TRAV12-2, TRAJ48)
CAVNPTSNFGNEKLTF

SEQ ID NO: 620494 - protein, 12 aa, Homo sapiens
  CDR3 for beta chain variable domain of TCR clone 310247 (TRBV9, TRBJ2-3)
CACSRRAGTQYF

SEQ ID NO: 620495 - protein, 12 aa, Homo sapiens
  CDR3 for alpha chain variable domain of TCR clone 310248 (TRAV13-1, TRAJ49)
SAASPMGNQFYF

SEQ ID NO: 620496 - protein, 17 aa, Homo sapiens
  CDR3 for beta chain variable domain of TCR clone 310248 (TRBV11-2, TRBJ2-1)
CASSLYPPGVEYNEQFF

SEQ ID NO: 620497 - protein, 16 aa, Homo sapiens
  CDR3 for alpha chain variable domain of TCR clone 310249 (TRAV26-1, TRAJ45)
CIVEKYSGGGADGLTF

SEQ ID NO: 620498 - protein, 15 aa, Homo sapiens
  CDR3 for beta chain variable domain of TCR clone 310249 (TRBV15, TRBJ2-7)
CHQQRPIQLAYEQYF

SEQ ID NO: 620499 - protein, 13 aa, Homo sapiens
  CDR3 for alpha chain variable domain of TCR clone 310250 (TRAV8-4, TRAJ9)
CAVSETGGFKTIF

SEQ ID NO: 620500 - protein, 14 aa, Homo sapiens
  CDR3 for beta chain variable domain of TCR clone 310250 (TRBV25-1, TRBJ1-1)
CASTHLGGNTEAFF

SEQ ID NO: 620501 - protein, 15 aa, Homo sapiens
  CDR3 for alpha chain variable domain of TCR clone 310251 (TRAV2, TRAJ38)
CAVEDRIGNNHKLIW

SEQ ID NO: 620502 - protein, 16 aa, Homo sapiens
  CDR3 for beta chain variable domain of TCR clone 310251 (TRBV7-8, TRBJ2-1)
CASSLAGTGRYNEQFF

SEQ ID NO: 620503 - protein, 17 aa, Homo sapiens
  CDR3 for alpha chain variable domain of TCR clone 310252 (TRAV8-1, TRAJ43)
CALTNDMRFGAGTRLTV

SEQ ID NO: 620504 - protein, 17 aa, Homo sapiens
  CDR3 for beta chain variable domain of TCR clone 310252 (TRBV5-4, TRBJ2-1)
CASSSAGGRGPYNEQFF

SEQ ID NO: 620505 - protein, 22 aa, Homo sapiens
  CDR3 for alpha chain variable domain of TCR clone 310253 (TRAV13-1, )
CAASGPRRAQIPDIQNPDPAVY

SEQ ID NO: 620506 - protein, 16 aa, Homo sapiens
  CDR3 for beta chain variable domain of TCR clone 310253 (TRBV18, TRBJ2-3)
CASSPPAGGPRKYAVF

SEQ ID NO: 620507 - protein, 15 aa, Homo sapiens
  CDR3 for alpha chain variable domain of TCR clone 310254 (TRAV8-3, TRAJ23)
CAVGDRYNQGGKIIF

SEQ ID NO: 620508 - protein, 15 aa, Homo sapiens
  CDR3 for beta chain variable domain of TCR clone 310254 (TRBV6-3, TRBJ2-7)
CASSSPGTVFYEQYF

SEQ ID NO: 620509 - protein, 15 aa, Homo sapiens
  CDR3 for alpha chain variable domain of TCR clone 310255 (TRAV8-4, TRAJ3)
CAVTGENLVQQCFQD

SEQ ID NO: 620510 - protein, 14 aa, Homo sapiens
  CDR3 for beta chain variable domain of TCR clone 310255 (TRBV7-3, TRBJ2-1)
CASSLAGGTNEQFF

SEQ ID NO: 620511 - protein, 16 aa, Homo sapiens
  CDR3 for alpha chain variable domain of TCR clone 310256 (TRAV38-1, TRAJ32)
CAFMKRGGGATNKLIF

SEQ ID NO: 620512 - protein, 13 aa, Homo sapiens
  CDR3 for beta chain variable domain of TCR clone 310256 (TRBV20-1, TRBJ2-5)
CSAREAFQETQYF

SEQ ID NO: 620513 - protein, 14 aa, Homo sapiens
  CDR3 for alpha chain variable domain of TCR clone 310257 (TRAV16, TRAJ15)
CALRPNQAGTALII

SEQ ID NO: 620514 - protein, 16 aa, Homo sapiens
  CDR3 for beta chain variable domain of TCR clone 310257 (TRBV6-5, TRBJ2-2)
CASSYGRVPDTGELFF

SEQ ID NO: 620515 - protein, 18 aa, Homo sapiens
  CDR3 for alpha chain variable domain of TCR clone 310258 (TRAV21, TRAJ52)
CAVRPSPAGGLSYGKLTF

SEQ ID NO: 620516 - protein, 14 aa, Homo sapiens
  CDR3 for beta chain variable domain of TCR clone 310258 (TRBV4-1, TRBJ2-2)
CASSQAVNTGELFF

SEQ ID NO: 620517 - protein, 13 aa, Homo sapiens
  CDR3 for alpha chain variable domain of TCR clone 310259 (TRAV12-2, TRAJ30)
CAVNLNRDDKIIF

SEQ ID NO: 620518 - protein, 20 aa, Homo sapiens
  CDR3 for beta chain variable domain of TCR clone 310259 (TRBV19, TRBJ2-7)
CASTQVAPESLRAVLRAGHQ

SEQ ID NO: 620519 - protein, 13 aa, Homo sapiens
  CDR3 for alpha chain variable domain of TCR clone 310260 (TRAV27, TRAJ42)
CAGARGSQGNLIF

SEQ ID NO: 620520 - protein, 15 aa, Homo sapiens
  CDR3 for beta chain variable domain of TCR clone 310260 (TRBV10-3, TRBJ2-2)
RAIRTDREDTGELFF

SEQ ID NO: 620521 - protein, 14 aa, Homo sapiens
  CDR3 for alpha chain variable domain of TCR clone 310261 (TRAV1-1, TRAJ23)
CAVSIYNQGGKLIF

SEQ ID NO: 620522 - protein, 15 aa, Homo sapiens
  CDR3 for beta chain variable domain of TCR clone 310261 (TRBV18, TRBJ2-5)
CASSPDPGLQETQYF

SEQ ID NO: 620523 - protein, 14 aa, Homo sapiens
  CDR3 for alpha chain variable domain of TCR clone 310262 (TRAV1-2, TRAJ16)
CAVNRFSDGQKLLF

SEQ ID NO: 620524 - protein, 13 aa, Homo sapiens
  CDR3 for beta chain variable domain of TCR clone 310262 (TRBV10-3, TRBJ2-7)
CASKLAVNYEQYV

SEQ ID NO: 620525 - protein, 12 aa, Homo sapiens
  CDR3 for alpha chain variable domain of TCR clone 310263 (TRAV12-3, TRAJ29)
CAAREGNTPLVF

SEQ ID NO: 620526 - protein, 18 aa, Homo sapiens
  CDR3 for beta chain variable domain of TCR clone 310263 (TRBV20-1, TRBJ2-6)
CSARTVAGGPSGANVLTF

SEQ ID NO: 620527 - protein, 14 aa, Homo sapiens
  CDR3 for alpha chain variable domain of TCR clone 310264 (TRAV12-2, TRAJ24)
CAVTPADSWGKLQF

SEQ ID NO: 620528 - protein, 15 aa, Homo sapiens
  CDR3 for beta chain variable domain of TCR clone 310264 (TRBV28, TRBJ2-3)
CASSQELGGTDTQYF

SEQ ID NO: 620529 - protein, 15 aa, Homo sapiens
  CDR3 for alpha chain variable domain of TCR clone 310265 (TRAV3, TRAJ29)
CAVRDINSVNTPLVF

SEQ ID NO: 620530 - protein, 16 aa, Homo sapiens
  CDR3 for beta chain variable domain of TCR clone 310265 (TRBV4-1, TRBJ2-5)
CASSQTFYGDQETQYF

SEQ ID NO: 620531 - protein, 14 aa, Homo sapiens
  CDR3 for alpha chain variable domain of TCR clone 310266 (TRAV26-1, TRAJ34)
CIVRVAYNTDKLIF

SEQ ID NO: 620532 - protein, 15 aa, Homo sapiens
  CDR3 for beta chain variable domain of TCR clone 310266 (TRBV19, TRBJ2-1)
CASIIQATSYNEQFF

SEQ ID NO: 620533 - protein, 19 aa, Homo sapiens
  CDR3 for alpha chain variable domain of TCR clone 310267 (TRAV26-1, TRAJ52)
CIVRAHRIAGGTSYGKLTF

SEQ ID NO: 620534 - protein, 15 aa, Homo sapiens
  CDR3 for beta chain variable domain of TCR clone 310267 (TRBV12-4, TRBJ2-5)
CASSPPTGLQETQYF

SEQ ID NO: 620535 - protein, 14 aa, Homo sapiens
  CDR3 for alpha chain variable domain of TCR clone 310268 (TRAV17, TRAJ33)
CARTWGDSNYQLIW

SEQ ID NO: 620536 - protein, 14 aa, Homo sapiens
  CDR3 for beta chain variable domain of TCR clone 310268 (TRBV4-1, TRBJ2-2)
CVSSQAVNTGELFF

SEQ ID NO: 620537 - protein, 14 aa, Homo sapiens
  CDR3 for alpha chain variable domain of TCR clone 310269 (TRAV38-2/DV8, TRAJ39)
CAYEGWNAGNMLTF

SEQ ID NO: 620538 - protein, 14 aa, Homo sapiens
  CDR3 for beta chain variable domain of TCR clone 310269 (TRBV6-1, TRBJ1-3)
CASVQGGGGNTIYF

SEQ ID NO: 620539 - protein, 12 aa, Homo sapiens
  CDR3 for alpha chain variable domain of TCR clone 310270 (TRAV12-2, TRAJ34)
CAVRRVTDKLIF

SEQ ID NO: 620540 - protein, 13 aa, Homo sapiens
  CDR3 for beta chain variable domain of TCR clone 310270 (TRBV7-3, TRBJ1-1)
CASSQDWGAEAFF

SEQ ID NO: 620541 - protein, 14 aa, Homo sapiens
  CDR3 for alpha chain variable domain of TCR clone 310271 (TRAV1-2, TRAJ8)
YAVREDTGFQKLVF

SEQ ID NO: 620542 - protein, 12 aa, Homo sapiens
  CDR3 for beta chain variable domain of TCR clone 310271 (TRBV11-2, TRBJ2-2)
CASSLGGGELFF

SEQ ID NO: 620543 - protein, 13 aa, Homo sapiens
  CDR3 for alpha chain variable domain of TCR clone 310272 (TRAV27, TRAJ58)
CAGAETSGSRMTF

SEQ ID NO: 620544 - protein, 13 aa, Homo sapiens
  CDR3 for beta chain variable domain of TCR clone 310272 (TRBV7-2, TRBJ2-1)
CASNRDRWNEQFF

SEQ ID NO: 620545 - protein, 14 aa, Homo sapiens
  CDR3 for alpha chain variable domain of TCR clone 310273 (TRAV12-2, TRAJ33)
CAVKRARSNYQLIW

SEQ ID NO: 620546 - protein, 12 aa, Homo sapiens
  CDR3 for beta chain variable domain of TCR clone 310273 (TRBV24-1, TRBJ2-3)
CTTSDSTDTQYF

SEQ ID NO: 620547 - protein, 14 aa, Homo sapiens
  CDR3 for alpha chain variable domain of TCR clone 310274 (TRAV30, TRAJ26)
CGTEIVSYGQNFVF

SEQ ID NO: 620548 - protein, 13 aa, Homo sapiens
  CDR3 for beta chain variable domain of TCR clone 310274 (TRBV24-1, TRBJ2-2)
CAASDWSTGELFF

SEQ ID NO: 620549 - protein, 14 aa, Homo sapiens
  CDR3 for alpha chain variable domain of TCR clone 310275 (TRAV36/DV7, TRAJ40)
CAVETTSGNYKYIF

SEQ ID NO: 620550 - protein, 13 aa, Homo sapiens
  CDR3 for beta chain variable domain of TCR clone 310275 (TRBV10-3, TRBJ2-5)
CAMTRGAGETQYF

SEQ ID NO: 620551 - protein, 15 aa, Homo sapiens
  CDR3 for alpha chain variable domain of TCR clone 310276 (TRAV17, TRAJ28)
CATVDSGAGSYQLTF

SEQ ID NO: 620552 - protein, 13 aa, Homo sapiens
  CDR3 for beta chain variable domain of TCR clone 310276 (TRBV15, TRBJ1-6)
CATSGGLNSPLHF

SEQ ID NO: 620553 - protein, 15 aa, Homo sapiens
  CDR3 for alpha chain variable domain of TCR clone 310277 (TRAV8-3, TRAJ45)
CASSYSGGGADGLTF

SEQ ID NO: 620554 - protein, 16 aa, Homo sapiens
  CDR3 for beta chain variable domain of TCR clone 310277 (TRBV7-9, TRBJ2-1)
CASSLVSGPSYNEQFF

SEQ ID NO: 620555 - protein, 14 aa, Homo sapiens
  CDR3 for alpha chain variable domain of TCR clone 310278 (TRAV12-2, TRAJ17)
CAALFKAAGNKLTF

SEQ ID NO: 620556 - protein, 18 aa, Homo sapiens
  CDR3 for beta chain variable domain of TCR clone 310278 (TRBV7-6, TRBJ2-1)
CASSPRTSGMSSYNEQFF

SEQ ID NO: 620557 - protein, 14 aa, Homo sapiens
  CDR3 for alpha chain variable domain of TCR clone 310279 (TRAV29/DV5, TRAJ20)
CPASAPIEDYKLSF

SEQ ID NO: 620558 - protein, 15 aa, Homo sapiens
  CDR3 for beta chain variable domain of TCR clone 310279 (TRBV6-1, TRBJ2-1)
CASSEAAYSYNEQFF

SEQ ID NO: 620559 - protein, 14 aa, Homo sapiens
  CDR3 for alpha chain variable domain of TCR clone 310280 (TRAV12-2, TRAJ40)
CAAKIPSGTYKYIF

SEQ ID NO: 620560 - protein, 16 aa, Homo sapiens
  CDR3 for beta chain variable domain of TCR clone 310280 (TRBV28, TRBJ2-5)
CASSFSPAGGWETQYF

SEQ ID NO: 620561 - protein, 12 aa, Homo sapiens
  CDR3 for alpha chain variable domain of TCR clone 310281 (TRAV12-3, TRAJ17)
CAMTLTGNKLTF

SEQ ID NO: 620562 - protein, 18 aa, Homo sapiens
  CDR3 for beta chain variable domain of TCR clone 310281 (TRBV4-3, TRBJ1-6)
CASSQETPASSYNSHLHF

SEQ ID NO: 620563 - protein, 16 aa, Homo sapiens
  CDR3 for alpha chain variable domain of TCR clone 310282 (TRAV21, TRAJ52)
CAVTNAGGTSYGKLTF

SEQ ID NO: 620564 - protein, 14 aa, Homo sapiens
  CDR3 for beta chain variable domain of TCR clone 310282 (TRBV7-9, TRBJ1-1)
CASTPLQSYTEAFF

SEQ ID NO: 620565 - protein, 13 aa, Homo sapiens
  CDR3 for alpha chain variable domain of TCR clone 310283 (TRAV13-2, TRAJ13)
CAERPGGYQKVTF

SEQ ID NO: 620566 - protein, 16 aa, Homo sapiens
  CDR3 for beta chain variable domain of TCR clone 310283 (TRBV7-3, TRBJ2-2)
CASSLKRGTLSGELFF

SEQ ID NO: 620567 - protein, 14 aa, Homo sapiens
  CDR3 for alpha chain variable domain of TCR clone 310284 (TRAV13-1, TRAJ6)
CAASITGGSYIPTF

SEQ ID NO: 620568 - protein, 14 aa, Homo sapiens
  CDR3 for beta chain variable domain of TCR clone 310284 (TRBV6-3, TRBJ2-1)
CASLHSAYYNERFF

SEQ ID NO: 620569 - protein, 11 aa, Homo sapiens
  CDR3 for alpha chain variable domain of TCR clone 310285 (TRAV1-1, TRAJ23)
CAVRQGGKLIF

SEQ ID NO: 620570 - protein, 12 aa, Homo sapiens
  CDR3 for beta chain variable domain of TCR clone 310285 (TRBV7-9, TRBJ2-7)
CASSIKREEQYF

SEQ ID NO: 620571 - protein, 13 aa, Homo sapiens
  CDR3 for alpha chain variable domain of TCR clone 310286 (TRAV8-3, TRAJ43)
CAVVPNNNNDMRF

SEQ ID NO: 620572 - protein, 17 aa, Homo sapiens
  CDR3 for beta chain variable domain of TCR clone 310286 (TRBV7-7, TRBJ1-1)
CASIGDRPNLGVTEAFF

SEQ ID NO: 620573 - protein, 12 aa, Homo sapiens
  CDR3 for alpha chain variable domain of TCR clone 310287 (TRAV13-1, TRAJ49)
CAAPNTGNQFYC

SEQ ID NO: 620574 - protein, 17 aa, Homo sapiens
  CDR3 for beta chain variable domain of TCR clone 310287 (TRBV25-1, TRBJ2-7)
CASSDARVVFSSYEQYF

SEQ ID NO: 620575 - protein, 13 aa, Homo sapiens
  CDR3 for alpha chain variable domain of TCR clone 310288 (TRAV12-1, TRAJ7)
CVVNMRGNNRLAF

SEQ ID NO: 620576 - protein, 15 aa, Homo sapiens
  CDR3 for beta chain variable domain of TCR clone 310288 (TRBV27, TRBJ2-3)
CASSLGLAASDTQYF

SEQ ID NO: 620577 - protein, 15 aa, Homo sapiens
  CDR3 for alpha chain variable domain of TCR clone 310289 (TRAV25, TRAJ52)
CAGRPGGTSYGKLTF

SEQ ID NO: 620578 - protein, 17 aa, Homo sapiens
  CDR3 for beta chain variable domain of TCR clone 310289 (TRBV7-8, TRBJ2-6)
CASSVGTGGAGANLLTF

SEQ ID NO: 620579 - protein, 14 aa, Homo sapiens
  CDR3 for alpha chain variable domain of TCR clone 310290 (TRAV17, TRAJ57)
CATDPQGGSEKLVF

SEQ ID NO: 620580 - protein, 15 aa, Homo sapiens
  CDR3 for beta chain variable domain of TCR clone 310290 (TRBV5-1, TRBJ2-7)
GASSLDLTSSYEQYF

SEQ ID NO: 620581 - protein, 16 aa, Homo sapiens
  CDR3 for alpha chain variable domain of TCR clone 310291 (TRAV3, TRAJ6)
CAVRDGMGRRKLHTYN

SEQ ID NO: 620582 - protein, 15 aa, Homo sapiens
  CDR3 for beta chain variable domain of TCR clone 310291 (TRBV5-1, TRBJ2-7)
CASSLGDFTTYEQYF

SEQ ID NO: 620583 - protein, 19 aa, Homo sapiens
  CDR3 for alpha chain variable domain of TCR clone 310292 (TRAV27, TRAJ53)
ASTSVQSRNSGGSNYKLTF

SEQ ID NO: 620584 - protein, 14 aa, Homo sapiens
  CDR3 for beta chain variable domain of TCR clone 310292 (TRBV11-1, TRBJ2-7)
CASTVAVPSYEQYF

SEQ ID NO: 620585 - protein, 17 aa, Homo sapiens
  CDR3 for alpha chain variable domain of TCR clone 310293 (TRAV13-1, TRAJ52)
CAASSGAGGTSYGKLTV

SEQ ID NO: 620586 - protein, 12 aa, Homo sapiens
  CDR3 for beta chain variable domain of TCR clone 310293 (TRBV11-2, TRBJ2-2)
CASSLGGGELFF

SEQ ID NO: 620587 - protein, 13 aa, Homo sapiens
  CDR3 for alpha chain variable domain of TCR clone 310294 (TRAV38-1, TRAJ49)
CAFMKYTGNQFYF

SEQ ID NO: 620588 - protein, 15 aa, Homo sapiens
  CDR3 for beta chain variable domain of TCR clone 310294 (TRBV5-1, TRBJ1-1)
FATAASYRGGGEAFF

SEQ ID NO: 620589 - protein, 15 aa, Homo sapiens
  CDR3 for alpha chain variable domain of TCR clone 310295 (TRAV26-1, TRAJ56)
CIVRVDNGANSKLTF

SEQ ID NO: 620590 - protein, 12 aa, Homo sapiens
  CDR3 for beta chain variable domain of TCR clone 310295 (TRBV5-1, TRBJ2-7)
CASSFRGYEQYF

SEQ ID NO: 620591 - protein, 13 aa, Homo sapiens
  CDR3 for alpha chain variable domain of TCR clone 310296 (TRAV13-1, TRAJ6)
CAASKGGSYIPTF

SEQ ID NO: 620592 - protein, 14 aa, Homo sapiens
  CDR3 for beta chain variable domain of TCR clone 310296 (TRBV7-2, TRBJ2-1)
CASSLGVGYNEQSF

SEQ ID NO: 620593 - protein, 12 aa, Homo sapiens
  CDR3 for alpha chain variable domain of TCR clone 310297 (TRAV12-2, TRAJ3)
CAVWRSASKIIF

SEQ ID NO: 620594 - protein, 12 aa, Homo sapiens
  CDR3 for beta chain variable domain of TCR clone 310297 (TRBV11-2, TRBJ2-1)
CASSPGNNEQFF

SEQ ID NO: 620595 - protein, 13 aa, Homo sapiens
  CDR3 for alpha chain variable domain of TCR clone 310298 (TRAV12-1, TRAJ34)
CVVTGYNTDKRIF

SEQ ID NO: 620596 - protein, 13 aa, Homo sapiens
  CDR3 for beta chain variable domain of TCR clone 310298 (TRBV28, TRBJ2-7)
CASKAGGVYEQYF

SEQ ID NO: 620597 - protein, 13 aa, Homo sapiens
  CDR3 for alpha chain variable domain of TCR clone 310299 (TRAV2, TRAJ15)
CAVASQARTALIF

SEQ ID NO: 620598 - protein, 14 aa, Homo sapiens
  CDR3 for beta chain variable domain of TCR clone 310299 (TRBV20-1, TRBJ1-1)
CSAQTRIGGTEAFF

SEQ ID NO: 620599 - protein, 13 aa, Homo sapiens
  CDR3 for alpha chain variable domain of TCR clone 310300 (TRAV2, TRAJ29)
CAAQNSGNTPLVF

SEQ ID NO: 620600 - protein, 16 aa, Homo sapiens
  CDR3 for beta chain variable domain of TCR clone 310300 (TRBV7-9, TRBJ2-4)
CARSLAMGVTFSNSAP

SEQ ID NO: 620601 - protein, 21 aa, Homo sapiens
  CDR3 for alpha chain variable domain of TCR clone 310301 (TRAV12-1, TRAJ37)
CVVNGGLCQHRQTNLWARDNF

SEQ ID NO: 620602 - protein, 12 aa, Homo sapiens
  CDR3 for beta chain variable domain of TCR clone 310301 (TRBV20-1, TRBJ1-2)
CSAPGFNYGYTF

SEQ ID NO: 620603 - protein, 12 aa, Homo sapiens
  CDR3 for alpha chain variable domain of TCR clone 310302 (TRAV12-1, TRAJ20)
CVVNPDDYKLSF

SEQ ID NO: 620604 - protein, 15 aa, Homo sapiens
  CDR3 for beta chain variable domain of TCR clone 310302 (TRBV11-3, TRBJ2-2)
CASSFVGTGAGELFF

SEQ ID NO: 620605 - protein, 15 aa, Homo sapiens
  CDR3 for alpha chain variable domain of TCR clone 310303 (TRAV8-3, TRAJ11)
CAVGLLNSGYSTLTF

SEQ ID NO: 620606 - protein, 13 aa, Homo sapiens
  CDR3 for beta chain variable domain of TCR clone 310303 (TRBV4-2, TRBJ2-5)
CASSRAGGETQFF

SEQ ID NO: 620607 - protein, 15 aa, Homo sapiens
  CDR3 for alpha chain variable domain of TCR clone 310304 (TRAV29/DV5, TRAJ53)
CAASASGGSNYKLTF

SEQ ID NO: 620608 - protein, 14 aa, Homo sapiens
  CDR3 for beta chain variable domain of TCR clone 310304 (TRBV7-9, TRBJ2-1)
CASSDNSGYNEQFF

SEQ ID NO: 620609 - protein, 16 aa, Homo sapiens
  CDR3 for alpha chain variable domain of TCR clone 310305 (TRAV12-2, TRAJ45)
CAVKRNPGGGADGLTF

SEQ ID NO: 620610 - protein, 12 aa, Homo sapiens
  CDR3 for beta chain variable domain of TCR clone 310305 (TRBV6-1, TRBJ2-5)
CASSEGRETRYF

SEQ ID NO: 620611 - protein, 17 aa, Homo sapiens
  CDR3 for alpha chain variable domain of TCR clone 310306 (TRAV29/DV5, TRAJ21)
CAASNKFYFGSGTKLNV

SEQ ID NO: 620612 - protein, 14 aa, Homo sapiens
  CDR3 for beta chain variable domain of TCR clone 310306 (TRBV4-1, TRBJ2-5)
CASSQYRDQETQYF

SEQ ID NO: 620613 - protein, 14 aa, Homo sapiens
  CDR3 for alpha chain variable domain of TCR clone 310307 (TRAV1-2, TRAJ16)
CAVNRFSDGQKLLF

SEQ ID NO: 620614 - protein, 15 aa, Homo sapiens
  CDR3 for beta chain variable domain of TCR clone 310307 (TRBV19, TRBJ2-1)
CASSINREPSHEQFF

SEQ ID NO: 620615 - protein, 14 aa, Homo sapiens
  CDR3 for alpha chain variable domain of TCR clone 310308 (TRAV29/DV5, TRAJ36)
CAARSKTGANNRFF

SEQ ID NO: 620616 - protein, 14 aa, Homo sapiens
  CDR3 for beta chain variable domain of TCR clone 310308 (TRBV12-5, TRBJ2-5)
CASGSRTHQETQYF

SEQ ID NO: 620617 - protein, 13 aa, Homo sapiens
  CDR3 for alpha chain variable domain of TCR clone 310309 (TRAV12-1, TRAJ6)
CVVFPGGSYIPTF

SEQ ID NO: 620618 - protein, 16 aa, Homo sapiens
  CDR3 for beta chain variable domain of TCR clone 310309 (TRBV20-1, TRBJ2-1)
CSARDLKQGMNNEQFF

SEQ ID NO: 620619 - protein, 19 aa, Homo sapiens
  CDR3 for alpha chain variable domain of TCR clone 310310 (TRAV1-2, TRAJ26)
CLLPLCCERPDNYGQNFVF

SEQ ID NO: 620620 - protein, 12 aa, Homo sapiens
  CDR3 for beta chain variable domain of TCR clone 310310 (TRBV7-9, TRBJ2-7)
CATWTDAYEQYF

SEQ ID NO: 620621 - protein, 14 aa, Homo sapiens
  CDR3 for alpha chain variable domain of TCR clone 310311 (TRAV35, TRAJ13)
CAGSPSGGYQKVTF

SEQ ID NO: 620622 - protein, 17 aa, Homo sapiens
  CDR3 for beta chain variable domain of TCR clone 310311 (TRBV7-6, TRBJ2-5)
CASSSGLADPWGETQYF

SEQ ID NO: 620623 - protein, 13 aa, Homo sapiens
  CDR3 for alpha chain variable domain of TCR clone 310312 (TRAV12-1, TRAJ29)
CVVNGPGNTPLVF

SEQ ID NO: 620624 - protein, 12 aa, Homo sapiens
  CDR3 for beta chain variable domain of TCR clone 310312 (TRBV14, TRBJ1-1)
CASSQLKGLAFF

SEQ ID NO: 620625 - protein, 16 aa, Homo sapiens
  CDR3 for alpha chain variable domain of TCR clone 310313 (TRAV35, TRAJ20)
CWADPSSGCNVYKLSF

SEQ ID NO: 620626 - protein, 16 aa, Homo sapiens
  CDR3 for beta chain variable domain of TCR clone 310313 (TRBV4-3, TRBJ1-6)
CASSAQPGGEGSPLHF

SEQ ID NO: 620627 - protein, 15 aa, Homo sapiens
  CDR3 for alpha chain variable domain of TCR clone 310314 (TRAV8-3, TRAJ27)
CAVGPYKTNAGKSTF

SEQ ID NO: 620628 - protein, 13 aa, Homo sapiens
  CDR3 for beta chain variable domain of TCR clone 310314 (TRBV20-1, TRBJ1-1)
CSAPLGGGTEAFF

SEQ ID NO: 620629 - protein, 14 aa, Homo sapiens
  CDR3 for alpha chain variable domain of TCR clone 310315 (TRAV2, TRAJ9)
CAVEDRSGGFKTIF

SEQ ID NO: 620630 - protein, 13 aa, Homo sapiens
  CDR3 for beta chain variable domain of TCR clone 310315 (TRBV7-7, TRBJ2-2)
CASSLTSAGELFF

SEQ ID NO: 620631 - protein, 10 aa, Homo sapiens
  CDR3 for alpha chain variable domain of TCR clone 310316 (TRAV16, TRAJ22)
SAMYLRQLTF

SEQ ID NO: 620632 - protein, 15 aa, Homo sapiens
  CDR3 for beta chain variable domain of TCR clone 310316 (TRBV7-3, TRBJ2-2)
CASSETGQGTGELFF

SEQ ID NO: 620633 - protein, 16 aa, Homo sapiens
  CDR3 for alpha chain variable domain of TCR clone 310317 (TRAV17, TRAJ52)
CATSNAGVTSYGKLTF

SEQ ID NO: 620634 - protein, 13 aa, Homo sapiens
  CDR3 for beta chain variable domain of TCR clone 310317 (TRBV27, TRBJ1-6)
CASSLVLVSPLHF

SEQ ID NO: 620635 - protein, 11 aa, Homo sapiens
  CDR3 for alpha chain variable domain of TCR clone 310318 (TRAV21, TRAJ34)
CAPLDTAKLIF

SEQ ID NO: 620636 - protein, 16 aa, Homo sapiens
  CDR3 for beta chain variable domain of TCR clone 310318 (TRBV5-1, TRBJ2-3)
CASSWAGDRGTDTQYF

SEQ ID NO: 620637 - protein, 21 aa, Homo sapiens
  CDR3 for alpha chain variable domain of TCR clone 310319 (TRAV8-3, TRAJ10)
CAVGHTDGRRKQTHLWDRHSA

SEQ ID NO: 620638 - protein, 10 aa, Homo sapiens
  CDR3 for beta chain variable domain of TCR clone 310319 (TRBV20-1, TRBJ2-5)
CSARFETQYF

SEQ ID NO: 620639 - protein, 16 aa, Homo sapiens
  CDR3 for alpha chain variable domain of TCR clone 310320 (TRAV26-1, TRAJ23)
CIVRVERYNQGGKLIF

SEQ ID NO: 620640 - protein, 14 aa, Homo sapiens
  CDR3 for beta chain variable domain of TCR clone 310320 (TRBV6-1, TRBJ1-3)
CASVQGGGGNTIYF

SEQ ID NO: 620641 - protein, 16 aa, Homo sapiens
  CDR3 for alpha chain variable domain of TCR clone 310321 (TRAV17, TRAJ53)
CATDALSGGSNYKLTF

SEQ ID NO: 620642 - protein, 12 aa, Homo sapiens
  CDR3 for beta chain variable domain of TCR clone 310321 (TRBV5-1, TRBJ1-2)
CASSQDTYGYTF

SEQ ID NO: 620643 - protein, 14 aa, Homo sapiens
  CDR3 for alpha chain variable domain of TCR clone 310322 (TRAV26-1, TRAJ39)
CIVRGSRAGNMLTL

SEQ ID NO: 620644 - protein, 15 aa, Homo sapiens
  CDR3 for beta chain variable domain of TCR clone 310322 (TRBV7-9, TRBJ1-5)
CASSQGHQPNQPQHF

SEQ ID NO: 620645 - protein, 18 aa, Homo sapiens
  CDR3 for alpha chain variable domain of TCR clone 310323 (TRAV21, TRAJ52)
CAERPPPAGGTSYGKLTF

SEQ ID NO: 620646 - protein, 17 aa, Homo sapiens
  CDR3 for beta chain variable domain of TCR clone 310323 (TRBV13, TRBJ2-3)
CASSLSRVAGGRNTQYF

SEQ ID NO: 620647 - protein, 11 aa, Homo sapiens
  CDR3 for alpha chain variable domain of TCR clone 310324 (TRAV4, TRAJ31)
CLVGDNASLMF

SEQ ID NO: 620648 - protein, 15 aa, Homo sapiens
  CDR3 for beta chain variable domain of TCR clone 310324 (TRBV10-2, TRBJ2-6)
CASSEQGTGANVLTF

SEQ ID NO: 620649 - protein, 13 aa, Homo sapiens
  CDR3 for alpha chain variable domain of TCR clone 310325 (TRAV8-3, TRAJ4)
CCGCSWWLNKLIF

SEQ ID NO: 620650 - protein, 15 aa, Homo sapiens
  CDR3 for beta chain variable domain of TCR clone 310325 (TRBV6-5, TRBJ2-1)
CASSYDAGAGNEQFF

SEQ ID NO: 620651 - protein, 11 aa, Homo sapiens
  CDR3 for alpha chain variable domain of TCR clone 310326 (TRAV2, TRAJ13)
CASGGYQTVTF

SEQ ID NO: 620652 - protein, 16 aa, Homo sapiens
  CDR3 for beta chain variable domain of TCR clone 310326 (TRBV6-1, TRBJ2-5)
CASSETLDRGAETRYF

SEQ ID NO: 620653 - protein, 13 aa, Homo sapiens
  CDR3 for alpha chain variable domain of TCR clone 310327 (TRAV8-3, TRAJ43)
CAVVPYNNNDMRL

SEQ ID NO: 620654 - protein, 17 aa, Homo sapiens
  CDR3 for beta chain variable domain of TCR clone 310327 (TRBV7-7, TRBJ1-1)
CASIGDRPNLGVTEAFF

SEQ ID NO: 620655 - protein, 15 aa, Homo sapiens
  CDR3 for alpha chain variable domain of TCR clone 310328 (TRAV8-4, TRAJ37)
CAVSRGSGNTGKLIF

SEQ ID NO: 620656 - protein, 15 aa, Homo sapiens
  CDR3 for beta chain variable domain of TCR clone 310328 (TRBV5-1, TRBJ2-7)
CASSLDLTSSCEQYF

SEQ ID NO: 620657 - protein, 14 aa, Homo sapiens
  CDR3 for alpha chain variable domain of TCR clone 310329 (TRAV13-1, TRAJ35)
CSASKGGFGNVRHC

SEQ ID NO: 620658 - protein, 13 aa, Homo sapiens
  CDR3 for beta chain variable domain of TCR clone 310329 (TRBV7-3, TRBJ1-1)
CASSQDWGAEAFF

SEQ ID NO: 620659 - protein, 15 aa, Homo sapiens
  CDR3 for alpha chain variable domain of TCR clone 310330 (TRAV17, TRAJ57)
CATRPSQGGSEKLVF

SEQ ID NO: 620660 - protein, 13 aa, Homo sapiens
  CDR3 for beta chain variable domain of TCR clone 310330 (TRBV6-5, TRBJ2-5)
CASSPQGGETQYF

SEQ ID NO: 620661 - protein, 13 aa, Homo sapiens
  CDR3 for alpha chain variable domain of TCR clone 310331 (TRAV38-2/DV8, TRAJ34)
CAYRTWNTDKLIF

SEQ ID NO: 620662 - protein, 13 aa, Homo sapiens
  CDR3 for beta chain variable domain of TCR clone 310331 (TRBV5-5, TRBJ1-2)
CASSFWRGEDYTF

SEQ ID NO: 620663 - protein, 14 aa, Homo sapiens
  CDR3 for alpha chain variable domain of TCR clone 310332 (TRAV12-1, TRAJ38)
CGELKAGNDRKLIW

SEQ ID NO: 620664 - protein, 12 aa, Homo sapiens
  CDR3 for beta chain variable domain of TCR clone 310332 (TRBV24-1, TRBJ1-1)
CATLYPDTEAFF

SEQ ID NO: 620665 - protein, 15 aa, Homo sapiens
  CDR3 for alpha chain variable domain of TCR clone 310333 (TRAV12-2, TRAJ23)
CAVNTLYNQGGKLIF

SEQ ID NO: 620666 - protein, 16 aa, Homo sapiens
  CDR3 for beta chain variable domain of TCR clone 310333 (TRBV7-6, TRBJ2-1)
CASSAPGPSSYNEQFF

SEQ ID NO: 620667 - protein, 12 aa, Homo sapiens
  CDR3 for alpha chain variable domain of TCR clone 310334 (TRAV1-1, TRAJ9)
CAVDTGGFKTIF

SEQ ID NO: 620668 - protein, 14 aa, Homo sapiens
  CDR3 for beta chain variable domain of TCR clone 310334 (TRBV7-8, TRBJ2-5)
CASSRTGGIETQYF

SEQ ID NO: 620669 - protein, 11 aa, Homo sapiens
  CDR3 for alpha chain variable domain of TCR clone 310335 (TRAV2, TRAJ13)
CASGGYQKVTF

SEQ ID NO: 620670 - protein, 13 aa, Homo sapiens
  CDR3 for beta chain variable domain of TCR clone 310335 (TRBV10-3, TRBJ1-2)
CAISERDSYGDTF

SEQ ID NO: 620671 - protein, 14 aa, Homo sapiens
  CDR3 for alpha chain variable domain of TCR clone 310336 (TRAV12-2, TRAJ13)
CAVKKTGGYQKVTF

SEQ ID NO: 620672 - protein, 17 aa, Homo sapiens
  CDR3 for beta chain variable domain of TCR clone 310336 (TRBV24-1, TRBJ2-1)
CATSDVSTSGTYNEQFV

SEQ ID NO: 620673 - protein, 19 aa, Homo sapiens
  CDR3 for alpha chain variable domain of TCR clone 310337 (TRAV26-1, TRAJ52)
CIVRAHRNAGGTSYGKQTF

SEQ ID NO: 620674 - protein, 15 aa, Homo sapiens
  CDR3 for beta chain variable domain of TCR clone 310337 (TRBV29-1, TRBJ2-1)
CSGRDRKSSYNEQFF

SEQ ID NO: 620675 - protein, 15 aa, Homo sapiens
  CDR3 for alpha chain variable domain of TCR clone 310338 (TRAV8-4, TRAJ37)
CAVSRGSGNTGKLIF

SEQ ID NO: 620676 - protein, 13 aa, Homo sapiens
  CDR3 for beta chain variable domain of TCR clone 310338 (TRBV7-9, TRBJ2-2)
CASSLDPTGELFF

SEQ ID NO: 620677 - protein, 15 aa, Homo sapiens
  CDR3 for alpha chain variable domain of TCR clone 310339 (TRAV12-3, TRAJ48)
CAMNAKNFGNEKLTF

SEQ ID NO: 620678 - protein, 14 aa, Homo sapiens
  CDR3 for beta chain variable domain of TCR clone 310339 (TRBV2, TRBJ1-6)
CASSESRNNSPIHF

SEQ ID NO: 620679 - protein, 13 aa, Homo sapiens
  CDR3 for alpha chain variable domain of TCR clone 310340 (TRAV3, TRAJ27)
CAVRPLGAGKSTF

SEQ ID NO: 620680 - protein, 13 aa, Homo sapiens
  CDR3 for beta chain variable domain of TCR clone 310340 (TRBV6-3, TRBJ1-4)
CASSPGPGEKLFF

SEQ ID NO: 620681 - protein, 11 aa, Homo sapiens
  CDR3 for alpha chain variable domain of TCR clone 310341 (TRAV12-1, TRAJ30)
CVVNGQDKIIF

SEQ ID NO: 620682 - protein, 12 aa, Homo sapiens
  CDR3 for beta chain variable domain of TCR clone 310341 (TRBV12-4, TRBJ2-1)
CASSLQGSEQFF

SEQ ID NO: 620683 - protein, 11 aa, Homo sapiens
  CDR3 for alpha chain variable domain of TCR clone 310342 (TRAV21, TRAJ11)
CAVNGYSTLAF

SEQ ID NO: 620684 - protein, 16 aa, Homo sapiens
  CDR3 for beta chain variable domain of TCR clone 310342 (TRBV19, TRBJ2-2)
CASRSPGTGATGELFF

SEQ ID NO: 620685 - protein, 18 aa, Homo sapiens
  CDR3 for alpha chain variable domain of TCR clone 310343 (TRAV21, TRAJ52)
CAVRPSPAGGTSYGTLTF

SEQ ID NO: 620686 - protein, 14 aa, Homo sapiens
  CDR3 for beta chain variable domain of TCR clone 310343 (TRBV7-2, TRBJ2-1)
CASSLEGGYNEQFF

SEQ ID NO: 620687 - protein, 12 aa, Homo sapiens
  CDR3 for alpha chain variable domain of TCR clone 310344 (TRAV4, TRAJ26)
CLVGDYGQNFVF

SEQ ID NO: 620688 - protein, 16 aa, Homo sapiens
  CDR3 for beta chain variable domain of TCR clone 310344 (TRBV5-1, TRBJ2-3)
CASSLGLAVYTDTQYF

SEQ ID NO: 620689 - protein, 17 aa, Homo sapiens
  CDR3 for alpha chain variable domain of TCR clone 310345 (TRAV3, TRAJ6)
CAVRDGPRAGGSYIPTF

SEQ ID NO: 620690 - protein, 12 aa, Homo sapiens
  CDR3 for beta chain variable domain of TCR clone 310345 (TRBV2, TRBJ1-1)
CATPSRGTEAFF

SEQ ID NO: 620691 - protein, 12 aa, Homo sapiens
  CDR3 for alpha chain variable domain of TCR clone 310346 (TRAV21, TRAJ11)
CAATSGYSTLTF

SEQ ID NO: 620692 - protein, 14 aa, Homo sapiens
  CDR3 for beta chain variable domain of TCR clone 310346 (TRBV20-1, TRBJ2-1)
CSAQIGGSANEQFF

SEQ ID NO: 620693 - protein, 14 aa, Homo sapiens
  CDR3 for alpha chain variable domain of TCR clone 310347 (TRAV17, TRAJ4)
CATAPLGGYNKLIF

SEQ ID NO: 620694 - protein, 13 aa, Homo sapiens
  CDR3 for beta chain variable domain of TCR clone 310347 (TRBV12-4, TRBJ1-3)
CASSLASGKTIYF

SEQ ID NO: 620695 - protein, 18 aa, Homo sapiens
  CDR3 for alpha chain variable domain of TCR clone 310348 (TRAV21, TRAJ52)
CAVRPSPAVGTSYGQLTF

SEQ ID NO: 620696 - protein, 17 aa, Homo sapiens
  CDR3 for beta chain variable domain of TCR clone 310348 (TRBV13, TRBJ2-3)
CASSLSRVAGGRNTQYF

SEQ ID NO: 620697 - protein, 13 aa, Homo sapiens
  CDR3 for alpha chain variable domain of TCR clone 310349 (TRAV38-2/DV8, TRAJ56)
CAYQSRANSKLTF

SEQ ID NO: 620698 - protein, 13 aa, Homo sapiens
  CDR3 for beta chain variable domain of TCR clone 310349 (TRBV20-1, TRBJ1-1)
CSARGGGNTEAFF

SEQ ID NO: 620699 - protein, 11 aa, Homo sapiens
  CDR3 for alpha chain variable domain of TCR clone 310350 (TRAV12-1, TRAJ21)
CVVSNFNKFYF

SEQ ID NO: 620700 - protein, 14 aa, Homo sapiens
  CDR3 for beta chain variable domain of TCR clone 310350 (TRBV7-2, TRBJ2-7)
CASRSQGAAYEQYF

SEQ ID NO: 620701 - protein, 15 aa, Homo sapiens
  CDR3 for alpha chain variable domain of TCR clone 310351 (TRAV3, TRAJ5)
CAVRYLDTVRRALTF

SEQ ID NO: 620702 - protein, 13 aa, Homo sapiens
  CDR3 for beta chain variable domain of TCR clone 310351 (TRBV12-4, TRBJ2-7)
CASSPTETYEQYF

SEQ ID NO: 620703 - protein, 20 aa, Homo sapiens
  CDR3 for alpha chain variable domain of TCR clone 310352 (TRAV2, TRAJ15)
ILQVREADAAVFSPRTALIF

SEQ ID NO: 620704 - protein, 13 aa, Homo sapiens
  CDR3 for beta chain variable domain of TCR clone 310352 (TRBV7-9, TRBJ1-2)
CASSLKQNYGYTF

SEQ ID NO: 620705 - protein, 14 aa, Homo sapiens
  CDR3 for alpha chain variable domain of TCR clone 310353 (TRAV12-3, TRAJ12)
CAMSEVDSSDNLIF

SEQ ID NO: 620706 - protein, 12 aa, Homo sapiens
  CDR3 for beta chain variable domain of TCR clone 310353 (TRBV18, TRBJ1-4)
CASSPSREKLFF

SEQ ID NO: 620707 - protein, 12 aa, Homo sapiens
  CDR3 for alpha chain variable domain of TCR clone 310354 (TRAV12-2, TRAJ10)
WGVTGGGTKLTF

SEQ ID NO: 620708 - protein, 15 aa, Homo sapiens
  CDR3 for beta chain variable domain of TCR clone 310354 (TRBV6-3, TRBJ2-7)
CASSSPGTVFYEQYF

SEQ ID NO: 620709 - protein, 15 aa, Homo sapiens
  CDR3 for alpha chain variable domain of TCR clone 310355 (TRAV21, TRAJ24)
CAARSSTGSWGKLPF

SEQ ID NO: 620710 - protein, 13 aa, Homo sapiens
  CDR3 for beta chain variable domain of TCR clone 310355 (TRBV10-3, TRBJ2-7)
CASKLAVNYEQYF

SEQ ID NO: 620711 - protein, 12 aa, Homo sapiens
  CDR3 for alpha chain variable domain of TCR clone 310356 (TRAV8-1, TRAJ31)
CAVINNNARLMF

SEQ ID NO: 620712 - protein, 15 aa, Homo sapiens
  CDR3 for beta chain variable domain of TCR clone 310356 (TRBV20-1, TRBJ2-7)
CSARDRVSGMDEQYF

SEQ ID NO: 620713 - protein, 14 aa, Homo sapiens
  CDR3 for alpha chain variable domain of TCR clone 310357 (TRAV17, TRAJ6)
CATPAMGGSYIPTF

SEQ ID NO: 620714 - protein, 17 aa, Homo sapiens
  CDR3 for beta chain variable domain of TCR clone 310357 (TRBV7-8, TRBJ2-1)
CASSPPTGTLAYNEQFF

SEQ ID NO: 620715 - protein, 14 aa, Homo sapiens
  CDR3 for alpha chain variable domain of TCR clone 310358 (TRAV23/DV6, TRAJ24)
CAASLSDSWGKLQF

SEQ ID NO: 620716 - protein, 16 aa, Homo sapiens
  CDR3 for beta chain variable domain of TCR clone 310358 (TRBV7-9, TRBJ2-6)
CASSVKGPLRANDLSF

SEQ ID NO: 620717 - protein, 13 aa, Homo sapiens
  CDR3 for alpha chain variable domain of TCR clone 310359 (TRAV8-3, TRAJ44)
CAVVPGTASKLTF

SEQ ID NO: 620718 - protein, 15 aa, Homo sapiens
  CDR3 for beta chain variable domain of TCR clone 310359 (TRBV6-3, TRBJ2-7)
CASSSPGTVFYEQYF

SEQ ID NO: 620719 - protein, 14 aa, Homo sapiens
  CDR3 for alpha chain variable domain of TCR clone 310360 (TRAV26-1, TRAJ34)
CIVRVAGNTDKLIF

SEQ ID NO: 620720 - protein, 16 aa, Homo sapiens
  CDR3 for beta chain variable domain of TCR clone 310360 (TRBV12-5, TRBJ2-5)
CASGPRTSGSQETQYF

SEQ ID NO: 620721 - protein, 15 aa, Homo sapiens
  CDR3 for alpha chain variable domain of TCR clone 310361 (TRAV27, TRAJ38)
CAARRNAGNNRKRIW

SEQ ID NO: 620722 - protein, 13 aa, Homo sapiens
  CDR3 for beta chain variable domain of TCR clone 310361 (TRBV19, TRBJ2-7)
CASSTSGSYEQYF

SEQ ID NO: 620723 - protein, 14 aa, Homo sapiens
  CDR3 for alpha chain variable domain of TCR clone 310362 (TRAV12-2, TRAJ17)
CAVLFKAAGNNLTF

SEQ ID NO: 620724 - protein, 17 aa, Homo sapiens
  CDR3 for beta chain variable domain of TCR clone 310362 (TRBV20-1, TRBJ2-2)
CSASGSGQCGLTGELFF

SEQ ID NO: 620725 - protein, 10 aa, Homo sapiens
  CDR3 for alpha chain variable domain of TCR clone 310363 (TRAV26-1, TRAJ22)
CIVSLNFFWF

SEQ ID NO: 620726 - protein, 13 aa, Homo sapiens
  CDR3 for beta chain variable domain of TCR clone 310363 (TRBV4-1, TRBJ2-2)
CASSQENTGELFF

SEQ ID NO: 620727 - protein, 13 aa, Homo sapiens
  CDR3 for alpha chain variable domain of TCR clone 310364 (TRAV13-1, TRAJ37)
CAAVSGNTGNLIF

SEQ ID NO: 620728 - protein, 17 aa, Homo sapiens
  CDR3 for beta chain variable domain of TCR clone 310364 (TRBV10-2, TRBJ1-6)
CASSENRGSSYNSPLHF

SEQ ID NO: 620729 - protein, 13 aa, Homo sapiens
  CDR3 for alpha chain variable domain of TCR clone 310365 (TRAV13-1, TRAJ33)
CAASRAGNYQLIW

SEQ ID NO: 620730 - protein, 15 aa, Homo sapiens
  CDR3 for beta chain variable domain of TCR clone 310365 (TRBV2, TRBJ2-7)
EDSAMYVCASSEQYF

SEQ ID NO: 620731 - protein, 15 aa, Homo sapiens
  CDR3 for alpha chain variable domain of TCR clone 310366 (TRAV26-1, TRAJ42)
CIVRVDGGSQGNLIF

SEQ ID NO: 620732 - protein, 14 aa, Homo sapiens
  CDR3 for beta chain variable domain of TCR clone 310366 (TRBV5-4, TRBJ1-1)
CASSLDSRRDEAFF

SEQ ID NO: 620733 - protein, 15 aa, Homo sapiens
  CDR3 for alpha chain variable domain of TCR clone 310367 (TRAV25, TRAJ53)
CAATGGGGSNYKLTF

SEQ ID NO: 620734 - protein, 17 aa, Homo sapiens
  CDR3 for beta chain variable domain of TCR clone 310367 (TRBV28, TRBJ1-1)
CASSLSGTGYENTEAFF

SEQ ID NO: 620735 - protein, 13 aa, Homo sapiens
  CDR3 for alpha chain variable domain of TCR clone 310368 (TRAV22, TRAJ29)
CAVGGSGNTPLVF

SEQ ID NO: 620736 - protein, 15 aa, Homo sapiens
  CDR3 for beta chain variable domain of TCR clone 310368 (TRBV7-9, TRBJ1-4)
CASSARTGGNEKLFF

SEQ ID NO: 620737 - protein, 11 aa, Homo sapiens
  CDR3 for alpha chain variable domain of TCR clone 310369 (TRAV20, TRAJ23)
CGCNQGGKLIF

SEQ ID NO: 620738 - protein, 16 aa, Homo sapiens
  CDR3 for beta chain variable domain of TCR clone 310369 (TRBV7-8, TRBJ2-5)
CASSFGGQPAQETQYF

SEQ ID NO: 620739 - protein, 14 aa, Homo sapiens
  CDR3 for alpha chain variable domain of TCR clone 310370 (TRAV1-2, TRAJ16)
GAVNRFSDGQKRRF

SEQ ID NO: 620740 - protein, 14 aa, Homo sapiens
  CDR3 for beta chain variable domain of TCR clone 310370 (TRBV6-1, TRBJ1-3)
CASVQGGGGNTIYF

SEQ ID NO: 620741 - protein, 15 aa, Homo sapiens
  CDR3 for alpha chain variable domain of TCR clone 310371 (TRAV12-2, TRAJ43)
CAFDMRFGAGTRLTV

SEQ ID NO: 620742 - protein, 13 aa, Homo sapiens
  CDR3 for beta chain variable domain of TCR clone 310371 (TRBV19, TRBJ1-2)
CASRPGTGVGYTF

SEQ ID NO: 620743 - protein, 16 aa, Homo sapiens
  CDR3 for alpha chain variable domain of TCR clone 310372 (TRAV16, TRAJ52)
CALSGVGGTSYGKLTF

SEQ ID NO: 620744 - protein, 17 aa, Homo sapiens
  CDR3 for beta chain variable domain of TCR clone 310372 (TRBV5-4, TRBJ2-1)
CASSSAGGRGPYNEQFF

SEQ ID NO: 620745 - protein, 14 aa, Homo sapiens
  CDR3 for alpha chain variable domain of TCR clone 310373 (TRAV12-3, TRAJ10)
SHLPLTGGGNKLTF

SEQ ID NO: 620746 - protein, 11 aa, Homo sapiens
  CDR3 for beta chain variable domain of TCR clone 310373 (TRBV11-2, TRBJ2-2)
CASSLPGELVF

SEQ ID NO: 620747 - protein, 16 aa, Homo sapiens
  CDR3 for alpha chain variable domain of TCR clone 310374 (TRAV3, TRAJ37)
CAVRPHGSGNTGKLIF

SEQ ID NO: 620748 - protein, 15 aa, Homo sapiens
  CDR3 for beta chain variable domain of TCR clone 310374 (TRBV27, TRBJ1-2)
CASSFRRQGGPGYTF

SEQ ID NO: 620749 - protein, 13 aa, Homo sapiens
  CDR3 for alpha chain variable domain of TCR clone 310375 (TRAV13-1, TRAJ33)
CAAWTDSNYQLIR

SEQ ID NO: 620750 - protein, 13 aa, Homo sapiens
  CDR3 for beta chain variable domain of TCR clone 310375 (TRBV20-1, TRBJ2-7)
CSARTSGNYEQYF

SEQ ID NO: 620751 - protein, 14 aa, Homo sapiens
  CDR3 for alpha chain variable domain of TCR clone 310376 (TRAV12-2, TRAJ40)
CAVKIPSGTYKYIF

SEQ ID NO: 620752 - protein, 13 aa, Homo sapiens
  CDR3 for beta chain variable domain of TCR clone 310376 (TRBV6-1, TRBJ2-1)
CASSPDRNNEQFF

SEQ ID NO: 620753 - protein, 13 aa, Homo sapiens
  CDR3 for alpha chain variable domain of TCR clone 310377 (TRAV26-1, TRAJ29)
CIVRRSGNTPLVF

SEQ ID NO: 620754 - protein, 15 aa, Homo sapiens
  CDR3 for beta chain variable domain of TCR clone 310377 (TRBV5-1, TRBJ2-5)
CASSLGLAEQETQYF

SEQ ID NO: 620755 - protein, 14 aa, Homo sapiens
  CDR3 for alpha chain variable domain of TCR clone 310378 (TRAV8-4, TRAJ43)
CALSDPRNNNDMRF

SEQ ID NO: 620756 - protein, 15 aa, Homo sapiens
  CDR3 for beta chain variable domain of TCR clone 310378 (TRBV4-2, TRBJ1-2)
CASSQRTGGRDGYTF

SEQ ID NO: 620757 - protein, 14 aa, Homo sapiens
  CDR3 for alpha chain variable domain of TCR clone 310379 (TRAV4, TRAJ43)
CLVGHMYNNNDMRF

SEQ ID NO: 620758 - protein, 21 aa, Homo sapiens
  CDR3 for beta chain variable domain of TCR clone 310379 (TRBV11-1, TRBJ2-1)
CASSARERLRPEGPSYNEQFF

SEQ ID NO: 620759 - protein, 12 aa, Homo sapiens
  CDR3 for alpha chain variable domain of TCR clone 310380 (TRAV21, TRAJ8)
CAVNTGFQKLVF

SEQ ID NO: 620760 - protein, 12 aa, Homo sapiens
  CDR3 for beta chain variable domain of TCR clone 310380 (TRBV6-3, TRBJ2-1)
CQQYDNYNEQFF

SEQ ID NO: 620761 - protein, 16 aa, Homo sapiens
  CDR3 for alpha chain variable domain of TCR clone 310381 (TRAV13-1, TRAJ48)
CAASIFGNLGNEKLTF

SEQ ID NO: 620762 - protein, 15 aa, Homo sapiens
  CDR3 for beta chain variable domain of TCR clone 310381 (TRBV10-2, TRBJ2-6)
CASSEQGTGANVLTF

SEQ ID NO: 620763 - protein, 16 aa, Homo sapiens
  CDR3 for alpha chain variable domain of TCR clone 310382 (TRAV12-2, TRAJ52)
CRLANAGGTSYGKLPF

SEQ ID NO: 620764 - protein, 13 aa, Homo sapiens
  CDR3 for beta chain variable domain of TCR clone 310382 (TRBV10-3, TRBJ2-7)
CASKLAVNYEQYF

SEQ ID NO: 620765 - protein, 17 aa, Homo sapiens
  CDR3 for alpha chain variable domain of TCR clone 310383 (TRAV3, TRAJ38)
CAVRDCLNAGNNRKLIW

SEQ ID NO: 620766 - protein, 14 aa, Homo sapiens
  CDR3 for beta chain variable domain of TCR clone 310383 (TRBV12-5, TRBJ2-5)
CASGSPTHQETQYF

SEQ ID NO: 620767 - protein, 16 aa, Homo sapiens
  CDR3 for alpha chain variable domain of TCR clone 310384 (TRAV14/DV4, TRAJ20)
CAMREGRSRDDYKLSF

SEQ ID NO: 620768 - protein, 13 aa, Homo sapiens
  CDR3 for beta chain variable domain of TCR clone 310384 (TRBV5-1, TRBJ1-1)
CASSADWDTEAFF

SEQ ID NO: 620769 - protein, 11 aa, Homo sapiens
  CDR3 for alpha chain variable domain of TCR clone 310385 (TRAV13-1, TRAJ39)
CAPHAGNVLTF

SEQ ID NO: 620770 - protein, 15 aa, Homo sapiens
  CDR3 for beta chain variable domain of TCR clone 310385 (TRBV6-3, TRBJ2-7)
CASSSPGTVFHEQYF

SEQ ID NO: 620771 - protein, 15 aa, Homo sapiens
  CDR3 for alpha chain variable domain of TCR clone 310386 (TRAV26-1, TRAJ28)
CIVRVAGAGSYQLTL

SEQ ID NO: 620772 - protein, 19 aa, Homo sapiens
  CDR3 for beta chain variable domain of TCR clone 310386 (TRBV7-3, TRBJ2-7)
CASSLTGVAGGWPSYEQYF

SEQ ID NO: 620773 - protein, 14 aa, Homo sapiens
  CDR3 for alpha chain variable domain of TCR clone 310387 (TRAV13-1, TRAJ5)
CAAHPDTGRRALTF

SEQ ID NO: 620774 - protein, 14 aa, Homo sapiens
  CDR3 for beta chain variable domain of TCR clone 310387 (TRBV25-1, TRBJ1-1)
CASPHLGGNTEAFF

SEQ ID NO: 620775 - protein, 14 aa, Homo sapiens
  CDR3 for alpha chain variable domain of TCR clone 310388 (TRAV13-1, TRAJ39)
CAASKNNAGNMPTF

SEQ ID NO: 620776 - protein, 14 aa, Homo sapiens
  CDR3 for beta chain variable domain of TCR clone 310388 (TRBV20-1, TRBJ2-7)
CSAPELAGVGEQYF

SEQ ID NO: 620777 - protein, 14 aa, Homo sapiens
  CDR3 for alpha chain variable domain of TCR clone 310389 (TRAV13-2, TRAJ17)
CAENSKAAGNKLTF

SEQ ID NO: 620778 - protein, 15 aa, Homo sapiens
  CDR3 for beta chain variable domain of TCR clone 310389 (TRBV27, TRBJ2-1)
CASSNWGGSSNEQFF

SEQ ID NO: 620779 - protein, 15 aa, Homo sapiens
  CDR3 for alpha chain variable domain of TCR clone 310390 (TRAV3, TRAJ22)
CAVRDRGGSARQLTF

SEQ ID NO: 620780 - protein, 14 aa, Homo sapiens
  CDR3 for beta chain variable domain of TCR clone 310390 (TRBV7-9, TRBJ2-7)
CASSRPGGPYEQYF

SEQ ID NO: 620781 - protein, 13 aa, Homo sapiens
  CDR3 for alpha chain variable domain of TCR clone 310391 (TRAV23/DV6, TRAJ34)
CAAIENNTDKLIF

SEQ ID NO: 620782 - protein, 17 aa, Homo sapiens
  CDR3 for beta chain variable domain of TCR clone 310391 (TRBV7-3, TRBJ2-3)
CASSLMKRMRGADTQYF

SEQ ID NO: 620783 - protein, 16 aa, Homo sapiens
  CDR3 for alpha chain variable domain of TCR clone 310392 (TRAV16, TRAJ4)
CALSRMFSGGYNKLIF

SEQ ID NO: 620784 - protein, 18 aa, Homo sapiens
  CDR3 for beta chain variable domain of TCR clone 310392 (TRBV18, TRBJ2-3)
CASSYTSGAAGGTDTQYF

SEQ ID NO: 620785 - protein, 13 aa, Homo sapiens
  CDR3 for alpha chain variable domain of TCR clone 310393 (TRAV13-2, TRAJ48)
CAEMDFGNEKLTF

SEQ ID NO: 620786 - protein, 15 aa, Homo sapiens
  CDR3 for beta chain variable domain of TCR clone 310393 (TRBV7-3, TRBJ2-1)
FASSQRGGALIEQFF

SEQ ID NO: 620787 - protein, 13 aa, Homo sapiens
  CDR3 for alpha chain variable domain of TCR clone 310394 (TRAV5, TRAJ13)
CAERPGGYQKVTF

SEQ ID NO: 620788 - protein, 15 aa, Homo sapiens
  CDR3 for beta chain variable domain of TCR clone 310394 (TRBV4-1, TRBJ1-4)
CASSDTGGTNEKLFF

SEQ ID NO: 620789 - protein, 16 aa, Homo sapiens
  CDR3 for alpha chain variable domain of TCR clone 310395 (TRAV26-1, TRAJ52)
CIVSNAGGTSYGKLTF

SEQ ID NO: 620790 - protein, 15 aa, Homo sapiens
  CDR3 for beta chain variable domain of TCR clone 310395 (TRBV7-3, TRBJ2-1)
CASSPTGGGEVEQLF

SEQ ID NO: 620791 - protein, 10 aa, Homo sapiens
  CDR3 for alpha chain variable domain of TCR clone 310396 (TRAV9-2, TRAJ49)
CALTGNQFYF

SEQ ID NO: 620792 - protein, 13 aa, Homo sapiens
  CDR3 for beta chain variable domain of TCR clone 310396 (TRBV12-5, TRBJ2-3)
CASGDRQSDTQYF

SEQ ID NO: 620793 - protein, 11 aa, Homo sapiens
  CDR3 for alpha chain variable domain of TCR clone 310397 (TRAV12-1, TRAJ21)
CVVNNFNKFYF

SEQ ID NO: 620794 - protein, 14 aa, Homo sapiens
  CDR3 for beta chain variable domain of TCR clone 310397 (TRBV6-5, TRBJ1-1)
CASNRQRSDTEAFF

SEQ ID NO: 620795 - protein, 14 aa, Homo sapiens
  CDR3 for alpha chain variable domain of TCR clone 310398 (TRAV12-3, TRAJ10)
SHLPLTGGGNKLTF

SEQ ID NO: 620796 - protein, 15 aa, Homo sapiens
  CDR3 for beta chain variable domain of TCR clone 310398 (TRBV5-1, TRBJ1-1)
CASSLAPRGNTEAFF

SEQ ID NO: 620797 - protein, 15 aa, Homo sapiens
  CDR3 for alpha chain variable domain of TCR clone 310399 (TRAV12-2, TRAJ43)
CAFDMRFGAGTRLTV

SEQ ID NO: 620798 - protein, 15 aa, Homo sapiens
  CDR3 for beta chain variable domain of TCR clone 310399 (TRBV3-1, TRBJ2-3)
CASSHSGGAGDTQYF

SEQ ID NO: 620799 - protein, 14 aa, Homo sapiens
  CDR3 for alpha chain variable domain of TCR clone 310400 (TRAV35, TRAJ33)
CAGTSLDSNYQLIW

SEQ ID NO: 620800 - protein, 15 aa, Homo sapiens
  CDR3 for beta chain variable domain of TCR clone 310400 (TRBV20-1, TRBJ2-7)
CSAESGTSGAYEQYF

SEQ ID NO: 620801 - protein, 13 aa, Homo sapiens
  CDR3 for alpha chain variable domain of TCR clone 310401 (TRAV12-3, TRAJ31)
CAMSANNNARLMF

SEQ ID NO: 620802 - protein, 16 aa, Homo sapiens
  CDR3 for beta chain variable domain of TCR clone 310401 (TRBV7-9, TRBJ1-2)
CASSLGFSSGDDGYTF

SEQ ID NO: 620803 - protein, 14 aa, Homo sapiens
  CDR3 for alpha chain variable domain of TCR clone 310402 (TRAV12-3, TRAJ12)
CVMSALDSSYKLIF

SEQ ID NO: 620804 - protein, 16 aa, Homo sapiens
  CDR3 for beta chain variable domain of TCR clone 310402 (TRBV7-9, TRBJ2-3)
CASSLQGNPGTDTQYF

SEQ ID NO: 620805 - protein, 15 aa, Homo sapiens
  CDR3 for alpha chain variable domain of TCR clone 310403 (TRAV3, TRAJ5)
CAVRDRKAGRRALTF

SEQ ID NO: 620806 - protein, 15 aa, Homo sapiens
  CDR3 for beta chain variable domain of TCR clone 310403 (TRBV7-8, TRBJ2-1)
RASSLADSLYNEQFF

SEQ ID NO: 620807 - protein, 15 aa, Homo sapiens
  CDR3 for alpha chain variable domain of TCR clone 310404 (TRAV13-1, TRAJ5)
CAASKADTGRRALTF

SEQ ID NO: 620808 - protein, 16 aa, Homo sapiens
  CDR3 for beta chain variable domain of TCR clone 310404 (TRBV7-2, TRBJ2-1)
CASSLGRTSGDIEQFF

SEQ ID NO: 620809 - protein, 14 aa, Homo sapiens
  CDR3 for alpha chain variable domain of TCR clone 310405 (TRAV12-2, TRAJ17)
CAVNIKAAGNKLLL

SEQ ID NO: 620810 - protein, 16 aa, Homo sapiens
  CDR3 for beta chain variable domain of TCR clone 310405 (TRBV20-1, TRBJ2-6)
CSASSQGYDGANVLTF

SEQ ID NO: 620811 - protein, 14 aa, Homo sapiens
  CDR3 for alpha chain variable domain of TCR clone 310406 (TRAV26-1, TRAJ45)
CIEVTGGGADGLTF

SEQ ID NO: 620812 - protein, 15 aa, Homo sapiens
  CDR3 for beta chain variable domain of TCR clone 310406 (TRBV7-8, TRBJ2-7)
CASSLERAGSYEQYF

SEQ ID NO: 620813 - protein, 12 aa, Homo sapiens
  CDR3 for alpha chain variable domain of TCR clone 310407 (TRAV13-2, TRAJ8)
CAPWLGFQKLVF

SEQ ID NO: 620814 - protein, 13 aa, Homo sapiens
  CDR3 for beta chain variable domain of TCR clone 310407 (TRBV12-4, TRBJ1-5)
CASSADRAEPQHF

SEQ ID NO: 620815 - protein, 13 aa, Homo sapiens
  CDR3 for alpha chain variable domain of TCR clone 310408 (TRAV2, TRAJ40)
CAVVTSGTYKYIF

SEQ ID NO: 620816 - protein, 15 aa, Homo sapiens
  CDR3 for beta chain variable domain of TCR clone 310408 (TRBV27, TRBJ2-1)
CASSSGGGSSNEQFF

SEQ ID NO: 620817 - protein, 12 aa, Homo sapiens
  CDR3 for alpha chain variable domain of TCR clone 310409 (TRAV8-3, TRAJ27)
CAVGAEAGKSTF

SEQ ID NO: 620818 - protein, 14 aa, Homo sapiens
  CDR3 for beta chain variable domain of TCR clone 310409 (TRBV2, TRBJ2-1)
CASRLIGGHDEQFF

SEQ ID NO: 620819 - protein, 13 aa, Homo sapiens
  CDR3 for alpha chain variable domain of TCR clone 310410 (TRAV4, TRAJ34)
CLVGDYNTDKLIF

SEQ ID NO: 620820 - protein, 23 aa, Homo sapiens
  CDR3 for beta chain variable domain of TCR clone 310410 (TRBV4-2, TRBJ2-3)
CASSQEPPRASSISGGRGDTQYF

SEQ ID NO: 620821 - protein, 13 aa, Homo sapiens
  CDR3 for alpha chain variable domain of TCR clone 310411 (TRAV16, TRAJ22)
SAMLAGSARQLTF

SEQ ID NO: 620822 - protein, 15 aa, Homo sapiens
  CDR3 for beta chain variable domain of TCR clone 310411 (TRBV6-6, TRBJ2-7)
CASSYSYGGSYEQYF

SEQ ID NO: 620823 - protein, 12 aa, Homo sapiens
  CDR3 for alpha chain variable domain of TCR clone 310412 (TRAV1-1, TRAJ24)
CAVRGSWGKFQF

SEQ ID NO: 620824 - protein, 13 aa, Homo sapiens
  CDR3 for beta chain variable domain of TCR clone 310412 (TRBV7-9, TRBJ1-4)
CASSLPGIEKLFF

SEQ ID NO: 620825 - protein, 16 aa, Homo sapiens
  CDR3 for alpha chain variable domain of TCR clone 310413 (TRAV27, TRAJ48)
TAAQPGDTGLYLPLTF

SEQ ID NO: 620826 - protein, 15 aa, Homo sapiens
  CDR3 for beta chain variable domain of TCR clone 310413 (TRBV5-5, TRBJ1-5)
CASSSTPGSNQPQHF

SEQ ID NO: 620827 - protein, 17 aa, Homo sapiens
  CDR3 for alpha chain variable domain of TCR clone 310414 (TRAV3, TRAJ12)
CAVSDGGRMDSSYKLIF

SEQ ID NO: 620828 - protein, 12 aa, Homo sapiens
  CDR3 for beta chain variable domain of TCR clone 310414 (TRBV11-2, TRBJ2-2)
CASSLGGGELFF

SEQ ID NO: 620829 - protein, 10 aa, Homo sapiens
  CDR3 for alpha chain variable domain of TCR clone 310415 (TRAV36/DV7, TRAJ49)
CALTGNQVYF

SEQ ID NO: 620830 - protein, 15 aa, Homo sapiens
  CDR3 for beta chain variable domain of TCR clone 310415 (TRBV11-2, TRBJ2-1)
CASSLGTSGLNEQFF

SEQ ID NO: 620831 - protein, 16 aa, Homo sapiens
  CDR3 for alpha chain variable domain of TCR clone 310416 (TRAV3, TRAJ10)
CAVRDMRAGGGNKLTF

SEQ ID NO: 620832 - protein, 17 aa, Homo sapiens
  CDR3 for beta chain variable domain of TCR clone 310416 (TRBV7-7, TRBJ1-1)
CASIGDRPNLGVTEAFF

SEQ ID NO: 620833 - protein, 11 aa, Homo sapiens
  CDR3 for alpha chain variable domain of TCR clone 310417 (TRAV2, TRAJ13)
CAARILGVTRK

SEQ ID NO: 620834 - protein, 14 aa, Homo sapiens
  CDR3 for beta chain variable domain of TCR clone 310417 (TRBV19, TRBJ2-1)
CASEVTGARNEQFF

SEQ ID NO: 620835 - protein, 11 aa, Homo sapiens
  CDR3 for alpha chain variable domain of TCR clone 310418 (TRAV35, TRAJ30)
CAPGGDDKIIF

SEQ ID NO: 620836 - protein, 15 aa, Homo sapiens
  CDR3 for beta chain variable domain of TCR clone 310418 (TRBV9, TRBJ1-6)
CASSVAGTGESPLHF

SEQ ID NO: 620837 - protein, 13 aa, Homo sapiens
  CDR3 for alpha chain variable domain of TCR clone 310419 (TRAV12-2, TRAJ52)
CAVSGTSYGKLTF

SEQ ID NO: 620838 - protein, 17 aa, Homo sapiens
  CDR3 for beta chain variable domain of TCR clone 310419 (TRBV11-2, TRBJ2-1)
CASSSYPPGVEYNEQFF

SEQ ID NO: 620839 - protein, 17 aa, Homo sapiens
  CDR3 for alpha chain variable domain of TCR clone 310420 (TRAV13-1, TRAJ28)
CAASAPYSGAGSYQLTF

SEQ ID NO: 620840 - protein, 16 aa, Homo sapiens
  CDR3 for beta chain variable domain of TCR clone 310420 (TRBV19, TRBJ2-2)
CASRSPGTGATGELFF

SEQ ID NO: 620841 - protein, 12 aa, Homo sapiens
  CDR3 for alpha chain variable domain of TCR clone 310421 (TRAV12-2, TRAJ21)
CAVRYNFNKFYF

SEQ ID NO: 620842 - protein, 14 aa, Homo sapiens
  CDR3 for beta chain variable domain of TCR clone 310421 (TRBV28, TRBJ2-1)
CASSYYTASNEQFF

SEQ ID NO: 620843 - protein, 17 aa, Homo sapiens
  CDR3 for alpha chain variable domain of TCR clone 310422 (TRAV3, TRAJ42)
CAVRDRDYVGSQGNLIF

SEQ ID NO: 620844 - protein, 15 aa, Homo sapiens
  CDR3 for beta chain variable domain of TCR clone 310422 (TRBV6-6, TRBJ2-7)
CASSYSDGGSYEQYF

SEQ ID NO: 620845 - protein, 13 aa, Homo sapiens
  CDR3 for alpha chain variable domain of TCR clone 310423 (TRAV26-1, TRAJ48)
CIVRVVGDEKLTF

SEQ ID NO: 620846 - protein, 19 aa, Homo sapiens
  CDR3 for beta chain variable domain of TCR clone 310423 (TRBV11-3, TRBJ2-2)
GASSTRPGAKTTNTGELFF

SEQ ID NO: 620847 - protein, 12 aa, Homo sapiens
  CDR3 for alpha chain variable domain of TCR clone 310424 (TRAV2, TRAJ33)
CAFMDSKYQLIW

SEQ ID NO: 620848 - protein, 16 aa, Homo sapiens
  CDR3 for beta chain variable domain of TCR clone 310424 (TRBV2, TRBJ2-7)
CASSEPWTGPSYEQYF

SEQ ID NO: 620849 - protein, 14 aa, Homo sapiens
  CDR3 for alpha chain variable domain of TCR clone 310425 (TRAV35, TRAJ53)
CWAASGGSNYKLTF

SEQ ID NO: 620850 - protein, 14 aa, Homo sapiens
  CDR3 for beta chain variable domain of TCR clone 310425 (TRBV27, TRBJ2-5)
CSSSSLKGWETQYF

SEQ ID NO: 620851 - protein, 15 aa, Homo sapiens
  CDR3 for alpha chain variable domain of TCR clone 310426 (TRAV27, TRAJ38)
CAARRNAGNNRKLIW

SEQ ID NO: 620852 - protein, 17 aa, Homo sapiens
  CDR3 for beta chain variable domain of TCR clone 310426 (TRBV7-2, TRBJ1-4)
CASSFKAGPTTNEKLFF

SEQ ID NO: 620853 - protein, 15 aa, Homo sapiens
  CDR3 for alpha chain variable domain of TCR clone 310427 (TRAV21, TRAJ40)
CAVRPQTSGTYKYIF

SEQ ID NO: 620854 - protein, 13 aa, Homo sapiens
  CDR3 for beta chain variable domain of TCR clone 310427 (TRBV7-2, TRBJ2-2)
CASSLVRAGELFF

SEQ ID NO: 620855 - protein, 15 aa, Homo sapiens
  CDR3 for alpha chain variable domain of TCR clone 310428 (TRAV1-2, TRAJ8)
CAVRDRNTGFQKLVF

SEQ ID NO: 620856 - protein, 13 aa, Homo sapiens
  CDR3 for beta chain variable domain of TCR clone 310428 (TRBV5-6, TRBJ2-1)
CASSLVESVEQFF

SEQ ID NO: 620857 - protein, 20 aa, Homo sapiens
  CDR3 for alpha chain variable domain of TCR clone 310429 (TRAV12-1, TRAJ42)
SSVIQPPTSVKGGSQGNLIF

SEQ ID NO: 620858 - protein, 18 aa, Homo sapiens
  CDR3 for beta chain variable domain of TCR clone 310429 (TRBV11-2, TRBJ2-3)
CASSLGGASRVAPNTQYF

SEQ ID NO: 620859 - protein, 13 aa, Homo sapiens
  CDR3 for alpha chain variable domain of TCR clone 310430 (TRAV3, TRAJ21)
CAVRAPDFNKFYF

SEQ ID NO: 620860 - protein, 13 aa, Homo sapiens
  CDR3 for beta chain variable domain of TCR clone 310430 (TRBV9, TRBJ2-1)
CASSPPGGNEQFF

SEQ ID NO: 620861 - protein, 13 aa, Homo sapiens
  CDR3 for alpha chain variable domain of TCR clone 310431 (TRAV29/DV5, TRAJ31)
YAASRNNNARLMF

SEQ ID NO: 620862 - protein, 12 aa, Homo sapiens
  CDR3 for beta chain variable domain of TCR clone 310431 (TRBV14, TRBJ1-1)
CASSQLKGLAFF

SEQ ID NO: 620863 - protein, 13 aa, Homo sapiens
  CDR3 for alpha chain variable domain of TCR clone 310432 (TRAV1-2, TRAJ31)
CAVRPNNNARLMF

SEQ ID NO: 620864 - protein, 17 aa, Homo sapiens
  CDR3 for beta chain variable domain of TCR clone 310432 (TRBV11-2, TRBJ2-1)
CASSLYPPGVEYNEQFF

SEQ ID NO: 620865 - protein, 13 aa, Homo sapiens
  CDR3 for alpha chain variable domain of TCR clone 310433 (TRAV2, TRAJ24)
TTVPLVRWGKLQF

SEQ ID NO: 620866 - protein, 17 aa, Homo sapiens
  CDR3 for beta chain variable domain of TCR clone 310433 (TRBV5-1, TRBJ2-1)
CASSTGTSGYSYNEQFF

SEQ ID NO: 620867 - protein, 13 aa, Homo sapiens
  CDR3 for alpha chain variable domain of TCR clone 310434 (TRAV21, TRAJ32)
CAVSGGATNKLIF

SEQ ID NO: 620868 - protein, 14 aa, Homo sapiens
  CDR3 for beta chain variable domain of TCR clone 310434 (TRBV23-1, TRBJ2-1)
CASSQWPAHNEQFF

SEQ ID NO: 620869 - protein, 15 aa, Homo sapiens
  CDR3 for alpha chain variable domain of TCR clone 310435 (TRAV12-3, TRAJ6)
CAMSAASGGSYIPTF

SEQ ID NO: 620870 - protein, 12 aa, Homo sapiens
  CDR3 for beta chain variable domain of TCR clone 310435 (TRBV7-3, TRBJ2-5)
CASSSPGGTQYF

SEQ ID NO: 620871 - protein, 11 aa, Homo sapiens
  CDR3 for alpha chain variable domain of TCR clone 310436 (TRAV12-2, TRAJ31)
CAVTRWARLMF

SEQ ID NO: 620872 - protein, 15 aa, Homo sapiens
  CDR3 for beta chain variable domain of TCR clone 310436 (TRBV19, TRBJ2-7)
CASSLGGGLVNEQYF

SEQ ID NO: 620873 - protein, 13 aa, Homo sapiens
  CDR3 for alpha chain variable domain of TCR clone 310437 (TRAV1-1, TRAJ30)
CAVRSDRDDKIIF

SEQ ID NO: 620874 - protein, 14 aa, Homo sapiens
  CDR3 for beta chain variable domain of TCR clone 310437 (TRBV28, TRBJ2-7)
CASTCYGRAHEQYF

SEQ ID NO: 620875 - protein, 13 aa, Homo sapiens
  CDR3 for alpha chain variable domain of TCR clone 310438 (TRAV38-1, TRAJ42)
CARGGGSQGNLIF

SEQ ID NO: 620876 - protein, 17 aa, Homo sapiens
  CDR3 for beta chain variable domain of TCR clone 310438 (TRBV20-1, TRBJ2-1)
CSARGPLAGVWDNEQFF

SEQ ID NO: 620877 - protein, 16 aa, Homo sapiens
  CDR3 for alpha chain variable domain of TCR clone 310439 (TRAV13-1, TRAJ48)
CSKYRESNFGNEKLTF

SEQ ID NO: 620878 - protein, 17 aa, Homo sapiens
  CDR3 for beta chain variable domain of TCR clone 310439 (TRBV28, TRBJ2-1)
CASSSARQALAYNEQFF

SEQ ID NO: 620879 - protein, 23 aa, Homo sapiens
  CDR3 for alpha chain variable domain of TCR clone 310440 (TRAV26-1, TRAJ38)
CIADNAGNNHIQNPAPAVYQLRD

SEQ ID NO: 620880 - protein, 13 aa, Homo sapiens
  CDR3 for beta chain variable domain of TCR clone 310440 (TRBV20-1, TRBJ1-1)
CSARGGGDTEAFF

SEQ ID NO: 620881 - protein, 14 aa, Homo sapiens
  CDR3 for alpha chain variable domain of TCR clone 310441 (TRAV12-2, TRAJ40)
CAVKIPSGTYKYIF

SEQ ID NO: 620882 - protein, 15 aa, Homo sapiens
  CDR3 for beta chain variable domain of TCR clone 310441 (TRBV29-1, TRBJ2-7)
CSVEFFDRGSYEQYF

SEQ ID NO: 620883 - protein, 15 aa, Homo sapiens
  CDR3 for alpha chain variable domain of TCR clone 310442 (TRAV17, TRAJ37)
CATDGGSSNTGKLIL

SEQ ID NO: 620884 - protein, 14 aa, Homo sapiens
  CDR3 for beta chain variable domain of TCR clone 310442 (TRBV5-7, TRBJ1-2)
CASSAVGVSGGYTF

SEQ ID NO: 620885 - protein, 13 aa, Homo sapiens
  CDR3 for alpha chain variable domain of TCR clone 310443 (TRAV12-1, TRAJ9)
CVVRNTGGFKTIC

SEQ ID NO: 620886 - protein, 14 aa, Homo sapiens
  CDR3 for beta chain variable domain of TCR clone 310443 (TRBV20-1, TRBJ2-1)
CSAQIGGPANEQFF

SEQ ID NO: 620887 - protein, 14 aa, Homo sapiens
  CDR3 for alpha chain variable domain of TCR clone 310444 (TRAV3, TRAJ40)
CAVRDCRGTYKYIF

SEQ ID NO: 620888 - protein, 15 aa, Homo sapiens
  CDR3 for beta chain variable domain of TCR clone 310444 (TRBV11-1, TRBJ1-3)
CASTDPRAFGNTMYF

SEQ ID NO: 620889 - protein, 13 aa, Homo sapiens
  CDR3 for alpha chain variable domain of TCR clone 310445 (TRAV20, TRAJ37)
CAGCSSNTGKLIF

SEQ ID NO: 620890 - protein, 15 aa, Homo sapiens
  CDR3 for beta chain variable domain of TCR clone 310445 (TRBV28, TRBJ2-5)
CASSPPWSYQETQYF

SEQ ID NO: 620891 - protein, 11 aa, Homo sapiens
  CDR3 for alpha chain variable domain of TCR clone 310446 (TRAV2, TRAJ21)
CSVFNFNKFYF

SEQ ID NO: 620892 - protein, 14 aa, Homo sapiens
  CDR3 for beta chain variable domain of TCR clone 310446 (TRBV15, TRBJ2-3)
CATRSGTSTDTQYF

SEQ ID NO: 620893 - protein, 17 aa, Homo sapiens
  CDR3 for alpha chain variable domain of TCR clone 310447 (TRAV12-2, TRAJ42)
CAVNILNYGGSQGNFIF

SEQ ID NO: 620894 - protein, 13 aa, Homo sapiens
  CDR3 for beta chain variable domain of TCR clone 310447 (TRBV3-1, TRBJ1-5)
CASSQDLDQPQHF

SEQ ID NO: 620895 - protein, 13 aa, Homo sapiens
  CDR3 for alpha chain variable domain of TCR clone 310448 (TRAV3, TRAJ21)
CAVGNFNKFYLDL

SEQ ID NO: 620896 - protein, 16 aa, Homo sapiens
  CDR3 for beta chain variable domain of TCR clone 310448 (TRBV20-1, TRBJ1-2)
CSASMGQGVANYGYTF

SEQ ID NO: 620897 - protein, 14 aa, Homo sapiens
  CDR3 for alpha chain variable domain of TCR clone 310449 (TRAV22, TRAJ6)
CAGVGPGGSYIPTF

SEQ ID NO: 620898 - protein, 16 aa, Homo sapiens
  CDR3 for beta chain variable domain of TCR clone 310449 (TRBV7-3, TRBJ2-2)
CASSLKRGTLSGELFF

SEQ ID NO: 620899 - protein, 14 aa, Homo sapiens
  CDR3 for alpha chain variable domain of TCR clone 310450 (TRAV16, TRAJ33)
CALSAMYSNYQLIW

SEQ ID NO: 620900 - protein, 12 aa, Homo sapiens
  CDR3 for beta chain variable domain of TCR clone 310450 (TRBV5-1, TRBJ1-2)
CAISQDTYGYTF

SEQ ID NO: 620901 - protein, 16 aa, Homo sapiens
  CDR3 for alpha chain variable domain of TCR clone 310451 (TRAV8-3, TRAJ28)
CAVGATLGLGVTNSLS

SEQ ID NO: 620902 - protein, 14 aa, Homo sapiens
  CDR3 for beta chain variable domain of TCR clone 310451 (TRBV7-2, TRBJ2-1)
CASSLGGGYNEQFF

SEQ ID NO: 620903 - protein, 13 aa, Homo sapiens
  CDR3 for alpha chain variable domain of TCR clone 310452 (TRAV2, TRAJ24)
CAVTTDSWGKLQF

SEQ ID NO: 620904 - protein, 14 aa, Homo sapiens
  CDR3 for beta chain variable domain of TCR clone 310452 (TRBV13, TRBJ2-5)
CTSSLGRGQETQYF

SEQ ID NO: 620905 - protein, 16 aa, Homo sapiens
  CDR3 for alpha chain variable domain of TCR clone 310453 (TRAV30, TRAJ24)
CGTEIVDADSWGKFQF

SEQ ID NO: 620906 - protein, 15 aa, Homo sapiens
  CDR3 for beta chain variable domain of TCR clone 310453 (TRBV3-1, TRBJ2-7)
CASSQGVGVKVEQYF

SEQ ID NO: 620907 - protein, 12 aa, Homo sapiens
  CDR3 for alpha chain variable domain of TCR clone 310454 (TRAV3, TRAJ13)
CAVGGGYQKVTF

SEQ ID NO: 620908 - protein, 13 aa, Homo sapiens
  CDR3 for beta chain variable domain of TCR clone 310454 (TRBV7-3, TRBJ1-1)
CASSQDWGAEAFF

SEQ ID NO: 620909 - protein, 14 aa, Homo sapiens
  CDR3 for alpha chain variable domain of TCR clone 310455 (TRAV8-3, TRAJ39)
CAVGANNAGNMLTF

SEQ ID NO: 620910 - protein, 15 aa, Homo sapiens
  CDR3 for beta chain variable domain of TCR clone 310455 (TRBV4-3, TRBJ1-1)
CASSQELGRGTVAFF

SEQ ID NO: 620911 - protein, 11 aa, Homo sapiens
  CDR3 for alpha chain variable domain of TCR clone 310456 (TRAV1-2, TRAJ40)
CAVPGTYKYIF

SEQ ID NO: 620912 - protein, 14 aa, Homo sapiens
  CDR3 for beta chain variable domain of TCR clone 310456 (TRBV5-7, TRBJ2-1)
CASIRDRSYNEQFF

SEQ ID NO: 620913 - protein, 16 aa, Homo sapiens
  CDR3 for alpha chain variable domain of TCR clone 310457 (TRAV23/DV6, )
CADIQNPDPAAYQLRD

SEQ ID NO: 620914 - protein, 13 aa, Homo sapiens
  CDR3 for beta chain variable domain of TCR clone 310457 (TRBV28, TRBJ2-7)
CASRSSGVYEQYF

SEQ ID NO: 620915 - protein, 16 aa, Homo sapiens
  CDR3 for alpha chain variable domain of TCR clone 310458 (TRAV26-2, TRAJ57)
CILRDVGSGVSEKRVF

SEQ ID NO: 620916 - protein, 13 aa, Homo sapiens
  CDR3 for beta chain variable domain of TCR clone 310458 (TRBV18, TRBJ2-3)
CASSPGVTDTQYF

SEQ ID NO: 620917 - protein, 16 aa, Homo sapiens
  CDR3 for alpha chain variable domain of TCR clone 310459 (TRAV21, TRAJ37)
CAVRTAGSSNTGILIF

SEQ ID NO: 620918 - protein, 13 aa, Homo sapiens
  CDR3 for beta chain variable domain of TCR clone 310459 (TRBV7-9, TRBJ2-5)
CASLPSGRETQYF

SEQ ID NO: 620919 - protein, 13 aa, Homo sapiens
  CDR3 for alpha chain variable domain of TCR clone 310460 (TRAV27, TRAJ41)
CAGEGNSGYALNF

SEQ ID NO: 620920 - protein, 14 aa, Homo sapiens
  CDR3 for beta chain variable domain of TCR clone 310460 (TRBV7-2, TRBJ1-1)
CPSSFLTGTTEAFF

SEQ ID NO: 620921 - protein, 14 aa, Homo sapiens
  CDR3 for alpha chain variable domain of TCR clone 310461 (TRAV12-1, TRAJ40)
CVVNRDSGTYKYSF

SEQ ID NO: 620922 - protein, 13 aa, Homo sapiens
  CDR3 for beta chain variable domain of TCR clone 310461 (TRBV4-2, TRBJ1-1)
CASSQAGNTEAFF

SEQ ID NO: 620923 - protein, 15 aa, Homo sapiens
  CDR3 for alpha chain variable domain of TCR clone 310462 (TRAV4, TRAJ42)
CLVGGYGGSQGNLIF

SEQ ID NO: 620924 - protein, 14 aa, Homo sapiens
  CDR3 for beta chain variable domain of TCR clone 310462 (TRBV4-2, TRBJ1-5)
CASSRDRGNQPQHF

SEQ ID NO: 620925 - protein, 11 aa, Homo sapiens
  CDR3 for alpha chain variable domain of TCR clone 310463 (TRAV2, TRAJ13)
CASGGYQKVTF

SEQ ID NO: 620926 - protein, 13 aa, Homo sapiens
  CDR3 for beta chain variable domain of TCR clone 310463 (TRBV19, TRBJ1-5)
CASSIGGNQPQHF

SEQ ID NO: 620927 - protein, 13 aa, Homo sapiens
  CDR3 for alpha chain variable domain of TCR clone 310464 (TRAV27, TRAJ41)
CAGEGNSGYALNF

SEQ ID NO: 620928 - protein, 18 aa, Homo sapiens
  CDR3 for beta chain variable domain of TCR clone 310464 (TRBV27, TRBJ2-3)
CASSLSGTSGRGTDTQYF

SEQ ID NO: 620929 - protein, 12 aa, Homo sapiens
  CDR3 for alpha chain variable domain of TCR clone 310465 (TRAV13-1, TRAJ21)
CAAKEGFNKFYF

SEQ ID NO: 620930 - protein, 13 aa, Homo sapiens
  CDR3 for beta chain variable domain of TCR clone 310465 (TRBV23-1, TRBJ2-5)
RSSFLRSQETQYF

SEQ ID NO: 620931 - protein, 15 aa, Homo sapiens
  CDR3 for alpha chain variable domain of TCR clone 310466 (TRAV17, TRAJ16)
CATALRFSDGHKLLF

SEQ ID NO: 620932 - protein, 15 aa, Homo sapiens
  CDR3 for beta chain variable domain of TCR clone 310466 (TRBV20-1, TRBJ1-1)
CSASRGVTGNTEALF

SEQ ID NO: 620933 - protein, 12 aa, Homo sapiens
  CDR3 for alpha chain variable domain of TCR clone 310467 (TRAV3, TRAJ20)
CAVRDPDYKLSF

SEQ ID NO: 620934 - protein, 15 aa, Homo sapiens
  CDR3 for beta chain variable domain of TCR clone 310467 (TRBV7-3, TRBJ2-1)
CASSLAGAGADEQFF

SEQ ID NO: 620935 - protein, 16 aa, Homo sapiens
  CDR3 for alpha chain variable domain of TCR clone 310468 (TRAV3, TRAJ37)
CAVRPHGSGNTGKLIF

SEQ ID NO: 620936 - protein, 15 aa, Homo sapiens
  CDR3 for beta chain variable domain of TCR clone 310468 (TRBV10-3, TRBJ2-1)
CAITFGGGTDNEQFF

SEQ ID NO: 620937 - protein, 18 aa, Homo sapiens
  CDR3 for alpha chain variable domain of TCR clone 310469 (TRAV21, TRAJ52)
CAVRPSPAGGTSYGNLTF

SEQ ID NO: 620938 - protein, 15 aa, Homo sapiens
  CDR3 for beta chain variable domain of TCR clone 310469 (TRBV20-1, TRBJ2-7)
CSARDRVSGMDEQYF

SEQ ID NO: 620939 - protein, 13 aa, Homo sapiens
  CDR3 for alpha chain variable domain of TCR clone 310470 (TRAV34, TRAJ22)
CGAGACSARQLTF

SEQ ID NO: 620940 - protein, 16 aa, Homo sapiens
  CDR3 for beta chain variable domain of TCR clone 310470 (TRBV7-3, TRBJ2-1)
CASSKPLAGGYNEQFF

SEQ ID NO: 620941 - protein, 16 aa, Homo sapiens
  CDR3 for alpha chain variable domain of TCR clone 310471 (TRAV4, TRAJ18)
CCVLLIGCSTLGRLYF

SEQ ID NO: 620942 - protein, 12 aa, Homo sapiens
  CDR3 for beta chain variable domain of TCR clone 310471 (TRBV6-3, TRBJ2-7)
CASSLTPYEQYF

SEQ ID NO: 620943 - protein, 14 aa, Homo sapiens
  CDR3 for alpha chain variable domain of TCR clone 310472 (TRAV2, TRAJ9)
CAVEDRSGGFRTIF

SEQ ID NO: 620944 - protein, 13 aa, Homo sapiens
  CDR3 for beta chain variable domain of TCR clone 310472 (TRBV3-1, TRBJ1-1)
CASSPGVITEAFF

SEQ ID NO: 620945 - protein, 16 aa, Homo sapiens
  CDR3 for alpha chain variable domain of TCR clone 310473 (TRAV13-1, TRAJ48)
CAASIFGNFGNEKLTF

SEQ ID NO: 620946 - protein, 14 aa, Homo sapiens
  CDR3 for beta chain variable domain of TCR clone 310473 (TRBV24-1, TRBJ1-1)
CATSIPRRDTEAFF

SEQ ID NO: 620947 - protein, 13 aa, Homo sapiens
  CDR3 for alpha chain variable domain of TCR clone 310474 (TRAV8-3, TRAJ36)
CAVGATGANNLFF

SEQ ID NO: 620948 - protein, 13 aa, Homo sapiens
  CDR3 for beta chain variable domain of TCR clone 310474 (TRBV6-3, TRBJ1-6)
CASSEGTGPPLHF

SEQ ID NO: 620949 - protein, 15 aa, Homo sapiens
  CDR3 for alpha chain variable domain of TCR clone 310475 (TRAV14/DV4, TRAJ10)
CAMRELTGGGKKLTF

SEQ ID NO: 620950 - protein, 15 aa, Homo sapiens
  CDR3 for beta chain variable domain of TCR clone 310475 (TRBV7-9, TRBJ1-4)
CASSRTGGFNEKLFF

SEQ ID NO: 620951 - protein, 12 aa, Homo sapiens
  CDR3 for alpha chain variable domain of TCR clone 310476 (TRAV10, TRAJ43)
CVVVRVGNDMRF

SEQ ID NO: 620952 - protein, 13 aa, Homo sapiens
  CDR3 for beta chain variable domain of TCR clone 310476 (TRBV7-7, TRBJ2-3)
CASSLSRADTQYF

SEQ ID NO: 620953 - protein, 14 aa, Homo sapiens
  CDR3 for alpha chain variable domain of TCR clone 310477 (TRAV12-2, TRAJ13)
CAVKKPGGYQKVTF

SEQ ID NO: 620954 - protein, 12 aa, Homo sapiens
  CDR3 for beta chain variable domain of TCR clone 310477 (TRBV12-4, TRBJ1-2)
CASSFIWLHLRF

SEQ ID NO: 620955 - protein, 14 aa, Homo sapiens
  CDR3 for alpha chain variable domain of TCR clone 310478 (TRAV17, TRAJ6)
CATNPAGGSNIPTF

SEQ ID NO: 620956 - protein, 15 aa, Homo sapiens
  CDR3 for beta chain variable domain of TCR clone 310478 (TRBV2, TRBJ2-5)
CASSGTVAAGETQYF

SEQ ID NO: 620957 - protein, 15 aa, Homo sapiens
  CDR3 for alpha chain variable domain of TCR clone 310479 (TRAV26-1, TRAJ44)
CIARVPFGTASKLTF

SEQ ID NO: 620958 - protein, 16 aa, Homo sapiens
  CDR3 for beta chain variable domain of TCR clone 310479 (TRBV7-9, TRBJ2-1)
CASSDVAGGSYNEQFF

SEQ ID NO: 620959 - protein, 16 aa, Homo sapiens
  CDR3 for alpha chain variable domain of TCR clone 310480 (TRAV4, TRAJ22)
CLVGDLYSGSARQLTF

SEQ ID NO: 620960 - protein, 16 aa, Homo sapiens
  CDR3 for beta chain variable domain of TCR clone 310480 (TRBV27, TRBJ2-2)
CASSFRGLVRTGELFF

SEQ ID NO: 620961 - protein, 15 aa, Homo sapiens
  CDR3 for alpha chain variable domain of TCR clone 310481 (TRAV8-3, TRAJ11)
CAVGLLNSGYSTRTI

SEQ ID NO: 620962 - protein, 16 aa, Homo sapiens
  CDR3 for beta chain variable domain of TCR clone 310481 (TRBV7-9, TRBJ1-2)
CASSLGFSSGEDGYTF

SEQ ID NO: 620963 - protein, 14 aa, Homo sapiens
  CDR3 for alpha chain variable domain of TCR clone 310482 (TRAV1-2, TRAJ8)
CAVREDTGFQKLVF

SEQ ID NO: 620964 - protein, 13 aa, Homo sapiens
  CDR3 for beta chain variable domain of TCR clone 310482 (TRBV29-1, TRBJ1-1)
CSVGDSRNTAAFF

SEQ ID NO: 620965 - protein, 16 aa, Homo sapiens
  CDR3 for alpha chain variable domain of TCR clone 310483 (TRAV26-2, TRAJ45)
CTTAAPIGGGADGLTF

SEQ ID NO: 620966 - protein, 20 aa, Homo sapiens
  CDR3 for beta chain variable domain of TCR clone 310483 (TRBV28, TRBJ2-1)
CASTPIGRSPGLAGGNEQFF

SEQ ID NO: 620967 - protein, 13 aa, Homo sapiens
  CDR3 for alpha chain variable domain of TCR clone 310484 (TRAV16, TRAJ27)
CALRRTNAGKSTF

SEQ ID NO: 620968 - protein, 15 aa, Homo sapiens
  CDR3 for beta chain variable domain of TCR clone 310484 (TRBV18, TRBJ2-1)
CASSPPSASYSEQFF

SEQ ID NO: 620969 - protein, 15 aa, Homo sapiens
  CDR3 for alpha chain variable domain of TCR clone 310485 (TRAV8-4, TRAJ37)
CAVTYGSSNTGKLIF

SEQ ID NO: 620970 - protein, 15 aa, Homo sapiens
  CDR3 for beta chain variable domain of TCR clone 310485 (TRBV11-3, TRBJ2-3)
CASLKDGREGDTQYF

SEQ ID NO: 620971 - protein, 15 aa, Homo sapiens
  CDR3 for alpha chain variable domain of TCR clone 310486 (TRAV17, TRAJ57)
CATGPSQGGSEKLVF

SEQ ID NO: 620972 - protein, 16 aa, Homo sapiens
  CDR3 for beta chain variable domain of TCR clone 310486 (TRBV27, TRBJ2-2)
CASSSSGVSNTGELFF

SEQ ID NO: 620973 - protein, 12 aa, Homo sapiens
  CDR3 for alpha chain variable domain of TCR clone 310487 (TRAV21, TRAJ31)
CAVWGNNARLMF

SEQ ID NO: 620974 - protein, 16 aa, Homo sapiens
  CDR3 for beta chain variable domain of TCR clone 310487 (TRBV27, TRBJ2-5)
CASSYGPGGQKESQYF

SEQ ID NO: 620975 - protein, 15 aa, Homo sapiens
  CDR3 for alpha chain variable domain of TCR clone 310488 (TRAV16, TRAJ12)
CSKWPLRDSSYKLIF

SEQ ID NO: 620976 - protein, 13 aa, Homo sapiens
  CDR3 for beta chain variable domain of TCR clone 310488 (TRBV7-2, TRBJ2-5)
CASSQTSVETQYF

SEQ ID NO: 620977 - protein, 14 aa, Homo sapiens
  CDR3 for alpha chain variable domain of TCR clone 310489 (TRAV8-4, TRAJ9)
CAVRINTGGFKTIF

SEQ ID NO: 620978 - protein, 14 aa, Homo sapiens
  CDR3 for beta chain variable domain of TCR clone 310489 (TRBV5-1, TRBJ1-1)
CASSLQGASTDAFF

SEQ ID NO: 620979 - protein, 14 aa, Homo sapiens
  CDR3 for alpha chain variable domain of TCR clone 310490 (TRAV35, TRAJ50)
CAGHRKTSYDKVIF

SEQ ID NO: 620980 - protein, 15 aa, Homo sapiens
  CDR3 for beta chain variable domain of TCR clone 310490 (TRBV5-5, TRBJ1-5)
CASSSTPGSNQPQHF

SEQ ID NO: 620981 - protein, 11 aa, Homo sapiens
  CDR3 for alpha chain variable domain of TCR clone 310491 (TRAV13-2, TRAJ36)
CAETGANNLFF

SEQ ID NO: 620982 - protein, 13 aa, Homo sapiens
  CDR3 for beta chain variable domain of TCR clone 310491 (TRBV7-9, TRBJ2-4)
CATEGLAGSIQYF

SEQ ID NO: 620983 - protein, 15 aa, Homo sapiens
  CDR3 for alpha chain variable domain of TCR clone 310492 (TRAV26-1, TRAJ17)
CIVRVVKAAGNKLTF

SEQ ID NO: 620984 - protein, 14 aa, Homo sapiens
  CDR3 for beta chain variable domain of TCR clone 310492 (TRBV4-2, TRBJ2-1)
CASGLDRAYNEQFF

SEQ ID NO: 620985 - protein, 14 aa, Homo sapiens
  CDR3 for alpha chain variable domain of TCR clone 310493 (TRAV12-2, TRAJ53)
SAVKGGGSNYKLTF

SEQ ID NO: 620986 - protein, 18 aa, Homo sapiens
  CDR3 for beta chain variable domain of TCR clone 310493 (TRBV23-1, TRBJ2-3)
CASSQFHTGGISTDTQYF

SEQ ID NO: 620987 - protein, 17 aa, Homo sapiens
  CDR3 for alpha chain variable domain of TCR clone 310494 (TRAV3, TRAJ6)
CAVSRRTDTGGSYIPTL

SEQ ID NO: 620988 - protein, 18 aa, Homo sapiens
  CDR3 for beta chain variable domain of TCR clone 310494 (TRBV7-2, TRBJ2-3)
CASSLETSRGRKADTQYF

SEQ ID NO: 620989 - protein, 16 aa, Homo sapiens
  CDR3 for alpha chain variable domain of TCR clone 310495 (TRAV30, TRAJ24)
CGTEIVDDDSWGKFQF

SEQ ID NO: 620990 - protein, 14 aa, Homo sapiens
  CDR3 for beta chain variable domain of TCR clone 310495 (TRBV12-5, TRBJ2-5)
CASGSRAHQETQYF

SEQ ID NO: 620991 - protein, 13 aa, Homo sapiens
  CDR3 for alpha chain variable domain of TCR clone 310496 (TRAV1-1, TRAJ9)
CAAKNTGGFKTIF

SEQ ID NO: 620992 - protein, 15 aa, Homo sapiens
  CDR3 for beta chain variable domain of TCR clone 310496 (TRBV5-1, TRBJ2-1)
GASSPPRAPYNEQFF

SEQ ID NO: 620993 - protein, 14 aa, Homo sapiens
  CDR3 for alpha chain variable domain of TCR clone 310497 (TRAV13-2, TRAJ11)
CRESSYSGYSTLTF

SEQ ID NO: 620994 - protein, 19 aa, Homo sapiens
  CDR3 for beta chain variable domain of TCR clone 310497 (TRBV4-3, TRBJ2-7)
CASSQEFIGWQVTPYEQYF

SEQ ID NO: 620995 - protein, 14 aa, Homo sapiens
  CDR3 for alpha chain variable domain of TCR clone 310498 (TRAV21, TRAJ38)
CAVANAGNNRKLIW

SEQ ID NO: 620996 - protein, 16 aa, Homo sapiens
  CDR3 for beta chain variable domain of TCR clone 310498 (TRBV5-4, TRBJ2-1)
CASSLALAGAYNEQSF

SEQ ID NO: 620997 - protein, 14 aa, Homo sapiens
  CDR3 for alpha chain variable domain of TCR clone 310499 (TRAV12-2, TRAJ17)
CAVLFKAAGNKLTF

SEQ ID NO: 620998 - protein, 10 aa, Homo sapiens
  CDR3 for beta chain variable domain of TCR clone 310499 (TRBV19, TRBJ1-2)
CASSEDRSMA

SEQ ID NO: 620999 - protein, 15 aa, Homo sapiens
  CDR3 for alpha chain variable domain of TCR clone 310500 (TRAV25, TRAJ53)
CAATGGGRSNYKLTF

SEQ ID NO: 621000 - protein, 19 aa, Homo sapiens
  CDR3 for beta chain variable domain of TCR clone 310500 (TRBV7-2, TRBJ2-3)
CASSFLSRNWGGGTDTQYF

SEQ ID NO: 621001 - protein, 15 aa, Homo sapiens
  CDR3 for alpha chain variable domain of TCR clone 310501 (TRAV23/DV6, TRAJ45)
CAAGSAGGGPDGLTF

SEQ ID NO: 621002 - protein, 13 aa, Homo sapiens
  CDR3 for beta chain variable domain of TCR clone 310501 (TRBV3-1, TRBJ2-2)
CASRQTNTGELFF

SEQ ID NO: 621003 - protein, 14 aa, Homo sapiens
  CDR3 for alpha chain variable domain of TCR clone 310502 (TRAV1-2, TRAJ8)
CAVREDTGFQKLVF

SEQ ID NO: 621004 - protein, 11 aa, Homo sapiens
  CDR3 for beta chain variable domain of TCR clone 310502 (TRBV6-3, TRBJ2-3)
CATGQADTQYF

SEQ ID NO: 621005 - protein, 14 aa, Homo sapiens
  CDR3 for alpha chain variable domain of TCR clone 310503 (TRAV9-2, TRAJ38)
CALRGAGNNRKPIW

SEQ ID NO: 621006 - protein, 14 aa, Homo sapiens
  CDR3 for beta chain variable domain of TCR clone 310503 (TRBV13, TRBJ2-2)
CASSFQGGAGELFF

SEQ ID NO: 621007 - protein, 12 aa, Homo sapiens
  CDR3 for alpha chain variable domain of TCR clone 310504 (TRAV12-3, TRAJ17)
CAMTLTGNGLTF

SEQ ID NO: 621008 - protein, 15 aa, Homo sapiens
  CDR3 for beta chain variable domain of TCR clone 310504 (TRBV20-1, TRBJ2-7)
CSARDRVSGMDEQYF

SEQ ID NO: 621009 - protein, 16 aa, Homo sapiens
  CDR3 for alpha chain variable domain of TCR clone 310505 (TRAV3, TRAJ21)
CAVRDIERGNFNKFYF

SEQ ID NO: 621010 - protein, 16 aa, Homo sapiens
  CDR3 for beta chain variable domain of TCR clone 310505 (TRBV28, TRBJ1-2)
CASSLYGQEANYGYTF

SEQ ID NO: 621011 - protein, 17 aa, Homo sapiens
  CDR3 for alpha chain variable domain of TCR clone 310506 (TRAV3, TRAJ12)
CAVRDGGGMDSSYKLIF

SEQ ID NO: 621012 - protein, 12 aa, Homo sapiens
  CDR3 for beta chain variable domain of TCR clone 310506 (TRBV11-2, TRBJ2-2)
CASSLGGGELFF

SEQ ID NO: 621013 - protein, 15 aa, Homo sapiens
  CDR3 for alpha chain variable domain of TCR clone 310507 (TRAV3, TRAJ22)
CAVRDRGGSSRQLTF

SEQ ID NO: 621014 - protein, 20 aa, Homo sapiens
  CDR3 for beta chain variable domain of TCR clone 310507 (TRBV11-2, TRBJ1-6)
CASSLVFATGGSVHPSTLGT

SEQ ID NO: 621015 - protein, 16 aa, Homo sapiens
  CDR3 for alpha chain variable domain of TCR clone 310508 (TRAV21, TRAJ52)
CAVTNAGGTSYGKLPF

SEQ ID NO: 621016 - protein, 14 aa, Homo sapiens
  CDR3 for beta chain variable domain of TCR clone 310508 (TRBV7-8, TRBJ2-7)
CASSPRDRVYEQYF

SEQ ID NO: 621017 - protein, 17 aa, Homo sapiens
  CDR3 for alpha chain variable domain of TCR clone 310509 (TRAV2, TRAJ22)
ILQVREADAAEQRQLTF

SEQ ID NO: 621018 - protein, 16 aa, Homo sapiens
  CDR3 for beta chain variable domain of TCR clone 310509 (TRBV2, TRBJ2-5)
CASSETQGVGEEAQYF

SEQ ID NO: 621019 - protein, 14 aa, Homo sapiens
  CDR3 for alpha chain variable domain of TCR clone 310510 (TRAV12-3, TRAJ10)
SRLPLTGGGNKLTF

SEQ ID NO: 621020 - protein, 13 aa, Homo sapiens
  CDR3 for beta chain variable domain of TCR clone 310510 (TRBV7-6, TRBJ2-3)
CASSLAVGDTQYF

SEQ ID NO: 621021 - protein, 12 aa, Homo sapiens
  CDR3 for alpha chain variable domain of TCR clone 310511 (TRAV12-1, TRAJ40)
CVVSSGTYKYIF

SEQ ID NO: 621022 - protein, 13 aa, Homo sapiens
  CDR3 for beta chain variable domain of TCR clone 310511 (TRBV2, TRBJ2-2)
CASRAWRTGELFF

SEQ ID NO: 621023 - protein, 14 aa, Homo sapiens
  CDR3 for alpha chain variable domain of TCR clone 310512 (TRAV3, TRAJ21)
CAVRDAYNFNKFYF

SEQ ID NO: 621024 - protein, 15 aa, Homo sapiens
  CDR3 for beta chain variable domain of TCR clone 310512 (TRBV28, TRBJ2-7)
CASSPGGRGFYEQYF

SEQ ID NO: 621025 - protein, 13 aa, Homo sapiens
  CDR3 for alpha chain variable domain of TCR clone 310513 (TRAV26-1, TRAJ49)
CIVSSVTGNQFYF

SEQ ID NO: 621026 - protein, 14 aa, Homo sapiens
  CDR3 for beta chain variable domain of TCR clone 310513 (TRBV19, TRBJ1-1)
CASKSTGFGTEAFF

SEQ ID NO: 621027 - protein, 16 aa, Homo sapiens
  CDR3 for alpha chain variable domain of TCR clone 310514 (TRAV30, TRAJ24)
CGTEIVDADSWGKFQF

SEQ ID NO: 621028 - protein, 18 aa, Homo sapiens
  CDR3 for beta chain variable domain of TCR clone 310514 (TRBV7-9, TRBJ2-7)
CASSLTTSGSRTWYEQYC

SEQ ID NO: 621029 - protein, 13 aa, Homo sapiens
  CDR3 for alpha chain variable domain of TCR clone 310515 (TRAV21, TRAJ52)
YAVRPSPAGGTSY

SEQ ID NO: 621030 - protein, 15 aa, Homo sapiens
  CDR3 for beta chain variable domain of TCR clone 310515 (TRBV5-1, TRBJ2-1)
CASSLVANSYNEQFF

SEQ ID NO: 621031 - protein, 15 aa, Homo sapiens
  CDR3 for alpha chain variable domain of TCR clone 310516 (TRAV3, TRAJ47)
CAVRDIGEYGNKLGF

SEQ ID NO: 621032 - protein, 15 aa, Homo sapiens
  CDR3 for beta chain variable domain of TCR clone 310516 (TRBV20-1, TRBJ2-7)
CSARVPAAYFYEQYF

SEQ ID NO: 621033 - protein, 14 aa, Homo sapiens
  CDR3 for alpha chain variable domain of TCR clone 310517 (TRAV26-1, TRAJ22)
CIVRVYGSARQLTF

SEQ ID NO: 621034 - protein, 16 aa, Homo sapiens
  CDR3 for beta chain variable domain of TCR clone 310517 (TRBV7-3, TRBJ2-3)
CASSPGGLALWRYAVF

SEQ ID NO: 621035 - protein, 12 aa, Homo sapiens
  CDR3 for alpha chain variable domain of TCR clone 310518 (TRAV12-2, TRAJ47)
CAVAEYGNKLVF

SEQ ID NO: 621036 - protein, 14 aa, Homo sapiens
  CDR3 for beta chain variable domain of TCR clone 310518 (TRBV20-1, TRBJ1-1)
CSAMGGTDNTEAFF

SEQ ID NO: 621037 - protein, 14 aa, Homo sapiens
  CDR3 for alpha chain variable domain of TCR clone 310519 (TRAV12-2, TRAJ13)
CAVKKTGGYQKVTF

SEQ ID NO: 621038 - protein, 15 aa, Homo sapiens
  CDR3 for beta chain variable domain of TCR clone 310519 (TRBV7-3, TRBJ2-2)
CASSLEVLPTGELFF

SEQ ID NO: 621039 - protein, 13 aa, Homo sapiens
  CDR3 for alpha chain variable domain of TCR clone 310520 (TRAV12-1, TRAJ6)
CVVFPGGSYIPTF

SEQ ID NO: 621040 - protein, 12 aa, Homo sapiens
  CDR3 for beta chain variable domain of TCR clone 310520 (TRBV11-2, TRBJ2-2)
CASSLGGGELFF

SEQ ID NO: 621041 - protein, 15 aa, Homo sapiens
  CDR3 for alpha chain variable domain of TCR clone 310521 (TRAV8-3, TRAJ45)
CASSYSGGGADGCTF

SEQ ID NO: 621042 - protein, 13 aa, Homo sapiens
  CDR3 for beta chain variable domain of TCR clone 310521 (TRBV10-3, TRBJ2-7)
CASKLAVNYEQYF

SEQ ID NO: 621043 - protein, 11 aa, Homo sapiens
  CDR3 for alpha chain variable domain of TCR clone 310522 (TRAV2, TRAJ13)
CASGGYQKVTF

SEQ ID NO: 621044 - protein, 16 aa, Homo sapiens
  CDR3 for beta chain variable domain of TCR clone 310522 (TRBV12-4, TRBJ1-4)
CASSSNRETTNEKLFF

SEQ ID NO: 621045 - protein, 12 aa, Homo sapiens
  CDR3 for alpha chain variable domain of TCR clone 310523 (TRAV13-1, TRAJ49)
CAASIRSNQFYF

SEQ ID NO: 621046 - protein, 11 aa, Homo sapiens
  CDR3 for beta chain variable domain of TCR clone 310523 (TRBV12-4, TRBJ2-3)
CASTATDTQYF

SEQ ID NO: 621047 - protein, 13 aa, Homo sapiens
  CDR3 for alpha chain variable domain of TCR clone 310524 (TRAV8-3, TRAJ4)
CVFYSGGYNKLIF

SEQ ID NO: 621048 - protein, 14 aa, Homo sapiens
  CDR3 for beta chain variable domain of TCR clone 310524 (TRBV7-9, TRBJ2-3)
CASSLEDGTDTQYF

SEQ ID NO: 621049 - protein, 14 aa, Homo sapiens
  CDR3 for alpha chain variable domain of TCR clone 310525 (TRAV1-2, TRAJ16)
CAVNRCSDGQKLLF

SEQ ID NO: 621050 - protein, 12 aa, Homo sapiens
  CDR3 for beta chain variable domain of TCR clone 310525 (TRBV19, TRBJ1-5)
CASSIAQQPQHF

SEQ ID NO: 621051 - protein, 14 aa, Homo sapiens
  CDR3 for alpha chain variable domain of TCR clone 310526 (TRAV13-1, TRAJ45)
VTVPEGGGADGLTF

SEQ ID NO: 621052 - protein, 14 aa, Homo sapiens
  CDR3 for beta chain variable domain of TCR clone 310526 (TRBV27, TRBJ1-1)
CASSPQGKRAEAFF

SEQ ID NO: 621053 - protein, 17 aa, Homo sapiens
  CDR3 for alpha chain variable domain of TCR clone 310527 (TRAV12-3, )
CAMNDDHSDKSVCRLAI

SEQ ID NO: 621054 - protein, 15 aa, Homo sapiens
  CDR3 for beta chain variable domain of TCR clone 310527 (TRBV7-9, TRBJ1-5)
CASSQGHQPNQPQHF

SEQ ID NO: 621055 - protein, 18 aa, Homo sapiens
  CDR3 for alpha chain variable domain of TCR clone 310528 (TRAV13-1, TRAJ52)
CAAKNPNAGGTSYGKLTF

SEQ ID NO: 621056 - protein, 15 aa, Homo sapiens
  CDR3 for beta chain variable domain of TCR clone 310528 (TRBV28, TRBJ2-5)
CACSSGRTIQETQYF

SEQ ID NO: 621057 - protein, 11 aa, Homo sapiens
  CDR3 for alpha chain variable domain of TCR clone 310529 (TRAV17, TRAJ31)
CATSNNARLMI

SEQ ID NO: 621058 - protein, 14 aa, Homo sapiens
  CDR3 for beta chain variable domain of TCR clone 310529 (TRBV18, TRBJ2-7)
CASSPRGGAYEQYF

SEQ ID NO: 621059 - protein, 13 aa, Homo sapiens
  CDR3 for alpha chain variable domain of TCR clone 310530 (TRAV8-3, TRAJ28)
CAVGAVRSYQITF

SEQ ID NO: 621060 - protein, 15 aa, Homo sapiens
  CDR3 for beta chain variable domain of TCR clone 310530 (TRBV7-9, TRBJ1-5)
CASSQGHQPNQPQHF

SEQ ID NO: 621061 - protein, 14 aa, Homo sapiens
  CDR3 for alpha chain variable domain of TCR clone 310531 (TRAV13-2, TRAJ41)
CAERPDWAGSALNF

SEQ ID NO: 621062 - protein, 16 aa, Homo sapiens
  CDR3 for beta chain variable domain of TCR clone 310531 (TRBV27, TRBJ2-5)
CASSYGPGGQKETQYF

SEQ ID NO: 621063 - protein, 12 aa, Homo sapiens
  CDR3 for alpha chain variable domain of TCR clone 310532 (TRAV35, TRAJ30)
CAGLNRDDKIIF

SEQ ID NO: 621064 - protein, 15 aa, Homo sapiens
  CDR3 for beta chain variable domain of TCR clone 310532 (TRBV9, TRBJ1-6)
CASSVAGTGDPPLHF

SEQ ID NO: 621065 - protein, 14 aa, Homo sapiens
  CDR3 for alpha chain variable domain of TCR clone 310533 (TRAV35, TRAJ10)
CAGILTGGGNKLTF

SEQ ID NO: 621066 - protein, 16 aa, Homo sapiens
  CDR3 for beta chain variable domain of TCR clone 310533 (TRBV7-9, TRBJ2-3)
CASSPWREVGTDTQYF

SEQ ID NO: 621067 - protein, 13 aa, Homo sapiens
  CDR3 for alpha chain variable domain of TCR clone 310534 (TRAV21, TRAJ20)
CAVGLRVDYKLSF

SEQ ID NO: 621068 - protein, 11 aa, Homo sapiens
  CDR3 for beta chain variable domain of TCR clone 310534 (TRBV29-1, TRBJ2-5)
CSGDRTGTQYF

SEQ ID NO: 621069 - protein, 15 aa, Homo sapiens
  CDR3 for alpha chain variable domain of TCR clone 310535 (TRAV26-1, TRAJ37)
CIVRLGSGNTGKLIF

SEQ ID NO: 621070 - protein, 13 aa, Homo sapiens
  CDR3 for beta chain variable domain of TCR clone 310535 (TRBV6-6, TRBJ2-7)
CASSASGSYEQYF

SEQ ID NO: 621071 - protein, 16 aa, Homo sapiens
  CDR3 for alpha chain variable domain of TCR clone 310536 (TRAV38-1, TRAJ32)
CAFMPFLGGATNKLIF

SEQ ID NO: 621072 - protein, 15 aa, Homo sapiens
  CDR3 for beta chain variable domain of TCR clone 310536 (TRBV2, TRBJ2-1)
CASSELAGSYNEQFF

SEQ ID NO: 621073 - protein, 15 aa, Homo sapiens
  CDR3 for alpha chain variable domain of TCR clone 310537 (TRAV25, TRAJ53)
CPTSNSGGSNYKLTF

SEQ ID NO: 621074 - protein, 15 aa, Homo sapiens
  CDR3 for beta chain variable domain of TCR clone 310537 (TRBV18, TRBJ1-1)
CASSPRQGENTEAFF

SEQ ID NO: 621075 - protein, 13 aa, Homo sapiens
  CDR3 for alpha chain variable domain of TCR clone 310538 (TRAV3, TRAJ27)
CAVRHLGAGKSTF

SEQ ID NO: 621076 - protein, 13 aa, Homo sapiens
  CDR3 for beta chain variable domain of TCR clone 310538 (TRBV7-9, TRBJ2-3)
CASSPGSTDTQYS

SEQ ID NO: 621077 - protein, 11 aa, Homo sapiens
  CDR3 for alpha chain variable domain of TCR clone 310539 (TRAV1-1, TRAJ23)
CAVRQGGKLIF

SEQ ID NO: 621078 - protein, 15 aa, Homo sapiens
  CDR3 for beta chain variable domain of TCR clone 310539 (TRBV19, TRBJ1-6)
CASSTQGAVGSPHHF

SEQ ID NO: 621079 - protein, 14 aa, Homo sapiens
  CDR3 for alpha chain variable domain of TCR clone 310540 (TRAV9-2, TRAJ38)
CALSRAGNNRKLIW

SEQ ID NO: 621080 - protein, 17 aa, Homo sapiens
  CDR3 for beta chain variable domain of TCR clone 310540 (TRBV4-1, TRBJ1-4)
CASSQEGPRGVEEKLFF

SEQ ID NO: 621081 - protein, 14 aa, Homo sapiens
  CDR3 for alpha chain variable domain of TCR clone 310541 (TRAV1-2, TRAJ8)
CAVREDTGFQKLVF

SEQ ID NO: 621082 - protein, 17 aa, Homo sapiens
  CDR3 for beta chain variable domain of TCR clone 310541 (TRBV4-1, TRBJ2-5)
CASSQDQTGGPQETQYF

SEQ ID NO: 621083 - protein, 16 aa, Homo sapiens
  CDR3 for alpha chain variable domain of TCR clone 310542 (TRAV12-3, TRAJ53)
CAMSPGSGGSNYKLTF

SEQ ID NO: 621084 - protein, 14 aa, Homo sapiens
  CDR3 for beta chain variable domain of TCR clone 310542 (TRBV7-2, TRBJ2-7)
CASSLPPGQGPQYF

SEQ ID NO: 621085 - protein, 11 aa, Homo sapiens
  CDR3 for alpha chain variable domain of TCR clone 310543 (TRAV4, TRAJ31)
GLVGDKARPMF

SEQ ID NO: 621086 - protein, 14 aa, Homo sapiens
  CDR3 for beta chain variable domain of TCR clone 310543 (TRBV2, TRBJ1-5)
CASSEAAGGQPQHF

SEQ ID NO: 621087 - protein, 15 aa, Homo sapiens
  CDR3 for alpha chain variable domain of TCR clone 310544 (TRAV34, TRAJ38)
CGADFTPGNNRKLIW

SEQ ID NO: 621088 - protein, 14 aa, Homo sapiens
  CDR3 for beta chain variable domain of TCR clone 310544 (TRBV2, TRBJ2-3)
CASSEGQNTDTQYF

SEQ ID NO: 621089 - protein, 14 aa, Homo sapiens
  CDR3 for alpha chain variable domain of TCR clone 310545 (TRAV13-1, TRAJ3)
CAASKSSSASKIIF

SEQ ID NO: 621090 - protein, 16 aa, Homo sapiens
  CDR3 for beta chain variable domain of TCR clone 310545 (TRBV7-3, TRBJ2-2)
CASSLKRGTLSGELFF

SEQ ID NO: 621091 - protein, 14 aa, Homo sapiens
  CDR3 for alpha chain variable domain of TCR clone 310546 (TRAV19, TRAJ5)
CALKKDTGGRALTF

SEQ ID NO: 621092 - protein, 15 aa, Homo sapiens
  CDR3 for beta chain variable domain of TCR clone 310546 (TRBV2, TRBJ2-5)
CASSEDGTRQETQYF

SEQ ID NO: 621093 - protein, 14 aa, Homo sapiens
  CDR3 for alpha chain variable domain of TCR clone 310547 (TRAV12-2, TRAJ17)
CAVLFKAAGNKLTF

SEQ ID NO: 621094 - protein, 13 aa, Homo sapiens
  CDR3 for beta chain variable domain of TCR clone 310547 (TRBV19, TRBJ2-7)
CASSPRQSYEQYF

SEQ ID NO: 621095 - protein, 14 aa, Homo sapiens
  CDR3 for alpha chain variable domain of TCR clone 310548 (TRAV1-2, TRAJ8)
CAVREDTGFQKLVF

SEQ ID NO: 621096 - protein, 13 aa, Homo sapiens
  CDR3 for beta chain variable domain of TCR clone 310548 (TRBV28, TRBJ2-7)
CASSNSGNYEQYF

SEQ ID NO: 621097 - protein, 13 aa, Homo sapiens
  CDR3 for alpha chain variable domain of TCR clone 310549 (TRAV26-1, TRAJ12)
CIVRPDSSYKLIF

SEQ ID NO: 621098 - protein, 15 aa, Homo sapiens
  CDR3 for beta chain variable domain of TCR clone 310549 (TRBV29-1, TRBJ2-1)
CSVGRHALFYNEQFF

SEQ ID NO: 621099 - protein, 14 aa, Homo sapiens
  CDR3 for alpha chain variable domain of TCR clone 310550 (TRAV13-1, )
CAANIQNPDPAVYQ

SEQ ID NO: 621100 - protein, 16 aa, Homo sapiens
  CDR3 for beta chain variable domain of TCR clone 310550 (TRBV5-4, TRBJ2-3)
CASSWGTSGGTDTQYF

SEQ ID NO: 621101 - protein, 14 aa, Homo sapiens
  CDR3 for alpha chain variable domain of TCR clone 310551 (TRAV1-2, TRAJ8)
CAVREDTGFQQLVF

SEQ ID NO: 621102 - protein, 14 aa, Homo sapiens
  CDR3 for beta chain variable domain of TCR clone 310551 (TRBV7-2, TRBJ1-2)
CASSQTGSTYGYTF

SEQ ID NO: 621103 - protein, 12 aa, Homo sapiens
  CDR3 for alpha chain variable domain of TCR clone 310552 (TRAV13-1, TRAJ9)
CASHTGGFKTIF

SEQ ID NO: 621104 - protein, 18 aa, Homo sapiens
  CDR3 for beta chain variable domain of TCR clone 310552 (TRBV11-2, TRBJ2-3)
CASSLGVASRGAPNTQYF

SEQ ID NO: 621105 - protein, 13 aa, Homo sapiens
  CDR3 for alpha chain variable domain of TCR clone 310553 (TRAV8-3, TRAJ48)
CAVVPFGNENLTF

SEQ ID NO: 621106 - protein, 13 aa, Homo sapiens
  CDR3 for beta chain variable domain of TCR clone 310553 (TRBV7-9, TRBJ2-3)
CASSPGSTDTQYF

SEQ ID NO: 621107 - protein, 17 aa, Homo sapiens
  CDR3 for alpha chain variable domain of TCR clone 310554 (TRAV36/DV7, TRAJ44)
CAVEQIPALPVNSPLGL

SEQ ID NO: 621108 - protein, 14 aa, Homo sapiens
  CDR3 for beta chain variable domain of TCR clone 310554 (TRBV20-1, TRBJ1-3)
CSASPTGAGNTIYF

SEQ ID NO: 621109 - protein, 11 aa, Homo sapiens
  CDR3 for alpha chain variable domain of TCR clone 310555 (TRAV13-2, TRAJ26)
CAKIPGQNFVF

SEQ ID NO: 621110 - protein, 12 aa, Homo sapiens
  CDR3 for beta chain variable domain of TCR clone 310555 (TRBV7-9, TRBJ1-1)
CASNLVRGEAFF

SEQ ID NO: 621111 - protein, 22 aa, Homo sapiens
  CDR3 for alpha chain variable domain of TCR clone 310556 (TRAV16, )
CALRTQIPDIQNPDPAVYQLRD

SEQ ID NO: 621112 - protein, 16 aa, Homo sapiens
  CDR3 for beta chain variable domain of TCR clone 310556 (TRBV7-2, TRBJ1-2)
CASSSNQDRRGHGDTF

SEQ ID NO: 621113 - protein, 13 aa, Homo sapiens
  CDR3 for alpha chain variable domain of TCR clone 310557 (TRAV12-3, TRAJ13)
CAMRSGGYQKVTF

SEQ ID NO: 621114 - protein, 16 aa, Homo sapiens
  CDR3 for beta chain variable domain of TCR clone 310557 (TRBV19, TRBJ2-1)
CASSKAGPSSYNEQFF

SEQ ID NO: 621115 - protein, 14 aa, Homo sapiens
  CDR3 for alpha chain variable domain of TCR clone 310558 (TRAV8-2, TRAJ29)
CVVSSSSGNTPLIF

SEQ ID NO: 621116 - protein, 12 aa, Homo sapiens
  CDR3 for beta chain variable domain of TCR clone 310558 (TRBV28, TRBJ2-3)
CASSLYRDTQYF

SEQ ID NO: 621117 - protein, 16 aa, Homo sapiens
  CDR3 for alpha chain variable domain of TCR clone 310559 (TRAV3, TRAJ10)
CSVRDMRAGGGNKLTF

SEQ ID NO: 621118 - protein, 16 aa, Homo sapiens
  CDR3 for beta chain variable domain of TCR clone 310559 (TRBV19, TRBJ2-2)
CASSFPGQGLAGELFF

SEQ ID NO: 621119 - protein, 14 aa, Homo sapiens
  CDR3 for alpha chain variable domain of TCR clone 310560 (TRAV35, TRAJ50)
CAGHRKTSYDKVIF

SEQ ID NO: 621120 - protein, 11 aa, Homo sapiens
  CDR3 for beta chain variable domain of TCR clone 310560 (TRBV29-1, TRBJ2-5)
CSEDRTGTQYF

SEQ ID NO: 621121 - protein, 14 aa, Homo sapiens
  CDR3 for alpha chain variable domain of TCR clone 310561 (TRAV8-3, TRAJ13)
CAVGAQVGYQKVTF

SEQ ID NO: 621122 - protein, 15 aa, Homo sapiens
  CDR3 for beta chain variable domain of TCR clone 310561 (TRBV3-1, TRBJ1-1)
CASKMRATMNTEAFF

SEQ ID NO: 621123 - protein, 15 aa, Homo sapiens
  CDR3 for alpha chain variable domain of TCR clone 310562 (TRAV17, TRAJ54)
CATEKLGQGAQKLVF

SEQ ID NO: 621124 - protein, 13 aa, Homo sapiens
  CDR3 for beta chain variable domain of TCR clone 310562 (TRBV4-1, TRBJ2-7)
CASSQGQAYEQYF

SEQ ID NO: 621125 - protein, 14 aa, Homo sapiens
  CDR3 for alpha chain variable domain of TCR clone 310563 (TRAV2, TRAJ9)
CAVEDRSGGFKTIS

SEQ ID NO: 621126 - protein, 15 aa, Homo sapiens
  CDR3 for beta chain variable domain of TCR clone 310563 (TRBV5-7, TRBJ1-5)
CASSYGKLWDQPQHF

SEQ ID NO: 621127 - protein, 15 aa, Homo sapiens
  CDR3 for alpha chain variable domain of TCR clone 310564 (TRAV25, TRAJ53)
CAATGGGGSNYKLTF

SEQ ID NO: 621128 - protein, 14 aa, Homo sapiens
  CDR3 for beta chain variable domain of TCR clone 310564 (TRBV4-2, TRBJ2-1)
CASGLDRAYNEQFF

SEQ ID NO: 621129 - protein, 13 aa, Homo sapiens
  CDR3 for alpha chain variable domain of TCR clone 310565 (TRAV21, TRAJ20)
CAVGVFADYKLSC

SEQ ID NO: 621130 - protein, 11 aa, Homo sapiens
  CDR3 for beta chain variable domain of TCR clone 310565 (TRBV11-2, TRBJ2-2)
CASSLPGELFF

SEQ ID NO: 621131 - protein, 13 aa, Homo sapiens
  CDR3 for alpha chain variable domain of TCR clone 310566 (TRAV23/DV6, TRAJ47)
CAASSQYGNKLVF

SEQ ID NO: 621132 - protein, 15 aa, Homo sapiens
  CDR3 for beta chain variable domain of TCR clone 310566 (TRBV7-3, TRBJ2-1)
CASSLDGNSYNEQFF

SEQ ID NO: 621133 - protein, 11 aa, Homo sapiens
  CDR3 for alpha chain variable domain of TCR clone 310567 (TRAV12-2, TRAJ39)
CAVNNMLTFGG

SEQ ID NO: 621134 - protein, 15 aa, Homo sapiens
  CDR3 for beta chain variable domain of TCR clone 310567 (TRBV9, TRBJ1-6)
CASSVAGTGDSPLHF

SEQ ID NO: 621135 - protein, 11 aa, Homo sapiens
  CDR3 for alpha chain variable domain of TCR clone 310568 (TRAV23/DV6, TRAJ58)
CAARLLRGETS

SEQ ID NO: 621136 - protein, 14 aa, Homo sapiens
  CDR3 for beta chain variable domain of TCR clone 310568 (TRBV2, TRBJ2-7)
CASSLNSGGYEQYF

SEQ ID NO: 621137 - protein, 15 aa, Homo sapiens
  CDR3 for alpha chain variable domain of TCR clone 310569 (TRAV20, TRAJ53)
CAVQASGCSNYKLTF

SEQ ID NO: 621138 - protein, 12 aa, Homo sapiens
  CDR3 for beta chain variable domain of TCR clone 310569 (TRBV7-8, TRBJ2-7)
CASSLGDREQYF

SEQ ID NO: 621139 - protein, 13 aa, Homo sapiens
  CDR3 for alpha chain variable domain of TCR clone 310570 (TRAV8-3, TRAJ28)
CAVGAVGSYQLTF

SEQ ID NO: 621140 - protein, 13 aa, Homo sapiens
  CDR3 for beta chain variable domain of TCR clone 310570 (TRBV5-5, TRBJ1-2)
CASSFWRGEDYTF

SEQ ID NO: 621141 - protein, 15 aa, Homo sapiens
  CDR3 for alpha chain variable domain of TCR clone 310571 (TRAV3, TRAJ30)
CAVRDEYGRDDKIIF

SEQ ID NO: 621142 - protein, 16 aa, Homo sapiens
  CDR3 for beta chain variable domain of TCR clone 310571 (TRBV5-1, TRBJ2-5)
CASSLANHRGGETQYF

SEQ ID NO: 621143 - protein, 14 aa, Homo sapiens
  CDR3 for alpha chain variable domain of TCR clone 310572 (TRAV17, TRAJ16)
CATADFFDGQKLLF

SEQ ID NO: 621144 - protein, 12 aa, Homo sapiens
  CDR3 for beta chain variable domain of TCR clone 310572 (TRBV24-1, TRBJ1-1)
CATLYPDTEAFF

SEQ ID NO: 621145 - protein, 15 aa, Homo sapiens
  CDR3 for alpha chain variable domain of TCR clone 310573 (TRAV20, TRAJ41)
CAVQANSNSGYALNF

SEQ ID NO: 621146 - protein, 18 aa, Homo sapiens
  CDR3 for beta chain variable domain of TCR clone 310573 (TRBV7-9, TRBJ2-7)
CASSLATSGSRTWYEQYF

SEQ ID NO: 621147 - protein, 13 aa, Homo sapiens
  CDR3 for alpha chain variable domain of TCR clone 310574 (TRAV13-2, TRAJ23)
CREYRAGGGKLIF

SEQ ID NO: 621148 - protein, 17 aa, Homo sapiens
  CDR3 for beta chain variable domain of TCR clone 310574 (TRBV5-1, TRBJ1-1)
CASSFMTGGKRDTEAFF

SEQ ID NO: 621149 - protein, 17 aa, Homo sapiens
  CDR3 for alpha chain variable domain of TCR clone 310575 (TRAV12-2, TRAJ6)
CAPQGPPRAGGSYIPTF

SEQ ID NO: 621150 - protein, 16 aa, Homo sapiens
  CDR3 for beta chain variable domain of TCR clone 310575 (TRBV19, TRBJ2-2)
CAGSTARAWNTGELFF

SEQ ID NO: 621151 - protein, 15 aa, Homo sapiens
  CDR3 for alpha chain variable domain of TCR clone 310576 (TRAV12-2, TRAJ53)
CAVNGGGGSNYKLTF

SEQ ID NO: 621152 - protein, 17 aa, Homo sapiens
  CDR3 for beta chain variable domain of TCR clone 310576 (TRBV28, TRBJ2-5)
CASSRQGGLAGAETQYF

SEQ ID NO: 621153 - protein, 19 aa, Homo sapiens
  CDR3 for alpha chain variable domain of TCR clone 310577 (TRAV2, TRAJ20)
ILQVREADAAVYRDCKLSF

SEQ ID NO: 621154 - protein, 15 aa, Homo sapiens
  CDR3 for beta chain variable domain of TCR clone 310577 (TRBV7-2, TRBJ2-2)
CASRRPGQNTGELFF

SEQ ID NO: 621155 - protein, 23 aa, Homo sapiens
  CDR3 for alpha chain variable domain of TCR clone 310578 (TRAV26-1, TRAJ38)
CIADNAGNNHIQNPDPAVYQLRD

SEQ ID NO: 621156 - protein, 16 aa, Homo sapiens
  CDR3 for beta chain variable domain of TCR clone 310578 (TRBV7-9, TRBJ1-2)
RASSLGFSSGEDGDTF

SEQ ID NO: 621157 - protein, 14 aa, Homo sapiens
  CDR3 for alpha chain variable domain of TCR clone 310579 (TRAV8-1, TRAJ5)
CAVSMDTGRRALTF

SEQ ID NO: 621158 - protein, 13 aa, Homo sapiens
  CDR3 for beta chain variable domain of TCR clone 310579 (TRBV2, TRBJ1-2)
CASTLGTGDGYTF

SEQ ID NO: 621159 - protein, 17 aa, Homo sapiens
  CDR3 for alpha chain variable domain of TCR clone 310580 (TRAV3, TRAJ38)
CAVRDCLNAGNNRKLIW

SEQ ID NO: 621160 - protein, 14 aa, Homo sapiens
  CDR3 for beta chain variable domain of TCR clone 310580 (TRBV7-3, TRBJ1-1)
CASSLKGGNTEAFF

SEQ ID NO: 621161 - protein, 17 aa, Homo sapiens
  CDR3 for alpha chain variable domain of TCR clone 310581 (TRAV3, TRAJ6)
CAVRDGPRAGVGYIPTF

SEQ ID NO: 621162 - protein, 20 aa, Homo sapiens
  CDR3 for beta chain variable domain of TCR clone 310581 (TRBV28, TRBJ2-1)
CASTPIGRSPGLAGGNEQFF

SEQ ID NO: 621163 - protein, 12 aa, Homo sapiens
  CDR3 for alpha chain variable domain of TCR clone 310582 (TRAV12-2, TRAJ7)
CAPEDGNNRLAF

SEQ ID NO: 621164 - protein, 15 aa, Homo sapiens
  CDR3 for beta chain variable domain of TCR clone 310582 (TRBV2, TRBJ1-2)
CASSEIGGANYGYTF

SEQ ID NO: 621165 - protein, 18 aa, Homo sapiens
  CDR3 for alpha chain variable domain of TCR clone 310583 (TRAV29/DV5, TRAJ53)
CSVLLCSKRGGSNYKLTF

SEQ ID NO: 621166 - protein, 16 aa, Homo sapiens
  CDR3 for beta chain variable domain of TCR clone 310583 (TRBV7-3, TRBJ2-2)
CASSLKRGTLSGELFF

SEQ ID NO: 621167 - protein, 11 aa, Homo sapiens
  CDR3 for alpha chain variable domain of TCR clone 310584 (TRAV23/DV6, TRAJ58)
CAARLLRGETS

SEQ ID NO: 621168 - protein, 16 aa, Homo sapiens
  CDR3 for beta chain variable domain of TCR clone 310584 (TRBV12-4, TRBJ2-5)
CASSFFVRGRQETQYF

SEQ ID NO: 621169 - protein, 13 aa, Homo sapiens
  CDR3 for alpha chain variable domain of TCR clone 310585 (TRAV20, TRAJ37)
CAGCSSNTGKLIF

SEQ ID NO: 621170 - protein, 15 aa, Homo sapiens
  CDR3 for beta chain variable domain of TCR clone 310585 (TRBV6-1, TRBJ2-1)
CASSEAAYSYNEQFF

SEQ ID NO: 621171 - protein, 15 aa, Homo sapiens
  CDR3 for alpha chain variable domain of TCR clone 310586 (TRAV27, TRAJ38)
CAARRNAGNNRKLIW

SEQ ID NO: 621172 - protein, 17 aa, Homo sapiens
  CDR3 for beta chain variable domain of TCR clone 310586 (TRBV6-3, TRBJ2-2)
CASSYRGRDFYTGELFF

SEQ ID NO: 621173 - protein, 18 aa, Homo sapiens
  CDR3 for alpha chain variable domain of TCR clone 310587 (TRAV21, TRAJ52)
CAVRPSPAGGTSYGKLTF

SEQ ID NO: 621174 - protein, 17 aa, Homo sapiens
  CDR3 for beta chain variable domain of TCR clone 310587 (TRBV13, TRBJ2-3)
CASSVARVAGGRNTQYF

SEQ ID NO: 621175 - protein, 15 aa, Homo sapiens
  CDR3 for alpha chain variable domain of TCR clone 310588 (TRAV12-2, TRAJ43)
CAFDMRFGAGTRLTV

SEQ ID NO: 621176 - protein, 18 aa, Homo sapiens
  CDR3 for beta chain variable domain of TCR clone 310588 (TRBV20-1, TRBJ2-3)
CSASGLAGGPGTTDTPYF

SEQ ID NO: 621177 - protein, 14 aa, Homo sapiens
  CDR3 for alpha chain variable domain of TCR clone 310589 (TRAV1-2, TRAJ16)
CAVNRCSDGQKLLF

SEQ ID NO: 621178 - protein, 16 aa, Homo sapiens
  CDR3 for beta chain variable domain of TCR clone 310589 (TRBV9, TRBJ2-1)
CASSVGGGGNYNEQFF

SEQ ID NO: 621179 - protein, 16 aa, Homo sapiens
  CDR3 for alpha chain variable domain of TCR clone 310590 (TRAV30, TRAJ24)
CGTEIVDADSWGKFQF

SEQ ID NO: 621180 - protein, 14 aa, Homo sapiens
  CDR3 for beta chain variable domain of TCR clone 310590 (TRBV2, TRBJ2-5)
CASKRDGTTETQYF

SEQ ID NO: 621181 - protein, 14 aa, Homo sapiens
  CDR3 for alpha chain variable domain of TCR clone 310591 (TRAV12-2, TRAJ17)
CAVLFKAAGNKLTF

SEQ ID NO: 621182 - protein, 18 aa, Homo sapiens
  CDR3 for beta chain variable domain of TCR clone 310591 (TRBV7-2, TRBJ2-3)
CASSLETSRGRKADTQYF

SEQ ID NO: 621183 - protein, 15 aa, Homo sapiens
  CDR3 for alpha chain variable domain of TCR clone 310592 (TRAV3, TRAJ17)
CAVRDTGAAGNKLTF

SEQ ID NO: 621184 - protein, 13 aa, Homo sapiens
  CDR3 for beta chain variable domain of TCR clone 310592 (TRBV5-7, TRBJ2-6)
CASTSSGANVLTF

SEQ ID NO: 621185 - protein, 10 aa, Homo sapiens
  CDR3 for alpha chain variable domain of TCR clone 310593 (TRAV12-1, TRAJ20)
CAIYFQRLQA

SEQ ID NO: 621186 - protein, 13 aa, Homo sapiens
  CDR3 for beta chain variable domain of TCR clone 310593 (TRBV7-3, TRBJ1-1)
CASSQDWGAEAFF

SEQ ID NO: 621187 - protein, 18 aa, Homo sapiens
  CDR3 for alpha chain variable domain of TCR clone 310594 (TRAV26-2, TRAJ54)
CILRDVEVGIQVAQKLEF

SEQ ID NO: 621188 - protein, 16 aa, Homo sapiens
  CDR3 for beta chain variable domain of TCR clone 310594 (TRBV6-1, TRBJ2-5)
CASSETLDRGAETQYF

SEQ ID NO: 621189 - protein, 12 aa, Homo sapiens
  CDR3 for alpha chain variable domain of TCR clone 310595 (TRAV13-1, TRAJ9)
CASHTGGFKTIF

SEQ ID NO: 621190 - protein, 13 aa, Homo sapiens
  CDR3 for beta chain variable domain of TCR clone 310595 (TRBV12-4, TRBJ1-2)
CASSSGSKGGDTF

SEQ ID NO: 621191 - protein, 12 aa, Homo sapiens
  CDR3 for alpha chain variable domain of TCR clone 310596 (TRAV25, TRAJ11)
CAGASEYSTLTF

SEQ ID NO: 621192 - protein, 14 aa, Homo sapiens
  CDR3 for beta chain variable domain of TCR clone 310596 (TRBV5-8, TRBJ2-3)
CASSLGQGTDTQYF

SEQ ID NO: 621193 - protein, 11 aa, Homo sapiens
  CDR3 for alpha chain variable domain of TCR clone 310597 (TRAV12-1, TRAJ40)
CVVPGTYKYIF

SEQ ID NO: 621194 - protein, 14 aa, Homo sapiens
  CDR3 for beta chain variable domain of TCR clone 310597 (TRBV9, TRBJ2-7)
CASSVGVGSYEQYF

SEQ ID NO: 621195 - protein, 12 aa, Homo sapiens
  CDR3 for alpha chain variable domain of TCR clone 310598 (TRAV1-1, TRAJ39)
CAVPVVGNMLTF

SEQ ID NO: 621196 - protein, 16 aa, Homo sapiens
  CDR3 for beta chain variable domain of TCR clone 310598 (TRBV7-2, TRBJ2-5)
CASSPFPTGGEETQYF

SEQ ID NO: 621197 - protein, 17 aa, Homo sapiens
  CDR3 for alpha chain variable domain of TCR clone 310599 (TRAV12-2, TRAJ4)
CAVNVRPVSVGYNKLIF

SEQ ID NO: 621198 - protein, 14 aa, Homo sapiens
  CDR3 for beta chain variable domain of TCR clone 310599 (TRBV12-5, TRBJ2-5)
CASGSRTHQETQYF

SEQ ID NO: 621199 - protein, 11 aa, Homo sapiens
  CDR3 for alpha chain variable domain of TCR clone 310600 (TRAV21, TRAJ34)
CAHYNTDKLIF

SEQ ID NO: 621200 - protein, 14 aa, Homo sapiens
  CDR3 for beta chain variable domain of TCR clone 310600 (TRBV18, TRBJ2-5)
CASSPGVSQETQYF

SEQ ID NO: 621201 - protein, 13 aa, Homo sapiens
  CDR3 for alpha chain variable domain of TCR clone 310601 (TRAV21, TRAJ37)
CAVSSGNTGKLIF

SEQ ID NO: 621202 - protein, 14 aa, Homo sapiens
  CDR3 for beta chain variable domain of TCR clone 310601 (TRBV23-1, TRBJ2-3)
PAVNRPASTDTQYF

SEQ ID NO: 621203 - protein, 13 aa, Homo sapiens
  CDR3 for alpha chain variable domain of TCR clone 310602 (TRAV23/DV6, TRAJ47)
CAASSQYGNKLGF

SEQ ID NO: 621204 - protein, 15 aa, Homo sapiens
  CDR3 for beta chain variable domain of TCR clone 310602 (TRBV7-3, TRBJ2-1)
CASSLDGNSYNEQFF

SEQ ID NO: 621205 - protein, 12 aa, Homo sapiens
  CDR3 for alpha chain variable domain of TCR clone 310603 (TRAV8-3, TRAJ26)
CAGDNYGQNFVF

SEQ ID NO: 621206 - protein, 15 aa, Homo sapiens
  CDR3 for beta chain variable domain of TCR clone 310603 (TRBV11-2, TRBJ2-1)
CASSLGTSGLNELFF

SEQ ID NO: 621207 - protein, 12 aa, Homo sapiens
  CDR3 for alpha chain variable domain of TCR clone 310604 (TRAV12-1, TRAJ40)
CVVSSGTYKYIF

SEQ ID NO: 621208 - protein, 15 aa, Homo sapiens
  CDR3 for beta chain variable domain of TCR clone 310604 (TRBV20-1, TRBJ2-2)
SAVPRTPRTPGSCFF

SEQ ID NO: 621209 - protein, 14 aa, Homo sapiens
  CDR3 for alpha chain variable domain of TCR clone 310605 (TRAV12-2, TRAJ13)
CAVKKTGGYQKVTF

SEQ ID NO: 621210 - protein, 15 aa, Homo sapiens
  CDR3 for beta chain variable domain of TCR clone 310605 (TRBV5-1, TRBJ2-5)
CASSRLGTVQETQYF

SEQ ID NO: 621211 - protein, 14 aa, Homo sapiens
  CDR3 for alpha chain variable domain of TCR clone 310606 (TRAV35, TRAJ22)
CAGLRPGSARQLTS

SEQ ID NO: 621212 - protein, 14 aa, Homo sapiens
  CDR3 for beta chain variable domain of TCR clone 310606 (TRBV4-1, TRBJ2-7)
CASSPVAGGDEQYF

SEQ ID NO: 621213 - protein, 14 aa, Homo sapiens
  CDR3 for alpha chain variable domain of TCR clone 310607 (TRAV8-2, TRAJ4)
CVVSPSGGYNKLIF

SEQ ID NO: 621214 - protein, 15 aa, Homo sapiens
  CDR3 for beta chain variable domain of TCR clone 310607 (TRBV13, TRBJ1-5)
CASSFGQGGVQPQHF

SEQ ID NO: 621215 - protein, 15 aa, Homo sapiens
  CDR3 for alpha chain variable domain of TCR clone 310608 (TRAV38-1, TRAJ37)
CAFIHGSGNTGKLIF

SEQ ID NO: 621216 - protein, 14 aa, Homo sapiens
  CDR3 for beta chain variable domain of TCR clone 310608 (TRBV29-1, TRBJ2-5)
CGVETSGSGETQYF

SEQ ID NO: 621217 - protein, 14 aa, Homo sapiens
  CDR3 for alpha chain variable domain of TCR clone 310609 (TRAV1-2, TRAJ6)
CAVRTSGGSYIPTF

SEQ ID NO: 621218 - protein, 15 aa, Homo sapiens
  CDR3 for beta chain variable domain of TCR clone 310609 (TRBV6-3, TRBJ2-7)
CASSSPGTVFYEQYF

SEQ ID NO: 621219 - protein, 12 aa, Homo sapiens
  CDR3 for alpha chain variable domain of TCR clone 310610 (TRAV3, TRAJ43)
CAVRDPNNDIRV

SEQ ID NO: 621220 - protein, 15 aa, Homo sapiens
  CDR3 for beta chain variable domain of TCR clone 310610 (TRBV27, TRBJ1-5)
CASSLGTGFDQPQHF

SEQ ID NO: 621221 - protein, 13 aa, Homo sapiens
  CDR3 for alpha chain variable domain of TCR clone 310611 (TRAV13-1, TRAJ43)
CAASKNNNNDMRF

SEQ ID NO: 621222 - protein, 17 aa, Homo sapiens
  CDR3 for beta chain variable domain of TCR clone 310611 (TRBV28, TRBJ2-5)
CASSRQGGLAGAETQYF

SEQ ID NO: 621223 - protein, 18 aa, Homo sapiens
  CDR3 for alpha chain variable domain of TCR clone 310612 (TRAV21, TRAJ52)
CAVRPYPAGGTSYGQLTF

SEQ ID NO: 621224 - protein, 17 aa, Homo sapiens
  CDR3 for beta chain variable domain of TCR clone 310612 (TRBV13, TRBJ2-3)
CASSLSRVAGGRNTQYF

SEQ ID NO: 621225 - protein, 10 aa, Homo sapiens
  CDR3 for alpha chain variable domain of TCR clone 310613 (TRAV16, TRAJ22)
SAMYLRQLTF

SEQ ID NO: 621226 - protein, 16 aa, Homo sapiens
  CDR3 for beta chain variable domain of TCR clone 310613 (TRBV7-7, TRBJ2-1)
CASSPGLAGGFNEQFF

SEQ ID NO: 621227 - protein, 13 aa, Homo sapiens
  CDR3 for alpha chain variable domain of TCR clone 310614 (TRAV17, TRAJ5)
CAPMDTGRRALTF

SEQ ID NO: 621228 - protein, 13 aa, Homo sapiens
  CDR3 for beta chain variable domain of TCR clone 310614 (TRBV6-4, TRBJ2-3)
CASRDSGTDTQYF

SEQ ID NO: 621229 - protein, 14 aa, Homo sapiens
  CDR3 for alpha chain variable domain of TCR clone 310615 (TRAV17, TRAJ16)
CATAVFSDGQKLLF

SEQ ID NO: 621230 - protein, 12 aa, Homo sapiens
  CDR3 for beta chain variable domain of TCR clone 310615 (TRBV24-1, TRBJ1-1)
CATLYPDTEAFF

SEQ ID NO: 621231 - protein, 14 aa, Homo sapiens
  CDR3 for alpha chain variable domain of TCR clone 310616 (TRAV38-1, TRAJ45)
CTYYSGGGADGLTF

SEQ ID NO: 621232 - protein, 20 aa, Homo sapiens
  CDR3 for beta chain variable domain of TCR clone 310616 (TRBV28, TRBJ2-1)
CASTPIGRSPRLAGGNEQFF

SEQ ID NO: 621233 - protein, 13 aa, Homo sapiens
  CDR3 for alpha chain variable domain of TCR clone 310617 (TRAV1-2, TRAJ31)
CAVRPNNNARLMF

SEQ ID NO: 621234 - protein, 18 aa, Homo sapiens
  CDR3 for beta chain variable domain of TCR clone 310617 (TRBV11-2, TRBJ2-3)
CASSLGGASRGAPNTQYF

SEQ ID NO: 621235 - protein, 12 aa, Homo sapiens
  CDR3 for alpha chain variable domain of TCR clone 310618 (TRAV12-2, TRAJ47)
CAVAEYGNKLVF

SEQ ID NO: 621236 - protein, 15 aa, Homo sapiens
  CDR3 for beta chain variable domain of TCR clone 310618 (TRBV7-2, TRBJ2-3)
CASTPTSGETDTQYF

SEQ ID NO: 621237 - protein, 15 aa, Homo sapiens
  CDR3 for alpha chain variable domain of TCR clone 310619 (TRAV23/DV6, TRAJ18)
CAARYRGPTLGRLYF

SEQ ID NO: 621238 - protein, 13 aa, Homo sapiens
  CDR3 for beta chain variable domain of TCR clone 310619 (TRBV7-2, TRBJ2-7)
CASSSPSGREQYF

SEQ ID NO: 621239 - protein, 17 aa, Homo sapiens
  CDR3 for alpha chain variable domain of TCR clone 310620 (TRAV3, TRAJ12)
CAVRDGGRMDSSYKLIF

SEQ ID NO: 621240 - protein, 16 aa, Homo sapiens
  CDR3 for beta chain variable domain of TCR clone 310620 (TRBV7-2, TRBJ2-1)
CASSLVAGAGYNEQFF

SEQ ID NO: 621241 - protein, 13 aa, Homo sapiens
  CDR3 for alpha chain variable domain of TCR clone 310621 (TRAV27, TRAJ53)
CAGQGGSNYKLTF

SEQ ID NO: 621242 - protein, 14 aa, Homo sapiens
  CDR3 for beta chain variable domain of TCR clone 310621 (TRBV19, TRBJ2-1)
CASPTFVLSGEQFF

SEQ ID NO: 621243 - protein, 12 aa, Homo sapiens
  CDR3 for alpha chain variable domain of TCR clone 310622 (TRAV8-1, TRAJ6)
CASSGGSYIPTF

SEQ ID NO: 621244 - protein, 12 aa, Homo sapiens
  CDR3 for beta chain variable domain of TCR clone 310622 (TRBV19, TRBJ1-1)
CASMNRYTGAFF

SEQ ID NO: 621245 - protein, 15 aa, Homo sapiens
  CDR3 for alpha chain variable domain of TCR clone 310623 (TRAV26-1, TRAJ23)
CIVRVAGYQGGKLIF

SEQ ID NO: 621246 - protein, 18 aa, Homo sapiens
  CDR3 for beta chain variable domain of TCR clone 310623 (TRBV28, TRBJ2-1)
CASSSTSGRANSYDEQFF

SEQ ID NO: 621247 - protein, 13 aa, Homo sapiens
  CDR3 for alpha chain variable domain of TCR clone 310624 (TRAV12-1, TRAJ29)
CVVNGPGNTPLVF

SEQ ID NO: 621248 - protein, 14 aa, Homo sapiens
  CDR3 for beta chain variable domain of TCR clone 310624 (TRBV11-2, TRBJ2-7)
CASSLGAGAYEQYF

SEQ ID NO: 621249 - protein, 16 aa, Homo sapiens
  CDR3 for alpha chain variable domain of TCR clone 310625 (TRAV4, TRAJ28)
CTTDFLFGAGSYQLTF

SEQ ID NO: 621250 - protein, 14 aa, Homo sapiens
  CDR3 for beta chain variable domain of TCR clone 310625 (TRBV7-9, TRBJ2-5)
CASSLDTAQETQYF

SEQ ID NO: 621251 - protein, 13 aa, Homo sapiens
  CDR3 for alpha chain variable domain of TCR clone 310626 (TRAV13-2, TRAJ48)
CAEMDFGNEKLTF

SEQ ID NO: 621252 - protein, 14 aa, Homo sapiens
  CDR3 for beta chain variable domain of TCR clone 310626 (TRBV15, TRBJ2-3)
SATRSGTSTDTQYF

SEQ ID NO: 621253 - protein, 14 aa, Homo sapiens
  CDR3 for alpha chain variable domain of TCR clone 310627 (TRAV36/DV7, TRAJ16)
CAVEADSEGQKLLF

SEQ ID NO: 621254 - protein, 15 aa, Homo sapiens
  CDR3 for beta chain variable domain of TCR clone 310627 (TRBV5-4, TRBJ2-3)
CATKSSGGALDTQYF

SEQ ID NO: 621255 - protein, 15 aa, Homo sapiens
  CDR3 for alpha chain variable domain of TCR clone 310628 (TRAV21, TRAJ53)
CATLNSGGRNYKLTF

SEQ ID NO: 621256 - protein, 13 aa, Homo sapiens
  CDR3 for beta chain variable domain of TCR clone 310628 (TRBV4-2, TRBJ1-1)
CASSQAGNTEAFF

SEQ ID NO: 621257 - protein, 14 aa, Homo sapiens
  CDR3 for alpha chain variable domain of TCR clone 310629 (TRAV12-1, TRAJ23)
CVVIVYNQGAKLIF

SEQ ID NO: 621258 - protein, 13 aa, Homo sapiens
  CDR3 for beta chain variable domain of TCR clone 310629 (TRBV11-2, TRBJ2-5)
CASSFSSQETQYF

SEQ ID NO: 621259 - protein, 14 aa, Homo sapiens
  CDR3 for alpha chain variable domain of TCR clone 310630 (TRAV26-1, TRAJ38)
CIADNAGNNRKLIW

SEQ ID NO: 621260 - protein, 12 aa, Homo sapiens
  CDR3 for beta chain variable domain of TCR clone 310630 (TRBV4-1, TRBJ2-3)
CASSQGTDTQYF

SEQ ID NO: 621261 - protein, 17 aa, Homo sapiens
  CDR3 for alpha chain variable domain of TCR clone 310631 (TRAV4, TRAJ42)
CLVSVLNYGGSQGNLIF

SEQ ID NO: 621262 - protein, 12 aa, Homo sapiens
  CDR3 for beta chain variable domain of TCR clone 310631 (TRBV20-1, TRBJ2-1)
CSAQYTYNEQFF

SEQ ID NO: 621263 - protein, 15 aa, Homo sapiens
  CDR3 for alpha chain variable domain of TCR clone 310632 (TRAV27, TRAJ38)
CAARRNAGNNRKLIW

SEQ ID NO: 621264 - protein, 17 aa, Homo sapiens
  CDR3 for beta chain variable domain of TCR clone 310632 (TRBV18, TRBJ2-3)
CASSSRGPASSTDTQYF

SEQ ID NO: 621265 - protein, 13 aa, Homo sapiens
  CDR3 for alpha chain variable domain of TCR clone 310633 (TRAV8-1, TRAJ28)
CAVSGAGSYQLTF

SEQ ID NO: 621266 - protein, 14 aa, Homo sapiens
  CDR3 for beta chain variable domain of TCR clone 310633 (TRBV12-5, TRBJ2-5)
CASGSRTHQETQYF

SEQ ID NO: 621267 - protein, 12 aa, Homo sapiens
  CDR3 for alpha chain variable domain of TCR clone 310634 (TRAV29/DV5, TRAJ34)
CAARPNTDKLIF

SEQ ID NO: 621268 - protein, 14 aa, Homo sapiens
  CDR3 for beta chain variable domain of TCR clone 310634 (TRBV7-2, TRBJ1-5)
CASSTQGAGQPQHF

SEQ ID NO: 621269 - protein, 14 aa, Homo sapiens
  CDR3 for alpha chain variable domain of TCR clone 310635 (TRAV13-1, TRAJ13)
CAASRVGGYQKVTF

SEQ ID NO: 621270 - protein, 12 aa, Homo sapiens
  CDR3 for beta chain variable domain of TCR clone 310635 (TRBV6-3, TRBJ2-7)
CASSLTPYEQYF

SEQ ID NO: 621271 - protein, 15 aa, Homo sapiens
  CDR3 for alpha chain variable domain of TCR clone 310636 (TRAV21, TRAJ53)
CATLNSGGSNYKLTF

SEQ ID NO: 621272 - protein, 15 aa, Homo sapiens
  CDR3 for beta chain variable domain of TCR clone 310636 (TRBV3-1, TRBJ2-2)
CASSQDWTRAGELFF

SEQ ID NO: 621273 - protein, 11 aa, Homo sapiens
  CDR3 for alpha chain variable domain of TCR clone 310637 (TRAV2, TRAJ21)
CAVFNFNKFYF

SEQ ID NO: 621274 - protein, 13 aa, Homo sapiens
  CDR3 for beta chain variable domain of TCR clone 310637 (TRBV7-3, TRBJ1-1)
CASSQDWGAEVFF

SEQ ID NO: 621275 - protein, 19 aa, Homo sapiens
  CDR3 for alpha chain variable domain of TCR clone 310638 (TRAV29/DV5, TRAJ49)
CSVLLCSKLTVETGNQFYF

SEQ ID NO: 621276 - protein, 17 aa, Homo sapiens
  CDR3 for beta chain variable domain of TCR clone 310638 (TRBV13, TRBJ2-3)
CASSLSRVAGGRNTQYF

SEQ ID NO: 621277 - protein, 17 aa, Homo sapiens
  CDR3 for alpha chain variable domain of TCR clone 310639 (TRAV13-1, TRAJ31)
CAPRDRLMFGDGTQLVV

SEQ ID NO: 621278 - protein, 20 aa, Homo sapiens
  CDR3 for beta chain variable domain of TCR clone 310639 (TRBV4-1, TRBJ2-2)
CASSQASPPGLASNTGELFF

SEQ ID NO: 621279 - protein, 13 aa, Homo sapiens
  CDR3 for alpha chain variable domain of TCR clone 310640 (TRAV16, TRAJ10)
CAPAREEETNSPL

SEQ ID NO: 621280 - protein, 15 aa, Homo sapiens
  CDR3 for beta chain variable domain of TCR clone 310640 (TRBV28, TRBJ2-7)
CASSLISGGSYEQYF

SEQ ID NO: 621281 - protein, 15 aa, Homo sapiens
  CDR3 for alpha chain variable domain of TCR clone 310641 (TRAV12-3, TRAJ6)
CEMSATTGGSYIPTF

SEQ ID NO: 621282 - protein, 13 aa, Homo sapiens
  CDR3 for beta chain variable domain of TCR clone 310641 (TRBV12-4, TRBJ2-7)
CASSPTETYEQYF

SEQ ID NO: 621283 - protein, 14 aa, Homo sapiens
  CDR3 for alpha chain variable domain of TCR clone 310642 (TRAV2, TRAJ9)
CAVEDRSGGFKTIF

SEQ ID NO: 621284 - protein, 17 aa, Homo sapiens
  CDR3 for beta chain variable domain of TCR clone 310642 (TRBV5-1, TRBJ1-6)
CASSPSLQGSDNSPLHF

SEQ ID NO: 621285 - protein, 14 aa, Homo sapiens
  CDR3 for alpha chain variable domain of TCR clone 310643 (TRAV38-1, TRAJ30)
CAFMKHESDDKIIF

SEQ ID NO: 621286 - protein, 14 aa, Homo sapiens
  CDR3 for beta chain variable domain of TCR clone 310643 (TRBV27, TRBJ1-1)
CASRPSAANTEAFG

SEQ ID NO: 621287 - protein, 12 aa, Homo sapiens
  CDR3 for alpha chain variable domain of TCR clone 310644 (TRAV13-1, TRAJ21)
CAAKEGINKFYF

SEQ ID NO: 621288 - protein, 14 aa, Homo sapiens
  CDR3 for beta chain variable domain of TCR clone 310644 (TRBV20-1, TRBJ2-7)
CSAPELAGVGEQYF

SEQ ID NO: 621289 - protein, 14 aa, Homo sapiens
  CDR3 for alpha chain variable domain of TCR clone 310645 (TRAV9-2, TRAJ36)
CALPCRTGANNLFS

SEQ ID NO: 621290 - protein, 14 aa, Homo sapiens
  CDR3 for beta chain variable domain of TCR clone 310645 (TRBV2, TRBJ1-2)
CASSELQVNYGYTF

SEQ ID NO: 621291 - protein, 14 aa, Homo sapiens
  CDR3 for alpha chain variable domain of TCR clone 310646 (TRAV12-2, TRAJ13)
CAVNKTGGYQKVTF

SEQ ID NO: 621292 - protein, 11 aa, Homo sapiens
  CDR3 for beta chain variable domain of TCR clone 310646 (TRBV29-1, TRBJ2-5)
CSEDRTGTQYF

SEQ ID NO: 621293 - protein, 16 aa, Homo sapiens
  CDR3 for alpha chain variable domain of TCR clone 310647 (TRAV3, TRAJ37)
CAVRGKGSGNTGKLIF

SEQ ID NO: 621294 - protein, 15 aa, Homo sapiens
  CDR3 for beta chain variable domain of TCR clone 310647 (TRBV6-6, TRBJ1-5)
CASSSIQGTNQPQHF

SEQ ID NO: 621295 - protein, 15 aa, Homo sapiens
  CDR3 for alpha chain variable domain of TCR clone 310648 (TRAV12-1, TRAJ44)
CVADLPTGTASKLTF

SEQ ID NO: 621296 - protein, 13 aa, Homo sapiens
  CDR3 for beta chain variable domain of TCR clone 310648 (TRBV6-5, TRBJ2-5)
CANSPQGGETQYF

SEQ ID NO: 621297 - protein, 13 aa, Homo sapiens
  CDR3 for alpha chain variable domain of TCR clone 310649 (TRAV8-6, TRAJ21)
CAVSPSSLNKFYF

SEQ ID NO: 621298 - protein, 14 aa, Homo sapiens
  CDR3 for beta chain variable domain of TCR clone 310649 (TRBV7-9, TRBJ2-5)
CARSLDTAQETQYF

SEQ ID NO: 621299 - protein, 14 aa, Homo sapiens
  CDR3 for alpha chain variable domain of TCR clone 310650 (TRAV12-2, TRAJ40)
CAVKNPSGTYKYIF

SEQ ID NO: 621300 - protein, 20 aa, Homo sapiens
  CDR3 for beta chain variable domain of TCR clone 310650 (TRBV28, TRBJ2-1)
CASTPIGRSLGLAGGNEQFF

SEQ ID NO: 621301 - protein, 19 aa, Homo sapiens
  CDR3 for alpha chain variable domain of TCR clone 310651 (TRAV3, TRAJ6)
CAVRDRNPSRSGGSYIPTF

SEQ ID NO: 621302 - protein, 15 aa, Homo sapiens
  CDR3 for beta chain variable domain of TCR clone 310651 (TRBV18, TRBJ2-7)
CASSQTFMDSYEQYF

SEQ ID NO: 621303 - protein, 14 aa, Homo sapiens
  CDR3 for alpha chain variable domain of TCR clone 310652 (TRAV12-1, TRAJ37)
CVVTGSSNTCKLIF

SEQ ID NO: 621304 - protein, 20 aa, Homo sapiens
  CDR3 for beta chain variable domain of TCR clone 310652 (TRBV23-1, TRBJ2-5)
CISAPAVPERVLLIQETQYF

SEQ ID NO: 621305 - protein, 12 aa, Homo sapiens
  CDR3 for alpha chain variable domain of TCR clone 310653 (TRAV21, TRAJ32)
CAPWGCYKQAHL

SEQ ID NO: 621306 - protein, 15 aa, Homo sapiens
  CDR3 for beta chain variable domain of TCR clone 310653 (TRBV27, TRBJ2-1)
CASSNGGGSSNEQFF

SEQ ID NO: 621307 - protein, 16 aa, Homo sapiens
  CDR3 for alpha chain variable domain of TCR clone 310654 (TRAV3, TRAJ3)
CAVRDRAKSSASTIII

SEQ ID NO: 621308 - protein, 16 aa, Homo sapiens
  CDR3 for beta chain variable domain of TCR clone 310654 (TRBV20-1, TRBJ2-4)
CSATSLAELAKNIQYF

SEQ ID NO: 621309 - protein, 15 aa, Homo sapiens
  CDR3 for alpha chain variable domain of TCR clone 310655 (TRAV23/DV6, TRAJ18)
CAASFRGSTLGRLYF

SEQ ID NO: 621310 - protein, 14 aa, Homo sapiens
  CDR3 for beta chain variable domain of TCR clone 310655 (TRBV7-2, TRBJ1-2)
CASSRGGTNYGYTF

SEQ ID NO: 621311 - protein, 14 aa, Homo sapiens
  CDR3 for alpha chain variable domain of TCR clone 310656 (TRAV1-2, TRAJ8)
CAVREDTGFQKLVF

SEQ ID NO: 621312 - protein, 16 aa, Homo sapiens
  CDR3 for beta chain variable domain of TCR clone 310656 (TRBV7-3, TRBJ2-2)
CPSSLKRGTLSGELFF

SEQ ID NO: 621313 - protein, 14 aa, Homo sapiens
  CDR3 for alpha chain variable domain of TCR clone 310657 (TRAV13-1, TRAJ35)
CAARKGGFGNVLHG

SEQ ID NO: 621314 - protein, 13 aa, Homo sapiens
  CDR3 for beta chain variable domain of TCR clone 310657 (TRBV7-3, TRBJ1-1)
CASSQDWGAEAFF

SEQ ID NO: 621315 - protein, 12 aa, Homo sapiens
  CDR3 for alpha chain variable domain of TCR clone 310658 (TRAV12-3, TRAJ17)
CAMTLTGNKLTF

SEQ ID NO: 621316 - protein, 15 aa, Homo sapiens
  CDR3 for beta chain variable domain of TCR clone 310658 (TRBV20-1, TRBJ2-7)
CSARVQVSGMDEQYF

SEQ ID NO: 621317 - protein, 17 aa, Homo sapiens
  CDR3 for alpha chain variable domain of TCR clone 310659 (TRAV3, TRAJ6)
FAVRDGPRAGGSYIPTL

SEQ ID NO: 621318 - protein, 15 aa, Homo sapiens
  CDR3 for beta chain variable domain of TCR clone 310659 (TRBV7-6, TRBJ2-3)
CASSPIIYSTDTQYF

SEQ ID NO: 621319 - protein, 14 aa, Homo sapiens
  CDR3 for alpha chain variable domain of TCR clone 310660 (TRAV29/DV5, TRAJ49)
CAASAQNTGNQFYF

SEQ ID NO: 621320 - protein, 16 aa, Homo sapiens
  CDR3 for beta chain variable domain of TCR clone 310660 (TRBV12-4, TRBJ1-5)
FASRQPVEGSNQPQHF

SEQ ID NO: 621321 - protein, 12 aa, Homo sapiens
  CDR3 for alpha chain variable domain of TCR clone 310661 (TRAV8-3, TRAJ34)
CAVRGNTDKLIF

SEQ ID NO: 621322 - protein, 14 aa, Homo sapiens
  CDR3 for beta chain variable domain of TCR clone 310661 (TRBV7-6, TRBJ2-3)
CASSLGTVTDTQYF

SEQ ID NO: 621323 - protein, 10 aa, Homo sapiens
  CDR3 for alpha chain variable domain of TCR clone 310662 (TRAV12-1, TRAJ20)
CVVNPRKLSF

SEQ ID NO: 621324 - protein, 10 aa, Homo sapiens
  CDR3 for beta chain variable domain of TCR clone 310662 (TRBV7-9, TRBJ2-2)
CASGPLDNFP

SEQ ID NO: 621325 - protein, 14 aa, Homo sapiens
  CDR3 for alpha chain variable domain of TCR clone 310663 (TRAV1-2, TRAJ16)
CAVNRFSDGQKLLF

SEQ ID NO: 621326 - protein, 15 aa, Homo sapiens
  CDR3 for beta chain variable domain of TCR clone 310663 (TRBV27, TRBJ2-1)
CASSNGGGSSNEKFF

SEQ ID NO: 621327 - protein, 15 aa, Homo sapiens
  CDR3 for alpha chain variable domain of TCR clone 310664 (TRAV12-2, TRAJ53)
CAVNGGGGSNYKLTF

SEQ ID NO: 621328 - protein, 13 aa, Homo sapiens
  CDR3 for beta chain variable domain of TCR clone 310664 (TRBV4-1, TRBJ1-1)
CASSLRGPTEAFF

SEQ ID NO: 621329 - protein, 14 aa, Homo sapiens
  CDR3 for alpha chain variable domain of TCR clone 310665 (TRAV16, TRAJ48)
CALTPGFGNEKLTF

SEQ ID NO: 621330 - protein, 14 aa, Homo sapiens
  CDR3 for beta chain variable domain of TCR clone 310665 (TRBV6-1, TRBJ1-3)
CASVQGGGGNTIYF

SEQ ID NO: 621331 - protein, 16 aa, Homo sapiens
  CDR3 for alpha chain variable domain of TCR clone 310666 (TRAV12-1, TRAJ12)
CVVNTLLMDSSYKLIF

SEQ ID NO: 621332 - protein, 12 aa, Homo sapiens
  CDR3 for beta chain variable domain of TCR clone 310666 (TRBV11-2, TRBJ2-2)
CASSLGGGELFF

SEQ ID NO: 621333 - protein, 12 aa, Homo sapiens
  CDR3 for alpha chain variable domain of TCR clone 310667 (TRAV30, TRAJ39)
CGRGNAGNMLTF

SEQ ID NO: 621334 - protein, 15 aa, Homo sapiens
  CDR3 for beta chain variable domain of TCR clone 310667 (TRBV5-1, TRBJ1-1)
CASSWTGRGNSEAFF

SEQ ID NO: 621335 - protein, 14 aa, Homo sapiens
  CDR3 for alpha chain variable domain of TCR clone 310668 (TRAV38-1, TRAJ40)
CALRPTPGTYKYIF

SEQ ID NO: 621336 - protein, 13 aa, Homo sapiens
  CDR3 for beta chain variable domain of TCR clone 310668 (TRBV7-2, TRBJ2-7)
CASSSPSGSEQYF

SEQ ID NO: 621337 - protein, 15 aa, Homo sapiens
  CDR3 for alpha chain variable domain of TCR clone 310669 (TRAV4, TRAJ8)
CLVGEQHTGFQKLVF

SEQ ID NO: 621338 - protein, 14 aa, Homo sapiens
  CDR3 for beta chain variable domain of TCR clone 310669 (TRBV7-9, TRBJ2-5)
CQQNRDYLQETQYF

SEQ ID NO: 621339 - protein, 12 aa, Homo sapiens
  CDR3 for alpha chain variable domain of TCR clone 310670 (TRAV25, TRAJ16)
CAGNRDGQKLLF

SEQ ID NO: 621340 - protein, 15 aa, Homo sapiens
  CDR3 for beta chain variable domain of TCR clone 310670 (TRBV5-1, TRBJ2-7)
CASSLYPDEGYEQYF

SEQ ID NO: 621341 - protein, 17 aa, Homo sapiens
  CDR3 for alpha chain variable domain of TCR clone 310671 (TRAV4, TRAJ28)
CLVGDRALGLGVTNSLS

SEQ ID NO: 621342 - protein, 14 aa, Homo sapiens
  CDR3 for beta chain variable domain of TCR clone 310671 (TRBV7-9, TRBJ2-7)
CASSLGGSSYEQYF

SEQ ID NO: 621343 - protein, 15 aa, Homo sapiens
  CDR3 for alpha chain variable domain of TCR clone 310672 (TRAV17, TRAJ35)
CATAFVIGFGNVLHC

SEQ ID NO: 621344 - protein, 15 aa, Homo sapiens
  CDR3 for beta chain variable domain of TCR clone 310672 (TRBV18, TRBJ2-3)
CASSPLAGETDTQYF

SEQ ID NO: 621345 - protein, 11 aa, Homo sapiens
  CDR3 for alpha chain variable domain of TCR clone 310673 (TRAV27, TRAJ47)
SIVGYGNKLVF

SEQ ID NO: 621346 - protein, 18 aa, Homo sapiens
  CDR3 for beta chain variable domain of TCR clone 310673 (TRBV2, TRBJ2-1)
CASRGLAGGPRTYNEQFF

SEQ ID NO: 621347 - protein, 14 aa, Homo sapiens
  CDR3 for alpha chain variable domain of TCR clone 310674 (TRAV12-3, TRAJ5)
YAMTWDTGRRALTF

SEQ ID NO: 621348 - protein, 14 aa, Homo sapiens
  CDR3 for beta chain variable domain of TCR clone 310674 (TRBV10-2, TRBJ1-5)
CASSSTGRNQPQHF

SEQ ID NO: 621349 - protein, 15 aa, Homo sapiens
  CDR3 for alpha chain variable domain of TCR clone 310675 (TRAV27, TRAJ38)
CAARRKAGNNRKLIW

SEQ ID NO: 621350 - protein, 13 aa, Homo sapiens
  CDR3 for beta chain variable domain of TCR clone 310675 (TRBV10-3, TRBJ2-7)
CASKLAVNYEQYF

SEQ ID NO: 621351 - protein, 15 aa, Homo sapiens
  CDR3 for alpha chain variable domain of TCR clone 310676 (TRAV8-3, TRAJ45)
CALSYSGGGADVLTS

SEQ ID NO: 621352 - protein, 13 aa, Homo sapiens
  CDR3 for beta chain variable domain of TCR clone 310676 (TRBV10-3, TRBJ2-7)
CASKLAVNYEQYF

SEQ ID NO: 621353 - protein, 12 aa, Homo sapiens
  CDR3 for alpha chain variable domain of TCR clone 310677 (TRAV21, TRAJ39)
LPYNNAGNMLTF

SEQ ID NO: 621354 - protein, 13 aa, Homo sapiens
  CDR3 for beta chain variable domain of TCR clone 310677 (TRBV2, TRBJ2-5)
CASGTPYQETQYF

SEQ ID NO: 621355 - protein, 20 aa, Homo sapiens
  CDR3 for alpha chain variable domain of TCR clone 310678 (TRAV21, TRAJ4)
AASQPGDSATLAGGYNKLIF

SEQ ID NO: 621356 - protein, 19 aa, Homo sapiens
  CDR3 for beta chain variable domain of TCR clone 310678 (TRBV18, TRBJ1-3)
CASSPLYRTGMSSGNTIYF

SEQ ID NO: 621357 - protein, 14 aa, Homo sapiens
  CDR3 for alpha chain variable domain of TCR clone 310679 (TRAV26-1, TRAJ34)
CIVIVAYNTDKLIF

SEQ ID NO: 621358 - protein, 15 aa, Homo sapiens
  CDR3 for beta chain variable domain of TCR clone 310679 (TRBV7-9, TRBJ1-4)
CASSRTGGFNEKLFF

SEQ ID NO: 621359 - protein, 16 aa, Homo sapiens
  CDR3 for alpha chain variable domain of TCR clone 310680 (TRAV3, TRAJ10)
CAVRDMRVGGGNKLTF

SEQ ID NO: 621360 - protein, 14 aa, Homo sapiens
  CDR3 for beta chain variable domain of TCR clone 310680 (TRBV25-1, TRBJ1-1)
CASTHLGGNTEAFF

SEQ ID NO: 621361 - protein, 18 aa, Homo sapiens
  CDR3 for alpha chain variable domain of TCR clone 310681 (TRAV21, TRAJ52)
CAVRPFPAGGTSYGKLTF

SEQ ID NO: 621362 - protein, 16 aa, Homo sapiens
  CDR3 for beta chain variable domain of TCR clone 310681 (TRBV7-3, TRBJ2-1)
CASSLEGYRSYNEQFF

SEQ ID NO: 621363 - protein, 14 aa, Homo sapiens
  CDR3 for alpha chain variable domain of TCR clone 310682 (TRAV12-1, TRAJ3)
CVVIGYSSASKIIF

SEQ ID NO: 621364 - protein, 14 aa, Homo sapiens
  CDR3 for beta chain variable domain of TCR clone 310682 (TRBV6-6, TRBJ1-3)
CASSRQGSGNTIYF

SEQ ID NO: 621365 - protein, 15 aa, Homo sapiens
  CDR3 for alpha chain variable domain of TCR clone 310683 (TRAV8-3, TRAJ27)
CAVGPSKTNAGKSTF

SEQ ID NO: 621366 - protein, 14 aa, Homo sapiens
  CDR3 for beta chain variable domain of TCR clone 310683 (TRBV11-2, TRBJ2-3)
SASSRLARTDTQYF

SEQ ID NO: 621367 - protein, 18 aa, Homo sapiens
  CDR3 for alpha chain variable domain of TCR clone 310684 (TRAV12-3, TRAJ52)
RAMSVGGAGGTSYGKLTF

SEQ ID NO: 621368 - protein, 14 aa, Homo sapiens
  CDR3 for beta chain variable domain of TCR clone 310684 (TRBV7-2, TRBJ2-7)
CASRSQGAAYEQYF

SEQ ID NO: 621369 - protein, 13 aa, Homo sapiens
  CDR3 for alpha chain variable domain of TCR clone 310685 (TRAV8-2, TRAJ43)
CVVSDQGDNDMRF

SEQ ID NO: 621370 - protein, 17 aa, Homo sapiens
  CDR3 for beta chain variable domain of TCR clone 310685 (TRBV10-3, TRBJ1-1)
CAISESGTGGGTTEAFF

SEQ ID NO: 621371 - protein, 15 aa, Homo sapiens
  CDR3 for alpha chain variable domain of TCR clone 310686 (TRAV21, TRAJ53)
CATLNSGGSNYKLTF

SEQ ID NO: 621372 - protein, 13 aa, Homo sapiens
  CDR3 for beta chain variable domain of TCR clone 310686 (TRBV7-9, TRBJ2-3)
CASSPGSTDTQYV

SEQ ID NO: 621373 - protein, 17 aa, Homo sapiens
  CDR3 for alpha chain variable domain of TCR clone 310687 (TRAV2, TRAJ28)
CAVLQVYSGAGSYQLTF

SEQ ID NO: 621374 - protein, 15 aa, Homo sapiens
  CDR3 for beta chain variable domain of TCR clone 310687 (TRBV2, TRBJ1-2)
CASSEIGGANYGYTF

SEQ ID NO: 621375 - protein, 16 aa, Homo sapiens
  CDR3 for alpha chain variable domain of TCR clone 310688 (TRAV30, TRAJ24)
CGTEIVYADSWGRFQF

SEQ ID NO: 621376 - protein, 14 aa, Homo sapiens
  CDR3 for beta chain variable domain of TCR clone 310688 (TRBV12-5, TRBJ2-5)
CASGSRTHQETQYF

SEQ ID NO: 621377 - protein, 17 aa, Homo sapiens
  CDR3 for alpha chain variable domain of TCR clone 310689 (TRAV3, TRAJ6)
CAVRDGSRAGGSYITTF

SEQ ID NO: 621378 - protein, 14 aa, Homo sapiens
  CDR3 for beta chain variable domain of TCR clone 310689 (TRBV7-2, TRBJ2-7)
CASSPKTSFYEQYF

SEQ ID NO: 621379 - protein, 11 aa, Homo sapiens
  CDR3 for alpha chain variable domain of TCR clone 310690 (TRAV1-2, TRAJ40)
CAVPGTYKYIF

SEQ ID NO: 621380 - protein, 14 aa, Homo sapiens
  CDR3 for beta chain variable domain of TCR clone 310690 (TRBV7-9, TRBJ2-5)
CASSLDTAQETQYF

SEQ ID NO: 621381 - protein, 13 aa, Homo sapiens
  CDR3 for alpha chain variable domain of TCR clone 310691 (TRAV12-2, TRAJ34)
CAVRGYNTDKLIF

SEQ ID NO: 621382 - protein, 15 aa, Homo sapiens
  CDR3 for beta chain variable domain of TCR clone 310691 (TRBV28, TRBJ2-1)
CASRTGAGGIARQFF

SEQ ID NO: 621383 - protein, 12 aa, Homo sapiens
  CDR3 for alpha chain variable domain of TCR clone 310692 (TRAV27, TRAJ58)
CAGARDTSRLTF

SEQ ID NO: 621384 - protein, 13 aa, Homo sapiens
  CDR3 for beta chain variable domain of TCR clone 310692 (TRBV20-1, TRBJ2-5)
CSARGDYQETQYF

SEQ ID NO: 621385 - protein, 13 aa, Homo sapiens
  CDR3 for alpha chain variable domain of TCR clone 310693 (TRAV2, TRAJ24)
CAVGSTDRGKLHI

SEQ ID NO: 621386 - protein, 15 aa, Homo sapiens
  CDR3 for beta chain variable domain of TCR clone 310693 (TRBV5-7, TRBJ2-3)
CASSPWDRATDTQYF

SEQ ID NO: 621387 - protein, 12 aa, Homo sapiens
  CDR3 for alpha chain variable domain of TCR clone 310694 (TRAV3, TRAJ26)
CAVRDYCQNFVF

SEQ ID NO: 621388 - protein, 16 aa, Homo sapiens
  CDR3 for beta chain variable domain of TCR clone 310694 (TRBV11-2, TRBJ1-2)
CASSPSGREANYGYTF

SEQ ID NO: 621389 - protein, 15 aa, Homo sapiens
  CDR3 for alpha chain variable domain of TCR clone 310695 (TRAV2, TRAJ44)
CAVEAYTGTASKLTF

SEQ ID NO: 621390 - protein, 14 aa, Homo sapiens
  CDR3 for beta chain variable domain of TCR clone 310695 (TRBV11-2, TRBJ2-1)
CAGSPGSRDNEQFF

SEQ ID NO: 621391 - protein, 14 aa, Homo sapiens
  CDR3 for alpha chain variable domain of TCR clone 310696 (TRAV8-3, TRAJ23)
CAVIIYNQGGKLIC

SEQ ID NO: 621392 - protein, 15 aa, Homo sapiens
  CDR3 for beta chain variable domain of TCR clone 310696 (TRBV18, TRBJ2-1)
CASSPPSASYNEQFF

SEQ ID NO: 621393 - protein, 13 aa, Homo sapiens
  CDR3 for alpha chain variable domain of TCR clone 310697 (TRAV23/DV6, TRAJ12)
CAPRVDSSYKLIF

SEQ ID NO: 621394 - protein, 12 aa, Homo sapiens
  CDR3 for beta chain variable domain of TCR clone 310697 (TRBV24-1, TRBJ2-3)
CATSDSTDTQYF

SEQ ID NO: 621395 - protein, 13 aa, Homo sapiens
  CDR3 for alpha chain variable domain of TCR clone 310698 (TRAV21, TRAJ45)
CAVMGGGADGLTF

SEQ ID NO: 621396 - protein, 15 aa, Homo sapiens
  CDR3 for beta chain variable domain of TCR clone 310698 (TRBV10-2, TRBJ2-6)
CASSEQGTGANVLTF

SEQ ID NO: 621397 - protein, 11 aa, Homo sapiens
  CDR3 for alpha chain variable domain of TCR clone 310699 (TRAV12-1, TRAJ30)
CVVNGQDKIIF

SEQ ID NO: 621398 - protein, 14 aa, Homo sapiens
  CDR3 for beta chain variable domain of TCR clone 310699 (TRBV3-1, TRBJ2-5)
CASSQAVRQETQYF

SEQ ID NO: 621399 - protein, 18 aa, Homo sapiens
  CDR3 for alpha chain variable domain of TCR clone 310700 (TRAV13-1, TRAJ52)
CATKNPNAGGTSYGKLTF

SEQ ID NO: 621400 - protein, 14 aa, Homo sapiens
  CDR3 for beta chain variable domain of TCR clone 310700 (TRBV7-3, TRBJ2-1)
CASSLAGGTNEQFF

SEQ ID NO: 621401 - protein, 11 aa, Homo sapiens
  CDR3 for alpha chain variable domain of TCR clone 310701 (TRAV1-1, TRAJ23)
CAVRQGGKLIF

SEQ ID NO: 621402 - protein, 11 aa, Homo sapiens
  CDR3 for beta chain variable domain of TCR clone 310701 (TRBV7-3, TRBJ2-5)
CASSLSETQYF

SEQ ID NO: 621403 - protein, 15 aa, Homo sapiens
  CDR3 for alpha chain variable domain of TCR clone 310702 (TRAV12-3, TRAJ6)
FAMSATTGGSYIPTF

SEQ ID NO: 621404 - protein, 16 aa, Homo sapiens
  CDR3 for beta chain variable domain of TCR clone 310702 (TRBV20-1, TRBJ1-2)
CSASTGQGVANYGYTF

SEQ ID NO: 621405 - protein, 15 aa, Homo sapiens
  CDR3 for alpha chain variable domain of TCR clone 310703 (TRAV12-2, TRAJ43)
CAFDMRFGAGTRLTV

SEQ ID NO: 621406 - protein, 12 aa, Homo sapiens
  CDR3 for beta chain variable domain of TCR clone 310703 (TRBV3-1, TRBJ2-7)
CASSQVRYEQYY

SEQ ID NO: 621407 - protein, 12 aa, Homo sapiens
  CDR3 for alpha chain variable domain of TCR clone 310704 (TRAV29/DV5, TRAJ49)
CAATDTGNQFDF

SEQ ID NO: 621408 - protein, 12 aa, Homo sapiens
  CDR3 for beta chain variable domain of TCR clone 310704 (TRBV12-4, TRBJ2-7)
CASSLGGYEQYF

SEQ ID NO: 621409 - protein, 14 aa, Homo sapiens
  CDR3 for alpha chain variable domain of TCR clone 310705 (TRAV12-1, TRAJ30)
CVVNIGGRDDKIIF

SEQ ID NO: 621410 - protein, 14 aa, Homo sapiens
  CDR3 for beta chain variable domain of TCR clone 310705 (TRBV7-6, TRBJ2-3)
CVRSLGTVTDTQYF

SEQ ID NO: 621411 - protein, 15 aa, Homo sapiens
  CDR3 for alpha chain variable domain of TCR clone 310706 (TRAV12-1, TRAJ44)
CVVLVNTGTASKLTF

SEQ ID NO: 621412 - protein, 16 aa, Homo sapiens
  CDR3 for beta chain variable domain of TCR clone 310706 (TRBV20-1, TRBJ2-5)
CSPGGTSGGYMETQYF

SEQ ID NO: 621413 - protein, 16 aa, Homo sapiens
  CDR3 for alpha chain variable domain of TCR clone 310707 (TRAV8-1, TRAJ39)
CAVNVPLYNAGNMLAF

SEQ ID NO: 621414 - protein, 15 aa, Homo sapiens
  CDR3 for beta chain variable domain of TCR clone 310707 (TRBV4-1, TRBJ2-3)
CASRSTRAGTDTQYF

SEQ ID NO: 621415 - protein, 14 aa, Homo sapiens
  CDR3 for alpha chain variable domain of TCR clone 310708 (TRAV1-2, TRAJ16)
CAVNRFSDGQKLLF

SEQ ID NO: 621416 - protein, 11 aa, Homo sapiens
  CDR3 for beta chain variable domain of TCR clone 310708 (TRBV11-2, TRBJ2-2)
CASSLPGELVF

SEQ ID NO: 621417 - protein, 10 aa, Homo sapiens
  CDR3 for alpha chain variable domain of TCR clone 310709 (TRAV23/DV6, TRAJ57)
CAASSTLSQG

SEQ ID NO: 621418 - protein, 15 aa, Homo sapiens
  CDR3 for beta chain variable domain of TCR clone 310709 (TRBV7-6, TRBJ2-1)
CASSSLAGEGNEQFF

SEQ ID NO: 621419 - protein, 14 aa, Homo sapiens
  CDR3 for alpha chain variable domain of TCR clone 310710 (TRAV8-1, TRAJ49)
CASSIANTGNQFYF

SEQ ID NO: 621420 - protein, 15 aa, Homo sapiens
  CDR3 for beta chain variable domain of TCR clone 310710 (TRBV12-4, TRBJ2-1)
CASSLLATGNNEQFF

SEQ ID NO: 621421 - protein, 13 aa, Homo sapiens
  CDR3 for alpha chain variable domain of TCR clone 310711 (TRAV23/DV6, TRAJ34)
CAASIEGTDKLIF

SEQ ID NO: 621422 - protein, 15 aa, Homo sapiens
  CDR3 for beta chain variable domain of TCR clone 310711 (TRBV4-1, TRBJ1-2)
CASSQGQGAAYGYTF

SEQ ID NO: 621423 - protein, 14 aa, Homo sapiens
  CDR3 for alpha chain variable domain of TCR clone 310712 (TRAV12-3, TRAJ10)
SHLPLTGGGNKLIF

SEQ ID NO: 621424 - protein, 15 aa, Homo sapiens
  CDR3 for beta chain variable domain of TCR clone 310712 (TRBV4-1, TRBJ1-4)
CASSDTGGTNEKLFF

SEQ ID NO: 621425 - protein, 13 aa, Homo sapiens
  CDR3 for alpha chain variable domain of TCR clone 310713 (TRAV8-4, TRAJ30)
CAVSVNRDDKIIF

SEQ ID NO: 621426 - protein, 15 aa, Homo sapiens
  CDR3 for beta chain variable domain of TCR clone 310713 (TRBV10-2, TRBJ2-6)
CASSEQGTGANVLTF

SEQ ID NO: 621427 - protein, 14 aa, Homo sapiens
  CDR3 for alpha chain variable domain of TCR clone 310714 (TRAV12-2, TRAJ44)
CAVNPAGTASKPTL

SEQ ID NO: 621428 - protein, 13 aa, Homo sapiens
  CDR3 for beta chain variable domain of TCR clone 310714 (TRBV20-1, TRBJ1-6)
CSAPLGVGSPLHF

SEQ ID NO: 621429 - protein, 16 aa, Homo sapiens
  CDR3 for alpha chain variable domain of TCR clone 310715 (TRAV12-3, TRAJ53)
CAMSPGSGSSNYKLTF

SEQ ID NO: 621430 - protein, 17 aa, Homo sapiens
  CDR3 for beta chain variable domain of TCR clone 310715 (TRBV28, TRBJ2-5)
CASSTPEGDSLQETQYF

SEQ ID NO: 621431 - protein, 12 aa, Homo sapiens
  CDR3 for alpha chain variable domain of TCR clone 310716 (TRAV26-1, TRAJ26)
CIVFIYGQNFVF

SEQ ID NO: 621432 - protein, 12 aa, Homo sapiens
  CDR3 for beta chain variable domain of TCR clone 310716 (TRBV11-2, TRBJ2-2)
CASSLGGGDLFF

SEQ ID NO: 621433 - protein, 10 aa, Homo sapiens
  CDR3 for alpha chain variable domain of TCR clone 310717 (TRAV21, TRAJ49)
CAVTGNQFYF

SEQ ID NO: 621434 - protein, 16 aa, Homo sapiens
  CDR3 for beta chain variable domain of TCR clone 310717 (TRBV2, TRBJ2-1)
CASRSPAGGKYNEQFF

SEQ ID NO: 621435 - protein, 13 aa, Homo sapiens
  CDR3 for alpha chain variable domain of TCR clone 310718 (TRAV2, TRAJ40)
CAVVTSGTYKCIF

SEQ ID NO: 621436 - protein, 16 aa, Homo sapiens
  CDR3 for beta chain variable domain of TCR clone 310718 (TRBV5-1, TRBJ2-2)
CASSSRTGGRTGELFF

SEQ ID NO: 621437 - protein, 14 aa, Homo sapiens
  CDR3 for alpha chain variable domain of TCR clone 310719 (TRAV16, TRAJ17)
CAPRIKAAGNKLTF

SEQ ID NO: 621438 - protein, 17 aa, Homo sapiens
  CDR3 for beta chain variable domain of TCR clone 310719 (TRBV7-2, TRBJ2-3)
CASSSYSGSRRADTQYF

SEQ ID NO: 621439 - protein, 16 aa, Homo sapiens
  CDR3 for alpha chain variable domain of TCR clone 310720 (TRAV30, TRAJ24)
CGTEIVDADSWGKFQF

SEQ ID NO: 621440 - protein, 16 aa, Homo sapiens
  CDR3 for beta chain variable domain of TCR clone 310720 (TRBV28, TRBJ2-7)
CASSLFFETGGPEQCF

SEQ ID NO: 621441 - protein, 14 aa, Homo sapiens
  CDR3 for alpha chain variable domain of TCR clone 310721 (TRAV10, TRAJ48)
CVGVFHFGNEKLTF

SEQ ID NO: 621442 - protein, 12 aa, Homo sapiens
  CDR3 for beta chain variable domain of TCR clone 310721 (TRBV11-2, TRBJ2-2)
CASSLGGGELFF

SEQ ID NO: 621443 - protein, 15 aa, Homo sapiens
  CDR3 for alpha chain variable domain of TCR clone 310722 (TRAV3, TRAJ22)
CAVRDRGGSARQLDF

SEQ ID NO: 621444 - protein, 16 aa, Homo sapiens
  CDR3 for beta chain variable domain of TCR clone 310722 (TRBV5-4, TRBJ2-3)
CASQQPGAGGADTQYF

SEQ ID NO: 621445 - protein, 11 aa, Homo sapiens
  CDR3 for alpha chain variable domain of TCR clone 310723 (TRAV12-1, TRAJ34)
CVVNKGRELIF

SEQ ID NO: 621446 - protein, 15 aa, Homo sapiens
  CDR3 for beta chain variable domain of TCR clone 310723 (TRBV5-1, TRBJ2-7)
CASSLNGGPAREQYF

SEQ ID NO: 621447 - protein, 14 aa, Homo sapiens
  CDR3 for alpha chain variable domain of TCR clone 310724 (TRAV12-2, TRAJ24)
CAVTPADSWGKLRF

SEQ ID NO: 621448 - protein, 15 aa, Homo sapiens
  CDR3 for beta chain variable domain of TCR clone 310724 (TRBV27, TRBJ2-1)
CASSNGGGSSNEQFF

SEQ ID NO: 621449 - protein, 15 aa, Homo sapiens
  CDR3 for alpha chain variable domain of TCR clone 310725 (TRAV12-1, TRAJ40)
CVVNMHFPGTYKYIF

SEQ ID NO: 621450 - protein, 14 aa, Homo sapiens
  CDR3 for beta chain variable domain of TCR clone 310725 (TRBV11-2, TRBJ2-3)
CASSRLARTDTQYF

SEQ ID NO: 621451 - protein, 14 aa, Homo sapiens
  CDR3 for alpha chain variable domain of TCR clone 310726 (TRAV12-3, TRAJ9)
CAMSPNTGGFKTIF

SEQ ID NO: 621452 - protein, 14 aa, Homo sapiens
  CDR3 for beta chain variable domain of TCR clone 310726 (TRBV19, TRBJ1-5)
CASSIASSPSILVM

SEQ ID NO: 621453 - protein, 13 aa, Homo sapiens
  CDR3 for alpha chain variable domain of TCR clone 310727 (TRAV35, TRAJ56)
CAGPTEANSKLTF

SEQ ID NO: 621454 - protein, 16 aa, Homo sapiens
  CDR3 for beta chain variable domain of TCR clone 310727 (TRBV20-1, TRBJ1-1)
CSAYKVQGDLNTEAYF

SEQ ID NO: 621455 - protein, 11 aa, Homo sapiens
  CDR3 for alpha chain variable domain of TCR clone 310728 (TRAV12-3, TRAJ49)
CAANTGNQFYF

SEQ ID NO: 621456 - protein, 15 aa, Homo sapiens
  CDR3 for beta chain variable domain of TCR clone 310728 (TRBV11-2, TRBJ2-1)
CASSLGTSGLNEQFV

SEQ ID NO: 621457 - protein, 17 aa, Homo sapiens
  CDR3 for alpha chain variable domain of TCR clone 310729 (TRAV27, TRAJ42)
CAERVIYYGGSQGNLIF

SEQ ID NO: 621458 - protein, 12 aa, Homo sapiens
  CDR3 for beta chain variable domain of TCR clone 310729 (TRBV5-1, TRBJ1-2)
CASSQDTYGYTF

SEQ ID NO: 621459 - protein, 13 aa, Homo sapiens
  CDR3 for alpha chain variable domain of TCR clone 310730 (TRAV21, TRAJ56)
CAVRSGANSKLTF

SEQ ID NO: 621460 - protein, 15 aa, Homo sapiens
  CDR3 for beta chain variable domain of TCR clone 310730 (TRBV7-9, TRBJ1-1)
CASSHRGTVNTEAFF

SEQ ID NO: 621461 - protein, 16 aa, Homo sapiens
  CDR3 for alpha chain variable domain of TCR clone 310731 (TRAV30, TRAJ24)
CGTEMVDADNWGKFQF

SEQ ID NO: 621462 - protein, 14 aa, Homo sapiens
  CDR3 for beta chain variable domain of TCR clone 310731 (TRBV12-5, TRBJ2-5)
CASGSRTHQETQYF

SEQ ID NO: 621463 - protein, 23 aa, Homo sapiens
  CDR3 for alpha chain variable domain of TCR clone 310732 (TRAV26-2, TRAJ38)
CILYNAGNNHIQNPDPAVYQLRD

SEQ ID NO: 621464 - protein, 13 aa, Homo sapiens
  CDR3 for beta chain variable domain of TCR clone 310732 (TRBV20-1, TRBJ2-7)
CSATHTSGYEQYF

SEQ ID NO: 621465 - protein, 11 aa, Homo sapiens
  CDR3 for alpha chain variable domain of TCR clone 310733 (TRAV23/DV6, TRAJ9)
CAASLSPPNTE

SEQ ID NO: 621466 - protein, 18 aa, Homo sapiens
  CDR3 for beta chain variable domain of TCR clone 310733 (TRBV4-1, TRBJ2-7)
CASSQDTGAGSGLNEQYF

SEQ ID NO: 621467 - protein, 14 aa, Homo sapiens
  CDR3 for alpha chain variable domain of TCR clone 310734 (TRAV1-2, TRAJ16)
CADNRFSDGQKLLF

SEQ ID NO: 621468 - protein, 12 aa, Homo sapiens
  CDR3 for beta chain variable domain of TCR clone 310734 (TRBV12-5, TRBJ2-5)
CASGQGVETQYF

SEQ ID NO: 621469 - protein, 13 aa, Homo sapiens
  CDR3 for alpha chain variable domain of TCR clone 310735 (TRAV13-1, TRAJ6)
CVASSGGSYIPTF

SEQ ID NO: 621470 - protein, 14 aa, Homo sapiens
  CDR3 for beta chain variable domain of TCR clone 310735 (TRBV20-1, TRBJ2-4)
CSAVAGGPGNIQYF

SEQ ID NO: 621471 - protein, 17 aa, Homo sapiens
  CDR3 for alpha chain variable domain of TCR clone 310736 (TRAV26-1, TRAJ53)
CIVRADDSGGSNYKLTC

SEQ ID NO: 621472 - protein, 15 aa, Homo sapiens
  CDR3 for beta chain variable domain of TCR clone 310736 (TRBV20-1, TRBJ2-7)
CSARVPAAYFYEQYF

SEQ ID NO: 621473 - protein, 14 aa, Homo sapiens
  CDR3 for alpha chain variable domain of TCR clone 310737 (TRAV29/DV5, TRAJ36)
CAARRKTGANNLFF

SEQ ID NO: 621474 - protein, 14 aa, Homo sapiens
  CDR3 for beta chain variable domain of TCR clone 310737 (TRBV12-5, TRBJ2-5)
CASGARTRQETQYF

SEQ ID NO: 621475 - protein, 12 aa, Homo sapiens
  CDR3 for alpha chain variable domain of TCR clone 310738 (TRAV12-3, TRAJ17)
CAMTLTGNKLTF

SEQ ID NO: 621476 - protein, 14 aa, Homo sapiens
  CDR3 for beta chain variable domain of TCR clone 310738 (TRBV4-1, TRBJ2-7)
CASIPSREGFEQYF

SEQ ID NO: 621477 - protein, 12 aa, Homo sapiens
  CDR3 for alpha chain variable domain of TCR clone 310739 (TRAV8-3, TRAJ41)
CAVALSGYALNF

SEQ ID NO: 621478 - protein, 16 aa, Homo sapiens
  CDR3 for beta chain variable domain of TCR clone 310739 (TRBV27, TRBJ2-7)
CASSSGRRDSAYEQYF

SEQ ID NO: 621479 - protein, 16 aa, Homo sapiens
  CDR3 for alpha chain variable domain of TCR clone 310740 (TRAV13-1, TRAJ37)
FAASSLGFSNTGKLIF

SEQ ID NO: 621480 - protein, 12 aa, Homo sapiens
  CDR3 for beta chain variable domain of TCR clone 310740 (TRBV6-1, TRBJ2-5)
CASSEGRETQYF

SEQ ID NO: 621481 - protein, 14 aa, Homo sapiens
  CDR3 for alpha chain variable domain of TCR clone 310741 (TRAV12-3, TRAJ10)
SHLPPTGGGNKLTF

SEQ ID NO: 621482 - protein, 15 aa, Homo sapiens
  CDR3 for beta chain variable domain of TCR clone 310741 (TRBV18, TRBJ2-1)
CASSPPSASYNEQFF

SEQ ID NO: 621483 - protein, 13 aa, Homo sapiens
  CDR3 for alpha chain variable domain of TCR clone 310742 (TRAV20, TRAJ48)
CAVQGVGNEKLTF

SEQ ID NO: 621484 - protein, 14 aa, Homo sapiens
  CDR3 for beta chain variable domain of TCR clone 310742 (TRBV27, TRBJ2-7)
CASSFREGPYEQYF

SEQ ID NO: 621485 - protein, 15 aa, Homo sapiens
  CDR3 for alpha chain variable domain of TCR clone 310743 (TRAV17, TRAJ57)
CATGPSQGGSEKLVF

SEQ ID NO: 621486 - protein, 17 aa, Homo sapiens
  CDR3 for beta chain variable domain of TCR clone 310743 (TRBV25-1, TRBJ2-7)
CASSDARVVFSSYEQYF

SEQ ID NO: 621487 - protein, 13 aa, Homo sapiens
  CDR3 for alpha chain variable domain of TCR clone 310744 (TRAV17, TRAJ5)
CAPMDTGRRALTF

SEQ ID NO: 621488 - protein, 13 aa, Homo sapiens
  CDR3 for beta chain variable domain of TCR clone 310744 (TRBV7-9, TRBJ1-2)
CASSVKQNYGYSF

SEQ ID NO: 621489 - protein, 12 aa, Homo sapiens
  CDR3 for alpha chain variable domain of TCR clone 310745 (TRAV22, TRAJ29)
CCGGSGNTPFVF

SEQ ID NO: 621490 - protein, 13 aa, Homo sapiens
  CDR3 for beta chain variable domain of TCR clone 310745 (TRBV4-2, TRBJ1-1)
CASSQAGNTEAFF

SEQ ID NO: 621491 - protein, 21 aa, Homo sapiens
  CDR3 for alpha chain variable domain of TCR clone 310746 (TRAV1-1, TRAJ6)
CLLLLRCERLERTGGGYIPTF

SEQ ID NO: 621492 - protein, 14 aa, Homo sapiens
  CDR3 for beta chain variable domain of TCR clone 310746 (TRBV4-1, TRBJ2-2)
CASGQAVNTGELFF

SEQ ID NO: 621493 - protein, 13 aa, Homo sapiens
  CDR3 for alpha chain variable domain of TCR clone 310747 (TRAV13-1, TRAJ10)
CAALEVGGNKLTF

SEQ ID NO: 621494 - protein, 11 aa, Homo sapiens
  CDR3 for beta chain variable domain of TCR clone 310747 (TRBV6-3, TRBJ2-7)
CASSFSYEQYF

SEQ ID NO: 621495 - protein, 12 aa, Homo sapiens
  CDR3 for alpha chain variable domain of TCR clone 310748 (TRAV8-6, TRAJ33)
GAVTDSNYQLIW

SEQ ID NO: 621496 - protein, 15 aa, Homo sapiens
  CDR3 for beta chain variable domain of TCR clone 310748 (TRBV4-3, TRBJ1-2)
CASSRGQGRNYGYTC

SEQ ID NO: 621497 - protein, 23 aa, Homo sapiens
  CDR3 for alpha chain variable domain of TCR clone 310749 (TRAV26-1, TRAJ38)
CIADNAGNNHIQNPDPAVHHLRD

SEQ ID NO: 621498 - protein, 13 aa, Homo sapiens
  CDR3 for beta chain variable domain of TCR clone 310749 (TRBV20-1, TRBJ1-1)
CSARGGGNTEAFF

SEQ ID NO: 621499 - protein, 13 aa, Homo sapiens
  CDR3 for alpha chain variable domain of TCR clone 310750 (TRAV12-2, TRAJ49)
CAVKPNTGNQFYF

SEQ ID NO: 621500 - protein, 14 aa, Homo sapiens
  CDR3 for beta chain variable domain of TCR clone 310750 (TRBV12-4, TRBJ1-1)
CASTWTGHDTEAFF

SEQ ID NO: 621501 - protein, 15 aa, Homo sapiens
  CDR3 for alpha chain variable domain of TCR clone 310751 (TRAV27, TRAJ37)
CAGIHGPSNTGKLIF

SEQ ID NO: 621502 - protein, 13 aa, Homo sapiens
  CDR3 for beta chain variable domain of TCR clone 310751 (TRBV19, TRBJ2-1)
CASSIRSSWEQFF

SEQ ID NO: 621503 - protein, 14 aa, Homo sapiens
  CDR3 for alpha chain variable domain of TCR clone 310752 (TRAV26-1, TRAJ49)
CIVRQRNTGNQFYF

SEQ ID NO: 621504 - protein, 13 aa, Homo sapiens
  CDR3 for beta chain variable domain of TCR clone 310752 (TRBV12-4, TRBJ2-4)
CASSNLRGNIQYF

SEQ ID NO: 621505 - protein, 13 aa, Homo sapiens
  CDR3 for alpha chain variable domain of TCR clone 310753 (TRAV2, TRAJ40)
CAVVTSGTYKYIF

SEQ ID NO: 621506 - protein, 14 aa, Homo sapiens
  CDR3 for beta chain variable domain of TCR clone 310753 (TRBV11-3, TRBJ2-3)
CQPKDGREGDTQYF

SEQ ID NO: 621507 - protein, 12 aa, Homo sapiens
  CDR3 for alpha chain variable domain of TCR clone 310754 (TRAV12-1, TRAJ40)
CVVYSGTYKYIF

SEQ ID NO: 621508 - protein, 17 aa, Homo sapiens
  CDR3 for beta chain variable domain of TCR clone 310754 (TRBV11-2, TRBJ2-3)
CQQLRGASRGAPNAQYF

SEQ ID NO: 621509 - protein, 17 aa, Homo sapiens
  CDR3 for alpha chain variable domain of TCR clone 310755 (TRAV1-1, TRAJ4)
CALYNKLIFGAGTRLAV

SEQ ID NO: 621510 - protein, 18 aa, Homo sapiens
  CDR3 for beta chain variable domain of TCR clone 310755 (TRBV27, TRBJ2-7)
CASQTGQFFPGARDEQYF

SEQ ID NO: 621511 - protein, 14 aa, Homo sapiens
  CDR3 for alpha chain variable domain of TCR clone 310756 (TRAV29/DV5, TRAJ45)
CAASFRGGADGLTF

SEQ ID NO: 621512 - protein, 14 aa, Homo sapiens
  CDR3 for beta chain variable domain of TCR clone 310756 (TRBV28, TRBJ1-1)
CASSSEQGYTEAFF

SEQ ID NO: 621513 - protein, 12 aa, Homo sapiens
  CDR3 for alpha chain variable domain of TCR clone 310757 (TRAV21, TRAJ31)
YAVWGNNARLMF

SEQ ID NO: 621514 - protein, 16 aa, Homo sapiens
  CDR3 for beta chain variable domain of TCR clone 310757 (TRBV27, TRBJ2-5)
CASSYGPGGQKETQYF

SEQ ID NO: 621515 - protein, 17 aa, Homo sapiens
  CDR3 for alpha chain variable domain of TCR clone 310758 (TRAV3, TRAJ6)
CAVRDGPRAGGSYIPTY

SEQ ID NO: 621516 - protein, 18 aa, Homo sapiens
  CDR3 for beta chain variable domain of TCR clone 310758 (TRBV7-2, TRBJ2-3)
CASSLKREGSGITDTQYF

SEQ ID NO: 621517 - protein, 15 aa, Homo sapiens
  CDR3 for alpha chain variable domain of TCR clone 310759 (TRAV12-2, TRAJ53)
CAGNGGGGSNYKLTF

SEQ ID NO: 621518 - protein, 17 aa, Homo sapiens
  CDR3 for beta chain variable domain of TCR clone 310759 (TRBV7-3, TRBJ2-3)
CASSLMKRVRGADTQYF

SEQ ID NO: 621519 - protein, 14 aa, Homo sapiens
  CDR3 for alpha chain variable domain of TCR clone 310760 (TRAV12-2, TRAJ17)
CAVLFKAPGNKLAF

SEQ ID NO: 621520 - protein, 17 aa, Homo sapiens
  CDR3 for beta chain variable domain of TCR clone 310760 (TRBV20-1, TRBJ2-2)
CSASGSGQGGLTGELFF

SEQ ID NO: 621521 - protein, 14 aa, Homo sapiens
  CDR3 for alpha chain variable domain of TCR clone 310761 (TRAV1-2, TRAJ16)
CAVNRFSDGQKLLF

SEQ ID NO: 621522 - protein, 15 aa, Homo sapiens
  CDR3 for beta chain variable domain of TCR clone 310761 (TRBV10-3, TRBJ2-2)
CAISVATSNTGELFF

SEQ ID NO: 621523 - protein, 14 aa, Homo sapiens
  CDR3 for alpha chain variable domain of TCR clone 310762 (TRAV35, TRAJ33)
CAGSSQDSNYQLIW

SEQ ID NO: 621524 - protein, 12 aa, Homo sapiens
  CDR3 for beta chain variable domain of TCR clone 310762 (TRBV20-1, TRBJ2-1)
CSAQYTYNEQFF

SEQ ID NO: 621525 - protein, 13 aa, Homo sapiens
  CDR3 for alpha chain variable domain of TCR clone 310763 (TRAV22, TRAJ29)
CAVGGSGNTPLVS

SEQ ID NO: 621526 - protein, 14 aa, Homo sapiens
  CDR3 for beta chain variable domain of TCR clone 310763 (TRBV19, TRBJ1-5)
CASRAPDSFLSQHF

SEQ ID NO: 621527 - protein, 11 aa, Homo sapiens
  CDR3 for alpha chain variable domain of TCR clone 310764 (TRAV21, TRAJ23)
CAPQRRGKLIF

SEQ ID NO: 621528 - protein, 15 aa, Homo sapiens
  CDR3 for beta chain variable domain of TCR clone 310764 (TRBV2, TRBJ2-1)
CASSELAGSYNEQFF

SEQ ID NO: 621529 - protein, 15 aa, Homo sapiens
  CDR3 for alpha chain variable domain of TCR clone 310765 (TRAV8-3, TRAJ15)
CAVGAPNQAGTALIF

SEQ ID NO: 621530 - protein, 14 aa, Homo sapiens
  CDR3 for beta chain variable domain of TCR clone 310765 (TRBV20-1, TRBJ2-1)
CSPDDEASYTEQFF

SEQ ID NO: 621531 - protein, 12 aa, Homo sapiens
  CDR3 for alpha chain variable domain of TCR clone 310766 (TRAV12-1, TRAJ40)
CVVYSGTYKYIF

SEQ ID NO: 621532 - protein, 18 aa, Homo sapiens
  CDR3 for beta chain variable domain of TCR clone 310766 (TRBV11-2, TRBJ2-3)
CASSLSGASRGAPNTQYF

SEQ ID NO: 621533 - protein, 14 aa, Homo sapiens
  CDR3 for alpha chain variable domain of TCR clone 310767 (TRAV1-2, TRAJ29)
CAVRELTSASPLVF

SEQ ID NO: 621534 - protein, 12 aa, Homo sapiens
  CDR3 for beta chain variable domain of TCR clone 310767 (TRBV11-2, TRBJ2-2)
CASSLGGGELFF

SEQ ID NO: 621535 - protein, 12 aa, Homo sapiens
  CDR3 for alpha chain variable domain of TCR clone 310768 (TRAV13-2, TRAJ23)
FVERHRGGKLIF

SEQ ID NO: 621536 - protein, 16 aa, Homo sapiens
  CDR3 for beta chain variable domain of TCR clone 310768 (TRBV20-1, TRBJ1-4)
CSAPGQGLLTNEKLFF

SEQ ID NO: 621537 - protein, 17 aa, Homo sapiens
  CDR3 for alpha chain variable domain of TCR clone 310769 (TRAV3, TRAJ6)
CAVRDGPRAGGSYIPTF

SEQ ID NO: 621538 - protein, 14 aa, Homo sapiens
  CDR3 for beta chain variable domain of TCR clone 310769 (TRBV7-2, TRBJ2-7)
CASSPKTRFYEQFF

SEQ ID NO: 621539 - protein, 15 aa, Homo sapiens
  CDR3 for alpha chain variable domain of TCR clone 310770 (TRAV3, TRAJ22)
CAVRDLGGSARQLTF

SEQ ID NO: 621540 - protein, 15 aa, Homo sapiens
  CDR3 for beta chain variable domain of TCR clone 310770 (TRBV19, TRBJ2-5)
CASSIVRASQETQYF

SEQ ID NO: 621541 - protein, 14 aa, Homo sapiens
  CDR3 for alpha chain variable domain of TCR clone 310771 (TRAV10, TRAJ39)
CVVILNNAGNMLTF

SEQ ID NO: 621542 - protein, 20 aa, Homo sapiens
  CDR3 for beta chain variable domain of TCR clone 310771 (TRBV28, TRBJ2-1)
CASTPIGRSPGLAGGNEQFF

SEQ ID NO: 621543 - protein, 15 aa, Homo sapiens
  CDR3 for alpha chain variable domain of TCR clone 310772 (TRAV12-3, TRAJ6)
CAMSATTGGSYRPTF

SEQ ID NO: 621544 - protein, 20 aa, Homo sapiens
  CDR3 for beta chain variable domain of TCR clone 310772 (TRBV7-8, TRBJ2-2)
CASSHLFPGPTIHITGELFF

SEQ ID NO: 621545 - protein, 13 aa, Homo sapiens
  CDR3 for alpha chain variable domain of TCR clone 310773 (TRAV35, TRAJ42)
CAGFPGSQGNLIF

SEQ ID NO: 621546 - protein, 17 aa, Homo sapiens
  CDR3 for beta chain variable domain of TCR clone 310773 (TRBV11-2, TRBJ2-1)
CASSLYPPGVEYNEQFV

SEQ ID NO: 621547 - protein, 14 aa, Homo sapiens
  CDR3 for alpha chain variable domain of TCR clone 310774 (TRAV16, TRAJ15)
CALRPNQAGTALIF

SEQ ID NO: 621548 - protein, 15 aa, Homo sapiens
  CDR3 for beta chain variable domain of TCR clone 310774 (TRBV3-1, TRBJ2-5)
CASSRGLALRETQYF

SEQ ID NO: 621549 - protein, 16 aa, Homo sapiens
  CDR3 for alpha chain variable domain of TCR clone 310775 (TRAV8-6, TRAJ58)
CCELLGRRNHGSRLTF

SEQ ID NO: 621550 - protein, 14 aa, Homo sapiens
  CDR3 for beta chain variable domain of TCR clone 310775 (TRBV4-2, TRBJ2-1)
CASGLDRAYNEQFF

SEQ ID NO: 621551 - protein, 14 aa, Homo sapiens
  CDR3 for alpha chain variable domain of TCR clone 310776 (TRAV12-2, TRAJ13)
CAVNPSGGYQKVTF

SEQ ID NO: 621552 - protein, 13 aa, Homo sapiens
  CDR3 for beta chain variable domain of TCR clone 310776 (TRBV12-4, TRBJ1-1)
CQQSRDRGTEAFF

SEQ ID NO: 621553 - protein, 14 aa, Homo sapiens
  CDR3 for alpha chain variable domain of TCR clone 310777 (TRAV1-2, TRAJ16)
CAVNRFSYGQKLLF

SEQ ID NO: 621554 - protein, 12 aa, Homo sapiens
  CDR3 for beta chain variable domain of TCR clone 310777 (TRBV14, TRBJ1-1)
CASSQIKGLAFF

SEQ ID NO: 621555 - protein, 14 aa, Homo sapiens
  CDR3 for alpha chain variable domain of TCR clone 310778 (TRAV16, TRAJ33)
CALSAMDTNYQLIC

SEQ ID NO: 621556 - protein, 12 aa, Homo sapiens
  CDR3 for beta chain variable domain of TCR clone 310778 (TRBV5-1, TRBJ1-2)
CASSQDTYGYTF

SEQ ID NO: 621557 - protein, 14 aa, Homo sapiens
  CDR3 for alpha chain variable domain of TCR clone 310779 (TRAV14/DV4, TRAJ54)
CAMREAPGAQKLVF

SEQ ID NO: 621558 - protein, 15 aa, Homo sapiens
  CDR3 for beta chain variable domain of TCR clone 310779 (TRBV5-1, TRBJ2-7)
CASSLNGGPARQQYF

SEQ ID NO: 621559 - protein, 13 aa, Homo sapiens
  CDR3 for alpha chain variable domain of TCR clone 310780 (TRAV36/DV7, TRAJ37)
CAVFSSNTGKLIF

SEQ ID NO: 621560 - protein, 20 aa, Homo sapiens
  CDR3 for beta chain variable domain of TCR clone 310780 (TRBV4-2, TRBJ2-7)
CASSQASGGNLRAVLRAGHQ

SEQ ID NO: 621561 - protein, 13 aa, Homo sapiens
  CDR3 for alpha chain variable domain of TCR clone 310781 (TRAV17, TRAJ34)
CATDRYNTDKLIF

SEQ ID NO: 621562 - protein, 12 aa, Homo sapiens
  CDR3 for beta chain variable domain of TCR clone 310781 (TRBV11-2, TRBJ2-2)
CASSLGGGELFF

SEQ ID NO: 621563 - protein, 14 aa, Homo sapiens
  CDR3 for alpha chain variable domain of TCR clone 310782 (TRAV17, TRAJ39)
CATDPVRAGNMPTF

SEQ ID NO: 621564 - protein, 15 aa, Homo sapiens
  CDR3 for beta chain variable domain of TCR clone 310782 (TRBV13, TRBJ1-5)
CASSFGQGGVQPQHF

SEQ ID NO: 621565 - protein, 14 aa, Homo sapiens
  CDR3 for alpha chain variable domain of TCR clone 310783 (TRAV12-1, TRAJ4)
CVGDFSGGYHKLIF

SEQ ID NO: 621566 - protein, 15 aa, Homo sapiens
  CDR3 for beta chain variable domain of TCR clone 310783 (TRBV4-2, TRBJ2-7)
CASSQVDRSSYEQYF

SEQ ID NO: 621567 - protein, 15 aa, Homo sapiens
  CDR3 for alpha chain variable domain of TCR clone 310784 (TRAV8-2, TRAJ40)
CLVLGTTSGTYKYIF

SEQ ID NO: 621568 - protein, 16 aa, Homo sapiens
  CDR3 for beta chain variable domain of TCR clone 310784 (TRBV7-3, TRBJ2-1)
CASSLEGYRSYNEQFF

SEQ ID NO: 621569 - protein, 16 aa, Homo sapiens
  CDR3 for alpha chain variable domain of TCR clone 310785 (TRAV12-2, TRAJ28)
CAVITYSGAGSYQLTF

SEQ ID NO: 621570 - protein, 12 aa, Homo sapiens
  CDR3 for beta chain variable domain of TCR clone 310785 (TRBV9, TRBJ2-2)
CTSSLVTGELFF

SEQ ID NO: 621571 - protein, 13 aa, Homo sapiens
  CDR3 for alpha chain variable domain of TCR clone 310786 (TRAV20, TRAJ15)
CATINQAGTALIF

SEQ ID NO: 621572 - protein, 13 aa, Homo sapiens
  CDR3 for beta chain variable domain of TCR clone 310786 (TRBV12-4, TRBJ2-1)
CASRQPSNNEQCF

SEQ ID NO: 621573 - protein, 13 aa, Homo sapiens
  CDR3 for alpha chain variable domain of TCR clone 310787 (TRAV8-6, TRAJ9)
CGVWDTGGFKTIF

SEQ ID NO: 621574 - protein, 14 aa, Homo sapiens
  CDR3 for beta chain variable domain of TCR clone 310787 (TRBV2, TRBJ2-1)
CASSEALIYNEQFF

SEQ ID NO: 621575 - protein, 15 aa, Homo sapiens
  CDR3 for alpha chain variable domain of TCR clone 310788 (TRAV3, TRAJ29)
CAVRAPLSGNTPLVF

SEQ ID NO: 621576 - protein, 15 aa, Homo sapiens
  CDR3 for beta chain variable domain of TCR clone 310788 (TRBV28, TRBJ1-1)
CASRIKWGLNTEAFF

SEQ ID NO: 621577 - protein, 13 aa, Homo sapiens
  CDR3 for alpha chain variable domain of TCR clone 310789 (TRAV13-1, TRAJ6)
CAASKGGSYIPTF

SEQ ID NO: 621578 - protein, 13 aa, Homo sapiens
  CDR3 for beta chain variable domain of TCR clone 310789 (TRBV7-9, TRBJ2-5)
CASLPSGRETQCF

SEQ ID NO: 621579 - protein, 16 aa, Homo sapiens
  CDR3 for alpha chain variable domain of TCR clone 310790 (TRAV23/DV6, TRAJ9)
CAASIGGNTGGFKTIL

SEQ ID NO: 621580 - protein, 17 aa, Homo sapiens
  CDR3 for beta chain variable domain of TCR clone 310790 (TRBV13, TRBJ2-3)
CASSLSRVAGGRNTQYF

SEQ ID NO: 621581 - protein, 16 aa, Homo sapiens
  CDR3 for alpha chain variable domain of TCR clone 310791 (TRAV3, TRAJ21)
CAVRDIERGNFNKFYF

SEQ ID NO: 621582 - protein, 20 aa, Homo sapiens
  CDR3 for beta chain variable domain of TCR clone 310791 (TRBV4-1, TRBJ2-2)
CASSQASPPGLASNAGELFF

SEQ ID NO: 621583 - protein, 14 aa, Homo sapiens
  CDR3 for alpha chain variable domain of TCR clone 310792 (TRAV1-2, TRAJ6)
CAVSLSGGSYIPTF

SEQ ID NO: 621584 - protein, 15 aa, Homo sapiens
  CDR3 for beta chain variable domain of TCR clone 310792 (TRBV12-4, TRBJ1-2)
CASSLAHRDGQAYTF

SEQ ID NO: 621585 - protein, 14 aa, Homo sapiens
  CDR3 for alpha chain variable domain of TCR clone 310793 (TRAV8-3, TRAJ4)
CAVGAAGGYNKLIF

SEQ ID NO: 621586 - protein, 15 aa, Homo sapiens
  CDR3 for beta chain variable domain of TCR clone 310793 (TRBV28, TRBJ2-1)
CASSIIAGGRSEQFF

SEQ ID NO: 621587 - protein, 13 aa, Homo sapiens
  CDR3 for alpha chain variable domain of TCR clone 310794 (TRAV1-2, TRAJ9)
CAVLNTGGFKTIF

SEQ ID NO: 621588 - protein, 13 aa, Homo sapiens
  CDR3 for beta chain variable domain of TCR clone 310794 (TRBV20-1, TRBJ1-1)
CSARVGGNTEAFF

SEQ ID NO: 621589 - protein, 15 aa, Homo sapiens
  CDR3 for alpha chain variable domain of TCR clone 310795 (TRAV23/DV6, TRAJ32)
CAARSYGGATNKLIF

SEQ ID NO: 621590 - protein, 14 aa, Homo sapiens
  CDR3 for beta chain variable domain of TCR clone 310795 (TRBV7-9, TRBJ2-5)
CASSLAPDQETQYF

SEQ ID NO: 621591 - protein, 16 aa, Homo sapiens
  CDR3 for alpha chain variable domain of TCR clone 310796 (TRAV26-1, TRAJ38)
CIVRVSGAGNNRKLIW

SEQ ID NO: 621592 - protein, 14 aa, Homo sapiens
  CDR3 for beta chain variable domain of TCR clone 310796 (TRBV25-1, TRBJ1-1)
CASTHLGGNTEAFF

SEQ ID NO: 621593 - protein, 14 aa, Homo sapiens
  CDR3 for alpha chain variable domain of TCR clone 310797 (TRAV26-1, TRAJ38)
CIVVGAGNNRKLIW

SEQ ID NO: 621594 - protein, 12 aa, Homo sapiens
  CDR3 for beta chain variable domain of TCR clone 310797 (TRBV5-1, TRBJ2-5)
GASSWDQETQYF

SEQ ID NO: 621595 - protein, 16 aa, Homo sapiens
  CDR3 for alpha chain variable domain of TCR clone 310798 (TRAV30, TRAJ26)
CGTESVGDNDGQNFVF

SEQ ID NO: 621596 - protein, 13 aa, Homo sapiens
  CDR3 for beta chain variable domain of TCR clone 310798 (TRBV19, TRBJ1-2)
CASSISEDYGYTF

SEQ ID NO: 621597 - protein, 15 aa, Homo sapiens
  CDR3 for alpha chain variable domain of TCR clone 310799 (TRAV13-1, TRAJ44)
CAASSGGGTASKLTF

SEQ ID NO: 621598 - protein, 14 aa, Homo sapiens
  CDR3 for beta chain variable domain of TCR clone 310799 (TRBV7-2, TRBJ2-5)
CASSPRVSSETQYF

SEQ ID NO: 621599 - protein, 13 aa, Homo sapiens
  CDR3 for alpha chain variable domain of TCR clone 310800 (TRAV22, TRAJ29)
CAVGGSGNTPLVF

SEQ ID NO: 621600 - protein, 17 aa, Homo sapiens
  CDR3 for beta chain variable domain of TCR clone 310800 (TRBV5-5, TRBJ1-2)
CASSLGSLDGQSEGYTF

SEQ ID NO: 621601 - protein, 15 aa, Homo sapiens
  CDR3 for alpha chain variable domain of TCR clone 310801 (TRAV14/DV4, TRAJ46)
CAMREKKRSGDKLTL

SEQ ID NO: 621602 - protein, 13 aa, Homo sapiens
  CDR3 for beta chain variable domain of TCR clone 310801 (TRBV20-1, TRBJ2-5)
CSAREAFQETQYF

SEQ ID NO: 621603 - protein, 16 aa, Homo sapiens
  CDR3 for alpha chain variable domain of TCR clone 310802 (TRAV8-3, TRAJ13)
CAVGAYPSAGYQKVTF

SEQ ID NO: 621604 - protein, 15 aa, Homo sapiens
  CDR3 for beta chain variable domain of TCR clone 310802 (TRBV19, TRBJ1-5)
CASSIVWADKQPQHF

SEQ ID NO: 621605 - protein, 14 aa, Homo sapiens
  CDR3 for alpha chain variable domain of TCR clone 310803 (TRAV12-1, TRAJ30)
CVVNIGGRDGKIIF

SEQ ID NO: 621606 - protein, 14 aa, Homo sapiens
  CDR3 for beta chain variable domain of TCR clone 310803 (TRBV7-6, TRBJ2-3)
CASSVGTVTDTQYF

SEQ ID NO: 621607 - protein, 17 aa, Homo sapiens
  CDR3 for alpha chain variable domain of TCR clone 310804 (TRAV3, TRAJ7)
CAVRDISPLEGTTDSLL

SEQ ID NO: 621608 - protein, 17 aa, Homo sapiens
  CDR3 for beta chain variable domain of TCR clone 310804 (TRBV15, TRBJ1-2)
CATSGREIDVVNYGYTF

SEQ ID NO: 621609 - protein, 15 aa, Homo sapiens
  CDR3 for alpha chain variable domain of TCR clone 310805 (TRAV23/DV6, TRAJ38)
CAASGGAGNNRKLIW

SEQ ID NO: 621610 - protein, 13 aa, Homo sapiens
  CDR3 for beta chain variable domain of TCR clone 310805 (TRBV7-2, TRBJ1-2)
CASSLPGLYGYAF

SEQ ID NO: 621611 - protein, 14 aa, Homo sapiens
  CDR3 for alpha chain variable domain of TCR clone 310806 (TRAV8-4, TRAJ37)
CAVSESSNTGKLIF

SEQ ID NO: 621612 - protein, 14 aa, Homo sapiens
  CDR3 for beta chain variable domain of TCR clone 310806 (TRBV19, TRBJ2-1)
CASPTFVLSGEQFF

SEQ ID NO: 621613 - protein, 13 aa, Homo sapiens
  CDR3 for alpha chain variable domain of TCR clone 310807 (TRAV13-1, TRAJ39)
CAASIWAGNMLTF

SEQ ID NO: 621614 - protein, 15 aa, Homo sapiens
  CDR3 for beta chain variable domain of TCR clone 310807 (TRBV7-9, TRBJ1-1)
WASSLLEQGGTEAFF

SEQ ID NO: 621615 - protein, 13 aa, Homo sapiens
  CDR3 for alpha chain variable domain of TCR clone 310808 (TRAV17, TRAJ22)
CAHHSGSARHLTF

SEQ ID NO: 621616 - protein, 14 aa, Homo sapiens
  CDR3 for beta chain variable domain of TCR clone 310808 (TRBV16, TRBJ1-1)
CASSQAGPNTEAFF

SEQ ID NO: 621617 - protein, 14 aa, Homo sapiens
  CDR3 for alpha chain variable domain of TCR clone 310809 (TRAV4, TRAJ32)
CLVGLGGATNKLNL

SEQ ID NO: 621618 - protein, 15 aa, Homo sapiens
  CDR3 for beta chain variable domain of TCR clone 310809 (TRBV7-2, TRBJ2-1)
CASSLASGRVNEQFF

SEQ ID NO: 621619 - protein, 12 aa, Homo sapiens
  CDR3 for alpha chain variable domain of TCR clone 310810 (TRAV16, TRAJ27)
CALNTNAGKSTF

SEQ ID NO: 621620 - protein, 17 aa, Homo sapiens
  CDR3 for beta chain variable domain of TCR clone 310810 (TRBV7-8, TRBJ2-6)
CASSAGTGGAGAKVLTF

SEQ ID NO: 621621 - protein, 11 aa, Homo sapiens
  CDR3 for alpha chain variable domain of TCR clone 310811 (TRAV12-1, TRAJ30)
CVVNGQDKIIF

SEQ ID NO: 621622 - protein, 15 aa, Homo sapiens
  CDR3 for beta chain variable domain of TCR clone 310811 (TRBV20-1, TRBJ1-5)
CSAKPPGQGPQPQHF

SEQ ID NO: 621623 - protein, 15 aa, Homo sapiens
  CDR3 for alpha chain variable domain of TCR clone 310812 (TRAV26-1, TRAJ56)
CIVRVATGANSKLTF

SEQ ID NO: 621624 - protein, 12 aa, Homo sapiens
  CDR3 for beta chain variable domain of TCR clone 310812 (TRBV7-8, TRBJ2-7)
CASSLGDREQYF

SEQ ID NO: 621625 - protein, 14 aa, Homo sapiens
  CDR3 for alpha chain variable domain of TCR clone 310813 (TRAV3, TRAJ9)
CAVRLNTGGFKTIF

SEQ ID NO: 621626 - protein, 15 aa, Homo sapiens
  CDR3 for beta chain variable domain of TCR clone 310813 (TRBV7-2, TRBJ2-1)
CASSLASGRVYEQFF

SEQ ID NO: 621627 - protein, 17 aa, Homo sapiens
  CDR3 for alpha chain variable domain of TCR clone 310814 (TRAV3, TRAJ12)
CVVRDGGRMDSSYKLIF

SEQ ID NO: 621628 - protein, 15 aa, Homo sapiens
  CDR3 for beta chain variable domain of TCR clone 310814 (TRBV5-1, TRBJ2-3)
CASSVTSGSTDTQYF

SEQ ID NO: 621629 - protein, 15 aa, Homo sapiens
  CDR3 for alpha chain variable domain of TCR clone 310815 (TRAV3, TRAJ3)
CAVRDMSSSASQIIF

SEQ ID NO: 621630 - protein, 14 aa, Homo sapiens
  CDR3 for beta chain variable domain of TCR clone 310815 (TRBV6-6, TRBJ2-7)
CASSIAGGVDEQYF

SEQ ID NO: 621631 - protein, 13 aa, Homo sapiens
  CDR3 for alpha chain variable domain of TCR clone 310816 (TRAV2, TRAJ21)
CAVEVLNFNKFYF

SEQ ID NO: 621632 - protein, 15 aa, Homo sapiens
  CDR3 for beta chain variable domain of TCR clone 310816 (TRBV28, TRBJ2-5)
CASSPGQGSIETQYF

SEQ ID NO: 621633 - protein, 15 aa, Homo sapiens
  CDR3 for alpha chain variable domain of TCR clone 310817 (TRAV29/DV5, TRAJ57)
CAASLLRGGSEKLVF

SEQ ID NO: 621634 - protein, 15 aa, Homo sapiens
  CDR3 for beta chain variable domain of TCR clone 310817 (TRBV5-1, TRBJ1-3)
CASSLEGGAGNTIYF

SEQ ID NO: 621635 - protein, 12 aa, Homo sapiens
  CDR3 for alpha chain variable domain of TCR clone 310818 (TRAV21, TRAJ33)
GAKMDSNYQLIW

SEQ ID NO: 621636 - protein, 17 aa, Homo sapiens
  CDR3 for beta chain variable domain of TCR clone 310818 (TRBV20-1, TRBJ2-2)
CSASGSGQGGLTGELFF

SEQ ID NO: 621637 - protein, 14 aa, Homo sapiens
  CDR3 for alpha chain variable domain of TCR clone 310819 (TRAV13-1, TRAJ3)
CAASKSSSASKIIF

SEQ ID NO: 621638 - protein, 13 aa, Homo sapiens
  CDR3 for beta chain variable domain of TCR clone 310819 (TRBV25-1, TRBJ2-5)
CASSEGGRETQYF

SEQ ID NO: 621639 - protein, 15 aa, Homo sapiens
  CDR3 for alpha chain variable domain of TCR clone 310820 (TRAV3, TRAJ22)
WAVRDRGGSARQLTL

SEQ ID NO: 621640 - protein, 16 aa, Homo sapiens
  CDR3 for beta chain variable domain of TCR clone 310820 (TRBV5-4, TRBJ2-3)
CASQQPGAGGADTQYF

SEQ ID NO: 621641 - protein, 12 aa, Homo sapiens
  CDR3 for alpha chain variable domain of TCR clone 310821 (TRAV12-3, TRAJ17)
CAMTLTGNKLTF

SEQ ID NO: 621642 - protein, 12 aa, Homo sapiens
  CDR3 for beta chain variable domain of TCR clone 310821 (TRBV5-4, TRBJ2-7)
CASSLEAYEQYF

SEQ ID NO: 621643 - protein, 11 aa, Homo sapiens
  CDR3 for alpha chain variable domain of TCR clone 310822 (TRAV8-3, TRAJ20)
CAVAQENKLSF

SEQ ID NO: 621644 - protein, 15 aa, Homo sapiens
  CDR3 for beta chain variable domain of TCR clone 310822 (TRBV28, TRBJ2-1)
CASSIIAGGRSEQFF

SEQ ID NO: 621645 - protein, 12 aa, Homo sapiens
  CDR3 for alpha chain variable domain of TCR clone 310823 (TRAV13-2, TRAJ23)
CAERHRGGKLLF

SEQ ID NO: 621646 - protein, 17 aa, Homo sapiens
  CDR3 for beta chain variable domain of TCR clone 310823 (TRBV20-1, TRBJ2-2)
CSASGSGQGGLTGELFF

SEQ ID NO: 621647 - protein, 12 aa, Homo sapiens
  CDR3 for alpha chain variable domain of TCR clone 310824 (TRAV13-1, TRAJ48)
CAANFGNEKLTF

SEQ ID NO: 621648 - protein, 13 aa, Homo sapiens
  CDR3 for beta chain variable domain of TCR clone 310824 (TRBV7-3, TRBJ1-1)
CARSQDWGAEAFF

SEQ ID NO: 621649 - protein, 16 aa, Homo sapiens
  CDR3 for alpha chain variable domain of TCR clone 310825 (TRAV10, TRAJ13)
CVVSARNSGGYQKVNF

SEQ ID NO: 621650 - protein, 19 aa, Homo sapiens
  CDR3 for beta chain variable domain of TCR clone 310825 (TRBV12-4, TRBJ2-1)
CASTLAFDPRDKEANEQFF

SEQ ID NO: 621651 - protein, 13 aa, Homo sapiens
  CDR3 for alpha chain variable domain of TCR clone 310826 (TRAV23/DV6, TRAJ12)
CAPRVDSSYKLIF

SEQ ID NO: 621652 - protein, 12 aa, Homo sapiens
  CDR3 for beta chain variable domain of TCR clone 310826 (TRBV7-6, TRBJ2-5)
CASSLSQETQYV

SEQ ID NO: 621653 - protein, 16 aa, Homo sapiens
  CDR3 for alpha chain variable domain of TCR clone 310827 (TRAV21, TRAJ45)
CAVSWGSGGGADGLTF

SEQ ID NO: 621654 - protein, 14 aa, Homo sapiens
  CDR3 for beta chain variable domain of TCR clone 310827 (TRBV4-2, TRBJ1-2)
CASSPGGSNCGYTF

SEQ ID NO: 621655 - protein, 14 aa, Homo sapiens
  CDR3 for alpha chain variable domain of TCR clone 310828 (TRAV13-2, TRAJ15)
CAENPNQAGTALIF

SEQ ID NO: 621656 - protein, 16 aa, Homo sapiens
  CDR3 for beta chain variable domain of TCR clone 310828 (TRBV12-4, TRBJ1-2)
CASSPNATGKTRGYTF

SEQ ID NO: 621657 - protein, 12 aa, Homo sapiens
  CDR3 for alpha chain variable domain of TCR clone 310829 (TRAV8-3, TRAJ20)
CAVGANDYKLSF

SEQ ID NO: 621658 - protein, 15 aa, Homo sapiens
  CDR3 for beta chain variable domain of TCR clone 310829 (TRBV18, TRBJ2-3)
CASSPLAGETDTQYF

SEQ ID NO: 621659 - protein, 14 aa, Homo sapiens
  CDR3 for alpha chain variable domain of TCR clone 310830 (TRAV8-3, TRAJ4)
CAVGASGGYNKLIF

SEQ ID NO: 621660 - protein, 13 aa, Homo sapiens
  CDR3 for beta chain variable domain of TCR clone 310830 (TRBV18, TRBJ2-5)
CASALQGQETQYF

SEQ ID NO: 621661 - protein, 12 aa, Homo sapiens
  CDR3 for alpha chain variable domain of TCR clone 310831 (TRAV13-2, TRAJ39)
CAENSERNMLTF

SEQ ID NO: 621662 - protein, 17 aa, Homo sapiens
  CDR3 for beta chain variable domain of TCR clone 310831 (TRBV12-4, TRBJ1-5)
CASSLRGDRGPNQPQHF

SEQ ID NO: 621663 - protein, 16 aa, Homo sapiens
  CDR3 for alpha chain variable domain of TCR clone 310832 (TRAV12-3, TRAJ53)
CAMSPGSGGSKYKLTF

SEQ ID NO: 621664 - protein, 11 aa, Homo sapiens
  CDR3 for beta chain variable domain of TCR clone 310832 (TRBV29-1, TRBJ2-5)
RSEDRTGTQYF

SEQ ID NO: 621665 - protein, 16 aa, Homo sapiens
  CDR3 for alpha chain variable domain of TCR clone 310833 (TRAV14/DV4, TRAJ54)
CAMREGRIQGAQKLVF

SEQ ID NO: 621666 - protein, 16 aa, Homo sapiens
  CDR3 for beta chain variable domain of TCR clone 310833 (TRBV4-1, TRBJ2-3)
CASSQSTSGAEDTQYF

SEQ ID NO: 621667 - protein, 13 aa, Homo sapiens
  CDR3 for alpha chain variable domain of TCR clone 310834 (TRAV8-6, TRAJ21)
CAVSPSSLNKFYF

SEQ ID NO: 621668 - protein, 19 aa, Homo sapiens
  CDR3 for beta chain variable domain of TCR clone 310834 (TRBV7-2, TRBJ2-3)
CASSPGLAGGGLTTDTQYF

SEQ ID NO: 621669 - protein, 13 aa, Homo sapiens
  CDR3 for alpha chain variable domain of TCR clone 310835 (TRAV8-3, TRAJ44)
CAVVPGTASKLTF

SEQ ID NO: 621670 - protein, 13 aa, Homo sapiens
  CDR3 for beta chain variable domain of TCR clone 310835 (TRBV9, TRBJ2-1)
CASSVGQGGEQFF

SEQ ID NO: 621671 - protein, 18 aa, Homo sapiens
  CDR3 for alpha chain variable domain of TCR clone 310836 (TRAV26-1, TRAJ23)
CIVRVGLEVWNQGGKLIF

SEQ ID NO: 621672 - protein, 15 aa, Homo sapiens
  CDR3 for beta chain variable domain of TCR clone 310836 (TRBV10-3, TRBJ2-3)
CAISDWYRDTDTQYF

SEQ ID NO: 621673 - protein, 13 aa, Homo sapiens
  CDR3 for alpha chain variable domain of TCR clone 310837 (TRAV20, TRAJ20)
CCAAGIYDYKLSF

SEQ ID NO: 621674 - protein, 13 aa, Homo sapiens
  CDR3 for beta chain variable domain of TCR clone 310837 (TRBV19, TRBJ2-5)
CASSETAPETQYF

SEQ ID NO: 621675 - protein, 11 aa, Homo sapiens
  CDR3 for alpha chain variable domain of TCR clone 310838 (TRAV12-3, TRAJ26)
CAMSHGQNFVF

SEQ ID NO: 621676 - protein, 17 aa, Homo sapiens
  CDR3 for beta chain variable domain of TCR clone 310838 (TRBV11-2, TRBJ2-1)
CASSLYPPGVEYNEQFF

SEQ ID NO: 621677 - protein, 16 aa, Homo sapiens
  CDR3 for alpha chain variable domain of TCR clone 310839 (TRAV12-2, TRAJ18)
CAVFAGRGSTLGRLYF

SEQ ID NO: 621678 - protein, 13 aa, Homo sapiens
  CDR3 for beta chain variable domain of TCR clone 310839 (TRBV29-1, TRBJ2-1)
CSVEGGRVNEQFF

SEQ ID NO: 621679 - protein, 13 aa, Homo sapiens
  CDR3 for alpha chain variable domain of TCR clone 310840 (TRAV26-1, TRAJ30)
CIVNMNRDDKIIF

SEQ ID NO: 621680 - protein, 16 aa, Homo sapiens
  CDR3 for beta chain variable domain of TCR clone 310840 (TRBV16, TRBJ2-7)
CASSRPAGGSSYGQYF

SEQ ID NO: 621681 - protein, 11 aa, Homo sapiens
  CDR3 for alpha chain variable domain of TCR clone 310841 (TRAV12-3, TRAJ26)
CAMSHGQNFVF

SEQ ID NO: 621682 - protein, 15 aa, Homo sapiens
  CDR3 for beta chain variable domain of TCR clone 310841 (TRBV3-1, TRBJ2-2)
CASSQDWTRAGELFF

SEQ ID NO: 621683 - protein, 12 aa, Homo sapiens
  CDR3 for alpha chain variable domain of TCR clone 310842 (TRAV23/DV6, TRAJ27)
CAASKPMRQINL

SEQ ID NO: 621684 - protein, 14 aa, Homo sapiens
  CDR3 for beta chain variable domain of TCR clone 310842 (TRBV5-4, TRBJ1-1)
CASSLDSRRDEAFF

SEQ ID NO: 621685 - protein, 16 aa, Homo sapiens
  CDR3 for alpha chain variable domain of TCR clone 310843 (TRAV12-3, TRAJ53)
CAMSPRSGGSKYNLTF

SEQ ID NO: 621686 - protein, 11 aa, Homo sapiens
  CDR3 for beta chain variable domain of TCR clone 310843 (TRBV29-1, TRBJ2-5)
CSEDRTGTQYF

SEQ ID NO: 621687 - protein, 15 aa, Homo sapiens
  CDR3 for alpha chain variable domain of TCR clone 310844 (TRAV13-2, TRAJ5)
CAENPHWTGRRALTF

SEQ ID NO: 621688 - protein, 14 aa, Homo sapiens
  CDR3 for beta chain variable domain of TCR clone 310844 (TRBV5-7, TRBJ2-7)
CASSFKGATGEQYC

SEQ ID NO: 621689 - protein, 13 aa, Homo sapiens
  CDR3 for alpha chain variable domain of TCR clone 310845 (TRAV9-2, TRAJ53)
CALSGGSNYKLTF

SEQ ID NO: 621690 - protein, 15 aa, Homo sapiens
  CDR3 for beta chain variable domain of TCR clone 310845 (TRBV19, TRBJ1-6)
CASSTQGAVGSPLHF

SEQ ID NO: 621691 - protein, 12 aa, Homo sapiens
  CDR3 for alpha chain variable domain of TCR clone 310846 (TRAV12-3, TRAJ17)
CAMTLTGNKLTF

SEQ ID NO: 621692 - protein, 13 aa, Homo sapiens
  CDR3 for beta chain variable domain of TCR clone 310846 (TRBV13, TRBJ2-7)
CASSQGVSYEQYF

SEQ ID NO: 621693 - protein, 13 aa, Homo sapiens
  CDR3 for alpha chain variable domain of TCR clone 310847 (TRAV12-3, TRAJ43)
CAMIRPNNNDRRF

SEQ ID NO: 621694 - protein, 12 aa, Homo sapiens
  CDR3 for beta chain variable domain of TCR clone 310847 (TRBV11-2, TRBJ2-5)
CASSLGQETQYF

SEQ ID NO: 621695 - protein, 17 aa, Homo sapiens
  CDR3 for alpha chain variable domain of TCR clone 310848 (TRAV3, TRAJ6)
CAVRDGPRAGGSYIPTF

SEQ ID NO: 621696 - protein, 20 aa, Homo sapiens
  CDR3 for beta chain variable domain of TCR clone 310848 (TRBV28, TRBJ2-1)
CASTPIGRSPGLAGGNSSSS

SEQ ID NO: 621697 - protein, 12 aa, Homo sapiens
  CDR3 for alpha chain variable domain of TCR clone 310849 (TRAV13-1, TRAJ27)
CAAHTNAGKSTF

SEQ ID NO: 621698 - protein, 15 aa, Homo sapiens
  CDR3 for beta chain variable domain of TCR clone 310849 (TRBV7-9, TRBJ1-6)
CDISSPGRGNSPLHF

SEQ ID NO: 621699 - protein, 17 aa, Homo sapiens
  CDR3 for alpha chain variable domain of TCR clone 310850 (TRAV3, TRAJ6)
CAVRDAPRAGGSYLPTF

SEQ ID NO: 621700 - protein, 14 aa, Homo sapiens
  CDR3 for beta chain variable domain of TCR clone 310850 (TRBV7-2, TRBJ2-7)
CASSPKTSFYEQYF

SEQ ID NO: 621701 - protein, 12 aa, Homo sapiens
  CDR3 for alpha chain variable domain of TCR clone 310851 (TRAV13-2, TRAJ23)
CAERNRGGKLIF

SEQ ID NO: 621702 - protein, 14 aa, Homo sapiens
  CDR3 for beta chain variable domain of TCR clone 310851 (TRBV5-1, TRBJ1-2)
CASSPQGANYGYTF

SEQ ID NO: 621703 - protein, 11 aa, Homo sapiens
  CDR3 for alpha chain variable domain of TCR clone 310852 (TRAV3, TRAJ21)
CAVGNFNKFYF

SEQ ID NO: 621704 - protein, 12 aa, Homo sapiens
  CDR3 for beta chain variable domain of TCR clone 310852 (TRBV24-1, TRBJ1-4)
CATSDPNEKLFF

SEQ ID NO: 621705 - protein, 14 aa, Homo sapiens
  CDR3 for alpha chain variable domain of TCR clone 310853 (TRAV16, TRAJ37)
CSLDGSSNTGKLIF

SEQ ID NO: 621706 - protein, 17 aa, Homo sapiens
  CDR3 for beta chain variable domain of TCR clone 310853 (TRBV7-3, TRBJ2-3)
CASSLMKRMRGADTQYF

SEQ ID NO: 621707 - protein, 12 aa, Homo sapiens
  CDR3 for alpha chain variable domain of TCR clone 310854 (TRAV8-6, TRAJ43)
CAVSNNNNDMRF

SEQ ID NO: 621708 - protein, 15 aa, Homo sapiens
  CDR3 for beta chain variable domain of TCR clone 310854 (TRBV7-3, TRBJ2-6)
CASSLGGSGANVLIF

SEQ ID NO: 621709 - protein, 16 aa, Homo sapiens
  CDR3 for alpha chain variable domain of TCR clone 310855 (TRAV12-1, TRAJ45)
CVVIRYSGGGADGLTF

SEQ ID NO: 621710 - protein, 14 aa, Homo sapiens
  CDR3 for beta chain variable domain of TCR clone 310855 (TRBV7-6, TRBJ2-3)
CASSLGTVTDTQYF

SEQ ID NO: 621711 - protein, 13 aa, Homo sapiens
  CDR3 for alpha chain variable domain of TCR clone 310856 (TRAV29/DV5, TRAJ29)
CAASAAGKTPTVF

SEQ ID NO: 621712 - protein, 14 aa, Homo sapiens
  CDR3 for beta chain variable domain of TCR clone 310856 (TRBV19, TRBJ2-3)
CASSAPRGTDTQYF

SEQ ID NO: 621713 - protein, 14 aa, Homo sapiens
  CDR3 for alpha chain variable domain of TCR clone 310857 (TRAV27, TRAJ22)
CAGLPSGSARQLTF

SEQ ID NO: 621714 - protein, 16 aa, Homo sapiens
  CDR3 for beta chain variable domain of TCR clone 310857 (TRBV7-3, TRBJ2-2)
CASSLKRGPLSGELFF

SEQ ID NO: 621715 - protein, 15 aa, Homo sapiens
  CDR3 for alpha chain variable domain of TCR clone 310858 (TRAV35, TRAJ28)
CAGRRTGAGSYQLTF

SEQ ID NO: 621716 - protein, 15 aa, Homo sapiens
  CDR3 for beta chain variable domain of TCR clone 310858 (TRBV5-1, TRBJ2-2)
CASSSQGGNTGELFF

SEQ ID NO: 621717 - protein, 16 aa, Homo sapiens
  CDR3 for alpha chain variable domain of TCR clone 310859 (TRAV20, TRAJ10)
CAVLRGLTGGGNKLTF

SEQ ID NO: 621718 - protein, 16 aa, Homo sapiens
  CDR3 for beta chain variable domain of TCR clone 310859 (TRBV7-3, TRBJ2-2)
CASRLKRGTLSGELFF

SEQ ID NO: 621719 - protein, 11 aa, Homo sapiens
  CDR3 for alpha chain variable domain of TCR clone 310860 (TRAV16, TRAJ34)
CALYNTDKLIF

SEQ ID NO: 621720 - protein, 12 aa, Homo sapiens
  CDR3 for beta chain variable domain of TCR clone 310860 (TRBV5-4, TRBJ2-5)
CASSSTRETQYF

SEQ ID NO: 621721 - protein, 14 aa, Homo sapiens
  CDR3 for alpha chain variable domain of TCR clone 310861 (TRAV12-2, TRAJ40)
CAVKIPSGTYKYIF

SEQ ID NO: 621722 - protein, 12 aa, Homo sapiens
  CDR3 for beta chain variable domain of TCR clone 310861 (TRBV11-2, TRBJ2-1)
CASSPGNNEKFF

SEQ ID NO: 621723 - protein, 14 aa, Homo sapiens
  CDR3 for alpha chain variable domain of TCR clone 310862 (TRAV12-2, TRAJ36)
CAVNPPTGANNLFF

SEQ ID NO: 621724 - protein, 12 aa, Homo sapiens
  CDR3 for beta chain variable domain of TCR clone 310862 (TRBV7-3, TRBJ2-1)
CASSFQSGHQFF

SEQ ID NO: 621725 - protein, 15 aa, Homo sapiens
  CDR3 for alpha chain variable domain of TCR clone 310863 (TRAV38-2/DV8, TRAJ48)
CAYRSGGFGNEKVTF

SEQ ID NO: 621726 - protein, 16 aa, Homo sapiens
  CDR3 for beta chain variable domain of TCR clone 310863 (TRBV28, TRBJ2-7)
CASSLWVATGDRSQYF

SEQ ID NO: 621727 - protein, 15 aa, Homo sapiens
  CDR3 for alpha chain variable domain of TCR clone 310864 (TRAV3, TRAJ3)
CAVRDRDSSASKIIF

SEQ ID NO: 621728 - protein, 16 aa, Homo sapiens
  CDR3 for beta chain variable domain of TCR clone 310864 (TRBV28, TRBJ1-4)
CASSPPYRGRSEKLFF

SEQ ID NO: 621729 - protein, 14 aa, Homo sapiens
  CDR3 for alpha chain variable domain of TCR clone 310865 (TRAV21, TRAJ12)
SPVRNGDSSYKLIF

SEQ ID NO: 621730 - protein, 14 aa, Homo sapiens
  CDR3 for beta chain variable domain of TCR clone 310865 (TRBV7-6, TRBJ2-7)
CASSLTGTGNEQYF

SEQ ID NO: 621731 - protein, 15 aa, Homo sapiens
  CDR3 for alpha chain variable domain of TCR clone 310866 (TRAV16, TRAJ16)
CALQGGGSDGQKLLF

SEQ ID NO: 621732 - protein, 13 aa, Homo sapiens
  CDR3 for beta chain variable domain of TCR clone 310866 (TRBV12-5, TRBJ2-3)
CSSGDRQSDTQYF

SEQ ID NO: 621733 - protein, 15 aa, Homo sapiens
  CDR3 for alpha chain variable domain of TCR clone 310867 (TRAV29/DV5, TRAJ29)
CAASERSSGNTPLVF

SEQ ID NO: 621734 - protein, 12 aa, Homo sapiens
  CDR3 for beta chain variable domain of TCR clone 310867 (TRBV27, TRBJ2-1)
CASRGFYNEQFF

SEQ ID NO: 621735 - protein, 17 aa, Homo sapiens
  CDR3 for alpha chain variable domain of TCR clone 310868 (TRAV17, TRAJ7)
CATLGRLAFGKGNQVGG

SEQ ID NO: 621736 - protein, 13 aa, Homo sapiens
  CDR3 for beta chain variable domain of TCR clone 310868 (TRBV12-4, TRBJ2-7)
CASSLERVREQYF

SEQ ID NO: 621737 - protein, 11 aa, Homo sapiens
  CDR3 for alpha chain variable domain of TCR clone 310869 (TRAV35, TRAJ30)
CAPGGDDKIIF

SEQ ID NO: 621738 - protein, 22 aa, Homo sapiens
  CDR3 for beta chain variable domain of TCR clone 310869 (TRBV7-6, TRBJ2-1)
AAGLGHLSLGQQLGGGADEQFF

SEQ ID NO: 621739 - protein, 14 aa, Homo sapiens
  CDR3 for alpha chain variable domain of TCR clone 310870 (TRAV2, TRAJ9)
CAVEDRSGGFKTIF

SEQ ID NO: 621740 - protein, 15 aa, Homo sapiens
  CDR3 for beta chain variable domain of TCR clone 310870 (TRBV28, TRBJ2-7)
CASSPGGRGFYEQYF

SEQ ID NO: 621741 - protein, 12 aa, Homo sapiens
  CDR3 for alpha chain variable domain of TCR clone 310871 (TRAV1-1, TRAJ9)
CAVDTGGFKTIF

SEQ ID NO: 621742 - protein, 14 aa, Homo sapiens
  CDR3 for beta chain variable domain of TCR clone 310871 (TRBV20-1, TRBJ2-1)
CSAQIGGSANEQFF

SEQ ID NO: 621743 - protein, 20 aa, Homo sapiens
  CDR3 for alpha chain variable domain of TCR clone 310872 (TRAV1-2, TRAJ8)
CAVREDTGFQKLIWNWHPTS

SEQ ID NO: 621744 - protein, 15 aa, Homo sapiens
  CDR3 for beta chain variable domain of TCR clone 310872 (TRBV4-1, TRBJ2-7)
CASSQNTGRLYEQYF

SEQ ID NO: 621745 - protein, 12 aa, Homo sapiens
  CDR3 for alpha chain variable domain of TCR clone 310873 (TRAV21, TRAJ33)
CAKMDSNYQLIW

SEQ ID NO: 621746 - protein, 16 aa, Homo sapiens
  CDR3 for beta chain variable domain of TCR clone 310873 (TRBV2, TRBJ2-7)
CASSQPRAATSSTSGR

SEQ ID NO: 621747 - protein, 12 aa, Homo sapiens
  CDR3 for alpha chain variable domain of TCR clone 310874 (TRAV25, TRAJ17)
CAGEAAGNKLTF

SEQ ID NO: 621748 - protein, 17 aa, Homo sapiens
  CDR3 for beta chain variable domain of TCR clone 310874 (TRBV24-1, TRBJ2-3)
CATSDLPSGEDTDTQYF

SEQ ID NO: 621749 - protein, 15 aa, Homo sapiens
  CDR3 for alpha chain variable domain of TCR clone 310875 (TRAV2, TRAJ15)
CAVEDRGQAGTALIF

SEQ ID NO: 621750 - protein, 13 aa, Homo sapiens
  CDR3 for beta chain variable domain of TCR clone 310875 (TRBV10-3, TRBJ1-2)
CAISERDSYGYTF

SEQ ID NO: 621751 - protein, 16 aa, Homo sapiens
  CDR3 for alpha chain variable domain of TCR clone 310876 (TRAV30, TRAJ24)
CGTEIVDADSWGKFQF

SEQ ID NO: 621752 - protein, 15 aa, Homo sapiens
  CDR3 for beta chain variable domain of TCR clone 310876 (TRBV19, TRBJ1-5)
CASSDSGPRNQPQHF

SEQ ID NO: 621753 - protein, 14 aa, Homo sapiens
  CDR3 for alpha chain variable domain of TCR clone 310877 (TRAV21, TRAJ38)
CAVMGAGNNRKLIW

SEQ ID NO: 621754 - protein, 14 aa, Homo sapiens
  CDR3 for beta chain variable domain of TCR clone 310877 (TRBV19, TRBJ1-2)
CASSLQGQAYGYTF

SEQ ID NO: 621755 - protein, 13 aa, Homo sapiens
  CDR3 for alpha chain variable domain of TCR clone 310878 (TRAV26-2, TRAJ41)
CILRDASGYALNF

SEQ ID NO: 621756 - protein, 13 aa, Homo sapiens
  CDR3 for beta chain variable domain of TCR clone 310878 (TRBV19, TRBJ2-7)
CASSPRQSYEQYF

SEQ ID NO: 621757 - protein, 11 aa, Homo sapiens
  CDR3 for alpha chain variable domain of TCR clone 310879 (TRAV1-2, TRAJ20)
CAVSNDYKPSF

SEQ ID NO: 621758 - protein, 17 aa, Homo sapiens
  CDR3 for beta chain variable domain of TCR clone 310879 (TRBV7-8, TRBJ2-6)
CASSAGTGGAGANVLTF

SEQ ID NO: 621759 - protein, 17 aa, Homo sapiens
  CDR3 for alpha chain variable domain of TCR clone 310880 (TRAV4, TRAJ18)
CLVGERSVGSTLGRLYF

SEQ ID NO: 621760 - protein, 16 aa, Homo sapiens
  CDR3 for beta chain variable domain of TCR clone 310880 (TRBV15, TRBJ1-4)
CATSRGSPPGREKLFF

SEQ ID NO: 621761 - protein, 14 aa, Homo sapiens
  CDR3 for alpha chain variable domain of TCR clone 310881 (TRAV1-2, TRAJ8)
CAVREDTGFQKPVF

SEQ ID NO: 621762 - protein, 15 aa, Homo sapiens
  CDR3 for beta chain variable domain of TCR clone 310881 (TRBV6-3, TRBJ2-7)
CATSSPGTVFYEQYF

SEQ ID NO: 621763 - protein, 14 aa, Homo sapiens
  CDR3 for alpha chain variable domain of TCR clone 310882 (TRAV12-1, TRAJ13)
CVVIDSGGHQKVTF

SEQ ID NO: 621764 - protein, 17 aa, Homo sapiens
  CDR3 for beta chain variable domain of TCR clone 310882 (TRBV15, TRBJ1-5)
CAISRAPPGTRNQPQHF

SEQ ID NO: 621765 - protein, 10 aa, Homo sapiens
  CDR3 for alpha chain variable domain of TCR clone 310883 (TRAV8-4, TRAJ43)
CAVSADDMRF

SEQ ID NO: 621766 - protein, 14 aa, Homo sapiens
  CDR3 for beta chain variable domain of TCR clone 310883 (TRBV5-1, TRBJ2-7)
CASSRGESLYEQYF

SEQ ID NO: 621767 - protein, 22 aa, Homo sapiens
  CDR3 for alpha chain variable domain of TCR clone 310884 (TRAV1-2, TRAJ10)
CAVRGGTHGRRKQTHLWDRHSA

SEQ ID NO: 621768 - protein, 15 aa, Homo sapiens
  CDR3 for beta chain variable domain of TCR clone 310884 (TRBV6-3, TRBJ2-7)
CASSSTGTVFYEQYF

SEQ ID NO: 621769 - protein, 15 aa, Homo sapiens
  CDR3 for alpha chain variable domain of TCR clone 310885 (TRAV13-1, TRAJ17)
CAASIHGGCKQQANF

SEQ ID NO: 621770 - protein, 14 aa, Homo sapiens
  CDR3 for beta chain variable domain of TCR clone 310885 (TRBV20-1, TRBJ2-4)
CSARDRGQGGIQYF

SEQ ID NO: 621771 - protein, 14 aa, Homo sapiens
  CDR3 for alpha chain variable domain of TCR clone 310886 (TRAV1-2, TRAJ6)
CAVSLSGGGYIPTF

SEQ ID NO: 621772 - protein, 15 aa, Homo sapiens
  CDR3 for beta chain variable domain of TCR clone 310886 (TRBV28, TRBJ2-7)
CASSPGGRGFYEHYF

SEQ ID NO: 621773 - protein, 16 aa, Homo sapiens
  CDR3 for alpha chain variable domain of TCR clone 310887 (TRAV1-2, TRAJ10)
CAVRGVLTGGGNKLTF

SEQ ID NO: 621774 - protein, 14 aa, Homo sapiens
  CDR3 for beta chain variable domain of TCR clone 310887 (TRBV7-2, TRBJ2-5)
CASSPRGSSETQYF

SEQ ID NO: 621775 - protein, 13 aa, Homo sapiens
  CDR3 for alpha chain variable domain of TCR clone 310888 (TRAV12-3, TRAJ54)
CAMTLQGAQKLVF

SEQ ID NO: 621776 - protein, 14 aa, Homo sapiens
  CDR3 for beta chain variable domain of TCR clone 310888 (TRBV4-1, TRBJ2-2)
CASSRAVNTGELFF

SEQ ID NO: 621777 - protein, 14 aa, Homo sapiens
  CDR3 for alpha chain variable domain of TCR clone 310889 (TRAV16, TRAJ42)
CALLAGGSQGNLIF

SEQ ID NO: 621778 - protein, 16 aa, Homo sapiens
  CDR3 for beta chain variable domain of TCR clone 310889 (TRBV7-2, TRBJ1-3)
CASSSGRVLSGNTIYF

SEQ ID NO: 621779 - protein, 13 aa, Homo sapiens
  CDR3 for alpha chain variable domain of TCR clone 310890 (TRAV21, TRAJ57)
CVVTQGGSEKLVF

SEQ ID NO: 621780 - protein, 16 aa, Homo sapiens
  CDR3 for beta chain variable domain of TCR clone 310890 (TRBV29-1, TRBJ2-7)
CSVDDAEDGTAYEQYF

SEQ ID NO: 621781 - protein, 14 aa, Homo sapiens
  CDR3 for alpha chain variable domain of TCR clone 310891 (TRAV3, TRAJ24)
CAVILTDSWGKLQF

SEQ ID NO: 621782 - protein, 12 aa, Homo sapiens
  CDR3 for beta chain variable domain of TCR clone 310891 (TRBV7-3, TRBJ1-1)
CASGHGGTEAFF

SEQ ID NO: 621783 - protein, 15 aa, Homo sapiens
  CDR3 for alpha chain variable domain of TCR clone 310892 (TRAV8-3, TRAJ27)
CAVGPSKTNAGKSTF

SEQ ID NO: 621784 - protein, 14 aa, Homo sapiens
  CDR3 for beta chain variable domain of TCR clone 310892 (TRBV7-2, TRBJ2-1)
CQQLRTRGGNEQFF

SEQ ID NO: 621785 - protein, 12 aa, Homo sapiens
  CDR3 for alpha chain variable domain of TCR clone 310893 (TRAV2, TRAJ40)
CCGYLGTYKYIF

SEQ ID NO: 621786 - protein, 16 aa, Homo sapiens
  CDR3 for beta chain variable domain of TCR clone 310893 (TRBV2, TRBJ2-1)
CASSVGGSLSYNEQFF

SEQ ID NO: 621787 - protein, 10 aa, Homo sapiens
  CDR3 for alpha chain variable domain of TCR clone 310894 (TRAV1-2, TRAJ31)
RAFFDARLMF

SEQ ID NO: 621788 - protein, 14 aa, Homo sapiens
  CDR3 for beta chain variable domain of TCR clone 310894 (TRBV5-1, TRBJ2-3)
CASSLFGPTDTQYF

SEQ ID NO: 621789 - protein, 13 aa, Homo sapiens
  CDR3 for alpha chain variable domain of TCR clone 310895 (TRAV3, TRAJ27)
CAVRPLGAGKSTF

SEQ ID NO: 621790 - protein, 13 aa, Homo sapiens
  CDR3 for beta chain variable domain of TCR clone 310895 (TRBV7-2, TRBJ2-2)
CASSSRPTGELFF

SEQ ID NO: 621791 - protein, 16 aa, Homo sapiens
  CDR3 for alpha chain variable domain of TCR clone 310896 (TRAV2, TRAJ4)
CAVEDRFSGGYNKLIF

SEQ ID NO: 621792 - protein, 13 aa, Homo sapiens
  CDR3 for beta chain variable domain of TCR clone 310896 (TRBV7-7, TRBJ2-5)
CDSSRSGQETQYF

SEQ ID NO: 621793 - protein, 16 aa, Homo sapiens
  CDR3 for alpha chain variable domain of TCR clone 310897 (TRAV12-2, TRAJ45)
CAVKRNRGGGADGLTF

SEQ ID NO: 621794 - protein, 12 aa, Homo sapiens
  CDR3 for beta chain variable domain of TCR clone 310897 (TRBV6-1, TRBJ2-5)
CASSEGRETQYF

SEQ ID NO: 621795 - protein, 13 aa, Homo sapiens
  CDR3 for alpha chain variable domain of TCR clone 310898 (TRAV8-3, TRAJ48)
CAVVPFGNEKLTF

SEQ ID NO: 621796 - protein, 19 aa, Homo sapiens
  CDR3 for beta chain variable domain of TCR clone 310898 (TRBV25-1, TRBJ2-2)
CAILVYRVDRGRKTGELLF

SEQ ID NO: 621797 - protein, 14 aa, Homo sapiens
  CDR3 for alpha chain variable domain of TCR clone 310899 (TRAV17, TRAJ53)
CATDAGGSNYKLTF

SEQ ID NO: 621798 - protein, 14 aa, Homo sapiens
  CDR3 for beta chain variable domain of TCR clone 310899 (TRBV7-2, TRBJ2-7)
CASSPKTSFYEQYF

SEQ ID NO: 621799 - protein, 14 aa, Homo sapiens
  CDR3 for alpha chain variable domain of TCR clone 310900 (TRAV27, TRAJ15)
CAGFDNQAGTALIF

SEQ ID NO: 621800 - protein, 11 aa, Homo sapiens
  CDR3 for beta chain variable domain of TCR clone 310900 (TRBV29-1, TRBJ1-1)
CSAEVGTRTFF

SEQ ID NO: 621801 - protein, 13 aa, Homo sapiens
  CDR3 for alpha chain variable domain of TCR clone 310901 (TRAV3, TRAJ27)
CAVRLLGAGKSTF

SEQ ID NO: 621802 - protein, 13 aa, Homo sapiens
  CDR3 for beta chain variable domain of TCR clone 310901 (TRBV7-9, TRBJ2-3)
CASSPRSTDTQYF

SEQ ID NO: 621803 - protein, 14 aa, Homo sapiens
  CDR3 for alpha chain variable domain of TCR clone 310902 (TRAV1-1, TRAJ30)
CAVRSLNRDDKIIF

SEQ ID NO: 621804 - protein, 19 aa, Homo sapiens
  CDR3 for beta chain variable domain of TCR clone 310902 (TRBV25-1, TRBJ2-2)
CAILVYRVDRGRKTGELFF

SEQ ID NO: 621805 - protein, 13 aa, Homo sapiens
  CDR3 for alpha chain variable domain of TCR clone 310903 (TRAV27, TRAJ41)
CAGEGNSGYALNF

SEQ ID NO: 621806 - protein, 14 aa, Homo sapiens
  CDR3 for beta chain variable domain of TCR clone 310903 (TRBV7-9, TRBJ2-1)
CASSDNSGYNEQFF

SEQ ID NO: 621807 - protein, 14 aa, Homo sapiens
  CDR3 for alpha chain variable domain of TCR clone 310904 (TRAV1-1, TRAJ27)
CAVIYNTNAGKSTF

SEQ ID NO: 621808 - protein, 14 aa, Homo sapiens
  CDR3 for beta chain variable domain of TCR clone 310904 (TRBV11-2, TRBJ2-3)
CASSRLARTDTQYF

SEQ ID NO: 621809 - protein, 13 aa, Homo sapiens
  CDR3 for alpha chain variable domain of TCR clone 310905 (TRAV12-2, TRAJ39)
CAVNNNAGNMLTF

SEQ ID NO: 621810 - protein, 12 aa, Homo sapiens
  CDR3 for beta chain variable domain of TCR clone 310905 (TRBV2, TRBJ1-5)
CHRGTGNQPQHF

SEQ ID NO: 621811 - protein, 11 aa, Homo sapiens
  CDR3 for alpha chain variable domain of TCR clone 310906 (TRAV12-3, TRAJ43)
CAMSVPNDIRF

SEQ ID NO: 621812 - protein, 13 aa, Homo sapiens
  CDR3 for beta chain variable domain of TCR clone 310906 (TRBV20-1, TRBJ1-1)
CSAPLGGGTEAFF

SEQ ID NO: 621813 - protein, 12 aa, Homo sapiens
  CDR3 for alpha chain variable domain of TCR clone 310907 (TRAV2, TRAJ9)
CAVGAGGFKTIF

SEQ ID NO: 621814 - protein, 14 aa, Homo sapiens
  CDR3 for beta chain variable domain of TCR clone 310907 (TRBV7-2, TRBJ2-7)
CASRSQGAAYEQYF

SEQ ID NO: 621815 - protein, 14 aa, Homo sapiens
  CDR3 for alpha chain variable domain of TCR clone 310908 (TRAV12-2, TRAJ29)
CAVRRNSGNTPLVF

SEQ ID NO: 621816 - protein, 15 aa, Homo sapiens
  CDR3 for beta chain variable domain of TCR clone 310908 (TRBV2, TRBJ2-3)
CASSGEGTGTDTQYF

SEQ ID NO: 621817 - protein, 15 aa, Homo sapiens
  CDR3 for alpha chain variable domain of TCR clone 310909 (TRAV13-2, TRAJ8)
CAENRGNTGFQKLVF

SEQ ID NO: 621818 - protein, 14 aa, Homo sapiens
  CDR3 for beta chain variable domain of TCR clone 310909 (TRBV5-4, TRBJ2-1)
CASSLDQGWNEQFF

SEQ ID NO: 621819 - protein, 13 aa, Homo sapiens
  CDR3 for alpha chain variable domain of TCR clone 310910 (TRAV21, TRAJ27)
CAARPGTAGKSTF

SEQ ID NO: 621820 - protein, 14 aa, Homo sapiens
  CDR3 for beta chain variable domain of TCR clone 310910 (TRBV7-6, TRBJ2-3)
CASSLGTVTETQYF

SEQ ID NO: 621821 - protein, 23 aa, Homo sapiens
  CDR3 for alpha chain variable domain of TCR clone 310911 (TRAV26-1, TRAJ38)
CIADNAGNNHIQNPDPDVYQLRD

SEQ ID NO: 621822 - protein, 12 aa, Homo sapiens
  CDR3 for beta chain variable domain of TCR clone 310911 (TRBV11-2, TRBJ2-2)
CASSLGGGELFF

SEQ ID NO: 621823 - protein, 15 aa, Homo sapiens
  CDR3 for alpha chain variable domain of TCR clone 310912 (TRAV3, TRAJ3)
CAVRDRDSSASKITF

SEQ ID NO: 621824 - protein, 18 aa, Homo sapiens
  CDR3 for beta chain variable domain of TCR clone 310912 (TRBV25-1, TRBJ1-2)
CASSGLQNGQGLIFGYTV

SEQ ID NO: 621825 - protein, 13 aa, Homo sapiens
  CDR3 for alpha chain variable domain of TCR clone 310913 (TRAV8-4, TRAJ42)
CAVKEGSQGNLIF

SEQ ID NO: 621826 - protein, 16 aa, Homo sapiens
  CDR3 for beta chain variable domain of TCR clone 310913 (TRBV7-2, TRBJ2-5)
CASSPGGARRGETQYF

SEQ ID NO: 621827 - protein, 17 aa, Homo sapiens
  CDR3 for alpha chain variable domain of TCR clone 310914 (TRAV3, TRAJ6)
CAVRDGPRAGGSYIPTF

SEQ ID NO: 621828 - protein, 15 aa, Homo sapiens
  CDR3 for beta chain variable domain of TCR clone 310914 (TRBV10-3, TRBJ2-1)
CHPGGRQGDYNEQFF

SEQ ID NO: 621829 - protein, 15 aa, Homo sapiens
  CDR3 for alpha chain variable domain of TCR clone 310915 (TRAV20, TRAJ43)
CAVQAGKSSDNDMRF

SEQ ID NO: 621830 - protein, 14 aa, Homo sapiens
  CDR3 for beta chain variable domain of TCR clone 310915 (TRBV27, TRBJ2-1)
CASRHLGGGKEQFF

SEQ ID NO: 621831 - protein, 12 aa, Homo sapiens
  CDR3 for alpha chain variable domain of TCR clone 310916 (TRAV3, TRAJ27)
CAERDKAGKSTF

SEQ ID NO: 621832 - protein, 14 aa, Homo sapiens
  CDR3 for beta chain variable domain of TCR clone 310916 (TRBV5-1, TRBJ1-2)
CASSVDSTNYGYTF

SEQ ID NO: 621833 - protein, 15 aa, Homo sapiens
  CDR3 for alpha chain variable domain of TCR clone 310917 (TRAV26-1, TRAJ22)
CIVRVSFWFCKATDL

SEQ ID NO: 621834 - protein, 14 aa, Homo sapiens
  CDR3 for beta chain variable domain of TCR clone 310917 (TRBV2, TRBJ2-7)
CASSLTSGGYEQYF

SEQ ID NO: 621835 - protein, 15 aa, Homo sapiens
  CDR3 for alpha chain variable domain of TCR clone 310918 (TRAV26-1, TRAJ22)
CIVRVSFWFFKATDL

SEQ ID NO: 621836 - protein, 12 aa, Homo sapiens
  CDR3 for beta chain variable domain of TCR clone 310918 (TRBV11-2, TRBJ2-2)
CASSLGGGELFF

SEQ ID NO: 621837 - protein, 15 aa, Homo sapiens
  CDR3 for alpha chain variable domain of TCR clone 310919 (TRAV23/DV6, TRAJ18)
CAARYRGSTLGRLYF

SEQ ID NO: 621838 - protein, 15 aa, Homo sapiens
  CDR3 for beta chain variable domain of TCR clone 310919 (TRBV10-2, TRBJ2-6)
CASSEQGTGANVLTF

SEQ ID NO: 621839 - protein, 11 aa, Homo sapiens
  CDR3 for alpha chain variable domain of TCR clone 310920 (TRAV12-3, TRAJ16)
LMGGDGQKLLF

SEQ ID NO: 621840 - protein, 12 aa, Homo sapiens
  CDR3 for beta chain variable domain of TCR clone 310920 (TRBV7-8, TRBJ2-7)
CASSLGDREQYF

SEQ ID NO: 621841 - protein, 14 aa, Homo sapiens
  CDR3 for alpha chain variable domain of TCR clone 310921 (TRAV8-1, TRAJ5)
CPVSMDTGRRALTF

SEQ ID NO: 621842 - protein, 15 aa, Homo sapiens
  CDR3 for beta chain variable domain of TCR clone 310921 (TRBV19, TRBJ2-4)
CASRGPRRGENIQYF

SEQ ID NO: 621843 - protein, 13 aa, Homo sapiens
  CDR3 for alpha chain variable domain of TCR clone 310922 (TRAV8-2, TRAJ49)
CVVTTNTGNQFYF

SEQ ID NO: 621844 - protein, 15 aa, Homo sapiens
  CDR3 for beta chain variable domain of TCR clone 310922 (TRBV11-2, TRBJ2-1)
CASSLTSGGYNEQFF

SEQ ID NO: 621845 - protein, 15 aa, Homo sapiens
  CDR3 for alpha chain variable domain of TCR clone 310923 (TRAV2, TRAJ44)
CAVEAYTGTASKLTF

SEQ ID NO: 621846 - protein, 17 aa, Homo sapiens
  CDR3 for beta chain variable domain of TCR clone 310923 (TRBV12-4, TRBJ2-1)
CASSPGLAGGRNNEQFF

SEQ ID NO: 621847 - protein, 16 aa, Homo sapiens
  CDR3 for alpha chain variable domain of TCR clone 310924 (TRAV16, TRAJ4)
CALSRMFSGGYNKLIF

SEQ ID NO: 621848 - protein, 15 aa, Homo sapiens
  CDR3 for beta chain variable domain of TCR clone 310924 (TRBV10-1, TRBJ2-3)
CASSATSGGFDTQYF

SEQ ID NO: 621849 - protein, 14 aa, Homo sapiens
  CDR3 for alpha chain variable domain of TCR clone 310925 (TRAV12-2, TRAJ53)
CAMKGGGSNYKLTF

SEQ ID NO: 621850 - protein, 15 aa, Homo sapiens
  CDR3 for beta chain variable domain of TCR clone 310925 (TRBV11-3, TRBJ2-3)
CASLKDGREGDTQYF

SEQ ID NO: 621851 - protein, 15 aa, Homo sapiens
  CDR3 for alpha chain variable domain of TCR clone 310926 (TRAV26-2, TRAJ13)
CILRELSGGYQKVTF

SEQ ID NO: 621852 - protein, 11 aa, Homo sapiens
  CDR3 for beta chain variable domain of TCR clone 310926 (TRBV7-9, TRBJ2-5)
CASSLSATQYF

SEQ ID NO: 621853 - protein, 14 aa, Homo sapiens
  CDR3 for alpha chain variable domain of TCR clone 310927 (TRAV1-2, TRAJ8)
CAVREDTGFQKLVF

SEQ ID NO: 621854 - protein, 16 aa, Homo sapiens
  CDR3 for beta chain variable domain of TCR clone 310927 (TRBV4-1, TRBJ2-3)
CASSQSTGGAEDTQYF

SEQ ID NO: 621855 - protein, 15 aa, Homo sapiens
  CDR3 for alpha chain variable domain of TCR clone 310928 (TRAV1-2, TRAJ17)
CAVRGYGAAGNKLTF

SEQ ID NO: 621856 - protein, 13 aa, Homo sapiens
  CDR3 for beta chain variable domain of TCR clone 310928 (TRBV12-4, TRBJ2-7)
CASSPTETYEQYF

SEQ ID NO: 621857 - protein, 17 aa, Homo sapiens
  CDR3 for alpha chain variable domain of TCR clone 310929 (TRAV13-1, TRAJ52)
CAASSGAGGTSYGKLTF

SEQ ID NO: 621858 - protein, 13 aa, Homo sapiens
  CDR3 for beta chain variable domain of TCR clone 310929 (TRBV2, TRBJ1-1)
CASSEGGNTEAFF

SEQ ID NO: 621859 - protein, 11 aa, Homo sapiens
  CDR3 for alpha chain variable domain of TCR clone 310930 (TRAV21, TRAJ34)
CAHYNTDKLIF

SEQ ID NO: 621860 - protein, 11 aa, Homo sapiens
  CDR3 for beta chain variable domain of TCR clone 310930 (TRBV11-2, TRBJ2-2)
CASSLPGELFF

SEQ ID NO: 621861 - protein, 15 aa, Homo sapiens
  CDR3 for alpha chain variable domain of TCR clone 310931 (TRAV23/DV6, TRAJ18)
CAARYRGSTLGGLYF

SEQ ID NO: 621862 - protein, 17 aa, Homo sapiens
  CDR3 for beta chain variable domain of TCR clone 310931 (TRBV7-3, TRBJ2-3)
CASSLMKRMRGADTQYF

SEQ ID NO: 621863 - protein, 12 aa, Homo sapiens
  CDR3 for alpha chain variable domain of TCR clone 310932 (TRAV12-2, TRAJ8)
CAVNTGFQKLVF

SEQ ID NO: 621864 - protein, 14 aa, Homo sapiens
  CDR3 for beta chain variable domain of TCR clone 310932 (TRBV20-1, TRBJ1-1)
CSAQTRIGGTESFF

SEQ ID NO: 621865 - protein, 16 aa, Homo sapiens
  CDR3 for alpha chain variable domain of TCR clone 310933 (TRAV3, TRAJ37)
CAVGPHGSGNTGKLIF

SEQ ID NO: 621866 - protein, 17 aa, Homo sapiens
  CDR3 for beta chain variable domain of TCR clone 310933 (TRBV20-1, TRBJ2-1)
CSASSSGLAGSYNEQFF

SEQ ID NO: 621867 - protein, 12 aa, Homo sapiens
  CDR3 for alpha chain variable domain of TCR clone 310934 (TRAV12-1, TRAJ23)
CVVNIPGGKLIF

SEQ ID NO: 621868 - protein, 15 aa, Homo sapiens
  CDR3 for beta chain variable domain of TCR clone 310934 (TRBV7-2, TRBJ2-7)
CASSLVSSSSYEKYF

SEQ ID NO: 621869 - protein, 15 aa, Homo sapiens
  CDR3 for alpha chain variable domain of TCR clone 310935 (TRAV8-3, TRAJ45)
CASSYSGGGADGLTF

SEQ ID NO: 621870 - protein, 15 aa, Homo sapiens
  CDR3 for beta chain variable domain of TCR clone 310935 (TRBV11-2, TRBJ1-2)
CASSLEGVQRNGYTF

SEQ ID NO: 621871 - protein, 15 aa, Homo sapiens
  CDR3 for alpha chain variable domain of TCR clone 310936 (TRAV2, TRAJ15)
CAVEDRGQAGTALIF

SEQ ID NO: 621872 - protein, 13 aa, Homo sapiens
  CDR3 for beta chain variable domain of TCR clone 310936 (TRBV7-9, TRBJ2-7)
CASSFAGAYEQYF

SEQ ID NO: 621873 - protein, 15 aa, Homo sapiens
  CDR3 for alpha chain variable domain of TCR clone 310937 (TRAV17, TRAJ56)
CATDANTGANSKLTF

SEQ ID NO: 621874 - protein, 11 aa, Homo sapiens
  CDR3 for beta chain variable domain of TCR clone 310937 (TRBV7-3, TRBJ2-2)
CASSLKRGTLF

SEQ ID NO: 621875 - protein, 11 aa, Homo sapiens
  CDR3 for alpha chain variable domain of TCR clone 310938 (TRAV16, TRAJ20)
CALSEGFKAAL

SEQ ID NO: 621876 - protein, 13 aa, Homo sapiens
  CDR3 for beta chain variable domain of TCR clone 310938 (TRBV7-3, TRBJ2-1)
CASSFDSYNEQFF

SEQ ID NO: 621877 - protein, 16 aa, Homo sapiens
  CDR3 for alpha chain variable domain of TCR clone 310939 (TRAV1-2, TRAJ10)
CAVRGVLTGGGKKLTF

SEQ ID NO: 621878 - protein, 17 aa, Homo sapiens
  CDR3 for beta chain variable domain of TCR clone 310939 (TRBV7-8, TRBJ2-6)
CASSAGTGGAGANVLTF

SEQ ID NO: 621879 - protein, 15 aa, Homo sapiens
  CDR3 for alpha chain variable domain of TCR clone 310940 (TRAV3, TRAJ22)
CAVRDRGGYARQLTF

SEQ ID NO: 621880 - protein, 17 aa, Homo sapiens
  CDR3 for beta chain variable domain of TCR clone 310940 (TRBV13, TRBJ2-3)
CASSLSRVAGGRNTQYF

SEQ ID NO: 621881 - protein, 14 aa, Homo sapiens
  CDR3 for alpha chain variable domain of TCR clone 310941 (TRAV12-1, TRAJ17)
CVVNYKAAGNKLAF

SEQ ID NO: 621882 - protein, 17 aa, Homo sapiens
  CDR3 for beta chain variable domain of TCR clone 310941 (TRBV20-1, TRBJ2-1)
CSASSSGLAGSYNEQFF

SEQ ID NO: 621883 - protein, 14 aa, Homo sapiens
  CDR3 for alpha chain variable domain of TCR clone 310942 (TRAV12-3, TRAJ10)
SHLPLTGGGNKLTF

SEQ ID NO: 621884 - protein, 15 aa, Homo sapiens
  CDR3 for beta chain variable domain of TCR clone 310942 (TRBV27, TRBJ1-5)
CASSLGTGFDLPQHF

SEQ ID NO: 621885 - protein, 14 aa, Homo sapiens
  CDR3 for alpha chain variable domain of TCR clone 310943 (TRAV1-2, TRAJ16)
CAVNRFSDVQKLLF

SEQ ID NO: 621886 - protein, 18 aa, Homo sapiens
  CDR3 for beta chain variable domain of TCR clone 310943 (TRBV20-1, TRBJ2-6)
CSAETAPTHGSGANVLTF

SEQ ID NO: 621887 - protein, 18 aa, Homo sapiens
  CDR3 for alpha chain variable domain of TCR clone 310944 (TRAV12-3, TRAJ52)
CAMSVGGAGGTSYGKLTF

SEQ ID NO: 621888 - protein, 13 aa, Homo sapiens
  CDR3 for beta chain variable domain of TCR clone 310944 (TRBV20-1, TRBJ2-5)
CSARDNYMETQYF

SEQ ID NO: 621889 - protein, 14 aa, Homo sapiens
  CDR3 for alpha chain variable domain of TCR clone 310945 (TRAV12-2, TRAJ13)
CAVKKTGGHQKVTF

SEQ ID NO: 621890 - protein, 13 aa, Homo sapiens
  CDR3 for beta chain variable domain of TCR clone 310945 (TRBV28, TRBJ2-7)
CASKAGGVYEQYF

SEQ ID NO: 621891 - protein, 14 aa, Homo sapiens
  CDR3 for alpha chain variable domain of TCR clone 310946 (TRAV1-2, TRAJ16)
CAVNRFSDGQKLLF

SEQ ID NO: 621892 - protein, 17 aa, Homo sapiens
  CDR3 for beta chain variable domain of TCR clone 310946 (TRBV10-3, TRBJ2-4)
CTSVPSVNKGSKTIQYF

SEQ ID NO: 621893 - protein, 15 aa, Homo sapiens
  CDR3 for alpha chain variable domain of TCR clone 310947 (TRAV21, TRAJ37)
CAVRPTLSNTDKLIF

SEQ ID NO: 621894 - protein, 16 aa, Homo sapiens
  CDR3 for beta chain variable domain of TCR clone 310947 (TRBV24-1, TRBJ2-3)
CATSDRRQDLTDTQYF

SEQ ID NO: 621895 - protein, 14 aa, Homo sapiens
  CDR3 for alpha chain variable domain of TCR clone 310948 (TRAV12-3, TRAJ10)
SHLPLTGGGNKLTF

SEQ ID NO: 621896 - protein, 15 aa, Homo sapiens
  CDR3 for beta chain variable domain of TCR clone 310948 (TRBV7-8, TRBJ2-1)
CASSSRLAAYNEQFF

SEQ ID NO: 621897 - protein, 16 aa, Homo sapiens
  CDR3 for alpha chain variable domain of TCR clone 310949 (TRAV36/DV7, TRAJ38)
CAVTTSNAGNNRKLIW

SEQ ID NO: 621898 - protein, 13 aa, Homo sapiens
  CDR3 for beta chain variable domain of TCR clone 310949 (TRBV7-9, TRBJ1-2)
CASSLKQNYGYTF

SEQ ID NO: 621899 - protein, 15 aa, Homo sapiens
  CDR3 for alpha chain variable domain of TCR clone 310950 (TRAV26-2, TRAJ39)
CSLRGNNDAGNMLTF

SEQ ID NO: 621900 - protein, 15 aa, Homo sapiens
  CDR3 for beta chain variable domain of TCR clone 310950 (TRBV5-4, TRBJ1-1)
CASSSLGWANTEAFF

SEQ ID NO: 621901 - protein, 14 aa, Homo sapiens
  CDR3 for alpha chain variable domain of TCR clone 310951 (TRAV16, TRAJ40)
CALHESYYLRNLQI

SEQ ID NO: 621902 - protein, 12 aa, Homo sapiens
  CDR3 for beta chain variable domain of TCR clone 310951 (TRBV7-3, TRBJ2-3)
CASGSLTDTQYF

SEQ ID NO: 621903 - protein, 10 aa, Homo sapiens
  CDR3 for alpha chain variable domain of TCR clone 310952 (TRAV30, TRAJ48)
CGIGNEKLTF

SEQ ID NO: 621904 - protein, 14 aa, Homo sapiens
  CDR3 for beta chain variable domain of TCR clone 310952 (TRBV7-6, TRBJ2-3)
AASSVAGGTDTQYF

SEQ ID NO: 621905 - protein, 14 aa, Homo sapiens
  CDR3 for alpha chain variable domain of TCR clone 310953 (TRAV9-2, TRAJ39)
CAPYIYNAGNMLTF

SEQ ID NO: 621906 - protein, 16 aa, Homo sapiens
  CDR3 for beta chain variable domain of TCR clone 310953 (TRBV12-5, TRBJ2-5)
CASGPRTSGNQETQYF

SEQ ID NO: 621907 - protein, 10 aa, Homo sapiens
  CDR3 for alpha chain variable domain of TCR clone 310954 (TRAV1-2, TRAJ31)
CAFFDARLMF

SEQ ID NO: 621908 - protein, 14 aa, Homo sapiens
  CDR3 for beta chain variable domain of TCR clone 310954 (TRBV12-4, TRBJ1-3)
CASTLTGAGNTMYF

SEQ ID NO: 621909 - protein, 13 aa, Homo sapiens
  CDR3 for alpha chain variable domain of TCR clone 310955 (TRAV21, TRAJ57)
CTVTQVGSEKLVF

SEQ ID NO: 621910 - protein, 16 aa, Homo sapiens
  CDR3 for beta chain variable domain of TCR clone 310955 (TRBV29-1, TRBJ2-7)
CSVEDAEDGTAYEQYF

SEQ ID NO: 621911 - protein, 19 aa, Homo sapiens
  CDR3 for alpha chain variable domain of TCR clone 310956 (TRAV39, TRAJ43)
PCMTSLPPTSVPWANDIRF

SEQ ID NO: 621912 - protein, 15 aa, Homo sapiens
  CDR3 for beta chain variable domain of TCR clone 310956 (TRBV12-4, TRBJ2-5)
CASSPPTGLQETQYF

SEQ ID NO: 621913 - protein, 22 aa, Homo sapiens
  CDR3 for alpha chain variable domain of TCR clone 310957 (TRAV8-2, TRAJ45)
HLTKPSAHMSDAAEYSADGLTF

SEQ ID NO: 621914 - protein, 15 aa, Homo sapiens
  CDR3 for beta chain variable domain of TCR clone 310957 (TRBV28, TRBJ2-1)
CASSIIAGGRSEQFF

SEQ ID NO: 621915 - protein, 14 aa, Homo sapiens
  CDR3 for alpha chain variable domain of TCR clone 310958 (TRAV8-4, TRAJ9)
CAVRINTGGFKNIF

SEQ ID NO: 621916 - protein, 14 aa, Homo sapiens
  CDR3 for beta chain variable domain of TCR clone 310958 (TRBV27, TRBJ2-1)
CASSATGGYNEQFF

SEQ ID NO: 621917 - protein, 15 aa, Homo sapiens
  CDR3 for alpha chain variable domain of TCR clone 310959 (TRAV3, TRAJ5)
CAVRDLDTGRRALTF

SEQ ID NO: 621918 - protein, 15 aa, Homo sapiens
  CDR3 for beta chain variable domain of TCR clone 310959 (TRBV7-2, TRBJ2-2)
CASRRPGQNTGELFF

SEQ ID NO: 621919 - protein, 12 aa, Homo sapiens
  CDR3 for alpha chain variable domain of TCR clone 310960 (TRAV12-3, TRAJ17)
CAMTLTGNKLTF

SEQ ID NO: 621920 - protein, 18 aa, Homo sapiens
  CDR3 for beta chain variable domain of TCR clone 310960 (TRBV11-2, TRBJ1-2)
CASSFSGLTTGPSYGYTF

SEQ ID NO: 621921 - protein, 12 aa, Homo sapiens
  CDR3 for alpha chain variable domain of TCR clone 310961 (TRAV13-1, TRAJ53)
SASGGSIYKLTF

SEQ ID NO: 621922 - protein, 15 aa, Homo sapiens
  CDR3 for beta chain variable domain of TCR clone 310961 (TRBV5-1, TRBJ2-1)
CASSPPRAPYNEQFF

SEQ ID NO: 621923 - protein, 14 aa, Homo sapiens
  CDR3 for alpha chain variable domain of TCR clone 310962 (TRAV1-2, TRAJ16)
CAVNRFSDGQNLLF

SEQ ID NO: 621924 - protein, 15 aa, Homo sapiens
  CDR3 for beta chain variable domain of TCR clone 310962 (TRBV20-1, TRBJ1-1)
CSASRGVTGNTEAFF

SEQ ID NO: 621925 - protein, 14 aa, Homo sapiens
  CDR3 for alpha chain variable domain of TCR clone 310963 (TRAV26-1, TRAJ34)
CIVRVAYNTDKLIF

SEQ ID NO: 621926 - protein, 20 aa, Homo sapiens
  CDR3 for beta chain variable domain of TCR clone 310963 (TRBV11-1, TRBJ2-6)
CASSAEFQPGMSSGANVLTF

SEQ ID NO: 621927 - protein, 16 aa, Homo sapiens
  CDR3 for alpha chain variable domain of TCR clone 310964 (TRAV1-2, TRAJ26)
CAARDLITMVRIFFLF

SEQ ID NO: 621928 - protein, 12 aa, Homo sapiens
  CDR3 for beta chain variable domain of TCR clone 310964 (TRBV20-1, TRBJ2-1)
CSAQYTYNEQFF

SEQ ID NO: 621929 - protein, 14 aa, Homo sapiens
  CDR3 for alpha chain variable domain of TCR clone 310965 (TRAV4, TRAJ6)
CLVGEAGGSYILTF

SEQ ID NO: 621930 - protein, 16 aa, Homo sapiens
  CDR3 for beta chain variable domain of TCR clone 310965 (TRBV7-6, TRBJ2-1)
CASSLNEGPYYNEQFF

SEQ ID NO: 621931 - protein, 13 aa, Homo sapiens
  CDR3 for alpha chain variable domain of TCR clone 310966 (TRAV8-3, TRAJ44)
CAVVPGTASKLTF

SEQ ID NO: 621932 - protein, 15 aa, Homo sapiens
  CDR3 for beta chain variable domain of TCR clone 310966 (TRBV11-2, TRBJ2-1)
CASSLAGAGADEQFF

SEQ ID NO: 621933 - protein, 11 aa, Homo sapiens
  CDR3 for alpha chain variable domain of TCR clone 310967 (TRAV12-3, TRAJ43)
CAMSVSNDIRF

SEQ ID NO: 621934 - protein, 15 aa, Homo sapiens
  CDR3 for beta chain variable domain of TCR clone 310967 (TRBV20-1, TRBJ2-7)
CSARDRVSGMDEQYF

SEQ ID NO: 621935 - protein, 14 aa, Homo sapiens
  CDR3 for alpha chain variable domain of TCR clone 310968 (TRAV12-2, TRAJ45)
CAVNSGGGADGLTF

SEQ ID NO: 621936 - protein, 16 aa, Homo sapiens
  CDR3 for beta chain variable domain of TCR clone 310968 (TRBV7-3, TRBJ2-1)
CASSLIPTETYNEQFF

SEQ ID NO: 621937 - protein, 14 aa, Homo sapiens
  CDR3 for alpha chain variable domain of TCR clone 310969 (TRAV1-2, TRAJ16)
CAVNRFSDGQKLLF

SEQ ID NO: 621938 - protein, 16 aa, Homo sapiens
  CDR3 for beta chain variable domain of TCR clone 310969 (TRBV29-1, TRBJ2-7)
CSVEVVGTIGSYEQYF

SEQ ID NO: 621939 - protein, 16 aa, Homo sapiens
  CDR3 for alpha chain variable domain of TCR clone 310970 (TRAV14/DV4, TRAJ54)
CAMREGRIQGAQKLVF

SEQ ID NO: 621940 - protein, 16 aa, Homo sapiens
  CDR3 for beta chain variable domain of TCR clone 310970 (TRBV19, TRBJ1-1)
CASSPTRFWPGTEAFF

SEQ ID NO: 621941 - protein, 14 aa, Homo sapiens
  CDR3 for alpha chain variable domain of TCR clone 310971 (TRAV17, TRAJ32)
CATDPGGATNKIIF

SEQ ID NO: 621942 - protein, 14 aa, Homo sapiens
  CDR3 for beta chain variable domain of TCR clone 310971 (TRBV2, TRBJ1-5)
CASSENRGGQPQHF

SEQ ID NO: 621943 - protein, 13 aa, Homo sapiens
  CDR3 for alpha chain variable domain of TCR clone 310972 (TRAV39, TRAJ58)
CAGEETSGSGLTF

SEQ ID NO: 621944 - protein, 13 aa, Homo sapiens
  CDR3 for beta chain variable domain of TCR clone 310972 (TRBV15, TRBJ2-7)
CATSTTGHYEQYF

SEQ ID NO: 621945 - protein, 15 aa, Homo sapiens
  CDR3 for alpha chain variable domain of TCR clone 310973 (TRAV3, TRAJ9)
CAVRARNTEGFKTIF

SEQ ID NO: 621946 - protein, 12 aa, Homo sapiens
  CDR3 for beta chain variable domain of TCR clone 310973 (TRBV27, TRBJ2-5)
CASSPTGETQYF

SEQ ID NO: 621947 - protein, 11 aa, Homo sapiens
  CDR3 for alpha chain variable domain of TCR clone 310974 (TRAV12-2, TRAJ36)
CAVDGANNLFF

SEQ ID NO: 621948 - protein, 16 aa, Homo sapiens
  CDR3 for beta chain variable domain of TCR clone 310974 (TRBV5-4, TRBJ2-3)
CASQQPGAGGADTQYF

SEQ ID NO: 621949 - protein, 10 aa, Homo sapiens
  CDR3 for alpha chain variable domain of TCR clone 310975 (TRAV17, TRAJ36)
CATVAGNLFF

SEQ ID NO: 621950 - protein, 13 aa, Homo sapiens
  CDR3 for beta chain variable domain of TCR clone 310975 (TRBV7-2, TRBJ2-2)
CASSSVRAGELFF

SEQ ID NO: 621951 - protein, 12 aa, Homo sapiens
  CDR3 for alpha chain variable domain of TCR clone 310976 (TRAV13-1, TRAJ11)
CAGPSGYSTLTF

SEQ ID NO: 621952 - protein, 15 aa, Homo sapiens
  CDR3 for beta chain variable domain of TCR clone 310976 (TRBV7-2, TRBJ2-7)
CASSSGLAGRREQYF

SEQ ID NO: 621953 - protein, 14 aa, Homo sapiens
  CDR3 for alpha chain variable domain of TCR clone 310977 (TRAV12-2, TRAJ17)
CAALFKAAGNKLTF

SEQ ID NO: 621954 - protein, 16 aa, Homo sapiens
  CDR3 for beta chain variable domain of TCR clone 310977 (TRBV11-2, TRBJ2-7)
CASSTVTAPKTYEQYF

SEQ ID NO: 621955 - protein, 14 aa, Homo sapiens
  CDR3 for alpha chain variable domain of TCR clone 310978 (TRAV8-3, TRAJ4)
CAGGAAGGFNKLIF

SEQ ID NO: 621956 - protein, 14 aa, Homo sapiens
  CDR3 for beta chain variable domain of TCR clone 310978 (TRBV12-5, TRBJ2-5)
CASGSRTHQETQYF

SEQ ID NO: 621957 - protein, 14 aa, Homo sapiens
  CDR3 for alpha chain variable domain of TCR clone 310979 (TRAV1-2, TRAJ16)
CAVNRFSDGEKLLF

SEQ ID NO: 621958 - protein, 15 aa, Homo sapiens
  CDR3 for beta chain variable domain of TCR clone 310979 (TRBV11-3, TRBJ2-3)
CASLKDGREGDTQYF

SEQ ID NO: 621959 - protein, 14 aa, Homo sapiens
  CDR3 for alpha chain variable domain of TCR clone 310980 (TRAV12-1, TRAJ9)
CVVNRRTGGFRTIF

SEQ ID NO: 621960 - protein, 16 aa, Homo sapiens
  CDR3 for beta chain variable domain of TCR clone 310980 (TRBV4-1, TRBJ2-3)
CASSQSTSGAEDTQYF

SEQ ID NO: 621961 - protein, 13 aa, Homo sapiens
  CDR3 for alpha chain variable domain of TCR clone 310981 (TRAV20, TRAJ21)
CAVEGYNFNKFYF

SEQ ID NO: 621962 - protein, 16 aa, Homo sapiens
  CDR3 for beta chain variable domain of TCR clone 310981 (TRBV7-2, TRBJ1-2)
CASSSNQDRRGHGYSF

SEQ ID NO: 621963 - protein, 16 aa, Homo sapiens
  CDR3 for alpha chain variable domain of TCR clone 310982 (TRAV17, TRAJ52)
CAIGIIGGTSYGKLTF

SEQ ID NO: 621964 - protein, 12 aa, Homo sapiens
  CDR3 for beta chain variable domain of TCR clone 310982 (TRBV7-3, TRBJ2-1)
CASSFINNEQFF

SEQ ID NO: 621965 - protein, 14 aa, Homo sapiens
  CDR3 for alpha chain variable domain of TCR clone 310983 (TRAV26-1, TRAJ34)
CIVRVAYNTDKLIF

SEQ ID NO: 621966 - protein, 15 aa, Homo sapiens
  CDR3 for beta chain variable domain of TCR clone 310983 (TRBV20-1, TRBJ2-7)
CGARVAAAYFYEQYF

SEQ ID NO: 621967 - protein, 14 aa, Homo sapiens
  CDR3 for alpha chain variable domain of TCR clone 310984 (TRAV35, TRAJ46)
CAGPQKSSRDKLTF

SEQ ID NO: 621968 - protein, 12 aa, Homo sapiens
  CDR3 for beta chain variable domain of TCR clone 310984 (TRBV19, TRBJ2-1)
CASSMQDTEQFF

SEQ ID NO: 621969 - protein, 12 aa, Homo sapiens
  CDR3 for alpha chain variable domain of TCR clone 310985 (TRAV38-2/DV8, TRAJ48)
CALLSGNEKLTF

SEQ ID NO: 621970 - protein, 14 aa, Homo sapiens
  CDR3 for beta chain variable domain of TCR clone 310985 (TRBV11-3, TRBJ2-1)
CASSATTSGSIQFF

SEQ ID NO: 621971 - protein, 15 aa, Homo sapiens
  CDR3 for alpha chain variable domain of TCR clone 310986 (TRAV23/DV6, TRAJ18)
CAARYRGSTLGRLYF

SEQ ID NO: 621972 - protein, 13 aa, Homo sapiens
  CDR3 for beta chain variable domain of TCR clone 310986 (TRBV7-2, TRBJ2-7)
CASSSRSGSEQYF

SEQ ID NO: 621973 - protein, 14 aa, Homo sapiens
  CDR3 for alpha chain variable domain of TCR clone 310987 (TRAV13-1, TRAJ13)
CAASRVGGYQKVTF

SEQ ID NO: 621974 - protein, 17 aa, Homo sapiens
  CDR3 for beta chain variable domain of TCR clone 310987 (TRBV15, TRBJ1-5)
CATSRAPPGTRNKPQHF

SEQ ID NO: 621975 - protein, 18 aa, Homo sapiens
  CDR3 for alpha chain variable domain of TCR clone 310988 (TRAV21, TRAJ52)
CAVRPSPAGGTSYGKLTF

SEQ ID NO: 621976 - protein, 12 aa, Homo sapiens
  CDR3 for beta chain variable domain of TCR clone 310988 (TRBV7-3, TRBJ2-5)
CASSSPGGTQYF

SEQ ID NO: 621977 - protein, 12 aa, Homo sapiens
  CDR3 for alpha chain variable domain of TCR clone 310989 (TRAV17, TRAJ57)
CATDGGSEKLVF

SEQ ID NO: 621978 - protein, 20 aa, Homo sapiens
  CDR3 for beta chain variable domain of TCR clone 310989 (TRBV28, TRBJ2-1)
CASTPIGRSPGLAGGNEQFF

SEQ ID NO: 621979 - protein, 12 aa, Homo sapiens
  CDR3 for alpha chain variable domain of TCR clone 310990 (TRAV35, TRAJ30)
CAGLNRDDKIIF

SEQ ID NO: 621980 - protein, 13 aa, Homo sapiens
  CDR3 for beta chain variable domain of TCR clone 310990 (TRBV7-9, TRBJ2-3)
CASSPGSTDTQYF

SEQ ID NO: 621981 - protein, 13 aa, Homo sapiens
  CDR3 for alpha chain variable domain of TCR clone 310991 (TRAV13-1, TRAJ5)
CAASDTGRRALTF

SEQ ID NO: 621982 - protein, 14 aa, Homo sapiens
  CDR3 for beta chain variable domain of TCR clone 310991 (TRBV4-2, TRBJ2-1)
CASSLDRAYNEQFF

SEQ ID NO: 621983 - protein, 11 aa, Homo sapiens
  CDR3 for alpha chain variable domain of TCR clone 310992 (TRAV12-2, TRAJ49)
CAVNTCNQFYF

SEQ ID NO: 621984 - protein, 12 aa, Homo sapiens
  CDR3 for beta chain variable domain of TCR clone 310992 (TRBV2, TRBJ2-3)
CASSGRFDTQYF

SEQ ID NO: 621985 - protein, 13 aa, Homo sapiens
  CDR3 for alpha chain variable domain of TCR clone 310993 (TRAV12-3, TRAJ13)
GAMSSGGYQKVTF

SEQ ID NO: 621986 - protein, 13 aa, Homo sapiens
  CDR3 for beta chain variable domain of TCR clone 310993 (TRBV20-1, TRBJ1-1)
CSAPPGGHTEAFF

SEQ ID NO: 621987 - protein, 13 aa, Homo sapiens
  CDR3 for alpha chain variable domain of TCR clone 310994 (TRAV17, TRAJ5)
CAPMDTGMRALTF

SEQ ID NO: 621988 - protein, 13 aa, Homo sapiens
  CDR3 for beta chain variable domain of TCR clone 310994 (TRBV7-9, TRBJ1-2)
CASSLKQNYGYTF

SEQ ID NO: 621989 - protein, 10 aa, Homo sapiens
  CDR3 for alpha chain variable domain of TCR clone 310995 (TRAV30, TRAJ48)
CDIGNEKLTF

SEQ ID NO: 621990 - protein, 13 aa, Homo sapiens
  CDR3 for beta chain variable domain of TCR clone 310995 (TRBV4-1, TRBJ2-7)
CASSWTGGYEQYF

SEQ ID NO: 621991 - protein, 16 aa, Homo sapiens
  CDR3 for alpha chain variable domain of TCR clone 310996 (TRAV3, TRAJ10)
CAVRDMRAGGGNKLTF

SEQ ID NO: 621992 - protein, 20 aa, Homo sapiens
  CDR3 for beta chain variable domain of TCR clone 310996 (TRBV11-3, TRBJ2-7)
CACSQRTSGSLRAVLRAGHQ

SEQ ID NO: 621993 - protein, 12 aa, Homo sapiens
  CDR3 for alpha chain variable domain of TCR clone 310997 (TRAV12-3, TRAJ4)
CAMTGAGTRLAV

SEQ ID NO: 621994 - protein, 14 aa, Homo sapiens
  CDR3 for beta chain variable domain of TCR clone 310997 (TRBV10-3, TRBJ1-1)
CAISDTDKGVEAFF

SEQ ID NO: 621995 - protein, 12 aa, Homo sapiens
  CDR3 for alpha chain variable domain of TCR clone 310998 (TRAV2, TRAJ29)
CAVDSGNTPLVF

SEQ ID NO: 621996 - protein, 12 aa, Homo sapiens
  CDR3 for beta chain variable domain of TCR clone 310998 (TRBV7-8, TRBJ2-5)
CASSPRVETQYF

SEQ ID NO: 621997 - protein, 15 aa, Homo sapiens
  CDR3 for alpha chain variable domain of TCR clone 310999 (TRAV12-1, TRAJ26)
CDSATYLYYGQNFVF

SEQ ID NO: 621998 - protein, 15 aa, Homo sapiens
  CDR3 for beta chain variable domain of TCR clone 310999 (TRBV5-1, TRBJ2-6)
CASSLDPSGANVLTF

SEQ ID NO: 621999 - protein, 14 aa, Homo sapiens
  CDR3 for alpha chain variable domain of TCR clone 311000 (TRAV1-2, TRAJ8)
CAVREDPGFQKLVF

SEQ ID NO: 622000 - protein, 15 aa, Homo sapiens
  CDR3 for beta chain variable domain of TCR clone 311000 (TRBV11-3, TRBJ2-3)
CASLKDGREGDTQYF

SEQ ID NO: 622001 - protein, 11 aa, Homo sapiens
  CDR3 for alpha chain variable domain of TCR clone 311001 (TRAV1-2, TRAJ20)
CAVSNDYKLSF

SEQ ID NO: 622002 - protein, 15 aa, Homo sapiens
  CDR3 for beta chain variable domain of TCR clone 311001 (TRBV7-9, TRBJ2-7)
CASSLALAEAYEQYF

SEQ ID NO: 622003 - protein, 14 aa, Homo sapiens
  CDR3 for alpha chain variable domain of TCR clone 311002 (TRAV16, TRAJ32)
CALKSGGATNKLIF

SEQ ID NO: 622004 - protein, 16 aa, Homo sapiens
  CDR3 for beta chain variable domain of TCR clone 311002 (TRBV7-9, TRBJ1-2)
CASSLGFSSGEDGYTF

SEQ ID NO: 622005 - protein, 11 aa, Homo sapiens
  CDR3 for alpha chain variable domain of TCR clone 311003 (TRAV2, TRAJ23)
CAVETRGKLIF

SEQ ID NO: 622006 - protein, 16 aa, Homo sapiens
  CDR3 for beta chain variable domain of TCR clone 311003 (TRBV7-3, TRBJ2-2)
CASSLKRGTLSGELFF

SEQ ID NO: 622007 - protein, 11 aa, Homo sapiens
  CDR3 for alpha chain variable domain of TCR clone 311004 (TRAV2, TRAJ23)
CAVETRVKLIF

SEQ ID NO: 622008 - protein, 14 aa, Homo sapiens
  CDR3 for beta chain variable domain of TCR clone 311004 (TRBV2, TRBJ2-3)
CASSEGQNTDTQYF

SEQ ID NO: 622009 - protein, 14 aa, Homo sapiens
  CDR3 for alpha chain variable domain of TCR clone 311005 (TRAV13-1, TRAJ16)
CAAGQMARSCSLQG

SEQ ID NO: 622010 - protein, 13 aa, Homo sapiens
  CDR3 for beta chain variable domain of TCR clone 311005 (TRBV7-2, TRBJ2-4)
CASSREHANTQYF

SEQ ID NO: 622011 - protein, 14 aa, Homo sapiens
  CDR3 for alpha chain variable domain of TCR clone 311006 (TRAV1-2, TRAJ16)
CAVNRFSDGQKLLF

SEQ ID NO: 622012 - protein, 14 aa, Homo sapiens
  CDR3 for beta chain variable domain of TCR clone 311006 (TRBV19, TRBJ2-2)
CASSTLRRSGELFF

SEQ ID NO: 622013 - protein, 16 aa, Homo sapiens
  CDR3 for alpha chain variable domain of TCR clone 311007 (TRAV3, TRAJ10)
CAVRDMRAGGGNKLTF

SEQ ID NO: 622014 - protein, 15 aa, Homo sapiens
  CDR3 for beta chain variable domain of TCR clone 311007 (TRBV11-2, TRBJ2-3)
CASLKDGREGDTQYF

SEQ ID NO: 622015 - protein, 12 aa, Homo sapiens
  CDR3 for alpha chain variable domain of TCR clone 311008 (TRAV12-1, TRAJ40)
CVVPSGTYKYIF

SEQ ID NO: 622016 - protein, 15 aa, Homo sapiens
  CDR3 for beta chain variable domain of TCR clone 311008 (TRBV12-4, TRBJ2-1)
CASSPLCGRNNEQFF

SEQ ID NO: 622017 - protein, 11 aa, Homo sapiens
  CDR3 for alpha chain variable domain of TCR clone 311009 (TRAV8-3, TRAJ49)
CAVNTGNQFYF

SEQ ID NO: 622018 - protein, 12 aa, Homo sapiens
  CDR3 for beta chain variable domain of TCR clone 311009 (TRBV11-2, TRBJ2-2)
CASSLPTGELFF

SEQ ID NO: 622019 - protein, 10 aa, Homo sapiens
  CDR3 for alpha chain variable domain of TCR clone 311010 (TRAV12-3, TRAJ4)
CAMTGAGTRL

SEQ ID NO: 622020 - protein, 14 aa, Homo sapiens
  CDR3 for beta chain variable domain of TCR clone 311010 (TRBV10-3, TRBJ1-1)
CAISDTDRGVEAFC

SEQ ID NO: 622021 - protein, 14 aa, Homo sapiens
  CDR3 for alpha chain variable domain of TCR clone 311011 (TRAV14/DV4, TRAJ56)
CAMSATGANSKLTF

SEQ ID NO: 622022 - protein, 14 aa, Homo sapiens
  CDR3 for beta chain variable domain of TCR clone 311011 (TRBV12-5, TRBJ2-5)
CASGSRTHQETQYF

SEQ ID NO: 622023 - protein, 11 aa, Homo sapiens
  CDR3 for alpha chain variable domain of TCR clone 311012 (TRAV13-1, TRAJ15)
CAATPGTALIF

SEQ ID NO: 622024 - protein, 13 aa, Homo sapiens
  CDR3 for beta chain variable domain of TCR clone 311012 (TRBV7-2, TRBJ2-1)
CASSVGVCNEQFF

SEQ ID NO: 622025 - protein, 16 aa, Homo sapiens
  CDR3 for alpha chain variable domain of TCR clone 311013 (TRAV3, TRAJ18)
CPVRDGRGSTLGRLYF

SEQ ID NO: 622026 - protein, 15 aa, Homo sapiens
  CDR3 for beta chain variable domain of TCR clone 311013 (TRBV7-9, TRBJ1-6)
CASSSPGRGNSPLHF

SEQ ID NO: 622027 - protein, 14 aa, Homo sapiens
  CDR3 for alpha chain variable domain of TCR clone 311014 (TRAV12-2, TRAJ44)
CAVHPAGTASQLTF

SEQ ID NO: 622028 - protein, 16 aa, Homo sapiens
  CDR3 for beta chain variable domain of TCR clone 311014 (TRBV2, TRBJ2-1)
CASSVGGSLSYNEQFF

SEQ ID NO: 622029 - protein, 16 aa, Homo sapiens
  CDR3 for alpha chain variable domain of TCR clone 311015 (TRAV16, TRAJ4)
CALRRMFSGGYNKLIF

SEQ ID NO: 622030 - protein, 15 aa, Homo sapiens
  CDR3 for beta chain variable domain of TCR clone 311015 (TRBV12-4, TRBJ2-5)
CASSPPTGLQETQYF

SEQ ID NO: 622031 - protein, 10 aa, Homo sapiens
  CDR3 for alpha chain variable domain of TCR clone 311016 (TRAV12-1, TRAJ37)
ARGNTGKLIF

SEQ ID NO: 622032 - protein, 15 aa, Homo sapiens
  CDR3 for beta chain variable domain of TCR clone 311016 (TRBV7-9, TRBJ1-5)
CASSQGHQPNQPQHF

SEQ ID NO: 622033 - protein, 11 aa, Homo sapiens
  CDR3 for alpha chain variable domain of TCR clone 311017 (TRAV17, TRAJ9)
CATTGGFKTIF

SEQ ID NO: 622034 - protein, 14 aa, Homo sapiens
  CDR3 for beta chain variable domain of TCR clone 311017 (TRBV7-8, TRBJ2-5)
CASSATGGQETQYF

SEQ ID NO: 622035 - protein, 15 aa, Homo sapiens
  CDR3 for alpha chain variable domain of TCR clone 311018 (TRAV26-1, TRAJ17)
CIVRVVKAAGNKLTF

SEQ ID NO: 622036 - protein, 15 aa, Homo sapiens
  CDR3 for beta chain variable domain of TCR clone 311018 (TRBV13, TRBJ1-5)
CASSRTGRGHQPQHF

SEQ ID NO: 622037 - protein, 15 aa, Homo sapiens
  CDR3 for alpha chain variable domain of TCR clone 311019 (TRAV38-2/DV8, TRAJ31)
CAYRRALDNNARLMF

SEQ ID NO: 622038 - protein, 13 aa, Homo sapiens
  CDR3 for beta chain variable domain of TCR clone 311019 (TRBV28, TRBJ2-1)
CASRSGGLNEQFF

SEQ ID NO: 622039 - protein, 14 aa, Homo sapiens
  CDR3 for alpha chain variable domain of TCR clone 311020 (TRAV17, TRAJ57)
CATDPQGGSEKLVF

SEQ ID NO: 622040 - protein, 20 aa, Homo sapiens
  CDR3 for beta chain variable domain of TCR clone 311020 (TRBV7-8, TRBJ2-2)
CASSHLFPGPTIQITGELFF

SEQ ID NO: 622041 - protein, 13 aa, Homo sapiens
  CDR3 for alpha chain variable domain of TCR clone 311021 (TRAV8-3, TRAJ43)
CAVGIYNNNDVRF

SEQ ID NO: 622042 - protein, 16 aa, Homo sapiens
  CDR3 for beta chain variable domain of TCR clone 311021 (TRBV7-2, TRBJ2-5)
CASSLVLWTKQETQYF

SEQ ID NO: 622043 - protein, 14 aa, Homo sapiens
  CDR3 for alpha chain variable domain of TCR clone 311022 (TRAV4, TRAJ20)
CLVGRRSNDYKLSF

SEQ ID NO: 622044 - protein, 18 aa, Homo sapiens
  CDR3 for beta chain variable domain of TCR clone 311022 (TRBV2, TRBJ2-5)
CASSGDSQGRGAQETQYF

SEQ ID NO: 622045 - protein, 15 aa, Homo sapiens
  CDR3 for alpha chain variable domain of TCR clone 311023 (TRAV8-3, TRAJ45)
CASSYSGGGADGLTF

SEQ ID NO: 622046 - protein, 16 aa, Homo sapiens
  CDR3 for beta chain variable domain of TCR clone 311023 (TRBV4-3, TRBJ2-1)
CASSPALDRGVNEQFF

SEQ ID NO: 622047 - protein, 12 aa, Homo sapiens
  CDR3 for alpha chain variable domain of TCR clone 311024 (TRAV1-1, TRAJ20)
CAVREDDYKLSF

SEQ ID NO: 622048 - protein, 15 aa, Homo sapiens
  CDR3 for beta chain variable domain of TCR clone 311024 (TRBV5-6, TRBJ2-7)
CASSLPGQVFYEQYY

SEQ ID NO: 622049 - protein, 14 aa, Homo sapiens
  CDR3 for alpha chain variable domain of TCR clone 311025 (TRAV2, TRAJ9)
CALEDRSGGFKTIF

SEQ ID NO: 622050 - protein, 13 aa, Homo sapiens
  CDR3 for beta chain variable domain of TCR clone 311025 (TRBV7-9, TRBJ1-2)
CASSLKQNYGYTF

SEQ ID NO: 622051 - protein, 15 aa, Homo sapiens
  CDR3 for alpha chain variable domain of TCR clone 311026 (TRAV2, TRAJ22)
CAVPSRGGSARQLTF

SEQ ID NO: 622052 - protein, 14 aa, Homo sapiens
  CDR3 for beta chain variable domain of TCR clone 311026 (TRBV11-2, TRBJ2-7)
CASSLGAGAYEQYF

SEQ ID NO: 622053 - protein, 10 aa, Homo sapiens
  CDR3 for alpha chain variable domain of TCR clone 311027 (TRAV13-1, TRAJ52)
CAAKTPMLVL

SEQ ID NO: 622054 - protein, 14 aa, Homo sapiens
  CDR3 for beta chain variable domain of TCR clone 311027 (TRBV6-5, TRBJ1-1)
CASSFGQGLTEAFF

SEQ ID NO: 622055 - protein, 17 aa, Homo sapiens
  CDR3 for alpha chain variable domain of TCR clone 311028 (TRAV3, TRAJ7)
YAVRDMSPLEGTTDSLL

SEQ ID NO: 622056 - protein, 17 aa, Homo sapiens
  CDR3 for beta chain variable domain of TCR clone 311028 (TRBV15, TRBJ1-2)
CATSGREIDVVNYGYTF

SEQ ID NO: 622057 - protein, 14 aa, Homo sapiens
  CDR3 for alpha chain variable domain of TCR clone 311029 (TRAV1-2, TRAJ16)
CAVNRFSDGQKLLF

SEQ ID NO: 622058 - protein, 16 aa, Homo sapiens
  CDR3 for beta chain variable domain of TCR clone 311029 (TRBV9, TRBJ2-7)
CASSVGLGGGTYEHYF

SEQ ID NO: 622059 - protein, 14 aa, Homo sapiens
  CDR3 for alpha chain variable domain of TCR clone 311030 (TRAV38-1, TRAJ45)
CASHSGGGADGLTF

SEQ ID NO: 622060 - protein, 11 aa, Homo sapiens
  CDR3 for beta chain variable domain of TCR clone 311030 (TRBV7-8, TRBJ2-7)
CASSLSLEQYF

SEQ ID NO: 622061 - protein, 12 aa, Homo sapiens
  CDR3 for alpha chain variable domain of TCR clone 311031 (TRAV13-2, TRAJ23)
CAECHRGGKLIF

SEQ ID NO: 622062 - protein, 11 aa, Homo sapiens
  CDR3 for beta chain variable domain of TCR clone 311031 (TRBV11-2, TRBJ2-2)
CASSLPGELFF

SEQ ID NO: 622063 - protein, 15 aa, Homo sapiens
  CDR3 for alpha chain variable domain of TCR clone 311032 (TRAV8-2, TRAJ44)
CVVSPNTGTASKLTF

SEQ ID NO: 622064 - protein, 12 aa, Homo sapiens
  CDR3 for beta chain variable domain of TCR clone 311032 (TRBV11-2, TRBJ2-2)
YAVPRNTGELFF

SEQ ID NO: 622065 - protein, 18 aa, Homo sapiens
  CDR3 for alpha chain variable domain of TCR clone 311033 (TRAV21, TRAJ52)
CAVGPSPAGGTSYGKLTL

SEQ ID NO: 622066 - protein, 17 aa, Homo sapiens
  CDR3 for beta chain variable domain of TCR clone 311033 (TRBV13, TRBJ2-3)
CASSLSRVAGGRNTQYF

SEQ ID NO: 622067 - protein, 11 aa, Homo sapiens
  CDR3 for alpha chain variable domain of TCR clone 311034 (TRAV13-1, TRAJ15)
CAATPGTAPIF

SEQ ID NO: 622068 - protein, 13 aa, Homo sapiens
  CDR3 for beta chain variable domain of TCR clone 311034 (TRBV7-2, TRBJ2-1)
CASSLGVYNEQFF

SEQ ID NO: 622069 - protein, 13 aa, Homo sapiens
  CDR3 for alpha chain variable domain of TCR clone 311035 (TRAV2, TRAJ40)
CAVVTSGTYKYIF

SEQ ID NO: 622070 - protein, 13 aa, Homo sapiens
  CDR3 for beta chain variable domain of TCR clone 311035 (TRBV10-3, TRBJ1-1)
CATWTGGFAEAFF

SEQ ID NO: 622071 - protein, 10 aa, Homo sapiens
  CDR3 for alpha chain variable domain of TCR clone 311036 (TRAV12-3, TRAJ49)
CAMNDDQFYF

SEQ ID NO: 622072 - protein, 13 aa, Homo sapiens
  CDR3 for beta chain variable domain of TCR clone 311036 (TRBV12-4, TRBJ2-5)
CASRLAVQETQYF

SEQ ID NO: 622073 - protein, 12 aa, Homo sapiens
  CDR3 for alpha chain variable domain of TCR clone 311037 (TRAV3, TRAJ43)
CAVRDPNNDMRF

SEQ ID NO: 622074 - protein, 16 aa, Homo sapiens
  CDR3 for beta chain variable domain of TCR clone 311037 (TRBV19, TRBJ2-1)
CASSKAGSSSYNEQFF

SEQ ID NO: 622075 - protein, 12 aa, Homo sapiens
  CDR3 for alpha chain variable domain of TCR clone 311038 (TRAV27, TRAJ42)
CAGGGSQGNLIF

SEQ ID NO: 622076 - protein, 16 aa, Homo sapiens
  CDR3 for beta chain variable domain of TCR clone 311038 (TRBV15, TRBJ1-2)
CATSRGPRTGGGGYTF

SEQ ID NO: 622077 - protein, 13 aa, Homo sapiens
  CDR3 for alpha chain variable domain of TCR clone 311039 (TRAV12-2, TRAJ4)
CAVHSGGYNKLIF

SEQ ID NO: 622078 - protein, 15 aa, Homo sapiens
  CDR3 for beta chain variable domain of TCR clone 311039 (TRBV10-3, TRBJ2-1)
CAISDVQDRAYEQFF

SEQ ID NO: 622079 - protein, 14 aa, Homo sapiens
  CDR3 for alpha chain variable domain of TCR clone 311040 (TRAV12-2, TRAJ9)
CAVNMEGGGFKTIF

SEQ ID NO: 622080 - protein, 15 aa, Homo sapiens
  CDR3 for beta chain variable domain of TCR clone 311040 (TRBV20-1, TRBJ1-6)
CSARAASSYNSPLHF

SEQ ID NO: 622081 - protein, 11 aa, Homo sapiens
  CDR3 for alpha chain variable domain of TCR clone 311041 (TRAV12-2, TRAJ21)
FAVEGFNKFYF

SEQ ID NO: 622082 - protein, 15 aa, Homo sapiens
  CDR3 for beta chain variable domain of TCR clone 311041 (TRBV20-1, TRBJ1-5)
CSASRRGDLGQPQHF

SEQ ID NO: 622083 - protein, 12 aa, Homo sapiens
  CDR3 for alpha chain variable domain of TCR clone 311042 (TRAV36/DV7, TRAJ37)
CACYGTTGKLIF

SEQ ID NO: 622084 - protein, 13 aa, Homo sapiens
  CDR3 for beta chain variable domain of TCR clone 311042 (TRBV19, TRBJ1-2)
CASSVPGQDGYTF

SEQ ID NO: 622085 - protein, 12 aa, Homo sapiens
  CDR3 for alpha chain variable domain of TCR clone 311043 (TRAV1-2, TRAJ33)
CAALDSNYRLIW

SEQ ID NO: 622086 - protein, 15 aa, Homo sapiens
  CDR3 for beta chain variable domain of TCR clone 311043 (TRBV27, TRBJ2-1)
CASSNGGGSSNEQFF

SEQ ID NO: 622087 - protein, 14 aa, Homo sapiens
  CDR3 for alpha chain variable domain of TCR clone 311044 (TRAV12-2, TRAJ13)
CAVKKTGGYQKVTF

SEQ ID NO: 622088 - protein, 13 aa, Homo sapiens
  CDR3 for beta chain variable domain of TCR clone 311044 (TRBV20-1, TRBJ1-1)
CSTRGGGNTEAFF

SEQ ID NO: 622089 - protein, 16 aa, Homo sapiens
  CDR3 for alpha chain variable domain of TCR clone 311045 (TRAV30, TRAJ24)
CGTEIVDADSWGKFQF

SEQ ID NO: 622090 - protein, 18 aa, Homo sapiens
  CDR3 for beta chain variable domain of TCR clone 311045 (TRBV5-5, TRBJ1-5)
CASSLRQVKGSSNQPQHF

SEQ ID NO: 622091 - protein, 14 aa, Homo sapiens
  CDR3 for alpha chain variable domain of TCR clone 311046 (TRAV8-1, TRAJ5)
CAVRTDTGRRALTF

SEQ ID NO: 622092 - protein, 13 aa, Homo sapiens
  CDR3 for beta chain variable domain of TCR clone 311046 (TRBV5-1, TRBJ1-2)
CASSIDRPEGYTF

SEQ ID NO: 622093 - protein, 13 aa, Homo sapiens
  CDR3 for alpha chain variable domain of TCR clone 311047 (TRAV4, TRAJ9)
CLVEGGGGFKTIF

SEQ ID NO: 622094 - protein, 16 aa, Homo sapiens
  CDR3 for beta chain variable domain of TCR clone 311047 (TRBV3-1, TRBJ2-6)
GASSLTWVSGANVLTF

SEQ ID NO: 622095 - protein, 14 aa, Homo sapiens
  CDR3 for alpha chain variable domain of TCR clone 311048 (TRAV8-4, TRAJ8)
CAVIGNTGFQKIVF

SEQ ID NO: 622096 - protein, 16 aa, Homo sapiens
  CDR3 for beta chain variable domain of TCR clone 311048 (TRBV9, TRBJ2-1)
CASSVEGDGSYNEQFF

SEQ ID NO: 622097 - protein, 14 aa, Homo sapiens
  CDR3 for alpha chain variable domain of TCR clone 311049 (TRAV26-1, TRAJ38)
CIADNAGNNRKLIW

SEQ ID NO: 622098 - protein, 15 aa, Homo sapiens
  CDR3 for beta chain variable domain of TCR clone 311049 (TRBV27, TRBJ2-1)
CVSSNGGGSSNEQFF

SEQ ID NO: 622099 - protein, 17 aa, Homo sapiens
  CDR3 for alpha chain variable domain of TCR clone 311050 (TRAV3, TRAJ12)
CAVREIGVMDSSYKLIF

SEQ ID NO: 622100 - protein, 14 aa, Homo sapiens
  CDR3 for beta chain variable domain of TCR clone 311050 (TRBV12-4, TRBJ1-1)
CASSFQSFGTEAFF

SEQ ID NO: 622101 - protein, 10 aa, Homo sapiens
  CDR3 for alpha chain variable domain of TCR clone 311051 (TRAV8-1, TRAJ21)
CAVNGTKFYF

SEQ ID NO: 622102 - protein, 14 aa, Homo sapiens
  CDR3 for beta chain variable domain of TCR clone 311051 (TRBV11-2, TRBJ2-3)
CASSRLARADTQYF

SEQ ID NO: 622103 - protein, 13 aa, Homo sapiens
  CDR3 for alpha chain variable domain of TCR clone 311052 (TRAV12-2, TRAJ50)
CAVIVTSYDKVIF

SEQ ID NO: 622104 - protein, 15 aa, Homo sapiens
  CDR3 for beta chain variable domain of TCR clone 311052 (TRBV19, TRBJ1-1)
CASTSGQIQNTEAFF

SEQ ID NO: 622105 - protein, 16 aa, Homo sapiens
  CDR3 for alpha chain variable domain of TCR clone 311053 (TRAV22, TRAJ45)
CAVERGKRGGADGVTF

SEQ ID NO: 622106 - protein, 13 aa, Homo sapiens
  CDR3 for beta chain variable domain of TCR clone 311053 (TRBV27, TRBJ1-1)
CASSLSIGAEAFF

SEQ ID NO: 622107 - protein, 15 aa, Homo sapiens
  CDR3 for alpha chain variable domain of TCR clone 311054 (TRAV25, TRAJ41)
CAGPWNSNSGYALNF

SEQ ID NO: 622108 - protein, 12 aa, Homo sapiens
  CDR3 for beta chain variable domain of TCR clone 311054 (TRBV11-2, TRBJ2-1)
CASSPGNNEQFF

SEQ ID NO: 622109 - protein, 11 aa, Homo sapiens
  CDR3 for alpha chain variable domain of TCR clone 311055 (TRAV1-2, TRAJ31)
RAVNKNARLMF

SEQ ID NO: 622110 - protein, 15 aa, Homo sapiens
  CDR3 for beta chain variable domain of TCR clone 311055 (TRBV28, TRBJ2-1)
CASSIIAGGRSEQFF

SEQ ID NO: 622111 - protein, 14 aa, Homo sapiens
  CDR3 for alpha chain variable domain of TCR clone 311056 (TRAV17, TRAJ33)
CATDARRSNYQLIW

SEQ ID NO: 622112 - protein, 14 aa, Homo sapiens
  CDR3 for beta chain variable domain of TCR clone 311056 (TRBV25-1, TRBJ1-4)
CASSGGCQPEKLFF

SEQ ID NO: 622113 - protein, 15 aa, Homo sapiens
  CDR3 for alpha chain variable domain of TCR clone 311057 (TRAV3, TRAJ30)
GAVRGEYGRDDKIIF

SEQ ID NO: 622114 - protein, 16 aa, Homo sapiens
  CDR3 for beta chain variable domain of TCR clone 311057 (TRBV5-1, TRBJ2-5)
CASSLANHRGRETQYF

SEQ ID NO: 622115 - protein, 14 aa, Homo sapiens
  CDR3 for alpha chain variable domain of TCR clone 311058 (TRAV2, TRAJ9)
CAVEDRSGGFKTIF

SEQ ID NO: 622116 - protein, 11 aa, Homo sapiens
  CDR3 for beta chain variable domain of TCR clone 311058 (TRBV12-4, TRBJ2-3)
CASTATDTQYL

SEQ ID NO: 622117 - protein, 14 aa, Homo sapiens
  CDR3 for alpha chain variable domain of TCR clone 311059 (TRAV25, TRAJ35)
SARRMEGFGNVLHC

SEQ ID NO: 622118 - protein, 13 aa, Homo sapiens
  CDR3 for beta chain variable domain of TCR clone 311059 (TRBV7-2, TRBJ1-4)
CASSLAGLEKLFF

SEQ ID NO: 622119 - protein, 15 aa, Homo sapiens
  CDR3 for alpha chain variable domain of TCR clone 311060 (TRAV23/DV6, TRAJ45)
CAASARGGGADGLTF

SEQ ID NO: 622120 - protein, 12 aa, Homo sapiens
  CDR3 for beta chain variable domain of TCR clone 311060 (TRBV5-1, TRBJ1-2)
CASSQDTYGYTF

SEQ ID NO: 622121 - protein, 14 aa, Homo sapiens
  CDR3 for alpha chain variable domain of TCR clone 311061 (TRAV35, TRAJ33)
CAGSSQDSNYQLIW

SEQ ID NO: 622122 - protein, 11 aa, Homo sapiens
  CDR3 for beta chain variable domain of TCR clone 311061 (TRBV12-4, TRBJ2-3)
CASTATDTQYF

SEQ ID NO: 622123 - protein, 14 aa, Homo sapiens
  CDR3 for alpha chain variable domain of TCR clone 311062 (TRAV1-2, TRAJ16)
CAVNRFLDGQKLLF

SEQ ID NO: 622124 - protein, 16 aa, Homo sapiens
  CDR3 for beta chain variable domain of TCR clone 311062 (TRBV19, TRBJ2-3)
CASSPEWDRGTDTQYF

SEQ ID NO: 622125 - protein, 11 aa, Homo sapiens
  CDR3 for alpha chain variable domain of TCR clone 311063 (TRAV1-1, TRAJ23)
CAVRQGGKLIF

SEQ ID NO: 622126 - protein, 15 aa, Homo sapiens
  CDR3 for beta chain variable domain of TCR clone 311063 (TRBV12-5, TRBJ2-2)
CASGRLGGNTGELFF

SEQ ID NO: 622127 - protein, 13 aa, Homo sapiens
  CDR3 for alpha chain variable domain of TCR clone 311064 (TRAV8-4, TRAJ48)
CSVSLFGNEKLNF

SEQ ID NO: 622128 - protein, 15 aa, Homo sapiens
  CDR3 for beta chain variable domain of TCR clone 311064 (TRBV20-1, TRBJ2-7)
CSARKGLAESYEQYF

SEQ ID NO: 622129 - protein, 14 aa, Homo sapiens
  CDR3 for alpha chain variable domain of TCR clone 311065 (TRAV1-2, TRAJ8)
CAVREDTGFQKLVL

SEQ ID NO: 622130 - protein, 14 aa, Homo sapiens
  CDR3 for beta chain variable domain of TCR clone 311065 (TRBV7-8, TRBJ2-3)
CASSLEAGTDTQYF

SEQ ID NO: 622131 - protein, 17 aa, Homo sapiens
  CDR3 for alpha chain variable domain of TCR clone 311066 (TRAV4, TRAJ18)
CLVGERFVGSTLGRLYF

SEQ ID NO: 622132 - protein, 16 aa, Homo sapiens
  CDR3 for beta chain variable domain of TCR clone 311066 (TRBV19, TRBJ2-1)
CASSKAGPSSYNEQFF

SEQ ID NO: 622133 - protein, 12 aa, Homo sapiens
  CDR3 for alpha chain variable domain of TCR clone 311067 (TRAV16, TRAJ10)
CSRTGGGNKFTF

SEQ ID NO: 622134 - protein, 12 aa, Homo sapiens
  CDR3 for beta chain variable domain of TCR clone 311067 (TRBV11-3, TRBJ1-1)
CASSHRQGEAFF

SEQ ID NO: 622135 - protein, 14 aa, Homo sapiens
  CDR3 for alpha chain variable domain of TCR clone 311068 (TRAV27, TRAJ17)
CRSTIRAAGNKLTF

SEQ ID NO: 622136 - protein, 15 aa, Homo sapiens
  CDR3 for beta chain variable domain of TCR clone 311068 (TRBV19, TRBJ1-6)
CASSTQGAVGSPLHF

SEQ ID NO: 622137 - protein, 14 aa, Homo sapiens
  CDR3 for alpha chain variable domain of TCR clone 311069 (TRAV13-1, TRAJ44)
CAAKATGTASKLTF

SEQ ID NO: 622138 - protein, 14 aa, Homo sapiens
  CDR3 for beta chain variable domain of TCR clone 311069 (TRBV7-2, TRBJ2-7)
CASSLPPGQGPQYF

SEQ ID NO: 622139 - protein, 16 aa, Homo sapiens
  CDR3 for alpha chain variable domain of TCR clone 311070 (TRAV9-2, TRAJ53)
CALRRNSGGRNYKLTF

SEQ ID NO: 622140 - protein, 14 aa, Homo sapiens
  CDR3 for beta chain variable domain of TCR clone 311070 (TRBV28, TRBJ2-1)
CASSLNGRNNEQFF

SEQ ID NO: 622141 - protein, 16 aa, Homo sapiens
  CDR3 for alpha chain variable domain of TCR clone 311071 (TRAV12-3, TRAJ20)
CAMDKLSFGAGATVTV

SEQ ID NO: 622142 - protein, 14 aa, Homo sapiens
  CDR3 for beta chain variable domain of TCR clone 311071 (TRBV5-4, TRBJ2-2)
CASSLTRRTGELFF

SEQ ID NO: 622143 - protein, 12 aa, Homo sapiens
  CDR3 for alpha chain variable domain of TCR clone 311072 (TRAV16, TRAJ12)
CAHRDSSYKLIF

SEQ ID NO: 622144 - protein, 12 aa, Homo sapiens
  CDR3 for beta chain variable domain of TCR clone 311072 (TRBV28, TRBJ2-1)
CASSRLVGEQFF

SEQ ID NO: 622145 - protein, 15 aa, Homo sapiens
  CDR3 for alpha chain variable domain of TCR clone 311073 (TRAV12-1, TRAJ36)
CVVNEHQPGANNLFF

SEQ ID NO: 622146 - protein, 12 aa, Homo sapiens
  CDR3 for beta chain variable domain of TCR clone 311073 (TRBV29-1, TRBJ2-3)
CSVTGGADTQYF

SEQ ID NO: 622147 - protein, 10 aa, Homo sapiens
  CDR3 for alpha chain variable domain of TCR clone 311074 (TRAV36/DV7, TRAJ38)
CAANNRKLLW

SEQ ID NO: 622148 - protein, 15 aa, Homo sapiens
  CDR3 for beta chain variable domain of TCR clone 311074 (TRBV20-1, TRBJ2-7)
CSARDRVSGMDEQYF

SEQ ID NO: 622149 - protein, 15 aa, Homo sapiens
  CDR3 for alpha chain variable domain of TCR clone 311075 (TRAV35, TRAJ58)
CAGRRQETSGSRLTF

SEQ ID NO: 622150 - protein, 14 aa, Homo sapiens
  CDR3 for beta chain variable domain of TCR clone 311075 (TRBV12-4, TRBJ1-1)
CASSLGTGGTEAFF

SEQ ID NO: 622151 - protein, 14 aa, Homo sapiens
  CDR3 for alpha chain variable domain of TCR clone 311076 (TRAV8-3, TRAJ15)
CAVGRHQAGTALIF

SEQ ID NO: 622152 - protein, 13 aa, Homo sapiens
  CDR3 for beta chain variable domain of TCR clone 311076 (TRBV9, TRBJ2-7)
CASSASDSYAQYF

SEQ ID NO: 622153 - protein, 15 aa, Homo sapiens
  CDR3 for alpha chain variable domain of TCR clone 311077 (TRAV17, TRAJ23)
CATDAEDKQGGKLIF

SEQ ID NO: 622154 - protein, 17 aa, Homo sapiens
  CDR3 for beta chain variable domain of TCR clone 311077 (TRBV13, TRBJ2-3)
CASSLSRVAGGRNTQYF

SEQ ID NO: 622155 - protein, 13 aa, Homo sapiens
  CDR3 for alpha chain variable domain of TCR clone 311078 (TRAV13-1, TRAJ9)
CAASETGGFKTIF

SEQ ID NO: 622156 - protein, 14 aa, Homo sapiens
  CDR3 for beta chain variable domain of TCR clone 311078 (TRBV19, TRBJ2-1)
CASPTFVLSGEQFF

SEQ ID NO: 622157 - protein, 14 aa, Homo sapiens
  CDR3 for alpha chain variable domain of TCR clone 311079 (TRAV13-1, TRAJ35)
CAASKGGFGNVLPV

SEQ ID NO: 622158 - protein, 13 aa, Homo sapiens
  CDR3 for beta chain variable domain of TCR clone 311079 (TRBV7-3, TRBJ1-1)
CASSQDWGAEAFF

SEQ ID NO: 622159 - protein, 13 aa, Homo sapiens
  CDR3 for alpha chain variable domain of TCR clone 311080 (TRAV13-2, TRAJ49)
CAETLHGGNKFYF

SEQ ID NO: 622160 - protein, 15 aa, Homo sapiens
  CDR3 for beta chain variable domain of TCR clone 311080 (TRBV9, TRBJ1-6)
CASSVAGTGDSPLHF

SEQ ID NO: 622161 - protein, 11 aa, Homo sapiens
  CDR3 for alpha chain variable domain of TCR clone 311081 (TRAV4, TRAJ31)
CLVGDNARLMF

SEQ ID NO: 622162 - protein, 16 aa, Homo sapiens
  CDR3 for beta chain variable domain of TCR clone 311081 (TRBV19, TRBJ1-1)
CASSPTRFWPGTEAFF

SEQ ID NO: 622163 - protein, 11 aa, Homo sapiens
  CDR3 for alpha chain variable domain of TCR clone 311082 (TRAV25, TRAJ49)
CAGGTGNQFYF

SEQ ID NO: 622164 - protein, 12 aa, Homo sapiens
  CDR3 for beta chain variable domain of TCR clone 311082 (TRBV6-5, TRBJ2-1)
CTSRNDRGQQFF

SEQ ID NO: 622165 - protein, 17 aa, Homo sapiens
  CDR3 for alpha chain variable domain of TCR clone 311083 (TRAV13-2, TRAJ42)
CAEGASHYGGSQGNLIF

SEQ ID NO: 622166 - protein, 14 aa, Homo sapiens
  CDR3 for beta chain variable domain of TCR clone 311083 (TRBV6-1, TRBJ1-3)
CASVQGGGGNTIYF

SEQ ID NO: 622167 - protein, 11 aa, Homo sapiens
  CDR3 for alpha chain variable domain of TCR clone 311084 (TRAV29/DV5, TRAJ49)
CAAFTGNQFYF

SEQ ID NO: 622168 - protein, 15 aa, Homo sapiens
  CDR3 for beta chain variable domain of TCR clone 311084 (TRBV29-1, TRBJ2-1)
CSVRTSLSSYNEQFF

SEQ ID NO: 622169 - protein, 11 aa, Homo sapiens
  CDR3 for alpha chain variable domain of TCR clone 311085 (TRAV35, TRAJ34)
CWARNTDKLIF

SEQ ID NO: 622170 - protein, 21 aa, Homo sapiens
  CDR3 for beta chain variable domain of TCR clone 311085 (TRBV27, TRBJ2-7)
EPRREGLRPSGRHKGPYEQYF

SEQ ID NO: 622171 - protein, 14 aa, Homo sapiens
  CDR3 for alpha chain variable domain of TCR clone 311086 (TRAV20, TRAJ4)
CAVRLGGGYNKLIF

SEQ ID NO: 622172 - protein, 11 aa, Homo sapiens
  CDR3 for beta chain variable domain of TCR clone 311086 (TRBV2, TRBJ1-1)
CARREGTEAFF

SEQ ID NO: 622173 - protein, 15 aa, Homo sapiens
  CDR3 for alpha chain variable domain of TCR clone 311087 (TRAV9-2, TRAJ18)
CALSGRGSTLGRLYF

SEQ ID NO: 622174 - protein, 11 aa, Homo sapiens
  CDR3 for beta chain variable domain of TCR clone 311087 (TRBV4-2, TRBJ1-2)
CASSQDRRGVA

SEQ ID NO: 622175 - protein, 14 aa, Homo sapiens
  CDR3 for alpha chain variable domain of TCR clone 311088 (TRAV12-2, TRAJ17)
CAVLFKAAGNKLTF

SEQ ID NO: 622176 - protein, 17 aa, Homo sapiens
  CDR3 for beta chain variable domain of TCR clone 311088 (TRBV5-4, TRBJ2-3)
CISVPAVLTASTDTQYF

SEQ ID NO: 622177 - protein, 13 aa, Homo sapiens
  CDR3 for alpha chain variable domain of TCR clone 311089 (TRAV12-1, TRAJ21)
CVGIGDNFNKFYF

SEQ ID NO: 622178 - protein, 14 aa, Homo sapiens
  CDR3 for beta chain variable domain of TCR clone 311089 (TRBV7-3, TRBJ2-2)
CASSLYPLTGELFF

SEQ ID NO: 622179 - protein, 15 aa, Homo sapiens
  CDR3 for alpha chain variable domain of TCR clone 311090 (TRAV3, TRAJ3)
CAVRDMISSASKIIF

SEQ ID NO: 622180 - protein, 14 aa, Homo sapiens
  CDR3 for beta chain variable domain of TCR clone 311090 (TRBV6-6, TRBJ2-7)
CASSIAGGVDEQYF

SEQ ID NO: 622181 - protein, 15 aa, Homo sapiens
  CDR3 for alpha chain variable domain of TCR clone 311091 (TRAV12-2, TRAJ53)
CAVNGGGGSNYKLTF

SEQ ID NO: 622182 - protein, 17 aa, Homo sapiens
  CDR3 for beta chain variable domain of TCR clone 311091 (TRBV7-3, TRBJ2-3)
RDSSLMKRMRGADTQYF

SEQ ID NO: 622183 - protein, 14 aa, Homo sapiens
  CDR3 for alpha chain variable domain of TCR clone 311092 (TRAV34, TRAJ44)
CGADGTGTANKLTF

SEQ ID NO: 622184 - protein, 15 aa, Homo sapiens
  CDR3 for beta chain variable domain of TCR clone 311092 (TRBV5-1, TRBJ2-1)
CASSPPRAPYNEQFF

SEQ ID NO: 622185 - protein, 12 aa, Homo sapiens
  CDR3 for alpha chain variable domain of TCR clone 311093 (TRAV16, TRAJ10)
CSRTGGGNKLTF

SEQ ID NO: 622186 - protein, 15 aa, Homo sapiens
  CDR3 for beta chain variable domain of TCR clone 311093 (TRBV19, TRBJ1-6)
CASSTQGAVGSPLHF

SEQ ID NO: 622187 - protein, 13 aa, Homo sapiens
  CDR3 for alpha chain variable domain of TCR clone 311094 (TRAV21, TRAJ3)
CCEPYSSASKIIF

SEQ ID NO: 622188 - protein, 17 aa, Homo sapiens
  CDR3 for beta chain variable domain of TCR clone 311094 (TRBV7-3, TRBJ2-2)
CASSLSGTSGGTGELFF

SEQ ID NO: 622189 - protein, 13 aa, Homo sapiens
  CDR3 for alpha chain variable domain of TCR clone 311095 (TRAV8-3, TRAJ43)
CAVVPYNNNDMRF

SEQ ID NO: 622190 - protein, 14 aa, Homo sapiens
  CDR3 for beta chain variable domain of TCR clone 311095 (TRBV15, TRBJ2-1)
CATSGVEDYNEQFF

SEQ ID NO: 622191 - protein, 13 aa, Homo sapiens
  CDR3 for alpha chain variable domain of TCR clone 311096 (TRAV12-3, TRAJ40)
CAMSDSGTYKYIF

SEQ ID NO: 622192 - protein, 15 aa, Homo sapiens
  CDR3 for beta chain variable domain of TCR clone 311096 (TRBV18, TRBJ2-3)
CASSPLAGETDTQYF

SEQ ID NO: 622193 - protein, 13 aa, Homo sapiens
  CDR3 for alpha chain variable domain of TCR clone 311097 (TRAV3, TRAJ20)
CAVRDTGAYKLSF

SEQ ID NO: 622194 - protein, 12 aa, Homo sapiens
  CDR3 for beta chain variable domain of TCR clone 311097 (TRBV29-1, TRBJ2-3)
CSVTGGADTQYF

SEQ ID NO: 622195 - protein, 12 aa, Homo sapiens
  CDR3 for alpha chain variable domain of TCR clone 311098 (TRAV13-1, TRAJ53)
AASGGSNYKLTF

SEQ ID NO: 622196 - protein, 15 aa, Homo sapiens
  CDR3 for beta chain variable domain of TCR clone 311098 (TRBV20-1, TRBJ2-7)
CSARDRVSVMDEQYF

SEQ ID NO: 622197 - protein, 13 aa, Homo sapiens
  CDR3 for alpha chain variable domain of TCR clone 311099 (TRAV8-3, TRAJ37)
CAVPSSNKGKLIF

SEQ ID NO: 622198 - protein, 12 aa, Homo sapiens
  CDR3 for beta chain variable domain of TCR clone 311099 (TRBV11-2, TRBJ2-1)
CASSPGNNEQFF

SEQ ID NO: 622199 - protein, 16 aa, Homo sapiens
  CDR3 for alpha chain variable domain of TCR clone 311100 (TRAV23/DV6, TRAJ9)
CAASIGGNTGCFKTIF

SEQ ID NO: 622200 - protein, 12 aa, Homo sapiens
  CDR3 for beta chain variable domain of TCR clone 311100 (TRBV11-2, TRBJ2-2)
CASSLGGGELFF

SEQ ID NO: 622201 - protein, 16 aa, Homo sapiens
  CDR3 for alpha chain variable domain of TCR clone 311101 (TRAV12-2, TRAJ32)
CAVNLGQGGATNKLIF

SEQ ID NO: 622202 - protein, 16 aa, Homo sapiens
  CDR3 for beta chain variable domain of TCR clone 311101 (TRBV5-5, TRBJ2-2)
CASSGRREGATGELFF

SEQ ID NO: 622203 - protein, 16 aa, Homo sapiens
  CDR3 for alpha chain variable domain of TCR clone 311102 (TRAV23/DV6, TRAJ52)
CAARPSGGTSYGKLTF

SEQ ID NO: 622204 - protein, 13 aa, Homo sapiens
  CDR3 for beta chain variable domain of TCR clone 311102 (TRBV7-9, TRBJ1-1)
CASSLTGETEAFF

SEQ ID NO: 622205 - protein, 12 aa, Homo sapiens
  CDR3 for alpha chain variable domain of TCR clone 311103 (TRAV12-2, TRAJ31)
CAVNTPDAILMF

SEQ ID NO: 622206 - protein, 12 aa, Homo sapiens
  CDR3 for beta chain variable domain of TCR clone 311103 (TRBV12-4, TRBJ2-7)
CASSLGGYEQYF

SEQ ID NO: 622207 - protein, 14 aa, Homo sapiens
  CDR3 for alpha chain variable domain of TCR clone 311104 (TRAV2, TRAJ9)
CAVEDRSGGFKTIF

SEQ ID NO: 622208 - protein, 18 aa, Homo sapiens
  CDR3 for beta chain variable domain of TCR clone 311104 (TRBV11-2, TRBJ2-3)
CASSLGGASRGATNTQYF

SEQ ID NO: 622209 - protein, 13 aa, Homo sapiens
  CDR3 for alpha chain variable domain of TCR clone 311105 (TRAV17, TRAJ9)
CATAITGGFKTIF

SEQ ID NO: 622210 - protein, 16 aa, Homo sapiens
  CDR3 for beta chain variable domain of TCR clone 311105 (TRBV15, TRBJ2-1)
CATSRNLAGGYKEQFF

SEQ ID NO: 622211 - protein, 13 aa, Homo sapiens
  CDR3 for alpha chain variable domain of TCR clone 311106 (TRAV23/DV6, TRAJ45)
CAARRGGDDGLTF

SEQ ID NO: 622212 - protein, 14 aa, Homo sapiens
  CDR3 for beta chain variable domain of TCR clone 311106 (TRBV7-2, TRBJ2-3)
CASSLARGTDTQYF

SEQ ID NO: 622213 - protein, 13 aa, Homo sapiens
  CDR3 for alpha chain variable domain of TCR clone 311107 (TRAV12-1, TRAJ37)
CVVSSGNTGKLIF

SEQ ID NO: 622214 - protein, 15 aa, Homo sapiens
  CDR3 for beta chain variable domain of TCR clone 311107 (TRBV6-3, TRBJ2-7)
CASSSPGTVFYEQYF

SEQ ID NO: 622215 - protein, 13 aa, Homo sapiens
  CDR3 for alpha chain variable domain of TCR clone 311108 (TRAV12-1, TRAJ33)
CGDAPDSNYQLIW

SEQ ID NO: 622216 - protein, 12 aa, Homo sapiens
  CDR3 for beta chain variable domain of TCR clone 311108 (TRBV6-3, TRBJ2-7)
CASSLTPYEQYF

SEQ ID NO: 622217 - protein, 15 aa, Homo sapiens
  CDR3 for alpha chain variable domain of TCR clone 311109 (TRAV2, TRAJ9)
CAVAALNTGGFKSIF

SEQ ID NO: 622218 - protein, 14 aa, Homo sapiens
  CDR3 for beta chain variable domain of TCR clone 311109 (TRBV7-8, TRBJ2-5)
CASSDTGGQETQYF

SEQ ID NO: 622219 - protein, 14 aa, Homo sapiens
  CDR3 for alpha chain variable domain of TCR clone 311110 (TRAV26-1, TRAJ38)
CIADNAGNNRKLFW

SEQ ID NO: 622220 - protein, 13 aa, Homo sapiens
  CDR3 for beta chain variable domain of TCR clone 311110 (TRBV15, TRBJ1-6)
CATSGGLNSPLHF

SEQ ID NO: 622221 - protein, 15 aa, Homo sapiens
  CDR3 for alpha chain variable domain of TCR clone 311111 (TRAV3, TRAJ22)
CAVRDRGGSARQLTF

SEQ ID NO: 622222 - protein, 15 aa, Homo sapiens
  CDR3 for beta chain variable domain of TCR clone 311111 (TRBV28, TRBJ2-3)
CASSPDRQGANTQYF

SEQ ID NO: 622223 - protein, 11 aa, Homo sapiens
  CDR3 for alpha chain variable domain of TCR clone 311112 (TRAV12-3, TRAJ43)
CAVSVSNDMRF

SEQ ID NO: 622224 - protein, 13 aa, Homo sapiens
  CDR3 for beta chain variable domain of TCR clone 311112 (TRBV20-1, TRBJ1-1)
CSAPLGGGTEAVF

SEQ ID NO: 622225 - protein, 15 aa, Homo sapiens
  CDR3 for alpha chain variable domain of TCR clone 311113 (TRAV8-3, TRAJ11)
CSVGLLNSGYSTLTF

SEQ ID NO: 622226 - protein, 15 aa, Homo sapiens
  CDR3 for beta chain variable domain of TCR clone 311113 (TRBV13, TRBJ2-1)
CASSLLSGLNNEQFF

SEQ ID NO: 622227 - protein, 17 aa, Homo sapiens
  CDR3 for alpha chain variable domain of TCR clone 311114 (TRAV17, TRAJ57)
LLLCYGPSQGGSEKLVF

SEQ ID NO: 622228 - protein, 16 aa, Homo sapiens
  CDR3 for beta chain variable domain of TCR clone 311114 (TRBV5-5, TRBJ2-2)
CASSGRREGATGELFF

SEQ ID NO: 622229 - protein, 11 aa, Homo sapiens
  CDR3 for alpha chain variable domain of TCR clone 311115 (TRAV21, TRAJ48)
CAVDGNEKLTF

SEQ ID NO: 622230 - protein, 16 aa, Homo sapiens
  CDR3 for beta chain variable domain of TCR clone 311115 (TRBV12-4, TRBJ1-5)
CASSSGPRGSNQPQYF

SEQ ID NO: 622231 - protein, 13 aa, Homo sapiens
  CDR3 for alpha chain variable domain of TCR clone 311116 (TRAV17, TRAJ7)
CATDNYGNNRLAF

SEQ ID NO: 622232 - protein, 15 aa, Homo sapiens
  CDR3 for beta chain variable domain of TCR clone 311116 (TRBV9, TRBJ2-1)
CASSLAGSSYNEQFF

SEQ ID NO: 622233 - protein, 16 aa, Homo sapiens
  CDR3 for alpha chain variable domain of TCR clone 311117 (TRAV8-3, TRAJ10)
CAVGPGGTGGGNNLTF

SEQ ID NO: 622234 - protein, 13 aa, Homo sapiens
  CDR3 for beta chain variable domain of TCR clone 311117 (TRBV18, TRBJ1-1)
CASSPGPSGEAFF

SEQ ID NO: 622235 - protein, 15 aa, Homo sapiens
  CDR3 for alpha chain variable domain of TCR clone 311118 (TRAV2, TRAJ28)
CAVPYSGAGSYQLTF

SEQ ID NO: 622236 - protein, 10 aa, Homo sapiens
  CDR3 for beta chain variable domain of TCR clone 311118 (TRBV23-1, TRBJ2-1)
KWSSYNEQFL

SEQ ID NO: 622237 - protein, 15 aa, Homo sapiens
  CDR3 for alpha chain variable domain of TCR clone 311119 (TRAV2, TRAJ9)
CAVEDRGTGGFKNVF

SEQ ID NO: 622238 - protein, 16 aa, Homo sapiens
  CDR3 for beta chain variable domain of TCR clone 311119 (TRBV24-1, TRBJ2-3)
CATSDPGTGATDTQYF

SEQ ID NO: 622239 - protein, 15 aa, Homo sapiens
  CDR3 for alpha chain variable domain of TCR clone 311120 (TRAV3, TRAJ9)
CAVRARNTGGFKTIF

SEQ ID NO: 622240 - protein, 14 aa, Homo sapiens
  CDR3 for beta chain variable domain of TCR clone 311120 (TRBV19, TRBJ2-1)
CASPTFVLSGEQFF

SEQ ID NO: 622241 - protein, 12 aa, Homo sapiens
  CDR3 for alpha chain variable domain of TCR clone 311121 (TRAV8-1, TRAJ6)
CASSGGSYIPTF

SEQ ID NO: 622242 - protein, 12 aa, Homo sapiens
  CDR3 for beta chain variable domain of TCR clone 311121 (TRBV19, TRBJ1-1)
CASMSRYTEAFF

SEQ ID NO: 622243 - protein, 13 aa, Homo sapiens
  CDR3 for alpha chain variable domain of TCR clone 311122 (TRAV13-1, TRAJ33)
CAASRAGNSQLIW

SEQ ID NO: 622244 - protein, 15 aa, Homo sapiens
  CDR3 for beta chain variable domain of TCR clone 311122 (TRBV2, TRBJ2-7)
EDSAMYFCASSEQYF

SEQ ID NO: 622245 - protein, 13 aa, Homo sapiens
  CDR3 for alpha chain variable domain of TCR clone 311123 (TRAV2, TRAJ21)
CAVEDLTFNKFYF

SEQ ID NO: 622246 - protein, 13 aa, Homo sapiens
  CDR3 for beta chain variable domain of TCR clone 311123 (TRBV7-3, TRBJ1-1)
CASSQDWGAEAFF

SEQ ID NO: 622247 - protein, 16 aa, Homo sapiens
  CDR3 for alpha chain variable domain of TCR clone 311124 (TRAV17, TRAJ22)
CATGPISSVSARQLTF

SEQ ID NO: 622248 - protein, 13 aa, Homo sapiens
  CDR3 for beta chain variable domain of TCR clone 311124 (TRBV11-2, TRBJ2-1)
CASSVGLAGGRFF

SEQ ID NO: 622249 - protein, 13 aa, Homo sapiens
  CDR3 for alpha chain variable domain of TCR clone 311125 (TRAV21, TRAJ40)
CAVRPSRAYKYIF

SEQ ID NO: 622250 - protein, 18 aa, Homo sapiens
  CDR3 for beta chain variable domain of TCR clone 311125 (TRBV18, TRBJ1-3)
CASSARGGAGPSGNTIYC

SEQ ID NO: 622251 - protein, 15 aa, Homo sapiens
  CDR3 for alpha chain variable domain of TCR clone 311126 (TRAV8-3, TRAJ27)
CAVGPSKTNAGKSTF

SEQ ID NO: 622252 - protein, 15 aa, Homo sapiens
  CDR3 for beta chain variable domain of TCR clone 311126 (TRBV7-2, TRBJ2-3)
CASSLVVRGPDTQYF

SEQ ID NO: 622253 - protein, 13 aa, Homo sapiens
  CDR3 for alpha chain variable domain of TCR clone 311127 (TRAV13-2, TRAJ48)
CAEMDFGNEKLTF

SEQ ID NO: 622254 - protein, 11 aa, Homo sapiens
  CDR3 for beta chain variable domain of TCR clone 311127 (TRBV23-1, TRBJ2-7)
SSSGTGLEQYF

SEQ ID NO: 622255 - protein, 14 aa, Homo sapiens
  CDR3 for alpha chain variable domain of TCR clone 311128 (TRAV8-1, TRAJ15)
CAVNGQQAGTALIF

SEQ ID NO: 622256 - protein, 13 aa, Homo sapiens
  CDR3 for beta chain variable domain of TCR clone 311128 (TRBV7-6, TRBJ1-2)
CASSLVADYGYTF

SEQ ID NO: 622257 - protein, 15 aa, Homo sapiens
  CDR3 for alpha chain variable domain of TCR clone 311129 (TRAV1-2, TRAJ8)
CAVRDRNTGFQKLLF

SEQ ID NO: 622258 - protein, 13 aa, Homo sapiens
  CDR3 for beta chain variable domain of TCR clone 311129 (TRBV5-7, TRBJ2-1)
CASSLVESVEQFF

SEQ ID NO: 622259 - protein, 16 aa, Homo sapiens
  CDR3 for alpha chain variable domain of TCR clone 311130 (TRAV1-2, TRAJ10)
CAVRGVLTGGGNKLTF

SEQ ID NO: 622260 - protein, 12 aa, Homo sapiens
  CDR3 for beta chain variable domain of TCR clone 311130 (TRBV11-2, TRBJ2-1)
CASSTGNNEQFF

SEQ ID NO: 622261 - protein, 14 aa, Homo sapiens
  CDR3 for alpha chain variable domain of TCR clone 311131 (TRAV20, TRAJ10)
CAVRDEGGGNKLTF

SEQ ID NO: 622262 - protein, 13 aa, Homo sapiens
  CDR3 for beta chain variable domain of TCR clone 311131 (TRBV13, TRBJ2-2)
CASSPGLTGELFF

SEQ ID NO: 622263 - protein, 16 aa, Homo sapiens
  CDR3 for alpha chain variable domain of TCR clone 311132 (TRAV12-3, TRAJ50)
CAMRDSMKTSYDKVIF

SEQ ID NO: 622264 - protein, 13 aa, Homo sapiens
  CDR3 for beta chain variable domain of TCR clone 311132 (TRBV4-1, TRBJ2-3)
CASSLDFTDTQYF

SEQ ID NO: 622265 - protein, 14 aa, Homo sapiens
  CDR3 for alpha chain variable domain of TCR clone 311133 (TRAV12-2, TRAJ15)
CAPHTGQAGTALIF

SEQ ID NO: 622266 - protein, 14 aa, Homo sapiens
  CDR3 for beta chain variable domain of TCR clone 311133 (TRBV7-3, TRBJ2-3)
CASSSTGVADTQYF

SEQ ID NO: 622267 - protein, 13 aa, Homo sapiens
  CDR3 for alpha chain variable domain of TCR clone 311134 (TRAV8-6, TRAJ21)
CAVSPSSLNKFYF

SEQ ID NO: 622268 - protein, 15 aa, Homo sapiens
  CDR3 for beta chain variable domain of TCR clone 311134 (TRBV29-1, TRBJ2-3)
CSATRTDLSTDTQYF

SEQ ID NO: 622269 - protein, 10 aa, Homo sapiens
  CDR3 for alpha chain variable domain of TCR clone 311135 (TRAV12-1, TRAJ37)
VRGNTGELIF

SEQ ID NO: 622270 - protein, 15 aa, Homo sapiens
  CDR3 for beta chain variable domain of TCR clone 311135 (TRBV7-2, TRBJ2-3)
CASSLEQGGTDTQYF

SEQ ID NO: 622271 - protein, 15 aa, Homo sapiens
  CDR3 for alpha chain variable domain of TCR clone 311136 (TRAV1-2, TRAJ28)
CAVQYSGAGSYQLTF

SEQ ID NO: 622272 - protein, 13 aa, Homo sapiens
  CDR3 for beta chain variable domain of TCR clone 311136 (TRBV7-8, TRBJ1-1)
CACSQAGNTEAFF

SEQ ID NO: 622273 - protein, 14 aa, Homo sapiens
  CDR3 for alpha chain variable domain of TCR clone 311137 (TRAV12-2, TRAJ33)
CAVKRARSNYQLIW

SEQ ID NO: 622274 - protein, 13 aa, Homo sapiens
  CDR3 for beta chain variable domain of TCR clone 311137 (TRBV7-2, TRBJ2-5)
CASSQTSVETQYF

SEQ ID NO: 622275 - protein, 13 aa, Homo sapiens
  CDR3 for alpha chain variable domain of TCR clone 311138 (TRAV17, TRAJ40)
CATVPGGTYKYIF

SEQ ID NO: 622276 - protein, 12 aa, Homo sapiens
  CDR3 for beta chain variable domain of TCR clone 311138 (TRBV2, TRBJ1-5)
CASSENRTPQHF

SEQ ID NO: 622277 - protein, 17 aa, Homo sapiens
  CDR3 for alpha chain variable domain of TCR clone 311139 (TRAV3, TRAJ6)
CAVRDVPRAGGSYIPTF

SEQ ID NO: 622278 - protein, 14 aa, Homo sapiens
  CDR3 for beta chain variable domain of TCR clone 311139 (TRBV7-2, TRBJ2-7)
CASRSQGAAYEQYF

SEQ ID NO: 622279 - protein, 15 aa, Homo sapiens
  CDR3 for alpha chain variable domain of TCR clone 311140 (TRAV23/DV6, TRAJ13)
CAAWPGGGGYQKVTF

SEQ ID NO: 622280 - protein, 15 aa, Homo sapiens
  CDR3 for beta chain variable domain of TCR clone 311140 (TRBV20-1, TRBJ2-7)
CSARDRVSGMDEQYF

SEQ ID NO: 622281 - protein, 17 aa, Homo sapiens
  CDR3 for alpha chain variable domain of TCR clone 311141 (TRAV3, TRAJ6)
CAVRDGPRAGGSYIHTF

SEQ ID NO: 622282 - protein, 13 aa, Homo sapiens
  CDR3 for beta chain variable domain of TCR clone 311141 (TRBV4-1, TRBJ2-2)
CASSQENTGELFF

SEQ ID NO: 622283 - protein, 14 aa, Homo sapiens
  CDR3 for alpha chain variable domain of TCR clone 311142 (TRAV12-1, TRAJ23)
CVVIVYNQGGKLIF

SEQ ID NO: 622284 - protein, 13 aa, Homo sapiens
  CDR3 for beta chain variable domain of TCR clone 311142 (TRBV11-2, TRBJ2-5)
CASSFGSQETQYF

SEQ ID NO: 622285 - protein, 13 aa, Homo sapiens
  CDR3 for alpha chain variable domain of TCR clone 311143 (TRAV35, TRAJ58)
CAGLETSGSRFTF

SEQ ID NO: 622286 - protein, 15 aa, Homo sapiens
  CDR3 for beta chain variable domain of TCR clone 311143 (TRBV20-1, TRBJ2-1)
CSARFSAGGLNEQFF

SEQ ID NO: 622287 - protein, 14 aa, Homo sapiens
  CDR3 for alpha chain variable domain of TCR clone 311144 (TRAV1-2, TRAJ16)
CAVNRFSDGQKLLF

SEQ ID NO: 622288 - protein, 15 aa, Homo sapiens
  CDR3 for beta chain variable domain of TCR clone 311144 (TRBV20-1, TRBJ1-5)
CSAFENGRRNQPQHF

SEQ ID NO: 622289 - protein, 11 aa, Homo sapiens
  CDR3 for alpha chain variable domain of TCR clone 311145 (TRAV12-2, TRAJ30)
CAVGRDDKIIF

SEQ ID NO: 622290 - protein, 13 aa, Homo sapiens
  CDR3 for beta chain variable domain of TCR clone 311145 (TRBV11-2, TRBJ2-5)
CASSFSSQETQYF

SEQ ID NO: 622291 - protein, 13 aa, Homo sapiens
  CDR3 for alpha chain variable domain of TCR clone 311146 (TRAV21, TRAJ45)
CAVMGGGDDGLTF

SEQ ID NO: 622292 - protein, 14 aa, Homo sapiens
  CDR3 for beta chain variable domain of TCR clone 311146 (TRBV4-3, TRBJ1-4)
CASSPLQRNEKLFF

SEQ ID NO: 622293 - protein, 14 aa, Homo sapiens
  CDR3 for alpha chain variable domain of TCR clone 311147 (TRAV8-3, TRAJ28)
CAVVPGAGSYQLTF

SEQ ID NO: 622294 - protein, 14 aa, Homo sapiens
  CDR3 for beta chain variable domain of TCR clone 311147 (TRBV11-2, TRBJ2-3)
CASSRLARTDTQYF

SEQ ID NO: 622295 - protein, 11 aa, Homo sapiens
  CDR3 for alpha chain variable domain of TCR clone 311148 (TRAV3, TRAJ17)
PRGAAGNKLTF

SEQ ID NO: 622296 - protein, 15 aa, Homo sapiens
  CDR3 for beta chain variable domain of TCR clone 311148 (TRBV11-3, TRBJ2-7)
CASSPGPASSYEQYF

SEQ ID NO: 622297 - protein, 14 aa, Homo sapiens
  CDR3 for alpha chain variable domain of TCR clone 311149 (TRAV13-1, TRAJ44)
CAAKATGTVSKLTF

SEQ ID NO: 622298 - protein, 15 aa, Homo sapiens
  CDR3 for beta chain variable domain of TCR clone 311149 (TRBV27, TRBJ2-5)
CASSLYPRGGETQYF

SEQ ID NO: 622299 - protein, 13 aa, Homo sapiens
  CDR3 for alpha chain variable domain of TCR clone 311150 (TRAV2, TRAJ40)
CAVVTSGTYKYIF

SEQ ID NO: 622300 - protein, 14 aa, Homo sapiens
  CDR3 for beta chain variable domain of TCR clone 311150 (TRBV19, TRBJ2-3)
CASSAPRGTDTQYF

SEQ ID NO: 622301 - protein, 21 aa, Homo sapiens
  CDR3 for alpha chain variable domain of TCR clone 311151 (TRAV12-1, TRAJ32)
SSVIQPPNSMNYGGATNKLIF

SEQ ID NO: 622302 - protein, 15 aa, Homo sapiens
  CDR3 for beta chain variable domain of TCR clone 311151 (TRBV7-9, TRBJ2-2)
CASGPLDTFPGELFF

SEQ ID NO: 622303 - protein, 14 aa, Homo sapiens
  CDR3 for alpha chain variable domain of TCR clone 311152 (TRAV14/DV4, TRAJ15)
CAMRRDQAGTAMIF

SEQ ID NO: 622304 - protein, 16 aa, Homo sapiens
  CDR3 for beta chain variable domain of TCR clone 311152 (TRBV15, TRBJ2-3)
CATSRDLGIVTDTQYF

SEQ ID NO: 622305 - protein, 18 aa, Homo sapiens
  CDR3 for alpha chain variable domain of TCR clone 311153 (TRAV3, TRAJ17)
CALRARRGGRSCRQQANF

SEQ ID NO: 622306 - protein, 14 aa, Homo sapiens
  CDR3 for beta chain variable domain of TCR clone 311153 (TRBV4-1, TRBJ2-2)
CASSQAVNTGELFF

SEQ ID NO: 622307 - protein, 14 aa, Homo sapiens
  CDR3 for alpha chain variable domain of TCR clone 311154 (TRAV12-2, TRAJ17)
CAALFKAAGNKLTV

SEQ ID NO: 622308 - protein, 16 aa, Homo sapiens
  CDR3 for beta chain variable domain of TCR clone 311154 (TRBV20-1, TRBJ2-2)
CSASASGIPGAGELFF

SEQ ID NO: 622309 - protein, 16 aa, Homo sapiens
  CDR3 for alpha chain variable domain of TCR clone 311155 (TRAV12-3, TRAJ53)
CAMSPGSGGSNYKLKF

SEQ ID NO: 622310 - protein, 11 aa, Homo sapiens
  CDR3 for beta chain variable domain of TCR clone 311155 (TRBV29-1, TRBJ2-5)
CSEDRTGTQYV

SEQ ID NO: 622311 - protein, 14 aa, Homo sapiens
  CDR3 for alpha chain variable domain of TCR clone 311156 (TRAV12-1, TRAJ10)
CVAILTGGGNKLTF

SEQ ID NO: 622312 - protein, 15 aa, Homo sapiens
  CDR3 for beta chain variable domain of TCR clone 311156 (TRBV20-1, TRBJ2-7)
CSARGFRPQTNEQYF

SEQ ID NO: 622313 - protein, 14 aa, Homo sapiens
  CDR3 for alpha chain variable domain of TCR clone 311157 (TRAV8-1, TRAJ31)
CAVTSWNNNARLMF

SEQ ID NO: 622314 - protein, 12 aa, Homo sapiens
  CDR3 for beta chain variable domain of TCR clone 311157 (TRBV7-3, TRBJ2-1)
CASSFINNEQFF

SEQ ID NO: 622315 - protein, 15 aa, Homo sapiens
  CDR3 for alpha chain variable domain of TCR clone 311158 (TRAV21, TRAJ37)
CAVRPTLSNTGKLIF

SEQ ID NO: 622316 - protein, 14 aa, Homo sapiens
  CDR3 for beta chain variable domain of TCR clone 311158 (TRBV7-3, TRBJ1-1)
CASSLKGGNTEAFF

SEQ ID NO: 622317 - protein, 15 aa, Homo sapiens
  CDR3 for alpha chain variable domain of TCR clone 311159 (TRAV12-3, TRAJ6)
CAMSATTGGSYIPTF

SEQ ID NO: 622318 - protein, 16 aa, Homo sapiens
  CDR3 for beta chain variable domain of TCR clone 311159 (TRBV20-1, TRBJ1-2)
CSASMGQGVANYGHIF

SEQ ID NO: 622319 - protein, 16 aa, Homo sapiens
  CDR3 for alpha chain variable domain of TCR clone 311160 (TRAV14/DV4, TRAJ12)
CAMREVLMDSSSKLIF

SEQ ID NO: 622320 - protein, 14 aa, Homo sapiens
  CDR3 for beta chain variable domain of TCR clone 311160 (TRBV7-2, TRBJ2-5)
CASSFTQGQETQYF

SEQ ID NO: 622321 - protein, 15 aa, Homo sapiens
  CDR3 for alpha chain variable domain of TCR clone 311161 (TRAV23/DV6, TRAJ4)
CAASPLRGGYNKLIF

SEQ ID NO: 622322 - protein, 15 aa, Homo sapiens
  CDR3 for beta chain variable domain of TCR clone 311161 (TRBV7-9, TRBJ1-6)
CASSSPGSGNSPLHF

SEQ ID NO: 622323 - protein, 13 aa, Homo sapiens
  CDR3 for alpha chain variable domain of TCR clone 311162 (TRAV8-1, TRAJ31)
CAVNLNNNARLMF

SEQ ID NO: 622324 - protein, 16 aa, Homo sapiens
  CDR3 for beta chain variable domain of TCR clone 311162 (TRBV24-1, TRBJ2-3)
CATSDPGTGATDTQYF

SEQ ID NO: 622325 - protein, 12 aa, Homo sapiens
  CDR3 for alpha chain variable domain of TCR clone 311163 (TRAV1-2, TRAJ29)
CAVPSGNTPPVF

SEQ ID NO: 622326 - protein, 14 aa, Homo sapiens
  CDR3 for beta chain variable domain of TCR clone 311163 (TRBV18, TRBJ2-5)
CASSPGVSQETQYF

SEQ ID NO: 622327 - protein, 16 aa, Homo sapiens
  CDR3 for alpha chain variable domain of TCR clone 311164 (TRAV30, TRAJ24)
CGTEIVDADSWGKFQC

SEQ ID NO: 622328 - protein, 17 aa, Homo sapiens
  CDR3 for beta chain variable domain of TCR clone 311164 (TRBV20-1, TRBJ2-1)
CSARDRRRASSYNEQFF

SEQ ID NO: 622329 - protein, 12 aa, Homo sapiens
  CDR3 for alpha chain variable domain of TCR clone 311165 (TRAV21, TRAJ33)
CGKMDSNYQLIW

SEQ ID NO: 622330 - protein, 14 aa, Homo sapiens
  CDR3 for beta chain variable domain of TCR clone 311165 (TRBV2, TRBJ2-7)
CANSLTSGGYEQYF

SEQ ID NO: 622331 - protein, 13 aa, Homo sapiens
  CDR3 for alpha chain variable domain of TCR clone 311166 (TRAV2, TRAJ29)
CAAGNSGNTPLVF

SEQ ID NO: 622332 - protein, 14 aa, Homo sapiens
  CDR3 for beta chain variable domain of TCR clone 311166 (TRBV7-9, TRBJ2-5)
CASSLDTAQETQYF

SEQ ID NO: 622333 - protein, 18 aa, Homo sapiens
  CDR3 for alpha chain variable domain of TCR clone 311167 (TRAV26-2, TRAJ45)
CILRLGGYSGGGADGRTF

SEQ ID NO: 622334 - protein, 17 aa, Homo sapiens
  CDR3 for beta chain variable domain of TCR clone 311167 (TRBV25-1, TRBJ2-1)
CASSAYGQGRGVYEQFF

SEQ ID NO: 622335 - protein, 18 aa, Homo sapiens
  CDR3 for alpha chain variable domain of TCR clone 311168 (TRAV21, TRAJ13)
CAVPRSFWGLPESYLWNC

SEQ ID NO: 622336 - protein, 13 aa, Homo sapiens
  CDR3 for beta chain variable domain of TCR clone 311168 (TRBV7-9, TRBJ1-2)
CASSLKQNYGYTF

SEQ ID NO: 622337 - protein, 15 aa, Homo sapiens
  CDR3 for alpha chain variable domain of TCR clone 311169 (TRAV23/DV6, TRAJ18)
CAARYIGSTLGRLYF

SEQ ID NO: 622338 - protein, 15 aa, Homo sapiens
  CDR3 for beta chain variable domain of TCR clone 311169 (TRBV20-1, TRBJ2-7)
CSARDRVSGMDEQYF

SEQ ID NO: 622339 - protein, 15 aa, Homo sapiens
  CDR3 for alpha chain variable domain of TCR clone 311170 (TRAV17, TRAJ23)
CGTDAEDNQGGKLIF

SEQ ID NO: 622340 - protein, 12 aa, Homo sapiens
  CDR3 for beta chain variable domain of TCR clone 311170 (TRBV2, TRBJ2-1)
CAKREGYNEQFF

SEQ ID NO: 622341 - protein, 12 aa, Homo sapiens
  CDR3 for alpha chain variable domain of TCR clone 311171 (TRAV4, TRAJ9)
CLVPTGGFKTIF

SEQ ID NO: 622342 - protein, 14 aa, Homo sapiens
  CDR3 for beta chain variable domain of TCR clone 311171 (TRBV25-1, TRBJ1-1)
CASTHLGGNTEAFF

SEQ ID NO: 622343 - protein, 15 aa, Homo sapiens
  CDR3 for alpha chain variable domain of TCR clone 311172 (TRAV17, TRAJ40)
CATVSSTSGTHKYLF

SEQ ID NO: 622344 - protein, 15 aa, Homo sapiens
  CDR3 for beta chain variable domain of TCR clone 311172 (TRBV5-1, TRBJ2-1)
CASSQAGYWWNEQFF

SEQ ID NO: 622345 - protein, 16 aa, Homo sapiens
  CDR3 for alpha chain variable domain of TCR clone 311173 (TRAV30, TRAJ24)
CGTEIVDADSWGKCQF

SEQ ID NO: 622346 - protein, 15 aa, Homo sapiens
  CDR3 for beta chain variable domain of TCR clone 311173 (TRBV5-1, TRBJ2-2)
CASSSQGGNTGELFF

SEQ ID NO: 622347 - protein, 15 aa, Homo sapiens
  CDR3 for alpha chain variable domain of TCR clone 311174 (TRAV40, TRAJ45)
CLLGDLGGGADGRTF

SEQ ID NO: 622348 - protein, 13 aa, Homo sapiens
  CDR3 for beta chain variable domain of TCR clone 311174 (TRBV7-9, TRBJ1-2)
CASSLKQNYGYTF

SEQ ID NO: 622349 - protein, 12 aa, Homo sapiens
  CDR3 for alpha chain variable domain of TCR clone 311175 (TRAV12-2, TRAJ10)
WGVTGGGTKLTF

SEQ ID NO: 622350 - protein, 16 aa, Homo sapiens
  CDR3 for beta chain variable domain of TCR clone 311175 (TRBV6-4, TRBJ1-2)
CASSEAVGDPNYGYSF

SEQ ID NO: 622351 - protein, 16 aa, Homo sapiens
  CDR3 for alpha chain variable domain of TCR clone 311176 (TRAV16, TRAJ57)
CAPYLITQGGSEKLVF

SEQ ID NO: 622352 - protein, 17 aa, Homo sapiens
  CDR3 for beta chain variable domain of TCR clone 311176 (TRBV4-1, TRBJ1-4)
CASSQEGPRGVEEKLFF

SEQ ID NO: 622353 - protein, 16 aa, Homo sapiens
  CDR3 for alpha chain variable domain of TCR clone 311177 (TRAV30, TRAJ24)
CGTEIVDADSWGNFKF

SEQ ID NO: 622354 - protein, 13 aa, Homo sapiens
  CDR3 for beta chain variable domain of TCR clone 311177 (TRBV20-1, TRBJ1-1)
CSAPPGGHTEAFF

SEQ ID NO: 622355 - protein, 15 aa, Homo sapiens
  CDR3 for alpha chain variable domain of TCR clone 311178 (TRAV12-1, TRAJ42)
CVVNGYGGSQGNLIF

SEQ ID NO: 622356 - protein, 14 aa, Homo sapiens
  CDR3 for beta chain variable domain of TCR clone 311178 (TRBV28, TRBJ1-1)
CASSPPGQGLGAFF

SEQ ID NO: 622357 - protein, 23 aa, Homo sapiens
  CDR3 for alpha chain variable domain of TCR clone 311179 (TRAV21, TRAJ32)
CAVEIMVVLQTSSSLELSLCLLS

SEQ ID NO: 622358 - protein, 13 aa, Homo sapiens
  CDR3 for beta chain variable domain of TCR clone 311179 (TRBV2, TRBJ1-6)
CASGRGGISPLHF

SEQ ID NO: 622359 - protein, 13 aa, Homo sapiens
  CDR3 for alpha chain variable domain of TCR clone 311180 (TRAV12-2, TRAJ15)
CAVFNQAGTALIF

SEQ ID NO: 622360 - protein, 17 aa, Homo sapiens
  CDR3 for beta chain variable domain of TCR clone 311180 (TRBV7-8, TRBJ1-5)
CASRRGGALISPRILVM

SEQ ID NO: 622361 - protein, 15 aa, Homo sapiens
  CDR3 for alpha chain variable domain of TCR clone 311181 (TRAV17, TRAJ37)
CATDHGSSNTGKLIF

SEQ ID NO: 622362 - protein, 14 aa, Homo sapiens
  CDR3 for beta chain variable domain of TCR clone 311181 (TRBV7-2, TRBJ2-3)
CASSRTSGADTLYF

SEQ ID NO: 622363 - protein, 13 aa, Homo sapiens
  CDR3 for alpha chain variable domain of TCR clone 311182 (TRAV26-2, TRAJ43)
CILRAVNNNDMRF

SEQ ID NO: 622364 - protein, 15 aa, Homo sapiens
  CDR3 for beta chain variable domain of TCR clone 311182 (TRBV5-1, TRBJ2-2)
CASSLVQLRSGELFF

SEQ ID NO: 622365 - protein, 15 aa, Homo sapiens
  CDR3 for alpha chain variable domain of TCR clone 311183 (TRAV12-3, TRAJ6)
CAMSATTGESYIPTF

SEQ ID NO: 622366 - protein, 14 aa, Homo sapiens
  CDR3 for beta chain variable domain of TCR clone 311183 (TRBV13, TRBJ2-5)
CASSLERVGETQYF

SEQ ID NO: 622367 - protein, 18 aa, Homo sapiens
  CDR3 for alpha chain variable domain of TCR clone 311184 (TRAV21, TRAJ52)
CAVRPSPAGGNSYGKLTF

SEQ ID NO: 622368 - protein, 14 aa, Homo sapiens
  CDR3 for beta chain variable domain of TCR clone 311184 (TRBV4-1, TRBJ2-5)
CASSRSGSGETQYF

SEQ ID NO: 622369 - protein, 14 aa, Homo sapiens
  CDR3 for alpha chain variable domain of TCR clone 311185 (TRAV26-1, TRAJ45)
CIEGTGGGADGLTF

SEQ ID NO: 622370 - protein, 13 aa, Homo sapiens
  CDR3 for beta chain variable domain of TCR clone 311185 (TRBV7-7, TRBJ1-2)
CASSLVADYGYTF

SEQ ID NO: 622371 - protein, 15 aa, Homo sapiens
  CDR3 for alpha chain variable domain of TCR clone 311186 (TRAV3, TRAJ22)
CAVRDRGGSAKQLTF

SEQ ID NO: 622372 - protein, 15 aa, Homo sapiens
  CDR3 for beta chain variable domain of TCR clone 311186 (TRBV11-3, TRBJ2-1)
CASSLAGQTYNEQFF

SEQ ID NO: 622373 - protein, 16 aa, Homo sapiens
  CDR3 for alpha chain variable domain of TCR clone 311187 (TRAV3, TRAJ37)
CAVRGKGSGNTGKLIF

SEQ ID NO: 622374 - protein, 14 aa, Homo sapiens
  CDR3 for beta chain variable domain of TCR clone 311187 (TRBV7-2, TRBJ2-7)
CASSLPPGQGPQYF

SEQ ID NO: 622375 - protein, 14 aa, Homo sapiens
  CDR3 for alpha chain variable domain of TCR clone 311188 (TRAV13-1, TRAJ3)
CAASKSSSASKIIF

SEQ ID NO: 622376 - protein, 15 aa, Homo sapiens
  CDR3 for beta chain variable domain of TCR clone 311188 (TRBV20-1, TRBJ2-7)
CSARDRVSGMDEQYF

SEQ ID NO: 622377 - protein, 13 aa, Homo sapiens
  CDR3 for alpha chain variable domain of TCR clone 311189 (TRAV21, TRAJ27)
CAARPGNAGKSNF

SEQ ID NO: 622378 - protein, 14 aa, Homo sapiens
  CDR3 for beta chain variable domain of TCR clone 311189 (TRBV5-1, TRBJ2-2)
CASSWTGNTGELFF

SEQ ID NO: 622379 - protein, 13 aa, Homo sapiens
  CDR3 for alpha chain variable domain of TCR clone 311190 (TRAV35, TRAJ42)
CAGFPGSQGNLIF

SEQ ID NO: 622380 - protein, 12 aa, Homo sapiens
  CDR3 for beta chain variable domain of TCR clone 311190 (TRBV20-1, TRBJ2-3)
CSARVGTDTQYF

SEQ ID NO: 622381 - protein, 16 aa, Homo sapiens
  CDR3 for alpha chain variable domain of TCR clone 311191 (TRAV12-3, TRAJ53)
CAMSPGSGGRNYKLTF

SEQ ID NO: 622382 - protein, 17 aa, Homo sapiens
  CDR3 for beta chain variable domain of TCR clone 311191 (TRBV28, TRBJ2-5)
CASSTPEGDALQETQYF

SEQ ID NO: 622383 - protein, 14 aa, Homo sapiens
  CDR3 for alpha chain variable domain of TCR clone 311192 (TRAV13-1, TRAJ15)
CAPGGNQAGTALIF

SEQ ID NO: 622384 - protein, 13 aa, Homo sapiens
  CDR3 for beta chain variable domain of TCR clone 311192 (TRBV25-1, TRBJ2-7)
CASSEDGDYEQYF

SEQ ID NO: 622385 - protein, 14 aa, Homo sapiens
  CDR3 for alpha chain variable domain of TCR clone 311193 (TRAV4, TRAJ43)
CLVGPMYNNNDMRF

SEQ ID NO: 622386 - protein, 21 aa, Homo sapiens
  CDR3 for beta chain variable domain of TCR clone 311193 (TRBV11-1, TRBJ2-1)
CASSARGRLRPGGPSYNEQFF

SEQ ID NO: 622387 - protein, 14 aa, Homo sapiens
  CDR3 for alpha chain variable domain of TCR clone 311194 (TRAV1-2, TRAJ16)
CAVNRVSDGQKLLF

SEQ ID NO: 622388 - protein, 15 aa, Homo sapiens
  CDR3 for beta chain variable domain of TCR clone 311194 (TRBV9, TRBJ2-1)
CASSLAGSSYNEQFF

SEQ ID NO: 622389 - protein, 14 aa, Homo sapiens
  CDR3 for alpha chain variable domain of TCR clone 311195 (TRAV13-1, TRAJ10)
CAAKQPGGGNKLTF

SEQ ID NO: 622390 - protein, 14 aa, Homo sapiens
  CDR3 for beta chain variable domain of TCR clone 311195 (TRBV6-6, TRBJ2-7)
CASSDSGAGYEQYF

SEQ ID NO: 622391 - protein, 11 aa, Homo sapiens
  CDR3 for alpha chain variable domain of TCR clone 311196 (TRAV13-2, TRAJ26)
CAEIPGQNFVF

SEQ ID NO: 622392 - protein, 19 aa, Homo sapiens
  CDR3 for beta chain variable domain of TCR clone 311196 (TRBV19, TRBJ2-2)
CASTRPGLARGRVTGELFF

SEQ ID NO: 622393 - protein, 13 aa, Homo sapiens
  CDR3 for alpha chain variable domain of TCR clone 311197 (TRAV12-1, TRAJ21)
CVVTLYNFNKFYF

SEQ ID NO: 622394 - protein, 20 aa, Homo sapiens
  CDR3 for beta chain variable domain of TCR clone 311197 (TRBV7-8, TRBJ2-1)
CASSLAHRLAGVRSYNEQFF

SEQ ID NO: 622395 - protein, 16 aa, Homo sapiens
  CDR3 for alpha chain variable domain of TCR clone 311198 (TRAV20, TRAJ38)
CAVQASNAGNNRKLIW

SEQ ID NO: 622396 - protein, 17 aa, Homo sapiens
  CDR3 for beta chain variable domain of TCR clone 311198 (TRBV3-1, TRBJ2-6)
CASSPNTGPTGANVLTF

SEQ ID NO: 622397 - protein, 17 aa, Homo sapiens
  CDR3 for alpha chain variable domain of TCR clone 311199 (TRAV29/DV5, TRAJ45)
CAADGPFSGGGADGLTF

SEQ ID NO: 622398 - protein, 14 aa, Homo sapiens
  CDR3 for beta chain variable domain of TCR clone 311199 (TRBV19, TRBJ2-1)
CASPTFVLSGEQFF

SEQ ID NO: 622399 - protein, 16 aa, Homo sapiens
  CDR3 for alpha chain variable domain of TCR clone 311200 (TRAV1-2, TRAJ18)
CAVRVERGSTLGRLYF

SEQ ID NO: 622400 - protein, 16 aa, Homo sapiens
  CDR3 for beta chain variable domain of TCR clone 311200 (TRBV20-1, TRBJ2-7)
CSAATSGRLSSYEQYF

SEQ ID NO: 622401 - protein, 12 aa, Homo sapiens
  CDR3 for alpha chain variable domain of TCR clone 311201 (TRAV13-1, TRAJ22)
CFPRGFCKATDL

SEQ ID NO: 622402 - protein, 14 aa, Homo sapiens
  CDR3 for beta chain variable domain of TCR clone 311201 (TRBV19, TRBJ2-1)
CASPTFVLSGEQFF

SEQ ID NO: 622403 - protein, 13 aa, Homo sapiens
  CDR3 for alpha chain variable domain of TCR clone 311202 (TRAV13-1, TRAJ5)
CAASDTGRRALTF

SEQ ID NO: 622404 - protein, 13 aa, Homo sapiens
  CDR3 for beta chain variable domain of TCR clone 311202 (TRBV20-1, TRBJ2-2)
CSASAAGTGELFF

SEQ ID NO: 622405 - protein, 13 aa, Homo sapiens
  CDR3 for alpha chain variable domain of TCR clone 311203 (TRAV2, TRAJ15)
CAVEAQAGTALIF

SEQ ID NO: 622406 - protein, 18 aa, Homo sapiens
  CDR3 for beta chain variable domain of TCR clone 311203 (TRBV11-2, TRBJ2-3)
CASSLGGASRGAPNTQYF

SEQ ID NO: 622407 - protein, 14 aa, Homo sapiens
  CDR3 for alpha chain variable domain of TCR clone 311204 (TRAV20, TRAJ10)
CAVRVERGGNKLTF

SEQ ID NO: 622408 - protein, 18 aa, Homo sapiens
  CDR3 for beta chain variable domain of TCR clone 311204 (TRBV24-1, TRBJ2-1)
CATSDLMFLGRGVHEQFF

SEQ ID NO: 622409 - protein, 16 aa, Homo sapiens
  CDR3 for alpha chain variable domain of TCR clone 311205 (TRAV8-3, TRAJ42)
CAVGEGHGGSPGNLIF

SEQ ID NO: 622410 - protein, 14 aa, Homo sapiens
  CDR3 for beta chain variable domain of TCR clone 311205 (TRBV7-2, TRBJ2-1)
CASSRGGARNEQFF

SEQ ID NO: 622411 - protein, 17 aa, Homo sapiens
  CDR3 for alpha chain variable domain of TCR clone 311206 (TRAV23/DV6, TRAJ57)
CAASSTLSQGGSAKLVF

SEQ ID NO: 622412 - protein, 15 aa, Homo sapiens
  CDR3 for beta chain variable domain of TCR clone 311206 (TRBV25-1, TRBJ1-4)
CASSPGDSTNEKLFF

SEQ ID NO: 622413 - protein, 14 aa, Homo sapiens
  CDR3 for alpha chain variable domain of TCR clone 311207 (TRAV2, TRAJ3)
CAVPPYSSASKIIF

SEQ ID NO: 622414 - protein, 14 aa, Homo sapiens
  CDR3 for beta chain variable domain of TCR clone 311207 (TRBV25-1, TRBJ1-1)
CASTRLGGNTEAFF

SEQ ID NO: 622415 - protein, 16 aa, Homo sapiens
  CDR3 for alpha chain variable domain of TCR clone 311208 (TRAV12-2, TRAJ45)
CAVIFLSGGGADGLTF

SEQ ID NO: 622416 - protein, 13 aa, Homo sapiens
  CDR3 for beta chain variable domain of TCR clone 311208 (TRBV7-3, TRBJ1-1)
CASSQDWGAEAFF

SEQ ID NO: 622417 - protein, 15 aa, Homo sapiens
  CDR3 for alpha chain variable domain of TCR clone 311209 (TRAV27, TRAJ38)
CAARRNAGNNRKLIW

SEQ ID NO: 622418 - protein, 13 aa, Homo sapiens
  CDR3 for beta chain variable domain of TCR clone 311209 (TRBV14, TRBJ1-1)
CASSREFGTEAFF

SEQ ID NO: 622419 - protein, 10 aa, Homo sapiens
  CDR3 for alpha chain variable domain of TCR clone 311210 (TRAV1-2, TRAJ23)
CAAWAGKLIV

SEQ ID NO: 622420 - protein, 14 aa, Homo sapiens
  CDR3 for beta chain variable domain of TCR clone 311210 (TRBV20-1, TRBJ2-7)
CSAKTGTGGYEQYF

SEQ ID NO: 622421 - protein, 14 aa, Homo sapiens
  CDR3 for alpha chain variable domain of TCR clone 311211 (TRAV1-2, TRAJ8)
YAVREDTGFQKLVF

SEQ ID NO: 622422 - protein, 15 aa, Homo sapiens
  CDR3 for beta chain variable domain of TCR clone 311211 (TRBV10-2, TRBJ2-6)
CASSEQGTGANVLTF

SEQ ID NO: 622423 - protein, 15 aa, Homo sapiens
  CDR3 for alpha chain variable domain of TCR clone 311212 (TRAV26-2, TRAJ50)
CILRDEETSYVKVIF

SEQ ID NO: 622424 - protein, 16 aa, Homo sapiens
  CDR3 for beta chain variable domain of TCR clone 311212 (TRBV9, TRBJ2-1)
CASSVGGGGNYNEQFF

SEQ ID NO: 622425 - protein, 15 aa, Homo sapiens
  CDR3 for alpha chain variable domain of TCR clone 311213 (TRAV12-2, TRAJ53)
CAVNGGGGSNYKLSF

SEQ ID NO: 622426 - protein, 17 aa, Homo sapiens
  CDR3 for beta chain variable domain of TCR clone 311213 (TRBV7-3, TRBJ2-3)
RASSLMKRMRGADTQYF

SEQ ID NO: 622427 - protein, 14 aa, Homo sapiens
  CDR3 for alpha chain variable domain of TCR clone 311214 (TRAV21, TRAJ35)
CAVMPIGFGNVLHC

SEQ ID NO: 622428 - protein, 13 aa, Homo sapiens
  CDR3 for beta chain variable domain of TCR clone 311214 (TRBV7-6, TRBJ1-2)
CASSLVADYGYTF

SEQ ID NO: 622429 - protein, 13 aa, Homo sapiens
  CDR3 for alpha chain variable domain of TCR clone 311215 (TRAV1-1, TRAJ31)
CTSYLNNNARLMF

SEQ ID NO: 622430 - protein, 14 aa, Homo sapiens
  CDR3 for beta chain variable domain of TCR clone 311215 (TRBV4-1, TRBJ2-5)
CASSRSGSGETQYF

SEQ ID NO: 622431 - protein, 15 aa, Homo sapiens
  CDR3 for alpha chain variable domain of TCR clone 311216 (TRAV38-2/DV8, TRAJ57)
CASARAQGGSEKLVF

SEQ ID NO: 622432 - protein, 17 aa, Homo sapiens
  CDR3 for beta chain variable domain of TCR clone 311216 (TRBV18, TRBJ1-5)
CASSPTMGQGTNQHQHF

SEQ ID NO: 622433 - protein, 16 aa, Homo sapiens
  CDR3 for alpha chain variable domain of TCR clone 311217 (TRAV2, TRAJ13)
CAARILGVTRKLPLEL

SEQ ID NO: 622434 - protein, 12 aa, Homo sapiens
  CDR3 for beta chain variable domain of TCR clone 311217 (TRBV11-2, TRBJ2-2)
CASSLGGGELFF

SEQ ID NO: 622435 - protein, 13 aa, Homo sapiens
  CDR3 for alpha chain variable domain of TCR clone 311218 (TRAV2, TRAJ40)
CAVVASGTYKYSF

SEQ ID NO: 622436 - protein, 15 aa, Homo sapiens
  CDR3 for beta chain variable domain of TCR clone 311218 (TRBV11-3, TRBJ2-3)
CASLKDGREGDTQYF

SEQ ID NO: 622437 - protein, 14 aa, Homo sapiens
  CDR3 for alpha chain variable domain of TCR clone 311219 (TRAV12-1, TRAJ17)
CVVNYKAAVNKLTF

SEQ ID NO: 622438 - protein, 16 aa, Homo sapiens
  CDR3 for beta chain variable domain of TCR clone 311219 (TRBV12-4, TRBJ1-5)
CASSRPVGGSNQPQHF

SEQ ID NO: 622439 - protein, 12 aa, Homo sapiens
  CDR3 for alpha chain variable domain of TCR clone 311220 (TRAV8-3, TRAJ40)
CAVTSGTCKYIF

SEQ ID NO: 622440 - protein, 14 aa, Homo sapiens
  CDR3 for beta chain variable domain of TCR clone 311220 (TRBV12-4, TRBJ2-3)
CASSGQGSTDTQYF

SEQ ID NO: 622441 - protein, 11 aa, Homo sapiens
  CDR3 for alpha chain variable domain of TCR clone 311221 (TRAV3, TRAJ21)
CALGNFNRFYF

SEQ ID NO: 622442 - protein, 16 aa, Homo sapiens
  CDR3 for beta chain variable domain of TCR clone 311221 (TRBV7-6, TRBJ2-1)
CASSAPGPSSYNEQFF

SEQ ID NO: 622443 - protein, 17 aa, Homo sapiens
  CDR3 for alpha chain variable domain of TCR clone 311222 (TRAV13-1, TRAJ3)
CAASKAGRGSSASKLIF

SEQ ID NO: 622444 - protein, 15 aa, Homo sapiens
  CDR3 for beta chain variable domain of TCR clone 311222 (TRBV20-1, TRBJ1-5)
CSAREGGHSNQPQHF

SEQ ID NO: 622445 - protein, 14 aa, Homo sapiens
  CDR3 for alpha chain variable domain of TCR clone 311223 (TRAV23/DV6, TRAJ17)
CAASIGAAGKKLTF

SEQ ID NO: 622446 - protein, 12 aa, Homo sapiens
  CDR3 for beta chain variable domain of TCR clone 311223 (TRBV20-1, TRBJ2-5)
CSAGGAGETQYF

SEQ ID NO: 622447 - protein, 16 aa, Homo sapiens
  CDR3 for alpha chain variable domain of TCR clone 311224 (TRAV12-3, TRAJ53)
CAMSPGSGGSNYKLTF

SEQ ID NO: 622448 - protein, 20 aa, Homo sapiens
  CDR3 for beta chain variable domain of TCR clone 311224 (TRBV7-8, TRBJ2-2)
CASSHFFPGPTIHITGELFF

SEQ ID NO: 622449 - protein, 13 aa, Homo sapiens
  CDR3 for alpha chain variable domain of TCR clone 311225 (TRAV3, TRAJ33)
CALRDRSNYPLIW

SEQ ID NO: 622450 - protein, 16 aa, Homo sapiens
  CDR3 for beta chain variable domain of TCR clone 311225 (TRBV4-2, TRBJ2-7)
CASSQDRGTSSYEQYF

SEQ ID NO: 622451 - protein, 13 aa, Homo sapiens
  CDR3 for alpha chain variable domain of TCR clone 311226 (TRAV9-2, TRAJ53)
CALSGGSNYKLTF

SEQ ID NO: 622452 - protein, 16 aa, Homo sapiens
  CDR3 for beta chain variable domain of TCR clone 311226 (TRBV20-1, TRBJ2-1)
CSAITWTSGSYNEQFF

SEQ ID NO: 622453 - protein, 13 aa, Homo sapiens
  CDR3 for alpha chain variable domain of TCR clone 311227 (TRAV30, TRAJ18)
CGTAASTLGRLYF

SEQ ID NO: 622454 - protein, 15 aa, Homo sapiens
  CDR3 for beta chain variable domain of TCR clone 311227 (TRBV7-3, TRBJ2-1)
CASSRIGTGSSEQFF

SEQ ID NO: 622455 - protein, 20 aa, Homo sapiens
  CDR3 for alpha chain variable domain of TCR clone 311228 (TRAV12-1, TRAJ42)
SSVIQPPTSVRGGSQGNLIF

SEQ ID NO: 622456 - protein, 18 aa, Homo sapiens
  CDR3 for beta chain variable domain of TCR clone 311228 (TRBV11-2, TRBJ2-3)
CASSLGGASREGPNTQYF

SEQ ID NO: 622457 - protein, 11 aa, Homo sapiens
  CDR3 for alpha chain variable domain of TCR clone 311229 (TRAV21, TRAJ34)
CAVTNTDKLIF

SEQ ID NO: 622458 - protein, 16 aa, Homo sapiens
  CDR3 for beta chain variable domain of TCR clone 311229 (TRBV7-2, TRBJ2-5)
CASSPFPTGGEETQYF

SEQ ID NO: 622459 - protein, 14 aa, Homo sapiens
  CDR3 for alpha chain variable domain of TCR clone 311230 (TRAV35, TRAJ38)
CAGSNAGNNRKLIW

SEQ ID NO: 622460 - protein, 11 aa, Homo sapiens
  CDR3 for beta chain variable domain of TCR clone 311230 (TRBV19, TRBJ2-7)
CQYHRGYEQYF

SEQ ID NO: 622461 - protein, 11 aa, Homo sapiens
  CDR3 for alpha chain variable domain of TCR clone 311231 (TRAV4, TRAJ31)
CLVGDNARLMF

SEQ ID NO: 622462 - protein, 18 aa, Homo sapiens
  CDR3 for beta chain variable domain of TCR clone 311231 (TRBV7-9, TRBJ2-7)
CASSLTTSGSRTWYEQYF

SEQ ID NO: 622463 - protein, 17 aa, Homo sapiens
  CDR3 for alpha chain variable domain of TCR clone 311232 (TRAV3, TRAJ6)
CAVRDGPRAGGSYIPTF

SEQ ID NO: 622464 - protein, 16 aa, Homo sapiens
  CDR3 for beta chain variable domain of TCR clone 311232 (TRBV28, TRBJ1-2)
CASSLYGQEANYGYTF

SEQ ID NO: 622465 - protein, 12 aa, Homo sapiens
  CDR3 for alpha chain variable domain of TCR clone 311233 (TRAV13-1, TRAJ27)
CAAHTNVGKSTF

SEQ ID NO: 622466 - protein, 14 aa, Homo sapiens
  CDR3 for beta chain variable domain of TCR clone 311233 (TRBV12-5, TRBJ2-5)
CASGSRTHQETQYF

SEQ ID NO: 622467 - protein, 14 aa, Homo sapiens
  CDR3 for alpha chain variable domain of TCR clone 311234 (TRAV3, TRAJ9)
CAVRLNTGGFKTIF

SEQ ID NO: 622468 - protein, 15 aa, Homo sapiens
  CDR3 for beta chain variable domain of TCR clone 311234 (TRBV20-1, TRBJ1-5)
CSAREGGHSNQPQHF

SEQ ID NO: 622469 - protein, 15 aa, Homo sapiens
  CDR3 for alpha chain variable domain of TCR clone 311235 (TRAV38-2/DV8, TRAJ45)
CAYWDSGGGADGVTF

SEQ ID NO: 622470 - protein, 14 aa, Homo sapiens
  CDR3 for beta chain variable domain of TCR clone 311235 (TRBV7-2, TRBJ2-7)
CASRSQGAAYEQYF

SEQ ID NO: 622471 - protein, 11 aa, Homo sapiens
  CDR3 for alpha chain variable domain of TCR clone 311236 (TRAV2, TRAJ13)
CASGGYQKVTF

SEQ ID NO: 622472 - protein, 17 aa, Homo sapiens
  CDR3 for beta chain variable domain of TCR clone 311236 (TRBV5-8, TRBJ2-3)
CASSLLTSGASTDTQCF

SEQ ID NO: 622473 - protein, 14 aa, Homo sapiens
  CDR3 for alpha chain variable domain of TCR clone 311237 (TRAV8-3, TRAJ4)
CAVGAAGGYNKPIF

SEQ ID NO: 622474 - protein, 15 aa, Homo sapiens
  CDR3 for beta chain variable domain of TCR clone 311237 (TRBV6-5, TRBJ2-1)
CASSYDAGAGNEQFF

SEQ ID NO: 622475 - protein, 15 aa, Homo sapiens
  CDR3 for alpha chain variable domain of TCR clone 311238 (TRAV21, TRAJ13)
CAVPRSFWCYQKVTF

SEQ ID NO: 622476 - protein, 15 aa, Homo sapiens
  CDR3 for beta chain variable domain of TCR clone 311238 (TRBV7-9, TRBJ1-6)
CASSSPGRGNSPLHF

SEQ ID NO: 622477 - protein, 13 aa, Homo sapiens
  CDR3 for alpha chain variable domain of TCR clone 311239 (TRAV21, TRAJ27)
CAARPGNAGKSPF

SEQ ID NO: 622478 - protein, 11 aa, Homo sapiens
  CDR3 for beta chain variable domain of TCR clone 311239 (TRBV11-2, TRBJ2-2)
CASSLPGELFF

SEQ ID NO: 622479 - protein, 14 aa, Homo sapiens
  CDR3 for alpha chain variable domain of TCR clone 311240 (TRAV1-2, TRAJ16)
CAVNRFSDGQKLHF

SEQ ID NO: 622480 - protein, 13 aa, Homo sapiens
  CDR3 for beta chain variable domain of TCR clone 311240 (TRBV12-4, TRBJ2-5)
CASSLGGSRTQYF

SEQ ID NO: 622481 - protein, 15 aa, Homo sapiens
  CDR3 for alpha chain variable domain of TCR clone 311241 (TRAV26-1, TRAJ22)
CIVRVSFWVCKATDL

SEQ ID NO: 622482 - protein, 14 aa, Homo sapiens
  CDR3 for beta chain variable domain of TCR clone 311241 (TRBV18, TRBJ2-7)
CASSPRGGAYEQYF

SEQ ID NO: 622483 - protein, 15 aa, Homo sapiens
  CDR3 for alpha chain variable domain of TCR clone 311242 (TRAV8-3, TRAJ20)
CAVEAKGPNDYKLSF

SEQ ID NO: 622484 - protein, 15 aa, Homo sapiens
  CDR3 for beta chain variable domain of TCR clone 311242 (TRBV7-9, TRBJ1-2)
CASSLDREPNYGYTF

SEQ ID NO: 622485 - protein, 15 aa, Homo sapiens
  CDR3 for alpha chain variable domain of TCR clone 311243 (TRAV3, TRAJ3)
CAVRDRDSSASKIIF

SEQ ID NO: 622486 - protein, 16 aa, Homo sapiens
  CDR3 for beta chain variable domain of TCR clone 311243 (TRBV12-4, TRBJ1-5)
CASSRPVGGPNQPQHF

SEQ ID NO: 622487 - protein, 11 aa, Homo sapiens
  CDR3 for alpha chain variable domain of TCR clone 311244 (TRAV17, TRAJ9)
CATTGGFKTIF

SEQ ID NO: 622488 - protein, 10 aa, Homo sapiens
  CDR3 for beta chain variable domain of TCR clone 311244 (TRBV7-9, TRBJ2-2)
ADSDTGELFF

SEQ ID NO: 622489 - protein, 14 aa, Homo sapiens
  CDR3 for alpha chain variable domain of TCR clone 311245 (TRAV12-2, TRAJ13)
CAVAGSGGYQKVTF

SEQ ID NO: 622490 - protein, 14 aa, Homo sapiens
  CDR3 for beta chain variable domain of TCR clone 311245 (TRBV6-5, TRBJ2-7)
CACSYGVGEAEQYF

SEQ ID NO: 622491 - protein, 10 aa, Homo sapiens
  CDR3 for alpha chain variable domain of TCR clone 311246 (TRAV36/DV7, TRAJ31)
CAVGEARLMF

SEQ ID NO: 622492 - protein, 15 aa, Homo sapiens
  CDR3 for beta chain variable domain of TCR clone 311246 (TRBV7-2, TRBJ2-1)
CASSSGLAGGNEQFF

SEQ ID NO: 622493 - protein, 13 aa, Homo sapiens
  CDR3 for alpha chain variable domain of TCR clone 311247 (TRAV8-4, TRAJ30)
CAVSVNRDDKIIF

SEQ ID NO: 622494 - protein, 13 aa, Homo sapiens
  CDR3 for beta chain variable domain of TCR clone 311247 (TRBV10-3, TRBJ2-7)
CASKLAVNYEQYF

SEQ ID NO: 622495 - protein, 13 aa, Homo sapiens
  CDR3 for alpha chain variable domain of TCR clone 311248 (TRAV12-3, TRAJ39)
SAMIDNAGNMLTF

SEQ ID NO: 622496 - protein, 18 aa, Homo sapiens
  CDR3 for beta chain variable domain of TCR clone 311248 (TRBV9, TRBJ2-5)
CASSVAEGTNAFGETQYF

SEQ ID NO: 622497 - protein, 15 aa, Homo sapiens
  CDR3 for alpha chain variable domain of TCR clone 311249 (TRAV2, TRAJ9)
CAVEDRGTGGFKTIF

SEQ ID NO: 622498 - protein, 13 aa, Homo sapiens
  CDR3 for beta chain variable domain of TCR clone 311249 (TRBV7-6, TRBJ2-3)
CQQRSGGTDTQYF

SEQ ID NO: 622499 - protein, 14 aa, Homo sapiens
  CDR3 for alpha chain variable domain of TCR clone 311250 (TRAV12-1, TRAJ44)
CGGHSSGTASKLTF

SEQ ID NO: 622500 - protein, 13 aa, Homo sapiens
  CDR3 for beta chain variable domain of TCR clone 311250 (TRBV27, TRBJ2-1)
CASSSGSYNEQFF

SEQ ID NO: 622501 - protein, 14 aa, Homo sapiens
  CDR3 for alpha chain variable domain of TCR clone 311251 (TRAV3, TRAJ26)
RAVRDYNYGQNFVF

SEQ ID NO: 622502 - protein, 15 aa, Homo sapiens
  CDR3 for beta chain variable domain of TCR clone 311251 (TRBV20-1, TRBJ2-5)
CSANPPGRGGETQYF

SEQ ID NO: 622503 - protein, 12 aa, Homo sapiens
  CDR3 for alpha chain variable domain of TCR clone 311252 (TRAV2, TRAJ26)
CAGSPGRLWSEF

SEQ ID NO: 622504 - protein, 16 aa, Homo sapiens
  CDR3 for beta chain variable domain of TCR clone 311252 (TRBV27, TRBJ2-2)
CASSFRGLVRTGELFF

SEQ ID NO: 622505 - protein, 12 aa, Homo sapiens
  CDR3 for alpha chain variable domain of TCR clone 311253 (TRAV25, TRAJ38)
CAGTGNNRKLSW

SEQ ID NO: 622506 - protein, 14 aa, Homo sapiens
  CDR3 for beta chain variable domain of TCR clone 311253 (TRBV5-4, TRBJ1-1)
CASSLDSRRDEAFF

SEQ ID NO: 622507 - protein, 14 aa, Homo sapiens
  CDR3 for alpha chain variable domain of TCR clone 311254 (TRAV8-2, TRAJ4)
CVVSPSSGYNKLIF

SEQ ID NO: 622508 - protein, 15 aa, Homo sapiens
  CDR3 for beta chain variable domain of TCR clone 311254 (TRBV4-1, TRBJ1-4)
CASSNTGGTNEKLFF

SEQ ID NO: 622509 - protein, 14 aa, Homo sapiens
  CDR3 for alpha chain variable domain of TCR clone 311255 (TRAV13-1, TRAJ44)
CAAKATGTASKLTF

SEQ ID NO: 622510 - protein, 16 aa, Homo sapiens
  CDR3 for beta chain variable domain of TCR clone 311255 (TRBV6-3, TRBJ2-1)
CASSYRRGDSYNEQFF

SEQ ID NO: 622511 - protein, 15 aa, Homo sapiens
  CDR3 for alpha chain variable domain of TCR clone 311256 (TRAV26-1, TRAJ24)
CIVREDTDSWGKLQF

SEQ ID NO: 622512 - protein, 16 aa, Homo sapiens
  CDR3 for beta chain variable domain of TCR clone 311256 (TRBV7-9, TRBJ1-2)
CASSLGFSSGEDGYTF

SEQ ID NO: 622513 - protein, 16 aa, Homo sapiens
  CDR3 for alpha chain variable domain of TCR clone 311257 (TRAV30, TRAJ24)
CGTEIVDAYSWGKFQF

SEQ ID NO: 622514 - protein, 13 aa, Homo sapiens
  CDR3 for beta chain variable domain of TCR clone 311257 (TRBV11-2, TRBJ2-5)
CASSSTGEETQYV

SEQ ID NO: 622515 - protein, 10 aa, Homo sapiens
  CDR3 for alpha chain variable domain of TCR clone 311258 (TRAV8-4, TRAJ43)
CAVSADDMRF

SEQ ID NO: 622516 - protein, 15 aa, Homo sapiens
  CDR3 for beta chain variable domain of TCR clone 311258 (TRBV4-1, TRBJ1-1)
CASSYSGTGGTEAFF

SEQ ID NO: 622517 - protein, 11 aa, Homo sapiens
  CDR3 for alpha chain variable domain of TCR clone 311259 (TRAV2, TRAJ13)
CASGGYQEVTF

SEQ ID NO: 622518 - protein, 11 aa, Homo sapiens
  CDR3 for beta chain variable domain of TCR clone 311259 (TRBV5-6, TRBJ2-5)
CASSLERTQYF

SEQ ID NO: 622519 - protein, 15 aa, Homo sapiens
  CDR3 for alpha chain variable domain of TCR clone 311260 (TRAV1-2, TRAJ15)
CAVDVMGSAGTALIF

SEQ ID NO: 622520 - protein, 14 aa, Homo sapiens
  CDR3 for beta chain variable domain of TCR clone 311260 (TRBV7-6, TRBJ2-3)
CASSLGTVTDTQYF

SEQ ID NO: 622521 - protein, 14 aa, Homo sapiens
  CDR3 for alpha chain variable domain of TCR clone 311261 (TRAV17, TRAJ16)
CATADFSDGQKLLF

SEQ ID NO: 622522 - protein, 12 aa, Homo sapiens
  CDR3 for beta chain variable domain of TCR clone 311261 (TRBV24-1, TRBJ1-1)
CATRYPDTEAFF

SEQ ID NO: 622523 - protein, 12 aa, Homo sapiens
  CDR3 for alpha chain variable domain of TCR clone 311262 (TRAV16, TRAJ56)
CAPTGANSKLTF

SEQ ID NO: 622524 - protein, 17 aa, Homo sapiens
  CDR3 for beta chain variable domain of TCR clone 311262 (TRBV28, TRBJ2-3)
CASSPTPAGGRVDTQYF

SEQ ID NO: 622525 - protein, 17 aa, Homo sapiens
  CDR3 for alpha chain variable domain of TCR clone 311263 (TRAV13-1, TRAJ52)
CAAGRNAGGTSYGKLTF

SEQ ID NO: 622526 - protein, 14 aa, Homo sapiens
  CDR3 for beta chain variable domain of TCR clone 311263 (TRBV23-1, TRBJ2-5)
CASSFLRSQETQYF

SEQ ID NO: 622527 - protein, 13 aa, Homo sapiens
  CDR3 for alpha chain variable domain of TCR clone 311264 (TRAV35, TRAJ44)
CAGLSGTASKLTF

SEQ ID NO: 622528 - protein, 17 aa, Homo sapiens
  CDR3 for beta chain variable domain of TCR clone 311264 (TRBV7-8, TRBJ1-2)
CASSLRPLQGHLYGYTC

SEQ ID NO: 622529 - protein, 14 aa, Homo sapiens
  CDR3 for alpha chain variable domain of TCR clone 311265 (TRAV12-1, TRAJ17)
CVVNYKAAGNKLPF

SEQ ID NO: 622530 - protein, 15 aa, Homo sapiens
  CDR3 for beta chain variable domain of TCR clone 311265 (TRBV7-2, TRBJ2-1)
CASTHGTGIYNEQFF

SEQ ID NO: 622531 - protein, 18 aa, Homo sapiens
  CDR3 for alpha chain variable domain of TCR clone 311266 (TRAV13-2, TRAJ52)
CAAKNPNAGGTSYGKLTF

SEQ ID NO: 622532 - protein, 14 aa, Homo sapiens
  CDR3 for beta chain variable domain of TCR clone 311266 (TRBV4-1, TRBJ2-2)
CASSQAVNTGELFF

SEQ ID NO: 622533 - protein, 14 aa, Homo sapiens
  CDR3 for alpha chain variable domain of TCR clone 311267 (TRAV8-6, TRAJ54)
CAVSDFQGAQKLVF

SEQ ID NO: 622534 - protein, 14 aa, Homo sapiens
  CDR3 for beta chain variable domain of TCR clone 311267 (TRBV5-1, TRBJ2-7)
CASSLWGAQDEQYF

SEQ ID NO: 622535 - protein, 16 aa, Homo sapiens
  CDR3 for alpha chain variable domain of TCR clone 311268 (TRAV13-2, TRAJ28)
FSEKSYSGAGSYQLTF

SEQ ID NO: 622536 - protein, 16 aa, Homo sapiens
  CDR3 for beta chain variable domain of TCR clone 311268 (TRBV19, TRBJ2-1)
CASSKAGPSSYNEQFF

SEQ ID NO: 622537 - protein, 12 aa, Homo sapiens
  CDR3 for alpha chain variable domain of TCR clone 311269 (TRAV26-2, TRAJ21)
CILKGNFNKYYF

SEQ ID NO: 622538 - protein, 14 aa, Homo sapiens
  CDR3 for beta chain variable domain of TCR clone 311269 (TRBV12-4, TRBJ1-1)
CASSLGTGGTEAFF

SEQ ID NO: 622539 - protein, 17 aa, Homo sapiens
  CDR3 for alpha chain variable domain of TCR clone 311270 (TRAV23/DV6, TRAJ58)
CSARLLRGATSGSRLTF

SEQ ID NO: 622540 - protein, 15 aa, Homo sapiens
  CDR3 for beta chain variable domain of TCR clone 311270 (TRBV9, TRBJ1-6)
CASSVAGTGDSPLHF

SEQ ID NO: 622541 - protein, 14 aa, Homo sapiens
  CDR3 for alpha chain variable domain of TCR clone 311271 (TRAV8-1, TRAJ39)
CAVNASNAGNMLTF

SEQ ID NO: 622542 - protein, 13 aa, Homo sapiens
  CDR3 for beta chain variable domain of TCR clone 311271 (TRBV12-4, TRBJ2-5)
CASSPGTEEAQYF

SEQ ID NO: 622543 - protein, 18 aa, Homo sapiens
  CDR3 for alpha chain variable domain of TCR clone 311272 (TRAV29/DV5, TRAJ52)
CAAGFRGAGGTRYVKLTF

SEQ ID NO: 622544 - protein, 16 aa, Homo sapiens
  CDR3 for beta chain variable domain of TCR clone 311272 (TRBV7-3, TRBJ2-2)
CASSLKRGTLSGELFF

SEQ ID NO: 622545 - protein, 12 aa, Homo sapiens
  CDR3 for alpha chain variable domain of TCR clone 311273 (TRAV21, TRAJ33)
CAKMDSNYQLIW

SEQ ID NO: 622546 - protein, 15 aa, Homo sapiens
  CDR3 for beta chain variable domain of TCR clone 311273 (TRBV20-1, TRBJ2-7)
CSARDRVSGMDEQYL

SEQ ID NO: 622547 - protein, 11 aa, Homo sapiens
  CDR3 for alpha chain variable domain of TCR clone 311274 (TRAV12-3, TRAJ27)
CAMANAGNSTF

SEQ ID NO: 622548 - protein, 13 aa, Homo sapiens
  CDR3 for beta chain variable domain of TCR clone 311274 (TRBV20-1, TRBJ1-1)
CSARVGGDTEAFF

SEQ ID NO: 622549 - protein, 14 aa, Homo sapiens
  CDR3 for alpha chain variable domain of TCR clone 311275 (TRAV25, TRAJ44)
CAVFPTGTASKLTF

SEQ ID NO: 622550 - protein, 14 aa, Homo sapiens
  CDR3 for beta chain variable domain of TCR clone 311275 (TRBV19, TRBJ1-1)
CASTGYRLNTEAFF

SEQ ID NO: 622551 - protein, 13 aa, Homo sapiens
  CDR3 for alpha chain variable domain of TCR clone 311276 (TRAV27, TRAJ45)
CRSSGGGGDGLTF

SEQ ID NO: 622552 - protein, 15 aa, Homo sapiens
  CDR3 for beta chain variable domain of TCR clone 311276 (TRBV20-1, TRBJ2-7)
CSARDRVSGMDEQYF

SEQ ID NO: 622553 - protein, 17 aa, Homo sapiens
  CDR3 for alpha chain variable domain of TCR clone 311277 (TRAV3, TRAJ6)
CAARDGPRAGGSYIPTF

SEQ ID NO: 622554 - protein, 14 aa, Homo sapiens
  CDR3 for beta chain variable domain of TCR clone 311277 (TRBV7-2, TRBJ2-7)
CASSPKTSFYEEYF

SEQ ID NO: 622555 - protein, 18 aa, Homo sapiens
  CDR3 for alpha chain variable domain of TCR clone 311278 (TRAV13-1, TRAJ52)
CAAKNPNAGGTSYGKLTF

SEQ ID NO: 622556 - protein, 18 aa, Homo sapiens
  CDR3 for beta chain variable domain of TCR clone 311278 (TRBV12-4, TRBJ2-4)
CASSRTGAVDVAKNIKYF

SEQ ID NO: 622557 - protein, 19 aa, Homo sapiens
  CDR3 for alpha chain variable domain of TCR clone 311279 (TRAV38-1, TRAJ53)
CALMKHGLESGGSNYKLTV

SEQ ID NO: 622558 - protein, 13 aa, Homo sapiens
  CDR3 for beta chain variable domain of TCR clone 311279 (TRBV19, TRBJ2-7)
CASSPRQSYEQYF

SEQ ID NO: 622559 - protein, 14 aa, Homo sapiens
  CDR3 for alpha chain variable domain of TCR clone 311280 (TRAV1-2, TRAJ16)
CAVNRFSDGQKLLF

SEQ ID NO: 622560 - protein, 12 aa, Homo sapiens
  CDR3 for beta chain variable domain of TCR clone 311280 (TRBV5-1, TRBJ2-5)
CASSLDQETQYF

SEQ ID NO: 622561 - protein, 18 aa, Homo sapiens
  CDR3 for alpha chain variable domain of TCR clone 311281 (TRAV26-1, TRAJ27)
CIVRPSFNITPMQANQPL

SEQ ID NO: 622562 - protein, 14 aa, Homo sapiens
  CDR3 for beta chain variable domain of TCR clone 311281 (TRBV10-3, TRBJ1-6)
CAISVDGDESPLHF

SEQ ID NO: 622563 - protein, 16 aa, Homo sapiens
  CDR3 for alpha chain variable domain of TCR clone 311282 (TRAV26-1, TRAJ38)
CIVRVELGGNNRKLIW

SEQ ID NO: 622564 - protein, 14 aa, Homo sapiens
  CDR3 for beta chain variable domain of TCR clone 311282 (TRBV18, TRBJ2-5)
CASSPGVSQETQYF

SEQ ID NO: 622565 - protein, 17 aa, Homo sapiens
  CDR3 for alpha chain variable domain of TCR clone 311283 (TRAV23/DV6, TRAJ57)
CSASSTLSQGGSEKLVF

SEQ ID NO: 622566 - protein, 14 aa, Homo sapiens
  CDR3 for beta chain variable domain of TCR clone 311283 (TRBV20-1, TRBJ2-7)
CSAKRGRSSYEQYF

SEQ ID NO: 622567 - protein, 13 aa, Homo sapiens
  CDR3 for alpha chain variable domain of TCR clone 311284 (TRAV21, TRAJ27)
CAARPDNAGKSTF

SEQ ID NO: 622568 - protein, 14 aa, Homo sapiens
  CDR3 for beta chain variable domain of TCR clone 311284 (TRBV7-6, TRBJ2-3)
CASSSGTVTDTQYF

SEQ ID NO: 622569 - protein, 16 aa, Homo sapiens
  CDR3 for alpha chain variable domain of TCR clone 311285 (TRAV16, TRAJ4)
YARSRMFSGGYNKLIF

SEQ ID NO: 622570 - protein, 16 aa, Homo sapiens
  CDR3 for beta chain variable domain of TCR clone 311285 (TRBV24-1, TRBJ2-3)
CATSDPGTGATDTQYF

SEQ ID NO: 622571 - protein, 14 aa, Homo sapiens
  CDR3 for alpha chain variable domain of TCR clone 311286 (TRAV27, TRAJ22)
CAGLPSGSARQLTF

SEQ ID NO: 622572 - protein, 13 aa, Homo sapiens
  CDR3 for beta chain variable domain of TCR clone 311286 (TRBV6-1, TRBJ2-1)
CASCSLSGNEQFF

SEQ ID NO: 622573 - protein, 14 aa, Homo sapiens
  CDR3 for alpha chain variable domain of TCR clone 311287 (TRAV12-2, TRAJ13)
CAVKKTGGYQKVTF

SEQ ID NO: 622574 - protein, 14 aa, Homo sapiens
  CDR3 for beta chain variable domain of TCR clone 311287 (TRBV5-1, TRBJ1-1)
CASSLTRRSTEAFF

SEQ ID NO: 622575 - protein, 14 aa, Homo sapiens
  CDR3 for alpha chain variable domain of TCR clone 311288 (TRAV9-2, TRAJ39)
CALYIYNAGNMLTF

SEQ ID NO: 622576 - protein, 16 aa, Homo sapiens
  CDR3 for beta chain variable domain of TCR clone 311288 (TRBV19, TRBJ2-2)
CASRSPGIGATGELFF

SEQ ID NO: 622577 - protein, 15 aa, Homo sapiens
  CDR3 for alpha chain variable domain of TCR clone 311289 (TRAV12-3, TRAJ6)
CAMSATSGGSYIPTF

SEQ ID NO: 622578 - protein, 11 aa, Homo sapiens
  CDR3 for beta chain variable domain of TCR clone 311289 (TRBV20-1, TRBJ1-5)
FSAQGDQPQHF

SEQ ID NO: 622579 - protein, 14 aa, Homo sapiens
  CDR3 for alpha chain variable domain of TCR clone 311290 (TRAV26-1, TRAJ34)
CLVRVAYNTDKPIF

SEQ ID NO: 622580 - protein, 15 aa, Homo sapiens
  CDR3 for beta chain variable domain of TCR clone 311290 (TRBV20-1, TRBJ2-7)
CSARVPAAYFYEQYF

SEQ ID NO: 622581 - protein, 14 aa, Homo sapiens
  CDR3 for alpha chain variable domain of TCR clone 311291 (TRAV26-1, TRAJ6)
CIGSPVGGSYIPTF

SEQ ID NO: 622582 - protein, 16 aa, Homo sapiens
  CDR3 for beta chain variable domain of TCR clone 311291 (TRBV4-1, TRBJ2-5)
CASSSGLAGVLGTQYF

SEQ ID NO: 622583 - protein, 13 aa, Homo sapiens
  CDR3 for alpha chain variable domain of TCR clone 311292 (TRAV16, TRAJ48)
CSPLNFGNEKLTF

SEQ ID NO: 622584 - protein, 11 aa, Homo sapiens
  CDR3 for beta chain variable domain of TCR clone 311292 (TRBV7-9, TRBJ2-3)
GASSPTDTQYF

SEQ ID NO: 622585 - protein, 14 aa, Homo sapiens
  CDR3 for alpha chain variable domain of TCR clone 311293 (TRAV26-1, TRAJ39)
CIVRGSRAGNMLTF

SEQ ID NO: 622586 - protein, 14 aa, Homo sapiens
  CDR3 for beta chain variable domain of TCR clone 311293 (TRBV12-4, TRBJ2-7)
CASSASGVDSEQYF

SEQ ID NO: 622587 - protein, 14 aa, Homo sapiens
  CDR3 for alpha chain variable domain of TCR clone 311294 (TRAV17, TRAJ45)
CAAASGGGSDGLTF

SEQ ID NO: 622588 - protein, 15 aa, Homo sapiens
  CDR3 for beta chain variable domain of TCR clone 311294 (TRBV11-2, TRBJ2-1)
CASSRNRGLMYEQFF

SEQ ID NO: 622589 - protein, 13 aa, Homo sapiens
  CDR3 for alpha chain variable domain of TCR clone 311295 (TRAV36/DV7, TRAJ53)
CALSGGSNFKLTF

SEQ ID NO: 622590 - protein, 13 aa, Homo sapiens
  CDR3 for beta chain variable domain of TCR clone 311295 (TRBV28, TRBJ2-7)
CASSLPSRYEQYF

SEQ ID NO: 622591 - protein, 16 aa, Homo sapiens
  CDR3 for alpha chain variable domain of TCR clone 311296 (TRAV3, TRAJ17)
FALYSPRGAAGNKLTF

SEQ ID NO: 622592 - protein, 12 aa, Homo sapiens
  CDR3 for beta chain variable domain of TCR clone 311296 (TRBV11-2, TRBJ2-2)
CASSLGGGELFF

SEQ ID NO: 622593 - protein, 15 aa, Homo sapiens
  CDR3 for alpha chain variable domain of TCR clone 311297 (TRAV21, TRAJ57)
CAVIITQGGSEKLVF

SEQ ID NO: 622594 - protein, 15 aa, Homo sapiens
  CDR3 for beta chain variable domain of TCR clone 311297 (TRBV6-1, TRBJ2-3)
CASSERGGITDTQYF

SEQ ID NO: 622595 - protein, 15 aa, Homo sapiens
  CDR3 for alpha chain variable domain of TCR clone 311298 (TRAV29/DV5, TRAJ53)
CAARYRGGSNYRLTF

SEQ ID NO: 622596 - protein, 15 aa, Homo sapiens
  CDR3 for beta chain variable domain of TCR clone 311298 (TRBV28, TRBJ2-1)
CASSLGTRLYNEQFF

SEQ ID NO: 622597 - protein, 13 aa, Homo sapiens
  CDR3 for alpha chain variable domain of TCR clone 311299 (TRAV8-3, TRAJ23)
CAGIYNQGGKLIF

SEQ ID NO: 622598 - protein, 13 aa, Homo sapiens
  CDR3 for beta chain variable domain of TCR clone 311299 (TRBV7-9, TRBJ1-2)
CASSLKQNYGYTF

SEQ ID NO: 622599 - protein, 15 aa, Homo sapiens
  CDR3 for alpha chain variable domain of TCR clone 311300 (TRAV12-2, TRAJ53)
CAVNGGGGSNYKLTF

SEQ ID NO: 622600 - protein, 17 aa, Homo sapiens
  CDR3 for beta chain variable domain of TCR clone 311300 (TRBV7-3, TRBJ2-3)
CASSLMKRTRGADTQYF

SEQ ID NO: 622601 - protein, 13 aa, Homo sapiens
  CDR3 for alpha chain variable domain of TCR clone 311301 (TRAV27, TRAJ45)
CRSSGGGADGLTF

SEQ ID NO: 622602 - protein, 15 aa, Homo sapiens
  CDR3 for beta chain variable domain of TCR clone 311301 (TRBV9, TRBJ2-2)
CASSDFAGASGELCF

SEQ ID NO: 622603 - protein, 13 aa, Homo sapiens
  CDR3 for alpha chain variable domain of TCR clone 311302 (TRAV12-2, TRAJ49)
CAVKPNTGNQFYF

SEQ ID NO: 622604 - protein, 15 aa, Homo sapiens
  CDR3 for beta chain variable domain of TCR clone 311302 (TRBV12-4, TRBJ1-6)
CASSLGGQGTSPLHF

SEQ ID NO: 622605 - protein, 14 aa, Homo sapiens
  CDR3 for alpha chain variable domain of TCR clone 311303 (TRAV12-3, TRAJ10)
RPLPLTGGGNQLTF

SEQ ID NO: 622606 - protein, 14 aa, Homo sapiens
  CDR3 for beta chain variable domain of TCR clone 311303 (TRBV25-1, TRBJ1-1)
CASTHLGGNTEAFF

SEQ ID NO: 622607 - protein, 13 aa, Homo sapiens
  CDR3 for alpha chain variable domain of TCR clone 311304 (TRAV12-2, TRAJ20)
CAVYPSNDYKLSF

SEQ ID NO: 622608 - protein, 15 aa, Homo sapiens
  CDR3 for beta chain variable domain of TCR clone 311304 (TRBV27, TRBJ2-5)
CASGLYPRGGETQYF

SEQ ID NO: 622609 - protein, 11 aa, Homo sapiens
  CDR3 for alpha chain variable domain of TCR clone 311305 (TRAV1-1, TRAJ31)
CAVPKQCQTHV

SEQ ID NO: 622610 - protein, 17 aa, Homo sapiens
  CDR3 for beta chain variable domain of TCR clone 311305 (TRBV27, TRBJ2-6)
CASSAGTGFSGTNVLTF

SEQ ID NO: 622611 - protein, 17 aa, Homo sapiens
  CDR3 for alpha chain variable domain of TCR clone 311306 (TRAV8-6, TRAJ52)
CAVSRNAGGTSYGKLTF

SEQ ID NO: 622612 - protein, 13 aa, Homo sapiens
  CDR3 for beta chain variable domain of TCR clone 311306 (TRBV7-9, TRBJ1-2)
CASSLKQNYGYTC

SEQ ID NO: 622613 - protein, 13 aa, Homo sapiens
  CDR3 for alpha chain variable domain of TCR clone 311307 (TRAV22, TRAJ29)
CAVGGSGNTPLVF

SEQ ID NO: 622614 - protein, 15 aa, Homo sapiens
  CDR3 for beta chain variable domain of TCR clone 311307 (TRBV29-1, TRBJ2-1)
CSGRDRKSSYNEQFF

SEQ ID NO: 622615 - protein, 14 aa, Homo sapiens
  CDR3 for alpha chain variable domain of TCR clone 311308 (TRAV8-6, TRAJ54)
CAVSPALGAQKLVF

SEQ ID NO: 622616 - protein, 15 aa, Homo sapiens
  CDR3 for beta chain variable domain of TCR clone 311308 (TRBV4-1, TRBJ1-6)
CSSSAGQGYNSPLHF

SEQ ID NO: 622617 - protein, 15 aa, Homo sapiens
  CDR3 for alpha chain variable domain of TCR clone 311309 (TRAV26-1, TRAJ37)
CIVRPGSGNTGKLIF

SEQ ID NO: 622618 - protein, 12 aa, Homo sapiens
  CDR3 for beta chain variable domain of TCR clone 311309 (TRBV29-1, TRBJ1-1)
CSVEWGSTEAFF

SEQ ID NO: 622619 - protein, 11 aa, Homo sapiens
  CDR3 for alpha chain variable domain of TCR clone 311310 (TRAV13-1, TRAJ40)
CAVSGTYKYIF

SEQ ID NO: 622620 - protein, 16 aa, Homo sapiens
  CDR3 for beta chain variable domain of TCR clone 311310 (TRBV10-3, TRBJ2-3)
CAISVSRRALTDTQYF

SEQ ID NO: 622621 - protein, 14 aa, Homo sapiens
  CDR3 for alpha chain variable domain of TCR clone 311311 (TRAV13-1, TRAJ28)
CAASPGAGRYQLTF

SEQ ID NO: 622622 - protein, 14 aa, Homo sapiens
  CDR3 for beta chain variable domain of TCR clone 311311 (TRBV27, TRBJ2-3)
CASSWAGTTDTQYF

SEQ ID NO: 622623 - protein, 13 aa, Homo sapiens
  CDR3 for alpha chain variable domain of TCR clone 311312 (TRAV21, TRAJ27)
CAARPGNAGKSTF

SEQ ID NO: 622624 - protein, 14 aa, Homo sapiens
  CDR3 for beta chain variable domain of TCR clone 311312 (TRBV9, TRBJ2-4)
CASSPSGTSGFQYF

SEQ ID NO: 622625 - protein, 15 aa, Homo sapiens
  CDR3 for alpha chain variable domain of TCR clone 311313 (TRAV17, TRAJ13)
CATVPNSGGYQQVTF

SEQ ID NO: 622626 - protein, 13 aa, Homo sapiens
  CDR3 for beta chain variable domain of TCR clone 311313 (TRBV3-1, TRBJ1-5)
CASSQAGGQPQHF

SEQ ID NO: 622627 - protein, 15 aa, Homo sapiens
  CDR3 for alpha chain variable domain of TCR clone 311314 (TRAV12-2, TRAJ43)
CAFDMRFGAGTRLTV

SEQ ID NO: 622628 - protein, 15 aa, Homo sapiens
  CDR3 for beta chain variable domain of TCR clone 311314 (TRBV28, TRBJ2-1)
CASSGLAEVDNEKFF

SEQ ID NO: 622629 - protein, 14 aa, Homo sapiens
  CDR3 for alpha chain variable domain of TCR clone 311315 (TRAV1-2, TRAJ16)
CAVNRFSDGQKLPF

SEQ ID NO: 622630 - protein, 12 aa, Homo sapiens
  CDR3 for beta chain variable domain of TCR clone 311315 (TRBV5-1, TRBJ2-5)
CASSWDQETQYF

SEQ ID NO: 622631 - protein, 14 aa, Homo sapiens
  CDR3 for alpha chain variable domain of TCR clone 311316 (TRAV8-3, TRAJ4)
CAVGASGGYNKLIF

SEQ ID NO: 622632 - protein, 16 aa, Homo sapiens
  CDR3 for beta chain variable domain of TCR clone 311316 (TRBV4-3, TRBJ2-2)
CASSRLPGSGTGELFF

SEQ ID NO: 622633 - protein, 14 aa, Homo sapiens
  CDR3 for alpha chain variable domain of TCR clone 311317 (TRAV24, TRAJ37)
CASDGSSNTGKLIF

SEQ ID NO: 622634 - protein, 15 aa, Homo sapiens
  CDR3 for beta chain variable domain of TCR clone 311317 (TRBV7-3, TRBJ2-2)
CASKANGANTGELFV

SEQ ID NO: 622635 - protein, 14 aa, Homo sapiens
  CDR3 for alpha chain variable domain of TCR clone 311318 (TRAV12-2, TRAJ48)
CAVNAFFGNEKLTF

SEQ ID NO: 622636 - protein, 13 aa, Homo sapiens
  CDR3 for beta chain variable domain of TCR clone 311318 (TRBV28, TRBJ2-7)
CGGAQQGLDEQYF

SEQ ID NO: 622637 - protein, 15 aa, Homo sapiens
  CDR3 for alpha chain variable domain of TCR clone 311319 (TRAV26-2, TRAJ28)
CILVESGAGSYQLTF

SEQ ID NO: 622638 - protein, 16 aa, Homo sapiens
  CDR3 for beta chain variable domain of TCR clone 311319 (TRBV27, TRBJ2-2)
CASSFRGLVRTGELFF

SEQ ID NO: 622639 - protein, 15 aa, Homo sapiens
  CDR3 for alpha chain variable domain of TCR clone 311320 (TRAV27, TRAJ38)
CVARRNAGNNRKLIW

SEQ ID NO: 622640 - protein, 13 aa, Homo sapiens
  CDR3 for beta chain variable domain of TCR clone 311320 (TRBV12-5, TRBJ2-3)
CASGDRQSDTQYF

SEQ ID NO: 622641 - protein, 14 aa, Homo sapiens
  CDR3 for alpha chain variable domain of TCR clone 311321 (TRAV23/DV6, TRAJ4)
CAAPSSGGHNKLIF

SEQ ID NO: 622642 - protein, 16 aa, Homo sapiens
  CDR3 for beta chain variable domain of TCR clone 311321 (TRBV19, TRBJ1-1)
CASRFGGPVTGTEAFF

SEQ ID NO: 622643 - protein, 18 aa, Homo sapiens
  CDR3 for alpha chain variable domain of TCR clone 311322 (TRAV13-1, TRAJ52)
CAAKNPNAGGTSYGKQTF

SEQ ID NO: 622644 - protein, 14 aa, Homo sapiens
  CDR3 for beta chain variable domain of TCR clone 311322 (TRBV7-2, TRBJ2-7)
CASSPKTSFYEQYF

SEQ ID NO: 622645 - protein, 13 aa, Homo sapiens
  CDR3 for alpha chain variable domain of TCR clone 311323 (TRAV1-2, TRAJ12)
CAVSMDSSYKLIF

SEQ ID NO: 622646 - protein, 13 aa, Homo sapiens
  CDR3 for beta chain variable domain of TCR clone 311323 (TRBV7-3, TRBJ2-5)
CASSFRGGETQYF

SEQ ID NO: 622647 - protein, 16 aa, Homo sapiens
  CDR3 for alpha chain variable domain of TCR clone 311324 (TRAV3, TRAJ37)
CAVRGKGSVNTGKLIF

SEQ ID NO: 622648 - protein, 14 aa, Homo sapiens
  CDR3 for beta chain variable domain of TCR clone 311324 (TRBV6-1, TRBJ1-3)
CASVQGGGGNTIYF

SEQ ID NO: 622649 - protein, 15 aa, Homo sapiens
  CDR3 for alpha chain variable domain of TCR clone 311325 (TRAV14/DV4, TRAJ33)
CAMREGRDSNYQLIW

SEQ ID NO: 622650 - protein, 15 aa, Homo sapiens
  CDR3 for beta chain variable domain of TCR clone 311325 (TRBV5-5, TRBJ1-5)
CASSSTPGSNKPQHF

SEQ ID NO: 622651 - protein, 14 aa, Homo sapiens
  CDR3 for alpha chain variable domain of TCR clone 311326 (TRAV1-2, TRAJ8)
CAVREDTGFQKLVF

SEQ ID NO: 622652 - protein, 15 aa, Homo sapiens
  CDR3 for beta chain variable domain of TCR clone 311326 (TRBV4-1, TRBJ2-7)
CASSQNTGRLYEQYL

SEQ ID NO: 622653 - protein, 13 aa, Homo sapiens
  CDR3 for alpha chain variable domain of TCR clone 311327 (TRAV12-2, TRAJ20)
CAVYPSNDYKLSF

SEQ ID NO: 622654 - protein, 13 aa, Homo sapiens
  CDR3 for beta chain variable domain of TCR clone 311327 (TRBV15, TRBJ1-2)
CATSRGQLYGYTF

SEQ ID NO: 622655 - protein, 14 aa, Homo sapiens
  CDR3 for alpha chain variable domain of TCR clone 311328 (TRAV9-2, TRAJ39)
CALYIYNAGNMLTF

SEQ ID NO: 622656 - protein, 18 aa, Homo sapiens
  CDR3 for beta chain variable domain of TCR clone 311328 (TRBV4-1, TRBJ1-4)
CASSPRTGGAWTNEKLFF

SEQ ID NO: 622657 - protein, 18 aa, Homo sapiens
  CDR3 for alpha chain variable domain of TCR clone 311329 (TRAV21, TRAJ52)
CAVRPPPAGGTSYGKLTF

SEQ ID NO: 622658 - protein, 15 aa, Homo sapiens
  CDR3 for beta chain variable domain of TCR clone 311329 (TRBV20-1, TRBJ1-5)
CSAFKNGQRNQPQHF

SEQ ID NO: 622659 - protein, 17 aa, Homo sapiens
  CDR3 for alpha chain variable domain of TCR clone 311330 (TRAV12-1, TRAJ42)
CVVMRMNYGGSQGNPIF

SEQ ID NO: 622660 - protein, 13 aa, Homo sapiens
  CDR3 for beta chain variable domain of TCR clone 311330 (TRBV7-2, TRBJ1-1)
CASSLARPAEAFF

SEQ ID NO: 622661 - protein, 13 aa, Homo sapiens
  CDR3 for alpha chain variable domain of TCR clone 311331 (TRAV8-3, TRAJ10)
WAILTGGGTKLTF

SEQ ID NO: 622662 - protein, 10 aa, Homo sapiens
  CDR3 for beta chain variable domain of TCR clone 311331 (TRBV20-1, TRBJ2-5)
CSARFETQYF

SEQ ID NO: 622663 - protein, 15 aa, Homo sapiens
  CDR3 for alpha chain variable domain of TCR clone 311332 (TRAV12-1, TRAJ13)
CVVNGDSGGYQKVTF

SEQ ID NO: 622664 - protein, 12 aa, Homo sapiens
  CDR3 for beta chain variable domain of TCR clone 311332 (TRBV7-3, TRBJ2-1)
CASSFINNEQFF

SEQ ID NO: 622665 - protein, 18 aa, Homo sapiens
  CDR3 for alpha chain variable domain of TCR clone 311333 (TRAV27, TRAJ52)
CAASKRSAGGTSYGKLTF

SEQ ID NO: 622666 - protein, 13 aa, Homo sapiens
  CDR3 for beta chain variable domain of TCR clone 311333 (TRBV12-4, TRBJ1-2)
CASSLRQGKGYTF

SEQ ID NO: 622667 - protein, 15 aa, Homo sapiens
  CDR3 for alpha chain variable domain of TCR clone 311334 (TRAV3, TRAJ17)
CAVRDTGAAGNKLTF

SEQ ID NO: 622668 - protein, 14 aa, Homo sapiens
  CDR3 for beta chain variable domain of TCR clone 311334 (TRBV6-3, TRBJ1-1)
CASSNLLPAAEAFF

SEQ ID NO: 622669 - protein, 17 aa, Homo sapiens
  CDR3 for alpha chain variable domain of TCR clone 311335 (TRAV3, TRAJ6)
CTVRDGPRAGGSYIPTF

SEQ ID NO: 622670 - protein, 16 aa, Homo sapiens
  CDR3 for beta chain variable domain of TCR clone 311335 (TRBV7-8, TRBJ2-3)
CASSTEGQRETDTQYF

SEQ ID NO: 622671 - protein, 11 aa, Homo sapiens
  CDR3 for alpha chain variable domain of TCR clone 311336 (TRAV12-1, TRAJ34)
CVVNKGRELIF

SEQ ID NO: 622672 - protein, 12 aa, Homo sapiens
  CDR3 for beta chain variable domain of TCR clone 311336 (TRBV2, TRBJ2-1)
CAYGPPGNEHFF

SEQ ID NO: 622673 - protein, 11 aa, Homo sapiens
  CDR3 for alpha chain variable domain of TCR clone 311337 (TRAV3, TRAJ17)
FAEAAGNKLTF

SEQ ID NO: 622674 - protein, 18 aa, Homo sapiens
  CDR3 for beta chain variable domain of TCR clone 311337 (TRBV7-9, TRBJ2-7)
CASSLTTSGSRTWYEQYF

SEQ ID NO: 622675 - protein, 14 aa, Homo sapiens
  CDR3 for alpha chain variable domain of TCR clone 311338 (TRAV13-2, TRAJ17)
CAENYKAAGNKLTF

SEQ ID NO: 622676 - protein, 14 aa, Homo sapiens
  CDR3 for beta chain variable domain of TCR clone 311338 (TRBV4-1, TRBJ2-2)
CASSQAVNTGELFF

SEQ ID NO: 622677 - protein, 14 aa, Homo sapiens
  CDR3 for alpha chain variable domain of TCR clone 311339 (TRAV4, TRAJ17)
CLVGDMASGNKLTF

SEQ ID NO: 622678 - protein, 14 aa, Homo sapiens
  CDR3 for beta chain variable domain of TCR clone 311339 (TRBV4-1, TRBJ2-7)
CASSPVAGGDEQYF

SEQ ID NO: 622679 - protein, 12 aa, Homo sapiens
  CDR3 for alpha chain variable domain of TCR clone 311340 (TRAV2, TRAJ36)
CAELTGANNLFF

SEQ ID NO: 622680 - protein, 16 aa, Homo sapiens
  CDR3 for beta chain variable domain of TCR clone 311340 (TRBV5-7, TRBJ2-5)
CASSLVGYPGVETQYF

SEQ ID NO: 622681 - protein, 16 aa, Homo sapiens
  CDR3 for alpha chain variable domain of TCR clone 311341 (TRAV30, TRAJ24)
CGTEIVDADSWGKFQF

SEQ ID NO: 622682 - protein, 18 aa, Homo sapiens
  CDR3 for beta chain variable domain of TCR clone 311341 (TRBV7-9, TRBJ2-7)
CASSLTTSGNRTWYEQYF

SEQ ID NO: 622683 - protein, 17 aa, Homo sapiens
  CDR3 for alpha chain variable domain of TCR clone 311342 (TRAV3, TRAJ6)
CAVRDGPRAGGGYTPTF

SEQ ID NO: 622684 - protein, 17 aa, Homo sapiens
  CDR3 for beta chain variable domain of TCR clone 311342 (TRBV27, TRBJ2-6)
CASSLTGFASGANVLTF

SEQ ID NO: 622685 - protein, 12 aa, Homo sapiens
  CDR3 for alpha chain variable domain of TCR clone 311343 (TRAV8-3, TRAJ20)
CAVGADDYKLSF

SEQ ID NO: 622686 - protein, 15 aa, Homo sapiens
  CDR3 for beta chain variable domain of TCR clone 311343 (TRBV11-2, TRBJ2-1)
CASSLGTSGLNEQFF

SEQ ID NO: 622687 - protein, 16 aa, Homo sapiens
  CDR3 for alpha chain variable domain of TCR clone 311344 (TRAV16, TRAJ52)
CALSAAGGTSYGKLTF

SEQ ID NO: 622688 - protein, 17 aa, Homo sapiens
  CDR3 for beta chain variable domain of TCR clone 311344 (TRBV11-2, TRBJ2-1)
CASSLSPPGVEYNERFF

SEQ ID NO: 622689 - protein, 12 aa, Homo sapiens
  CDR3 for alpha chain variable domain of TCR clone 311345 (TRAV8-3, TRAJ26)
CAGDNYGQNFVF

SEQ ID NO: 622690 - protein, 15 aa, Homo sapiens
  CDR3 for beta chain variable domain of TCR clone 311345 (TRBV5-7, TRBJ2-7)
CASSLPGQVFYEQYF

SEQ ID NO: 622691 - protein, 15 aa, Homo sapiens
  CDR3 for alpha chain variable domain of TCR clone 311346 (TRAV3, TRAJ5)
CAVRDLDTGRRALTF

SEQ ID NO: 622692 - protein, 15 aa, Homo sapiens
  CDR3 for beta chain variable domain of TCR clone 311346 (TRBV20-1, TRBJ2-1)
CSARSPGGQGNEQFF

SEQ ID NO: 622693 - protein, 14 aa, Homo sapiens
  CDR3 for alpha chain variable domain of TCR clone 311347 (TRAV8-6, TRAJ5)
CAVSVDTGRRALTF

SEQ ID NO: 622694 - protein, 11 aa, Homo sapiens
  CDR3 for beta chain variable domain of TCR clone 311347 (TRBV7-3, TRBJ2-5)
GASSLSETQYF

SEQ ID NO: 622695 - protein, 15 aa, Homo sapiens
  CDR3 for alpha chain variable domain of TCR clone 311348 (TRAV12-2, TRAJ20)
CAVKGCCGAGTTVTV

SEQ ID NO: 622696 - protein, 13 aa, Homo sapiens
  CDR3 for beta chain variable domain of TCR clone 311348 (TRBV12-4, TRBJ2-7)
CASSPGQLYEQYF

SEQ ID NO: 622697 - protein, 13 aa, Homo sapiens
  CDR3 for alpha chain variable domain of TCR clone 311349 (TRAV17, TRAJ34)
CATDLYNTDKLIF

SEQ ID NO: 622698 - protein, 15 aa, Homo sapiens
  CDR3 for beta chain variable domain of TCR clone 311349 (TRBV20-1, TRBJ2-7)
CSARDRVSGMDEQYF

SEQ ID NO: 622699 - protein, 12 aa, Homo sapiens
  CDR3 for alpha chain variable domain of TCR clone 311350 (TRAV6, TRAJ3)
CALYSSASKIIF

SEQ ID NO: 622700 - protein, 12 aa, Homo sapiens
  CDR3 for beta chain variable domain of TCR clone 311350 (TRBV7-2, TRBJ2-3)
CASSLIGETQDF

SEQ ID NO: 622701 - protein, 14 aa, Homo sapiens
  CDR3 for alpha chain variable domain of TCR clone 311351 (TRAV29/DV5, TRAJ57)
CAASSQGGSEKLVF

SEQ ID NO: 622702 - protein, 15 aa, Homo sapiens
  CDR3 for beta chain variable domain of TCR clone 311351 (TRBV28, TRBJ2-4)
CAAGSGTLLMGIQYF

SEQ ID NO: 622703 - protein, 16 aa, Homo sapiens
  CDR3 for alpha chain variable domain of TCR clone 311352 (TRAV3, TRAJ10)
CAVRDMRAGGGNKLPF

SEQ ID NO: 622704 - protein, 14 aa, Homo sapiens
  CDR3 for beta chain variable domain of TCR clone 311352 (TRBV7-2, TRBJ1-1)
CASSFLTGTTEAFF

SEQ ID NO: 622705 - protein, 13 aa, Homo sapiens
  CDR3 for alpha chain variable domain of TCR clone 311353 (TRAV12-1, TRAJ26)
CVVRRNYGQNFVF

SEQ ID NO: 622706 - protein, 15 aa, Homo sapiens
  CDR3 for beta chain variable domain of TCR clone 311353 (TRBV4-2, TRBJ2-3)
CASLKDGREGDTQYF

SEQ ID NO: 622707 - protein, 10 aa, Homo sapiens
  CDR3 for alpha chain variable domain of TCR clone 311354 (TRAV30, TRAJ20)
CGTDDYKLSF

SEQ ID NO: 622708 - protein, 15 aa, Homo sapiens
  CDR3 for beta chain variable domain of TCR clone 311354 (TRBV28, TRBJ2-5)
CASSPPWSYQETQYF

SEQ ID NO: 622709 - protein, 13 aa, Homo sapiens
  CDR3 for alpha chain variable domain of TCR clone 311355 (TRAV17, TRAJ22)
CAHHSGSARQLTF

SEQ ID NO: 622710 - protein, 14 aa, Homo sapiens
  CDR3 for beta chain variable domain of TCR clone 311355 (TRBV16, TRBJ1-1)
CDSSQAGPNTEAFF

SEQ ID NO: 622711 - protein, 16 aa, Homo sapiens
  CDR3 for alpha chain variable domain of TCR clone 311356 (TRAV12-2, TRAJ40)
CAVIRGGTSGTYKYIF

SEQ ID NO: 622712 - protein, 13 aa, Homo sapiens
  CDR3 for beta chain variable domain of TCR clone 311356 (TRBV7-9, TRBJ1-2)
CASSLKQNYGYPF

SEQ ID NO: 622713 - protein, 13 aa, Homo sapiens
  CDR3 for alpha chain variable domain of TCR clone 311357 (TRAV21, TRAJ26)
CAVLDNYGQNFVF

SEQ ID NO: 622714 - protein, 16 aa, Homo sapiens
  CDR3 for beta chain variable domain of TCR clone 311357 (TRBV29-1, TRBJ2-2)
CSVETRASGNTGELVF

SEQ ID NO: 622715 - protein, 18 aa, Homo sapiens
  CDR3 for alpha chain variable domain of TCR clone 311358 (TRAV26-2, TRAJ45)
CILRVDKYSGGGADGLTF

SEQ ID NO: 622716 - protein, 16 aa, Homo sapiens
  CDR3 for beta chain variable domain of TCR clone 311358 (TRBV2, TRBJ1-4)
CASKLLQGATNEKLFF

SEQ ID NO: 622717 - protein, 17 aa, Homo sapiens
  CDR3 for alpha chain variable domain of TCR clone 311359 (TRAV8-6, TRAJ58)
CAVGSWVGETSGSRLTF

SEQ ID NO: 622718 - protein, 14 aa, Homo sapiens
  CDR3 for beta chain variable domain of TCR clone 311359 (TRBV4-2, TRBJ2-1)
CASGLDRAYNEQFL

SEQ ID NO: 622719 - protein, 13 aa, Homo sapiens
  CDR3 for alpha chain variable domain of TCR clone 311360 (TRAV3, TRAJ15)
CAVRDQAGTALTF

SEQ ID NO: 622720 - protein, 15 aa, Homo sapiens
  CDR3 for beta chain variable domain of TCR clone 311360 (TRBV11-1, TRBJ2-7)
CASSLNDGASYEQYF

SEQ ID NO: 622721 - protein, 12 aa, Homo sapiens
  CDR3 for alpha chain variable domain of TCR clone 311361 (TRAV21, TRAJ33)
CANMDSNYQLIW

SEQ ID NO: 622722 - protein, 16 aa, Homo sapiens
  CDR3 for beta chain variable domain of TCR clone 311361 (TRBV4-3, TRBJ2-1)
CASSKVASGSYNEQFF

SEQ ID NO: 622723 - protein, 15 aa, Homo sapiens
  CDR3 for alpha chain variable domain of TCR clone 311362 (TRAV4, TRAJ39)
FLVGPNNNAGNMLTF

SEQ ID NO: 622724 - protein, 16 aa, Homo sapiens
  CDR3 for beta chain variable domain of TCR clone 311362 (TRBV13, TRBJ2-2)
CASSPRTGEHTGELFF

SEQ ID NO: 622725 - protein, 14 aa, Homo sapiens
  CDR3 for alpha chain variable domain of TCR clone 311363 (TRAV38-1, TRAJ43)
CAFMKHNNNNDMRF

SEQ ID NO: 622726 - protein, 17 aa, Homo sapiens
  CDR3 for beta chain variable domain of TCR clone 311363 (TRBV7-8, TRBJ2-6)
CASSAGTGGAGANVLTF

SEQ ID NO: 622727 - protein, 15 aa, Homo sapiens
  CDR3 for alpha chain variable domain of TCR clone 311364 (TRAV12-2, TRAJ43)
CAFDMRFGAVTRLTV

SEQ ID NO: 622728 - protein, 18 aa, Homo sapiens
  CDR3 for beta chain variable domain of TCR clone 311364 (TRBV20-1, TRBJ2-3)
CSASGLAGGPGTTDTQYL

SEQ ID NO: 622729 - protein, 14 aa, Homo sapiens
  CDR3 for alpha chain variable domain of TCR clone 311365 (TRAV1-2, TRAJ16)
CAVNRFSDGPKLLF

SEQ ID NO: 622730 - protein, 14 aa, Homo sapiens
  CDR3 for beta chain variable domain of TCR clone 311365 (TRBV7-2, TRBJ2-2)
CASRGQGAAGELFF

SEQ ID NO: 622731 - protein, 15 aa, Homo sapiens
  CDR3 for alpha chain variable domain of TCR clone 311366 (TRAV13-1, TRAJ52)
SYYNAGGTSYGKLTF

SEQ ID NO: 622732 - protein, 11 aa, Homo sapiens
  CDR3 for beta chain variable domain of TCR clone 311366 (TRBV12-4, TRBJ2-2)
CASSSAGELFC

SEQ ID NO: 622733 - protein, 14 aa, Homo sapiens
  CDR3 for alpha chain variable domain of TCR clone 311367 (TRAV26-1, TRAJ39)
CIVRGSRAGNMLTF

SEQ ID NO: 622734 - protein, 15 aa, Homo sapiens
  CDR3 for beta chain variable domain of TCR clone 311367 (TRBV28, TRBJ2-5)
CASSTGQGSIETQYF

SEQ ID NO: 622735 - protein, 11 aa, Homo sapiens
  CDR3 for alpha chain variable domain of TCR clone 311368 (TRAV12-3, TRAJ16)
LTGGDGQKLLF

SEQ ID NO: 622736 - protein, 13 aa, Homo sapiens
  CDR3 for beta chain variable domain of TCR clone 311368 (TRBV4-1, TRBJ2-5)
CASSLTRGETQYF

SEQ ID NO: 622737 - protein, 12 aa, Homo sapiens
  CDR3 for alpha chain variable domain of TCR clone 311369 (TRAV30, TRAJ43)
EATSAALSDMRS

SEQ ID NO: 622738 - protein, 13 aa, Homo sapiens
  CDR3 for beta chain variable domain of TCR clone 311369 (TRBV12-4, TRBJ2-2)
CASSITGSGELFF

SEQ ID NO: 622739 - protein, 13 aa, Homo sapiens
  CDR3 for alpha chain variable domain of TCR clone 311370 (TRAV13-1, TRAJ22)
CAAGAGSARQLTF

SEQ ID NO: 622740 - protein, 13 aa, Homo sapiens
  CDR3 for beta chain variable domain of TCR clone 311370 (TRBV19, TRBJ2-2)
CASSIWSTGELFF

SEQ ID NO: 622741 - protein, 14 aa, Homo sapiens
  CDR3 for alpha chain variable domain of TCR clone 311371 (TRAV8-6, TRAJ37)
CAVRSRSNTGKLIF

SEQ ID NO: 622742 - protein, 12 aa, Homo sapiens
  CDR3 for beta chain variable domain of TCR clone 311371 (TRBV5-1, TRBJ2-1)
CASIGGYNEQFF

SEQ ID NO: 622743 - protein, 13 aa, Homo sapiens
  CDR3 for alpha chain variable domain of TCR clone 311372 (TRAV8-6, TRAJ9)
CAVSHTGGFKTIF

SEQ ID NO: 622744 - protein, 13 aa, Homo sapiens
  CDR3 for beta chain variable domain of TCR clone 311372 (TRBV20-1, TRBJ1-4)
CSAILINGEKLFF

SEQ ID NO: 622745 - protein, 14 aa, Homo sapiens
  CDR3 for alpha chain variable domain of TCR clone 311373 (TRAV17, TRAJ56)
CATDVGGANSKLTF

SEQ ID NO: 622746 - protein, 16 aa, Homo sapiens
  CDR3 for beta chain variable domain of TCR clone 311373 (TRBV24-1, TRBJ2-3)
CATSDPGTGATDTQYF

SEQ ID NO: 622747 - protein, 15 aa, Homo sapiens
  CDR3 for alpha chain variable domain of TCR clone 311374 (TRAV1-2, TRAJ12)
CAVIPEVDSSYKLIF

SEQ ID NO: 622748 - protein, 12 aa, Homo sapiens
  CDR3 for beta chain variable domain of TCR clone 311374 (TRBV20-1, TRBJ1-2)
CSASHPSGGYAF

SEQ ID NO: 622749 - protein, 14 aa, Homo sapiens
  CDR3 for alpha chain variable domain of TCR clone 311375 (TRAV1-2, TRAJ27)
CAPAEYTNAGKSTF

SEQ ID NO: 622750 - protein, 18 aa, Homo sapiens
  CDR3 for beta chain variable domain of TCR clone 311375 (TRBV28, TRBJ1-2)
WASRQQQGKRGSNYGYTF

SEQ ID NO: 622751 - protein, 13 aa, Homo sapiens
  CDR3 for alpha chain variable domain of TCR clone 311376 (TRAV21, TRAJ27)
CAARPGNAGKSTF

SEQ ID NO: 622752 - protein, 11 aa, Homo sapiens
  CDR3 for beta chain variable domain of TCR clone 311376 (TRBV28, TRBJ2-7)
CASSLTYEQYF

SEQ ID NO: 622753 - protein, 16 aa, Homo sapiens
  CDR3 for alpha chain variable domain of TCR clone 311377 (TRAV13-1, TRAJ48)
CAASIFGNFGNVKLTF

SEQ ID NO: 622754 - protein, 12 aa, Homo sapiens
  CDR3 for beta chain variable domain of TCR clone 311377 (TRBV14, TRBJ2-4)
CASSNLKSIQYF

SEQ ID NO: 622755 - protein, 14 aa, Homo sapiens
  CDR3 for alpha chain variable domain of TCR clone 311378 (TRAV13-1, TRAJ40)
CAASMTSETYKYIF

SEQ ID NO: 622756 - protein, 15 aa, Homo sapiens
  CDR3 for beta chain variable domain of TCR clone 311378 (TRBV7-3, TRBJ2-1)
CASSPTGGGEVEQFF

SEQ ID NO: 622757 - protein, 12 aa, Homo sapiens
  CDR3 for alpha chain variable domain of TCR clone 311379 (TRAV3, TRAJ20)
CAVRDPDYKLSF

SEQ ID NO: 622758 - protein, 17 aa, Homo sapiens
  CDR3 for beta chain variable domain of TCR clone 311379 (TRBV7-8, TRBJ2-6)
CASSAGTGGAGANVLTF

SEQ ID NO: 622759 - protein, 13 aa, Homo sapiens
  CDR3 for alpha chain variable domain of TCR clone 311380 (TRAV8-3, TRAJ40)
CAVGAQYLRNLQI

SEQ ID NO: 622760 - protein, 19 aa, Homo sapiens
  CDR3 for beta chain variable domain of TCR clone 311380 (TRBV25-1, TRBJ2-2)
CAMLVYRVDRGRKTGELFF

SEQ ID NO: 622761 - protein, 14 aa, Homo sapiens
  CDR3 for alpha chain variable domain of TCR clone 311381 (TRAV29/DV5, TRAJ32)
CAAAYGGATNKLIV

SEQ ID NO: 622762 - protein, 15 aa, Homo sapiens
  CDR3 for beta chain variable domain of TCR clone 311381 (TRBV27, TRBJ2-7)
CASSTAGTGSYEQYF

SEQ ID NO: 622763 - protein, 17 aa, Homo sapiens
  CDR3 for alpha chain variable domain of TCR clone 311382 (TRAV3, TRAJ6)
CAVRDGPRAGGSYIPTF

SEQ ID NO: 622764 - protein, 12 aa, Homo sapiens
  CDR3 for beta chain variable domain of TCR clone 311382 (TRBV28, TRBJ2-6)
CAIQAGANVLTF

SEQ ID NO: 622765 - protein, 14 aa, Homo sapiens
  CDR3 for alpha chain variable domain of TCR clone 311383 (TRAV8-4, TRAJ41)
CAVTDSNSGYALNF

SEQ ID NO: 622766 - protein, 14 aa, Homo sapiens
  CDR3 for beta chain variable domain of TCR clone 311383 (TRBV11-1, TRBJ2-7)
CASSFRQGSYEQYF

SEQ ID NO: 622767 - protein, 14 aa, Homo sapiens
  CDR3 for alpha chain variable domain of TCR clone 311384 (TRAV1-2, TRAJ16)
CAVNRSSDGQKLLF

SEQ ID NO: 622768 - protein, 14 aa, Homo sapiens
  CDR3 for beta chain variable domain of TCR clone 311384 (TRBV7-2, TRBJ1-2)
CASSQTGSTYGYTF

SEQ ID NO: 622769 - protein, 18 aa, Homo sapiens
  CDR3 for alpha chain variable domain of TCR clone 311385 (TRAV13-1, TRAJ52)
CAASKRSAGGTSYGKLTF

SEQ ID NO: 622770 - protein, 15 aa, Homo sapiens
  CDR3 for beta chain variable domain of TCR clone 311385 (TRBV9, TRBJ2-3)
CASSVAGGRSDTQYF

SEQ ID NO: 622771 - protein, 17 aa, Homo sapiens
  CDR3 for alpha chain variable domain of TCR clone 311386 (TRAV8-1, TRAJ43)
RAVTNDMRFGAGTRLTV

SEQ ID NO: 622772 - protein, 15 aa, Homo sapiens
  CDR3 for beta chain variable domain of TCR clone 311386 (TRBV9, TRBJ1-6)
CASSVAGTGDSPLHF

SEQ ID NO: 622773 - protein, 18 aa, Homo sapiens
  CDR3 for alpha chain variable domain of TCR clone 311387 (TRAV12-3, TRAJ52)
CAMSVGGAGGASYGKLTF

SEQ ID NO: 622774 - protein, 15 aa, Homo sapiens
  CDR3 for beta chain variable domain of TCR clone 311387 (TRBV27, TRBJ1-6)
CASSFDRVLGSPLHF

SEQ ID NO: 622775 - protein, 20 aa, Homo sapiens
  CDR3 for alpha chain variable domain of TCR clone 311388 (TRAV8-3, TRAJ45)
LGTSVLWGSYSGGGADGLTF

SEQ ID NO: 622776 - protein, 11 aa, Homo sapiens
  CDR3 for beta chain variable domain of TCR clone 311388 (TRBV20-1, TRBJ2-5)
CRADRAETQYF

SEQ ID NO: 622777 - protein, 15 aa, Homo sapiens
  CDR3 for alpha chain variable domain of TCR clone 311389 (TRAV3, TRAJ5)
CAVRDLDTGRRALTF

SEQ ID NO: 622778 - protein, 13 aa, Homo sapiens
  CDR3 for beta chain variable domain of TCR clone 311389 (TRBV9, TRBJ2-7)
CASSASDSYEQFF

SEQ ID NO: 622779 - protein, 13 aa, Homo sapiens
  CDR3 for alpha chain variable domain of TCR clone 311390 (TRAV12-3, TRAJ9)
CAMRNTGGFKTIF

SEQ ID NO: 622780 - protein, 13 aa, Homo sapiens
  CDR3 for beta chain variable domain of TCR clone 311390 (TRBV20-1, TRBJ1-1)
CSARGGANTEAFF

SEQ ID NO: 622781 - protein, 11 aa, Homo sapiens
  CDR3 for alpha chain variable domain of TCR clone 311391 (TRAV3, TRAJ32)
CAVREGIMVVL

SEQ ID NO: 622782 - protein, 13 aa, Homo sapiens
  CDR3 for beta chain variable domain of TCR clone 311391 (TRBV2, TRBJ1-1)
CASSVGGNTEAFF

SEQ ID NO: 622783 - protein, 14 aa, Homo sapiens
  CDR3 for alpha chain variable domain of TCR clone 311392 (TRAV2, TRAJ9)
CALEDRSGGFKTIF

SEQ ID NO: 622784 - protein, 14 aa, Homo sapiens
  CDR3 for beta chain variable domain of TCR clone 311392 (TRBV7-3, TRBJ2-1)
CASSLAGGTNEQFF

SEQ ID NO: 622785 - protein, 13 aa, Homo sapiens
  CDR3 for alpha chain variable domain of TCR clone 311393 (TRAV35, TRAJ21)
CAGQLSNFNKFYF

SEQ ID NO: 622786 - protein, 12 aa, Homo sapiens
  CDR3 for beta chain variable domain of TCR clone 311393 (TRBV11-2, TRBJ2-2)
CASSLPTGELFF

SEQ ID NO: 622787 - protein, 12 aa, Homo sapiens
  CDR3 for alpha chain variable domain of TCR clone 311394 (TRAV12-1, TRAJ6)
CVSSGGSYIPTF

SEQ ID NO: 622788 - protein, 14 aa, Homo sapiens
  CDR3 for beta chain variable domain of TCR clone 311394 (TRBV25-1, TRBJ2-1)
CASSVAGLENEQFF

SEQ ID NO: 622789 - protein, 14 aa, Homo sapiens
  CDR3 for alpha chain variable domain of TCR clone 311395 (TRAV29/DV5, TRAJ36)
CAARRQTGANNIFF

SEQ ID NO: 622790 - protein, 14 aa, Homo sapiens
  CDR3 for beta chain variable domain of TCR clone 311395 (TRBV12-5, TRBJ2-5)
CASGSRTHQETQYF

SEQ ID NO: 622791 - protein, 14 aa, Homo sapiens
  CDR3 for alpha chain variable domain of TCR clone 311396 (TRAV13-1, TRAJ35)
CAASKGGFGNVLHC

SEQ ID NO: 622792 - protein, 16 aa, Homo sapiens
  CDR3 for beta chain variable domain of TCR clone 311396 (TRBV7-3, TRBJ2-2)
CASSFLPSGYTGELFF

SEQ ID NO: 622793 - protein, 15 aa, Homo sapiens
  CDR3 for alpha chain variable domain of TCR clone 311397 (TRAV8-3, TRAJ11)
CAVGLLNSGYSTLTC

SEQ ID NO: 622794 - protein, 23 aa, Homo sapiens
  CDR3 for beta chain variable domain of TCR clone 311397 (TRBV7-9, TRBJ1-2)
EAQLEKSRLLSDRFSPGEDGYTF

SEQ ID NO: 622795 - protein, 15 aa, Homo sapiens
  CDR3 for alpha chain variable domain of TCR clone 311398 (TRAV27, TRAJ37)
CAGIHGSSNTGRLIF

SEQ ID NO: 622796 - protein, 14 aa, Homo sapiens
  CDR3 for beta chain variable domain of TCR clone 311398 (TRBV7-6, TRBJ2-3)
CASSLGTVTDTQYF

SEQ ID NO: 622797 - protein, 12 aa, Homo sapiens
  CDR3 for alpha chain variable domain of TCR clone 311399 (TRAV4, TRAJ26)
CLVGDYGQNFVF

SEQ ID NO: 622798 - protein, 15 aa, Homo sapiens
  CDR3 for beta chain variable domain of TCR clone 311399 (TRBV28, TRBJ2-3)
CASSQELGGTDTQYF

SEQ ID NO: 622799 - protein, 16 aa, Homo sapiens
  CDR3 for alpha chain variable domain of TCR clone 311400 (TRAV16, TRAJ4)
CAISRMFSGGYNKLTF

SEQ ID NO: 622800 - protein, 16 aa, Homo sapiens
  CDR3 for beta chain variable domain of TCR clone 311400 (TRBV24-1, TRBJ2-3)
CATSDPGTGATDTQYF

SEQ ID NO: 622801 - protein, 14 aa, Homo sapiens
  CDR3 for alpha chain variable domain of TCR clone 311401 (TRAV1-2, TRAJ8)
CAVREDTGFQKLEF

SEQ ID NO: 622802 - protein, 15 aa, Homo sapiens
  CDR3 for beta chain variable domain of TCR clone 311401 (TRBV4-1, TRBJ2-7)
CASSQNTGRLYEQYF

SEQ ID NO: 622803 - protein, 15 aa, Homo sapiens
  CDR3 for alpha chain variable domain of TCR clone 311402 (TRAV12-1, TRAJ43)
CVVNKGRYNNNDMRF

SEQ ID NO: 622804 - protein, 16 aa, Homo sapiens
  CDR3 for beta chain variable domain of TCR clone 311402 (TRBV19, TRBJ2-3)
CASSFYTTGIGDTQYF

SEQ ID NO: 622805 - protein, 15 aa, Homo sapiens
  CDR3 for alpha chain variable domain of TCR clone 311403 (TRAV2, TRAJ9)
CAVAALITGGFKIIF

SEQ ID NO: 622806 - protein, 14 aa, Homo sapiens
  CDR3 for beta chain variable domain of TCR clone 311403 (TRBV7-8, TRBJ2-5)
CASSATGGQETQYF

SEQ ID NO: 622807 - protein, 11 aa, Homo sapiens
  CDR3 for alpha chain variable domain of TCR clone 311404 (TRAV4, TRAJ23)
CLVAPVGKLIF

SEQ ID NO: 622808 - protein, 15 aa, Homo sapiens
  CDR3 for beta chain variable domain of TCR clone 311404 (TRBV7-2, TRBJ2-1)
CASSFQADEYNEQFF

SEQ ID NO: 622809 - protein, 14 aa, Homo sapiens
  CDR3 for alpha chain variable domain of TCR clone 311405 (TRAV1-2, TRAJ16)
CAVNWFSDGQKLLF

SEQ ID NO: 622810 - protein, 13 aa, Homo sapiens
  CDR3 for beta chain variable domain of TCR clone 311405 (TRBV20-1, TRBJ1-6)
CSAPTGLGSPLHF

SEQ ID NO: 622811 - protein, 13 aa, Homo sapiens
  CDR3 for alpha chain variable domain of TCR clone 311406 (TRAV2, TRAJ40)
CAVVTSRTYKYIF

SEQ ID NO: 622812 - protein, 16 aa, Homo sapiens
  CDR3 for beta chain variable domain of TCR clone 311406 (TRBV28, TRBJ2-7)
CASSPWVATGDLSQYF

SEQ ID NO: 622813 - protein, 16 aa, Homo sapiens
  CDR3 for alpha chain variable domain of TCR clone 311407 (TRAV26-1, )
CIDIQNPDPSVYQLRD

SEQ ID NO: 622814 - protein, 19 aa, Homo sapiens
  CDR3 for beta chain variable domain of TCR clone 311407 (TRBV19, TRBJ2-5)
CASSIGQVTDFFLGETQYF

SEQ ID NO: 622815 - protein, 15 aa, Homo sapiens
  CDR3 for alpha chain variable domain of TCR clone 311408 (TRAV3, TRAJ13)
CAVRDIAGGYQKVTF

SEQ ID NO: 622816 - protein, 15 aa, Homo sapiens
  CDR3 for beta chain variable domain of TCR clone 311408 (TRBV2, TRBJ1-2)
CASSEIGGANYGYTF

SEQ ID NO: 622817 - protein, 11 aa, Homo sapiens
  CDR3 for alpha chain variable domain of TCR clone 311409 (TRAV8-3, TRAJ15)
CAVGPGTALIF

SEQ ID NO: 622818 - protein, 17 aa, Homo sapiens
  CDR3 for beta chain variable domain of TCR clone 311409 (TRBV18, TRBJ2-3)
CASSYSGAAGGTDTQYF

SEQ ID NO: 622819 - protein, 13 aa, Homo sapiens
  CDR3 for alpha chain variable domain of TCR clone 311410 (TRAV16, TRAJ52)
CALRGTSYGKLTF

SEQ ID NO: 622820 - protein, 15 aa, Homo sapiens
  CDR3 for beta chain variable domain of TCR clone 311410 (TRBV11-3, TRBJ2-3)
CASLKDGREGDTQYF

SEQ ID NO: 622821 - protein, 14 aa, Homo sapiens
  CDR3 for alpha chain variable domain of TCR clone 311411 (TRAV17, TRAJ57)
CATDPQRGSEKLVF

SEQ ID NO: 622822 - protein, 13 aa, Homo sapiens
  CDR3 for beta chain variable domain of TCR clone 311411 (TRBV29-1, TRBJ2-1)
CSVEGGSVNEQFF

SEQ ID NO: 622823 - protein, 12 aa, Homo sapiens
  CDR3 for alpha chain variable domain of TCR clone 311412 (TRAV21, TRAJ11)
CAATSGYSTLTF

SEQ ID NO: 622824 - protein, 17 aa, Homo sapiens
  CDR3 for beta chain variable domain of TCR clone 311412 (TRBV7-3, TRBJ2-2)
CASSLSGTSGGTGELFF

SEQ ID NO: 622825 - protein, 14 aa, Homo sapiens
  CDR3 for alpha chain variable domain of TCR clone 311413 (TRAV1-2, TRAJ16)
CAVNRLSDGQKLLF

SEQ ID NO: 622826 - protein, 16 aa, Homo sapiens
  CDR3 for beta chain variable domain of TCR clone 311413 (TRBV12-4, TRBJ2-5)
CASSFFVRGRQETQYF

SEQ ID NO: 622827 - protein, 14 aa, Homo sapiens
  CDR3 for alpha chain variable domain of TCR clone 311414 (TRAV26-2, TRAJ32)
CCVGYGGATNKLIF

SEQ ID NO: 622828 - protein, 15 aa, Homo sapiens
  CDR3 for beta chain variable domain of TCR clone 311414 (TRBV9, TRBJ1-6)
CASSVAGTGDSPLHF

SEQ ID NO: 622829 - protein, 11 aa, Homo sapiens
  CDR3 for alpha chain variable domain of TCR clone 311415 (TRAV3, TRAJ21)
CAVGKFNKFYF

SEQ ID NO: 622830 - protein, 16 aa, Homo sapiens
  CDR3 for beta chain variable domain of TCR clone 311415 (TRBV19, TRBJ2-1)
CASSRAGPSSYNEQFF

SEQ ID NO: 622831 - protein, 12 aa, Homo sapiens
  CDR3 for alpha chain variable domain of TCR clone 311416 (TRAV12-3, TRAJ17)
CAMTLTGSKLTF

SEQ ID NO: 622832 - protein, 18 aa, Homo sapiens
  CDR3 for beta chain variable domain of TCR clone 311416 (TRBV5-5, TRBJ1-5)
CASSLRQVKGSSNQPQHF

SEQ ID NO: 622833 - protein, 15 aa, Homo sapiens
  CDR3 for alpha chain variable domain of TCR clone 311417 (TRAV38-2/DV8, TRAJ37)
CAYRVGSGNTGKLIF

SEQ ID NO: 622834 - protein, 16 aa, Homo sapiens
  CDR3 for beta chain variable domain of TCR clone 311417 (TRBV7-3, TRBJ2-2)
CASSLKRGTLSGELFF

SEQ ID NO: 622835 - protein, 17 aa, Homo sapiens
  CDR3 for alpha chain variable domain of TCR clone 311418 (TRAV3, TRAJ6)
CAVRDGPRAGGSYIPTF

SEQ ID NO: 622836 - protein, 16 aa, Homo sapiens
  CDR3 for beta chain variable domain of TCR clone 311418 (TRBV20-1, TRBJ1-2)
CSASMGQGVANYGYTF

SEQ ID NO: 622837 - protein, 13 aa, Homo sapiens
  CDR3 for alpha chain variable domain of TCR clone 311419 (TRAV27, TRAJ11)
CAGGGSGYSTLTF

SEQ ID NO: 622838 - protein, 13 aa, Homo sapiens
  CDR3 for beta chain variable domain of TCR clone 311419 (TRBV12-4, TRBJ1-2)
CASSLRQGKGYTF

SEQ ID NO: 622839 - protein, 15 aa, Homo sapiens
  CDR3 for alpha chain variable domain of TCR clone 311420 (TRAV21, TRAJ24)
CAARSSTDSWGKLQF

SEQ ID NO: 622840 - protein, 14 aa, Homo sapiens
  CDR3 for beta chain variable domain of TCR clone 311420 (TRBV4-2, TRBJ2-7)
CASSPNRAPYEQYF

SEQ ID NO: 622841 - protein, 11 aa, Homo sapiens
  CDR3 for alpha chain variable domain of TCR clone 311421 (TRAV17, TRAJ31)
CATDRTARLMF

SEQ ID NO: 622842 - protein, 12 aa, Homo sapiens
  CDR3 for beta chain variable domain of TCR clone 311421 (TRBV29-1, TRBJ2-3)
CSVTGGADTQYF

SEQ ID NO: 622843 - protein, 12 aa, Homo sapiens
  CDR3 for alpha chain variable domain of TCR clone 311422 (TRAV17, TRAJ47)
CARTVRGNKLVF

SEQ ID NO: 622844 - protein, 13 aa, Homo sapiens
  CDR3 for beta chain variable domain of TCR clone 311422 (TRBV7-2, TRBJ2-4)
CASSLAEGGIQYF

SEQ ID NO: 622845 - protein, 14 aa, Homo sapiens
  CDR3 for alpha chain variable domain of TCR clone 311423 (TRAV23/DV6, TRAJ37)
CAASTSSNTGKLIF

SEQ ID NO: 622846 - protein, 13 aa, Homo sapiens
  CDR3 for beta chain variable domain of TCR clone 311423 (TRBV20-1, TRBJ2-3)
CSARLAGTDTQYF

SEQ ID NO: 622847 - protein, 16 aa, Homo sapiens
  CDR3 for alpha chain variable domain of TCR clone 311424 (TRAV38-2/DV8, TRAJ47)
CAYRSAIMEYGNKLVF

SEQ ID NO: 622848 - protein, 13 aa, Homo sapiens
  CDR3 for beta chain variable domain of TCR clone 311424 (TRBV7-9, TRBJ1-2)
CASSLKQNYGYTF

SEQ ID NO: 622849 - protein, 16 aa, Homo sapiens
  CDR3 for alpha chain variable domain of TCR clone 311425 (TRAV14/DV4, TRAJ54)
CAMRGGRIQGAQKLVF

SEQ ID NO: 622850 - protein, 18 aa, Homo sapiens
  CDR3 for beta chain variable domain of TCR clone 311425 (TRBV18, TRBJ1-3)
CASSPRGGAGPSGNTIYF

SEQ ID NO: 622851 - protein, 17 aa, Homo sapiens
  CDR3 for alpha chain variable domain of TCR clone 311426 (TRAV12-2, TRAJ52)
CAVNPYAGGTSYVKLTF

SEQ ID NO: 622852 - protein, 16 aa, Homo sapiens
  CDR3 for beta chain variable domain of TCR clone 311426 (TRBV5-5, TRBJ2-2)
CASSGRREGATGELFF

SEQ ID NO: 622853 - protein, 15 aa, Homo sapiens
  CDR3 for alpha chain variable domain of TCR clone 311427 (TRAV13-1, TRAJ17)
CAASIERAAGKKLTF

SEQ ID NO: 622854 - protein, 17 aa, Homo sapiens
  CDR3 for beta chain variable domain of TCR clone 311427 (TRBV13, TRBJ2-3)
CASSLSRVAGGRNTQYF

SEQ ID NO: 622855 - protein, 13 aa, Homo sapiens
  CDR3 for alpha chain variable domain of TCR clone 311428 (TRAV23/DV6, TRAJ45)
CSKLGGGADGLTF

SEQ ID NO: 622856 - protein, 15 aa, Homo sapiens
  CDR3 for beta chain variable domain of TCR clone 311428 (TRBV4-2, TRBJ1-2)
CASSRNTGAGYGYTF

SEQ ID NO: 622857 - protein, 16 aa, Homo sapiens
  CDR3 for alpha chain variable domain of TCR clone 311429 (TRAV22, TRAJ45)
CAVEGGKRGGADGITF

SEQ ID NO: 622858 - protein, 13 aa, Homo sapiens
  CDR3 for beta chain variable domain of TCR clone 311429 (TRBV27, TRBJ1-1)
CASSLSIGAEAFF

SEQ ID NO: 622859 - protein, 13 aa, Homo sapiens
  CDR3 for alpha chain variable domain of TCR clone 311430 (TRAV21, TRAJ27)
CAACPGHAGKSTF

SEQ ID NO: 622860 - protein, 14 aa, Homo sapiens
  CDR3 for beta chain variable domain of TCR clone 311430 (TRBV7-6, TRBJ2-3)
CASSLGTVTDTQYF

SEQ ID NO: 622861 - protein, 14 aa, Homo sapiens
  CDR3 for alpha chain variable domain of TCR clone 311431 (TRAV12-1, TRAJ6)
CVVKRSGGSYIPTF

SEQ ID NO: 622862 - protein, 17 aa, Homo sapiens
  CDR3 for beta chain variable domain of TCR clone 311431 (TRBV11-2, TRBJ2-1)
CASSLYPPGVEYNEQFF

SEQ ID NO: 622863 - protein, 13 aa, Homo sapiens
  CDR3 for alpha chain variable domain of TCR clone 311432 (TRAV12-3, TRAJ13)
CAMTSGGYQKVTF

SEQ ID NO: 622864 - protein, 12 aa, Homo sapiens
  CDR3 for beta chain variable domain of TCR clone 311432 (TRBV7-9, TRBJ2-7)
CATRTDAYEQYF

SEQ ID NO: 622865 - protein, 16 aa, Homo sapiens
  CDR3 for alpha chain variable domain of TCR clone 311433 (TRAV23/DV6, TRAJ9)
CAASIGGHTGGFKTIL

SEQ ID NO: 622866 - protein, 15 aa, Homo sapiens
  CDR3 for beta chain variable domain of TCR clone 311433 (TRBV6-3, TRBJ2-7)
CASSSPGTVLYEQYF

SEQ ID NO: 622867 - protein, 14 aa, Homo sapiens
  CDR3 for alpha chain variable domain of TCR clone 311434 (TRAV26-1, TRAJ49)
CIVRLTNTGNQFYF

SEQ ID NO: 622868 - protein, 13 aa, Homo sapiens
  CDR3 for beta chain variable domain of TCR clone 311434 (TRBV4-1, TRBJ2-7)
CGSSQGQAYEQYF

SEQ ID NO: 622869 - protein, 13 aa, Homo sapiens
  CDR3 for alpha chain variable domain of TCR clone 311435 (TRAV12-3, TRAJ7)
CAMSASGNNRLAF

SEQ ID NO: 622870 - protein, 11 aa, Homo sapiens
  CDR3 for beta chain variable domain of TCR clone 311435 (TRBV6-3, TRBJ2-3)
CATGQADTQYF

SEQ ID NO: 622871 - protein, 13 aa, Homo sapiens
  CDR3 for alpha chain variable domain of TCR clone 311436 (TRAV27, TRAJ3)
ASLRGSSASKIIF

SEQ ID NO: 622872 - protein, 13 aa, Homo sapiens
  CDR3 for beta chain variable domain of TCR clone 311436 (TRBV7-9, TRBJ2-3)
CASSPGSTDTQYF

SEQ ID NO: 622873 - protein, 13 aa, Homo sapiens
  CDR3 for alpha chain variable domain of TCR clone 311437 (TRAV1-1, TRAJ9)
CAAKTTGGFKTIF

SEQ ID NO: 622874 - protein, 16 aa, Homo sapiens
  CDR3 for beta chain variable domain of TCR clone 311437 (TRBV12-5, TRBJ2-5)
CASGPRTSGNQETQYF

SEQ ID NO: 622875 - protein, 15 aa, Homo sapiens
  CDR3 for alpha chain variable domain of TCR clone 311438 (TRAV20, TRAJ4)
CAVEGSSGGYNKLIF

SEQ ID NO: 622876 - protein, 14 aa, Homo sapiens
  CDR3 for beta chain variable domain of TCR clone 311438 (TRBV7-8, TRBJ2-7)
CASTLGGAVGEQYF

SEQ ID NO: 622877 - protein, 16 aa, Homo sapiens
  CDR3 for alpha chain variable domain of TCR clone 311439 (TRAV3, TRAJ37)
CAVRPHGSGNTGKLIF

SEQ ID NO: 622878 - protein, 16 aa, Homo sapiens
  CDR3 for beta chain variable domain of TCR clone 311439 (TRBV9, TRBJ1-2)
CASSAEEKVSPYGYTF

SEQ ID NO: 622879 - protein, 15 aa, Homo sapiens
  CDR3 for alpha chain variable domain of TCR clone 311440 (TRAV8-4, TRAJ56)
CAVSGGTGANSKLTF

SEQ ID NO: 622880 - protein, 14 aa, Homo sapiens
  CDR3 for beta chain variable domain of TCR clone 311440 (TRBV7-9, TRBJ2-1)
YASSPKGGADEQFF

SEQ ID NO: 622881 - protein, 17 aa, Homo sapiens
  CDR3 for alpha chain variable domain of TCR clone 311441 (TRAV3, TRAJ42)
CAVRDRDYGGSQGNLIF

SEQ ID NO: 622882 - protein, 15 aa, Homo sapiens
  CDR3 for beta chain variable domain of TCR clone 311441 (TRBV6-6, TRBJ2-7)
CASSYSYGGAYEQHF

SEQ ID NO: 622883 - protein, 22 aa, Homo sapiens
  CDR3 for alpha chain variable domain of TCR clone 311442 (TRAV20, TRAJ38)
CAIRGNAGNNHIQNPDPAVYQL

SEQ ID NO: 622884 - protein, 16 aa, Homo sapiens
  CDR3 for beta chain variable domain of TCR clone 311442 (TRBV4-3, TRBJ2-2)
CASSHLQGSGTGELFF

SEQ ID NO: 622885 - protein, 12 aa, Homo sapiens
  CDR3 for alpha chain variable domain of TCR clone 311443 (TRAV8-3, TRAJ41)
CAVALSGYALNS

SEQ ID NO: 622886 - protein, 16 aa, Homo sapiens
  CDR3 for beta chain variable domain of TCR clone 311443 (TRBV27, TRBJ2-7)
CASSSERRDSAYEQYF

SEQ ID NO: 622887 - protein, 11 aa, Homo sapiens
  CDR3 for alpha chain variable domain of TCR clone 311444 (TRAV35, TRAJ57)
GPQGGSEKLVF

SEQ ID NO: 622888 - protein, 16 aa, Homo sapiens
  CDR3 for beta chain variable domain of TCR clone 311444 (TRBV7-2, TRBJ1-5)
CASSLTGGPGNQPQHF

SEQ ID NO: 622889 - protein, 14 aa, Homo sapiens
  CDR3 for alpha chain variable domain of TCR clone 311445 (TRAV12-3, TRAJ10)
SHLPLTGGGKKLTF

SEQ ID NO: 622890 - protein, 16 aa, Homo sapiens
  CDR3 for beta chain variable domain of TCR clone 311445 (TRBV19, TRBJ2-1)
CASSKAGPSSYNEQFF

SEQ ID NO: 622891 - protein, 13 aa, Homo sapiens
  CDR3 for alpha chain variable domain of TCR clone 311446 (TRAV36/DV7, TRAJ37)
CAGFSSNTGKLIF

SEQ ID NO: 622892 - protein, 16 aa, Homo sapiens
  CDR3 for beta chain variable domain of TCR clone 311446 (TRBV12-4, TRBJ2-5)
CASSFFVRGRQETQYF

SEQ ID NO: 622893 - protein, 15 aa, Homo sapiens
  CDR3 for alpha chain variable domain of TCR clone 311447 (TRAV8-4, TRAJ45)
CAVIWTGGGADGLTF

SEQ ID NO: 622894 - protein, 12 aa, Homo sapiens
  CDR3 for beta chain variable domain of TCR clone 311447 (TRBV29-1, TRBJ2-7)
CSVGPAGDEQYF

SEQ ID NO: 622895 - protein, 16 aa, Homo sapiens
  CDR3 for alpha chain variable domain of TCR clone 311448 (TRAV8-3, TRAJ10)
CAVGPILTGGGNKITF

SEQ ID NO: 622896 - protein, 16 aa, Homo sapiens
  CDR3 for beta chain variable domain of TCR clone 311448 (TRBV7-2, TRBJ2-5)
CASSSKWLSGQETQYF

SEQ ID NO: 622897 - protein, 12 aa, Homo sapiens
  CDR3 for alpha chain variable domain of TCR clone 311449 (TRAV8-3, TRAJ26)
CAGDNCGQNFVF

SEQ ID NO: 622898 - protein, 15 aa, Homo sapiens
  CDR3 for beta chain variable domain of TCR clone 311449 (TRBV7-2, TRBJ2-7)
CASSLLGTGSYEQYF

SEQ ID NO: 622899 - protein, 15 aa, Homo sapiens
  CDR3 for alpha chain variable domain of TCR clone 311450 (TRAV3, TRAJ5)
CAVRTLDTGRRALTF

SEQ ID NO: 622900 - protein, 13 aa, Homo sapiens
  CDR3 for beta chain variable domain of TCR clone 311450 (TRBV12-4, TRBJ2-7)
CASSPTETYEQYF

SEQ ID NO: 622901 - protein, 15 aa, Homo sapiens
  CDR3 for alpha chain variable domain of TCR clone 311451 (TRAV26-1, TRAJ40)
CIVRVTTSGTYKYIF

SEQ ID NO: 622902 - protein, 12 aa, Homo sapiens
  CDR3 for beta chain variable domain of TCR clone 311451 (TRBV7-9, TRBJ1-4)
CASSSDREKLFF

SEQ ID NO: 622903 - protein, 15 aa, Homo sapiens
  CDR3 for alpha chain variable domain of TCR clone 311452 (TRAV12-2, TRAJ53)
CAVNTGGGSNYKLTF

SEQ ID NO: 622904 - protein, 16 aa, Homo sapiens
  CDR3 for beta chain variable domain of TCR clone 311452 (TRBV19, TRBJ2-2)
CASSAAGTGGTGELFF

SEQ ID NO: 622905 - protein, 11 aa, Homo sapiens
  CDR3 for alpha chain variable domain of TCR clone 311453 (TRAV12-1, TRAJ30)
CVVNGQDKIIF

SEQ ID NO: 622906 - protein, 16 aa, Homo sapiens
  CDR3 for beta chain variable domain of TCR clone 311453 (TRBV24-1, TRBJ2-3)
CATSGAISGITDTQYF

SEQ ID NO: 622907 - protein, 17 aa, Homo sapiens
  CDR3 for alpha chain variable domain of TCR clone 311454 (TRAV3, TRAJ6)
CAVRDGPRAGGSYIQTF

SEQ ID NO: 622908 - protein, 14 aa, Homo sapiens
  CDR3 for beta chain variable domain of TCR clone 311454 (TRBV7-2, TRBJ2-7)
CASSPKTSFYEQYF

SEQ ID NO: 622909 - protein, 12 aa, Homo sapiens
  CDR3 for alpha chain variable domain of TCR clone 311455 (TRAV3, TRAJ43)
CAVRDPNNDMRF

SEQ ID NO: 622910 - protein, 13 aa, Homo sapiens
  CDR3 for beta chain variable domain of TCR clone 311455 (TRBV20-1, TRBJ2-7)
CSATHTSGYEQYF

SEQ ID NO: 622911 - protein, 16 aa, Homo sapiens
  CDR3 for alpha chain variable domain of TCR clone 311456 (TRAV8-3, TRAJ44)
CAVGTLMTGTASKVTF

SEQ ID NO: 622912 - protein, 13 aa, Homo sapiens
  CDR3 for beta chain variable domain of TCR clone 311456 (TRBV11-2, TRBJ2-1)
CASSLRLTHEQFF

SEQ ID NO: 622913 - protein, 13 aa, Homo sapiens
  CDR3 for alpha chain variable domain of TCR clone 311457 (TRAV2, TRAJ15)
CAVASQAGTALIF

SEQ ID NO: 622914 - protein, 15 aa, Homo sapiens
  CDR3 for beta chain variable domain of TCR clone 311457 (TRBV27, TRBJ2-1)
CASINGGGSSNEQFF

SEQ ID NO: 622915 - protein, 19 aa, Homo sapiens
  CDR3 for alpha chain variable domain of TCR clone 311458 (TRAV26-1, TRAJ28)
CIVRVAHAYSGAGSYQLAF

SEQ ID NO: 622916 - protein, 15 aa, Homo sapiens
  CDR3 for beta chain variable domain of TCR clone 311458 (TRBV5-1, TRBJ1-3)
CASSSKTGAGNTIYF

SEQ ID NO: 622917 - protein, 13 aa, Homo sapiens
  CDR3 for alpha chain variable domain of TCR clone 311459 (TRAV1-1, TRAJ9)
CAAKTTGGFKTIF

SEQ ID NO: 622918 - protein, 15 aa, Homo sapiens
  CDR3 for beta chain variable domain of TCR clone 311459 (TRBV20-1, TRBJ2-7)
CSAESGTSGAYEQYF

SEQ ID NO: 622919 - protein, 16 aa, Homo sapiens
  CDR3 for alpha chain variable domain of TCR clone 311460 (TRAV3, TRAJ37)
CAVRGKGSGNTGQLIF

SEQ ID NO: 622920 - protein, 15 aa, Homo sapiens
  CDR3 for beta chain variable domain of TCR clone 311460 (TRBV18, TRBJ2-1)
CASSPPSASYNEQFF

SEQ ID NO: 622921 - protein, 12 aa, Homo sapiens
  CDR3 for alpha chain variable domain of TCR clone 311461 (TRAV9-2, TRAJ4)
VIRSGGYNKLIF

SEQ ID NO: 622922 - protein, 12 aa, Homo sapiens
  CDR3 for beta chain variable domain of TCR clone 311461 (TRBV11-2, TRBJ2-2)
CASSLGGGELFF

SEQ ID NO: 622923 - protein, 14 aa, Homo sapiens
  CDR3 for alpha chain variable domain of TCR clone 311462 (TRAV3, TRAJ21)
CAVRDKYNFNKFYF

SEQ ID NO: 622924 - protein, 14 aa, Homo sapiens
  CDR3 for beta chain variable domain of TCR clone 311462 (TRBV27, TRBJ2-3)
CASRDSPITDTRYF

SEQ ID NO: 622925 - protein, 14 aa, Homo sapiens
  CDR3 for alpha chain variable domain of TCR clone 311463 (TRAV13-1, TRAJ9)
CAASALTGGFKTIF

SEQ ID NO: 622926 - protein, 15 aa, Homo sapiens
  CDR3 for beta chain variable domain of TCR clone 311463 (TRBV19, TRBJ2-1)
CASSSPGVPLDEQFF

SEQ ID NO: 622927 - protein, 15 aa, Homo sapiens
  CDR3 for alpha chain variable domain of TCR clone 311464 (TRAV20, TRAJ53)
CAVQASGGSNYKLTF

SEQ ID NO: 622928 - protein, 12 aa, Homo sapiens
  CDR3 for beta chain variable domain of TCR clone 311464 (TRBV7-6, TRBJ2-5)
CASSISQETQYF

SEQ ID NO: 622929 - protein, 16 aa, Homo sapiens
  CDR3 for alpha chain variable domain of TCR clone 311465 (TRAV12-2, TRAJ28)
CAVTPSSGAGSYQLTF

SEQ ID NO: 622930 - protein, 13 aa, Homo sapiens
  CDR3 for beta chain variable domain of TCR clone 311465 (TRBV20-1, TRBJ1-1)
CSARGGGNTEAFF

SEQ ID NO: 622931 - protein, 11 aa, Homo sapiens
  CDR3 for alpha chain variable domain of TCR clone 311466 (TRAV16, TRAJ31)
CALFNNARLMF

SEQ ID NO: 622932 - protein, 15 aa, Homo sapiens
  CDR3 for beta chain variable domain of TCR clone 311466 (TRBV20-1, TRBJ1-1)
CSASRGVTGNTEAFF

SEQ ID NO: 622933 - protein, 12 aa, Homo sapiens
  CDR3 for alpha chain variable domain of TCR clone 311467 (TRAV2, TRAJ36)
CAELTGENNLFF

SEQ ID NO: 622934 - protein, 18 aa, Homo sapiens
  CDR3 for beta chain variable domain of TCR clone 311467 (TRBV19, TRBJ1-1)
CASSIDGGDYTGNTEAFF

SEQ ID NO: 622935 - protein, 11 aa, Homo sapiens
  CDR3 for alpha chain variable domain of TCR clone 311468 (TRAV13-1, TRAJ39)
CASHAGNLLTF

SEQ ID NO: 622936 - protein, 15 aa, Homo sapiens
  CDR3 for beta chain variable domain of TCR clone 311468 (TRBV6-3, TRBJ2-7)
CASSSPGTVFYEQYF

SEQ ID NO: 622937 - protein, 14 aa, Homo sapiens
  CDR3 for alpha chain variable domain of TCR clone 311469 (TRAV16, TRAJ30)
CAPPSLNRDDKIIF

SEQ ID NO: 622938 - protein, 12 aa, Homo sapiens
  CDR3 for beta chain variable domain of TCR clone 311469 (TRBV14, TRBJ2-7)
CASSSLKGEQYF

SEQ ID NO: 622939 - protein, 16 aa, Homo sapiens
  CDR3 for alpha chain variable domain of TCR clone 311470 (TRAV30, TRAJ24)
CGTEIVDADSWGKFQF

SEQ ID NO: 622940 - protein, 13 aa, Homo sapiens
  CDR3 for beta chain variable domain of TCR clone 311470 (TRBV19, TRBJ1-2)
CASSVPGQYGYTF

SEQ ID NO: 622941 - protein, 16 aa, Homo sapiens
  CDR3 for alpha chain variable domain of TCR clone 311471 (TRAV38-1, TRAJ22)
CAFMAISSGSARQLTF

SEQ ID NO: 622942 - protein, 15 aa, Homo sapiens
  CDR3 for beta chain variable domain of TCR clone 311471 (TRBV4-1, TRBJ1-4)
RASSDTGGTNEKLFF

SEQ ID NO: 622943 - protein, 14 aa, Homo sapiens
  CDR3 for alpha chain variable domain of TCR clone 311472 (TRAV1-2, TRAJ8)
RAVREDTGFQKLVF

SEQ ID NO: 622944 - protein, 13 aa, Homo sapiens
  CDR3 for beta chain variable domain of TCR clone 311472 (TRBV12-4, TRBJ1-5)
CASSPDRAQPQHF

SEQ ID NO: 622945 - protein, 12 aa, Homo sapiens
  CDR3 for alpha chain variable domain of TCR clone 311473 (TRAV30, TRAJ43)
CGTEERGNDMRF

SEQ ID NO: 622946 - protein, 15 aa, Homo sapiens
  CDR3 for beta chain variable domain of TCR clone 311473 (TRBV7-3, TRBJ2-2)
CASSLTGQGTGELFF

SEQ ID NO: 622947 - protein, 14 aa, Homo sapiens
  CDR3 for alpha chain variable domain of TCR clone 311474 (TRAV17, TRAJ57)
CATDPQGGSEKLVF

SEQ ID NO: 622948 - protein, 13 aa, Homo sapiens
  CDR3 for beta chain variable domain of TCR clone 311474 (TRBV7-6, TRBJ1-3)
CASSSQQGNTIYF

SEQ ID NO: 622949 - protein, 14 aa, Homo sapiens
  CDR3 for alpha chain variable domain of TCR clone 311475 (TRAV1-2, TRAJ16)
CAVNRFSDGQKLPF

SEQ ID NO: 622950 - protein, 14 aa, Homo sapiens
  CDR3 for beta chain variable domain of TCR clone 311475 (TRBV7-2, TRBJ1-1)
CASSFLTGTTEAFF

SEQ ID NO: 622951 - protein, 14 aa, Homo sapiens
  CDR3 for alpha chain variable domain of TCR clone 311476 (TRAV12-2, TRAJ40)
CAVKIPSGTYKYIF

SEQ ID NO: 622952 - protein, 20 aa, Homo sapiens
  CDR3 for beta chain variable domain of TCR clone 311476 (TRBV28, TRBJ2-1)
CAGTPIGRSPGLAGGNEQFF

SEQ ID NO: 622953 - protein, 14 aa, Homo sapiens
  CDR3 for alpha chain variable domain of TCR clone 311477 (TRAV17, TRAJ57)
CATDPQGGSEKLGF

SEQ ID NO: 622954 - protein, 15 aa, Homo sapiens
  CDR3 for beta chain variable domain of TCR clone 311477 (TRBV5-1, TRBJ2-7)
CASSLDLTSSYEQYF

SEQ ID NO: 622955 - protein, 13 aa, Homo sapiens
  CDR3 for alpha chain variable domain of TCR clone 311478 (TRAV21, TRAJ20)
CAVGLRVDYKPSF

SEQ ID NO: 622956 - protein, 15 aa, Homo sapiens
  CDR3 for beta chain variable domain of TCR clone 311478 (TRBV7-8, TRBJ2-3)
CASSPRTGSTDTQYF

SEQ ID NO: 622957 - protein, 13 aa, Homo sapiens
  CDR3 for alpha chain variable domain of TCR clone 311479 (TRAV27, TRAJ45)
CRSSGGGADGLTF

SEQ ID NO: 622958 - protein, 14 aa, Homo sapiens
  CDR3 for beta chain variable domain of TCR clone 311479 (TRBV27, TRBJ2-1)
CASRHLGGGKEQFF

SEQ ID NO: 622959 - protein, 12 aa, Homo sapiens
  CDR3 for alpha chain variable domain of TCR clone 311480 (TRAV23/DV6, TRAJ24)
CAANDSCGKLQF

SEQ ID NO: 622960 - protein, 16 aa, Homo sapiens
  CDR3 for beta chain variable domain of TCR clone 311480 (TRBV12-4, TRBJ2-5)
CASSLSTSGGKETQYF

SEQ ID NO: 622961 - protein, 15 aa, Homo sapiens
  CDR3 for alpha chain variable domain of TCR clone 311481 (TRAV25, TRAJ53)
CAATGGGGSNYKLTF

SEQ ID NO: 622962 - protein, 19 aa, Homo sapiens
  CDR3 for beta chain variable domain of TCR clone 311481 (TRBV7-2, TRBJ2-3)
CASSFLSLNWGGGTDTQYF

SEQ ID NO: 622963 - protein, 16 aa, Homo sapiens
  CDR3 for alpha chain variable domain of TCR clone 311482 (TRAV12-2, TRAJ18)
CALTTDRGSTLGRLYF

SEQ ID NO: 622964 - protein, 14 aa, Homo sapiens
  CDR3 for beta chain variable domain of TCR clone 311482 (TRBV4-2, TRBJ1-5)
CASSQDSINQPQHF

SEQ ID NO: 622965 - protein, 12 aa, Homo sapiens
  CDR3 for alpha chain variable domain of TCR clone 311483 (TRAV12-3, TRAJ4)
CAMTGAGTRLAV

SEQ ID NO: 622966 - protein, 13 aa, Homo sapiens
  CDR3 for beta chain variable domain of TCR clone 311483 (TRBV6-4, TRBJ2-3)
CASSVSWADTQYF

SEQ ID NO: 622967 - protein, 16 aa, Homo sapiens
  CDR3 for alpha chain variable domain of TCR clone 311484 (TRAV3, TRAJ21)
CAVRDIERGNFNKFYF

SEQ ID NO: 622968 - protein, 14 aa, Homo sapiens
  CDR3 for beta chain variable domain of TCR clone 311484 (TRBV23-1, TRBJ2-5)
CASSFLRSQETQYF

SEQ ID NO: 622969 - protein, 12 aa, Homo sapiens
  CDR3 for alpha chain variable domain of TCR clone 311485 (TRAV16, TRAJ10)
CSRTGGGNKLTF

SEQ ID NO: 622970 - protein, 16 aa, Homo sapiens
  CDR3 for beta chain variable domain of TCR clone 311485 (TRBV20-1, TRBJ2-1)
CSARDLKQGMNNEQFF

SEQ ID NO: 622971 - protein, 15 aa, Homo sapiens
  CDR3 for alpha chain variable domain of TCR clone 311486 (TRAV8-3, TRAJ41)
CAAGSNSNSGYALNF

SEQ ID NO: 622972 - protein, 17 aa, Homo sapiens
  CDR3 for beta chain variable domain of TCR clone 311486 (TRBV25-1, TRBJ2-1)
CASSAYGQGRGVYEQFF

SEQ ID NO: 622973 - protein, 13 aa, Homo sapiens
  CDR3 for alpha chain variable domain of TCR clone 311487 (TRAV13-1, TRAJ5)
CAARVMGRRALTF

SEQ ID NO: 622974 - protein, 15 aa, Homo sapiens
  CDR3 for beta chain variable domain of TCR clone 311487 (TRBV7-9, TRBJ2-7)
CASSPGGGLTYEQYF

SEQ ID NO: 622975 - protein, 14 aa, Homo sapiens
  CDR3 for alpha chain variable domain of TCR clone 311488 (TRAV27, TRAJ22)
CAGLPSCSARQLTF

SEQ ID NO: 622976 - protein, 13 aa, Homo sapiens
  CDR3 for beta chain variable domain of TCR clone 311488 (TRBV7-3, TRBJ1-1)
CASSQGWGAEAFF

SEQ ID NO: 622977 - protein, 11 aa, Homo sapiens
  CDR3 for alpha chain variable domain of TCR clone 311489 (TRAV13-1, TRAJ24)
CAASGWGKLQF

SEQ ID NO: 622978 - protein, 12 aa, Homo sapiens
  CDR3 for beta chain variable domain of TCR clone 311489 (TRBV6-1, TRBJ2-7)
CASSDYSYEQYF

SEQ ID NO: 622979 - protein, 12 aa, Homo sapiens
  CDR3 for alpha chain variable domain of TCR clone 311490 (TRAV20, TRAJ39)
CAVGNAGNMLTF

SEQ ID NO: 622980 - protein, 17 aa, Homo sapiens
  CDR3 for beta chain variable domain of TCR clone 311490 (TRBV4-1, TRBJ2-3)
CASSQGYVSGGTDTPYF

SEQ ID NO: 622981 - protein, 13 aa, Homo sapiens
  CDR3 for alpha chain variable domain of TCR clone 311491 (TRAV2, TRAJ40)
CAVVTLGTYEYIF

SEQ ID NO: 622982 - protein, 14 aa, Homo sapiens
  CDR3 for beta chain variable domain of TCR clone 311491 (TRBV19, TRBJ2-1)
CASPTFVLSGEQFF

SEQ ID NO: 622983 - protein, 12 aa, Homo sapiens
  CDR3 for alpha chain variable domain of TCR clone 311492 (TRAV13-1, TRAJ21)
CAAKEGFNKFYF

SEQ ID NO: 622984 - protein, 17 aa, Homo sapiens
  CDR3 for beta chain variable domain of TCR clone 311492 (TRBV4-1, TRBJ2-7)
CASSPFLTSGGVVEQYF

SEQ ID NO: 622985 - protein, 12 aa, Homo sapiens
  CDR3 for alpha chain variable domain of TCR clone 311493 (TRAV12-3, TRAJ17)
CAMTLTGNKLTF

SEQ ID NO: 622986 - protein, 16 aa, Homo sapiens
  CDR3 for beta chain variable domain of TCR clone 311493 (TRBV7-2, TRBJ2-1)
CASSLGRTSGDNEQFF

SEQ ID NO: 622987 - protein, 16 aa, Homo sapiens
  CDR3 for alpha chain variable domain of TCR clone 311494 (TRAV30, TRAJ24)
CGTDIVDVDSWGKFQF

SEQ ID NO: 622988 - protein, 15 aa, Homo sapiens
  CDR3 for beta chain variable domain of TCR clone 311494 (TRBV9, TRBJ2-1)
CASSLAGSSYNEQFF

SEQ ID NO: 622989 - protein, 14 aa, Homo sapiens
  CDR3 for alpha chain variable domain of TCR clone 311495 (TRAV12-1, TRAJ30)
CVVNIGERDDKIIF

SEQ ID NO: 622990 - protein, 14 aa, Homo sapiens
  CDR3 for beta chain variable domain of TCR clone 311495 (TRBV20-1, TRBJ2-1)
CSAQIGGSANEQFF

SEQ ID NO: 622991 - protein, 14 aa, Homo sapiens
  CDR3 for alpha chain variable domain of TCR clone 311496 (TRAV1-2, TRAJ16)
CAVNRFSDGQRLLF

SEQ ID NO: 622992 - protein, 15 aa, Homo sapiens
  CDR3 for beta chain variable domain of TCR clone 311496 (TRBV9, TRBJ1-6)
CASSVAGTGDSPLHL

SEQ ID NO: 622993 - protein, 12 aa, Homo sapiens
  CDR3 for alpha chain variable domain of TCR clone 311497 (TRAV12-3, TRAJ20)
CAMVRGDYKLSF

SEQ ID NO: 622994 - protein, 15 aa, Homo sapiens
  CDR3 for beta chain variable domain of TCR clone 311497 (TRBV7-2, TRBJ1-4)
CASSLLGQSNEKLFF

SEQ ID NO: 622995 - protein, 10 aa, Homo sapiens
  CDR3 for alpha chain variable domain of TCR clone 311498 (TRAV21, TRAJ31)
CAVDNARLMF

SEQ ID NO: 622996 - protein, 14 aa, Homo sapiens
  CDR3 for beta chain variable domain of TCR clone 311498 (TRBV28, TRBJ2-7)
CASKPGPDLYEQYF

SEQ ID NO: 622997 - protein, 15 aa, Homo sapiens
  CDR3 for alpha chain variable domain of TCR clone 311499 (TRAV3, TRAJ22)
CAVRERGGSARQLTF

SEQ ID NO: 622998 - protein, 13 aa, Homo sapiens
  CDR3 for beta chain variable domain of TCR clone 311499 (TRBV2, TRBJ1-5)
CATAGPGNQPQHF

SEQ ID NO: 622999 - protein, 10 aa, Homo sapiens
  CDR3 for alpha chain variable domain of TCR clone 311500 (TRAV16, TRAJ26)
CALSGSEFCL

SEQ ID NO: 623000 - protein, 12 aa, Homo sapiens
  CDR3 for beta chain variable domain of TCR clone 311500 (TRBV11-2, TRBJ2-1)
RASSPGNNEQFF

SEQ ID NO: 623001 - protein, 11 aa, Homo sapiens
  CDR3 for alpha chain variable domain of TCR clone 311501 (TRAV13-1, TRAJ30)
CAASRDDKIIF

SEQ ID NO: 623002 - protein, 15 aa, Homo sapiens
  CDR3 for beta chain variable domain of TCR clone 311501 (TRBV18, TRBJ1-1)
CASSPSSWVSTEAFF

SEQ ID NO: 623003 - protein, 14 aa, Homo sapiens
  CDR3 for alpha chain variable domain of TCR clone 311502 (TRAV1-2, TRAJ16)
CAVNRFSDGQKLLF

SEQ ID NO: 623004 - protein, 15 aa, Homo sapiens
  CDR3 for beta chain variable domain of TCR clone 311502 (TRBV7-9, TRBJ1-6)
GASSSPGRGNSPLHF

SEQ ID NO: 623005 - protein, 14 aa, Homo sapiens
  CDR3 for alpha chain variable domain of TCR clone 311503 (TRAV14/DV4, TRAJ32)
SNVLPLTPTNKLIF

SEQ ID NO: 623006 - protein, 14 aa, Homo sapiens
  CDR3 for beta chain variable domain of TCR clone 311503 (TRBV4-1, TRBJ2-2)
CASSQAVNTGELFF

SEQ ID NO: 623007 - protein, 16 aa, Homo sapiens
  CDR3 for alpha chain variable domain of TCR clone 311504 (TRAV3, TRAJ3)
CAVRDRAKSSASKIIF

SEQ ID NO: 623008 - protein, 13 aa, Homo sapiens
  CDR3 for beta chain variable domain of TCR clone 311504 (TRBV10-3, TRBJ2-7)
CTSKLAVNYEQYF

SEQ ID NO: 623009 - protein, 13 aa, Homo sapiens
  CDR3 for alpha chain variable domain of TCR clone 311505 (TRAV8-3, TRAJ28)
CAVGSVGSYQLTF

SEQ ID NO: 623010 - protein, 15 aa, Homo sapiens
  CDR3 for beta chain variable domain of TCR clone 311505 (TRBV7-9, TRBJ1-5)
CASSRGHQPNQPQHF

SEQ ID NO: 623011 - protein, 14 aa, Homo sapiens
  CDR3 for alpha chain variable domain of TCR clone 311506 (TRAV1-2, TRAJ16)
CAFNRFSDGQKLLF

SEQ ID NO: 623012 - protein, 16 aa, Homo sapiens
  CDR3 for beta chain variable domain of TCR clone 311506 (TRBV12-5, TRBJ2-5)
CASGPRTSGNQETQYF

SEQ ID NO: 623013 - protein, 15 aa, Homo sapiens
  CDR3 for alpha chain variable domain of TCR clone 311507 (TRAV3, TRAJ9)
CAVRARNTGGFKTIF

SEQ ID NO: 623014 - protein, 13 aa, Homo sapiens
  CDR3 for beta chain variable domain of TCR clone 311507 (TRBV6-1, TRBJ1-1)
CASSRQGNTEAFF

SEQ ID NO: 623015 - protein, 12 aa, Homo sapiens
  CDR3 for alpha chain variable domain of TCR clone 311508 (TRAV30, TRAJ43)
CGTEERGNDMRF

SEQ ID NO: 623016 - protein, 17 aa, Homo sapiens
  CDR3 for beta chain variable domain of TCR clone 311508 (TRBV7-9, TRBJ2-3)
CASSLEEAGAYPDTQYF

SEQ ID NO: 623017 - protein, 14 aa, Homo sapiens
  CDR3 for alpha chain variable domain of TCR clone 311509 (TRAV12-2, TRAJ44)
CAVNPAGTASKLTF

SEQ ID NO: 623018 - protein, 15 aa, Homo sapiens
  CDR3 for beta chain variable domain of TCR clone 311509 (TRBV11-2, TRBJ1-3)
SASSLSPLVRDTIYF

SEQ ID NO: 623019 - protein, 12 aa, Homo sapiens
  CDR3 for alpha chain variable domain of TCR clone 311510 (TRAV12-3, TRAJ17)
CAMTLTGNKLTF

SEQ ID NO: 623020 - protein, 18 aa, Homo sapiens
  CDR3 for beta chain variable domain of TCR clone 311510 (TRBV15, TRBJ2-3)
CATSRDGARSWDTDTQYF

SEQ ID NO: 623021 - protein, 11 aa, Homo sapiens
  CDR3 for alpha chain variable domain of TCR clone 311511 (TRAV12-3, TRAJ43)
CAMSVSNDMRF

SEQ ID NO: 623022 - protein, 13 aa, Homo sapiens
  CDR3 for beta chain variable domain of TCR clone 311511 (TRBV7-2, TRBJ2-5)
CASSQTSVETQYF

SEQ ID NO: 623023 - protein, 13 aa, Homo sapiens
  CDR3 for alpha chain variable domain of TCR clone 311512 (TRAV17, TRAJ5)
CAPMDTGRRALTF

SEQ ID NO: 623024 - protein, 15 aa, Homo sapiens
  CDR3 for beta chain variable domain of TCR clone 311512 (TRBV6-6, TRBJ2-5)
CAISPGGGLEETQYF

SEQ ID NO: 623025 - protein, 15 aa, Homo sapiens
  CDR3 for alpha chain variable domain of TCR clone 311513 (TRAV17, TRAJ57)
CATGPSQGGSEKLDF

SEQ ID NO: 623026 - protein, 11 aa, Homo sapiens
  CDR3 for beta chain variable domain of TCR clone 311513 (TRBV29-1, TRBJ2-5)
CSEDRTGTQYF

SEQ ID NO: 623027 - protein, 15 aa, Homo sapiens
  CDR3 for alpha chain variable domain of TCR clone 311514 (TRAV12-3, TRAJ10)
CASHILTGGGNKLTF

SEQ ID NO: 623028 - protein, 15 aa, Homo sapiens
  CDR3 for beta chain variable domain of TCR clone 311514 (TRBV7-2, TRBJ1-6)
CASSLGLDRGMPLHF

SEQ ID NO: 623029 - protein, 15 aa, Homo sapiens
  CDR3 for alpha chain variable domain of TCR clone 311515 (TRAV21, TRAJ56)
CAVTKYTGANSKLTF

SEQ ID NO: 623030 - protein, 12 aa, Homo sapiens
  CDR3 for beta chain variable domain of TCR clone 311515 (TRBV5-1, TRBJ1-2)
CASSQDTYGYTF

SEQ ID NO: 623031 - protein, 15 aa, Homo sapiens
  CDR3 for alpha chain variable domain of TCR clone 311516 (TRAV21, TRAJ13)
CAVRPPYGGYQKVTF

SEQ ID NO: 623032 - protein, 15 aa, Homo sapiens
  CDR3 for beta chain variable domain of TCR clone 311516 (TRBV28, TRBJ2-7)
CASSPGGRGFYEQSF

SEQ ID NO: 623033 - protein, 13 aa, Homo sapiens
  CDR3 for alpha chain variable domain of TCR clone 311517 (TRAV27, TRAJ56)
CAGKPGANSKLTF

SEQ ID NO: 623034 - protein, 16 aa, Homo sapiens
  CDR3 for beta chain variable domain of TCR clone 311517 (TRBV5-1, TRBJ2-7)
APAADNPGQIPYEQYF

SEQ ID NO: 623035 - protein, 14 aa, Homo sapiens
  CDR3 for alpha chain variable domain of TCR clone 311518 (TRAV27, TRAJ42)
CAGEKVGRQGNLIF

SEQ ID NO: 623036 - protein, 15 aa, Homo sapiens
  CDR3 for beta chain variable domain of TCR clone 311518 (TRBV7-2, TRBJ2-2)
CASSLVAGSAGELFF

SEQ ID NO: 623037 - protein, 14 aa, Homo sapiens
  CDR3 for alpha chain variable domain of TCR clone 311519 (TRAV16, TRAJ44)
CALSTTGTASKLTF

SEQ ID NO: 623038 - protein, 13 aa, Homo sapiens
  CDR3 for beta chain variable domain of TCR clone 311519 (TRBV20-1, TRBJ1-1)
CSARVGGNTEAFF

SEQ ID NO: 623039 - protein, 12 aa, Homo sapiens
  CDR3 for alpha chain variable domain of TCR clone 311520 (TRAV1-1, TRAJ30)
CAVRGRDDKIIF

SEQ ID NO: 623040 - protein, 12 aa, Homo sapiens
  CDR3 for beta chain variable domain of TCR clone 311520 (TRBV5-5, TRBJ2-5)
CASSYFGETQYF

SEQ ID NO: 623041 - protein, 13 aa, Homo sapiens
  CDR3 for alpha chain variable domain of TCR clone 311521 (TRAV27, TRAJ41)
CAGEGNSGYALNF

SEQ ID NO: 623042 - protein, 14 aa, Homo sapiens
  CDR3 for beta chain variable domain of TCR clone 311521 (TRBV7-8, TRBJ2-3)
CASSFKSSTDTQYF

SEQ ID NO: 623043 - protein, 16 aa, Homo sapiens
  CDR3 for alpha chain variable domain of TCR clone 311522 (TRAV12-3, TRAJ53)
CAMNPGSGGSNYKLTF

SEQ ID NO: 623044 - protein, 20 aa, Homo sapiens
  CDR3 for beta chain variable domain of TCR clone 311522 (TRBV7-8, TRBJ2-2)
CASSHLFPGPTIHITGELFF

SEQ ID NO: 623045 - protein, 14 aa, Homo sapiens
  CDR3 for alpha chain variable domain of TCR clone 311523 (TRAV14/DV4, TRAJ9)
CARRESTGGFKTIF

SEQ ID NO: 623046 - protein, 15 aa, Homo sapiens
  CDR3 for beta chain variable domain of TCR clone 311523 (TRBV10-3, TRBJ1-5)
CAISDTGLGGQPQHF

SEQ ID NO: 623047 - protein, 14 aa, Homo sapiens
  CDR3 for alpha chain variable domain of TCR clone 311524 (TRAV13-1, TRAJ10)
CAALFTGEGNKLTF

SEQ ID NO: 623048 - protein, 15 aa, Homo sapiens
  CDR3 for beta chain variable domain of TCR clone 311524 (TRBV10-3, TRBJ2-2)
CAISEGDRAAGELFF

SEQ ID NO: 623049 - protein, 16 aa, Homo sapiens
  CDR3 for alpha chain variable domain of TCR clone 311525 (TRAV17, TRAJ52)
CATGIIGGTSYGKLTY

SEQ ID NO: 623050 - protein, 12 aa, Homo sapiens
  CDR3 for beta chain variable domain of TCR clone 311525 (TRBV7-3, TRBJ2-1)
CASSFINNEQFF

SEQ ID NO: 623051 - protein, 12 aa, Homo sapiens
  CDR3 for alpha chain variable domain of TCR clone 311526 (TRAV2, TRAJ9)
CAVVAGGFKTIL

SEQ ID NO: 623052 - protein, 16 aa, Homo sapiens
  CDR3 for beta chain variable domain of TCR clone 311526 (TRBV13, TRBJ2-2)
CASSPRTGEHTGELFF

SEQ ID NO: 623053 - protein, 13 aa, Homo sapiens
  CDR3 for alpha chain variable domain of TCR clone 311527 (TRAV8-3, TRAJ28)
CAVGAVGSYQLTF

SEQ ID NO: 623054 - protein, 13 aa, Homo sapiens
  CDR3 for beta chain variable domain of TCR clone 311527 (TRBV2, TRBJ1-1)
CASSVLMNTEAFF

SEQ ID NO: 623055 - protein, 15 aa, Homo sapiens
  CDR3 for alpha chain variable domain of TCR clone 311528 (TRAV17, TRAJ56)
CATEPLTGANSKLTF

SEQ ID NO: 623056 - protein, 15 aa, Homo sapiens
  CDR3 for beta chain variable domain of TCR clone 311528 (TRBV28, TRBJ1-5)
CASSRTGGYVQPQHF

SEQ ID NO: 623057 - protein, 12 aa, Homo sapiens
  CDR3 for alpha chain variable domain of TCR clone 311529 (TRAV13-2, TRAJ23)
CVERHRGGKLIF

SEQ ID NO: 623058 - protein, 12 aa, Homo sapiens
  CDR3 for beta chain variable domain of TCR clone 311529 (TRBV29-1, TRBJ2-3)
CSVTGGADTQYF

SEQ ID NO: 623059 - protein, 14 aa, Homo sapiens
  CDR3 for alpha chain variable domain of TCR clone 311530 (TRAV1-2, TRAJ16)
CAVRGFSDGQKLLF

SEQ ID NO: 623060 - protein, 15 aa, Homo sapiens
  CDR3 for beta chain variable domain of TCR clone 311530 (TRBV18, TRBJ2-3)
CASSPLAGETDTQYF

SEQ ID NO: 623061 - protein, 10 aa, Homo sapiens
  CDR3 for alpha chain variable domain of TCR clone 311531 (TRAV12-3, TRAJ49)
CAMNDDQFYF

SEQ ID NO: 623062 - protein, 12 aa, Homo sapiens
  CDR3 for beta chain variable domain of TCR clone 311531 (TRBV25-1, TRBJ1-1)
CASRHMNTEAFF

SEQ ID NO: 623063 - protein, 13 aa, Homo sapiens
  CDR3 for alpha chain variable domain of TCR clone 311532 (TRAV1-1, TRAJ9)
CAAKNTGGFNTIF

SEQ ID NO: 623064 - protein, 14 aa, Homo sapiens
  CDR3 for beta chain variable domain of TCR clone 311532 (TRBV12-5, TRBJ2-5)
CASGSRTHQETQYF

SEQ ID NO: 623065 - protein, 14 aa, Homo sapiens
  CDR3 for alpha chain variable domain of TCR clone 311533 (TRAV38-1, TRAJ40)
CALRPTSGTYKYIF

SEQ ID NO: 623066 - protein, 15 aa, Homo sapiens
  CDR3 for beta chain variable domain of TCR clone 311533 (TRBV24-1, TRBJ2-1)
CATSGSGGSYNEQFF

SEQ ID NO: 623067 - protein, 11 aa, Homo sapiens
  CDR3 for alpha chain variable domain of TCR clone 311534 (TRAV23/DV6, TRAJ17)
CKWAAGNKLTF

SEQ ID NO: 623068 - protein, 14 aa, Homo sapiens
  CDR3 for beta chain variable domain of TCR clone 311534 (TRBV6-1, TRBJ2-7)
CASSGGAYLYEQYF

SEQ ID NO: 623069 - protein, 20 aa, Homo sapiens
  CDR3 for alpha chain variable domain of TCR clone 311535 (TRAV8-3, TRAJ44)
LSTSVLWVRLYTGTASKLPF

SEQ ID NO: 623070 - protein, 14 aa, Homo sapiens
  CDR3 for beta chain variable domain of TCR clone 311535 (TRBV7-6, TRBJ2-3)
CASSLGTVTDTQYF

SEQ ID NO: 623071 - protein, 14 aa, Homo sapiens
  CDR3 for alpha chain variable domain of TCR clone 311536 (TRAV8-6, TRAJ49)
CAVSVRYTGNQFYF

SEQ ID NO: 623072 - protein, 19 aa, Homo sapiens
  CDR3 for beta chain variable domain of TCR clone 311536 (TRBV28, TRBJ2-1)
CASSFFIRGSGRTRYEQFF

SEQ ID NO: 623073 - protein, 14 aa, Homo sapiens
  CDR3 for alpha chain variable domain of TCR clone 311537 (TRAV21, TRAJ32)
CCGDYGGATNSLIF

SEQ ID NO: 623074 - protein, 13 aa, Homo sapiens
  CDR3 for beta chain variable domain of TCR clone 311537 (TRBV2, TRBJ1-6)
CASGRGGISPLHF

SEQ ID NO: 623075 - protein, 13 aa, Homo sapiens
  CDR3 for alpha chain variable domain of TCR clone 311538 (TRAV8-6, TRAJ49)
CAVITSTGNQFYF

SEQ ID NO: 623076 - protein, 12 aa, Homo sapiens
  CDR3 for beta chain variable domain of TCR clone 311538 (TRBV11-2, TRBJ2-2)
CASSLGGGELFF

SEQ ID NO: 623077 - protein, 15 aa, Homo sapiens
  CDR3 for alpha chain variable domain of TCR clone 311539 (TRAV35, TRAJ23)
CAGQRGYNQGGQPIF

SEQ ID NO: 623078 - protein, 16 aa, Homo sapiens
  CDR3 for beta chain variable domain of TCR clone 311539 (TRBV27, TRBJ2-1)
CASSSRLAGNYNEQFF

SEQ ID NO: 623079 - protein, 18 aa, Homo sapiens
  CDR3 for alpha chain variable domain of TCR clone 311540 (TRAV17, TRAJ45)
CATYLDLYSGGGADGLTF

SEQ ID NO: 623080 - protein, 15 aa, Homo sapiens
  CDR3 for beta chain variable domain of TCR clone 311540 (TRBV11-2, TRBJ2-1)
CASSKNRGLIYEQFF

SEQ ID NO: 623081 - protein, 14 aa, Homo sapiens
  CDR3 for alpha chain variable domain of TCR clone 311541 (TRAV12-1, TRAJ38)
CVVNNAGNNRMLIW

SEQ ID NO: 623082 - protein, 15 aa, Homo sapiens
  CDR3 for beta chain variable domain of TCR clone 311541 (TRBV28, TRBJ2-1)
CASSIIAGGRSEQFF

SEQ ID NO: 623083 - protein, 14 aa, Homo sapiens
  CDR3 for alpha chain variable domain of TCR clone 311542 (TRAV12-1, TRAJ22)
CVVTTSGSARQLTF

SEQ ID NO: 623084 - protein, 14 aa, Homo sapiens
  CDR3 for beta chain variable domain of TCR clone 311542 (TRBV7-2, TRBJ1-1)
CASSFLTGTTEAFF

SEQ ID NO: 623085 - protein, 15 aa, Homo sapiens
  CDR3 for alpha chain variable domain of TCR clone 311543 (TRAV2, TRAJ15)
CAVEDRGQAGTALIF

SEQ ID NO: 623086 - protein, 13 aa, Homo sapiens
  CDR3 for beta chain variable domain of TCR clone 311543 (TRBV12-4, TRBJ2-5)
CASSVGGSRTQYF

SEQ ID NO: 623087 - protein, 11 aa, Homo sapiens
  CDR3 for alpha chain variable domain of TCR clone 311544 (TRAV17, TRAJ9)
CGFTGGFKTIF

SEQ ID NO: 623088 - protein, 13 aa, Homo sapiens
  CDR3 for beta chain variable domain of TCR clone 311544 (TRBV7-3, TRBJ2-1)
CASSLDSYNEQFF

SEQ ID NO: 623089 - protein, 15 aa, Homo sapiens
  CDR3 for alpha chain variable domain of TCR clone 311545 (TRAV29/DV5, TRAJ57)
CAASLLRGGSEKLGF

SEQ ID NO: 623090 - protein, 15 aa, Homo sapiens
  CDR3 for beta chain variable domain of TCR clone 311545 (TRBV5-1, TRBJ1-3)
CASSLEGGSGNTIYF

SEQ ID NO: 623091 - protein, 12 aa, Homo sapiens
  CDR3 for alpha chain variable domain of TCR clone 311546 (TRAV12-2, TRAJ10)
WGVTGGGNKITF

SEQ ID NO: 623092 - protein, 14 aa, Homo sapiens
  CDR3 for beta chain variable domain of TCR clone 311546 (TRBV27, TRBJ2-7)
CASATGTGRREQYF

SEQ ID NO: 623093 - protein, 16 aa, Homo sapiens
  CDR3 for alpha chain variable domain of TCR clone 311547 (TRAV1-1, TRAJ29)
CDVRSTRNSGNTPLVF

SEQ ID NO: 623094 - protein, 15 aa, Homo sapiens
  CDR3 for beta chain variable domain of TCR clone 311547 (TRBV5-1, TRBJ2-7)
CASSLDLTSSYEQYF

SEQ ID NO: 623095 - protein, 12 aa, Homo sapiens
  CDR3 for alpha chain variable domain of TCR clone 311548 (TRAV12-3, TRAJ17)
CAMTLKGNKLTF

SEQ ID NO: 623096 - protein, 15 aa, Homo sapiens
  CDR3 for beta chain variable domain of TCR clone 311548 (TRBV29-1, TRBJ2-6)
CSFTGGRSGANVLTF

SEQ ID NO: 623097 - protein, 15 aa, Homo sapiens
  CDR3 for alpha chain variable domain of TCR clone 311549 (TRAV3, TRAJ7)
CAVRDKDNGNNRLAF

SEQ ID NO: 623098 - protein, 19 aa, Homo sapiens
  CDR3 for beta chain variable domain of TCR clone 311549 (TRBV5-8, TRBJ2-3)
CAISFLGTSGSHRTDTQYF

SEQ ID NO: 623099 - protein, 12 aa, Homo sapiens
  CDR3 for alpha chain variable domain of TCR clone 311550 (TRAV25, TRAJ35)
CAGIGCGNVLHC

SEQ ID NO: 623100 - protein, 12 aa, Homo sapiens
  CDR3 for beta chain variable domain of TCR clone 311550 (TRBV6-3, TRBJ2-7)
CASSRQGYEQYF

SEQ ID NO: 623101 - protein, 15 aa, Homo sapiens
  CDR3 for alpha chain variable domain of TCR clone 311551 (TRAV35, TRAJ23)
CAGPLGNNQGGKLIF

SEQ ID NO: 623102 - protein, 17 aa, Homo sapiens
  CDR3 for beta chain variable domain of TCR clone 311551 (TRBV13, TRBJ2-3)
CASSLSRVAGGRNTQYF

SEQ ID NO: 623103 - protein, 14 aa, Homo sapiens
  CDR3 for alpha chain variable domain of TCR clone 311552 (TRAV13-1, TRAJ35)
CAASKGGFGNVLNC

SEQ ID NO: 623104 - protein, 13 aa, Homo sapiens
  CDR3 for beta chain variable domain of TCR clone 311552 (TRBV7-3, TRBJ1-1)
CASSQDWGADAFF

SEQ ID NO: 623105 - protein, 11 aa, Homo sapiens
  CDR3 for alpha chain variable domain of TCR clone 311553 (TRAV2, TRAJ21)
CAVFNFNKFYF

SEQ ID NO: 623106 - protein, 14 aa, Homo sapiens
  CDR3 for beta chain variable domain of TCR clone 311553 (TRBV15, TRBJ2-3)
CATRSGASTDTQYF

SEQ ID NO: 623107 - protein, 15 aa, Homo sapiens
  CDR3 for alpha chain variable domain of TCR clone 311554 (TRAV27, TRAJ38)
CAGRFNAGNNRKLIW

SEQ ID NO: 623108 - protein, 15 aa, Homo sapiens
  CDR3 for beta chain variable domain of TCR clone 311554 (TRBV11-2, TRBJ2-2)
CASSSDRVNAGELFF

SEQ ID NO: 623109 - protein, 15 aa, Homo sapiens
  CDR3 for alpha chain variable domain of TCR clone 311555 (TRAV4, TRAJ39)
CLVGPTNSAGNMLTF

SEQ ID NO: 623110 - protein, 16 aa, Homo sapiens
  CDR3 for beta chain variable domain of TCR clone 311555 (TRBV27, TRBJ2-2)
CASSFRGLVRTGELFF

SEQ ID NO: 623111 - protein, 12 aa, Homo sapiens
  CDR3 for alpha chain variable domain of TCR clone 311556 (TRAV13-2, TRAJ23)
CAERHRGGKLIF

SEQ ID NO: 623112 - protein, 18 aa, Homo sapiens
  CDR3 for beta chain variable domain of TCR clone 311556 (TRBV11-2, TRBJ1-1)
CASSLRQGGNTRKLSLDK

SEQ ID NO: 623113 - protein, 11 aa, Homo sapiens
  CDR3 for alpha chain variable domain of TCR clone 311557 (TRAV2, TRAJ13)
CASGGYQKVTF

SEQ ID NO: 623114 - protein, 14 aa, Homo sapiens
  CDR3 for beta chain variable domain of TCR clone 311557 (TRBV19, TRBJ2-2)
SRSPGTGATGELFF

SEQ ID NO: 623115 - protein, 16 aa, Homo sapiens
  CDR3 for alpha chain variable domain of TCR clone 311558 (TRAV30, TRAJ24)
CGPEIVDADSWGKFQF

SEQ ID NO: 623116 - protein, 17 aa, Homo sapiens
  CDR3 for beta chain variable domain of TCR clone 311558 (TRBV20-1, TRBJ2-2)
CSASGSGQGGLTGELFF

SEQ ID NO: 623117 - protein, 12 aa, Homo sapiens
  CDR3 for alpha chain variable domain of TCR clone 311559 (TRAV8-3, TRAJ20)
CAVGANDYKLSF

SEQ ID NO: 623118 - protein, 16 aa, Homo sapiens
  CDR3 for beta chain variable domain of TCR clone 311559 (TRBV19, TRBJ2-2)
CESRSPGTGATGELFF

SEQ ID NO: 623119 - protein, 15 aa, Homo sapiens
  CDR3 for alpha chain variable domain of TCR clone 311560 (TRAV12-1, TRAJ42)
CVVTRDGGSQGNLIF

SEQ ID NO: 623120 - protein, 17 aa, Homo sapiens
  CDR3 for beta chain variable domain of TCR clone 311560 (TRBV11-2, TRBJ2-6)
CASSQRDIFSGANVLTF

SEQ ID NO: 623121 - protein, 14 aa, Homo sapiens
  CDR3 for alpha chain variable domain of TCR clone 311561 (TRAV12-2, TRAJ13)
CAVKRTGGYQKDTF

SEQ ID NO: 623122 - protein, 15 aa, Homo sapiens
  CDR3 for beta chain variable domain of TCR clone 311561 (TRBV27, TRBJ2-1)
CASSNGGGSSNEQFF

SEQ ID NO: 623123 - protein, 18 aa, Homo sapiens
  CDR3 for alpha chain variable domain of TCR clone 311562 (TRAV26-1, TRAJ52)
CIVRVEGAGGTSYGKLTF

SEQ ID NO: 623124 - protein, 14 aa, Homo sapiens
  CDR3 for beta chain variable domain of TCR clone 311562 (TRBV7-6, TRBJ2-3)
CASSLGTVTDTQYF

SEQ ID NO: 623125 - protein, 13 aa, Homo sapiens
  CDR3 for alpha chain variable domain of TCR clone 311563 (TRAV12-2, TRAJ39)
CAVNNNAGNMITF

SEQ ID NO: 623126 - protein, 13 aa, Homo sapiens
  CDR3 for beta chain variable domain of TCR clone 311563 (TRBV2, TRBJ1-5)
CATAGPGNQPQHC

SEQ ID NO: 623127 - protein, 14 aa, Homo sapiens
  CDR3 for alpha chain variable domain of TCR clone 311564 (TRAV22, TRAJ6)
CAGVGPGGSYIPTF

SEQ ID NO: 623128 - protein, 14 aa, Homo sapiens
  CDR3 for beta chain variable domain of TCR clone 311564 (TRBV19, TRBJ2-7)
CASSMGQGAIEQYF

SEQ ID NO: 623129 - protein, 13 aa, Homo sapiens
  CDR3 for alpha chain variable domain of TCR clone 311565 (TRAV2, TRAJ21)
CAVEDLNFNKFYF

SEQ ID NO: 623130 - protein, 14 aa, Homo sapiens
  CDR3 for beta chain variable domain of TCR clone 311565 (TRBV11-2, TRBJ2-3)
CASSRLARTDTQYF

SEQ ID NO: 623131 - protein, 12 aa, Homo sapiens
  CDR3 for alpha chain variable domain of TCR clone 311566 (TRAV1-2, TRAJ33)
CAALDSNYQLIW

SEQ ID NO: 623132 - protein, 14 aa, Homo sapiens
  CDR3 for beta chain variable domain of TCR clone 311566 (TRBV6-1, TRBJ2-2)
CASSGQGRAGELFF

SEQ ID NO: 623133 - protein, 14 aa, Homo sapiens
  CDR3 for alpha chain variable domain of TCR clone 311567 (TRAV13-1, TRAJ44)
CVAKATGTASKLTF

SEQ ID NO: 623134 - protein, 17 aa, Homo sapiens
  CDR3 for beta chain variable domain of TCR clone 311567 (TRBV7-3, TRBJ2-3)
RASSLMKRMRGADTQYF

SEQ ID NO: 623135 - protein, 11 aa, Homo sapiens
  CDR3 for alpha chain variable domain of TCR clone 311568 (TRAV27, TRAJ20)
CAGADDYKLSF

SEQ ID NO: 623136 - protein, 14 aa, Homo sapiens
  CDR3 for beta chain variable domain of TCR clone 311568 (TRBV19, TRBJ2-1)
CASPTFVLSGEQFF

SEQ ID NO: 623137 - protein, 15 aa, Homo sapiens
  CDR3 for alpha chain variable domain of TCR clone 311569 (TRAV3, TRAJ36)
CAVRASQTVANNLFF

SEQ ID NO: 623138 - protein, 13 aa, Homo sapiens
  CDR3 for beta chain variable domain of TCR clone 311569 (TRBV10-3, TRBJ1-2)
CAISERDSYGYTF

SEQ ID NO: 623139 - protein, 10 aa, Homo sapiens
  CDR3 for alpha chain variable domain of TCR clone 311570 (TRAV12-1, TRAJ20)
CVVNPRKLSS

SEQ ID NO: 623140 - protein, 15 aa, Homo sapiens
  CDR3 for beta chain variable domain of TCR clone 311570 (TRBV5-1, TRBJ2-1)
CASSPPRAPYNEQFF

SEQ ID NO: 623141 - protein, 15 aa, Homo sapiens
  CDR3 for alpha chain variable domain of TCR clone 311571 (TRAV21, TRAJ40)
CAMRPQTSGTYKYVF

SEQ ID NO: 623142 - protein, 13 aa, Homo sapiens
  CDR3 for beta chain variable domain of TCR clone 311571 (TRBV7-2, TRBJ2-2)
CASSSVRAGELFF

SEQ ID NO: 623143 - protein, 14 aa, Homo sapiens
  CDR3 for alpha chain variable domain of TCR clone 311572 (TRAV9-2, TRAJ39)
CALYIYNAGNMRTF

SEQ ID NO: 623144 - protein, 17 aa, Homo sapiens
  CDR3 for beta chain variable domain of TCR clone 311572 (TRBV9, TRBJ2-3)
CASRSTAGGPSTDTQYF

SEQ ID NO: 623145 - protein, 15 aa, Homo sapiens
  CDR3 for alpha chain variable domain of TCR clone 311573 (TRAV3, TRAJ17)
CAVRDTGAAGNKLTF

SEQ ID NO: 623146 - protein, 14 aa, Homo sapiens
  CDR3 for beta chain variable domain of TCR clone 311573 (TRBV25-1, TRBJ1-1)
CASTHLGGNTEAFF

SEQ ID NO: 623147 - protein, 14 aa, Homo sapiens
  CDR3 for alpha chain variable domain of TCR clone 311574 (TRAV12-2, TRAJ24)
CAVTPADSWGKLQF

SEQ ID NO: 623148 - protein, 13 aa, Homo sapiens
  CDR3 for beta chain variable domain of TCR clone 311574 (TRBV19, TRBJ1-5)
CASSMRGYQPQHF

SEQ ID NO: 623149 - protein, 14 aa, Homo sapiens
  CDR3 for alpha chain variable domain of TCR clone 311575 (TRAV17, TRAJ16)
CATADFSGGQKLRF

SEQ ID NO: 623150 - protein, 14 aa, Homo sapiens
  CDR3 for beta chain variable domain of TCR clone 311575 (TRBV25-1, TRBJ1-1)
CASTHLGGNTEAFF

SEQ ID NO: 623151 - protein, 16 aa, Homo sapiens
  CDR3 for alpha chain variable domain of TCR clone 311576 (TRAV30, TRAJ24)
CGTEIVDADSWGKFQF

SEQ ID NO: 623152 - protein, 18 aa, Homo sapiens
  CDR3 for beta chain variable domain of TCR clone 311576 (TRBV7-9, TRBJ2-7)
CASSLTTSWSRTWYEQYF

SEQ ID NO: 623153 - protein, 17 aa, Homo sapiens
  CDR3 for alpha chain variable domain of TCR clone 311577 (TRAV26-1, TRAJ53)
CIVRVDDSGGSNYKLAF

SEQ ID NO: 623154 - protein, 15 aa, Homo sapiens
  CDR3 for beta chain variable domain of TCR clone 311577 (TRBV20-1, TRBJ2-7)
CSARVPAAYFYEQYI

SEQ ID NO: 623155 - protein, 15 aa, Homo sapiens
  CDR3 for alpha chain variable domain of TCR clone 311578 (TRAV3, TRAJ20)
CAVRDIKLSDYKLSF

SEQ ID NO: 623156 - protein, 15 aa, Homo sapiens
  CDR3 for beta chain variable domain of TCR clone 311578 (TRBV7-9, TRBJ1-6)
CDSSSPGRGNSPLHF

SEQ ID NO: 623157 - protein, 14 aa, Homo sapiens
  CDR3 for alpha chain variable domain of TCR clone 311579 (TRAV1-2, TRAJ8)
CAVREDTGFQKLVF

SEQ ID NO: 623158 - protein, 15 aa, Homo sapiens
  CDR3 for beta chain variable domain of TCR clone 311579 (TRBV6-1, TRBJ2-4)
CASSEAVWTINIQYF

SEQ ID NO: 623159 - protein, 14 aa, Homo sapiens
  CDR3 for alpha chain variable domain of TCR clone 311580 (TRAV1-2, TRAJ16)
CDVNRFSDDQKLLF

SEQ ID NO: 623160 - protein, 11 aa, Homo sapiens
  CDR3 for beta chain variable domain of TCR clone 311580 (TRBV7-8, TRBJ2-7)
CASSLSLEQYF

SEQ ID NO: 623161 - protein, 16 aa, Homo sapiens
  CDR3 for alpha chain variable domain of TCR clone 311581 (TRAV30, TRAJ24)
CGMEIVDADSWGKFQF

SEQ ID NO: 623162 - protein, 16 aa, Homo sapiens
  CDR3 for beta chain variable domain of TCR clone 311581 (TRBV20-1, TRBJ1-1)
CSARALTQGMNTEAFF

SEQ ID NO: 623163 - protein, 13 aa, Homo sapiens
  CDR3 for alpha chain variable domain of TCR clone 311582 (TRAV13-2, TRAJ48)
CAEMDFGNEKLTF

SEQ ID NO: 623164 - protein, 15 aa, Homo sapiens
  CDR3 for beta chain variable domain of TCR clone 311582 (TRBV28, TRBJ2-1)
CASSGLAEVDNEQFF

SEQ ID NO: 623165 - protein, 14 aa, Homo sapiens
  CDR3 for alpha chain variable domain of TCR clone 311583 (TRAV1-2, TRAJ16)
CAVNRVSDGQKLLF

SEQ ID NO: 623166 - protein, 14 aa, Homo sapiens
  CDR3 for beta chain variable domain of TCR clone 311583 (TRBV11-1, TRBJ2-7)
CASSFRQGSYEQYF

SEQ ID NO: 623167 - protein, 11 aa, Homo sapiens
  CDR3 for alpha chain variable domain of TCR clone 311584 (TRAV35, TRAJ52)
CAGFFMEKLTF

SEQ ID NO: 623168 - protein, 18 aa, Homo sapiens
  CDR3 for beta chain variable domain of TCR clone 311584 (TRBV30, TRBJ2-3)
CAWPGTRGMVRSTDTQYF

SEQ ID NO: 623169 - protein, 10 aa, Homo sapiens
  CDR3 for alpha chain variable domain of TCR clone 311585 (TRAV23/DV6, TRAJ57)
CAASSTLSQG

SEQ ID NO: 623170 - protein, 12 aa, Homo sapiens
  CDR3 for beta chain variable domain of TCR clone 311585 (TRBV19, TRBJ2-1)
YASSQISNEQFF

SEQ ID NO: 623171 - protein, 17 aa, Homo sapiens
  CDR3 for alpha chain variable domain of TCR clone 311586 (TRAV3, TRAJ6)
CAVRDGPRAVVSYIPTF

SEQ ID NO: 623172 - protein, 14 aa, Homo sapiens
  CDR3 for beta chain variable domain of TCR clone 311586 (TRBV7-2, TRBJ2-7)
CASSPKTSFYEQYF

SEQ ID NO: 623173 - protein, 14 aa, Homo sapiens
  CDR3 for alpha chain variable domain of TCR clone 311587 (TRAV12-2, TRAJ13)
CAVKKTGGYQKVTF

SEQ ID NO: 623174 - protein, 15 aa, Homo sapiens
  CDR3 for beta chain variable domain of TCR clone 311587 (TRBV7-3, TRBJ2-1)
CASSPTGGGEVEQFC

SEQ ID NO: 623175 - protein, 14 aa, Homo sapiens
  CDR3 for alpha chain variable domain of TCR clone 311588 (TRAV25, TRAJ9)
CAGPGNTGGFKTIF

SEQ ID NO: 623176 - protein, 15 aa, Homo sapiens
  CDR3 for beta chain variable domain of TCR clone 311588 (TRBV11-2, TRBJ2-1)
CASSPAGQSLNEQFF

SEQ ID NO: 623177 - protein, 13 aa, Homo sapiens
  CDR3 for alpha chain variable domain of TCR clone 311589 (TRAV8-2, TRAJ43)
CVVSDQGDNDMRF

SEQ ID NO: 623178 - protein, 15 aa, Homo sapiens
  CDR3 for beta chain variable domain of TCR clone 311589 (TRBV28, TRBJ2-1)
CASSIIAGGRSEQFF

SEQ ID NO: 623179 - protein, 17 aa, Homo sapiens
  CDR3 for alpha chain variable domain of TCR clone 311590 (TRAV26-1, TRAJ58)
CIVRVGAEETSGSRLTF

SEQ ID NO: 623180 - protein, 13 aa, Homo sapiens
  CDR3 for beta chain variable domain of TCR clone 311590 (TRBV12-5, TRBJ1-2)
CASGVRTRNGYTF

SEQ ID NO: 623181 - protein, 13 aa, Homo sapiens
  CDR3 for alpha chain variable domain of TCR clone 311591 (TRAV8-2, TRAJ36)
CVVSHLPTNHLFF

SEQ ID NO: 623182 - protein, 18 aa, Homo sapiens
  CDR3 for beta chain variable domain of TCR clone 311591 (TRBV7-9, TRBJ2-6)
CASSFPGAGMSGANVLTF

SEQ ID NO: 623183 - protein, 14 aa, Homo sapiens
  CDR3 for alpha chain variable domain of TCR clone 311592 (TRAV26-1, TRAJ39)
CIVRGLRAGNMLTF

SEQ ID NO: 623184 - protein, 14 aa, Homo sapiens
  CDR3 for beta chain variable domain of TCR clone 311592 (TRBV25-1, TRBJ1-1)
CASTHLGGNTEAFF

SEQ ID NO: 623185 - protein, 14 aa, Homo sapiens
  CDR3 for alpha chain variable domain of TCR clone 311593 (TRAV12-2, TRAJ13)
CAVKKTGGYQKVTF

SEQ ID NO: 623186 - protein, 15 aa, Homo sapiens
  CDR3 for beta chain variable domain of TCR clone 311593 (TRBV5-1, TRBJ2-1)
CANSPPRAPYNEQFF

SEQ ID NO: 623187 - protein, 14 aa, Homo sapiens
  CDR3 for alpha chain variable domain of TCR clone 311594 (TRAV35, TRAJ22)
CAGLRPGSARQLTF

SEQ ID NO: 623188 - protein, 19 aa, Homo sapiens
  CDR3 for beta chain variable domain of TCR clone 311594 (TRBV25-1, TRBJ2-2)
CAILVYRVDRGRKTGELFF

SEQ ID NO: 623189 - protein, 14 aa, Homo sapiens
  CDR3 for alpha chain variable domain of TCR clone 311595 (TRAV9-2, TRAJ39)
CALYIYNAGNMLTF

SEQ ID NO: 623190 - protein, 14 aa, Homo sapiens
  CDR3 for beta chain variable domain of TCR clone 311595 (TRBV5-1, TRBJ1-1)
CASSLQGASTEAFF

SEQ ID NO: 623191 - protein, 15 aa, Homo sapiens
  CDR3 for alpha chain variable domain of TCR clone 311596 (TRAV8-3, TRAJ11)
CAVGLLNSGYSTLTF

SEQ ID NO: 623192 - protein, 15 aa, Homo sapiens
  CDR3 for beta chain variable domain of TCR clone 311596 (TRBV7-3, TRBJ2-1)
CASSPTGGGEGEQFF

SEQ ID NO: 623193 - protein, 14 aa, Homo sapiens
  CDR3 for alpha chain variable domain of TCR clone 311597 (TRAV12-3, TRAJ6)
CAMSATGASYIPTF

SEQ ID NO: 623194 - protein, 16 aa, Homo sapiens
  CDR3 for beta chain variable domain of TCR clone 311597 (TRBV4-2, TRBJ2-1)
CASSPRAGQGANEQFF

SEQ ID NO: 623195 - protein, 13 aa, Homo sapiens
  CDR3 for alpha chain variable domain of TCR clone 311598 (TRAV2, TRAJ40)
CAVVTSGTYKYIL

SEQ ID NO: 623196 - protein, 17 aa, Homo sapiens
  CDR3 for beta chain variable domain of TCR clone 311598 (TRBV7-3, TRBJ2-3)
CASSLMKRMRGADTQYF

SEQ ID NO: 623197 - protein, 13 aa, Homo sapiens
  CDR3 for alpha chain variable domain of TCR clone 311599 (TRAV8-4, TRAJ30)
CAVSVNRDDKIIF

SEQ ID NO: 623198 - protein, 13 aa, Homo sapiens
  CDR3 for beta chain variable domain of TCR clone 311599 (TRBV3-1, TRBJ2-2)
CASLARGSVELFF

SEQ ID NO: 623199 - protein, 16 aa, Homo sapiens
  CDR3 for alpha chain variable domain of TCR clone 311600 (TRAV3, TRAJ3)
CAVRDRAKSSASKIIF

SEQ ID NO: 623200 - protein, 13 aa, Homo sapiens
  CDR3 for beta chain variable domain of TCR clone 311600 (TRBV7-2, TRBJ1-5)
CASTPTVNQPQHF

SEQ ID NO: 623201 - protein, 11 aa, Homo sapiens
  CDR3 for alpha chain variable domain of TCR clone 311601 (TRAV27, TRAJ37)
CAGTQGGKLIF

SEQ ID NO: 623202 - protein, 12 aa, Homo sapiens
  CDR3 for beta chain variable domain of TCR clone 311601 (TRBV28, TRBJ2-6)
CAIQAGTNVLTF

SEQ ID NO: 623203 - protein, 17 aa, Homo sapiens
  CDR3 for alpha chain variable domain of TCR clone 311602 (TRAV8-3, TRAJ44)
CAVGARAALPVNSPLGL

SEQ ID NO: 623204 - protein, 15 aa, Homo sapiens
  CDR3 for beta chain variable domain of TCR clone 311602 (TRBV11-2, TRBJ2-2)
CASSLLAGGAGELFF

SEQ ID NO: 623205 - protein, 18 aa, Homo sapiens
  CDR3 for alpha chain variable domain of TCR clone 311603 (TRAV1-1, TRAJ42)
CAVSPSAFYGGSQGNLIF

SEQ ID NO: 623206 - protein, 14 aa, Homo sapiens
  CDR3 for beta chain variable domain of TCR clone 311603 (TRBV6-3, TRBJ2-7)
CASSYATGGDEQYF

SEQ ID NO: 623207 - protein, 12 aa, Homo sapiens
  CDR3 for alpha chain variable domain of TCR clone 311604 (TRAV12-3, TRAJ40)
CNERLGTYKYIF

SEQ ID NO: 623208 - protein, 22 aa, Homo sapiens
  CDR3 for beta chain variable domain of TCR clone 311604 (TRBV14, TRBJ1-5)
CASSQDGVTPYLPPIGNQPQHF

SEQ ID NO: 623209 - protein, 13 aa, Homo sapiens
  CDR3 for alpha chain variable domain of TCR clone 311605 (TRAV13-1, TRAJ54)
CAARIQGAQKLVF

SEQ ID NO: 623210 - protein, 14 aa, Homo sapiens
  CDR3 for beta chain variable domain of TCR clone 311605 (TRBV7-8, TRBJ2-3)
CASSLEAGTDTQYF

SEQ ID NO: 623211 - protein, 10 aa, Homo sapiens
  CDR3 for alpha chain variable domain of TCR clone 311606 (TRAV12-1, TRAJ43)
CVVHNNDMRF

SEQ ID NO: 623212 - protein, 15 aa, Homo sapiens
  CDR3 for beta chain variable domain of TCR clone 311606 (TRBV28, TRBJ1-3)
CASSMGWASGNTIYF

SEQ ID NO: 623213 - protein, 15 aa, Homo sapiens
  CDR3 for alpha chain variable domain of TCR clone 311607 (TRAV9-2, TRAJ10)
CALSDLGGGGNKLTF

SEQ ID NO: 623214 - protein, 17 aa, Homo sapiens
  CDR3 for beta chain variable domain of TCR clone 311607 (TRBV13, TRBJ2-3)
CASSLSRVAGGRNTQYF

SEQ ID NO: 623215 - protein, 15 aa, Homo sapiens
  CDR3 for alpha chain variable domain of TCR clone 311608 (TRAV8-4, TRAJ47)
CAVSEPEEYGKKLVF

SEQ ID NO: 623216 - protein, 15 aa, Homo sapiens
  CDR3 for beta chain variable domain of TCR clone 311608 (TRBV11-2, TRBJ2-1)
CASSLGPDSYNEQFF

SEQ ID NO: 623217 - protein, 12 aa, Homo sapiens
  CDR3 for alpha chain variable domain of TCR clone 311609 (TRAV1-1, TRAJ23)
CAVTDQGGKLIF

SEQ ID NO: 623218 - protein, 15 aa, Homo sapiens
  CDR3 for beta chain variable domain of TCR clone 311609 (TRBV27, TRBJ2-1)
CASSNGGGSSNEQFF

SEQ ID NO: 623219 - protein, 14 aa, Homo sapiens
  CDR3 for alpha chain variable domain of TCR clone 311610 (TRAV1-2, TRAJ16)
CAVNRFSDGQKLLF

SEQ ID NO: 623220 - protein, 17 aa, Homo sapiens
  CDR3 for beta chain variable domain of TCR clone 311610 (TRBV19, TRBJ2-6)
CASSTGQVFSGANDLTF

SEQ ID NO: 623221 - protein, 13 aa, Homo sapiens
  CDR3 for alpha chain variable domain of TCR clone 311611 (TRAV16, TRAJ9)
CALSNTGGFKTIF

SEQ ID NO: 623222 - protein, 16 aa, Homo sapiens
  CDR3 for beta chain variable domain of TCR clone 311611 (TRBV28, TRBJ2-7)
CASSPWAATGDLSQYF

SEQ ID NO: 623223 - protein, 12 aa, Homo sapiens
  CDR3 for alpha chain variable domain of TCR clone 311612 (TRAV21, TRAJ33)
CANMDSNYQLIW

SEQ ID NO: 623224 - protein, 18 aa, Homo sapiens
  CDR3 for beta chain variable domain of TCR clone 311612 (TRBV15, TRBJ2-3)
CATSRDGARSWDTDTQHF

SEQ ID NO: 623225 - protein, 14 aa, Homo sapiens
  CDR3 for alpha chain variable domain of TCR clone 311613 (TRAV12-2, TRAJ17)
CAVLFKAAGNTLTF

SEQ ID NO: 623226 - protein, 14 aa, Homo sapiens
  CDR3 for beta chain variable domain of TCR clone 311613 (TRBV7-8, TRBJ2-5)
CASSATGGQETQYF

SEQ ID NO: 623227 - protein, 15 aa, Homo sapiens
  CDR3 for alpha chain variable domain of TCR clone 311614 (TRAV8-3, TRAJ45)
CASSYSGGVADGLTF

SEQ ID NO: 623228 - protein, 13 aa, Homo sapiens
  CDR3 for beta chain variable domain of TCR clone 311614 (TRBV10-3, TRBJ2-7)
CASKLAVNYEQYY

SEQ ID NO: 623229 - protein, 15 aa, Homo sapiens
  CDR3 for alpha chain variable domain of TCR clone 311615 (TRAV12-1, TRAJ44)
CVVDTPQGTASKLTF

SEQ ID NO: 623230 - protein, 14 aa, Homo sapiens
  CDR3 for beta chain variable domain of TCR clone 311615 (TRBV7-9, TRBJ2-1)
CASSPRDSVYEQFF

SEQ ID NO: 623231 - protein, 14 aa, Homo sapiens
  CDR3 for alpha chain variable domain of TCR clone 311616 (TRAV1-2, TRAJ16)
CAVNRFSDGQKRLF

SEQ ID NO: 623232 - protein, 15 aa, Homo sapiens
  CDR3 for beta chain variable domain of TCR clone 311616 (TRBV7-9, TRBJ1-6)
CASSSPGRGNSPLHF

SEQ ID NO: 623233 - protein, 15 aa, Homo sapiens
  CDR3 for alpha chain variable domain of TCR clone 311617 (TRAV8-3, TRAJ6)
CAVGPLGGGSYIPTF

SEQ ID NO: 623234 - protein, 14 aa, Homo sapiens
  CDR3 for beta chain variable domain of TCR clone 311617 (TRBV2, TRBJ2-5)
CASKRDGTTETQYF

SEQ ID NO: 623235 - protein, 14 aa, Homo sapiens
  CDR3 for alpha chain variable domain of TCR clone 311618 (TRAV26-1, TRAJ49)
CIVRLTNTCNPFYF

SEQ ID NO: 623236 - protein, 13 aa, Homo sapiens
  CDR3 for beta chain variable domain of TCR clone 311618 (TRBV4-1, TRBJ2-7)
CASSQGQAYEQYF

SEQ ID NO: 623237 - protein, 13 aa, Homo sapiens
  CDR3 for alpha chain variable domain of TCR clone 311619 (TRAV13-1, TRAJ37)
CAAASGNAGKLIF

SEQ ID NO: 623238 - protein, 17 aa, Homo sapiens
  CDR3 for beta chain variable domain of TCR clone 311619 (TRBV10-2, TRBJ1-6)
CASSENRGSSYNSPLHF

SEQ ID NO: 623239 - protein, 13 aa, Homo sapiens
  CDR3 for alpha chain variable domain of TCR clone 311620 (TRAV21, TRAJ3)
CAVTGSSASKIIF

SEQ ID NO: 623240 - protein, 11 aa, Homo sapiens
  CDR3 for beta chain variable domain of TCR clone 311620 (TRBV7-8, TRBJ2-7)
CASSLSLEQYF

SEQ ID NO: 623241 - protein, 12 aa, Homo sapiens
  CDR3 for alpha chain variable domain of TCR clone 311621 (TRAV20, TRAJ56)
CAVTGANGKLTL

SEQ ID NO: 623242 - protein, 14 aa, Homo sapiens
  CDR3 for beta chain variable domain of TCR clone 311621 (TRBV20-1, TRBJ2-5)
CSALVPGYQETQYF

SEQ ID NO: 623243 - protein, 17 aa, Homo sapiens
  CDR3 for alpha chain variable domain of TCR clone 311622 (TRAV4, TRAJ13)
CLVGVQGSSGGYQKVTF

SEQ ID NO: 623244 - protein, 18 aa, Homo sapiens
  CDR3 for beta chain variable domain of TCR clone 311622 (TRBV15, TRBJ2-3)
RATSRDGARSWDTDTQYF

SEQ ID NO: 623245 - protein, 17 aa, Homo sapiens
  CDR3 for alpha chain variable domain of TCR clone 311623 (TRAV26-1, TRAJ37)
CIVRVITVSSNTGKLIF

SEQ ID NO: 623246 - protein, 16 aa, Homo sapiens
  CDR3 for beta chain variable domain of TCR clone 311623 (TRBV19, TRBJ2-3)
CASSPGAASRTDTQYF

SEQ ID NO: 623247 - protein, 16 aa, Homo sapiens
  CDR3 for alpha chain variable domain of TCR clone 311624 (TRAV17, TRAJ53)
CATDAISGGSNYKLTF

SEQ ID NO: 623248 - protein, 15 aa, Homo sapiens
  CDR3 for beta chain variable domain of TCR clone 311624 (TRBV20-1, TRBJ2-7)
CSARDRVSGMDEQYF

SEQ ID NO: 623249 - protein, 20 aa, Homo sapiens
  CDR3 for alpha chain variable domain of TCR clone 311625 (TRAV4, TRAJ29)
CCVLLPRGCVPFSGNTPLVF

SEQ ID NO: 623250 - protein, 17 aa, Homo sapiens
  CDR3 for beta chain variable domain of TCR clone 311625 (TRBV25-1, TRBJ2-7)
CASSDARVVFSSYELYF

SEQ ID NO: 623251 - protein, 13 aa, Homo sapiens
  CDR3 for alpha chain variable domain of TCR clone 311626 (TRAV21, TRAJ27)
CAARPGNAGKSNF

SEQ ID NO: 623252 - protein, 14 aa, Homo sapiens
  CDR3 for beta chain variable domain of TCR clone 311626 (TRBV7-6, TRBJ2-3)
CACSLGTVTDTQYF

SEQ ID NO: 623253 - protein, 10 aa, Homo sapiens
  CDR3 for alpha chain variable domain of TCR clone 311627 (TRAV1-2, TRAJ31)
CAFFDARLMF

SEQ ID NO: 623254 - protein, 13 aa, Homo sapiens
  CDR3 for beta chain variable domain of TCR clone 311627 (TRBV7-6, TRBJ1-2)
CASSLVADYGYTF

SEQ ID NO: 623255 - protein, 17 aa, Homo sapiens
  CDR3 for alpha chain variable domain of TCR clone 311628 (TRAV3, TRAJ6)
CAVRDGPRAGGSYIPTF

SEQ ID NO: 623256 - protein, 15 aa, Homo sapiens
  CDR3 for beta chain variable domain of TCR clone 311628 (TRBV5-6, TRBJ2-7)
CASSLGPGRGHEQYF

SEQ ID NO: 623257 - protein, 13 aa, Homo sapiens
  CDR3 for alpha chain variable domain of TCR clone 311629 (TRAV1-2, TRAJ9)
CAALNTGGFKTIF

SEQ ID NO: 623258 - protein, 13 aa, Homo sapiens
  CDR3 for beta chain variable domain of TCR clone 311629 (TRBV7-2, TRBJ2-5)
CASSLYRQETQYF

SEQ ID NO: 623259 - protein, 16 aa, Homo sapiens
  CDR3 for alpha chain variable domain of TCR clone 311630 (TRAV8-3, TRAJ8)
CAVPRDGNTGFQKLVF

SEQ ID NO: 623260 - protein, 14 aa, Homo sapiens
  CDR3 for beta chain variable domain of TCR clone 311630 (TRBV4-1, TRBJ2-2)
CASSQVVNTGELFF

SEQ ID NO: 623261 - protein, 12 aa, Homo sapiens
  CDR3 for alpha chain variable domain of TCR clone 311631 (TRAV12-3, TRAJ17)
CAKTLTGNKLTF

SEQ ID NO: 623262 - protein, 15 aa, Homo sapiens
  CDR3 for beta chain variable domain of TCR clone 311631 (TRBV20-1, TRBJ2-7)
CSARDWVSGMDEQYF

SEQ ID NO: 623263 - protein, 13 aa, Homo sapiens
  CDR3 for alpha chain variable domain of TCR clone 311632 (TRAV1-2, TRAJ9)
CAALNIGGFKTIF

SEQ ID NO: 623264 - protein, 15 aa, Homo sapiens
  CDR3 for beta chain variable domain of TCR clone 311632 (TRBV19, TRBJ1-1)
CASASGQIQNTEAFF

SEQ ID NO: 623265 - protein, 13 aa, Homo sapiens
  CDR3 for alpha chain variable domain of TCR clone 311633 (TRAV17, TRAJ40)
CATAEGGTYKYIF

SEQ ID NO: 623266 - protein, 13 aa, Homo sapiens
  CDR3 for beta chain variable domain of TCR clone 311633 (TRBV6-3, TRBJ2-5)
CASSYRMTETQYF

SEQ ID NO: 623267 - protein, 15 aa, Homo sapiens
  CDR3 for alpha chain variable domain of TCR clone 311634 (TRAV3, TRAJ17)
CAVSPKEAAGTKLTF

SEQ ID NO: 623268 - protein, 12 aa, Homo sapiens
  CDR3 for beta chain variable domain of TCR clone 311634 (TRBV7-9, TRBJ1-6)
CASSLMTSPLLF

SEQ ID NO: 623269 - protein, 13 aa, Homo sapiens
  CDR3 for alpha chain variable domain of TCR clone 311635 (TRAV35, TRAJ57)
CAGSQGGCEKLVF

SEQ ID NO: 623270 - protein, 15 aa, Homo sapiens
  CDR3 for beta chain variable domain of TCR clone 311635 (TRBV20-1, TRBJ2-7)
CSARDRVSGMDEQYF

SEQ ID NO: 623271 - protein, 19 aa, Homo sapiens
  CDR3 for alpha chain variable domain of TCR clone 311636 (TRAV8-1, TRAJ37)
LSTSVPPSDGSGNTGKLIF

SEQ ID NO: 623272 - protein, 13 aa, Homo sapiens
  CDR3 for beta chain variable domain of TCR clone 311636 (TRBV7-9, TRBJ1-2)
CASSLKQNYGYTI

SEQ ID NO: 623273 - protein, 12 aa, Homo sapiens
  CDR3 for alpha chain variable domain of TCR clone 311637 (TRAV12-3, TRAJ41)
CAISYSGYALNF

SEQ ID NO: 623274 - protein, 13 aa, Homo sapiens
  CDR3 for beta chain variable domain of TCR clone 311637 (TRBV7-3, TRBJ2-1)
CASSLDSYNEHFF

SEQ ID NO: 623275 - protein, 14 aa, Homo sapiens
  CDR3 for alpha chain variable domain of TCR clone 311638 (TRAV12-2, TRAJ45)
CAVNKGGGDDGLTF

SEQ ID NO: 623276 - protein, 14 aa, Homo sapiens
  CDR3 for beta chain variable domain of TCR clone 311638 (TRBV20-1, TRBJ1-1)
CSAMGGTANTEAFF

SEQ ID NO: 623277 - protein, 15 aa, Homo sapiens
  CDR3 for alpha chain variable domain of TCR clone 311639 (TRAV4, TRAJ26)
CLVGGLDKYGQNFVF

SEQ ID NO: 623278 - protein, 13 aa, Homo sapiens
  CDR3 for beta chain variable domain of TCR clone 311639 (TRBV20-1, TRBJ2-5)
CSASLTGRETQYF

SEQ ID NO: 623279 - protein, 14 aa, Homo sapiens
  CDR3 for alpha chain variable domain of TCR clone 311640 (TRAV9-2, TRAJ39)
CALYIYNAGNMLTF

SEQ ID NO: 623280 - protein, 13 aa, Homo sapiens
  CDR3 for beta chain variable domain of TCR clone 311640 (TRBV10-3, TRBJ2-7)
CVSKLAVNYEQYF

SEQ ID NO: 623281 - protein, 12 aa, Homo sapiens
  CDR3 for alpha chain variable domain of TCR clone 311641 (TRAV13-1, TRAJ53)
AASRGSNYKLTF

SEQ ID NO: 623282 - protein, 12 aa, Homo sapiens
  CDR3 for beta chain variable domain of TCR clone 311641 (TRBV18, TRBJ1-4)
CASSPSREKLFF

SEQ ID NO: 623283 - protein, 13 aa, Homo sapiens
  CDR3 for alpha chain variable domain of TCR clone 311642 (TRAV21, TRAJ27)
CAARPGNAGKSTS

SEQ ID NO: 623284 - protein, 13 aa, Homo sapiens
  CDR3 for beta chain variable domain of TCR clone 311642 (TRBV7-3, TRBJ2-7)
CANSQAGGYEQYF

SEQ ID NO: 623285 - protein, 13 aa, Homo sapiens
  CDR3 for alpha chain variable domain of TCR clone 311643 (TRAV1-2, TRAJ9)
CAALNTGGFKTIF

SEQ ID NO: 623286 - protein, 16 aa, Homo sapiens
  CDR3 for beta chain variable domain of TCR clone 311643 (TRBV4-1, TRBJ2-7)
CASSPVAGGTSSTSGR

SEQ ID NO: 623287 - protein, 15 aa, Homo sapiens
  CDR3 for alpha chain variable domain of TCR clone 311644 (TRAV8-2, TRAJ16)
CVVSDGFSDGQKLLF

SEQ ID NO: 623288 - protein, 15 aa, Homo sapiens
  CDR3 for beta chain variable domain of TCR clone 311644 (TRBV20-1, TRBJ2-3)
CSARPSGFYTDTQYF

SEQ ID NO: 623289 - protein, 14 aa, Homo sapiens
  CDR3 for alpha chain variable domain of TCR clone 311645 (TRAV8-1, TRAJ34)
CAVITTYNTDKLIF

SEQ ID NO: 623290 - protein, 14 aa, Homo sapiens
  CDR3 for beta chain variable domain of TCR clone 311645 (TRBV11-3, TRBJ1-3)
CASSHNGQGNTLYV

SEQ ID NO: 623291 - protein, 15 aa, Homo sapiens
  CDR3 for alpha chain variable domain of TCR clone 311646 (TRAV3, TRAJ9)
CAVRDINAGGFKTIF

SEQ ID NO: 623292 - protein, 13 aa, Homo sapiens
  CDR3 for beta chain variable domain of TCR clone 311646 (TRBV19, TRBJ2-7)
CASSIPSVREQYF

SEQ ID NO: 623293 - protein, 16 aa, Homo sapiens
  CDR3 for alpha chain variable domain of TCR clone 311647 (TRAV1-2, TRAJ10)
CAVRDQGGGGGNKLTF

SEQ ID NO: 623294 - protein, 13 aa, Homo sapiens
  CDR3 for beta chain variable domain of TCR clone 311647 (TRBV29-1, TRBJ1-1)
CSVGDSRNTEDFF

SEQ ID NO: 623295 - protein, 13 aa, Homo sapiens
  CDR3 for alpha chain variable domain of TCR clone 311648 (TRAV12-1, TRAJ7)
CVVNLRGNNRLAF

SEQ ID NO: 623296 - protein, 16 aa, Homo sapiens
  CDR3 for beta chain variable domain of TCR clone 311648 (TRBV20-1, TRBJ1-4)
CSAPGQGLLTNEKLFF

SEQ ID NO: 623297 - protein, 13 aa, Homo sapiens
  CDR3 for alpha chain variable domain of TCR clone 311649 (TRAV1-1, TRAJ9)
CAAKNTGGFKTIF

SEQ ID NO: 623298 - protein, 16 aa, Homo sapiens
  CDR3 for beta chain variable domain of TCR clone 311649 (TRBV7-3, TRBJ2-3)
CASSSGLAGGTDTQYF

SEQ ID NO: 623299 - protein, 14 aa, Homo sapiens
  CDR3 for alpha chain variable domain of TCR clone 311650 (TRAV3, TRAJ21)
CALGRGATTFTLDL

SEQ ID NO: 623300 - protein, 14 aa, Homo sapiens
  CDR3 for beta chain variable domain of TCR clone 311650 (TRBV7-9, TRBJ2-4)
CASSLAMGGNIQYF

SEQ ID NO: 623301 - protein, 19 aa, Homo sapiens
  CDR3 for alpha chain variable domain of TCR clone 311651 (TRAV9-2, )
CALIQIGDIQNPDPAGYQL

SEQ ID NO: 623302 - protein, 17 aa, Homo sapiens
  CDR3 for beta chain variable domain of TCR clone 311651 (TRBV7-8, TRBJ2-6)
CASSAGTGGAGANVLTF

SEQ ID NO: 623303 - protein, 13 aa, Homo sapiens
  CDR3 for alpha chain variable domain of TCR clone 311652 (TRAV3, TRAJ27)
CALRPLGAGKSTL

SEQ ID NO: 623304 - protein, 13 aa, Homo sapiens
  CDR3 for beta chain variable domain of TCR clone 311652 (TRBV7-9, TRBJ2-3)
CASSPGSTDTQYF

SEQ ID NO: 623305 - protein, 13 aa, Homo sapiens
  CDR3 for alpha chain variable domain of TCR clone 311653 (TRAV2, TRAJ11)
CAVEDIGYRTLTF

SEQ ID NO: 623306 - protein, 17 aa, Homo sapiens
  CDR3 for beta chain variable domain of TCR clone 311653 (TRBV7-2, TRBJ2-1)
CASSRGTSGAVGWEQFF

SEQ ID NO: 623307 - protein, 17 aa, Homo sapiens
  CDR3 for alpha chain variable domain of TCR clone 311654 (TRAV3, TRAJ38)
CAVRDCLNAGNNRKLFW

SEQ ID NO: 623308 - protein, 14 aa, Homo sapiens
  CDR3 for beta chain variable domain of TCR clone 311654 (TRBV12-5, TRBJ2-5)
CASGSRTHQETQYF

SEQ ID NO: 623309 - protein, 10 aa, Homo sapiens
  CDR3 for alpha chain variable domain of TCR clone 311655 (TRAV1-2, TRAJ20)
CACNDYKLSF

SEQ ID NO: 623310 - protein, 14 aa, Homo sapiens
  CDR3 for beta chain variable domain of TCR clone 311655 (TRBV7-2, TRBJ1-2)
CASSQTGSTYGYTF

SEQ ID NO: 623311 - protein, 13 aa, Homo sapiens
  CDR3 for alpha chain variable domain of TCR clone 311656 (TRAV13-1, TRAJ12)
CSKYMGSSYKLIF

SEQ ID NO: 623312 - protein, 14 aa, Homo sapiens
  CDR3 for beta chain variable domain of TCR clone 311656 (TRBV29-1, TRBJ2-3)
CSARAGAGTDTQYV

SEQ ID NO: 623313 - protein, 14 aa, Homo sapiens
  CDR3 for alpha chain variable domain of TCR clone 311657 (TRAV12-2, TRAJ13)
CAVKKTGRYQKVTF

SEQ ID NO: 623314 - protein, 15 aa, Homo sapiens
  CDR3 for beta chain variable domain of TCR clone 311657 (TRBV27, TRBJ2-1)
CASSNGGVSSNEQFF

SEQ ID NO: 623315 - protein, 16 aa, Homo sapiens
  CDR3 for alpha chain variable domain of TCR clone 311658 (TRAV26-1, TRAJ41)
CIVKVAVANSGYALNF

SEQ ID NO: 623316 - protein, 15 aa, Homo sapiens
  CDR3 for beta chain variable domain of TCR clone 311658 (TRBV6-1, TRBJ1-1)
CASSEYPRMNTEAFF

SEQ ID NO: 623317 - protein, 12 aa, Homo sapiens
  CDR3 for alpha chain variable domain of TCR clone 311659 (TRAV8-3, TRAJ26)
CAGDNYGQNFVF

SEQ ID NO: 623318 - protein, 15 aa, Homo sapiens
  CDR3 for beta chain variable domain of TCR clone 311659 (TRBV9, TRBJ2-1)
CASSLAGSSYNEQIF

SEQ ID NO: 623319 - protein, 14 aa, Homo sapiens
  CDR3 for alpha chain variable domain of TCR clone 311660 (TRAV1-2, TRAJ8)
CAVREDTGFQKLVF

SEQ ID NO: 623320 - protein, 14 aa, Homo sapiens
  CDR3 for beta chain variable domain of TCR clone 311660 (TRBV19, TRBJ2-2)
CATTGHANTGELFF

SEQ ID NO: 623321 - protein, 14 aa, Homo sapiens
  CDR3 for alpha chain variable domain of TCR clone 311661 (TRAV38-1, TRAJ29)
CAFITPSGNTPLVF

SEQ ID NO: 623322 - protein, 16 aa, Homo sapiens
  CDR3 for beta chain variable domain of TCR clone 311661 (TRBV5-1, TRBJ2-2)
CASSLWDTTNTGELFF

SEQ ID NO: 623323 - protein, 13 aa, Homo sapiens
  CDR3 for alpha chain variable domain of TCR clone 311662 (TRAV21, TRAJ57)
CAVTQGGSEKLVC

SEQ ID NO: 623324 - protein, 13 aa, Homo sapiens
  CDR3 for beta chain variable domain of TCR clone 311662 (TRBV11-3, TRBJ2-7)
CASSFGVGYEQYF

SEQ ID NO: 623325 - protein, 16 aa, Homo sapiens
  CDR3 for alpha chain variable domain of TCR clone 311663 (TRAV12-3, TRAJ53)
CAMSPGSGGSNYKLTS

SEQ ID NO: 623326 - protein, 15 aa, Homo sapiens
  CDR3 for beta chain variable domain of TCR clone 311663 (TRBV27, TRBJ2-1)
CASSNGGGSSNEQFF

SEQ ID NO: 623327 - protein, 14 aa, Homo sapiens
  CDR3 for alpha chain variable domain of TCR clone 311664 (TRAV8-4, TRAJ16)
CAVSPVGRGPEAAL

SEQ ID NO: 623328 - protein, 14 aa, Homo sapiens
  CDR3 for beta chain variable domain of TCR clone 311664 (TRBV23-1, TRBJ2-5)
CASSFLRSQETQYF

SEQ ID NO: 623329 - protein, 12 aa, Homo sapiens
  CDR3 for alpha chain variable domain of TCR clone 311665 (TRAV13-1, TRAJ21)
CAAKEGFNEFYF

SEQ ID NO: 623330 - protein, 14 aa, Homo sapiens
  CDR3 for beta chain variable domain of TCR clone 311665 (TRBV5-4, TRBJ1-1)
CASSLDRRRDEAFF

SEQ ID NO: 623331 - protein, 13 aa, Homo sapiens
  CDR3 for alpha chain variable domain of TCR clone 311666 (TRAV17, TRAJ9)
CATAITGGFNTIF

SEQ ID NO: 623332 - protein, 16 aa, Homo sapiens
  CDR3 for beta chain variable domain of TCR clone 311666 (TRBV15, TRBJ2-1)
CATSRTLAGGYNEQFF

SEQ ID NO: 623333 - protein, 12 aa, Homo sapiens
  CDR3 for alpha chain variable domain of TCR clone 311667 (TRAV16, TRAJ9)
CALSSGGFKTIF

SEQ ID NO: 623334 - protein, 13 aa, Homo sapiens
  CDR3 for beta chain variable domain of TCR clone 311667 (TRBV7-9, TRBJ2-1)
CQQLSRTLNEQFF

SEQ ID NO: 623335 - protein, 11 aa, Homo sapiens
  CDR3 for alpha chain variable domain of TCR clone 311668 (TRAV1-1, TRAJ31)
CAVPKQCQTQV

SEQ ID NO: 623336 - protein, 17 aa, Homo sapiens
  CDR3 for beta chain variable domain of TCR clone 311668 (TRBV27, TRBJ2-6)
CASSAGTGFSGANVLTF

SEQ ID NO: 623337 - protein, 14 aa, Homo sapiens
  CDR3 for alpha chain variable domain of TCR clone 311669 (TRAV3, TRAJ5)
CAERPRHGQESTYF

SEQ ID NO: 623338 - protein, 13 aa, Homo sapiens
  CDR3 for beta chain variable domain of TCR clone 311669 (TRBV12-4, TRBJ2-7)
CASSPTETYEQYF

SEQ ID NO: 623339 - protein, 15 aa, Homo sapiens
  CDR3 for alpha chain variable domain of TCR clone 311670 (TRAV27, TRAJ38)
CAARRNADNNSKLIW

SEQ ID NO: 623340 - protein, 13 aa, Homo sapiens
  CDR3 for beta chain variable domain of TCR clone 311670 (TRBV12-5, TRBJ2-3)
CASGDRQSDTQYF

SEQ ID NO: 623341 - protein, 12 aa, Homo sapiens
  CDR3 for alpha chain variable domain of TCR clone 311671 (TRAV12-1, TRAJ16)
CVVFRDGQKLLF

SEQ ID NO: 623342 - protein, 13 aa, Homo sapiens
  CDR3 for beta chain variable domain of TCR clone 311671 (TRBV12-4, TRBJ2-7)
CASSPGQLYEQYF

SEQ ID NO: 623343 - protein, 13 aa, Homo sapiens
  CDR3 for alpha chain variable domain of TCR clone 311672 (TRAV13-1, TRAJ39)
CSKYSNAGNMLTF

SEQ ID NO: 623344 - protein, 16 aa, Homo sapiens
  CDR3 for beta chain variable domain of TCR clone 311672 (TRBV7-9, TRBJ2-1)
CASSLDPGLAIDEQFF

SEQ ID NO: 623345 - protein, 14 aa, Homo sapiens
  CDR3 for alpha chain variable domain of TCR clone 311673 (TRAV8-4, TRAJ43)
CAVRDPRNNNDMRF

SEQ ID NO: 623346 - protein, 14 aa, Homo sapiens
  CDR3 for beta chain variable domain of TCR clone 311673 (TRBV19, TRBJ2-1)
CASPTFVLSGEQFF

SEQ ID NO: 623347 - protein, 15 aa, Homo sapiens
  CDR3 for alpha chain variable domain of TCR clone 311674 (TRAV8-3, TRAJ45)
CASSYSGGGSDGLTF

SEQ ID NO: 623348 - protein, 14 aa, Homo sapiens
  CDR3 for beta chain variable domain of TCR clone 311674 (TRBV7-2, TRBJ2-5)
CASSTGGELKTQYF

SEQ ID NO: 623349 - protein, 14 aa, Homo sapiens
  CDR3 for alpha chain variable domain of TCR clone 311675 (TRAV8-1, TRAJ49)
CASSIANTGNQFYF

SEQ ID NO: 623350 - protein, 13 aa, Homo sapiens
  CDR3 for beta chain variable domain of TCR clone 311675 (TRBV11-2, TRBJ2-5)
CASSFSGQETQYF

SEQ ID NO: 623351 - protein, 13 aa, Homo sapiens
  CDR3 for alpha chain variable domain of TCR clone 311676 (TRAV13-2, TRAJ48)
CAEMDFGNEKLTF

SEQ ID NO: 623352 - protein, 13 aa, Homo sapiens
  CDR3 for beta chain variable domain of TCR clone 311676 (TRBV5-5, TRBJ1-5)
CQQWTGSRSAQHF

SEQ ID NO: 623353 - protein, 13 aa, Homo sapiens
  CDR3 for alpha chain variable domain of TCR clone 311677 (TRAV21, TRAJ20)
CAVGLRVDYKLSF

SEQ ID NO: 623354 - protein, 15 aa, Homo sapiens
  CDR3 for beta chain variable domain of TCR clone 311677 (TRBV29-1, TRBJ2-1)
CGVPTGLALYNEQFF

SEQ ID NO: 623355 - protein, 13 aa, Homo sapiens
  CDR3 for alpha chain variable domain of TCR clone 311678 (TRAV12-2, TRAJ20)
CAVYPSNDYKLSF

SEQ ID NO: 623356 - protein, 15 aa, Homo sapiens
  CDR3 for beta chain variable domain of TCR clone 311678 (TRBV20-1, TRBJ2-7)
CSARGLWTGVGEQYF

SEQ ID NO: 623357 - protein, 13 aa, Homo sapiens
  CDR3 for alpha chain variable domain of TCR clone 311679 (TRAV36/DV7, TRAJ38)
CVANAGNNRKLIC

SEQ ID NO: 623358 - protein, 14 aa, Homo sapiens
  CDR3 for beta chain variable domain of TCR clone 311679 (TRBV7-2, TRBJ2-7)
CASSLRWEVNEQYF

SEQ ID NO: 623359 - protein, 16 aa, Homo sapiens
  CDR3 for alpha chain variable domain of TCR clone 311680 (TRAV12-3, TRAJ53)
CAMSPGGGGSNYKLTF

SEQ ID NO: 623360 - protein, 11 aa, Homo sapiens
  CDR3 for beta chain variable domain of TCR clone 311680 (TRBV29-1, TRBJ2-5)
CSEDRTRTQYF

SEQ ID NO: 623361 - protein, 12 aa, Homo sapiens
  CDR3 for alpha chain variable domain of TCR clone 311681 (TRAV12-2, TRAJ16)
CAVNLDGQKLLF

SEQ ID NO: 623362 - protein, 12 aa, Homo sapiens
  CDR3 for beta chain variable domain of TCR clone 311681 (TRBV5-7, TRBJ2-7)
CASSVQGGKQYF

SEQ ID NO: 623363 - protein, 11 aa, Homo sapiens
  CDR3 for alpha chain variable domain of TCR clone 311682 (TRAV4, TRAJ39)
CLVGLIGNARL

SEQ ID NO: 623364 - protein, 15 aa, Homo sapiens
  CDR3 for beta chain variable domain of TCR clone 311682 (TRBV7-3, TRBJ2-2)
CASSLYGGDTGELFF

SEQ ID NO: 623365 - protein, 21 aa, Homo sapiens
  CDR3 for alpha chain variable domain of TCR clone 311683 (TRAV29/DV5, TRAJ52)
CSVLLCSKREAGGTSYGNLTF

SEQ ID NO: 623366 - protein, 15 aa, Homo sapiens
  CDR3 for beta chain variable domain of TCR clone 311683 (TRBV6-1, TRBJ2-1)
CASSELRGQYNEQFF

SEQ ID NO: 623367 - protein, 15 aa, Homo sapiens
  CDR3 for alpha chain variable domain of TCR clone 311684 (TRAV17, TRAJ40)
CATASSTSGTYKYIF

SEQ ID NO: 623368 - protein, 16 aa, Homo sapiens
  CDR3 for beta chain variable domain of TCR clone 311684 (TRBV6-1, TRBJ2-5)
CASSETLDRGAETQYF

SEQ ID NO: 623369 - protein, 14 aa, Homo sapiens
  CDR3 for alpha chain variable domain of TCR clone 311685 (TRAV12-1, TRAJ8)
CVVNSNTGFQKLVF

SEQ ID NO: 623370 - protein, 13 aa, Homo sapiens
  CDR3 for beta chain variable domain of TCR clone 311685 (TRBV20-1, TRBJ1-1)
CSARAGGNTEAFF

SEQ ID NO: 623371 - protein, 12 aa, Homo sapiens
  CDR3 for alpha chain variable domain of TCR clone 311686 (TRAV12-1, TRAJ40)
CVVYSGNYKYIF

SEQ ID NO: 623372 - protein, 18 aa, Homo sapiens
  CDR3 for beta chain variable domain of TCR clone 311686 (TRBV11-2, TRBJ2-3)
CASSFGGASRGAPNTQYF

SEQ ID NO: 623373 - protein, 15 aa, Homo sapiens
  CDR3 for alpha chain variable domain of TCR clone 311687 (TRAV3, TRAJ17)
CAVRGGPAAGNKLTF

SEQ ID NO: 623374 - protein, 12 aa, Homo sapiens
  CDR3 for beta chain variable domain of TCR clone 311687 (TRBV12-4, TRBJ2-1)
CASSPGRNEQFF

SEQ ID NO: 623375 - protein, 11 aa, Homo sapiens
  CDR3 for alpha chain variable domain of TCR clone 311688 (TRAV2, TRAJ13)
CASGGYQKGTF

SEQ ID NO: 623376 - protein, 14 aa, Homo sapiens
  CDR3 for beta chain variable domain of TCR clone 311688 (TRBV7-3, TRBJ2-7)
CASSYDQDYYEQYF

SEQ ID NO: 623377 - protein, 15 aa, Homo sapiens
  CDR3 for alpha chain variable domain of TCR clone 311689 (TRAV12-1, TRAJ45)
CVVLSGGGGADGLIF

SEQ ID NO: 623378 - protein, 15 aa, Homo sapiens
  CDR3 for beta chain variable domain of TCR clone 311689 (TRBV7-2, TRBJ2-1)
CASTHGTGIYNEQFF

SEQ ID NO: 623379 - protein, 14 aa, Homo sapiens
  CDR3 for alpha chain variable domain of TCR clone 311690 (TRAV20, TRAJ42)
CAVQVGGSQGNLIF

SEQ ID NO: 623380 - protein, 12 aa, Homo sapiens
  CDR3 for beta chain variable domain of TCR clone 311690 (TRBV11-2, TRBJ2-2)
CASSLGGGELFF

SEQ ID NO: 623381 - protein, 13 aa, Homo sapiens
  CDR3 for alpha chain variable domain of TCR clone 311691 (TRAV13-1, TRAJ43)
CAESLSNNNDMRF

SEQ ID NO: 623382 - protein, 15 aa, Homo sapiens
  CDR3 for beta chain variable domain of TCR clone 311691 (TRBV20-1, TRBJ2-7)
CSARDRVSGMDEQYF

SEQ ID NO: 623383 - protein, 13 aa, Homo sapiens
  CDR3 for alpha chain variable domain of TCR clone 311692 (TRAV39, TRAJ33)
CAANPDSNYQLIW

SEQ ID NO: 623384 - protein, 15 aa, Homo sapiens
  CDR3 for beta chain variable domain of TCR clone 311692 (TRBV18, TRBJ2-1)
CASSPPSASYNEQFF

SEQ ID NO: 623385 - protein, 15 aa, Homo sapiens
  CDR3 for alpha chain variable domain of TCR clone 311693 (TRAV3, TRAJ22)
CAVRDRGGASRQLTF

SEQ ID NO: 623386 - protein, 16 aa, Homo sapiens
  CDR3 for beta chain variable domain of TCR clone 311693 (TRBV5-4, TRBJ2-3)
CASQQPGAGGADTQYF

SEQ ID NO: 623387 - protein, 12 aa, Homo sapiens
  CDR3 for alpha chain variable domain of TCR clone 311694 (TRAV8-3, TRAJ26)
CAGDNYGQNFVF

SEQ ID NO: 623388 - protein, 14 aa, Homo sapiens
  CDR3 for beta chain variable domain of TCR clone 311694 (TRBV6-5, TRBJ1-2)
CASSYDGTGGGYTF

SEQ ID NO: 623389 - protein, 12 aa, Homo sapiens
  CDR3 for alpha chain variable domain of TCR clone 311695 (TRAV13-1, TRAJ21)
CAAKEGFDKFYF

SEQ ID NO: 623390 - protein, 17 aa, Homo sapiens
  CDR3 for beta chain variable domain of TCR clone 311695 (TRBV19, TRBJ2-7)
CASSISFYDSYPYEQYF

SEQ ID NO: 623391 - protein, 14 aa, Homo sapiens
  CDR3 for alpha chain variable domain of TCR clone 311696 (TRAV21, TRAJ21)
CAVGVEDNFNKFYF

SEQ ID NO: 623392 - protein, 14 aa, Homo sapiens
  CDR3 for beta chain variable domain of TCR clone 311696 (TRBV12-5, TRBJ2-5)
CASGSRTHQETQYF

SEQ ID NO: 623393 - protein, 15 aa, Homo sapiens
  CDR3 for alpha chain variable domain of TCR clone 311697 (TRAV17, TRAJ37)
CATDHGSSNTGKLIF

SEQ ID NO: 623394 - protein, 18 aa, Homo sapiens
  CDR3 for beta chain variable domain of TCR clone 311697 (TRBV7-9, TRBJ2-7)
CASSLTTSGSRTWYEQYF

SEQ ID NO: 623395 - protein, 14 aa, Homo sapiens
  CDR3 for alpha chain variable domain of TCR clone 311698 (TRAV1-1, TRAJ27)
CAVIYNTNAGKSTF

SEQ ID NO: 623396 - protein, 15 aa, Homo sapiens
  CDR3 for beta chain variable domain of TCR clone 311698 (TRBV15, TRBJ1-1)
CATSLQGGRNTEAFF

SEQ ID NO: 623397 - protein, 20 aa, Homo sapiens
  CDR3 for alpha chain variable domain of TCR clone 311699 (TRAV12-3, TRAJ41)
SLFIRDSQPSDSATPEALNF

SEQ ID NO: 623398 - protein, 15 aa, Homo sapiens
  CDR3 for beta chain variable domain of TCR clone 311699 (TRBV5-1, TRBJ2-7)
CASSVDLTSSYEQYV

SEQ ID NO: 623399 - protein, 16 aa, Homo sapiens
  CDR3 for alpha chain variable domain of TCR clone 311700 (TRAV13-2, TRAJ28)
CAEKSYSGAGRYKLTF

SEQ ID NO: 623400 - protein, 16 aa, Homo sapiens
  CDR3 for beta chain variable domain of TCR clone 311700 (TRBV19, TRBJ2-1)
CASSKAGPSSYNEQFF

SEQ ID NO: 623401 - protein, 18 aa, Homo sapiens
  CDR3 for alpha chain variable domain of TCR clone 311701 (TRAV13-1, TRAJ52)
CAAKKPNAGGTSYGKLTF

SEQ ID NO: 623402 - protein, 14 aa, Homo sapiens
  CDR3 for beta chain variable domain of TCR clone 311701 (TRBV7-3, TRBJ2-1)
CASSLAGGTNEQFF

SEQ ID NO: 623403 - protein, 14 aa, Homo sapiens
  CDR3 for alpha chain variable domain of TCR clone 311702 (TRAV12-2, TRAJ13)
CAVKKTGGYQKVTF

SEQ ID NO: 623404 - protein, 15 aa, Homo sapiens
  CDR3 for beta chain variable domain of TCR clone 311702 (TRBV27, TRBJ2-1)
CASSNGGGASNEQSF

SEQ ID NO: 623405 - protein, 14 aa, Homo sapiens
  CDR3 for alpha chain variable domain of TCR clone 311703 (TRAV8-1, TRAJ4)
CAVPFSGGYNKLIF

SEQ ID NO: 623406 - protein, 13 aa, Homo sapiens
  CDR3 for beta chain variable domain of TCR clone 311703 (TRBV7-9, TRBJ1-2)
CASSLKQNYGYTF

SEQ ID NO: 623407 - protein, 14 aa, Homo sapiens
  CDR3 for alpha chain variable domain of TCR clone 311704 (TRAV26-1, TRAJ38)
CIADNAGNNRKLIW

SEQ ID NO: 623408 - protein, 13 aa, Homo sapiens
  CDR3 for beta chain variable domain of TCR clone 311704 (TRBV20-1, TRBJ1-1)
CSARGGGSNEAFF

SEQ ID NO: 623409 - protein, 15 aa, Homo sapiens
  CDR3 for alpha chain variable domain of TCR clone 311705 (TRAV38-1, TRAJ37)
CAFIFGSGNTGKLIF

SEQ ID NO: 623410 - protein, 12 aa, Homo sapiens
  CDR3 for beta chain variable domain of TCR clone 311705 (TRBV7-9, TRBJ2-7)
CASGLEGYEQYF

SEQ ID NO: 623411 - protein, 13 aa, Homo sapiens
  CDR3 for alpha chain variable domain of TCR clone 311706 (TRAV39, TRAJ33)
CAANPDTNYQLIW

SEQ ID NO: 623412 - protein, 13 aa, Homo sapiens
  CDR3 for beta chain variable domain of TCR clone 311706 (TRBV18, TRBJ1-1)
CASSGGRNTEAFF

SEQ ID NO: 623413 - protein, 16 aa, Homo sapiens
  CDR3 for alpha chain variable domain of TCR clone 311707 (TRAV30, TRAJ24)
CGTEIVDADSWGKFKF

SEQ ID NO: 623414 - protein, 14 aa, Homo sapiens
  CDR3 for beta chain variable domain of TCR clone 311707 (TRBV12-5, TRBJ2-5)
CASGPRTHQETQYF

SEQ ID NO: 623415 - protein, 10 aa, Homo sapiens
  CDR3 for alpha chain variable domain of TCR clone 311708 (TRAV16, TRAJ22)
SAMYLRQLTF

SEQ ID NO: 623416 - protein, 13 aa, Homo sapiens
  CDR3 for beta chain variable domain of TCR clone 311708 (TRBV20-1, TRBJ1-1)
CSAGTVGNTEAFF

SEQ ID NO: 623417 - protein, 13 aa, Homo sapiens
  CDR3 for alpha chain variable domain of TCR clone 311709 (TRAV12-2, TRAJ18)
CAVRGSTLGRLYF

SEQ ID NO: 623418 - protein, 13 aa, Homo sapiens
  CDR3 for beta chain variable domain of TCR clone 311709 (TRBV4-1, TRBJ2-1)
CASSQAGGDEQFF

SEQ ID NO: 623419 - protein, 22 aa, Homo sapiens
  CDR3 for alpha chain variable domain of TCR clone 311710 (TRAV34, TRAJ40)
PAQPCRHLPLWSGPSGTYKYIF

SEQ ID NO: 623420 - protein, 14 aa, Homo sapiens
  CDR3 for beta chain variable domain of TCR clone 311710 (TRBV5-4, TRBJ1-2)
CASTRQTDNYGYTF

SEQ ID NO: 623421 - protein, 11 aa, Homo sapiens
  CDR3 for alpha chain variable domain of TCR clone 311711 (TRAV8-4, TRAJ20)
CAVTNVLTTTR

SEQ ID NO: 623422 - protein, 13 aa, Homo sapiens
  CDR3 for beta chain variable domain of TCR clone 311711 (TRBV19, TRBJ2-3)
CATWDKITDTQYF

SEQ ID NO: 623423 - protein, 16 aa, Homo sapiens
  CDR3 for alpha chain variable domain of TCR clone 311712 (TRAV17, TRAJ28)
CATASVSGAGSYQLTF

SEQ ID NO: 623424 - protein, 14 aa, Homo sapiens
  CDR3 for beta chain variable domain of TCR clone 311712 (TRBV19, TRBJ1-2)
CASSLQGQAYGYTF

SEQ ID NO: 623425 - protein, 13 aa, Homo sapiens
  CDR3 for alpha chain variable domain of TCR clone 311713 (TRAV29/DV5, TRAJ31)
FAASRNNNARLMF

SEQ ID NO: 623426 - protein, 13 aa, Homo sapiens
  CDR3 for beta chain variable domain of TCR clone 311713 (TRBV7-2, TRBJ2-4)
CASSREHANIQYF

SEQ ID NO: 623427 - protein, 15 aa, Homo sapiens
  CDR3 for alpha chain variable domain of TCR clone 311714 (TRAV36/DV7, TRAJ54)
CAVEKPVQGAQKLVF

SEQ ID NO: 623428 - protein, 14 aa, Homo sapiens
  CDR3 for beta chain variable domain of TCR clone 311714 (TRBV13, TRBJ2-5)
CASSLGPRGETQYF

SEQ ID NO: 623429 - protein, 14 aa, Homo sapiens
  CDR3 for alpha chain variable domain of TCR clone 311715 (TRAV3, TRAJ21)
CAVESQATFDKFYF

SEQ ID NO: 623430 - protein, 18 aa, Homo sapiens
  CDR3 for beta chain variable domain of TCR clone 311715 (TRBV7-9, TRBJ2-1)
CASSLAVSGTSGRNEQFF

SEQ ID NO: 623431 - protein, 14 aa, Homo sapiens
  CDR3 for alpha chain variable domain of TCR clone 311716 (TRAV12-2, TRAJ48)
CAVNACFGNEKLTF

SEQ ID NO: 623432 - protein, 13 aa, Homo sapiens
  CDR3 for beta chain variable domain of TCR clone 311716 (TRBV28, TRBJ2-7)
CAGAQQGRDEQYF

SEQ ID NO: 623433 - protein, 14 aa, Homo sapiens
  CDR3 for alpha chain variable domain of TCR clone 311717 (TRAV12-2, TRAJ17)
CAVLFKAAGNKLTF

SEQ ID NO: 623434 - protein, 13 aa, Homo sapiens
  CDR3 for beta chain variable domain of TCR clone 311717 (TRBV11-2, TRBJ2-5)
CASSFSSQETQYF

SEQ ID NO: 623435 - protein, 18 aa, Homo sapiens
  CDR3 for alpha chain variable domain of TCR clone 311718 (TRAV13-1, TRAJ10)
CAASKGRAVTGGGHKLTF

SEQ ID NO: 623436 - protein, 15 aa, Homo sapiens
  CDR3 for beta chain variable domain of TCR clone 311718 (TRBV27, TRBJ2-7)
CASSPIVTGAYEQYF

SEQ ID NO: 623437 - protein, 15 aa, Homo sapiens
  CDR3 for alpha chain variable domain of TCR clone 311719 (TRAV12-3, TRAJ6)
CAMSATTGGSFIPTF

SEQ ID NO: 623438 - protein, 17 aa, Homo sapiens
  CDR3 for beta chain variable domain of TCR clone 311719 (TRBV13, TRBJ2-3)
CASSLSRVAGGRNTQCF

SEQ ID NO: 623439 - protein, 12 aa, Homo sapiens
  CDR3 for alpha chain variable domain of TCR clone 311720 (TRAV12-3, TRAJ17)
CAMTLTGNKLTF

SEQ ID NO: 623440 - protein, 16 aa, Homo sapiens
  CDR3 for beta chain variable domain of TCR clone 311720 (TRBV9, TRBJ2-1)
CASSPTTGASYNEQFF

SEQ ID NO: 623441 - protein, 10 aa, Homo sapiens
  CDR3 for alpha chain variable domain of TCR clone 311721 (TRAV13-2, TRAJ49)
CADTGNPFYF

SEQ ID NO: 623442 - protein, 13 aa, Homo sapiens
  CDR3 for beta chain variable domain of TCR clone 311721 (TRBV10-3, TRBJ1-2)
CAISERDSYGYTF

SEQ ID NO: 623443 - protein, 12 aa, Homo sapiens
  CDR3 for alpha chain variable domain of TCR clone 311722 (TRAV12-2, TRAJ42)
CAVGGSQGNLIF

SEQ ID NO: 623444 - protein, 16 aa, Homo sapiens
  CDR3 for beta chain variable domain of TCR clone 311722 (TRBV7-3, TRBJ2-2)
CASSLKRGTLSGELFL

SEQ ID NO: 623445 - protein, 14 aa, Homo sapiens
  CDR3 for alpha chain variable domain of TCR clone 311723 (TRAV23/DV6, TRAJ24)
CAASLSDRWGKLQF

SEQ ID NO: 623446 - protein, 16 aa, Homo sapiens
  CDR3 for beta chain variable domain of TCR clone 311723 (TRBV7-9, TRBJ2-6)
CASSVKGPLRANVLTF

SEQ ID NO: 623447 - protein, 13 aa, Homo sapiens
  CDR3 for alpha chain variable domain of TCR clone 311724 (TRAV29/DV5, TRAJ28)
CAAHRTRSYQLPF

SEQ ID NO: 623448 - protein, 13 aa, Homo sapiens
  CDR3 for beta chain variable domain of TCR clone 311724 (TRBV6-3, TRBJ2-3)
CASSYYPADTQYF

SEQ ID NO: 623449 - protein, 15 aa, Homo sapiens
  CDR3 for alpha chain variable domain of TCR clone 311725 (TRAV27, TRAJ56)
CAGRDGTGANSKLTF

SEQ ID NO: 623450 - protein, 13 aa, Homo sapiens
  CDR3 for beta chain variable domain of TCR clone 311725 (TRBV11-2, TRBJ2-1)
CASSSEAYNEQFF

SEQ ID NO: 623451 - protein, 23 aa, Homo sapiens
  CDR3 for alpha chain variable domain of TCR clone 311726 (TRAV26-1, TRAJ38)
CIADNAGNNHIQNPDPAGNQLRD

SEQ ID NO: 623452 - protein, 13 aa, Homo sapiens
  CDR3 for beta chain variable domain of TCR clone 311726 (TRBV20-1, TRBJ1-1)
CSARGGGNTEAFF

SEQ ID NO: 623453 - protein, 20 aa, Homo sapiens
  CDR3 for alpha chain variable domain of TCR clone 311727 (TRAV1-1, TRAJ4)
CLLLLRCEGFLSGGYNKLIF

SEQ ID NO: 623454 - protein, 16 aa, Homo sapiens
  CDR3 for beta chain variable domain of TCR clone 311727 (TRBV28, TRBJ1-4)
CASSPPYRGRSEKLFF

SEQ ID NO: 623455 - protein, 13 aa, Homo sapiens
  CDR3 for alpha chain variable domain of TCR clone 311728 (TRAV12-2, TRAJ13)
CREEDWGLQKVTF

SEQ ID NO: 623456 - protein, 15 aa, Homo sapiens
  CDR3 for beta chain variable domain of TCR clone 311728 (TRBV19, TRBJ1-6)
CASSTQGAVGSPLHF

SEQ ID NO: 623457 - protein, 14 aa, Homo sapiens
  CDR3 for alpha chain variable domain of TCR clone 311729 (TRAV12-2, TRAJ4)
CAEDLSGGDNKLIL

SEQ ID NO: 623458 - protein, 13 aa, Homo sapiens
  CDR3 for beta chain variable domain of TCR clone 311729 (TRBV7-9, TRBJ1-2)
CASSLKQNYGYTF

SEQ ID NO: 623459 - protein, 17 aa, Homo sapiens
  CDR3 for alpha chain variable domain of TCR clone 311730 (TRAV13-1, TRAJ31)
CAPRDRLMFGDGTQLVV

SEQ ID NO: 623460 - protein, 17 aa, Homo sapiens
  CDR3 for beta chain variable domain of TCR clone 311730 (TRBV5-4, TRBJ2-1)
CASSSAGGRGPYNEQFF

SEQ ID NO: 623461 - protein, 14 aa, Homo sapiens
  CDR3 for alpha chain variable domain of TCR clone 311731 (TRAV16, TRAJ17)
CALSGRAADNKLTF

SEQ ID NO: 623462 - protein, 15 aa, Homo sapiens
  CDR3 for beta chain variable domain of TCR clone 311731 (TRBV3-1, TRBJ1-2)
CASSPTRLPEGGYTF

SEQ ID NO: 623463 - protein, 17 aa, Homo sapiens
  CDR3 for alpha chain variable domain of TCR clone 311732 (TRAV23/DV6, TRAJ58)
CAARLLRGETSGSRLTF

SEQ ID NO: 623464 - protein, 14 aa, Homo sapiens
  CDR3 for beta chain variable domain of TCR clone 311732 (TRBV7-3, TRBJ1-1)
CASGLKGGNTEAFF

SEQ ID NO: 623465 - protein, 14 aa, Homo sapiens
  CDR3 for alpha chain variable domain of TCR clone 311733 (TRAV12-1, TRAJ13)
CVVIDSGGYQKVTF

SEQ ID NO: 623466 - protein, 14 aa, Homo sapiens
  CDR3 for beta chain variable domain of TCR clone 311733 (TRBV13, TRBJ2-7)
CASSLKGASYEQYF

SEQ ID NO: 623467 - protein, 18 aa, Homo sapiens
  CDR3 for alpha chain variable domain of TCR clone 311734 (TRAV21, TRAJ52)
CAVRPSPAGGTSYGKLTC

SEQ ID NO: 623468 - protein, 17 aa, Homo sapiens
  CDR3 for beta chain variable domain of TCR clone 311734 (TRBV13, TRBJ2-3)
CASSRSRVAGGRNTQYF

SEQ ID NO: 623469 - protein, 12 aa, Homo sapiens
  CDR3 for alpha chain variable domain of TCR clone 311735 (TRAV1-1, TRAJ39)
CAVPVVGNMLTF

SEQ ID NO: 623470 - protein, 15 aa, Homo sapiens
  CDR3 for beta chain variable domain of TCR clone 311735 (TRBV6-5, TRBJ2-1)
CASSYDAGAGNEQFF

SEQ ID NO: 623471 - protein, 15 aa, Homo sapiens
  CDR3 for alpha chain variable domain of TCR clone 311736 (TRAV3, TRAJ20)
CAVRDIKLSDYKLSF

SEQ ID NO: 623472 - protein, 17 aa, Homo sapiens
  CDR3 for beta chain variable domain of TCR clone 311736 (TRBV20-1, TRBJ2-2)
CSSSGSGQGGLTGELFF

SEQ ID NO: 623473 - protein, 19 aa, Homo sapiens
  CDR3 for alpha chain variable domain of TCR clone 311737 (TRAV8-3, TRAJ8)
LSTSVLWDPMNTGFQKLVF

SEQ ID NO: 623474 - protein, 13 aa, Homo sapiens
  CDR3 for beta chain variable domain of TCR clone 311737 (TRBV10-2, TRBJ2-3)
CVSSESGDHTQYF

SEQ ID NO: 623475 - protein, 14 aa, Homo sapiens
  CDR3 for alpha chain variable domain of TCR clone 311738 (TRAV3, TRAJ9)
CAVSGNTGGFKTIF

SEQ ID NO: 623476 - protein, 18 aa, Homo sapiens
  CDR3 for beta chain variable domain of TCR clone 311738 (TRBV7-2, TRBJ2-7)
CASSLGLAGGRTSSTSGR

SEQ ID NO: 623477 - protein, 17 aa, Homo sapiens
  CDR3 for alpha chain variable domain of TCR clone 311739 (TRAV27, TRAJ42)
CAERVIYYGGSQGNLIF

SEQ ID NO: 623478 - protein, 14 aa, Homo sapiens
  CDR3 for beta chain variable domain of TCR clone 311739 (TRBV19, TRBJ2-1)
CASPTFVLSGEQFF

SEQ ID NO: 623479 - protein, 15 aa, Homo sapiens
  CDR3 for alpha chain variable domain of TCR clone 311740 (TRAV26-1, TRAJ29)
CIVRVEGSGNTPLVF

SEQ ID NO: 623480 - protein, 18 aa, Homo sapiens
  CDR3 for beta chain variable domain of TCR clone 311740 (TRBV18, TRBJ2-1)
CAGCPNWGQGAPKCEQFF

SEQ ID NO: 623481 - protein, 15 aa, Homo sapiens
  CDR3 for alpha chain variable domain of TCR clone 311741 (TRAV1-2, TRAJ8)
CSVRDRNTGFQKLVF

SEQ ID NO: 623482 - protein, 13 aa, Homo sapiens
  CDR3 for beta chain variable domain of TCR clone 311741 (TRBV5-7, TRBJ2-1)
CASSLVESVEQFF

SEQ ID NO: 623483 - protein, 16 aa, Homo sapiens
  CDR3 for alpha chain variable domain of TCR clone 311742 (TRAV1-2, TRAJ10)
CAVRGVLTGGGNKLTF

SEQ ID NO: 623484 - protein, 15 aa, Homo sapiens
  CDR3 for beta chain variable domain of TCR clone 311742 (TRBV7-9, TRBJ1-6)
CASSSPGRANSPLHF

SEQ ID NO: 623485 - protein, 10 aa, Homo sapiens
  CDR3 for alpha chain variable domain of TCR clone 311743 (TRAV23/DV6, TRAJ43)
CAAAVAALEQ

SEQ ID NO: 623486 - protein, 15 aa, Homo sapiens
  CDR3 for beta chain variable domain of TCR clone 311743 (TRBV20-1, TRBJ1-1)
CSASRGVTGNTEAVF

SEQ ID NO: 623487 - protein, 19 aa, Homo sapiens
  CDR3 for alpha chain variable domain of TCR clone 311744 (TRAV2, TRAJ20)
ILQVREADAAVYRDCKLSF

SEQ ID NO: 623488 - protein, 17 aa, Homo sapiens
  CDR3 for beta chain variable domain of TCR clone 311744 (TRBV20-1, TRBJ2-2)
CSASGSGHGGLTGELFF

SEQ ID NO: 623489 - protein, 16 aa, Homo sapiens
  CDR3 for alpha chain variable domain of TCR clone 311745 (TRAV4, TRAJ22)
CLVGDLYSGSARQLTF

SEQ ID NO: 623490 - protein, 15 aa, Homo sapiens
  CDR3 for beta chain variable domain of TCR clone 311745 (TRBV7-9, TRBJ2-1)
CQSDVAGGSYNEQFF

SEQ ID NO: 623491 - protein, 11 aa, Homo sapiens
  CDR3 for alpha chain variable domain of TCR clone 311746 (TRAV12-1, TRAJ26)
CVVAYGRNFVF

SEQ ID NO: 623492 - protein, 15 aa, Homo sapiens
  CDR3 for beta chain variable domain of TCR clone 311746 (TRBV12-4, TRBJ2-5)
CASSGTGQAQETQYF

SEQ ID NO: 623493 - protein, 18 aa, Homo sapiens
  CDR3 for alpha chain variable domain of TCR clone 311747 (TRAV13-1, TRAJ52)
CAASKRSAGGTSYGKLTF

SEQ ID NO: 623494 - protein, 12 aa, Homo sapiens
  CDR3 for beta chain variable domain of TCR clone 311747 (TRBV12-4, TRBJ1-2)
ASSLRQGKGYTF

SEQ ID NO: 623495 - protein, 14 aa, Homo sapiens
  CDR3 for alpha chain variable domain of TCR clone 311748 (TRAV1-2, TRAJ8)
CAVREGTGFQKLVF

SEQ ID NO: 623496 - protein, 14 aa, Homo sapiens
  CDR3 for beta chain variable domain of TCR clone 311748 (TRBV12-4, TRBJ2-1)
CASSLGQGASEQFF

SEQ ID NO: 623497 - protein, 16 aa, Homo sapiens
  CDR3 for alpha chain variable domain of TCR clone 311749 (TRAV30, TRAJ24)
CGTEIVDADSWGKFQF

SEQ ID NO: 623498 - protein, 17 aa, Homo sapiens
  CDR3 for beta chain variable domain of TCR clone 311749 (TRBV20-1, TRBJ2-1)
CSAPPRLSGTRYNEQFF

SEQ ID NO: 623499 - protein, 13 aa, Homo sapiens
  CDR3 for alpha chain variable domain of TCR clone 311750 (TRAV23/DV6, TRAJ10)
ESVLTGGGNKLTF

SEQ ID NO: 623500 - protein, 13 aa, Homo sapiens
  CDR3 for beta chain variable domain of TCR clone 311750 (TRBV11-1, TRBJ1-2)
CASVGSWGYGYTF

SEQ ID NO: 623501 - protein, 10 aa, Homo sapiens
  CDR3 for alpha chain variable domain of TCR clone 311751 (TRAV36/DV7, TRAJ31)
CAVGEARLMF

SEQ ID NO: 623502 - protein, 13 aa, Homo sapiens
  CDR3 for beta chain variable domain of TCR clone 311751 (TRBV7-2, TRBJ2-2)
CASSLAVTGELFF

SEQ ID NO: 623503 - protein, 15 aa, Homo sapiens
  CDR3 for alpha chain variable domain of TCR clone 311752 (TRAV3, TRAJ3)
CAVRGGHSSASKIIF

SEQ ID NO: 623504 - protein, 17 aa, Homo sapiens
  CDR3 for beta chain variable domain of TCR clone 311752 (TRBV25-1, TRBJ2-7)
CASSDARVVFSSYEQYF

SEQ ID NO: 623505 - protein, 14 aa, Homo sapiens
  CDR3 for alpha chain variable domain of TCR clone 311753 (TRAV1-2, TRAJ16)
CAVNRFSDGQKLIF

SEQ ID NO: 623506 - protein, 14 aa, Homo sapiens
  CDR3 for beta chain variable domain of TCR clone 311753 (TRBV2, TRBJ1-1)
CASSEGLLNTEAFF

SEQ ID NO: 623507 - protein, 12 aa, Homo sapiens
  CDR3 for alpha chain variable domain of TCR clone 311754 (TRAV9-2, TRAJ26)
CALRGYGQNFCF

SEQ ID NO: 623508 - protein, 12 aa, Homo sapiens
  CDR3 for beta chain variable domain of TCR clone 311754 (TRBV29-1, TRBJ2-3)
CSVTGGADTQYF

SEQ ID NO: 623509 - protein, 16 aa, Homo sapiens
  CDR3 for alpha chain variable domain of TCR clone 311755 (TRAV30, TRAJ24)
CGTEIVDADSWGKFQF

SEQ ID NO: 623510 - protein, 16 aa, Homo sapiens
  CDR3 for beta chain variable domain of TCR clone 311755 (TRBV4-1, TRBJ2-7)
CASSREGTASSYEQYF

SEQ ID NO: 623511 - protein, 13 aa, Homo sapiens
  CDR3 for alpha chain variable domain of TCR clone 311756 (TRAV21, TRAJ13)
CAVNSGGYQKVTF

SEQ ID NO: 623512 - protein, 17 aa, Homo sapiens
  CDR3 for beta chain variable domain of TCR clone 311756 (TRBV9, TRBJ2-5)
CASSVAWQGPSIETQYF

SEQ ID NO: 623513 - protein, 13 aa, Homo sapiens
  CDR3 for alpha chain variable domain of TCR clone 311757 (TRAV27, TRAJ49)
CAPRPYTGNQFYF

SEQ ID NO: 623514 - protein, 15 aa, Homo sapiens
  CDR3 for beta chain variable domain of TCR clone 311757 (TRBV5-1, TRBJ2-7)
CASSLNGGPAREQYF

SEQ ID NO: 623515 - protein, 13 aa, Homo sapiens
  CDR3 for alpha chain variable domain of TCR clone 311758 (TRAV1-2, TRAJ9)
CAALNTGGFKTIF

SEQ ID NO: 623516 - protein, 14 aa, Homo sapiens
  CDR3 for beta chain variable domain of TCR clone 311758 (TRBV7-2, TRBJ2-3)
CASSQTGSSYTQYF

SEQ ID NO: 623517 - protein, 14 aa, Homo sapiens
  CDR3 for alpha chain variable domain of TCR clone 311759 (TRAV21, TRAJ37)
CAVKGSSNTGKLIF

SEQ ID NO: 623518 - protein, 13 aa, Homo sapiens
  CDR3 for beta chain variable domain of TCR clone 311759 (TRBV19, TRBJ1-2)
CASSVPGQDGYTF

SEQ ID NO: 623519 - protein, 16 aa, Homo sapiens
  CDR3 for alpha chain variable domain of TCR clone 311760 (TRAV16, TRAJ52)
CALSAAGGTSYGKLTV

SEQ ID NO: 623520 - protein, 19 aa, Homo sapiens
  CDR3 for beta chain variable domain of TCR clone 311760 (TRBV19, TRBJ2-5)
CASSIGQVTDFFLGETQYF

SEQ ID NO: 623521 - protein, 14 aa, Homo sapiens
  CDR3 for alpha chain variable domain of TCR clone 311761 (TRAV35, TRAJ22)
CAGLRPGSARQLTF

SEQ ID NO: 623522 - protein, 14 aa, Homo sapiens
  CDR3 for beta chain variable domain of TCR clone 311761 (TRBV7-8, TRBJ2-3)
CASSFKSSTDTQYF

SEQ ID NO: 623523 - protein, 14 aa, Homo sapiens
  CDR3 for alpha chain variable domain of TCR clone 311762 (TRAV25, TRAJ45)
CAGNSGGGADGLTF

SEQ ID NO: 623524 - protein, 14 aa, Homo sapiens
  CDR3 for beta chain variable domain of TCR clone 311762 (TRBV29-1, TRBJ1-2)
CSARRGTQTSGYAF

SEQ ID NO: 623525 - protein, 12 aa, Homo sapiens
  CDR3 for alpha chain variable domain of TCR clone 311763 (TRAV12-3, TRAJ17)
CAMTLTGNKITF

SEQ ID NO: 623526 - protein, 14 aa, Homo sapiens
  CDR3 for beta chain variable domain of TCR clone 311763 (TRBV12-4, TRBJ2-3)
CASSGQGSTDTQYF

SEQ ID NO: 623527 - protein, 15 aa, Homo sapiens
  CDR3 for alpha chain variable domain of TCR clone 311764 (TRAV4, TRAJ39)
CLVGPNNNAGNMPTF

SEQ ID NO: 623528 - protein, 15 aa, Homo sapiens
  CDR3 for beta chain variable domain of TCR clone 311764 (TRBV7-9, TRBJ2-2)
CASGPLDTFPGELFF

SEQ ID NO: 623529 - protein, 12 aa, Homo sapiens
  CDR3 for alpha chain variable domain of TCR clone 311765 (TRAV27, TRAJ35)
CAGADFGNVLHC

SEQ ID NO: 623530 - protein, 16 aa, Homo sapiens
  CDR3 for beta chain variable domain of TCR clone 311765 (TRBV6-1, TRBJ2-1)
CASILRRGSSYNEQFF

SEQ ID NO: 623531 - protein, 14 aa, Homo sapiens
  CDR3 for alpha chain variable domain of TCR clone 311766 (TRAV1-2, TRAJ8)
CAVRADTGFQKLVF

SEQ ID NO: 623532 - protein, 15 aa, Homo sapiens
  CDR3 for beta chain variable domain of TCR clone 311766 (TRBV5-7, TRBJ2-3)
CASSPGLATTDTQYF

SEQ ID NO: 623533 - protein, 18 aa, Homo sapiens
  CDR3 for alpha chain variable domain of TCR clone 311767 (TRAV29/DV5, TRAJ52)
CAAGFRGAGGTSYGKLTF

SEQ ID NO: 623534 - protein, 15 aa, Homo sapiens
  CDR3 for beta chain variable domain of TCR clone 311767 (TRBV6-1, TRBJ2-3)
CASSERGGITDTQYF

SEQ ID NO: 623535 - protein, 14 aa, Homo sapiens
  CDR3 for alpha chain variable domain of TCR clone 311768 (TRAV9-2, TRAJ39)
CALYIYNAGNMLTF

SEQ ID NO: 623536 - protein, 12 aa, Homo sapiens
  CDR3 for beta chain variable domain of TCR clone 311768 (TRBV2, TRBJ2-1)
CASRPGPREQFF

SEQ ID NO: 623537 - protein, 16 aa, Homo sapiens
  CDR3 for alpha chain variable domain of TCR clone 311769 (TRAV17, TRAJ54)
CATDSDIIQGAQKLVF

SEQ ID NO: 623538 - protein, 15 aa, Homo sapiens
  CDR3 for beta chain variable domain of TCR clone 311769 (TRBV20-1, TRBJ2-7)
CSAESGTSGAYEQYF

SEQ ID NO: 623539 - protein, 11 aa, Homo sapiens
  CDR3 for alpha chain variable domain of TCR clone 311770 (TRAV2, TRAJ13)
CASGGYQKVTF

SEQ ID NO: 623540 - protein, 12 aa, Homo sapiens
  CDR3 for beta chain variable domain of TCR clone 311770 (TRBV20-1, TRBJ2-7)
CIAITPTKEQYF

SEQ ID NO: 623541 - protein, 14 aa, Homo sapiens
  CDR3 for alpha chain variable domain of TCR clone 311771 (TRAV1-1, TRAJ23)
CAVSIYNQGGKLIF

SEQ ID NO: 623542 - protein, 13 aa, Homo sapiens
  CDR3 for beta chain variable domain of TCR clone 311771 (TRBV13, TRBJ2-5)
CASSPEVGETQYF

SEQ ID NO: 623543 - protein, 17 aa, Homo sapiens
  CDR3 for alpha chain variable domain of TCR clone 311772 (TRAV4, TRAJ42)
CLVGVLNYGGSQGNTIF

SEQ ID NO: 623544 - protein, 12 aa, Homo sapiens
  CDR3 for beta chain variable domain of TCR clone 311772 (TRBV20-1, TRBJ2-1)
CSAQYTYNEQFF

SEQ ID NO: 623545 - protein, 16 aa, Homo sapiens
  CDR3 for alpha chain variable domain of TCR clone 311773 (TRAV1-1, TRAJ29)
CVVRSTRNSGHTPLVF

SEQ ID NO: 623546 - protein, 14 aa, Homo sapiens
  CDR3 for beta chain variable domain of TCR clone 311773 (TRBV19, TRBJ2-1)
CASPTFVLSGEQFF

SEQ ID NO: 623547 - protein, 19 aa, Homo sapiens
  CDR3 for alpha chain variable domain of TCR clone 311774 (TRAV26-1, TRAJ52)
CIVRAHRNAGGTSYGKLTF

SEQ ID NO: 623548 - protein, 15 aa, Homo sapiens
  CDR3 for beta chain variable domain of TCR clone 311774 (TRBV12-4, TRBJ2-5)
SASSPPTGLQETQYF

SEQ ID NO: 623549 - protein, 12 aa, Homo sapiens
  CDR3 for alpha chain variable domain of TCR clone 311775 (TRAV12-3, TRAJ17)
CAMTLTGNKLTF

SEQ ID NO: 623550 - protein, 15 aa, Homo sapiens
  CDR3 for beta chain variable domain of TCR clone 311775 (TRBV24-1, TRBJ1-4)
CATSDPQGADEKLFF

SEQ ID NO: 623551 - protein, 14 aa, Homo sapiens
  CDR3 for alpha chain variable domain of TCR clone 311776 (TRAV1-2, TRAJ16)
CAVNRFSDGQKLLF

SEQ ID NO: 623552 - protein, 14 aa, Homo sapiens
  CDR3 for beta chain variable domain of TCR clone 311776 (TRBV11-2, TRBJ2-5)
CASSRTGDIETQYF

SEQ ID NO: 623553 - protein, 11 aa, Homo sapiens
  CDR3 for alpha chain variable domain of TCR clone 311777 (TRAV35, TRAJ30)
CAGTGDDKIIF

SEQ ID NO: 623554 - protein, 14 aa, Homo sapiens
  CDR3 for beta chain variable domain of TCR clone 311777 (TRBV7-6, TRBJ1-6)
CASSQAGGGSPLHF

SEQ ID NO: 623555 - protein, 10 aa, Homo sapiens
  CDR3 for alpha chain variable domain of TCR clone 311778 (TRAV8-4, TRAJ43)
CAVSADDMRF

SEQ ID NO: 623556 - protein, 15 aa, Homo sapiens
  CDR3 for beta chain variable domain of TCR clone 311778 (TRBV28, TRBJ2-1)
CASRKTGTAYNEQFF

SEQ ID NO: 623557 - protein, 14 aa, Homo sapiens
  CDR3 for alpha chain variable domain of TCR clone 311779 (TRAV1-2, TRAJ16)
CAVNRLSDGQKLLF

SEQ ID NO: 623558 - protein, 12 aa, Homo sapiens
  CDR3 for beta chain variable domain of TCR clone 311779 (TRBV7-8, TRBJ2-7)
CASSLGDREQYF

SEQ ID NO: 623559 - protein, 13 aa, Homo sapiens
  CDR3 for alpha chain variable domain of TCR clone 311780 (TRAV12-2, TRAJ3)
CAGCESSASKIIF

SEQ ID NO: 623560 - protein, 16 aa, Homo sapiens
  CDR3 for beta chain variable domain of TCR clone 311780 (TRBV12-5, TRBJ2-5)
CASGPRTSGNQETQYF

SEQ ID NO: 623561 - protein, 14 aa, Homo sapiens
  CDR3 for alpha chain variable domain of TCR clone 311781 (TRAV12-2, TRAJ24)
CSVTPADSWGKLQF

SEQ ID NO: 623562 - protein, 16 aa, Homo sapiens
  CDR3 for beta chain variable domain of TCR clone 311781 (TRBV7-7, TRBJ2-1)
CASSLASGTSYNEQFF

SEQ ID NO: 623563 - protein, 11 aa, Homo sapiens
  CDR3 for alpha chain variable domain of TCR clone 311782 (TRAV1-2, TRAJ40)
CAVPGTYKYIF

SEQ ID NO: 623564 - protein, 14 aa, Homo sapiens
  CDR3 for beta chain variable domain of TCR clone 311782 (TRBV11-2, TRBJ2-3)
CASSRLARTDTQYF

SEQ ID NO: 623565 - protein, 14 aa, Homo sapiens
  CDR3 for alpha chain variable domain of TCR clone 311783 (TRAV13-1, TRAJ26)
CAASSAHYGQNLVF

SEQ ID NO: 623566 - protein, 17 aa, Homo sapiens
  CDR3 for beta chain variable domain of TCR clone 311783 (TRBV25-1, TRBJ2-5)
CASSRRGGRGGQETQYF

SEQ ID NO: 623567 - protein, 13 aa, Homo sapiens
  CDR3 for alpha chain variable domain of TCR clone 311784 (TRAV17, TRAJ26)
CATVDNYGQNFVF

SEQ ID NO: 623568 - protein, 13 aa, Homo sapiens
  CDR3 for beta chain variable domain of TCR clone 311784 (TRBV5-5, TRBJ2-2)
CASTLGGAGELFF

SEQ ID NO: 623569 - protein, 14 aa, Homo sapiens
  CDR3 for alpha chain variable domain of TCR clone 311785 (TRAV13-1, TRAJ44)
CAAKATGTASKLPF

SEQ ID NO: 623570 - protein, 15 aa, Homo sapiens
  CDR3 for beta chain variable domain of TCR clone 311785 (TRBV19, TRBJ2-1)
CASIKGRGPYNEQFF

SEQ ID NO: 623571 - protein, 14 aa, Homo sapiens
  CDR3 for alpha chain variable domain of TCR clone 311786 (TRAV8-4, TRAJ40)
CAVIPTSGTCKYIF

SEQ ID NO: 623572 - protein, 15 aa, Homo sapiens
  CDR3 for beta chain variable domain of TCR clone 311786 (TRBV7-2, TRBJ2-1)
CASTSASGDYNEQFF

SEQ ID NO: 623573 - protein, 12 aa, Homo sapiens
  CDR3 for alpha chain variable domain of TCR clone 311787 (TRAV12-3, TRAJ17)
CAMTLTGNKLTF

SEQ ID NO: 623574 - protein, 17 aa, Homo sapiens
  CDR3 for beta chain variable domain of TCR clone 311787 (TRBV3-1, TRBJ2-7)
CASSQDLTGLSSYEQYF

SEQ ID NO: 623575 - protein, 15 aa, Homo sapiens
  CDR3 for alpha chain variable domain of TCR clone 311788 (TRAV13-1, TRAJ52)
CAATSPRTSSGKLTF

SEQ ID NO: 623576 - protein, 12 aa, Homo sapiens
  CDR3 for beta chain variable domain of TCR clone 311788 (TRBV7-3, TRBJ2-7)
CARRLGDREQYF

SEQ ID NO: 623577 - protein, 18 aa, Homo sapiens
  CDR3 for alpha chain variable domain of TCR clone 311789 (TRAV21, TRAJ52)
CAVRPSPAGGTSYGKLTF

SEQ ID NO: 623578 - protein, 11 aa, Homo sapiens
  CDR3 for beta chain variable domain of TCR clone 311789 (TRBV18, TRBJ2-5)
CASSPRETQYF

SEQ ID NO: 623579 - protein, 14 aa, Homo sapiens
  CDR3 for alpha chain variable domain of TCR clone 311790 (TRAV13-1, TRAJ35)
CAASKGGFGNVLHC

SEQ ID NO: 623580 - protein, 13 aa, Homo sapiens
  CDR3 for beta chain variable domain of TCR clone 311790 (TRBV12-4, TRBJ2-5)
CASSPGTEETQYF

SEQ ID NO: 623581 - protein, 22 aa, Homo sapiens
  CDR3 for alpha chain variable domain of TCR clone 311791 (TRAV27, TRAJ41)
CAVRTQIPAIQNPDPAVYQLRE

SEQ ID NO: 623582 - protein, 16 aa, Homo sapiens
  CDR3 for beta chain variable domain of TCR clone 311791 (TRBV5-1, TRBJ2-3)
CGSSLGLAVYTDTQYF

SEQ ID NO: 623583 - protein, 14 aa, Homo sapiens
  CDR3 for alpha chain variable domain of TCR clone 311792 (TRAV1-2, TRAJ27)
CAPAEYTNAGKPTF

SEQ ID NO: 623584 - protein, 18 aa, Homo sapiens
  CDR3 for beta chain variable domain of TCR clone 311792 (TRBV28, TRBJ1-2)
CASRQQQGKRGSNYGYTF

SEQ ID NO: 623585 - protein, 14 aa, Homo sapiens
  CDR3 for alpha chain variable domain of TCR clone 311793 (TRAV26-1, TRAJ39)
CVVRGSRAGNMPTF

SEQ ID NO: 623586 - protein, 15 aa, Homo sapiens
  CDR3 for beta chain variable domain of TCR clone 311793 (TRBV7-9, TRBJ1-5)
CASSQGHQPNQPQHF

SEQ ID NO: 623587 - protein, 12 aa, Homo sapiens
  CDR3 for alpha chain variable domain of TCR clone 311794 (TRAV12-3, TRAJ17)
CALTLTGNKLTF

SEQ ID NO: 623588 - protein, 16 aa, Homo sapiens
  CDR3 for beta chain variable domain of TCR clone 311794 (TRBV29-1, TRBJ2-7)
CSVEDAEDGTAYEQYF

SEQ ID NO: 623589 - protein, 15 aa, Homo sapiens
  CDR3 for alpha chain variable domain of TCR clone 311795 (TRAV3, TRAJ6)
CAVSGESGGSYIPTF

SEQ ID NO: 623590 - protein, 14 aa, Homo sapiens
  CDR3 for beta chain variable domain of TCR clone 311795 (TRBV7-9, TRBJ2-1)
CASSSMVGFGEQFF

SEQ ID NO: 623591 - protein, 12 aa, Homo sapiens
  CDR3 for alpha chain variable domain of TCR clone 311796 (TRAV8-3, TRAJ26)
CAGDNYGQNFVF

SEQ ID NO: 623592 - protein, 15 aa, Homo sapiens
  CDR3 for beta chain variable domain of TCR clone 311796 (TRBV7-9, TRBJ2-2)
CASGPLDTFPGELFF

SEQ ID NO: 623593 - protein, 12 aa, Homo sapiens
  CDR3 for alpha chain variable domain of TCR clone 311797 (TRAV12-3, TRAJ17)
CAMMLTGNKLTF

SEQ ID NO: 623594 - protein, 15 aa, Homo sapiens
  CDR3 for beta chain variable domain of TCR clone 311797 (TRBV12-4, TRBJ2-5)
CASSPPTGLQETQYF

SEQ ID NO: 623595 - protein, 14 aa, Homo sapiens
  CDR3 for alpha chain variable domain of TCR clone 311798 (TRAV8-4, TRAJ5)
CAVSTDTGRRALTF

SEQ ID NO: 623596 - protein, 14 aa, Homo sapiens
  CDR3 for beta chain variable domain of TCR clone 311798 (TRBV7-3, TRBJ2-2)
CASSSGGYTGELFF

SEQ ID NO: 623597 - protein, 13 aa, Homo sapiens
  CDR3 for alpha chain variable domain of TCR clone 311799 (TRAV21, TRAJ27)
CAARPGNAGKSTF

SEQ ID NO: 623598 - protein, 13 aa, Homo sapiens
  CDR3 for beta chain variable domain of TCR clone 311799 (TRBV29-1, TRBJ2-3)
CSATRGGRDTQYF

SEQ ID NO: 623599 - protein, 12 aa, Homo sapiens
  CDR3 for alpha chain variable domain of TCR clone 311800 (TRAV27, TRAJ36)
ASTPAGANNLCF

SEQ ID NO: 623600 - protein, 13 aa, Homo sapiens
  CDR3 for beta chain variable domain of TCR clone 311800 (TRBV7-9, TRBJ2-3)
CASSPGSTDTQYF

SEQ ID NO: 623601 - protein, 11 aa, Homo sapiens
  CDR3 for alpha chain variable domain of TCR clone 311801 (TRAV17, TRAJ43)
CATPRSNDMRF

SEQ ID NO: 623602 - protein, 13 aa, Homo sapiens
  CDR3 for beta chain variable domain of TCR clone 311801 (TRBV28, TRBJ2-4)
CASSSSRKNIQYF

SEQ ID NO: 623603 - protein, 14 aa, Homo sapiens
  CDR3 for alpha chain variable domain of TCR clone 311802 (TRAV20, TRAJ56)
CAVQFGGANSKQTF

SEQ ID NO: 623604 - protein, 17 aa, Homo sapiens
  CDR3 for beta chain variable domain of TCR clone 311802 (TRBV20-1, TRBJ2-1)
CSASSSGLAGSYNEQFF

SEQ ID NO: 623605 - protein, 13 aa, Homo sapiens
  CDR3 for alpha chain variable domain of TCR clone 311803 (TRAV34, TRAJ33)
CGADMNSNYQLIW

SEQ ID NO: 623606 - protein, 16 aa, Homo sapiens
  CDR3 for beta chain variable domain of TCR clone 311803 (TRBV20-1, TRBJ2-1)
CSASLAGAPGYNEQFF

SEQ ID NO: 623607 - protein, 16 aa, Homo sapiens
  CDR3 for alpha chain variable domain of TCR clone 311804 (TRAV26-1, )
CIDIQNPDPAVYQLRD

SEQ ID NO: 623608 - protein, 19 aa, Homo sapiens
  CDR3 for beta chain variable domain of TCR clone 311804 (TRBV19, TRBJ2-5)
CASSIGQVTDFVLGETQYF

SEQ ID NO: 623609 - protein, 15 aa, Homo sapiens
  CDR3 for alpha chain variable domain of TCR clone 311805 (TRAV39, TRAJ32)
CAVDMEGGATNKLIF

SEQ ID NO: 623610 - protein, 14 aa, Homo sapiens
  CDR3 for beta chain variable domain of TCR clone 311805 (TRBV7-8, TRBJ2-3)
CASSLEAGTDTQYF

SEQ ID NO: 623611 - protein, 15 aa, Homo sapiens
  CDR3 for alpha chain variable domain of TCR clone 311806 (TRAV14/DV4, TRAJ21)
CAMREGVYNFNKFYF

SEQ ID NO: 623612 - protein, 14 aa, Homo sapiens
  CDR3 for beta chain variable domain of TCR clone 311806 (TRBV5-5, TRBJ1-5)
CASSGQGVDQPQHF

SEQ ID NO: 623613 - protein, 13 aa, Homo sapiens
  CDR3 for alpha chain variable domain of TCR clone 311807 (TRAV27, TRAJ41)
CSGEGNSGYELNF

SEQ ID NO: 623614 - protein, 14 aa, Homo sapiens
  CDR3 for beta chain variable domain of TCR clone 311807 (TRBV7-2, TRBJ1-1)
CASSFLTGTTEAFF

SEQ ID NO: 623615 - protein, 12 aa, Homo sapiens
  CDR3 for alpha chain variable domain of TCR clone 311808 (TRAV21, TRAJ23)
CAVPNQGGKLLF

SEQ ID NO: 623616 - protein, 15 aa, Homo sapiens
  CDR3 for beta chain variable domain of TCR clone 311808 (TRBV27, TRBJ2-1)
CASSFGAGTGPEQFF

SEQ ID NO: 623617 - protein, 14 aa, Homo sapiens
  CDR3 for alpha chain variable domain of TCR clone 311809 (TRAV12-2, TRAJ13)
GAVKKTGGYQKVTF

SEQ ID NO: 623618 - protein, 14 aa, Homo sapiens
  CDR3 for beta chain variable domain of TCR clone 311809 (TRBV20-1, TRBJ2-3)
CRAYSGGRTDTQYF

SEQ ID NO: 623619 - protein, 14 aa, Homo sapiens
  CDR3 for alpha chain variable domain of TCR clone 311810 (TRAV12-3, TRAJ35)
CAMSLIGFGNALHC

SEQ ID NO: 623620 - protein, 16 aa, Homo sapiens
  CDR3 for beta chain variable domain of TCR clone 311810 (TRBV7-6, TRBJ2-7)
CQQLSSASGNSYEQYF

SEQ ID NO: 623621 - protein, 12 aa, Homo sapiens
  CDR3 for alpha chain variable domain of TCR clone 311811 (TRAV24, TRAJ37)
CASSSNTGKLIF

SEQ ID NO: 623622 - protein, 17 aa, Homo sapiens
  CDR3 for beta chain variable domain of TCR clone 311811 (TRBV20-1, TRBJ2-2)
CSASGSGQGGLTGELFF

SEQ ID NO: 623623 - protein, 14 aa, Homo sapiens
  CDR3 for alpha chain variable domain of TCR clone 311812 (TRAV3, TRAJ22)
CAVRDYGSARQLTF

SEQ ID NO: 623624 - protein, 11 aa, Homo sapiens
  CDR3 for beta chain variable domain of TCR clone 311812 (TRBV28, TRBJ2-7)
CASGPLPEQYF

SEQ ID NO: 623625 - protein, 15 aa, Homo sapiens
  CDR3 for alpha chain variable domain of TCR clone 311813 (TRAV26-1, TRAJ40)
CIVRVTTSGTYKYIF

SEQ ID NO: 623626 - protein, 13 aa, Homo sapiens
  CDR3 for beta chain variable domain of TCR clone 311813 (TRBV11-3, TRBJ1-1)
CASSLTRNTEAFF

SEQ ID NO: 623627 - protein, 16 aa, Homo sapiens
  CDR3 for alpha chain variable domain of TCR clone 311814 (TRAV30, TRAJ24)
CGTEIVDADCWGKFQF

SEQ ID NO: 623628 - protein, 12 aa, Homo sapiens
  CDR3 for beta chain variable domain of TCR clone 311814 (TRBV11-2, TRBJ2-1)
CASSPGNNEQFF

SEQ ID NO: 623629 - protein, 12 aa, Homo sapiens
  CDR3 for alpha chain variable domain of TCR clone 311815 (TRAV3, TRAJ20)
CAVRDPDYKLSF

SEQ ID NO: 623630 - protein, 14 aa, Homo sapiens
  CDR3 for beta chain variable domain of TCR clone 311815 (TRBV13, TRBJ2-5)
CASSLERVGETQYF

SEQ ID NO: 623631 - protein, 14 aa, Homo sapiens
  CDR3 for alpha chain variable domain of TCR clone 311816 (TRAV16, TRAJ17)
CAPRIKAAGNKLTF

SEQ ID NO: 623632 - protein, 13 aa, Homo sapiens
  CDR3 for beta chain variable domain of TCR clone 311816 (TRBV4-2, TRBJ1-1)
CASSQAGNTEAFF

SEQ ID NO: 623633 - protein, 10 aa, Homo sapiens
  CDR3 for alpha chain variable domain of TCR clone 311817 (TRAV12-1, TRAJ37)
ARGNTGKLIF

SEQ ID NO: 623634 - protein, 13 aa, Homo sapiens
  CDR3 for beta chain variable domain of TCR clone 311817 (TRBV10-3, TRBJ2-7)
CASKLAVNYEQYF

SEQ ID NO: 623635 - protein, 14 aa, Homo sapiens
  CDR3 for alpha chain variable domain of TCR clone 311818 (TRAV27, TRAJ38)
CAGPQAGNNRKLIW

SEQ ID NO: 623636 - protein, 14 aa, Homo sapiens
  CDR3 for beta chain variable domain of TCR clone 311818 (TRBV7-9, TRBJ2-7)
CASSLSQGSYEQYF

SEQ ID NO: 623637 - protein, 12 aa, Homo sapiens
  CDR3 for alpha chain variable domain of TCR clone 311819 (TRAV1-1, TRAJ30)
CAVRGRDDKIIF

SEQ ID NO: 623638 - protein, 13 aa, Homo sapiens
  CDR3 for beta chain variable domain of TCR clone 311819 (TRBV4-2, TRBJ1-1)
CASSQAGNTEAFF

SEQ ID NO: 623639 - protein, 18 aa, Homo sapiens
  CDR3 for alpha chain variable domain of TCR clone 311820 (TRAV13-1, TRAJ52)
CAAKNPNAGSTSYGKLTF

SEQ ID NO: 623640 - protein, 15 aa, Homo sapiens
  CDR3 for beta chain variable domain of TCR clone 311820 (TRBV20-1, TRBJ2-7)
CSARDRVSGMDEQYF

SEQ ID NO: 623641 - protein, 15 aa, Homo sapiens
  CDR3 for alpha chain variable domain of TCR clone 311821 (TRAV12-3, TRAJ6)
CAMSATTGGSYIPAF

SEQ ID NO: 623642 - protein, 19 aa, Homo sapiens
  CDR3 for beta chain variable domain of TCR clone 311821 (TRBV25-1, TRBJ2-2)
CAILVYRVDRGRKTGELFF

SEQ ID NO: 623643 - protein, 14 aa, Homo sapiens
  CDR3 for alpha chain variable domain of TCR clone 311822 (TRAV12-1, TRAJ43)
CVVNGRSNNNDMRF

SEQ ID NO: 623644 - protein, 14 aa, Homo sapiens
  CDR3 for beta chain variable domain of TCR clone 311822 (TRBV7-6, TRBJ2-3)
CASSVAGGTDTQYF

SEQ ID NO: 623645 - protein, 15 aa, Homo sapiens
  CDR3 for alpha chain variable domain of TCR clone 311823 (TRAV3, TRAJ42)
CAVRGGTGSQGNLIF

SEQ ID NO: 623646 - protein, 14 aa, Homo sapiens
  CDR3 for beta chain variable domain of TCR clone 311823 (TRBV19, TRBJ1-2)
CASSSLFARDDYTF

SEQ ID NO: 623647 - protein, 12 aa, Homo sapiens
  CDR3 for alpha chain variable domain of TCR clone 311824 (TRAV12-1, TRAJ40)
CVVCSGTYKYIF

SEQ ID NO: 623648 - protein, 15 aa, Homo sapiens
  CDR3 for beta chain variable domain of TCR clone 311824 (TRBV27, TRBJ1-6)
CASSFDRGLGSPLHF

SEQ ID NO: 623649 - protein, 15 aa, Homo sapiens
  CDR3 for alpha chain variable domain of TCR clone 311825 (TRAV8-3, TRAJ41)
CAVGSNSNSGYALNF

SEQ ID NO: 623650 - protein, 14 aa, Homo sapiens
  CDR3 for beta chain variable domain of TCR clone 311825 (TRBV15, TRBJ2-5)
CATSIGGPGETQYF

SEQ ID NO: 623651 - protein, 14 aa, Homo sapiens
  CDR3 for alpha chain variable domain of TCR clone 311826 (TRAV1-2, TRAJ8)
CAVREETGFQKLVF

SEQ ID NO: 623652 - protein, 15 aa, Homo sapiens
  CDR3 for beta chain variable domain of TCR clone 311826 (TRBV7-9, TRBJ2-1)
CQQRCSGGLLNEQFF

SEQ ID NO: 623653 - protein, 13 aa, Homo sapiens
  CDR3 for alpha chain variable domain of TCR clone 311827 (TRAV12-2, TRAJ31)
CAVKADNNARLMF

SEQ ID NO: 623654 - protein, 15 aa, Homo sapiens
  CDR3 for beta chain variable domain of TCR clone 311827 (TRBV2, TRBJ2-1)
CASSELAGSYNEQFF

SEQ ID NO: 623655 - protein, 15 aa, Homo sapiens
  CDR3 for alpha chain variable domain of TCR clone 311828 (TRAV26-1, TRAJ29)
CIVRVEGSGNTPLVF

SEQ ID NO: 623656 - protein, 17 aa, Homo sapiens
  CDR3 for beta chain variable domain of TCR clone 311828 (TRBV28, TRBJ2-7)
CASSPLHRASGVYEQYF

SEQ ID NO: 623657 - protein, 13 aa, Homo sapiens
  CDR3 for alpha chain variable domain of TCR clone 311829 (TRAV13-1, TRAJ5)
CAAEHTGRRALPF

SEQ ID NO: 623658 - protein, 13 aa, Homo sapiens
  CDR3 for beta chain variable domain of TCR clone 311829 (TRBV2, TRBJ1-4)
CASNRGTNEKLFF

SEQ ID NO: 623659 - protein, 13 aa, Homo sapiens
  CDR3 for alpha chain variable domain of TCR clone 311830 (TRAV21, TRAJ27)
CAARPGNAGKSTF

SEQ ID NO: 623660 - protein, 14 aa, Homo sapiens
  CDR3 for beta chain variable domain of TCR clone 311830 (TRBV7-9, TRBJ2-5)
CASSLDAAQETQYF

SEQ ID NO: 623661 - protein, 14 aa, Homo sapiens
  CDR3 for alpha chain variable domain of TCR clone 311831 (TRAV13-1, TRAJ44)
CAAKATGTASKLTS

SEQ ID NO: 623662 - protein, 12 aa, Homo sapiens
  CDR3 for beta chain variable domain of TCR clone 311831 (TRBV7-8, TRBJ2-7)
CASSLGDREQYF

SEQ ID NO: 623663 - protein, 11 aa, Homo sapiens
  CDR3 for alpha chain variable domain of TCR clone 311832 (TRAV12-2, TRAJ30)
CAVGRGDKIIF

SEQ ID NO: 623664 - protein, 14 aa, Homo sapiens
  CDR3 for beta chain variable domain of TCR clone 311832 (TRBV6-1, TRBJ1-3)
CASVQGGGGNTIYF

SEQ ID NO: 623665 - protein, 14 aa, Homo sapiens
  CDR3 for alpha chain variable domain of TCR clone 311833 (TRAV12-1, TRAJ12)
CVVTRMESSYKLIF

SEQ ID NO: 623666 - protein, 13 aa, Homo sapiens
  CDR3 for beta chain variable domain of TCR clone 311833 (TRBV20-1, TRBJ1-1)
CSARGGGNTETFF

SEQ ID NO: 623667 - protein, 23 aa, Homo sapiens
  CDR3 for alpha chain variable domain of TCR clone 311834 (TRAV26-1, TRAJ38)
CIADNAGNNPIQNPDPAGYQLRN

SEQ ID NO: 623668 - protein, 13 aa, Homo sapiens
  CDR3 for beta chain variable domain of TCR clone 311834 (TRBV20-1, TRBJ1-1)
CSARGGGNTEAFF

SEQ ID NO: 623669 - protein, 12 aa, Homo sapiens
  CDR3 for alpha chain variable domain of TCR clone 311835 (TRAV12-3, TRAJ20)
YAMVRGDYKLSF

SEQ ID NO: 623670 - protein, 14 aa, Homo sapiens
  CDR3 for beta chain variable domain of TCR clone 311835 (TRBV5-5, TRBJ1-5)
CASSGQGVDQPQHC

SEQ ID NO: 623671 - protein, 13 aa, Homo sapiens
  CDR3 for alpha chain variable domain of TCR clone 311836 (TRAV27, TRAJ41)
CAGEGNSGYALNF

SEQ ID NO: 623672 - protein, 13 aa, Homo sapiens
  CDR3 for beta chain variable domain of TCR clone 311836 (TRBV7-2, TRBJ2-5)
CASSQTSVETQYF

SEQ ID NO: 623673 - protein, 13 aa, Homo sapiens
  CDR3 for alpha chain variable domain of TCR clone 311837 (TRAV29/DV5, TRAJ58)
CAGEETSGSRLTF

SEQ ID NO: 623674 - protein, 15 aa, Homo sapiens
  CDR3 for beta chain variable domain of TCR clone 311837 (TRBV11-2, TRBJ1-6)
CASTGFGTAVSPLLF

SEQ ID NO: 623675 - protein, 15 aa, Homo sapiens
  CDR3 for alpha chain variable domain of TCR clone 311838 (TRAV3, TRAJ13)
CAVRVSSGGYQKVTF

SEQ ID NO: 623676 - protein, 15 aa, Homo sapiens
  CDR3 for beta chain variable domain of TCR clone 311838 (TRBV5-7, TRBJ1-2)
CASSLGVAANYGYTF

SEQ ID NO: 623677 - protein, 16 aa, Homo sapiens
  CDR3 for alpha chain variable domain of TCR clone 311839 (TRAV12-3, TRAJ53)
CAMSPGSGGSTYKLTF

SEQ ID NO: 623678 - protein, 14 aa, Homo sapiens
  CDR3 for beta chain variable domain of TCR clone 311839 (TRBV4-1, TRBJ2-7)
CASSPVAGGDEQYF

SEQ ID NO: 623679 - protein, 13 aa, Homo sapiens
  CDR3 for alpha chain variable domain of TCR clone 311840 (TRAV1-2, TRAJ9)
CAALTTGGFKTIV

SEQ ID NO: 623680 - protein, 12 aa, Homo sapiens
  CDR3 for beta chain variable domain of TCR clone 311840 (TRBV11-3, TRBJ1-1)
CASSHRQGEAFF

SEQ ID NO: 623681 - protein, 10 aa, Homo sapiens
  CDR3 for alpha chain variable domain of TCR clone 311841 (TRAV12-2, TRAJ43)
CAGADMRFGA

SEQ ID NO: 623682 - protein, 16 aa, Homo sapiens
  CDR3 for beta chain variable domain of TCR clone 311841 (TRBV2, TRBJ2-4)
CASSEAPGGEQNIQYF

SEQ ID NO: 623683 - protein, 14 aa, Homo sapiens
  CDR3 for alpha chain variable domain of TCR clone 311842 (TRAV1-2, TRAJ16)
CAVNRFSDGQKLLF

SEQ ID NO: 623684 - protein, 14 aa, Homo sapiens
  CDR3 for beta chain variable domain of TCR clone 311842 (TRBV6-1, TRBJ1-3)
CAGVQGGGGNTIYF

SEQ ID NO: 623685 - protein, 16 aa, Homo sapiens
  CDR3 for alpha chain variable domain of TCR clone 311843 (TRAV30, TRAJ24)
CGTEIVDADSRGKFQF

SEQ ID NO: 623686 - protein, 14 aa, Homo sapiens
  CDR3 for beta chain variable domain of TCR clone 311843 (TRBV12-5, TRBJ2-5)
CAGGSRTHQETQYF

SEQ ID NO: 623687 - protein, 18 aa, Homo sapiens
  CDR3 for alpha chain variable domain of TCR clone 311844 (TRAV13-2, TRAJ52)
CAETPLNAGGTSYGKLTF

SEQ ID NO: 623688 - protein, 14 aa, Homo sapiens
  CDR3 for beta chain variable domain of TCR clone 311844 (TRBV7-2, TRBJ2-7)
CASRSQGAAYEQYF

SEQ ID NO: 623689 - protein, 13 aa, Homo sapiens
  CDR3 for alpha chain variable domain of TCR clone 311845 (TRAV29/DV5, TRAJ31)
CAASRNTNASLMF

SEQ ID NO: 623690 - protein, 12 aa, Homo sapiens
  CDR3 for beta chain variable domain of TCR clone 311845 (TRBV14, TRBJ2-7)
CASSSLKGEQYF

SEQ ID NO: 623691 - protein, 14 aa, Homo sapiens
  CDR3 for alpha chain variable domain of TCR clone 311846 (TRAV20, TRAJ22)
FAVALGGSARQLTF

SEQ ID NO: 623692 - protein, 15 aa, Homo sapiens
  CDR3 for beta chain variable domain of TCR clone 311846 (TRBV7-2, TRBJ1-1)
CASSFAGDRDTEAFF

SEQ ID NO: 623693 - protein, 18 aa, Homo sapiens
  CDR3 for alpha chain variable domain of TCR clone 311847 (TRAV13-1, TRAJ52)
CAARKRSAGGTSNGKLTF

SEQ ID NO: 623694 - protein, 13 aa, Homo sapiens
  CDR3 for beta chain variable domain of TCR clone 311847 (TRBV12-4, TRBJ1-2)
CASSLRQGRGYTF

SEQ ID NO: 623695 - protein, 16 aa, Homo sapiens
  CDR3 for alpha chain variable domain of TCR clone 311848 (TRAV38-1, TRAJ53)
CAFMKQSGGSNYKLTF

SEQ ID NO: 623696 - protein, 12 aa, Homo sapiens
  CDR3 for beta chain variable domain of TCR clone 311848 (TRBV7-8, TRBJ2-7)
CASSLAGYEQYF

SEQ ID NO: 623697 - protein, 12 aa, Homo sapiens
  CDR3 for alpha chain variable domain of TCR clone 311849 (TRAV17, TRAJ49)
CDTVTTGNQFYF

SEQ ID NO: 623698 - protein, 18 aa, Homo sapiens
  CDR3 for beta chain variable domain of TCR clone 311849 (TRBV11-2, TRBJ2-6)
CASSLNPFLGTGANVLTF

SEQ ID NO: 623699 - protein, 13 aa, Homo sapiens
  CDR3 for alpha chain variable domain of TCR clone 311850 (TRAV13-2, TRAJ40)
CAEFTSGTYKYIF

SEQ ID NO: 623700 - protein, 18 aa, Homo sapiens
  CDR3 for beta chain variable domain of TCR clone 311850 (TRBV7-9, TRBJ2-7)
CASSLTTSGSRTWYEQYF

SEQ ID NO: 623701 - protein, 15 aa, Homo sapiens
  CDR3 for alpha chain variable domain of TCR clone 311851 (TRAV3, TRAJ29)
CALRAPLSGNTPLVF

SEQ ID NO: 623702 - protein, 15 aa, Homo sapiens
  CDR3 for beta chain variable domain of TCR clone 311851 (TRBV28, TRBJ1-1)
CASRIKGGLNTEAFF

SEQ ID NO: 623703 - protein, 13 aa, Homo sapiens
  CDR3 for alpha chain variable domain of TCR clone 311852 (TRAV16, TRAJ5)
CALTNTGRRALTF

SEQ ID NO: 623704 - protein, 17 aa, Homo sapiens
  CDR3 for beta chain variable domain of TCR clone 311852 (TRBV20-1, TRBJ2-1)
CSASSSGLAGSYNEQFF

SEQ ID NO: 623705 - protein, 17 aa, Homo sapiens
  CDR3 for alpha chain variable domain of TCR clone 311853 (TRAV35, TRAJ38)
CAGQLQRNAGNNRKLIW

SEQ ID NO: 623706 - protein, 15 aa, Homo sapiens
  CDR3 for beta chain variable domain of TCR clone 311853 (TRBV11-3, TRBJ2-3)
CASLKDGREGDTQYF

SEQ ID NO: 623707 - protein, 12 aa, Homo sapiens
  CDR3 for alpha chain variable domain of TCR clone 311854 (TRAV2, TRAJ9)
CAVGAGGFKTIF

SEQ ID NO: 623708 - protein, 16 aa, Homo sapiens
  CDR3 for beta chain variable domain of TCR clone 311854 (TRBV13, TRBJ2-2)
CASSPRTREHTGQLFF

SEQ ID NO: 623709 - protein, 18 aa, Homo sapiens
  CDR3 for alpha chain variable domain of TCR clone 311855 (TRAV21, TRAJ52)
CAVRPSPAGGTSYGKMTF

SEQ ID NO: 623710 - protein, 15 aa, Homo sapiens
  CDR3 for beta chain variable domain of TCR clone 311855 (TRBV7-2, TRBJ2-7)
CASSLGGAKSGEQYF

SEQ ID NO: 623711 - protein, 13 aa, Homo sapiens
  CDR3 for alpha chain variable domain of TCR clone 311856 (TRAV35, TRAJ42)
CAGFPGSQGNLIF

SEQ ID NO: 623712 - protein, 17 aa, Homo sapiens
  CDR3 for beta chain variable domain of TCR clone 311856 (TRBV20-1, TRBJ1-4)
SAVLDLTGGELNEKLFF

SEQ ID NO: 623713 - protein, 11 aa, Homo sapiens
  CDR3 for alpha chain variable domain of TCR clone 311857 (TRAV2, TRAJ33)
CAVESNYQLIW

SEQ ID NO: 623714 - protein, 16 aa, Homo sapiens
  CDR3 for beta chain variable domain of TCR clone 311857 (TRBV2, TRBJ1-4)
CASNLLQGATNEKLFF

SEQ ID NO: 623715 - protein, 10 aa, Homo sapiens
  CDR3 for alpha chain variable domain of TCR clone 311858 (TRAV1-2, TRAJ18)
CAVRGEAQPW

SEQ ID NO: 623716 - protein, 19 aa, Homo sapiens
  CDR3 for beta chain variable domain of TCR clone 311858 (TRBV6-3, TRBJ1-2)
CASSYSKGRTGPPNYDYTF

SEQ ID NO: 623717 - protein, 14 aa, Homo sapiens
  CDR3 for alpha chain variable domain of TCR clone 311859 (TRAV12-1, TRAJ30)
CVVNIGGSDDKIIF

SEQ ID NO: 623718 - protein, 14 aa, Homo sapiens
  CDR3 for beta chain variable domain of TCR clone 311859 (TRBV7-6, TRBJ2-3)
CASSLGTVTNTQYF

SEQ ID NO: 623719 - protein, 12 aa, Homo sapiens
  CDR3 for alpha chain variable domain of TCR clone 311860 (TRAV13-1, TRAJ21)
CAAFFNFTKFYF

SEQ ID NO: 623720 - protein, 14 aa, Homo sapiens
  CDR3 for beta chain variable domain of TCR clone 311860 (TRBV4-1, TRBJ2-7)
CASRLTSGSYEQFF

SEQ ID NO: 623721 - protein, 10 aa, Homo sapiens
  CDR3 for alpha chain variable domain of TCR clone 311861 (TRAV16, TRAJ22)
SAMYLRQLTF

SEQ ID NO: 623722 - protein, 12 aa, Homo sapiens
  CDR3 for beta chain variable domain of TCR clone 311861 (TRBV28, TRBJ2-6)
CAIQAGANVLTF

SEQ ID NO: 623723 - protein, 13 aa, Homo sapiens
  CDR3 for alpha chain variable domain of TCR clone 311862 (TRAV13-2, TRAJ40)
CAELISGTYKYIF

SEQ ID NO: 623724 - protein, 14 aa, Homo sapiens
  CDR3 for beta chain variable domain of TCR clone 311862 (TRBV19, TRBJ1-5)
CASGTEVYNQPRHF

SEQ ID NO: 623725 - protein, 13 aa, Homo sapiens
  CDR3 for alpha chain variable domain of TCR clone 311863 (TRAV21, TRAJ27)
CGARPGNAGKSTF

SEQ ID NO: 623726 - protein, 14 aa, Homo sapiens
  CDR3 for beta chain variable domain of TCR clone 311863 (TRBV7-6, TRBJ2-3)
CASSVGTVTDTQYF

SEQ ID NO: 623727 - protein, 14 aa, Homo sapiens
  CDR3 for alpha chain variable domain of TCR clone 311864 (TRAV12-1, TRAJ23)
CVVIVYNQGGKLIF

SEQ ID NO: 623728 - protein, 15 aa, Homo sapiens
  CDR3 for beta chain variable domain of TCR clone 311864 (TRBV14, TRBJ2-7)
CQQPSQQGWVYEQYF

SEQ ID NO: 623729 - protein, 13 aa, Homo sapiens
  CDR3 for alpha chain variable domain of TCR clone 311865 (TRAV8-6, TRAJ49)
CAVITNTGNQFYF

SEQ ID NO: 623730 - protein, 17 aa, Homo sapiens
  CDR3 for beta chain variable domain of TCR clone 311865 (TRBV11-2, TRBJ2-1)
CASSLYTPGVEYNEQFF

SEQ ID NO: 623731 - protein, 14 aa, Homo sapiens
  CDR3 for alpha chain variable domain of TCR clone 311866 (TRAV8-3, TRAJ4)
CAVGAAGGYNKLIF

SEQ ID NO: 623732 - protein, 14 aa, Homo sapiens
  CDR3 for beta chain variable domain of TCR clone 311866 (TRBV7-8, TRBJ2-3)
CASSLEAGTDTQYF

SEQ ID NO: 623733 - protein, 16 aa, Homo sapiens
  CDR3 for alpha chain variable domain of TCR clone 311867 (TRAV16, TRAJ52)
CALSGVGGTSYGTLTF

SEQ ID NO: 623734 - protein, 17 aa, Homo sapiens
  CDR3 for beta chain variable domain of TCR clone 311867 (TRBV13, TRBJ2-3)
CASSLSRVAGGRNTQYF

SEQ ID NO: 623735 - protein, 12 aa, Homo sapiens
  CDR3 for alpha chain variable domain of TCR clone 311868 (TRAV21, TRAJ42)
CAVGGSQGNLIF

SEQ ID NO: 623736 - protein, 16 aa, Homo sapiens
  CDR3 for beta chain variable domain of TCR clone 311868 (TRBV7-3, TRBJ2-1)
CASSLSGGVHYNEQFF

SEQ ID NO: 623737 - protein, 12 aa, Homo sapiens
  CDR3 for alpha chain variable domain of TCR clone 311869 (TRAV13-2, TRAJ48)
VQMDFGNEKLTF

SEQ ID NO: 623738 - protein, 12 aa, Homo sapiens
  CDR3 for beta chain variable domain of TCR clone 311869 (TRBV11-2, TRBJ2-2)
CASSLGGGELFF

SEQ ID NO: 623739 - protein, 16 aa, Homo sapiens
  CDR3 for alpha chain variable domain of TCR clone 311870 (TRAV12-3, TRAJ53)
CAMSPGSGGSNYKLTF

SEQ ID NO: 623740 - protein, 16 aa, Homo sapiens
  CDR3 for beta chain variable domain of TCR clone 311870 (TRBV5-1, TRBJ2-3)
CASSLGLAVYTDTQYF

SEQ ID NO: 623741 - protein, 17 aa, Homo sapiens
  CDR3 for alpha chain variable domain of TCR clone 311871 (TRAV3, TRAJ38)
CAVRDCLNAGNNRKLTW

SEQ ID NO: 623742 - protein, 13 aa, Homo sapiens
  CDR3 for beta chain variable domain of TCR clone 311871 (TRBV23-1, TRBJ1-4)
CASRGKFNEKLFF

SEQ ID NO: 623743 - protein, 15 aa, Homo sapiens
  CDR3 for alpha chain variable domain of TCR clone 311872 (TRAV26-1, TRAJ22)
CIAPPSSGSARQLTF

SEQ ID NO: 623744 - protein, 14 aa, Homo sapiens
  CDR3 for beta chain variable domain of TCR clone 311872 (TRBV25-1, TRBJ1-1)
CASTHLGGNTEAFF

SEQ ID NO: 623745 - protein, 11 aa, Homo sapiens
  CDR3 for alpha chain variable domain of TCR clone 311873 (TRAV12-2, TRAJ49)
CALQGGNQSYF

SEQ ID NO: 623746 - protein, 14 aa, Homo sapiens
  CDR3 for beta chain variable domain of TCR clone 311873 (TRBV7-2, TRBJ2-7)
CASSPKTSFYGQYF

SEQ ID NO: 623747 - protein, 12 aa, Homo sapiens
  CDR3 for alpha chain variable domain of TCR clone 311874 (TRAV21, TRAJ11)
CAATSGYSTLTF

SEQ ID NO: 623748 - protein, 14 aa, Homo sapiens
  CDR3 for beta chain variable domain of TCR clone 311874 (TRBV20-1, TRBJ2-7)
CSAPELAGVGERFF

SEQ ID NO: 623749 - protein, 16 aa, Homo sapiens
  CDR3 for alpha chain variable domain of TCR clone 311875 (TRAV30, TRAJ24)
CGTEIVDADSWGKFQF

SEQ ID NO: 623750 - protein, 14 aa, Homo sapiens
  CDR3 for beta chain variable domain of TCR clone 311875 (TRBV12-5, TRBJ2-5)
CASGSQTHQETQYF

SEQ ID NO: 623751 - protein, 14 aa, Homo sapiens
  CDR3 for alpha chain variable domain of TCR clone 311876 (TRAV8-1, TRAJ15)
CAVNGQQAGTALIF

SEQ ID NO: 623752 - protein, 20 aa, Homo sapiens
  CDR3 for beta chain variable domain of TCR clone 311876 (TRBV11-2, TRBJ1-6)
CASSLVFATGGSVHPSTLGT

SEQ ID NO: 623753 - protein, 17 aa, Homo sapiens
  CDR3 for alpha chain variable domain of TCR clone 311877 (TRAV3, TRAJ38)
CAVRECLNAGNNRKLIW

SEQ ID NO: 623754 - protein, 14 aa, Homo sapiens
  CDR3 for beta chain variable domain of TCR clone 311877 (TRBV5-5, TRBJ1-5)
CASSGQGVDQPQHF

SEQ ID NO: 623755 - protein, 15 aa, Homo sapiens
  CDR3 for alpha chain variable domain of TCR clone 311878 (TRAV27, TRAJ38)
CAARRNAGNNRKLVW

SEQ ID NO: 623756 - protein, 13 aa, Homo sapiens
  CDR3 for beta chain variable domain of TCR clone 311878 (TRBV20-1, TRBJ1-1)
CSARAGGNTEAFF

SEQ ID NO: 623757 - protein, 10 aa, Homo sapiens
  CDR3 for alpha chain variable domain of TCR clone 311879 (TRAV3, TRAJ30)
CAVREIEIIF

SEQ ID NO: 623758 - protein, 12 aa, Homo sapiens
  CDR3 for beta chain variable domain of TCR clone 311879 (TRBV11-2, TRBJ2-2)
CASSLGGGELFF

SEQ ID NO: 623759 - protein, 14 aa, Homo sapiens
  CDR3 for alpha chain variable domain of TCR clone 311880 (TRAV12-2, TRAJ13)
CAVKKTGVYQKVTF

SEQ ID NO: 623760 - protein, 12 aa, Homo sapiens
  CDR3 for beta chain variable domain of TCR clone 311880 (TRBV12-4, TRBJ1-2)
CASSFIWLHLRF

SEQ ID NO: 623761 - protein, 16 aa, Homo sapiens
  CDR3 for alpha chain variable domain of TCR clone 311881 (TRAV30, TRAJ49)
SAAQRVGPNTGNQFYF

SEQ ID NO: 623762 - protein, 15 aa, Homo sapiens
  CDR3 for beta chain variable domain of TCR clone 311881 (TRBV11-2, TRBJ2-2)
CASSSDRVNAGELFF

SEQ ID NO: 623763 - protein, 13 aa, Homo sapiens
  CDR3 for alpha chain variable domain of TCR clone 311882 (TRAV17, TRAJ6)
CATGFGGSYIPQF

SEQ ID NO: 623764 - protein, 14 aa, Homo sapiens
  CDR3 for beta chain variable domain of TCR clone 311882 (TRBV5-1, TRBJ2-5)
CASSFGGSQETQYF

SEQ ID NO: 623765 - protein, 14 aa, Homo sapiens
  CDR3 for alpha chain variable domain of TCR clone 311883 (TRAV2, TRAJ9)
CAVDDRSGGLKTIF

SEQ ID NO: 623766 - protein, 14 aa, Homo sapiens
  CDR3 for beta chain variable domain of TCR clone 311883 (TRBV7-9, TRBJ2-7)
CASSPSGGQNEQYF

SEQ ID NO: 623767 - protein, 16 aa, Homo sapiens
  CDR3 for alpha chain variable domain of TCR clone 311884 (TRAV3, TRAJ8)
CAVRDYPNTGFQKLVF

SEQ ID NO: 623768 - protein, 14 aa, Homo sapiens
  CDR3 for beta chain variable domain of TCR clone 311884 (TRBV19, TRBJ2-1)
CASPTFVLSGEQFF

SEQ ID NO: 623769 - protein, 13 aa, Homo sapiens
  CDR3 for alpha chain variable domain of TCR clone 311885 (TRAV17, TRAJ54)
CATSWGGAQKLVF

SEQ ID NO: 623770 - protein, 15 aa, Homo sapiens
  CDR3 for beta chain variable domain of TCR clone 311885 (TRBV4-2, TRBJ2-3)
CASSPSLLSTDTQYF

SEQ ID NO: 623771 - protein, 14 aa, Homo sapiens
  CDR3 for alpha chain variable domain of TCR clone 311886 (TRAV38-1, TRAJ39)
CAFAYNNAGNMLTF

SEQ ID NO: 623772 - protein, 15 aa, Homo sapiens
  CDR3 for beta chain variable domain of TCR clone 311886 (TRBV19, TRBJ2-6)
CASSIGPSLANVLTF

SEQ ID NO: 623773 - protein, 13 aa, Homo sapiens
  CDR3 for alpha chain variable domain of TCR clone 311887 (TRAV4, TRAJ42)
CLVGGGRQGNLIF

SEQ ID NO: 623774 - protein, 16 aa, Homo sapiens
  CDR3 for beta chain variable domain of TCR clone 311887 (TRBV5-1, TRBJ2-3)
CASSLQGRVGADTQYF

SEQ ID NO: 623775 - protein, 10 aa, Homo sapiens
  CDR3 for alpha chain variable domain of TCR clone 311888 (TRAV23/DV6, TRAJ57)
CAASSTLSQG

SEQ ID NO: 623776 - protein, 17 aa, Homo sapiens
  CDR3 for beta chain variable domain of TCR clone 311888 (TRBV20-1, TRBJ2-3)
CSASLLGRGGSADTQYF

SEQ ID NO: 623777 - protein, 14 aa, Homo sapiens
  CDR3 for alpha chain variable domain of TCR clone 311889 (TRAV29/DV5, TRAJ36)
CAARRKTGANNLLF

SEQ ID NO: 623778 - protein, 14 aa, Homo sapiens
  CDR3 for beta chain variable domain of TCR clone 311889 (TRBV13, TRBJ2-5)
CASSLDYPQETQYF

SEQ ID NO: 623779 - protein, 14 aa, Homo sapiens
  CDR3 for alpha chain variable domain of TCR clone 311890 (TRAV1-2, TRAJ8)
CAVREDTGFQKLVF

SEQ ID NO: 623780 - protein, 15 aa, Homo sapiens
  CDR3 for beta chain variable domain of TCR clone 311890 (TRBV28, TRBJ2-1)
CASRVGLDEYNEQFF

SEQ ID NO: 623781 - protein, 14 aa, Homo sapiens
  CDR3 for alpha chain variable domain of TCR clone 311891 (TRAV23/DV6, TRAJ57)
CAASNQGGSEKLVF

SEQ ID NO: 623782 - protein, 13 aa, Homo sapiens
  CDR3 for beta chain variable domain of TCR clone 311891 (TRBV7-9, TRBJ2-7)
CASSFAGAYEQYF

SEQ ID NO: 623783 - protein, 11 aa, Homo sapiens
  CDR3 for alpha chain variable domain of TCR clone 311892 (TRAV3, TRAJ21)
CAVGNFNKFYF

SEQ ID NO: 623784 - protein, 15 aa, Homo sapiens
  CDR3 for beta chain variable domain of TCR clone 311892 (TRBV10-3, TRBJ2-3)
CAISLTSGGTDTQYF

SEQ ID NO: 623785 - protein, 13 aa, Homo sapiens
  CDR3 for alpha chain variable domain of TCR clone 311893 (TRAV8-3, TRAJ15)
CAVGIQAGTALIF

SEQ ID NO: 623786 - protein, 13 aa, Homo sapiens
  CDR3 for beta chain variable domain of TCR clone 311893 (TRBV7-3, TRBJ1-1)
CASSQDWGAEAFF

SEQ ID NO: 623787 - protein, 13 aa, Homo sapiens
  CDR3 for alpha chain variable domain of TCR clone 311894 (TRAV27, TRAJ57)
CRSAQGGSEKLVF

SEQ ID NO: 623788 - protein, 16 aa, Homo sapiens
  CDR3 for beta chain variable domain of TCR clone 311894 (TRBV10-3, TRBJ2-1)
CASSGVGDGGGGEQFF

SEQ ID NO: 623789 - protein, 14 aa, Homo sapiens
  CDR3 for alpha chain variable domain of TCR clone 311895 (TRAV26-1, TRAJ45)
CIEVTGGGADGLTF

SEQ ID NO: 623790 - protein, 12 aa, Homo sapiens
  CDR3 for beta chain variable domain of TCR clone 311895 (TRBV11-2, TRBJ2-3)
CASSYRPDTQYF

SEQ ID NO: 623791 - protein, 13 aa, Homo sapiens
  CDR3 for alpha chain variable domain of TCR clone 311896 (TRAV12-1, TRAJ40)
CVVPTSATYKYIF

SEQ ID NO: 623792 - protein, 18 aa, Homo sapiens
  CDR3 for beta chain variable domain of TCR clone 311896 (TRBV7-6, TRBJ2-1)
WASSPRTSGMSSYNEQFF

SEQ ID NO: 623793 - protein, 14 aa, Homo sapiens
  CDR3 for alpha chain variable domain of TCR clone 311897 (TRAV4, TRAJ9)
CLVGSGTGGFKTIF

SEQ ID NO: 623794 - protein, 12 aa, Homo sapiens
  CDR3 for beta chain variable domain of TCR clone 311897 (TRBV7-9, TRBJ2-7)
CASSIKREEQYF

SEQ ID NO: 623795 - protein, 15 aa, Homo sapiens
  CDR3 for alpha chain variable domain of TCR clone 311898 (TRAV35, TRAJ53)
CAGLTQAGSNYKLTF

SEQ ID NO: 623796 - protein, 13 aa, Homo sapiens
  CDR3 for beta chain variable domain of TCR clone 311898 (TRBV20-1, TRBJ1-1)
CGAVDGTLNEAFF

SEQ ID NO: 623797 - protein, 12 aa, Homo sapiens
  CDR3 for alpha chain variable domain of TCR clone 311899 (TRAV13-2, TRAJ8)
CAPWLVFQKLVF

SEQ ID NO: 623798 - protein, 18 aa, Homo sapiens
  CDR3 for beta chain variable domain of TCR clone 311899 (TRBV11-2, TRBJ2-3)
CASSLGGASRGAPNTQYF

SEQ ID NO: 623799 - protein, 14 aa, Homo sapiens
  CDR3 for alpha chain variable domain of TCR clone 311900 (TRAV13-1, TRAJ20)
CAARPGSNDYKLSF

SEQ ID NO: 623800 - protein, 16 aa, Homo sapiens
  CDR3 for beta chain variable domain of TCR clone 311900 (TRBV4-1, TRBJ1-2)
CASSQDAGQVLYGYTF

SEQ ID NO: 623801 - protein, 13 aa, Homo sapiens
  CDR3 for alpha chain variable domain of TCR clone 311901 (TRAV23/DV6, TRAJ22)
CASRAGSARQLTF

SEQ ID NO: 623802 - protein, 14 aa, Homo sapiens
  CDR3 for beta chain variable domain of TCR clone 311901 (TRBV6-1, TRBJ1-3)
CASVQGGGGNTIYF

SEQ ID NO: 623803 - protein, 14 aa, Homo sapiens
  CDR3 for alpha chain variable domain of TCR clone 311902 (TRAV23/DV6, TRAJ58)
SAGMRETSGSRLTF

SEQ ID NO: 623804 - protein, 13 aa, Homo sapiens
  CDR3 for beta chain variable domain of TCR clone 311902 (TRBV28, TRBJ2-7)
CASRSSGVYEQYF

SEQ ID NO: 623805 - protein, 16 aa, Homo sapiens
  CDR3 for alpha chain variable domain of TCR clone 311903 (TRAV30, TRAJ24)
CGTEIVDADSWEKFKF

SEQ ID NO: 623806 - protein, 14 aa, Homo sapiens
  CDR3 for beta chain variable domain of TCR clone 311903 (TRBV12-5, TRBJ2-5)
CASGSRTHQETQYF

SEQ ID NO: 623807 - protein, 17 aa, Homo sapiens
  CDR3 for alpha chain variable domain of TCR clone 311904 (TRAV3, TRAJ6)
CAVRDGPRAGGSYIPTF

SEQ ID NO: 623808 - protein, 12 aa, Homo sapiens
  CDR3 for beta chain variable domain of TCR clone 311904 (TRBV7-2, TRBJ2-2)
CATQIVTGELFF

SEQ ID NO: 623809 - protein, 12 aa, Homo sapiens
  CDR3 for alpha chain variable domain of TCR clone 311905 (TRAV22, TRAJ29)
CAPPSGNTPLVF

SEQ ID NO: 623810 - protein, 14 aa, Homo sapiens
  CDR3 for beta chain variable domain of TCR clone 311905 (TRBV11-2, TRBJ2-7)
CASSLGAGANEQYF

SEQ ID NO: 623811 - protein, 12 aa, Homo sapiens
  CDR3 for alpha chain variable domain of TCR clone 311906 (TRAV9-2, TRAJ26)
CALRGCGQNFVF

SEQ ID NO: 623812 - protein, 12 aa, Homo sapiens
  CDR3 for beta chain variable domain of TCR clone 311906 (TRBV29-1, TRBJ2-3)
CSVTGGADTQYF

SEQ ID NO: 623813 - protein, 16 aa, Homo sapiens
  CDR3 for alpha chain variable domain of TCR clone 311907 (TRAV30, TRAJ24)
CGTEIVDADSWGKFKF

SEQ ID NO: 623814 - protein, 15 aa, Homo sapiens
  CDR3 for beta chain variable domain of TCR clone 311907 (TRBV7-9, TRBJ1-4)
CASSARIGGNEKLFF

SEQ ID NO: 623815 - protein, 14 aa, Homo sapiens
  CDR3 for alpha chain variable domain of TCR clone 311908 (TRAV26-1, TRAJ39)
CIVFTNNAGNMLTL

SEQ ID NO: 623816 - protein, 15 aa, Homo sapiens
  CDR3 for beta chain variable domain of TCR clone 311908 (TRBV19, TRBJ2-4)
CASSLTGLTKNIQYF

SEQ ID NO: 623817 - protein, 14 aa, Homo sapiens
  CDR3 for alpha chain variable domain of TCR clone 311909 (TRAV1-2, TRAJ16)
CAVNRFSDGQKLLF

SEQ ID NO: 623818 - protein, 14 aa, Homo sapiens
  CDR3 for beta chain variable domain of TCR clone 311909 (TRBV7-2, TRBJ2-5)
CASSTGGELKTQYF

SEQ ID NO: 623819 - protein, 12 aa, Homo sapiens
  CDR3 for alpha chain variable domain of TCR clone 311910 (TRAV26-2, TRAJ47)
CILVEYGNKLVF

SEQ ID NO: 623820 - protein, 13 aa, Homo sapiens
  CDR3 for beta chain variable domain of TCR clone 311910 (TRBV7-9, TRBJ1-1)
CASTQGMNTEAFF

SEQ ID NO: 623821 - protein, 15 aa, Homo sapiens
  CDR3 for alpha chain variable domain of TCR clone 311911 (TRAV17, TRAJ56)
CATDANTGAKSKLTF

SEQ ID NO: 623822 - protein, 14 aa, Homo sapiens
  CDR3 for beta chain variable domain of TCR clone 311911 (TRBV19, TRBJ1-5)
CASSLGTGGQPQHF

SEQ ID NO: 623823 - protein, 13 aa, Homo sapiens
  CDR3 for alpha chain variable domain of TCR clone 311912 (TRAV16, TRAJ29)
CALSRRGNTPLVF

SEQ ID NO: 623824 - protein, 15 aa, Homo sapiens
  CDR3 for beta chain variable domain of TCR clone 311912 (TRBV4-1, TRBJ2-3)
CASSRGHGIPDTQYF

SEQ ID NO: 623825 - protein, 14 aa, Homo sapiens
  CDR3 for alpha chain variable domain of TCR clone 311913 (TRAV1-2, TRAJ16)
CSVNRFSDGQKLLF

SEQ ID NO: 623826 - protein, 13 aa, Homo sapiens
  CDR3 for beta chain variable domain of TCR clone 311913 (TRBV19, TRBJ2-7)
CASSTSGSYEQYF

SEQ ID NO: 623827 - protein, 13 aa, Homo sapiens
  CDR3 for alpha chain variable domain of TCR clone 311914 (TRAV12-1, TRAJ26)
CVVRRNYGQNFVF

SEQ ID NO: 623828 - protein, 16 aa, Homo sapiens
  CDR3 for beta chain variable domain of TCR clone 311914 (TRBV4-1, TRBJ2-1)
CASSQEAGQGSGEQFF

SEQ ID NO: 623829 - protein, 14 aa, Homo sapiens
  CDR3 for alpha chain variable domain of TCR clone 311915 (TRAV12-2, TRAJ6)
CASKWGGGSYIPTF

SEQ ID NO: 623830 - protein, 16 aa, Homo sapiens
  CDR3 for beta chain variable domain of TCR clone 311915 (TRBV13, TRBJ2-2)
CASSPRTGEHTGELFF

SEQ ID NO: 623831 - protein, 11 aa, Homo sapiens
  CDR3 for alpha chain variable domain of TCR clone 311916 (TRAV26-1, TRAJ37)
CIVRVGGKLIF

SEQ ID NO: 623832 - protein, 15 aa, Homo sapiens
  CDR3 for beta chain variable domain of TCR clone 311916 (TRBV7-2, TRBJ2-2)
CASRRPGQNTGELFF

SEQ ID NO: 623833 - protein, 17 aa, Homo sapiens
  CDR3 for alpha chain variable domain of TCR clone 311917 (TRAV3, TRAJ6)
CAVRDGPRAGGSYITTF

SEQ ID NO: 623834 - protein, 16 aa, Homo sapiens
  CDR3 for beta chain variable domain of TCR clone 311917 (TRBV12-5, TRBJ2-5)
CASGPRTSGNQETQYF

SEQ ID NO: 623835 - protein, 13 aa, Homo sapiens
  CDR3 for alpha chain variable domain of TCR clone 311918 (TRAV2, TRAJ40)
CAVVTSGTYKYIF

SEQ ID NO: 623836 - protein, 14 aa, Homo sapiens
  CDR3 for beta chain variable domain of TCR clone 311918 (TRBV11-2, TRBJ2-7)
CASSSTGEGYEQYF

SEQ ID NO: 623837 - protein, 15 aa, Homo sapiens
  CDR3 for alpha chain variable domain of TCR clone 311919 (TRAV26-1, TRAJ38)
CIASSSAGNNRKLIW

SEQ ID NO: 623838 - protein, 12 aa, Homo sapiens
  CDR3 for beta chain variable domain of TCR clone 311919 (TRBV5-8, TRBJ1-2)
CASSFGVYGYTF

SEQ ID NO: 623839 - protein, 18 aa, Homo sapiens
  CDR3 for alpha chain variable domain of TCR clone 311920 (TRAV12-3, TRAJ52)
CAMSRTNAGGTSYGKLAF

SEQ ID NO: 623840 - protein, 16 aa, Homo sapiens
  CDR3 for beta chain variable domain of TCR clone 311920 (TRBV7-3, TRBJ2-3)
CQQLNEKDAGSDTQYF

SEQ ID NO: 623841 - protein, 16 aa, Homo sapiens
  CDR3 for alpha chain variable domain of TCR clone 311921 (TRAV3, TRAJ37)
CAVRVRGSGNTGKLIF

SEQ ID NO: 623842 - protein, 15 aa, Homo sapiens
  CDR3 for beta chain variable domain of TCR clone 311921 (TRBV3-1, TRBJ2-1)
CDSSPRDSGFNEQFF

SEQ ID NO: 623843 - protein, 15 aa, Homo sapiens
  CDR3 for alpha chain variable domain of TCR clone 311922 (TRAV23/DV6, TRAJ4)
CAASPLRGGYNTLIF

SEQ ID NO: 623844 - protein, 15 aa, Homo sapiens
  CDR3 for beta chain variable domain of TCR clone 311922 (TRBV7-9, TRBJ1-6)
CASSSPGRGNSPLHF

SEQ ID NO: 623845 - protein, 14 aa, Homo sapiens
  CDR3 for alpha chain variable domain of TCR clone 311923 (TRAV13-1, TRAJ35)
CAASKGGFGNVLHC

SEQ ID NO: 623846 - protein, 13 aa, Homo sapiens
  CDR3 for beta chain variable domain of TCR clone 311923 (TRBV7-3, TRBJ1-1)
CASSQDWGAEDSF

SEQ ID NO: 623847 - protein, 11 aa, Homo sapiens
  CDR3 for alpha chain variable domain of TCR clone 311924 (TRAV1-1, TRAJ16)
CAAGDGQKVLF

SEQ ID NO: 623848 - protein, 15 aa, Homo sapiens
  CDR3 for beta chain variable domain of TCR clone 311924 (TRBV28, TRBJ1-2)
CASIPQGSDDYGYTF

SEQ ID NO: 623849 - protein, 11 aa, Homo sapiens
  CDR3 for alpha chain variable domain of TCR clone 311925 (TRAV8-3, TRAJ4)
CAVGARPDFKR

SEQ ID NO: 623850 - protein, 13 aa, Homo sapiens
  CDR3 for beta chain variable domain of TCR clone 311925 (TRBV20-1, TRBJ1-2)
CSATGIQGSGDTF

SEQ ID NO: 623851 - protein, 12 aa, Homo sapiens
  CDR3 for alpha chain variable domain of TCR clone 311926 (TRAV17, TRAJ20)
CAALSNDYKLSF

SEQ ID NO: 623852 - protein, 14 aa, Homo sapiens
  CDR3 for beta chain variable domain of TCR clone 311926 (TRBV18, TRBJ2-7)
CASSPRGGAYEQYF

SEQ ID NO: 623853 - protein, 14 aa, Homo sapiens
  CDR3 for alpha chain variable domain of TCR clone 311927 (TRAV29/DV5, TRAJ36)
CAARRKTGANNLFF

SEQ ID NO: 623854 - protein, 12 aa, Homo sapiens
  CDR3 for beta chain variable domain of TCR clone 311927 (TRBV5-6, TRBJ2-7)
CASSLGLREQYF

SEQ ID NO: 623855 - protein, 12 aa, Homo sapiens
  CDR3 for alpha chain variable domain of TCR clone 311928 (TRAV25, TRAJ17)
CAGEAAGNKLTF

SEQ ID NO: 623856 - protein, 14 aa, Homo sapiens
  CDR3 for beta chain variable domain of TCR clone 311928 (TRBV5-1, TRBJ2-1)
CASSALWAGNEQFV

SEQ ID NO: 623857 - protein, 14 aa, Homo sapiens
  CDR3 for alpha chain variable domain of TCR clone 311929 (TRAV3, TRAJ36)
CAVRDGTGANNLFF

SEQ ID NO: 623858 - protein, 16 aa, Homo sapiens
  CDR3 for beta chain variable domain of TCR clone 311929 (TRBV7-3, TRBJ2-5)
CASIQPGGSVKETQYF

SEQ ID NO: 623859 - protein, 17 aa, Homo sapiens
  CDR3 for alpha chain variable domain of TCR clone 311930 (TRAV3, TRAJ38)
CAVRDCFNAGNNRKLIW

SEQ ID NO: 623860 - protein, 13 aa, Homo sapiens
  CDR3 for beta chain variable domain of TCR clone 311930 (TRBV23-1, TRBJ1-4)
CASRGKFNEKLFF

SEQ ID NO: 623861 - protein, 13 aa, Homo sapiens
  CDR3 for alpha chain variable domain of TCR clone 311931 (TRAV12-3, TRAJ54)
CAMTLQGAQKLVC

SEQ ID NO: 623862 - protein, 14 aa, Homo sapiens
  CDR3 for beta chain variable domain of TCR clone 311931 (TRBV4-1, TRBJ2-2)
CASSQAVNTGELFF

SEQ ID NO: 623863 - protein, 16 aa, Homo sapiens
  CDR3 for alpha chain variable domain of TCR clone 311932 (TRAV12-3, TRAJ53)
CAMSPGSGGSNYKLTF

SEQ ID NO: 623864 - protein, 13 aa, Homo sapiens
  CDR3 for beta chain variable domain of TCR clone 311932 (TRBV12-4, TRBJ2-1)
CASSFQGYNEQFF

SEQ ID NO: 623865 - protein, 12 aa, Homo sapiens
  CDR3 for alpha chain variable domain of TCR clone 311933 (TRAV12-3, TRAJ17)
CAMTLTGNRLTF

SEQ ID NO: 623866 - protein, 16 aa, Homo sapiens
  CDR3 for beta chain variable domain of TCR clone 311933 (TRBV19, TRBJ2-1)
CASSKAGPSSYNEQFF

SEQ ID NO: 623867 - protein, 16 aa, Homo sapiens
  CDR3 for alpha chain variable domain of TCR clone 311934 (TRAV13-1, TRAJ45)
CAARGSRKGGADGLTF

SEQ ID NO: 623868 - protein, 15 aa, Homo sapiens
  CDR3 for beta chain variable domain of TCR clone 311934 (TRBV4-1, TRBJ2-7)
CASSQQGQGFDEQYF

SEQ ID NO: 623869 - protein, 15 aa, Homo sapiens
  CDR3 for alpha chain variable domain of TCR clone 311935 (TRAV35, TRAJ58)
CAGRRQETSGSLLTF

SEQ ID NO: 623870 - protein, 16 aa, Homo sapiens
  CDR3 for beta chain variable domain of TCR clone 311935 (TRBV2, TRBJ2-1)
CASSVGGSLSYNEQFF

SEQ ID NO: 623871 - protein, 13 aa, Homo sapiens
  CDR3 for alpha chain variable domain of TCR clone 311936 (TRAV3, TRAJ33)
CAVRNRSNYQLIW

SEQ ID NO: 623872 - protein, 16 aa, Homo sapiens
  CDR3 for beta chain variable domain of TCR clone 311936 (TRBV4-2, TRBJ2-7)
CASSQDRGTSSYEQYF

SEQ ID NO: 623873 - protein, 15 aa, Homo sapiens
  CDR3 for alpha chain variable domain of TCR clone 311937 (TRAV29/DV5, TRAJ42)
CAAKTDGGSKGNIIL

SEQ ID NO: 623874 - protein, 12 aa, Homo sapiens
  CDR3 for beta chain variable domain of TCR clone 311937 (TRBV11-2, TRBJ2-1)
CASSPGNNEQFF

SEQ ID NO: 623875 - protein, 15 aa, Homo sapiens
  CDR3 for alpha chain variable domain of TCR clone 311938 (TRAV3, TRAJ3)
CAVRDRDSSASKIIF

SEQ ID NO: 623876 - protein, 18 aa, Homo sapiens
  CDR3 for beta chain variable domain of TCR clone 311938 (TRBV25-1, TRBJ1-2)
CASSGLQNGQGFIFGYTF

SEQ ID NO: 623877 - protein, 16 aa, Homo sapiens
  CDR3 for alpha chain variable domain of TCR clone 311939 (TRAV8-3, TRAJ44)
CAVGPLNNGTASKLTF

SEQ ID NO: 623878 - protein, 18 aa, Homo sapiens
  CDR3 for beta chain variable domain of TCR clone 311939 (TRBV3-1, TRBJ2-1)
CASSQDLPGRPLFDEQFF

SEQ ID NO: 623879 - protein, 16 aa, Homo sapiens
  CDR3 for alpha chain variable domain of TCR clone 311940 (TRAV12-2, TRAJ13)
CAVKKTGGYQKVTLNW

SEQ ID NO: 623880 - protein, 15 aa, Homo sapiens
  CDR3 for beta chain variable domain of TCR clone 311940 (TRBV27, TRBJ2-1)
CASSNGGGSSNEQFF

SEQ ID NO: 623881 - protein, 13 aa, Homo sapiens
  CDR3 for alpha chain variable domain of TCR clone 311941 (TRAV1-2, TRAJ9)
CAALNTGGFKTIF

SEQ ID NO: 623882 - protein, 16 aa, Homo sapiens
  CDR3 for beta chain variable domain of TCR clone 311941 (TRBV20-1, TRBJ1-2)
CSASMGQGVANYGYTF

SEQ ID NO: 623883 - protein, 11 aa, Homo sapiens
  CDR3 for alpha chain variable domain of TCR clone 311942 (TRAV25, TRAJ47)
CAGLYGNKLVF

SEQ ID NO: 623884 - protein, 14 aa, Homo sapiens
  CDR3 for beta chain variable domain of TCR clone 311942 (TRBV19, TRBJ2-1)
CAIKEGVQVNEQFF

SEQ ID NO: 623885 - protein, 13 aa, Homo sapiens
  CDR3 for alpha chain variable domain of TCR clone 311943 (TRAV12-1, TRAJ6)
CVMYPGGSYTPTF

SEQ ID NO: 623886 - protein, 13 aa, Homo sapiens
  CDR3 for beta chain variable domain of TCR clone 311943 (TRBV4-2, TRBJ1-1)
CASSQAGNTEAFF

SEQ ID NO: 623887 - protein, 13 aa, Homo sapiens
  CDR3 for alpha chain variable domain of TCR clone 311944 (TRAV8-3, TRAJ12)
CAVGPGSSYKLIF

SEQ ID NO: 623888 - protein, 13 aa, Homo sapiens
  CDR3 for beta chain variable domain of TCR clone 311944 (TRBV12-4, TRBJ1-3)
CASSLASGNTIYF

SEQ ID NO: 623889 - protein, 14 aa, Homo sapiens
  CDR3 for alpha chain variable domain of TCR clone 311945 (TRAV13-1, TRAJ44)
CAAKSTGTASKLTF

SEQ ID NO: 623890 - protein, 16 aa, Homo sapiens
  CDR3 for beta chain variable domain of TCR clone 311945 (TRBV19, TRBJ2-2)
CASRSPGTGATGELFF

SEQ ID NO: 623891 - protein, 18 aa, Homo sapiens
  CDR3 for alpha chain variable domain of TCR clone 311946 (TRAV21, TRAJ52)
CAVRPSPAGGTSYGKLTF

SEQ ID NO: 623892 - protein, 16 aa, Homo sapiens
  CDR3 for beta chain variable domain of TCR clone 311946 (TRBV11-3, TRBJ2-5)
CASSSVVAGSTETQYF

SEQ ID NO: 623893 - protein, 14 aa, Homo sapiens
  CDR3 for alpha chain variable domain of TCR clone 311947 (TRAV1-2, TRAJ16)
CAVNRFSDGQKLLF

SEQ ID NO: 623894 - protein, 15 aa, Homo sapiens
  CDR3 for beta chain variable domain of TCR clone 311947 (TRBV12-4, TRBJ2-5)
CQQFFCQGRQETQYF

SEQ ID NO: 623895 - protein, 17 aa, Homo sapiens
  CDR3 for alpha chain variable domain of TCR clone 311948 (TRAV26-1, TRAJ11)
CIVRVGQSNSGYSTLTF

SEQ ID NO: 623896 - protein, 14 aa, Homo sapiens
  CDR3 for beta chain variable domain of TCR clone 311948 (TRBV27, TRBJ2-5)
CQQFNTFWGETQYF

SEQ ID NO: 623897 - protein, 13 aa, Homo sapiens
  CDR3 for alpha chain variable domain of TCR clone 311949 (TRAV8-4, TRAJ3)
CAVSDSGASKIIF

SEQ ID NO: 623898 - protein, 16 aa, Homo sapiens
  CDR3 for beta chain variable domain of TCR clone 311949 (TRBV7-9, TRBJ2-7)
CASRNHGGQEKYEQYF

SEQ ID NO: 623899 - protein, 14 aa, Homo sapiens
  CDR3 for alpha chain variable domain of TCR clone 311950 (TRAV12-3, TRAJ10)
SHLPLTGGGNKLTF

SEQ ID NO: 623900 - protein, 16 aa, Homo sapiens
  CDR3 for beta chain variable domain of TCR clone 311950 (TRBV6-1, TRBJ2-5)
SASSETLDRGAETQYF

SEQ ID NO: 623901 - protein, 11 aa, Homo sapiens
  CDR3 for alpha chain variable domain of TCR clone 311951 (TRAV39, TRAJ49)
CAVDISTQFYF

SEQ ID NO: 623902 - protein, 13 aa, Homo sapiens
  CDR3 for beta chain variable domain of TCR clone 311951 (TRBV7-8, TRBJ2-3)
CASSQPPTDTQYF

SEQ ID NO: 623903 - protein, 13 aa, Homo sapiens
  CDR3 for alpha chain variable domain of TCR clone 311952 (TRAV12-3, TRAJ13)
CAMRSGGYQKVTF

SEQ ID NO: 623904 - protein, 14 aa, Homo sapiens
  CDR3 for beta chain variable domain of TCR clone 311952 (TRBV4-2, TRBJ2-1)
CASGLDRAYNEQFF

SEQ ID NO: 623905 - protein, 16 aa, Homo sapiens
  CDR3 for alpha chain variable domain of TCR clone 311953 (TRAV29/DV5, TRAJ39)
CAASLLFNNAGNMLIF

SEQ ID NO: 623906 - protein, 16 aa, Homo sapiens
  CDR3 for beta chain variable domain of TCR clone 311953 (TRBV19, TRBJ2-6)
CASSMSGLSGANVLTF

SEQ ID NO: 623907 - protein, 14 aa, Homo sapiens
  CDR3 for alpha chain variable domain of TCR clone 311954 (TRAV35, TRAJ33)
CAGSSQDSNYQLIW

SEQ ID NO: 623908 - protein, 16 aa, Homo sapiens
  CDR3 for beta chain variable domain of TCR clone 311954 (TRBV20-1, TRBJ2-3)
CSAVRDRGPIADTQYF

SEQ ID NO: 623909 - protein, 15 aa, Homo sapiens
  CDR3 for alpha chain variable domain of TCR clone 311955 (TRAV12-3, TRAJ6)
CAMSAASGGGYIPTF

SEQ ID NO: 623910 - protein, 13 aa, Homo sapiens
  CDR3 for beta chain variable domain of TCR clone 311955 (TRBV20-1, TRBJ1-2)
CSASPEFNYGYTF

SEQ ID NO: 623911 - protein, 17 aa, Homo sapiens
  CDR3 for alpha chain variable domain of TCR clone 311956 (TRAV12-2, TRAJ52)
CAVNPYAGGTSYGKLTF

SEQ ID NO: 623912 - protein, 13 aa, Homo sapiens
  CDR3 for beta chain variable domain of TCR clone 311956 (TRBV7-3, TRBJ1-1)
CASSQDWGAEAFF

SEQ ID NO: 623913 - protein, 13 aa, Homo sapiens
  CDR3 for alpha chain variable domain of TCR clone 311957 (TRAV17, TRAJ9)
CATAINGGFKTIF

SEQ ID NO: 623914 - protein, 16 aa, Homo sapiens
  CDR3 for beta chain variable domain of TCR clone 311957 (TRBV15, TRBJ2-1)
CATSRNLAGGYNEQFF

SEQ ID NO: 623915 - protein, 14 aa, Homo sapiens
  CDR3 for alpha chain variable domain of TCR clone 311958 (TRAV2, TRAJ23)
CAVGLRNQGGKLNF

SEQ ID NO: 623916 - protein, 13 aa, Homo sapiens
  CDR3 for beta chain variable domain of TCR clone 311958 (TRBV12-4, TRBJ2-5)
CASSPGTEETQYF

SEQ ID NO: 623917 - protein, 15 aa, Homo sapiens
  CDR3 for alpha chain variable domain of TCR clone 311959 (TRAV27, TRAJ38)
CAARRNAGNNRKLIW

SEQ ID NO: 623918 - protein, 15 aa, Homo sapiens
  CDR3 for beta chain variable domain of TCR clone 311959 (TRBV7-3, TRBJ2-1)
CASSLKASEYNERFF

SEQ ID NO: 623919 - protein, 16 aa, Homo sapiens
  CDR3 for alpha chain variable domain of TCR clone 311960 (TRAV26-1, TRAJ32)
CIVRTNYGGSTNKLIF

SEQ ID NO: 623920 - protein, 20 aa, Homo sapiens
  CDR3 for beta chain variable domain of TCR clone 311960 (TRBV7-8, TRBJ2-2)
CASSHLFPGPTIHITGELFF

SEQ ID NO: 623921 - protein, 13 aa, Homo sapiens
  CDR3 for alpha chain variable domain of TCR clone 311961 (TRAV2, TRAJ20)
CAVEDPSEYKLSF

SEQ ID NO: 623922 - protein, 15 aa, Homo sapiens
  CDR3 for beta chain variable domain of TCR clone 311961 (TRBV25-1, TRBJ2-7)
CSSELTGGGIYEQYF

SEQ ID NO: 623923 - protein, 17 aa, Homo sapiens
  CDR3 for alpha chain variable domain of TCR clone 311962 (TRAV12-2, TRAJ42)
CAVNILNYGGSPGNLIF

SEQ ID NO: 623924 - protein, 13 aa, Homo sapiens
  CDR3 for beta chain variable domain of TCR clone 311962 (TRBV3-1, TRBJ1-5)
CASSQDLDQPQHF

SEQ ID NO: 623925 - protein, 16 aa, Homo sapiens
  CDR3 for alpha chain variable domain of TCR clone 311963 (TRAV27, TRAJ13)
CAGAKSDSGGYQKVTF

SEQ ID NO: 623926 - protein, 15 aa, Homo sapiens
  CDR3 for beta chain variable domain of TCR clone 311963 (TRBV25-1, TRBJ1-4)
CASSKRIATNEKLFF

SEQ ID NO: 623927 - protein, 14 aa, Homo sapiens
  CDR3 for alpha chain variable domain of TCR clone 311964 (TRAV1-2, TRAJ16)
CAVNRFSDGQKLIF

SEQ ID NO: 623928 - protein, 15 aa, Homo sapiens
  CDR3 for beta chain variable domain of TCR clone 311964 (TRBV27, TRBJ1-1)
CASSPYADPYTEAFF

SEQ ID NO: 623929 - protein, 12 aa, Homo sapiens
  CDR3 for alpha chain variable domain of TCR clone 311965 (TRAV8-3, TRAJ20)
CAVGANDYKLSF

SEQ ID NO: 623930 - protein, 14 aa, Homo sapiens
  CDR3 for beta chain variable domain of TCR clone 311965 (TRBV19, TRBJ2-3)
CASSAPRGTDTQYF

SEQ ID NO: 623931 - protein, 14 aa, Homo sapiens
  CDR3 for alpha chain variable domain of TCR clone 311966 (TRAV21, TRAJ37)
CPRPGSGNTGKLIF

SEQ ID NO: 623932 - protein, 16 aa, Homo sapiens
  CDR3 for beta chain variable domain of TCR clone 311966 (TRBV6-6, TRBJ2-3)
WASSYSHAGATDTQYF

SEQ ID NO: 623933 - protein, 12 aa, Homo sapiens
  CDR3 for alpha chain variable domain of TCR clone 311967 (TRAV12-3, TRAJ17)
CAMTPTGNKLTF

SEQ ID NO: 623934 - protein, 15 aa, Homo sapiens
  CDR3 for beta chain variable domain of TCR clone 311967 (TRBV20-1, TRBJ2-7)
CSARDRVSGRDEQYF

SEQ ID NO: 623935 - protein, 15 aa, Homo sapiens
  CDR3 for alpha chain variable domain of TCR clone 311968 (TRAV21, TRAJ24)
CAARSSTDSWGKLQF

SEQ ID NO: 623936 - protein, 14 aa, Homo sapiens
  CDR3 for beta chain variable domain of TCR clone 311968 (TRBV7-8, TRBJ2-3)
CASSSRDSTDTQYF

SEQ ID NO: 623937 - protein, 12 aa, Homo sapiens
  CDR3 for alpha chain variable domain of TCR clone 311969 (TRAV3, TRAJ7)
CADLLWEQQPRF

SEQ ID NO: 623938 - protein, 13 aa, Homo sapiens
  CDR3 for beta chain variable domain of TCR clone 311969 (TRBV7-3, TRBJ2-5)
CASSFRGGETQYF

SEQ ID NO: 623939 - protein, 12 aa, Homo sapiens
  CDR3 for alpha chain variable domain of TCR clone 311970 (TRAV26-1, TRAJ36)
CIVRVRADNLFF

SEQ ID NO: 623940 - protein, 16 aa, Homo sapiens
  CDR3 for beta chain variable domain of TCR clone 311970 (TRBV10-3, TRBJ2-1)
CAISGVGDGGGGEQFF

SEQ ID NO: 623941 - protein, 12 aa, Homo sapiens
  CDR3 for alpha chain variable domain of TCR clone 311971 (TRAV8-3, TRAJ20)
CAVGANDYKLSF

SEQ ID NO: 623942 - protein, 15 aa, Homo sapiens
  CDR3 for beta chain variable domain of TCR clone 311971 (TRBV7-2, TRBJ2-2)
CASSLGLAGTGELFF

SEQ ID NO: 623943 - protein, 13 aa, Homo sapiens
  CDR3 for alpha chain variable domain of TCR clone 311972 (TRAV12-3, TRAJ43)
CAMIRPNNNDMRF

SEQ ID NO: 623944 - protein, 13 aa, Homo sapiens
  CDR3 for beta chain variable domain of TCR clone 311972 (TRBV19, TRBJ1-2)
CASSVPGQDGYTF

SEQ ID NO: 623945 - protein, 13 aa, Homo sapiens
  CDR3 for alpha chain variable domain of TCR clone 311973 (TRAV36/DV7, TRAJ41)
CAVEANSGYALNF

SEQ ID NO: 623946 - protein, 13 aa, Homo sapiens
  CDR3 for beta chain variable domain of TCR clone 311973 (TRBV11-2, TRBJ1-1)
CASSLGNGAEAFF

SEQ ID NO: 623947 - protein, 13 aa, Homo sapiens
  CDR3 for alpha chain variable domain of TCR clone 311974 (TRAV12-2, TRAJ6)
CAVNVSRKLHTYI

SEQ ID NO: 623948 - protein, 15 aa, Homo sapiens
  CDR3 for beta chain variable domain of TCR clone 311974 (TRBV4-1, TRBJ2-3)
CASSRGQGIPDTQYL

SEQ ID NO: 623949 - protein, 16 aa, Homo sapiens
  CDR3 for alpha chain variable domain of TCR clone 311975 (TRAV30, TRAJ24)
CGTEIVDANSWGKFQF

SEQ ID NO: 623950 - protein, 14 aa, Homo sapiens
  CDR3 for beta chain variable domain of TCR clone 311975 (TRBV13, TRBJ2-1)
CASSPRPRYNEQFF

SEQ ID NO: 623951 - protein, 14 aa, Homo sapiens
  CDR3 for alpha chain variable domain of TCR clone 311976 (TRAV38-1, TRAJ40)
CALRPTSGTYKYVF

SEQ ID NO: 623952 - protein, 14 aa, Homo sapiens
  CDR3 for beta chain variable domain of TCR clone 311976 (TRBV5-4, TRBJ1-1)
CASSLDSRRDEAFF

SEQ ID NO: 623953 - protein, 16 aa, Homo sapiens
  CDR3 for alpha chain variable domain of TCR clone 311977 (TRAV14/DV4, TRAJ53)
CAMREGGGGSNYKLTF

SEQ ID NO: 623954 - protein, 13 aa, Homo sapiens
  CDR3 for beta chain variable domain of TCR clone 311977 (TRBV15, TRBJ1-6)
CATSGGLNSPLHF

SEQ ID NO: 623955 - protein, 12 aa, Homo sapiens
  CDR3 for alpha chain variable domain of TCR clone 311978 (TRAV1-1, TRAJ8)
CAGGTGFQKLVF

SEQ ID NO: 623956 - protein, 15 aa, Homo sapiens
  CDR3 for beta chain variable domain of TCR clone 311978 (TRBV6-5, TRBJ1-2)
CASSYSQAFNYGYTF

SEQ ID NO: 623957 - protein, 11 aa, Homo sapiens
  CDR3 for alpha chain variable domain of TCR clone 311979 (TRAV23/DV6, TRAJ48)
CAPRWSEKLTF

SEQ ID NO: 623958 - protein, 13 aa, Homo sapiens
  CDR3 for beta chain variable domain of TCR clone 311979 (TRBV12-4, TRBJ2-5)
YASSPGTEETQYF

SEQ ID NO: 623959 - protein, 14 aa, Homo sapiens
  CDR3 for alpha chain variable domain of TCR clone 311980 (TRAV17, TRAJ6)
CATDASGGSYIPTF

SEQ ID NO: 623960 - protein, 15 aa, Homo sapiens
  CDR3 for beta chain variable domain of TCR clone 311980 (TRBV28, TRBJ2-5)
CASSPPWSYQETQYF

SEQ ID NO: 623961 - protein, 12 aa, Homo sapiens
  CDR3 for alpha chain variable domain of TCR clone 311981 (TRAV12-1, TRAJ34)
CVVAGATDKLIF

SEQ ID NO: 623962 - protein, 13 aa, Homo sapiens
  CDR3 for beta chain variable domain of TCR clone 311981 (TRBV10-3, TRBJ2-7)
CASKLAVNYEQYF

SEQ ID NO: 623963 - protein, 17 aa, Homo sapiens
  CDR3 for alpha chain variable domain of TCR clone 311982 (TRAV13-2, TRAJ28)
CAEGPAGSGAGSYQLTF

SEQ ID NO: 623964 - protein, 15 aa, Homo sapiens
  CDR3 for beta chain variable domain of TCR clone 311982 (TRBV7-3, TRBJ2-7)
CASSPEEGSSYEQYF

SEQ ID NO: 623965 - protein, 18 aa, Homo sapiens
  CDR3 for alpha chain variable domain of TCR clone 311983 (TRAV12-3, TRAJ52)
CAMSRTNAGGTSYGKLTF

SEQ ID NO: 623966 - protein, 16 aa, Homo sapiens
  CDR3 for beta chain variable domain of TCR clone 311983 (TRBV18, TRBJ2-2)
CASSRAGPTNTGELFF

SEQ ID NO: 623967 - protein, 12 aa, Homo sapiens
  CDR3 for alpha chain variable domain of TCR clone 311984 (TRAV3, TRAJ43)
CAVRDPNNDIRF

SEQ ID NO: 623968 - protein, 13 aa, Homo sapiens
  CDR3 for beta chain variable domain of TCR clone 311984 (TRBV4-1, TRBJ2-1)
CASSQAGGDEQFF

SEQ ID NO: 623969 - protein, 14 aa, Homo sapiens
  CDR3 for alpha chain variable domain of TCR clone 311985 (TRAV12-2, TRAJ17)
CAALFKAAGNKLTF

SEQ ID NO: 623970 - protein, 15 aa, Homo sapiens
  CDR3 for beta chain variable domain of TCR clone 311985 (TRBV6-5, TRBJ1-2)
CASSYSQAFNYGYTF

SEQ ID NO: 623971 - protein, 14 aa, Homo sapiens
  CDR3 for alpha chain variable domain of TCR clone 311986 (TRAV17, TRAJ11)
CATDTSRGYSTLTF

SEQ ID NO: 623972 - protein, 13 aa, Homo sapiens
  CDR3 for beta chain variable domain of TCR clone 311986 (TRBV19, TRBJ2-5)
CASRDARRETQYF

SEQ ID NO: 623973 - protein, 14 aa, Homo sapiens
  CDR3 for alpha chain variable domain of TCR clone 311987 (TRAV1-2, TRAJ8)
CAVREETGFQKLVF

SEQ ID NO: 623974 - protein, 14 aa, Homo sapiens
  CDR3 for beta chain variable domain of TCR clone 311987 (TRBV7-9, TRBJ1-1)
CASSLGGANTEAFF

SEQ ID NO: 623975 - protein, 15 aa, Homo sapiens
  CDR3 for alpha chain variable domain of TCR clone 311988 (TRAV34, TRAJ38)
CGADFTPGNNRNLIW

SEQ ID NO: 623976 - protein, 16 aa, Homo sapiens
  CDR3 for beta chain variable domain of TCR clone 311988 (TRBV12-5, TRBJ2-5)
CASGPRTSGNQETQYF

SEQ ID NO: 623977 - protein, 13 aa, Homo sapiens
  CDR3 for alpha chain variable domain of TCR clone 311989 (TRAV12-3, TRAJ49)
CAMLSNTGNQFYF

SEQ ID NO: 623978 - protein, 13 aa, Homo sapiens
  CDR3 for beta chain variable domain of TCR clone 311989 (TRBV7-3, TRBJ1-1)
CASSQDWGAEAFF

SEQ ID NO: 623979 - protein, 14 aa, Homo sapiens
  CDR3 for alpha chain variable domain of TCR clone 311990 (TRAV3, TRAJ9)
CAVRLNTGCFKTIF

SEQ ID NO: 623980 - protein, 15 aa, Homo sapiens
  CDR3 for beta chain variable domain of TCR clone 311990 (TRBV7-2, TRBJ2-1)
CASSLASGRVNKQFF

SEQ ID NO: 623981 - protein, 15 aa, Homo sapiens
  CDR3 for alpha chain variable domain of TCR clone 311991 (TRAV3, TRAJ4)
CAVRDGTGGYNKLIF

SEQ ID NO: 623982 - protein, 15 aa, Homo sapiens
  CDR3 for beta chain variable domain of TCR clone 311991 (TRBV12-4, TRBJ2-5)
CASSGTGQAQETQYF

SEQ ID NO: 623983 - protein, 14 aa, Homo sapiens
  CDR3 for alpha chain variable domain of TCR clone 311992 (TRAV13-1, TRAJ35)
CAASKGGFGNVLHC

SEQ ID NO: 623984 - protein, 12 aa, Homo sapiens
  CDR3 for beta chain variable domain of TCR clone 311992 (TRBV7-8, TRBJ2-7)
CASEGGPHGQYF

SEQ ID NO: 623985 - protein, 14 aa, Homo sapiens
  CDR3 for alpha chain variable domain of TCR clone 311993 (TRAV29/DV5, TRAJ44)
CAASATGTASKPTF

SEQ ID NO: 623986 - protein, 16 aa, Homo sapiens
  CDR3 for beta chain variable domain of TCR clone 311993 (TRBV7-9, TRBJ1-3)
CASSQTSGLRMGTIYF

SEQ ID NO: 623987 - protein, 15 aa, Homo sapiens
  CDR3 for alpha chain variable domain of TCR clone 311994 (TRAV8-3, TRAJ45)
CASSYSGGGADGVTF

SEQ ID NO: 623988 - protein, 17 aa, Homo sapiens
  CDR3 for beta chain variable domain of TCR clone 311994 (TRBV7-8, TRBJ1-2)
CASSLRPLQGHLYGYTF

SEQ ID NO: 623989 - protein, 15 aa, Homo sapiens
  CDR3 for alpha chain variable domain of TCR clone 311995 (TRAV34, TRAJ38)
CGADFTPGNNRKLIW

SEQ ID NO: 623990 - protein, 14 aa, Homo sapiens
  CDR3 for beta chain variable domain of TCR clone 311995 (TRBV5-5, TRBJ1-1)
CASSLQLMNTEAFF

SEQ ID NO: 623991 - protein, 16 aa, Homo sapiens
  CDR3 for alpha chain variable domain of TCR clone 311996 (TRAV21, TRAJ37)
CAVRTAGSTNPGKLIF

SEQ ID NO: 623992 - protein, 13 aa, Homo sapiens
  CDR3 for beta chain variable domain of TCR clone 311996 (TRBV7-9, TRBJ2-5)
CASLPSGRETQYF

SEQ ID NO: 623993 - protein, 13 aa, Homo sapiens
  CDR3 for alpha chain variable domain of TCR clone 311997 (TRAV12-1, TRAJ26)
CVVRRNYGQNFVF

SEQ ID NO: 623994 - protein, 19 aa, Homo sapiens
  CDR3 for beta chain variable domain of TCR clone 311997 (TRBV11-2, TRBJ2-3)
CASSAPRAGGNPSTDTQYF

SEQ ID NO: 623995 - protein, 13 aa, Homo sapiens
  CDR3 for alpha chain variable domain of TCR clone 311998 (TRAV26-2, TRAJ43)
CILRAVNNNDMLF

SEQ ID NO: 623996 - protein, 15 aa, Homo sapiens
  CDR3 for beta chain variable domain of TCR clone 311998 (TRBV5-1, TRBJ2-2)
CASSSQGGNTGELFF

SEQ ID NO: 623997 - protein, 12 aa, Homo sapiens
  CDR3 for alpha chain variable domain of TCR clone 311999 (TRAV17, TRAJ20)
CATLANDYKLSF

SEQ ID NO: 623998 - protein, 14 aa, Homo sapiens
  CDR3 for beta chain variable domain of TCR clone 311999 (TRBV10-3, TRBJ1-2)
CAISEDTPYYGYIF

SEQ ID NO: 623999 - protein, 16 aa, Homo sapiens
  CDR3 for alpha chain variable domain of TCR clone 312000 (TRAV12-3, TRAJ53)
CAMSPGSGGSNYKLTF

SEQ ID NO: 624000 - protein, 16 aa, Homo sapiens
  CDR3 for beta chain variable domain of TCR clone 312000 (TRBV7-9, TRBJ1-2)
CASSPGGGAINYGYTF

SEQ ID NO: 624001 - protein, 15 aa, Homo sapiens
  CDR3 for alpha chain variable domain of TCR clone 312001 (TRAV26-1, TRAJ44)
CIVRANTGTASKLTF

SEQ ID NO: 624002 - protein, 19 aa, Homo sapiens
  CDR3 for beta chain variable domain of TCR clone 312001 (TRBV25-1, TRBJ2-2)
CAILVYRVDRGRKTGELFF

SEQ ID NO: 624003 - protein, 17 aa, Homo sapiens
  CDR3 for alpha chain variable domain of TCR clone 312002 (TRAV20, TRAJ45)
CAVQGMYSGGGADGLTF

SEQ ID NO: 624004 - protein, 12 aa, Homo sapiens
  CDR3 for beta chain variable domain of TCR clone 312002 (TRBV11-2, TRBJ2-2)
CASSLPTGELFF

SEQ ID NO: 624005 - protein, 14 aa, Homo sapiens
  CDR3 for alpha chain variable domain of TCR clone 312003 (TRAV12-2, TRAJ3)
CAVSLYSSASKIIF

SEQ ID NO: 624006 - protein, 14 aa, Homo sapiens
  CDR3 for beta chain variable domain of TCR clone 312003 (TRBV4-1, TRBJ2-2)
CASSQAVNTGELFF

SEQ ID NO: 624007 - protein, 11 aa, Homo sapiens
  CDR3 for alpha chain variable domain of TCR clone 312004 (TRAV17, TRAJ43)
CATPRSNDMRF

SEQ ID NO: 624008 - protein, 13 aa, Homo sapiens
  CDR3 for beta chain variable domain of TCR clone 312004 (TRBV19, TRBJ1-2)
CASSVPGQDGYTF

SEQ ID NO: 624009 - protein, 16 aa, Homo sapiens
  CDR3 for alpha chain variable domain of TCR clone 312005 (TRAV3, TRAJ37)
CAVRVRDSGNTGKLIF

SEQ ID NO: 624010 - protein, 11 aa, Homo sapiens
  CDR3 for beta chain variable domain of TCR clone 312005 (TRBV11-2, TRBJ2-2)
CASSLPGELFF

SEQ ID NO: 624011 - protein, 11 aa, Homo sapiens
  CDR3 for alpha chain variable domain of TCR clone 312006 (TRAV16, TRAJ49)
CALRSGNQFYF

SEQ ID NO: 624012 - protein, 16 aa, Homo sapiens
  CDR3 for beta chain variable domain of TCR clone 312006 (TRBV20-1, TRBJ1-5)
CSARDVGGVWIQPQHF

SEQ ID NO: 624013 - protein, 14 aa, Homo sapiens
  CDR3 for alpha chain variable domain of TCR clone 312007 (TRAV17, TRAJ16)
CATADFSDGQKLLF

SEQ ID NO: 624014 - protein, 14 aa, Homo sapiens
  CDR3 for beta chain variable domain of TCR clone 312007 (TRBV25-1, TRBJ1-1)
CASTRLGGNTEAFF

SEQ ID NO: 624015 - protein, 12 aa, Homo sapiens
  CDR3 for alpha chain variable domain of TCR clone 312008 (TRAV12-3, TRAJ17)
CAMTLKGNKLTF

SEQ ID NO: 624016 - protein, 20 aa, Homo sapiens
  CDR3 for beta chain variable domain of TCR clone 312008 (TRBV19, TRBJ2-1)
CASSISRTVTSTRLNNEQFF

SEQ ID NO: 624017 - protein, 15 aa, Homo sapiens
  CDR3 for alpha chain variable domain of TCR clone 312009 (TRAV17, TRAJ57)
CATGSSQGGSEKLVF

SEQ ID NO: 624018 - protein, 13 aa, Homo sapiens
  CDR3 for beta chain variable domain of TCR clone 312009 (TRBV27, TRBJ1-4)
CASSLMGDEKLFF

SEQ ID NO: 624019 - protein, 13 aa, Homo sapiens
  CDR3 for alpha chain variable domain of TCR clone 312010 (TRAV2, TRAJ40)
STVVTSGTYKYIF

SEQ ID NO: 624020 - protein, 14 aa, Homo sapiens
  CDR3 for beta chain variable domain of TCR clone 312010 (TRBV19, TRBJ2-1)
CASPAFVLSGEQFF

SEQ ID NO: 624021 - protein, 13 aa, Homo sapiens
  CDR3 for alpha chain variable domain of TCR clone 312011 (TRAV27, TRAJ41)
CAGEGNSGYALNF

SEQ ID NO: 624022 - protein, 13 aa, Homo sapiens
  CDR3 for beta chain variable domain of TCR clone 312011 (TRBV27, TRBJ2-7)
CASSFVSSYEQYV

SEQ ID NO: 624023 - protein, 15 aa, Homo sapiens
  CDR3 for alpha chain variable domain of TCR clone 312012 (TRAV13-1, TRAJ10)
CAASKISGGGNKLTF

SEQ ID NO: 624024 - protein, 13 aa, Homo sapiens
  CDR3 for beta chain variable domain of TCR clone 312012 (TRBV7-3, TRBJ1-1)
CASSQDWGAEAFF

SEQ ID NO: 624025 - protein, 14 aa, Homo sapiens
  CDR3 for alpha chain variable domain of TCR clone 312013 (TRAV17, TRAJ57)
CATDPQGGAEKLVF

SEQ ID NO: 624026 - protein, 15 aa, Homo sapiens
  CDR3 for beta chain variable domain of TCR clone 312013 (TRBV12-4, TRBJ1-2)
CASRLGVAGNYGYTF

SEQ ID NO: 624027 - protein, 12 aa, Homo sapiens
  CDR3 for alpha chain variable domain of TCR clone 312014 (TRAV27, TRAJ35)
CAGADFRNVLHC

SEQ ID NO: 624028 - protein, 16 aa, Homo sapiens
  CDR3 for beta chain variable domain of TCR clone 312014 (TRBV6-1, TRBJ2-1)
CASILRQGISYNEQFF

SEQ ID NO: 624029 - protein, 14 aa, Homo sapiens
  CDR3 for alpha chain variable domain of TCR clone 312015 (TRAV12-3, TRAJ29)
CAMSPYSGNTPLVF

SEQ ID NO: 624030 - protein, 15 aa, Homo sapiens
  CDR3 for beta chain variable domain of TCR clone 312015 (TRBV7-2, TRBJ2-3)
CASSLAGAFIDTQYF

SEQ ID NO: 624031 - protein, 13 aa, Homo sapiens
  CDR3 for alpha chain variable domain of TCR clone 312016 (TRAV3, TRAJ21)
CAVREPDFNKFYF

SEQ ID NO: 624032 - protein, 16 aa, Homo sapiens
  CDR3 for beta chain variable domain of TCR clone 312016 (TRBV7-3, TRBJ2-2)
CASSLTGTGTTGELFF

SEQ ID NO: 624033 - protein, 14 aa, Homo sapiens
  CDR3 for alpha chain variable domain of TCR clone 312017 (TRAV26-1, TRAJ49)
CIVRLTNTGNQFYF

SEQ ID NO: 624034 - protein, 13 aa, Homo sapiens
  CDR3 for beta chain variable domain of TCR clone 312017 (TRBV4-1, TRBJ2-7)
CASSQGQAYEQYS

SEQ ID NO: 624035 - protein, 14 aa, Homo sapiens
  CDR3 for alpha chain variable domain of TCR clone 312018 (TRAV38-1, TRAJ40)
CALRPTSGTYKYIF

SEQ ID NO: 624036 - protein, 14 aa, Homo sapiens
  CDR3 for beta chain variable domain of TCR clone 312018 (TRBV28, TRBJ1-2)
CASRIQGANYGYTF

SEQ ID NO: 624037 - protein, 12 aa, Homo sapiens
  CDR3 for alpha chain variable domain of TCR clone 312019 (TRAV12-3, TRAJ17)
CAMTLTGNKLTF

SEQ ID NO: 624038 - protein, 15 aa, Homo sapiens
  CDR3 for beta chain variable domain of TCR clone 312019 (TRBV10-2, TRBJ2-6)
CASSEQGTGANALTF

SEQ ID NO: 624039 - protein, 16 aa, Homo sapiens
  CDR3 for alpha chain variable domain of TCR clone 312020 (TRAV3, TRAJ37)
CAVRGKGSGNTDKLIF

SEQ ID NO: 624040 - protein, 16 aa, Homo sapiens
  CDR3 for beta chain variable domain of TCR clone 312020 (TRBV12-4, TRBJ1-5)
CASSRPVGGSNQPQHF

SEQ ID NO: 624041 - protein, 14 aa, Homo sapiens
  CDR3 for alpha chain variable domain of TCR clone 312021 (TRAV35, TRAJ40)
CAGSTTSGTYKYIF

SEQ ID NO: 624042 - protein, 16 aa, Homo sapiens
  CDR3 for beta chain variable domain of TCR clone 312021 (TRBV7-2, TRBJ1-2)
CASSSNQDRRGHGYTF

SEQ ID NO: 624043 - protein, 15 aa, Homo sapiens
  CDR3 for alpha chain variable domain of TCR clone 312022 (TRAV13-1, TRAJ44)
CAASRGGGTARKLTF

SEQ ID NO: 624044 - protein, 12 aa, Homo sapiens
  CDR3 for beta chain variable domain of TCR clone 312022 (TRBV11-2, TRBJ2-2)
CASSLGGGELFF

SEQ ID NO: 624045 - protein, 13 aa, Homo sapiens
  CDR3 for alpha chain variable domain of TCR clone 312023 (TRAV38-2/DV8, TRAJ34)
CAYRTWNTDKLIF

SEQ ID NO: 624046 - protein, 13 aa, Homo sapiens
  CDR3 for beta chain variable domain of TCR clone 312023 (TRBV6-4, TRBJ1-5)
CASSADLNQPQHF

SEQ ID NO: 624047 - protein, 13 aa, Homo sapiens
  CDR3 for alpha chain variable domain of TCR clone 312024 (TRAV2, TRAJ40)
CAVVTSGTYKYIF

SEQ ID NO: 624048 - protein, 15 aa, Homo sapiens
  CDR3 for beta chain variable domain of TCR clone 312024 (TRBV12-4, TRBJ2-5)
CASSLSGAFQETQYF

SEQ ID NO: 624049 - protein, 22 aa, Homo sapiens
  CDR3 for alpha chain variable domain of TCR clone 312025 (TRAV16, )
CALRTQIPDIQKPDPAVYQLRD

SEQ ID NO: 624050 - protein, 16 aa, Homo sapiens
  CDR3 for beta chain variable domain of TCR clone 312025 (TRBV7-2, TRBJ1-2)
CASSSNQDRRGHGYTF

SEQ ID NO: 624051 - protein, 15 aa, Homo sapiens
  CDR3 for alpha chain variable domain of TCR clone 312026 (TRAV9-2, TRAJ23)
CALSDLYNQGGKLIF

SEQ ID NO: 624052 - protein, 12 aa, Homo sapiens
  CDR3 for beta chain variable domain of TCR clone 312026 (TRBV7-8, TRBJ2-7)
CASSLGDREQYF

SEQ ID NO: 624053 - protein, 12 aa, Homo sapiens
  CDR3 for alpha chain variable domain of TCR clone 312027 (TRAV1-1, TRAJ8)
CAGGTGFQKLVF

SEQ ID NO: 624054 - protein, 15 aa, Homo sapiens
  CDR3 for beta chain variable domain of TCR clone 312027 (TRBV7-9, TRBJ1-4)
CASSRTAGFNEKLFF

SEQ ID NO: 624055 - protein, 12 aa, Homo sapiens
  CDR3 for alpha chain variable domain of TCR clone 312028 (TRAV8-3, TRAJ34)
WASGYNTDKLIF

SEQ ID NO: 624056 - protein, 13 aa, Homo sapiens
  CDR3 for beta chain variable domain of TCR clone 312028 (TRBV20-1, TRBJ2-3)
CSASRQAADTQYF

SEQ ID NO: 624057 - protein, 17 aa, Homo sapiens
  CDR3 for alpha chain variable domain of TCR clone 312029 (TRAV4, TRAJ18)
CLVGERSVGSTLGRLYF

SEQ ID NO: 624058 - protein, 16 aa, Homo sapiens
  CDR3 for beta chain variable domain of TCR clone 312029 (TRBV15, TRBJ1-4)
CATSRDSPPGREELFF

SEQ ID NO: 624059 - protein, 15 aa, Homo sapiens
  CDR3 for alpha chain variable domain of TCR clone 312030 (TRAV25, TRAJ41)
CAGPWNANSGYALNF

SEQ ID NO: 624060 - protein, 13 aa, Homo sapiens
  CDR3 for beta chain variable domain of TCR clone 312030 (TRBV15, TRBJ1-1)
CATSRGIQARAFF

SEQ ID NO: 624061 - protein, 16 aa, Homo sapiens
  CDR3 for alpha chain variable domain of TCR clone 312031 (TRAV12-3, TRAJ53)
CASSPGSGGSNYKLTF

SEQ ID NO: 624062 - protein, 11 aa, Homo sapiens
  CDR3 for beta chain variable domain of TCR clone 312031 (TRBV29-1, TRBJ2-5)
CSEDRTGTQYF

SEQ ID NO: 624063 - protein, 15 aa, Homo sapiens
  CDR3 for alpha chain variable domain of TCR clone 312032 (TRAV16, TRAJ5)
CALKGMDTGRRALTF

SEQ ID NO: 624064 - protein, 13 aa, Homo sapiens
  CDR3 for beta chain variable domain of TCR clone 312032 (TRBV12-4, TRBJ2-5)
CASRLAVQETQYF

SEQ ID NO: 624065 - protein, 16 aa, Homo sapiens
  CDR3 for alpha chain variable domain of TCR clone 312033 (TRAV12-2, TRAJ28)
CAVITDSGAGSYQLTF

SEQ ID NO: 624066 - protein, 14 aa, Homo sapiens
  CDR3 for beta chain variable domain of TCR clone 312033 (TRBV7-2, TRBJ1-3)
CASSRLRSGNTIYF

SEQ ID NO: 624067 - protein, 12 aa, Homo sapiens
  CDR3 for alpha chain variable domain of TCR clone 312034 (TRAV3, TRAJ7)
CAELLWEQQTRF

SEQ ID NO: 624068 - protein, 12 aa, Homo sapiens
  CDR3 for beta chain variable domain of TCR clone 312034 (TRBV7-3, TRBJ2-5)
CQQLPGGETQYF

SEQ ID NO: 624069 - protein, 12 aa, Homo sapiens
  CDR3 for alpha chain variable domain of TCR clone 312035 (TRAV17, TRAJ30)
CVPERRDDKIIF

SEQ ID NO: 624070 - protein, 14 aa, Homo sapiens
  CDR3 for beta chain variable domain of TCR clone 312035 (TRBV7-7, TRBJ2-2)
CDSSRDRSTGELFF

SEQ ID NO: 624071 - protein, 14 aa, Homo sapiens
  CDR3 for alpha chain variable domain of TCR clone 312036 (TRAV13-1, TRAJ3)
CAASKSSRASKIIF

SEQ ID NO: 624072 - protein, 16 aa, Homo sapiens
  CDR3 for beta chain variable domain of TCR clone 312036 (TRBV15, TRBJ2-3)
CATSRDLGIVTDTQYF

SEQ ID NO: 624073 - protein, 14 aa, Homo sapiens
  CDR3 for alpha chain variable domain of TCR clone 312037 (TRAV8-2, TRAJ37)
CVVSISDNTGKLIF

SEQ ID NO: 624074 - protein, 14 aa, Homo sapiens
  CDR3 for beta chain variable domain of TCR clone 312037 (TRBV12-4, TRBJ1-6)
CASNLQGKGSPLHF

SEQ ID NO: 624075 - protein, 20 aa, Homo sapiens
  CDR3 for alpha chain variable domain of TCR clone 312038 (TRAV12-1, TRAJ42)
SSVIQPPTSVKGGSQGNLIF

SEQ ID NO: 624076 - protein, 16 aa, Homo sapiens
  CDR3 for beta chain variable domain of TCR clone 312038 (TRBV11-3, TRBJ2-3)
CASSSGSGGGTDTQYF

SEQ ID NO: 624077 - protein, 11 aa, Homo sapiens
  CDR3 for alpha chain variable domain of TCR clone 312039 (TRAV20, TRAJ23)
CACNQGGKLIF

SEQ ID NO: 624078 - protein, 15 aa, Homo sapiens
  CDR3 for beta chain variable domain of TCR clone 312039 (TRBV7-8, TRBJ2-5)
CQQLWRATRQETQYF

SEQ ID NO: 624079 - protein, 13 aa, Homo sapiens
  CDR3 for alpha chain variable domain of TCR clone 312040 (TRAV20, TRAJ37)
CAGCSSNTGKLTF

SEQ ID NO: 624080 - protein, 14 aa, Homo sapiens
  CDR3 for beta chain variable domain of TCR clone 312040 (TRBV20-1, TRBJ2-5)
CSARDGRAGETQYF

SEQ ID NO: 624081 - protein, 14 aa, Homo sapiens
  CDR3 for alpha chain variable domain of TCR clone 312041 (TRAV16, TRAJ15)
CALSGPQAGTALIF

SEQ ID NO: 624082 - protein, 13 aa, Homo sapiens
  CDR3 for beta chain variable domain of TCR clone 312041 (TRBV10-3, TRBJ2-7)
CASKLAVNYEQYF

SEQ ID NO: 624083 - protein, 13 aa, Homo sapiens
  CDR3 for alpha chain variable domain of TCR clone 312042 (TRAV38-1, TRAJ42)
CARWGGSQGNLIF

SEQ ID NO: 624084 - protein, 14 aa, Homo sapiens
  CDR3 for beta chain variable domain of TCR clone 312042 (TRBV6-1, TRBJ1-3)
CASVQVGGGNTIYF

SEQ ID NO: 624085 - protein, 11 aa, Homo sapiens
  CDR3 for alpha chain variable domain of TCR clone 312043 (TRAV3, TRAJ21)
CAVGNFNKFFF

SEQ ID NO: 624086 - protein, 14 aa, Homo sapiens
  CDR3 for beta chain variable domain of TCR clone 312043 (TRBV6-3, TRBJ1-1)
CASSYHSKNTEAFF

SEQ ID NO: 624087 - protein, 15 aa, Homo sapiens
  CDR3 for alpha chain variable domain of TCR clone 312044 (TRAV12-1, TRAJ44)
CVADLPTGTASKLTF

SEQ ID NO: 624088 - protein, 13 aa, Homo sapiens
  CDR3 for beta chain variable domain of TCR clone 312044 (TRBV6-6, TRBJ1-5)
CASSRGSNQPQHF

SEQ ID NO: 624089 - protein, 13 aa, Homo sapiens
  CDR3 for alpha chain variable domain of TCR clone 312045 (TRAV8-3, TRAJ42)
CARYGGSQGNLIF

SEQ ID NO: 624090 - protein, 14 aa, Homo sapiens
  CDR3 for beta chain variable domain of TCR clone 312045 (TRBV20-1, TRBJ2-1)
CSDLDRGTYNEQFF

SEQ ID NO: 624091 - protein, 13 aa, Homo sapiens
  CDR3 for alpha chain variable domain of TCR clone 312046 (TRAV8-3, TRAJ28)
CAVVAVVSYQLTF

SEQ ID NO: 624092 - protein, 15 aa, Homo sapiens
  CDR3 for beta chain variable domain of TCR clone 312046 (TRBV7-9, TRBJ1-5)
CASSQGHQPNQPQHF

SEQ ID NO: 624093 - protein, 15 aa, Homo sapiens
  CDR3 for alpha chain variable domain of TCR clone 312047 (TRAV12-2, TRAJ56)
CAVNPFTGANSKLTF

SEQ ID NO: 624094 - protein, 13 aa, Homo sapiens
  CDR3 for beta chain variable domain of TCR clone 312047 (TRBV12-4, TRBJ1-2)
CASTMTSNYGYTF

SEQ ID NO: 624095 - protein, 12 aa, Homo sapiens
  CDR3 for alpha chain variable domain of TCR clone 312048 (TRAV3, TRAJ26)
CAVRDYGQNSVF

SEQ ID NO: 624096 - protein, 16 aa, Homo sapiens
  CDR3 for beta chain variable domain of TCR clone 312048 (TRBV11-2, TRBJ1-2)
CAGSPSGREANYGYTF

SEQ ID NO: 624097 - protein, 15 aa, Homo sapiens
  CDR3 for alpha chain variable domain of TCR clone 312049 (TRAV26-1, TRAJ44)
CIVRANTGTASKLIF

SEQ ID NO: 624098 - protein, 13 aa, Homo sapiens
  CDR3 for beta chain variable domain of TCR clone 312049 (TRBV12-4, TRBJ1-2)
CASSLRQGKGYTF

SEQ ID NO: 624099 - protein, 12 aa, Homo sapiens
  CDR3 for alpha chain variable domain of TCR clone 312050 (TRAV1-1, TRAJ29)
CAVEFRKHTSCL

SEQ ID NO: 624100 - protein, 17 aa, Homo sapiens
  CDR3 for beta chain variable domain of TCR clone 312050 (TRBV7-2, TRBJ2-3)
CASSLEARGTSTDTQYF

SEQ ID NO: 624101 - protein, 14 aa, Homo sapiens
  CDR3 for alpha chain variable domain of TCR clone 312051 (TRAV17, TRAJ57)
CATDPQGGSEKLGF

SEQ ID NO: 624102 - protein, 13 aa, Homo sapiens
  CDR3 for beta chain variable domain of TCR clone 312051 (TRBV3-1, TRBJ1-1)
CASSQLQGAEAFF

SEQ ID NO: 624103 - protein, 12 aa, Homo sapiens
  CDR3 for alpha chain variable domain of TCR clone 312052 (TRAV12-1, TRAJ30)
CVVNTRDDKIIF

SEQ ID NO: 624104 - protein, 18 aa, Homo sapiens
  CDR3 for beta chain variable domain of TCR clone 312052 (TRBV5-1, TRBJ2-7)
CASSLAGFGGMSSYEQYF

SEQ ID NO: 624105 - protein, 11 aa, Homo sapiens
  CDR3 for alpha chain variable domain of TCR clone 312053 (TRAV1-1, TRAJ23)
CAVRQGGKLIF

SEQ ID NO: 624106 - protein, 14 aa, Homo sapiens
  CDR3 for beta chain variable domain of TCR clone 312053 (TRBV2, TRBJ2-3)
CASSEGQNTDTQYF

SEQ ID NO: 624107 - protein, 16 aa, Homo sapiens
  CDR3 for alpha chain variable domain of TCR clone 312054 (TRAV40, TRAJ52)
CLLGNAGGTSYGKLTF

SEQ ID NO: 624108 - protein, 18 aa, Homo sapiens
  CDR3 for beta chain variable domain of TCR clone 312054 (TRBV4-1, TRBJ1-5)
CASSQDPRGQGLNQPQHF

SEQ ID NO: 624109 - protein, 14 aa, Homo sapiens
  CDR3 for alpha chain variable domain of TCR clone 312055 (TRAV13-2, TRAJ43)
CAEIPTYNNNDMRF

SEQ ID NO: 624110 - protein, 15 aa, Homo sapiens
  CDR3 for beta chain variable domain of TCR clone 312055 (TRBV7-9, TRBJ2-2)
CASGPLDTSPGELFF

SEQ ID NO: 624111 - protein, 12 aa, Homo sapiens
  CDR3 for alpha chain variable domain of TCR clone 312056 (TRAV17, TRAJ53)
CATEGSNYKLTF

SEQ ID NO: 624112 - protein, 19 aa, Homo sapiens
  CDR3 for beta chain variable domain of TCR clone 312056 (TRBV5-1, TRBJ2-3)
CASSLWTSGGIITPDTQYF

SEQ ID NO: 624113 - protein, 13 aa, Homo sapiens
  CDR3 for alpha chain variable domain of TCR clone 312057 (TRAV12-2, TRAJ6)
CAVNVSRKLHTYI

SEQ ID NO: 624114 - protein, 14 aa, Homo sapiens
  CDR3 for beta chain variable domain of TCR clone 312057 (TRBV20-1, TRBJ1-1)
CSARAVNGYTEAFF

SEQ ID NO: 624115 - protein, 11 aa, Homo sapiens
  CDR3 for alpha chain variable domain of TCR clone 312058 (TRAV2, TRAJ13)
CASGGYLKVTF

SEQ ID NO: 624116 - protein, 12 aa, Homo sapiens
  CDR3 for beta chain variable domain of TCR clone 312058 (TRBV19, TRBJ1-4)
CASKDWPGGLFF

SEQ ID NO: 624117 - protein, 12 aa, Homo sapiens
  CDR3 for alpha chain variable domain of TCR clone 312059 (TRAV13-1, TRAJ27)
CAAHTNAGKSTF

SEQ ID NO: 624118 - protein, 12 aa, Homo sapiens
  CDR3 for beta chain variable domain of TCR clone 312059 (TRBV29-1, TRBJ2-3)
CSVTGGADTQYF

SEQ ID NO: 624119 - protein, 16 aa, Homo sapiens
  CDR3 for alpha chain variable domain of TCR clone 312060 (TRAV38-1, TRAJ37)
CAFKGDGSSNTGKLIF

SEQ ID NO: 624120 - protein, 12 aa, Homo sapiens
  CDR3 for beta chain variable domain of TCR clone 312060 (TRBV12-4, TRBJ1-3)
CASSFSGNTIYF

SEQ ID NO: 624121 - protein, 13 aa, Homo sapiens
  CDR3 for alpha chain variable domain of TCR clone 312061 (TRAV1-1, TRAJ33)
CASHMDSNYQLIW

SEQ ID NO: 624122 - protein, 15 aa, Homo sapiens
  CDR3 for beta chain variable domain of TCR clone 312061 (TRBV11-3, TRBJ2-3)
FASLKDGREGDTQYF

SEQ ID NO: 624123 - protein, 18 aa, Homo sapiens
  CDR3 for alpha chain variable domain of TCR clone 312062 (TRAV21, TRAJ52)
CAVRPSPAGGTSYRKLTF

SEQ ID NO: 624124 - protein, 15 aa, Homo sapiens
  CDR3 for beta chain variable domain of TCR clone 312062 (TRBV6-4, TRBJ2-2)
CASSPGGGWTGELFF

SEQ ID NO: 624125 - protein, 14 aa, Homo sapiens
  CDR3 for alpha chain variable domain of TCR clone 312063 (TRAV1-2, TRAJ16)
CAVNRSSDGQKRLF

SEQ ID NO: 624126 - protein, 13 aa, Homo sapiens
  CDR3 for beta chain variable domain of TCR clone 312063 (TRBV7-3, TRBJ1-1)
CASSQDWGAEAFF

SEQ ID NO: 624127 - protein, 14 aa, Homo sapiens
  CDR3 for alpha chain variable domain of TCR clone 312064 (TRAV1-2, TRAJ16)
CAVNRFSDGQKLLF

SEQ ID NO: 624128 - protein, 12 aa, Homo sapiens
  CDR3 for beta chain variable domain of TCR clone 312064 (TRBV27, TRBJ2-2)
CASSFLPGELFF

SEQ ID NO: 624129 - protein, 12 aa, Homo sapiens
  CDR3 for alpha chain variable domain of TCR clone 312065 (TRAV12-3, TRAJ17)
CAMTLAGNKLTF

SEQ ID NO: 624130 - protein, 14 aa, Homo sapiens
  CDR3 for beta chain variable domain of TCR clone 312065 (TRBV5-1, TRBJ2-7)
CASSRGESLYEQYF

SEQ ID NO: 624131 - protein, 16 aa, Homo sapiens
  CDR3 for alpha chain variable domain of TCR clone 312066 (TRAV3, TRAJ37)
CAVRGKGSGNTGKLIF

SEQ ID NO: 624132 - protein, 15 aa, Homo sapiens
  CDR3 for beta chain variable domain of TCR clone 312066 (TRBV12-4, TRBJ1-2)
CASSLAHRDGQAYTF

SEQ ID NO: 624133 - protein, 12 aa, Homo sapiens
  CDR3 for alpha chain variable domain of TCR clone 312067 (TRAV1-1, TRAJ24)
CAARGSWGKLQF

SEQ ID NO: 624134 - protein, 16 aa, Homo sapiens
  CDR3 for beta chain variable domain of TCR clone 312067 (TRBV27, TRBJ2-2)
CASSFRGLVRTGELFF

SEQ ID NO: 624135 - protein, 14 aa, Homo sapiens
  CDR3 for alpha chain variable domain of TCR clone 312068 (TRAV26-1, TRAJ45)
CIEVTEGGADGLTF

SEQ ID NO: 624136 - protein, 13 aa, Homo sapiens
  CDR3 for beta chain variable domain of TCR clone 312068 (TRBV7-6, TRBJ1-2)
CASSLVADYGYTF

SEQ ID NO: 624137 - protein, 14 aa, Homo sapiens
  CDR3 for alpha chain variable domain of TCR clone 312069 (TRAV8-3, TRAJ4)
CAVGEAGGYNKMIF

SEQ ID NO: 624138 - protein, 15 aa, Homo sapiens
  CDR3 for beta chain variable domain of TCR clone 312069 (TRBV6-5, TRBJ2-1)
CASSYDAGAGNEQFF

SEQ ID NO: 624139 - protein, 13 aa, Homo sapiens
  CDR3 for alpha chain variable domain of TCR clone 312070 (TRAV24, TRAJ43)
CALTRHNNNDMPF

SEQ ID NO: 624140 - protein, 13 aa, Homo sapiens
  CDR3 for beta chain variable domain of TCR clone 312070 (TRBV2, TRBJ1-1)
CASSVLMNTEAFF

SEQ ID NO: 624141 - protein, 13 aa, Homo sapiens
  CDR3 for alpha chain variable domain of TCR clone 312071 (TRAV8-3, TRAJ44)
CAVVPGTASKLTF

SEQ ID NO: 624142 - protein, 14 aa, Homo sapiens
  CDR3 for beta chain variable domain of TCR clone 312071 (TRBV11-2, TRBJ2-3)
CASSRPARTDTQYF

SEQ ID NO: 624143 - protein, 14 aa, Homo sapiens
  CDR3 for alpha chain variable domain of TCR clone 312072 (TRAV12-1, TRAJ23)
CVVIGYNQGGKLIF

SEQ ID NO: 624144 - protein, 13 aa, Homo sapiens
  CDR3 for beta chain variable domain of TCR clone 312072 (TRBV18, TRBJ2-7)
CASSPGNTYEQYF

SEQ ID NO: 624145 - protein, 15 aa, Homo sapiens
  CDR3 for alpha chain variable domain of TCR clone 312073 (TRAV25, TRAJ53)
CPTSNSGGSNYKLTF

SEQ ID NO: 624146 - protein, 13 aa, Homo sapiens
  CDR3 for beta chain variable domain of TCR clone 312073 (TRBV12-5, TRBJ2-3)
CASQNRGTDTQYF

SEQ ID NO: 624147 - protein, 12 aa, Homo sapiens
  CDR3 for alpha chain variable domain of TCR clone 312074 (TRAV17, TRAJ57)
CATDGGSETLVF

SEQ ID NO: 624148 - protein, 13 aa, Homo sapiens
  CDR3 for beta chain variable domain of TCR clone 312074 (TRBV7-9, TRBJ2-7)
CASSLAGAYEQYF

SEQ ID NO: 624149 - protein, 14 aa, Homo sapiens
  CDR3 for alpha chain variable domain of TCR clone 312075 (TRAV25, TRAJ39)
CGRSNNNAGNMLTF

SEQ ID NO: 624150 - protein, 14 aa, Homo sapiens
  CDR3 for beta chain variable domain of TCR clone 312075 (TRBV15, TRBJ2-5)
CATSIGGLGETQYF

SEQ ID NO: 624151 - protein, 14 aa, Homo sapiens
  CDR3 for alpha chain variable domain of TCR clone 312076 (TRAV17, TRAJ16)
CATADFSDGQKLLF

SEQ ID NO: 624152 - protein, 12 aa, Homo sapiens
  CDR3 for beta chain variable domain of TCR clone 312076 (TRBV24-1, TRBJ1-1)
CATLYPETKAFF

SEQ ID NO: 624153 - protein, 15 aa, Homo sapiens
  CDR3 for alpha chain variable domain of TCR clone 312077 (TRAV26-1, TRAJ40)
CIVRVTTSGTYKYIF

SEQ ID NO: 624154 - protein, 12 aa, Homo sapiens
  CDR3 for beta chain variable domain of TCR clone 312077 (TRBV7-9, TRBJ1-4)
CASSTDREKVFF

SEQ ID NO: 624155 - protein, 15 aa, Homo sapiens
  CDR3 for alpha chain variable domain of TCR clone 312078 (TRAV8-3, TRAJ11)
CAVGLLNSGYSTLTF

SEQ ID NO: 624156 - protein, 13 aa, Homo sapiens
  CDR3 for beta chain variable domain of TCR clone 312078 (TRBV11-2, TRBJ1-3)
CASSLEPVNTIYF

SEQ ID NO: 624157 - protein, 15 aa, Homo sapiens
  CDR3 for alpha chain variable domain of TCR clone 312079 (TRAV17, TRAJ4)
CATGTCSGCYNKLIF

SEQ ID NO: 624158 - protein, 13 aa, Homo sapiens
  CDR3 for beta chain variable domain of TCR clone 312079 (TRBV6-6, TRBJ2-7)
CASSPKHLAEQYF

SEQ ID NO: 624159 - protein, 11 aa, Homo sapiens
  CDR3 for alpha chain variable domain of TCR clone 312080 (TRAV2, TRAJ13)
CASAGYQKVTF

SEQ ID NO: 624160 - protein, 14 aa, Homo sapiens
  CDR3 for beta chain variable domain of TCR clone 312080 (TRBV7-3, TRBJ2-1)
CASSLAGGTNEQFF

SEQ ID NO: 624161 - protein, 13 aa, Homo sapiens
  CDR3 for alpha chain variable domain of TCR clone 312081 (TRAV20, TRAJ31)
CAVQAIGGARLMF

SEQ ID NO: 624162 - protein, 17 aa, Homo sapiens
  CDR3 for beta chain variable domain of TCR clone 312081 (TRBV19, TRBJ2-7)
CASSISFYDSYPYEQYF

SEQ ID NO: 624163 - protein, 15 aa, Homo sapiens
  CDR3 for alpha chain variable domain of TCR clone 312082 (TRAV21, TRAJ10)
CAVPLLTGGGNKLTF

SEQ ID NO: 624164 - protein, 16 aa, Homo sapiens
  CDR3 for beta chain variable domain of TCR clone 312082 (TRBV12-5, TRBJ2-5)
CASGPRTSGNQETQYF

SEQ ID NO: 624165 - protein, 14 aa, Homo sapiens
  CDR3 for alpha chain variable domain of TCR clone 312083 (TRAV13-1, TRAJ45)
CAAIGGGGAEGLTF

SEQ ID NO: 624166 - protein, 16 aa, Homo sapiens
  CDR3 for beta chain variable domain of TCR clone 312083 (TRBV7-2, TRBJ1-1)
CASSLGAGWTNTEAFF

SEQ ID NO: 624167 - protein, 15 aa, Homo sapiens
  CDR3 for alpha chain variable domain of TCR clone 312084 (TRAV16, TRAJ16)
CALQGGGSDGQKLLF

SEQ ID NO: 624168 - protein, 13 aa, Homo sapiens
  CDR3 for beta chain variable domain of TCR clone 312084 (TRBV19, TRBJ2-7)
CASRKAGGSEQYF

SEQ ID NO: 624169 - protein, 13 aa, Homo sapiens
  CDR3 for alpha chain variable domain of TCR clone 312085 (TRAV26-2, TRAJ43)
CILRAVNNNDMRF

SEQ ID NO: 624170 - protein, 14 aa, Homo sapiens
  CDR3 for beta chain variable domain of TCR clone 312085 (TRBV7-2, TRBJ2-1)
CQHPRDRDLNEQFF

SEQ ID NO: 624171 - protein, 17 aa, Homo sapiens
  CDR3 for alpha chain variable domain of TCR clone 312086 (TRAV3, TRAJ6)
CAVIGGPRAGGSFIPTF

SEQ ID NO: 624172 - protein, 14 aa, Homo sapiens
  CDR3 for beta chain variable domain of TCR clone 312086 (TRBV7-2, TRBJ2-7)
CASSPKTSFYEQYF

SEQ ID NO: 624173 - protein, 15 aa, Homo sapiens
  CDR3 for alpha chain variable domain of TCR clone 312087 (TRAV29/DV5, TRAJ57)
CAASLLRGGSEKLVF

SEQ ID NO: 624174 - protein, 15 aa, Homo sapiens
  CDR3 for beta chain variable domain of TCR clone 312087 (TRBV5-1, TRBJ1-3)
CASSLEGGSGNTIDF

SEQ ID NO: 624175 - protein, 15 aa, Homo sapiens
  CDR3 for alpha chain variable domain of TCR clone 312088 (TRAV38-1, TRAJ37)
CAFKHGSGNTGKLIF

SEQ ID NO: 624176 - protein, 12 aa, Homo sapiens
  CDR3 for beta chain variable domain of TCR clone 312088 (TRBV7-9, TRBJ2-7)
CASSFGSYEQYF

SEQ ID NO: 624177 - protein, 14 aa, Homo sapiens
  CDR3 for alpha chain variable domain of TCR clone 312089 (TRAV17, TRAJ57)
CATDPQGGSEKLVF

SEQ ID NO: 624178 - protein, 17 aa, Homo sapiens
  CDR3 for beta chain variable domain of TCR clone 312089 (TRBV4-3, TRBJ2-1)
CASSQFSSGRASGEQFF

SEQ ID NO: 624179 - protein, 13 aa, Homo sapiens
  CDR3 for alpha chain variable domain of TCR clone 312090 (TRAV20, TRAJ48)
CDVQGVGNEKLTF

SEQ ID NO: 624180 - protein, 12 aa, Homo sapiens
  CDR3 for beta chain variable domain of TCR clone 312090 (TRBV2, TRBJ2-2)
CASSQPGLAGGG

SEQ ID NO: 624181 - protein, 11 aa, Homo sapiens
  CDR3 for alpha chain variable domain of TCR clone 312091 (TRAV17, TRAJ31)
CATSNNARLMF

SEQ ID NO: 624182 - protein, 16 aa, Homo sapiens
  CDR3 for beta chain variable domain of TCR clone 312091 (TRBV7-3, TRBJ2-2)
CASSLKRGTLAGELFF

SEQ ID NO: 624183 - protein, 19 aa, Homo sapiens
  CDR3 for alpha chain variable domain of TCR clone 312092 (TRAV1-2, TRAJ26)
CLLPLCCEGPDNYGQNFVF

SEQ ID NO: 624184 - protein, 12 aa, Homo sapiens
  CDR3 for beta chain variable domain of TCR clone 312092 (TRBV11-2, TRBJ2-5)
CASSLVGETQYF

SEQ ID NO: 624185 - protein, 14 aa, Homo sapiens
  CDR3 for alpha chain variable domain of TCR clone 312093 (TRAV2, TRAJ37)
CAVDFTSNTGKLIF

SEQ ID NO: 624186 - protein, 16 aa, Homo sapiens
  CDR3 for beta chain variable domain of TCR clone 312093 (TRBV20-1, TRBJ1-4)
RSAPGQGLLTNEKLFF

SEQ ID NO: 624187 - protein, 14 aa, Homo sapiens
  CDR3 for alpha chain variable domain of TCR clone 312094 (TRAV23/DV6, TRAJ40)
CAASLTPGTYKYIF

SEQ ID NO: 624188 - protein, 14 aa, Homo sapiens
  CDR3 for beta chain variable domain of TCR clone 312094 (TRBV7-3, TRBJ2-2)
CASSSGGYTGELFF

SEQ ID NO: 624189 - protein, 11 aa, Homo sapiens
  CDR3 for alpha chain variable domain of TCR clone 312095 (TRAV1-1, TRAJ23)
CAVRQGGKLIF

SEQ ID NO: 624190 - protein, 16 aa, Homo sapiens
  CDR3 for beta chain variable domain of TCR clone 312095 (TRBV4-3, TRBJ2-1)
CASSPALDRGVMSSSS

SEQ ID NO: 624191 - protein, 14 aa, Homo sapiens
  CDR3 for alpha chain variable domain of TCR clone 312096 (TRAV12-1, TRAJ37)
CVVTGSSNTGKLIF

SEQ ID NO: 624192 - protein, 16 aa, Homo sapiens
  CDR3 for beta chain variable domain of TCR clone 312096 (TRBV4-1, TRBJ2-5)
CASSQTFYGDQETQYF

SEQ ID NO: 624193 - protein, 20 aa, Homo sapiens
  CDR3 for alpha chain variable domain of TCR clone 312097 (TRAV26-1, TRAJ47)
CCVLLHRQSSFMEYGDKLVF

SEQ ID NO: 624194 - protein, 14 aa, Homo sapiens
  CDR3 for beta chain variable domain of TCR clone 312097 (TRBV7-2, TRBJ1-2)
CASSRGGTNYGYTF

SEQ ID NO: 624195 - protein, 15 aa, Homo sapiens
  CDR3 for alpha chain variable domain of TCR clone 312098 (TRAV21, TRAJ52)
CATRGGGTSYGKLTF

SEQ ID NO: 624196 - protein, 14 aa, Homo sapiens
  CDR3 for beta chain variable domain of TCR clone 312098 (TRBV28, TRBJ2-3)
CASSSAPSTDTQYI

SEQ ID NO: 624197 - protein, 13 aa, Homo sapiens
  CDR3 for alpha chain variable domain of TCR clone 312099 (TRAV12-3, TRAJ33)
CAMSVNSNYQLIW

SEQ ID NO: 624198 - protein, 15 aa, Homo sapiens
  CDR3 for beta chain variable domain of TCR clone 312099 (TRBV4-1, TRBJ2-7)
CASSQQGQGFDEQYF

SEQ ID NO: 624199 - protein, 16 aa, Homo sapiens
  CDR3 for alpha chain variable domain of TCR clone 312100 (TRAV8-3, TRAJ10)
CAVGPILTGGGNKLTF

SEQ ID NO: 624200 - protein, 14 aa, Homo sapiens
  CDR3 for beta chain variable domain of TCR clone 312100 (TRBV7-2, TRBJ2-7)
CASRSQGAAYEQYF

SEQ ID NO: 624201 - protein, 18 aa, Homo sapiens
  CDR3 for alpha chain variable domain of TCR clone 312101 (TRAV21, TRAJ52)
CAVRPFPAGGTSYGKLTF

SEQ ID NO: 624202 - protein, 16 aa, Homo sapiens
  CDR3 for beta chain variable domain of TCR clone 312101 (TRBV19, TRBJ2-1)
CASSKAGPSSYNEQFF

SEQ ID NO: 624203 - protein, 13 aa, Homo sapiens
  CDR3 for alpha chain variable domain of TCR clone 312102 (TRAV2, TRAJ40)
CAVVTSGTYKYTF

SEQ ID NO: 624204 - protein, 14 aa, Homo sapiens
  CDR3 for beta chain variable domain of TCR clone 312102 (TRBV19, TRBJ2-1)
CASPTFVLSGEQFY

SEQ ID NO: 624205 - protein, 15 aa, Homo sapiens
  CDR3 for alpha chain variable domain of TCR clone 312103 (TRAV12-2, TRAJ53)
CAVNGGRGSNYKLTF

SEQ ID NO: 624206 - protein, 17 aa, Homo sapiens
  CDR3 for beta chain variable domain of TCR clone 312103 (TRBV7-3, TRBJ2-3)
RASSLMKRMRGADTQYF

SEQ ID NO: 624207 - protein, 15 aa, Homo sapiens
  CDR3 for alpha chain variable domain of TCR clone 312104 (TRAV8-3, TRAJ45)
CASSYSGGGAVGFTF

SEQ ID NO: 624208 - protein, 13 aa, Homo sapiens
  CDR3 for beta chain variable domain of TCR clone 312104 (TRBV10-3, TRBJ2-7)
CASKLAVNYEQYF

SEQ ID NO: 624209 - protein, 14 aa, Homo sapiens
  CDR3 for alpha chain variable domain of TCR clone 312105 (TRAV23/DV6, TRAJ24)
CAASLSDTWGKLQF

SEQ ID NO: 624210 - protein, 16 aa, Homo sapiens
  CDR3 for beta chain variable domain of TCR clone 312105 (TRBV7-9, TRBJ2-6)
CASSLKGPLRANVLTF

SEQ ID NO: 624211 - protein, 11 aa, Homo sapiens
  CDR3 for alpha chain variable domain of TCR clone 312106 (TRAV2, TRAJ13)
CASGGYQKVTF

SEQ ID NO: 624212 - protein, 11 aa, Homo sapiens
  CDR3 for beta chain variable domain of TCR clone 312106 (TRBV7-3, TRBJ2-5)
CASSLSETQYF

SEQ ID NO: 624213 - protein, 15 aa, Homo sapiens
  CDR3 for alpha chain variable domain of TCR clone 312107 (TRAV12-3, TRAJ27)
CAMRAYNTNAGKSTF

SEQ ID NO: 624214 - protein, 13 aa, Homo sapiens
  CDR3 for beta chain variable domain of TCR clone 312107 (TRBV11-2, TRBJ2-5)
CASSRGPSETQHF

SEQ ID NO: 624215 - protein, 15 aa, Homo sapiens
  CDR3 for alpha chain variable domain of TCR clone 312108 (TRAV26-2, TRAJ52)
CILRAGGTSYGKLTF

SEQ ID NO: 624216 - protein, 18 aa, Homo sapiens
  CDR3 for beta chain variable domain of TCR clone 312108 (TRBV11-2, TRBJ2-3)
CASSLGGASRGAPNTQYF

SEQ ID NO: 624217 - protein, 11 aa, Homo sapiens
  CDR3 for alpha chain variable domain of TCR clone 312109 (TRAV1-1, TRAJ23)
CAVRQGGKLIS

SEQ ID NO: 624218 - protein, 20 aa, Homo sapiens
  CDR3 for beta chain variable domain of TCR clone 312109 (TRBV7-8, TRBJ2-2)
CASSHLFLGPTIHITGELFF

SEQ ID NO: 624219 - protein, 13 aa, Homo sapiens
  CDR3 for alpha chain variable domain of TCR clone 312110 (TRAV8-4, TRAJ21)
CAVSEYNFNQFYF

SEQ ID NO: 624220 - protein, 12 aa, Homo sapiens
  CDR3 for beta chain variable domain of TCR clone 312110 (TRBV7-9, TRBJ1-5)
CASSSDQAPQHF

SEQ ID NO: 624221 - protein, 11 aa, Homo sapiens
  CDR3 for alpha chain variable domain of TCR clone 312111 (TRAV1-2, TRAJ31)
CAVNNNARLMF

SEQ ID NO: 624222 - protein, 13 aa, Homo sapiens
  CDR3 for beta chain variable domain of TCR clone 312111 (TRBV7-7, TRBJ2-2)
CASSLTSAGELFF

SEQ ID NO: 624223 - protein, 17 aa, Homo sapiens
  CDR3 for alpha chain variable domain of TCR clone 312112 (TRAV21, TRAJ52)
CAVGVNAGATSYGKLTF

SEQ ID NO: 624224 - protein, 13 aa, Homo sapiens
  CDR3 for beta chain variable domain of TCR clone 312112 (TRBV5-1, TRBJ1-2)
CASSFQGNYGYTF

SEQ ID NO: 624225 - protein, 16 aa, Homo sapiens
  CDR3 for alpha chain variable domain of TCR clone 312113 (TRAV3, TRAJ10)
CAVRDMRAGGGNKLTF

SEQ ID NO: 624226 - protein, 15 aa, Homo sapiens
  CDR3 for beta chain variable domain of TCR clone 312113 (TRBV7-2, TRBJ2-7)
CASSLDPAQGQEQYF

SEQ ID NO: 624227 - protein, 14 aa, Homo sapiens
  CDR3 for alpha chain variable domain of TCR clone 312114 (TRAV12-1, TRAJ17)
CVVNYKAAGNKLTF

SEQ ID NO: 624228 - protein, 15 aa, Homo sapiens
  CDR3 for beta chain variable domain of TCR clone 312114 (TRBV7-9, TRBJ1-6)
CASSSPGRGNSPLHF

SEQ ID NO: 624229 - protein, 13 aa, Homo sapiens
  CDR3 for alpha chain variable domain of TCR clone 312115 (TRAV2, TRAJ24)
CAVPTDSWGKLQV

SEQ ID NO: 624230 - protein, 16 aa, Homo sapiens
  CDR3 for beta chain variable domain of TCR clone 312115 (TRBV6-3, TRBJ1-2)
CASSRELSGTPYGYTF

SEQ ID NO: 624231 - protein, 13 aa, Homo sapiens
  CDR3 for alpha chain variable domain of TCR clone 312116 (TRAV20, TRAJ48)
CAVQGVGNEKLTF

SEQ ID NO: 624232 - protein, 19 aa, Homo sapiens
  CDR3 for beta chain variable domain of TCR clone 312116 (TRBV2, TRBJ2-2)
CASSHPGIAGGGNTGELFF

SEQ ID NO: 624233 - protein, 12 aa, Homo sapiens
  CDR3 for alpha chain variable domain of TCR clone 312117 (TRAV26-2, TRAJ21)
CILKGNFNKFYF

SEQ ID NO: 624234 - protein, 13 aa, Homo sapiens
  CDR3 for beta chain variable domain of TCR clone 312117 (TRBV19, TRBJ2-7)
CASRKAGGSEQYF

SEQ ID NO: 624235 - protein, 11 aa, Homo sapiens
  CDR3 for alpha chain variable domain of TCR clone 312118 (TRAV23/DV6, TRAJ9)
CAASLSPPNTG

SEQ ID NO: 624236 - protein, 18 aa, Homo sapiens
  CDR3 for beta chain variable domain of TCR clone 312118 (TRBV4-1, TRBJ2-7)
CASSQATGAGSGLNEQYF

SEQ ID NO: 624237 - protein, 12 aa, Homo sapiens
  CDR3 for alpha chain variable domain of TCR clone 312119 (TRAV12-3, TRAJ20)
CAMVRGDYRLSF

SEQ ID NO: 624238 - protein, 19 aa, Homo sapiens
  CDR3 for beta chain variable domain of TCR clone 312119 (TRBV25-1, TRBJ2-2)
CAILVYRVDRGRKTGELFF

SEQ ID NO: 624239 - protein, 15 aa, Homo sapiens
  CDR3 for alpha chain variable domain of TCR clone 312120 (TRAV8-3, TRAJ27)
CAVGPSKTNAGKSTF

SEQ ID NO: 624240 - protein, 16 aa, Homo sapiens
  CDR3 for beta chain variable domain of TCR clone 312120 (TRBV4-2, TRBJ2-1)
CASSQGEGRTVNEQFF

SEQ ID NO: 624241 - protein, 14 aa, Homo sapiens
  CDR3 for alpha chain variable domain of TCR clone 312121 (TRAV38-1, TRAJ45)
CAYYSGGGADGLTF

SEQ ID NO: 624242 - protein, 15 aa, Homo sapiens
  CDR3 for beta chain variable domain of TCR clone 312121 (TRBV28, TRBJ1-5)
CASSRTGGYVQPQHF

SEQ ID NO: 624243 - protein, 14 aa, Homo sapiens
  CDR3 for alpha chain variable domain of TCR clone 312122 (TRAV8-4, TRAJ8)
CAVSVNTGFQKLVF

SEQ ID NO: 624244 - protein, 12 aa, Homo sapiens
  CDR3 for beta chain variable domain of TCR clone 312122 (TRBV19, TRBJ1-5)
CASSIAQQPQHF

SEQ ID NO: 624245 - protein, 14 aa, Homo sapiens
  CDR3 for alpha chain variable domain of TCR clone 312123 (TRAV1-2, TRAJ8)
CAEREDTGFQKLVF

SEQ ID NO: 624246 - protein, 12 aa, Homo sapiens
  CDR3 for beta chain variable domain of TCR clone 312123 (TRBV7-8, TRBJ2-7)
CASSLGDREQYF

SEQ ID NO: 624247 - protein, 13 aa, Homo sapiens
  CDR3 for alpha chain variable domain of TCR clone 312124 (TRAV38-1, TRAJ42)
WARWGGSQGNLIF

SEQ ID NO: 624248 - protein, 17 aa, Homo sapiens
  CDR3 for beta chain variable domain of TCR clone 312124 (TRBV20-1, TRBJ2-1)
CSARDPLAGVWDNEQFF

SEQ ID NO: 624249 - protein, 14 aa, Homo sapiens
  CDR3 for alpha chain variable domain of TCR clone 312125 (TRAV4, TRAJ20)
CLVGRRSNDYKLSF

SEQ ID NO: 624250 - protein, 18 aa, Homo sapiens
  CDR3 for beta chain variable domain of TCR clone 312125 (TRBV2, TRBJ2-5)
CASSGAPQGRGAQETQYF

SEQ ID NO: 624251 - protein, 15 aa, Homo sapiens
  CDR3 for alpha chain variable domain of TCR clone 312126 (TRAV3, TRAJ22)
CAVRDRGGSARQLTF

SEQ ID NO: 624252 - protein, 20 aa, Homo sapiens
  CDR3 for beta chain variable domain of TCR clone 312126 (TRBV7-8, TRBJ2-2)
CASSHLFPGPTIHITGERFF

SEQ ID NO: 624253 - protein, 14 aa, Homo sapiens
  CDR3 for alpha chain variable domain of TCR clone 312127 (TRAV1-2, TRAJ16)
CAVNRFSDGQKLLF

SEQ ID NO: 624254 - protein, 13 aa, Homo sapiens
  CDR3 for beta chain variable domain of TCR clone 312127 (TRBV4-2, TRBJ1-1)
CASSQAGNTEAFF

SEQ ID NO: 624255 - protein, 14 aa, Homo sapiens
  CDR3 for alpha chain variable domain of TCR clone 312128 (TRAV27, TRAJ58)
CAGDGETSGSRLTF

SEQ ID NO: 624256 - protein, 15 aa, Homo sapiens
  CDR3 for beta chain variable domain of TCR clone 312128 (TRBV20-1, TRBJ2-7)
CSARDRVSGMDEQYF

SEQ ID NO: 624257 - protein, 14 aa, Homo sapiens
  CDR3 for alpha chain variable domain of TCR clone 312129 (TRAV23/DV6, TRAJ4)
CAAHSSGGYNKLIF

SEQ ID NO: 624258 - protein, 16 aa, Homo sapiens
  CDR3 for beta chain variable domain of TCR clone 312129 (TRBV19, TRBJ1-1)
CASRFGGTVTGTEAFF

SEQ ID NO: 624259 - protein, 15 aa, Homo sapiens
  CDR3 for alpha chain variable domain of TCR clone 312130 (TRAV21, TRAJ13)
CAVRPTSRGYQKVTF

SEQ ID NO: 624260 - protein, 18 aa, Homo sapiens
  CDR3 for beta chain variable domain of TCR clone 312130 (TRBV11-3, TRBJ2-1)
CASSSYPGGRDSYNEQFF

SEQ ID NO: 624261 - protein, 23 aa, Homo sapiens
  CDR3 for alpha chain variable domain of TCR clone 312131 (TRAV30, TRAJ29)
PAQLLRNLLLWHRACSGNTPLVF

SEQ ID NO: 624262 - protein, 15 aa, Homo sapiens
  CDR3 for beta chain variable domain of TCR clone 312131 (TRBV5-1, TRBJ2-2)
CASSLFGQNTGELFF

SEQ ID NO: 624263 - protein, 13 aa, Homo sapiens
  CDR3 for alpha chain variable domain of TCR clone 312132 (TRAV8-3, TRAJ36)
CAVGATGANNLFF

SEQ ID NO: 624264 - protein, 16 aa, Homo sapiens
  CDR3 for beta chain variable domain of TCR clone 312132 (TRBV6-1, TRBJ2-1)
CASILRQGSSYNEQFF

SEQ ID NO: 624265 - protein, 12 aa, Homo sapiens
  CDR3 for alpha chain variable domain of TCR clone 312133 (TRAV12-3, TRAJ17)
RAMTLTGNKLTF

SEQ ID NO: 624266 - protein, 13 aa, Homo sapiens
  CDR3 for beta chain variable domain of TCR clone 312133 (TRBV20-1, TRBJ2-5)
CSARGNYQETQYF

SEQ ID NO: 624267 - protein, 18 aa, Homo sapiens
  CDR3 for alpha chain variable domain of TCR clone 312134 (TRAV26-2, TRAJ54)
CILRDVEVGIQGAQKLVF

SEQ ID NO: 624268 - protein, 14 aa, Homo sapiens
  CDR3 for beta chain variable domain of TCR clone 312134 (TRBV7-9, TRBJ2-1)
CASSPRDSLYEQFF

SEQ ID NO: 624269 - protein, 16 aa, Homo sapiens
  CDR3 for alpha chain variable domain of TCR clone 312135 (TRAV3, TRAJ18)
CAVRDGRGSTLGRLYF

SEQ ID NO: 624270 - protein, 15 aa, Homo sapiens
  CDR3 for beta chain variable domain of TCR clone 312135 (TRBV7-9, TRBJ1-6)
CASGSPGRGNSPLHF

SEQ ID NO: 624271 - protein, 14 aa, Homo sapiens
  CDR3 for alpha chain variable domain of TCR clone 312136 (TRAV12-1, TRAJ17)
CVVNYKAAGNKLTF

SEQ ID NO: 624272 - protein, 14 aa, Homo sapiens
  CDR3 for beta chain variable domain of TCR clone 312136 (TRBV28, TRBJ2-1)
CASSPSTGYNEQCF

SEQ ID NO: 624273 - protein, 13 aa, Homo sapiens
  CDR3 for alpha chain variable domain of TCR clone 312137 (TRAV27, TRAJ27)
CAGGITNAGKSTF

SEQ ID NO: 624274 - protein, 16 aa, Homo sapiens
  CDR3 for beta chain variable domain of TCR clone 312137 (TRBV11-2, TRBJ1-2)
CASSPSGREANYGYTF

SEQ ID NO: 624275 - protein, 14 aa, Homo sapiens
  CDR3 for alpha chain variable domain of TCR clone 312138 (TRAV38-1, TRAJ45)
CAYYSGGGAYGLPF

SEQ ID NO: 624276 - protein, 20 aa, Homo sapiens
  CDR3 for beta chain variable domain of TCR clone 312138 (TRBV28, TRBJ2-1)
CASTPIGRSPGLAGGNEQFF

SEQ ID NO: 624277 - protein, 12 aa, Homo sapiens
  CDR3 for alpha chain variable domain of TCR clone 312139 (TRAV17, TRAJ30)
CVLERRDDKPIF

SEQ ID NO: 624278 - protein, 14 aa, Homo sapiens
  CDR3 for beta chain variable domain of TCR clone 312139 (TRBV7-7, TRBJ2-2)
CASSRDRSTGELFF

SEQ ID NO: 624279 - protein, 20 aa, Homo sapiens
  CDR3 for alpha chain variable domain of TCR clone 312140 (TRAV12-1, TRAJ42)
SSVIQPPTSVKGGTQGNIIF

SEQ ID NO: 624280 - protein, 18 aa, Homo sapiens
  CDR3 for beta chain variable domain of TCR clone 312140 (TRBV11-2, TRBJ2-3)
CASSLGGASRGAPNTQYF

SEQ ID NO: 624281 - protein, 11 aa, Homo sapiens
  CDR3 for alpha chain variable domain of TCR clone 312141 (TRAV2, TRAJ33)
CAVESNYQLIW

SEQ ID NO: 624282 - protein, 13 aa, Homo sapiens
  CDR3 for beta chain variable domain of TCR clone 312141 (TRBV2, TRBJ2-7)
CASSVGGSGEQYF

SEQ ID NO: 624283 - protein, 15 aa, Homo sapiens
  CDR3 for alpha chain variable domain of TCR clone 312142 (TRAV3, TRAJ27)
WAVRDPLTNAGKSTF

SEQ ID NO: 624284 - protein, 15 aa, Homo sapiens
  CDR3 for beta chain variable domain of TCR clone 312142 (TRBV28, TRBJ2-1)
CASSIIAGGRSEQFF

SEQ ID NO: 624285 - protein, 14 aa, Homo sapiens
  CDR3 for alpha chain variable domain of TCR clone 312143 (TRAV13-1, TRAJ35)
CAASKGGFGNVLHC

SEQ ID NO: 624286 - protein, 14 aa, Homo sapiens
  CDR3 for beta chain variable domain of TCR clone 312143 (TRBV7-2, TRBJ2-3)
CASSRTSGADTQYF

SEQ ID NO: 624287 - protein, 16 aa, Homo sapiens
  CDR3 for alpha chain variable domain of TCR clone 312144 (TRAV30, TRAJ24)
CGTEIVDADSWGKFQF

SEQ ID NO: 624288 - protein, 13 aa, Homo sapiens
  CDR3 for beta chain variable domain of TCR clone 312144 (TRBV10-3, TRBJ2-7)
CTSKLAVNYEQYF

SEQ ID NO: 624289 - protein, 14 aa, Homo sapiens
  CDR3 for alpha chain variable domain of TCR clone 312145 (TRAV29/DV5, TRAJ45)
CAARFRGGADGLTF

SEQ ID NO: 624290 - protein, 15 aa, Homo sapiens
  CDR3 for beta chain variable domain of TCR clone 312145 (TRBV27, TRBJ2-1)
CSSSNGGGSSNEQFF

SEQ ID NO: 624291 - protein, 13 aa, Homo sapiens
  CDR3 for alpha chain variable domain of TCR clone 312146 (TRAV21, TRAJ27)
CAARPDNAGKSTF

SEQ ID NO: 624292 - protein, 13 aa, Homo sapiens
  CDR3 for beta chain variable domain of TCR clone 312146 (TRBV18, TRBJ2-7)
CASQSGGGYEQYF

SEQ ID NO: 624293 - protein, 14 aa, Homo sapiens
  CDR3 for alpha chain variable domain of TCR clone 312147 (TRAV26-1, TRAJ11)
CIVPLYSGYSTLTF

SEQ ID NO: 624294 - protein, 14 aa, Homo sapiens
  CDR3 for beta chain variable domain of TCR clone 312147 (TRBV11-3, TRBJ2-1)
CASSATTSGSIQFF

SEQ ID NO: 624295 - protein, 14 aa, Homo sapiens
  CDR3 for alpha chain variable domain of TCR clone 312148 (TRAV8-3, TRAJ4)
CAVGAAGGYNKLIF

SEQ ID NO: 624296 - protein, 16 aa, Homo sapiens
  CDR3 for beta chain variable domain of TCR clone 312148 (TRBV11-2, TRBJ2-5)
CASSGQGYSPQETQYF

SEQ ID NO: 624297 - protein, 22 aa, Homo sapiens
  CDR3 for alpha chain variable domain of TCR clone 312149 (TRAV12-2, TRAJ32)
CSSETPSPVIQPPKSATNKLIF

SEQ ID NO: 624298 - protein, 14 aa, Homo sapiens
  CDR3 for beta chain variable domain of TCR clone 312149 (TRBV7-3, TRBJ2-1)
CASSLSGSHNEQFF

SEQ ID NO: 624299 - protein, 15 aa, Homo sapiens
  CDR3 for alpha chain variable domain of TCR clone 312150 (TRAV8-3, TRAJ27)
CAVGPSKTNAGKSTF

SEQ ID NO: 624300 - protein, 13 aa, Homo sapiens
  CDR3 for beta chain variable domain of TCR clone 312150 (TRBV12-4, TRBJ1-1)
CASSPGTGFEAFF

SEQ ID NO: 624301 - protein, 13 aa, Homo sapiens
  CDR3 for alpha chain variable domain of TCR clone 312151 (TRAV27, TRAJ49)
CVPRPHTGNQFYF

SEQ ID NO: 624302 - protein, 16 aa, Homo sapiens
  CDR3 for beta chain variable domain of TCR clone 312151 (TRBV4-1, TRBJ1-2)
CASSQDAGQVLYGYTF

SEQ ID NO: 624303 - protein, 15 aa, Homo sapiens
  CDR3 for alpha chain variable domain of TCR clone 312152 (TRAV3, TRAJ4)
CAQNMFSGGYNKLIF

SEQ ID NO: 624304 - protein, 15 aa, Homo sapiens
  CDR3 for beta chain variable domain of TCR clone 312152 (TRBV7-9, TRBJ2-7)
CASSLRTSGSYEQYF

SEQ ID NO: 624305 - protein, 20 aa, Homo sapiens
  CDR3 for alpha chain variable domain of TCR clone 312153 (TRAV26-1, TRAJ38)
CIANNAGNNHIQNPDPAVYQ

SEQ ID NO: 624306 - protein, 13 aa, Homo sapiens
  CDR3 for beta chain variable domain of TCR clone 312153 (TRBV20-1, TRBJ1-1)
CSARGGGNTEAFF

SEQ ID NO: 624307 - protein, 13 aa, Homo sapiens
  CDR3 for alpha chain variable domain of TCR clone 312154 (TRAV2, TRAJ15)
CSVASQAGTALIF

SEQ ID NO: 624308 - protein, 16 aa, Homo sapiens
  CDR3 for beta chain variable domain of TCR clone 312154 (TRBV29-1, TRBJ2-7)
CSVEDAEDGTAYEQYF

SEQ ID NO: 624309 - protein, 12 aa, Homo sapiens
  CDR3 for alpha chain variable domain of TCR clone 312155 (TRAV23/DV6, TRAJ17)
CARGSCRQQANF

SEQ ID NO: 624310 - protein, 14 aa, Homo sapiens
  CDR3 for beta chain variable domain of TCR clone 312155 (TRBV7-2, TRBJ1-2)
CTSSQTGSTYGYTF

SEQ ID NO: 624311 - protein, 14 aa, Homo sapiens
  CDR3 for alpha chain variable domain of TCR clone 312156 (TRAV12-2, TRAJ40)
CAVKIPSGTYKYIF

SEQ ID NO: 624312 - protein, 13 aa, Homo sapiens
  CDR3 for beta chain variable domain of TCR clone 312156 (TRBV19, TRBJ1-5)
CASSMRGYQHQHF

SEQ ID NO: 624313 - protein, 14 aa, Homo sapiens
  CDR3 for alpha chain variable domain of TCR clone 312157 (TRAV12-2, TRAJ52)
CAVPGWTSYGKLTF

SEQ ID NO: 624314 - protein, 12 aa, Homo sapiens
  CDR3 for beta chain variable domain of TCR clone 312157 (TRBV18, TRBJ2-1)
CASSPGTSEGFF

SEQ ID NO: 624315 - protein, 14 aa, Homo sapiens
  CDR3 for alpha chain variable domain of TCR clone 312158 (TRAV12-2, TRAJ24)
CAVTPADSWGKLQF

SEQ ID NO: 624316 - protein, 16 aa, Homo sapiens
  CDR3 for beta chain variable domain of TCR clone 312158 (TRBV28, TRBJ2-7)
CASSSGTSGRGYEQYF

SEQ ID NO: 624317 - protein, 18 aa, Homo sapiens
  CDR3 for alpha chain variable domain of TCR clone 312159 (TRAV12-3, TRAJ52)
CAMSVGGAGGTSYGKLTF

SEQ ID NO: 624318 - protein, 14 aa, Homo sapiens
  CDR3 for beta chain variable domain of TCR clone 312159 (TRBV5-1, TRBJ2-3)
CASSLFGPTDTQYF

SEQ ID NO: 624319 - protein, 13 aa, Homo sapiens
  CDR3 for alpha chain variable domain of TCR clone 312160 (TRAV12-1, TRAJ31)
CVVNMNNNARLMF

SEQ ID NO: 624320 - protein, 16 aa, Homo sapiens
  CDR3 for beta chain variable domain of TCR clone 312160 (TRBV12-4, TRBJ2-1)
CASSAVGQGNGDEQFF

SEQ ID NO: 624321 - protein, 12 aa, Homo sapiens
  CDR3 for alpha chain variable domain of TCR clone 312161 (TRAV13-1, TRAJ26)
QVQDKYGQNFVF

SEQ ID NO: 624322 - protein, 13 aa, Homo sapiens
  CDR3 for beta chain variable domain of TCR clone 312161 (TRBV7-9, TRBJ2-7)
CASSAGLQYEQYF

SEQ ID NO: 624323 - protein, 12 aa, Homo sapiens
  CDR3 for alpha chain variable domain of TCR clone 312162 (TRAV13-1, TRAJ21)
CAAKEGFNKFYF

SEQ ID NO: 624324 - protein, 14 aa, Homo sapiens
  CDR3 for beta chain variable domain of TCR clone 312162 (TRBV7-2, TRBJ2-5)
CASSLSGGGETQYC

SEQ ID NO: 624325 - protein, 13 aa, Homo sapiens
  CDR3 for alpha chain variable domain of TCR clone 312163 (TRAV8-6, TRAJ16)
CAVSRWVGQKLLF

SEQ ID NO: 624326 - protein, 14 aa, Homo sapiens
  CDR3 for beta chain variable domain of TCR clone 312163 (TRBV19, TRBJ2-1)
CASPTFVLSGEQFF

SEQ ID NO: 624327 - protein, 15 aa, Homo sapiens
  CDR3 for alpha chain variable domain of TCR clone 312164 (TRAV17, TRAJ57)
GATGPSQGGSENLVF

SEQ ID NO: 624328 - protein, 16 aa, Homo sapiens
  CDR3 for beta chain variable domain of TCR clone 312164 (TRBV12-4, TRBJ1-5)
CASSRPVGGSNQPQHF

SEQ ID NO: 624329 - protein, 12 aa, Homo sapiens
  CDR3 for alpha chain variable domain of TCR clone 312165 (TRAV13-1, TRAJ27)
CAAHTNAGKSTF

SEQ ID NO: 624330 - protein, 16 aa, Homo sapiens
  CDR3 for beta chain variable domain of TCR clone 312165 (TRBV9, TRBJ2-2)
CASSAMGKGNTGELFF

SEQ ID NO: 624331 - protein, 14 aa, Homo sapiens
  CDR3 for alpha chain variable domain of TCR clone 312166 (TRAV12-2, TRAJ13)
CAVKKTGGYQKVTF

SEQ ID NO: 624332 - protein, 13 aa, Homo sapiens
  CDR3 for beta chain variable domain of TCR clone 312166 (TRBV19, TRBJ1-5)
CASSIGGEQPQHF

SEQ ID NO: 624333 - protein, 12 aa, Homo sapiens
  CDR3 for alpha chain variable domain of TCR clone 312167 (TRAV12-3, TRAJ20)
CAMVRGDYKLSF

SEQ ID NO: 624334 - protein, 11 aa, Homo sapiens
  CDR3 for beta chain variable domain of TCR clone 312167 (TRBV29-1, TRBJ1-3)
CSVAIGNTIYF

SEQ ID NO: 624335 - protein, 13 aa, Homo sapiens
  CDR3 for alpha chain variable domain of TCR clone 312168 (TRAV21, TRAJ27)
CAARPGSAGKSTF

SEQ ID NO: 624336 - protein, 14 aa, Homo sapiens
  CDR3 for beta chain variable domain of TCR clone 312168 (TRBV12-4, TRBJ1-1)
CASSLGTGGTEAFF

SEQ ID NO: 624337 - protein, 13 aa, Homo sapiens
  CDR3 for alpha chain variable domain of TCR clone 312169 (TRAV30, TRAJ24)
CGTVTDSWGKLQF

SEQ ID NO: 624338 - protein, 13 aa, Homo sapiens
  CDR3 for beta chain variable domain of TCR clone 312169 (TRBV4-2, TRBJ1-1)
CASSQAGNTEAFF

SEQ ID NO: 624339 - protein, 11 aa, Homo sapiens
  CDR3 for alpha chain variable domain of TCR clone 312170 (TRAV1-2, TRAJ31)
CAVNNNARLMF

SEQ ID NO: 624340 - protein, 19 aa, Homo sapiens
  CDR3 for beta chain variable domain of TCR clone 312170 (TRBV25-1, TRBJ2-2)
CAILVYRVDRGRKTGELFF

SEQ ID NO: 624341 - protein, 15 aa, Homo sapiens
  CDR3 for alpha chain variable domain of TCR clone 312171 (TRAV26-1, TRAJ29)
CIVRVEGSGNTPLVF

SEQ ID NO: 624342 - protein, 15 aa, Homo sapiens
  CDR3 for beta chain variable domain of TCR clone 312171 (TRBV7-9, TRBJ1-5)
CASCQCHQPNQPQHF

SEQ ID NO: 624343 - protein, 14 aa, Homo sapiens
  CDR3 for alpha chain variable domain of TCR clone 312172 (TRAV1-2, TRAJ16)
CAVNRFSDGQKLLF

SEQ ID NO: 624344 - protein, 16 aa, Homo sapiens
  CDR3 for beta chain variable domain of TCR clone 312172 (TRBV7-2, TRBJ2-7)
CASSLDLRGGAYEQYF

SEQ ID NO: 624345 - protein, 11 aa, Homo sapiens
  CDR3 for alpha chain variable domain of TCR clone 312173 (TRAV1-2, TRAJ40)
CAVPGTYKYIF

SEQ ID NO: 624346 - protein, 16 aa, Homo sapiens
  CDR3 for beta chain variable domain of TCR clone 312173 (TRBV29-1, TRBJ2-7)
CSVEVVGTSGGYEQYY

SEQ ID NO: 624347 - protein, 14 aa, Homo sapiens
  CDR3 for alpha chain variable domain of TCR clone 312174 (TRAV2, TRAJ9)
CAVEDRSGGFKTNF

SEQ ID NO: 624348 - protein, 13 aa, Homo sapiens
  CDR3 for beta chain variable domain of TCR clone 312174 (TRBV12-4, TRBJ2-7)
CASSLSGVYEQYF

SEQ ID NO: 624349 - protein, 12 aa, Homo sapiens
  CDR3 for alpha chain variable domain of TCR clone 312175 (TRAV1-1, TRAJ8)
CAGGTGFLKLVF

SEQ ID NO: 624350 - protein, 15 aa, Homo sapiens
  CDR3 for beta chain variable domain of TCR clone 312175 (TRBV7-2, TRBJ2-3)
CASSLEQGGTDTQYF

SEQ ID NO: 624351 - protein, 15 aa, Homo sapiens
  CDR3 for alpha chain variable domain of TCR clone 312176 (TRAV8-2, TRAJ16)
CVVSDGFSDGQKLLF

SEQ ID NO: 624352 - protein, 16 aa, Homo sapiens
  CDR3 for beta chain variable domain of TCR clone 312176 (TRBV4-1, TRBJ2-6)
CASSQVGDPGANVLTF

SEQ ID NO: 624353 - protein, 17 aa, Homo sapiens
  CDR3 for alpha chain variable domain of TCR clone 312177 (TRAV8-6, TRAJ58)
CAVSSWVGETSVSRLSF

SEQ ID NO: 624354 - protein, 14 aa, Homo sapiens
  CDR3 for beta chain variable domain of TCR clone 312177 (TRBV4-2, TRBJ2-1)
CASGLDRAYNEQFF

SEQ ID NO: 624355 - protein, 11 aa, Homo sapiens
  CDR3 for alpha chain variable domain of TCR clone 312178 (TRAV39, TRAJ33)
CAGDRWIATTS

SEQ ID NO: 624356 - protein, 14 aa, Homo sapiens
  CDR3 for beta chain variable domain of TCR clone 312178 (TRBV28, TRBJ2-3)
CASRSRDSTDTQYF

SEQ ID NO: 624357 - protein, 11 aa, Homo sapiens
  CDR3 for alpha chain variable domain of TCR clone 312179 (TRAV12-1, TRAJ23)
CVNNQGGKLIF

SEQ ID NO: 624358 - protein, 16 aa, Homo sapiens
  CDR3 for beta chain variable domain of TCR clone 312179 (TRBV11-1, TRBJ2-7)
CASSAQTGTLSYEQYF

SEQ ID NO: 624359 - protein, 16 aa, Homo sapiens
  CDR3 for alpha chain variable domain of TCR clone 312180 (TRAV16, TRAJ52)
CALSAAGGTSYGKLTF

SEQ ID NO: 624360 - protein, 15 aa, Homo sapiens
  CDR3 for beta chain variable domain of TCR clone 312180 (TRBV28, TRBJ2-5)
CASSPGQGSIETQYF

SEQ ID NO: 624361 - protein, 13 aa, Homo sapiens
  CDR3 for alpha chain variable domain of TCR clone 312181 (TRAV1-1, TRAJ9)
CAAKNTGGFKTIF

SEQ ID NO: 624362 - protein, 15 aa, Homo sapiens
  CDR3 for beta chain variable domain of TCR clone 312181 (TRBV7-2, TRBJ2-1)
CASSSGLAGGNEQFF

SEQ ID NO: 624363 - protein, 14 aa, Homo sapiens
  CDR3 for alpha chain variable domain of TCR clone 312182 (TRAV1-2, TRAJ16)
CAVNRLSDGQKLLF

SEQ ID NO: 624364 - protein, 13 aa, Homo sapiens
  CDR3 for beta chain variable domain of TCR clone 312182 (TRBV10-3, TRBJ1-2)
CAISERDSYGYTF

SEQ ID NO: 624365 - protein, 13 aa, Homo sapiens
  CDR3 for alpha chain variable domain of TCR clone 312183 (TRAV17, TRAJ5)
CAPMDTGRRALTF

SEQ ID NO: 624366 - protein, 13 aa, Homo sapiens
  CDR3 for beta chain variable domain of TCR clone 312183 (TRBV19, TRBJ1-2)
CASSVPGLDGYTF

SEQ ID NO: 624367 - protein, 14 aa, Homo sapiens
  CDR3 for alpha chain variable domain of TCR clone 312184 (TRAV12-1, TRAJ13)
CVVIDSGGYQKVTF

SEQ ID NO: 624368 - protein, 14 aa, Homo sapiens
  CDR3 for beta chain variable domain of TCR clone 312184 (TRBV5-4, TRBJ2-1)
CASSLDQGLNEQFF

SEQ ID NO: 624369 - protein, 12 aa, Homo sapiens
  CDR3 for alpha chain variable domain of TCR clone 312185 (TRAV1-1, TRAJ8)
CAGGTGFQNIVF

SEQ ID NO: 624370 - protein, 15 aa, Homo sapiens
  CDR3 for beta chain variable domain of TCR clone 312185 (TRBV7-9, TRBJ1-4)
CASSRTGGFNEKLFF

SEQ ID NO: 624371 - protein, 17 aa, Homo sapiens
  CDR3 for alpha chain variable domain of TCR clone 312186 (TRAV1-2, TRAJ27)
CAVRDKTGDTNAGKSTF

SEQ ID NO: 624372 - protein, 15 aa, Homo sapiens
  CDR3 for beta chain variable domain of TCR clone 312186 (TRBV6-3, TRBJ2-2)
CASSFLATLTGELFF

SEQ ID NO: 624373 - protein, 11 aa, Homo sapiens
  CDR3 for alpha chain variable domain of TCR clone 312187 (TRAV13-2, TRAJ20)
CADSNDCKLSF

SEQ ID NO: 624374 - protein, 12 aa, Homo sapiens
  CDR3 for beta chain variable domain of TCR clone 312187 (TRBV5-1, TRBJ2-3)
CASSLAADTQYF

SEQ ID NO: 624375 - protein, 12 aa, Homo sapiens
  CDR3 for alpha chain variable domain of TCR clone 312188 (TRAV12-1, TRAJ40)
CVVYSGTYKYIF

SEQ ID NO: 624376 - protein, 15 aa, Homo sapiens
  CDR3 for beta chain variable domain of TCR clone 312188 (TRBV28, TRBJ1-3)
CASSMGWASGNTIYF

SEQ ID NO: 624377 - protein, 15 aa, Homo sapiens
  CDR3 for alpha chain variable domain of TCR clone 312189 (TRAV17, TRAJ16)
CATALRFSDGQKLLF

SEQ ID NO: 624378 - protein, 13 aa, Homo sapiens
  CDR3 for beta chain variable domain of TCR clone 312189 (TRBV28, TRBJ2-7)
CASSPSGTYEQYF

SEQ ID NO: 624379 - protein, 15 aa, Homo sapiens
  CDR3 for alpha chain variable domain of TCR clone 312190 (TRAV26-1, TRAJ29)
CIVRVEGSGNTPLVF

SEQ ID NO: 624380 - protein, 14 aa, Homo sapiens
  CDR3 for beta chain variable domain of TCR clone 312190 (TRBV18, TRBJ2-5)
CASSPGVSQETEYF

SEQ ID NO: 624381 - protein, 11 aa, Homo sapiens
  CDR3 for alpha chain variable domain of TCR clone 312191 (TRAV21, TRAJ9)
CAVPGGFKTFF

SEQ ID NO: 624382 - protein, 12 aa, Homo sapiens
  CDR3 for beta chain variable domain of TCR clone 312191 (TRBV20-1, TRBJ2-3)
CSARVGTDTQYF

SEQ ID NO: 624383 - protein, 14 aa, Homo sapiens
  CDR3 for alpha chain variable domain of TCR clone 312192 (TRAV12-2, TRAJ44)
CAVNKAGTASKLTF

SEQ ID NO: 624384 - protein, 12 aa, Homo sapiens
  CDR3 for beta chain variable domain of TCR clone 312192 (TRBV19, TRBJ1-4)
CASKDWPGGLFF

SEQ ID NO: 624385 - protein, 18 aa, Homo sapiens
  CDR3 for alpha chain variable domain of TCR clone 312193 (TRAV13-1, TRAJ52)
RAAKNPNAGGTSYGKLTF

SEQ ID NO: 624386 - protein, 13 aa, Homo sapiens
  CDR3 for beta chain variable domain of TCR clone 312193 (TRBV12-4, TRBJ2-3)
CASQNRGTDTQYF

SEQ ID NO: 624387 - protein, 14 aa, Homo sapiens
  CDR3 for alpha chain variable domain of TCR clone 312194 (TRAV12-2, TRAJ9)
CAVSMEGGGFKTIF

SEQ ID NO: 624388 - protein, 14 aa, Homo sapiens
  CDR3 for beta chain variable domain of TCR clone 312194 (TRBV27, TRBJ2-3)
CASRRGGRTDTQYF

SEQ ID NO: 624389 - protein, 16 aa, Homo sapiens
  CDR3 for alpha chain variable domain of TCR clone 312195 (TRAV4, TRAJ22)
CLVGDLYSGSARQLTF

SEQ ID NO: 624390 - protein, 15 aa, Homo sapiens
  CDR3 for beta chain variable domain of TCR clone 312195 (TRBV7-2, TRBJ2-3)
CASSSTGLETDTQYF

SEQ ID NO: 624391 - protein, 15 aa, Homo sapiens
  CDR3 for alpha chain variable domain of TCR clone 312196 (TRAV8-4, TRAJ47)
CAVSDPEEYGNTLVF

SEQ ID NO: 624392 - protein, 15 aa, Homo sapiens
  CDR3 for beta chain variable domain of TCR clone 312196 (TRBV11-2, TRBJ2-1)
CASSLGPDSYNEQFF

SEQ ID NO: 624393 - protein, 15 aa, Homo sapiens
  CDR3 for alpha chain variable domain of TCR clone 312197 (TRAV26-1, TRAJ29)
CIVRCEGSGNTPLVF

SEQ ID NO: 624394 - protein, 14 aa, Homo sapiens
  CDR3 for beta chain variable domain of TCR clone 312197 (TRBV4-2, TRBJ2-3)
CASRETRAPGMQYF

SEQ ID NO: 624395 - protein, 14 aa, Homo sapiens
  CDR3 for alpha chain variable domain of TCR clone 312198 (TRAV26-1, TRAJ48)
CIVRVGFGNEKLTF

SEQ ID NO: 624396 - protein, 17 aa, Homo sapiens
  CDR3 for beta chain variable domain of TCR clone 312198 (TRBV11-2, TRBJ2-1)
CASSLYPPGVEYNEQFF

SEQ ID NO: 624397 - protein, 12 aa, Homo sapiens
  CDR3 for alpha chain variable domain of TCR clone 312199 (TRAV8-6, TRAJ36)
CAVSDWLGQTTS

SEQ ID NO: 624398 - protein, 14 aa, Homo sapiens
  CDR3 for beta chain variable domain of TCR clone 312199 (TRBV7-9, TRBJ2-1)
CASSPRDSLYEQFF

SEQ ID NO: 624399 - protein, 12 aa, Homo sapiens
  CDR3 for alpha chain variable domain of TCR clone 312200 (TRAV26-1, TRAJ53)
CIEGGSNYKLTF

SEQ ID NO: 624400 - protein, 12 aa, Homo sapiens
  CDR3 for beta chain variable domain of TCR clone 312200 (TRBV11-2, TRBJ2-1)
CASSPGNNEQFF

SEQ ID NO: 624401 - protein, 22 aa, Homo sapiens
  CDR3 for alpha chain variable domain of TCR clone 312201 (TRAV2, TRAJ26)
CAGSPGRLWSEFCLWSRNQIVV

SEQ ID NO: 624402 - protein, 13 aa, Homo sapiens
  CDR3 for beta chain variable domain of TCR clone 312201 (TRBV7-9, TRBJ1-2)
CASSLKQNYGYTF

SEQ ID NO: 624403 - protein, 12 aa, Homo sapiens
  CDR3 for alpha chain variable domain of TCR clone 312202 (TRAV12-2, TRAJ3)
CAVWSSASKIIF

SEQ ID NO: 624404 - protein, 12 aa, Homo sapiens
  CDR3 for beta chain variable domain of TCR clone 312202 (TRBV11-2, TRBJ2-1)
CASSPGNNEHFF

SEQ ID NO: 624405 - protein, 14 aa, Homo sapiens
  CDR3 for alpha chain variable domain of TCR clone 312203 (TRAV12-2, TRAJ11)
CAVEGGSGYSTLTF

SEQ ID NO: 624406 - protein, 16 aa, Homo sapiens
  CDR3 for beta chain variable domain of TCR clone 312203 (TRBV4-1, TRBJ2-7)
CASSQEWTSGPLEQYF

SEQ ID NO: 624407 - protein, 13 aa, Homo sapiens
  CDR3 for alpha chain variable domain of TCR clone 312204 (TRAV12-1, TRAJ13)
CVVTSGGYQKVTF

SEQ ID NO: 624408 - protein, 14 aa, Homo sapiens
  CDR3 for beta chain variable domain of TCR clone 312204 (TRBV27, TRBJ2-7)
CASSLAGLPYEQYS

SEQ ID NO: 624409 - protein, 17 aa, Homo sapiens
  CDR3 for alpha chain variable domain of TCR clone 312205 (TRAV3, TRAJ6)
CAVRDGPRAGGSYIPTF

SEQ ID NO: 624410 - protein, 13 aa, Homo sapiens
  CDR3 for beta chain variable domain of TCR clone 312205 (TRBV5-4, TRBJ1-2)
CASSNRGTYGYTF

SEQ ID NO: 624411 - protein, 12 aa, Homo sapiens
  CDR3 for alpha chain variable domain of TCR clone 312206 (TRAV8-3, TRAJ26)
CAGDNYGQNFVF

SEQ ID NO: 624412 - protein, 13 aa, Homo sapiens
  CDR3 for beta chain variable domain of TCR clone 312206 (TRBV11-2, TRBJ1-5)
CASSLDRNQPQHF

SEQ ID NO: 624413 - protein, 13 aa, Homo sapiens
  CDR3 for alpha chain variable domain of TCR clone 312207 (TRAV2, TRAJ40)
CAVVTSGTYKYIF

SEQ ID NO: 624414 - protein, 15 aa, Homo sapiens
  CDR3 for beta chain variable domain of TCR clone 312207 (TRBV18, TRBJ1-1)
CASSPWQGENTEAFF

SEQ ID NO: 624415 - protein, 14 aa, Homo sapiens
  CDR3 for alpha chain variable domain of TCR clone 312208 (TRAV8-3, TRAJ7)
CAAIELYGNNRLAF

SEQ ID NO: 624416 - protein, 16 aa, Homo sapiens
  CDR3 for beta chain variable domain of TCR clone 312208 (TRBV12-5, TRBJ2-5)
CASGPRTSGNQETQYF

SEQ ID NO: 624417 - protein, 13 aa, Homo sapiens
  CDR3 for alpha chain variable domain of TCR clone 312209 (TRAV13-1, TRAJ20)
CAARVSNDYKLSV

SEQ ID NO: 624418 - protein, 16 aa, Homo sapiens
  CDR3 for beta chain variable domain of TCR clone 312209 (TRBV11-1, TRBJ1-1)
CATNPRDRAFNTEAFF

SEQ ID NO: 624419 - protein, 14 aa, Homo sapiens
  CDR3 for alpha chain variable domain of TCR clone 312210 (TRAV4, TRAJ30)
CLVGDMNRDDKIIF

SEQ ID NO: 624420 - protein, 15 aa, Homo sapiens
  CDR3 for beta chain variable domain of TCR clone 312210 (TRBV7-2, TRBJ2-7)
CASSLSSGGTYEQYF

SEQ ID NO: 624421 - protein, 16 aa, Homo sapiens
  CDR3 for alpha chain variable domain of TCR clone 312211 (TRAV21, TRAJ37)
CAVRNAGSSNTGKLIF

SEQ ID NO: 624422 - protein, 13 aa, Homo sapiens
  CDR3 for beta chain variable domain of TCR clone 312211 (TRBV7-9, TRBJ2-5)
CASLPSGRETKYF

SEQ ID NO: 624423 - protein, 15 aa, Homo sapiens
  CDR3 for alpha chain variable domain of TCR clone 312212 (TRAV8-6, TRAJ23)
CAVREFYNQGGQLIF

SEQ ID NO: 624424 - protein, 15 aa, Homo sapiens
  CDR3 for beta chain variable domain of TCR clone 312212 (TRBV20-1, TRBJ2-1)
CSAITGTRGSNEQFF

SEQ ID NO: 624425 - protein, 15 aa, Homo sapiens
  CDR3 for alpha chain variable domain of TCR clone 312213 (TRAV17, TRAJ57)
CATGPSQGGSEKLVF

SEQ ID NO: 624426 - protein, 17 aa, Homo sapiens
  CDR3 for beta chain variable domain of TCR clone 312213 (TRBV24-1, TRBJ2-4)
CATSDAEARGVRNIQYF

SEQ ID NO: 624427 - protein, 16 aa, Homo sapiens
  CDR3 for alpha chain variable domain of TCR clone 312214 (TRAV3, TRAJ37)
CAVRGKGSGNTGKLIF

SEQ ID NO: 624428 - protein, 13 aa, Homo sapiens
  CDR3 for beta chain variable domain of TCR clone 312214 (TRBV7-3, TRBJ1-1)
CASSQDGGAEAFF

SEQ ID NO: 624429 - protein, 15 aa, Homo sapiens
  CDR3 for alpha chain variable domain of TCR clone 312215 (TRAV4, TRAJ10)
CLVGDEEGGGNKLTF

SEQ ID NO: 624430 - protein, 15 aa, Homo sapiens
  CDR3 for beta chain variable domain of TCR clone 312215 (TRBV7-2, TRBJ2-3)
CASSSTGLETDTQYF

SEQ ID NO: 624431 - protein, 10 aa, Homo sapiens
  CDR3 for alpha chain variable domain of TCR clone 312216 (TRAV12-2, TRAJ52)
RSTSYGKLTF

SEQ ID NO: 624432 - protein, 14 aa, Homo sapiens
  CDR3 for beta chain variable domain of TCR clone 312216 (TRBV7-2, TRBJ1-1)
CASSFLTGTTEAFF

SEQ ID NO: 624433 - protein, 15 aa, Homo sapiens
  CDR3 for alpha chain variable domain of TCR clone 312217 (TRAV20, TRAJ53)
CAVQSSGGSNYKLTF

SEQ ID NO: 624434 - protein, 12 aa, Homo sapiens
  CDR3 for beta chain variable domain of TCR clone 312217 (TRBV7-2, TRBJ2-1)
CASSPQDIEQFF

SEQ ID NO: 624435 - protein, 13 aa, Homo sapiens
  CDR3 for alpha chain variable domain of TCR clone 312218 (TRAV13-2, TRAJ13)
CAERPGGYQKVTF

SEQ ID NO: 624436 - protein, 13 aa, Homo sapiens
  CDR3 for beta chain variable domain of TCR clone 312218 (TRBV6-1, TRBJ1-1)
CASSRQGNTEAFF

SEQ ID NO: 624437 - protein, 16 aa, Homo sapiens
  CDR3 for alpha chain variable domain of TCR clone 312219 (TRAV12-3, TRAJ4)
CAMTRLFSGGYNKLIF

SEQ ID NO: 624438 - protein, 12 aa, Homo sapiens
  CDR3 for beta chain variable domain of TCR clone 312219 (TRBV6-1, TRBJ2-7)
CASSDYSYEQYF

SEQ ID NO: 624439 - protein, 14 aa, Homo sapiens
  CDR3 for alpha chain variable domain of TCR clone 312220 (TRAV35, TRAJ42)
CCVPYGGSQGNLIF

SEQ ID NO: 624440 - protein, 15 aa, Homo sapiens
  CDR3 for beta chain variable domain of TCR clone 312220 (TRBV27, TRBJ2-5)
CASSLIPSGGETPYF

SEQ ID NO: 624441 - protein, 12 aa, Homo sapiens
  CDR3 for alpha chain variable domain of TCR clone 312221 (TRAV21, TRAJ3)
CCFYSSASKIIF

SEQ ID NO: 624442 - protein, 15 aa, Homo sapiens
  CDR3 for beta chain variable domain of TCR clone 312221 (TRBV20-1, TRBJ2-1)
CSARGIGGTYNEQFF

SEQ ID NO: 624443 - protein, 14 aa, Homo sapiens
  CDR3 for alpha chain variable domain of TCR clone 312222 (TRAV12-2, TRAJ44)
CAVNPAGTASKLTL

SEQ ID NO: 624444 - protein, 16 aa, Homo sapiens
  CDR3 for beta chain variable domain of TCR clone 312222 (TRBV2, TRBJ2-6)
CASSEVGGAGANVLTF

SEQ ID NO: 624445 - protein, 16 aa, Homo sapiens
  CDR3 for alpha chain variable domain of TCR clone 312223 (TRAV14/DV4, TRAJ20)
CAMREGRSRADYKLSF

SEQ ID NO: 624446 - protein, 17 aa, Homo sapiens
  CDR3 for beta chain variable domain of TCR clone 312223 (TRBV20-1, TRBJ2-2)
CSASGSGQGGLTGELFF

SEQ ID NO: 624447 - protein, 16 aa, Homo sapiens
  CDR3 for alpha chain variable domain of TCR clone 312224 (TRAV16, TRAJ57)
CAPYLITQGGSDKLVF

SEQ ID NO: 624448 - protein, 14 aa, Homo sapiens
  CDR3 for beta chain variable domain of TCR clone 312224 (TRBV7-2, TRBJ2-2)
CASRGQGAAGELFF

SEQ ID NO: 624449 - protein, 15 aa, Homo sapiens
  CDR3 for alpha chain variable domain of TCR clone 312225 (TRAV21, TRAJ24)
CAARSSTDSWGKLQF

SEQ ID NO: 624450 - protein, 14 aa, Homo sapiens
  CDR3 for beta chain variable domain of TCR clone 312225 (TRBV11-2, TRBJ1-2)
CASSLGTANYGYTF

SEQ ID NO: 624451 - protein, 14 aa, Homo sapiens
  CDR3 for alpha chain variable domain of TCR clone 312226 (TRAV29/DV5, TRAJ36)
CAARRKTGANYLFF

SEQ ID NO: 624452 - protein, 13 aa, Homo sapiens
  CDR3 for beta chain variable domain of TCR clone 312226 (TRBV7-3, TRBJ1-1)
CASSQDWGAEAFF

SEQ ID NO: 624453 - protein, 13 aa, Homo sapiens
  CDR3 for alpha chain variable domain of TCR clone 312227 (TRAV12-1, TRAJ39)
CVVPQRAGNMLTF

SEQ ID NO: 624454 - protein, 11 aa, Homo sapiens
  CDR3 for beta chain variable domain of TCR clone 312227 (TRBV12-4, TRBJ2-7)
CASRQSYEQYF

SEQ ID NO: 624455 - protein, 13 aa, Homo sapiens
  CDR3 for alpha chain variable domain of TCR clone 312228 (TRAV13-1, TRAJ21)
CAASIYNFNKFYF

SEQ ID NO: 624456 - protein, 16 aa, Homo sapiens
  CDR3 for beta chain variable domain of TCR clone 312228 (TRBV7-9, TRBJ1-2)
CASSLGFSSGEDGYTF

SEQ ID NO: 624457 - protein, 11 aa, Homo sapiens
  CDR3 for alpha chain variable domain of TCR clone 312229 (TRAV13-1, TRAJ26)
VQANYGQNFVF

SEQ ID NO: 624458 - protein, 14 aa, Homo sapiens
  CDR3 for beta chain variable domain of TCR clone 312229 (TRBV11-2, TRBJ1-2)
CASSLYRGNYGYTF

SEQ ID NO: 624459 - protein, 13 aa, Homo sapiens
  CDR3 for alpha chain variable domain of TCR clone 312230 (TRAV26-1, )
CIVSHRVEGFLNQ

SEQ ID NO: 624460 - protein, 14 aa, Homo sapiens
  CDR3 for beta chain variable domain of TCR clone 312230 (TRBV20-1, TRBJ2-7)
CSAWTALSSYEQYF

SEQ ID NO: 624461 - protein, 12 aa, Homo sapiens
  CDR3 for alpha chain variable domain of TCR clone 312231 (TRAV25, TRAJ16)
CAGNRDGQKLLL

SEQ ID NO: 624462 - protein, 13 aa, Homo sapiens
  CDR3 for beta chain variable domain of TCR clone 312231 (TRBV19, TRBJ1-5)
CASSMRGYQPQHF

SEQ ID NO: 624463 - protein, 15 aa, Homo sapiens
  CDR3 for alpha chain variable domain of TCR clone 312232 (TRAV1-2, TRAJ18)
CAWEGRGSTLGRLYF

SEQ ID NO: 624464 - protein, 16 aa, Homo sapiens
  CDR3 for beta chain variable domain of TCR clone 312232 (TRBV12-5, TRBJ2-5)
CASGPRTSGNQETQYF

SEQ ID NO: 624465 - protein, 13 aa, Homo sapiens
  CDR3 for alpha chain variable domain of TCR clone 312233 (TRAV12-2, TRAJ23)
CAVMGNQGGKLIF

SEQ ID NO: 624466 - protein, 12 aa, Homo sapiens
  CDR3 for beta chain variable domain of TCR clone 312233 (TRBV12-5, TRBJ2-5)
CASGQGVETQYF

SEQ ID NO: 624467 - protein, 10 aa, Homo sapiens
  CDR3 for alpha chain variable domain of TCR clone 312234 (TRAV30, TRAJ48)
CGIGNEKLTF

SEQ ID NO: 624468 - protein, 15 aa, Homo sapiens
  CDR3 for beta chain variable domain of TCR clone 312234 (TRBV6-6, TRBJ1-6)
CASSYTRSGTSPLHF

SEQ ID NO: 624469 - protein, 16 aa, Homo sapiens
  CDR3 for alpha chain variable domain of TCR clone 312235 (TRAV24, TRAJ53)
CASNMGGGGSNYKLTF

SEQ ID NO: 624470 - protein, 14 aa, Homo sapiens
  CDR3 for beta chain variable domain of TCR clone 312235 (TRBV18, TRBJ2-3)
CASSGLADTDTQYF

SEQ ID NO: 624471 - protein, 15 aa, Homo sapiens
  CDR3 for alpha chain variable domain of TCR clone 312236 (TRAV38-2/DV8, TRAJ47)
CAYRSAKGYGNKLVF

SEQ ID NO: 624472 - protein, 17 aa, Homo sapiens
  CDR3 for beta chain variable domain of TCR clone 312236 (TRBV2, TRBJ1-5)
CASSVGTGMRGYQPQHF

SEQ ID NO: 624473 - protein, 16 aa, Homo sapiens
  CDR3 for alpha chain variable domain of TCR clone 312237 (TRAV3, TRAJ27)
CAVRDPQGTNEGKSTF

SEQ ID NO: 624474 - protein, 17 aa, Homo sapiens
  CDR3 for beta chain variable domain of TCR clone 312237 (TRBV4-1, TRBJ2-7)
CASSQGRGLQTSYEQYF

SEQ ID NO: 624475 - protein, 14 aa, Homo sapiens
  CDR3 for alpha chain variable domain of TCR clone 312238 (TRAV9-2, TRAJ39)
CALYIYNSGNMLTF

SEQ ID NO: 624476 - protein, 16 aa, Homo sapiens
  CDR3 for beta chain variable domain of TCR clone 312238 (TRBV29-1, TRBJ2-6)
CSVEDITYSGANVLTF

SEQ ID NO: 624477 - protein, 16 aa, Homo sapiens
  CDR3 for alpha chain variable domain of TCR clone 312239 (TRAV16, TRAJ52)
CALSAAGGTSYGKLTF

SEQ ID NO: 624478 - protein, 15 aa, Homo sapiens
  CDR3 for beta chain variable domain of TCR clone 312239 (TRBV20-1, TRBJ2-7)
CSARDWVSGMDEQYF

SEQ ID NO: 624479 - protein, 16 aa, Homo sapiens
  CDR3 for alpha chain variable domain of TCR clone 312240 (TRAV3, TRAJ37)
CAVRPHGSGNTGKLIF

SEQ ID NO: 624480 - protein, 16 aa, Homo sapiens
  CDR3 for beta chain variable domain of TCR clone 312240 (TRBV19, TRBJ2-1)
CASGSKGTRSYNEQFF

SEQ ID NO: 624481 - protein, 13 aa, Homo sapiens
  CDR3 for alpha chain variable domain of TCR clone 312241 (TRAV8-3, TRAJ53)
CAVGRGSNYKLTF

SEQ ID NO: 624482 - protein, 12 aa, Homo sapiens
  CDR3 for beta chain variable domain of TCR clone 312241 (TRBV7-9, TRBJ2-7)
CASSLEGYEQYF

SEQ ID NO: 624483 - protein, 17 aa, Homo sapiens
  CDR3 for alpha chain variable domain of TCR clone 312242 (TRAV12-2, TRAJ4)
CAVNVRPVSGGYNKLIF

SEQ ID NO: 624484 - protein, 13 aa, Homo sapiens
  CDR3 for beta chain variable domain of TCR clone 312242 (TRBV7-9, TRBJ2-3)
CASSAAGSDTQYF

SEQ ID NO: 624485 - protein, 16 aa, Homo sapiens
  CDR3 for alpha chain variable domain of TCR clone 312243 (TRAV20, TRAJ38)
CAVQPSNAGNNRKLTW

SEQ ID NO: 624486 - protein, 16 aa, Homo sapiens
  CDR3 for beta chain variable domain of TCR clone 312243 (TRBV7-8, TRBJ2-6)
CASRVGDSSGANVLTF

SEQ ID NO: 624487 - protein, 14 aa, Homo sapiens
  CDR3 for alpha chain variable domain of TCR clone 312244 (TRAV3, TRAJ34)
CAVRDINNTDKLIY

SEQ ID NO: 624488 - protein, 13 aa, Homo sapiens
  CDR3 for beta chain variable domain of TCR clone 312244 (TRBV20-1, TRBJ1-1)
CSARGGGNTEAFF

SEQ ID NO: 624489 - protein, 14 aa, Homo sapiens
  CDR3 for alpha chain variable domain of TCR clone 312245 (TRAV12-3, TRAJ6)
CAMSATGGSYIPTF

SEQ ID NO: 624490 - protein, 13 aa, Homo sapiens
  CDR3 for beta chain variable domain of TCR clone 312245 (TRBV10-3, TRBJ2-7)
CASKLAVNYEQYF

SEQ ID NO: 624491 - protein, 13 aa, Homo sapiens
  CDR3 for alpha chain variable domain of TCR clone 312246 (TRAV12-2, TRAJ10)
CAVPTGGGYKLTF

SEQ ID NO: 624492 - protein, 14 aa, Homo sapiens
  CDR3 for beta chain variable domain of TCR clone 312246 (TRBV25-1, TRBJ1-1)
CASTHLGGNTEAFF

SEQ ID NO: 624493 - protein, 13 aa, Homo sapiens
  CDR3 for alpha chain variable domain of TCR clone 312247 (TRAV1-2, TRAJ9)
CAALNTGGFKTIF

SEQ ID NO: 624494 - protein, 15 aa, Homo sapiens
  CDR3 for beta chain variable domain of TCR clone 312247 (TRBV3-1, TRBJ2-2)
CASSQDWTRAGELFF

SEQ ID NO: 624495 - protein, 14 aa, Homo sapiens
  CDR3 for alpha chain variable domain of TCR clone 312248 (TRAV12-2, TRAJ44)
CAVNPAGTASKLTF

SEQ ID NO: 624496 - protein, 15 aa, Homo sapiens
  CDR3 for beta chain variable domain of TCR clone 312248 (TRBV27, TRBJ2-1)
CASSNGGGSSNEQFF

SEQ ID NO: 624497 - protein, 12 aa, Homo sapiens
  CDR3 for alpha chain variable domain of TCR clone 312249 (TRAV6, TRAJ3)
CALYSSASKIIF

SEQ ID NO: 624498 - protein, 14 aa, Homo sapiens
  CDR3 for beta chain variable domain of TCR clone 312249 (TRBV20-1, TRBJ1-1)
CSAQTRIGGTGAFF

SEQ ID NO: 624499 - protein, 14 aa, Homo sapiens
  CDR3 for alpha chain variable domain of TCR clone 312250 (TRAV2, TRAJ37)
CAVDFTSNTCKLIF

SEQ ID NO: 624500 - protein, 15 aa, Homo sapiens
  CDR3 for beta chain variable domain of TCR clone 312250 (TRBV20-1, TRBJ1-1)
CGASRGVTGNTEAFF

SEQ ID NO: 624501 - protein, 12 aa, Homo sapiens
  CDR3 for alpha chain variable domain of TCR clone 312251 (TRAV12-3, TRAJ17)
CAMTLTGNKLTF

SEQ ID NO: 624502 - protein, 10 aa, Homo sapiens
  CDR3 for beta chain variable domain of TCR clone 312251 (TRBV20-1, TRBJ2-7)
RVSGMDEQYF

SEQ ID NO: 624503 - protein, 15 aa, Homo sapiens
  CDR3 for alpha chain variable domain of TCR clone 312252 (TRAV8-2, TRAJ40)
CVVLGTTSGTYKYIF

SEQ ID NO: 624504 - protein, 15 aa, Homo sapiens
  CDR3 for beta chain variable domain of TCR clone 312252 (TRBV7-3, TRBJ2-2)
CASSETGQGTGELFF

SEQ ID NO: 624505 - protein, 12 aa, Homo sapiens
  CDR3 for alpha chain variable domain of TCR clone 312253 (TRAV29/DV5, TRAJ26)
CAAIPRGQNFVS

SEQ ID NO: 624506 - protein, 15 aa, Homo sapiens
  CDR3 for beta chain variable domain of TCR clone 312253 (TRBV19, TRBJ1-5)
CASSDSGPRNQPQHF

SEQ ID NO: 624507 - protein, 14 aa, Homo sapiens
  CDR3 for alpha chain variable domain of TCR clone 312254 (TRAV35, TRAJ34)
CAGRGTPTSTSLGL

SEQ ID NO: 624508 - protein, 14 aa, Homo sapiens
  CDR3 for beta chain variable domain of TCR clone 312254 (TRBV5-1, TRBJ2-7)
CASSRGESLYEQYF

SEQ ID NO: 624509 - protein, 13 aa, Homo sapiens
  CDR3 for alpha chain variable domain of TCR clone 312255 (TRAV12-1, TRAJ33)
CGDAPDSNYQLIW

SEQ ID NO: 624510 - protein, 12 aa, Homo sapiens
  CDR3 for beta chain variable domain of TCR clone 312255 (TRBV11-2, TRBJ2-2)
CPSSLGGGELFF

SEQ ID NO: 624511 - protein, 12 aa, Homo sapiens
  CDR3 for alpha chain variable domain of TCR clone 312256 (TRAV12-3, TRAJ17)
CAMTLTGNKLTF

SEQ ID NO: 624512 - protein, 13 aa, Homo sapiens
  CDR3 for beta chain variable domain of TCR clone 312256 (TRBV10-3, TRBJ2-7)
CASKLAVNYEQYF

SEQ ID NO: 624513 - protein, 16 aa, Homo sapiens
  CDR3 for alpha chain variable domain of TCR clone 312257 (TRAV3, TRAJ37)
CAVRVRGSGNTGKLIF

SEQ ID NO: 624514 - protein, 13 aa, Homo sapiens
  CDR3 for beta chain variable domain of TCR clone 312257 (TRBV11-2, TRBJ2-5)
CASSFSSQETQYF

SEQ ID NO: 624515 - protein, 14 aa, Homo sapiens
  CDR3 for alpha chain variable domain of TCR clone 312258 (TRAV20, TRAJ56)
CAAQFGGANSKLTF

SEQ ID NO: 624516 - protein, 14 aa, Homo sapiens
  CDR3 for beta chain variable domain of TCR clone 312258 (TRBV7-2, TRBJ1-1)
CASSFSTGTTEAFF

SEQ ID NO: 624517 - protein, 14 aa, Homo sapiens
  CDR3 for alpha chain variable domain of TCR clone 312259 (TRAV26-1, TRAJ38)
CIADNAGNNRKLIL

SEQ ID NO: 624518 - protein, 15 aa, Homo sapiens
  CDR3 for beta chain variable domain of TCR clone 312259 (TRBV7-9, TRBJ1-2)
CASSPDRGSGYGYTF

SEQ ID NO: 624519 - protein, 12 aa, Homo sapiens
  CDR3 for alpha chain variable domain of TCR clone 312260 (TRAV12-3, TRAJ17)
CAMTLTGNKLTF

SEQ ID NO: 624520 - protein, 14 aa, Homo sapiens
  CDR3 for beta chain variable domain of TCR clone 312260 (TRBV7-2, TRBJ2-7)
CASSPKTSFYEQYS

SEQ ID NO: 624521 - protein, 15 aa, Homo sapiens
  CDR3 for alpha chain variable domain of TCR clone 312261 (TRAV23/DV6, TRAJ18)
CAARYRGSTLGRLYF

SEQ ID NO: 624522 - protein, 15 aa, Homo sapiens
  CDR3 for beta chain variable domain of TCR clone 312261 (TRBV5-1, TRBJ2-2)
CANSSQGGNTGELFF

SEQ ID NO: 624523 - protein, 14 aa, Homo sapiens
  CDR3 for alpha chain variable domain of TCR clone 312262 (TRAV17, TRAJ54)
CATDANQGAQMLVF

SEQ ID NO: 624524 - protein, 12 aa, Homo sapiens
  CDR3 for beta chain variable domain of TCR clone 312262 (TRBV7-9, TRBJ2-7)
CASSIKREEQYF

SEQ ID NO: 624525 - protein, 14 aa, Homo sapiens
  CDR3 for alpha chain variable domain of TCR clone 312263 (TRAV1-2, TRAJ16)
CAFNRFSDGQKLLF

SEQ ID NO: 624526 - protein, 15 aa, Homo sapiens
  CDR3 for beta chain variable domain of TCR clone 312263 (TRBV5-8, TRBJ1-1)
CASSFSGTSLKGAFF

SEQ ID NO: 624527 - protein, 11 aa, Homo sapiens
  CDR3 for alpha chain variable domain of TCR clone 312264 (TRAV2, TRAJ13)
CASGGYQKVTF

SEQ ID NO: 624528 - protein, 13 aa, Homo sapiens
  CDR3 for beta chain variable domain of TCR clone 312264 (TRBV20-1, TRBJ1-1)
CSARVGGNTEACF

SEQ ID NO: 624529 - protein, 18 aa, Homo sapiens
  CDR3 for alpha chain variable domain of TCR clone 312265 (TRAV21, TRAJ52)
CAVRPSPAGGTSYGKLQF

SEQ ID NO: 624530 - protein, 13 aa, Homo sapiens
  CDR3 for beta chain variable domain of TCR clone 312265 (TRBV29-1, TRBJ2-1)
CSVEGGRVNEQFF

SEQ ID NO: 624531 - protein, 12 aa, Homo sapiens
  CDR3 for alpha chain variable domain of TCR clone 312266 (TRAV8-3, TRAJ20)
CAVGANDYKLSF

SEQ ID NO: 624532 - protein, 16 aa, Homo sapiens
  CDR3 for beta chain variable domain of TCR clone 312266 (TRBV19, TRBJ2-2)
CASPSPGTGATGELFF

SEQ ID NO: 624533 - protein, 13 aa, Homo sapiens
  CDR3 for alpha chain variable domain of TCR clone 312267 (TRAV2, TRAJ40)
CAVVISGTYKYIF

SEQ ID NO: 624534 - protein, 15 aa, Homo sapiens
  CDR3 for beta chain variable domain of TCR clone 312267 (TRBV7-3, TRBJ2-1)
CASSPTGGGEVEQFF

SEQ ID NO: 624535 - protein, 12 aa, Homo sapiens
  CDR3 for alpha chain variable domain of TCR clone 312268 (TRAV8-3, TRAJ40)
CAVTSGTYKYIF

SEQ ID NO: 624536 - protein, 14 aa, Homo sapiens
  CDR3 for beta chain variable domain of TCR clone 312268 (TRBV12-4, TRBJ2-3)
CASGGQGSTDTQYF

SEQ ID NO: 624537 - protein, 18 aa, Homo sapiens
  CDR3 for alpha chain variable domain of TCR clone 312269 (TRAV12-3, TRAJ52)
CAMSVGEAGGTSYGKLTF

SEQ ID NO: 624538 - protein, 15 aa, Homo sapiens
  CDR3 for beta chain variable domain of TCR clone 312269 (TRBV27, TRBJ1-6)
CASSFDRGLGPPLHF

SEQ ID NO: 624539 - protein, 12 aa, Homo sapiens
  CDR3 for alpha chain variable domain of TCR clone 312270 (TRAV8-3, TRAJ40)
WAVTSGTYKYIF

SEQ ID NO: 624540 - protein, 15 aa, Homo sapiens
  CDR3 for beta chain variable domain of TCR clone 312270 (TRBV27, TRBJ2-1)
CASSNGGGSSNEQFF

SEQ ID NO: 624541 - protein, 15 aa, Homo sapiens
  CDR3 for alpha chain variable domain of TCR clone 312271 (TRAV21, TRAJ40)
CAVRPQTTGTYKYIF

SEQ ID NO: 624542 - protein, 13 aa, Homo sapiens
  CDR3 for beta chain variable domain of TCR clone 312271 (TRBV7-2, TRBJ2-2)
CASGSVRARELFF

SEQ ID NO: 624543 - protein, 14 aa, Homo sapiens
  CDR3 for alpha chain variable domain of TCR clone 312272 (TRAV8-3, TRAJ13)
CAVGAQEGYQKGTF

SEQ ID NO: 624544 - protein, 15 aa, Homo sapiens
  CDR3 for beta chain variable domain of TCR clone 312272 (TRBV19, TRBJ1-1)
CASTSGQIQNTEAFF

SEQ ID NO: 624545 - protein, 14 aa, Homo sapiens
  CDR3 for alpha chain variable domain of TCR clone 312273 (TRAV1-2, TRAJ8)
CALREDTGFQKLVF

SEQ ID NO: 624546 - protein, 14 aa, Homo sapiens
  CDR3 for beta chain variable domain of TCR clone 312273 (TRBV7-3, TRBJ2-2)
CASSSGGYTGELFF

SEQ ID NO: 624547 - protein, 23 aa, Homo sapiens
  CDR3 for alpha chain variable domain of TCR clone 312274 (TRAV4, TRAJ26)
IPADRKSSTLSLPRVYYGQNFVF

SEQ ID NO: 624548 - protein, 16 aa, Homo sapiens
  CDR3 for beta chain variable domain of TCR clone 312274 (TRBV7-2, TRBJ1-2)
CASSSNQDRRGHGYIF

SEQ ID NO: 624549 - protein, 13 aa, Homo sapiens
  CDR3 for alpha chain variable domain of TCR clone 312275 (TRAV30, TRAJ24)
CGPVTDSWGKLQF

SEQ ID NO: 624550 - protein, 14 aa, Homo sapiens
  CDR3 for beta chain variable domain of TCR clone 312275 (TRBV6-3, TRBJ2-2)
CASTYTPGTGELFF

SEQ ID NO: 624551 - protein, 17 aa, Homo sapiens
  CDR3 for alpha chain variable domain of TCR clone 312276 (TRAV38-1, TRAJ28)
CAFMKPTSGAGSYKLTF

SEQ ID NO: 624552 - protein, 15 aa, Homo sapiens
  CDR3 for beta chain variable domain of TCR clone 312276 (TRBV5-1, TRBJ2-4)
CASSLGGGGSYMQYF

SEQ ID NO: 624553 - protein, 14 aa, Homo sapiens
  CDR3 for alpha chain variable domain of TCR clone 312277 (TRAV1-2, TRAJ8)
CAVREGTGFQKLVF

SEQ ID NO: 624554 - protein, 13 aa, Homo sapiens
  CDR3 for beta chain variable domain of TCR clone 312277 (TRBV4-2, TRBJ2-2)
CASEDRGTGELFF

SEQ ID NO: 624555 - protein, 16 aa, Homo sapiens
  CDR3 for alpha chain variable domain of TCR clone 312278 (TRAV27, TRAJ52)
CAGAPAGGTSYGKLTF

SEQ ID NO: 624556 - protein, 13 aa, Homo sapiens
  CDR3 for beta chain variable domain of TCR clone 312278 (TRBV4-2, TRBJ1-1)
CASSQAGNTEAFF

SEQ ID NO: 624557 - protein, 14 aa, Homo sapiens
  CDR3 for alpha chain variable domain of TCR clone 312279 (TRAV2, TRAJ9)
CAVEDRSGGFKTIF

SEQ ID NO: 624558 - protein, 14 aa, Homo sapiens
  CDR3 for beta chain variable domain of TCR clone 312279 (TRBV18, TRBJ2-5)
CASSPGVSQETQYF

SEQ ID NO: 624559 - protein, 14 aa, Homo sapiens
  CDR3 for alpha chain variable domain of TCR clone 312280 (TRAV12-1, TRAJ30)
CVVNIGGRDDKIIS

SEQ ID NO: 624560 - protein, 14 aa, Homo sapiens
  CDR3 for beta chain variable domain of TCR clone 312280 (TRBV7-6, TRBJ2-3)
CASSLGTVTDTQYF

SEQ ID NO: 624561 - protein, 14 aa, Homo sapiens
  CDR3 for alpha chain variable domain of TCR clone 312281 (TRAV12-3, TRAJ10)
SHLPLTGGGNKLTF

SEQ ID NO: 624562 - protein, 15 aa, Homo sapiens
  CDR3 for beta chain variable domain of TCR clone 312281 (TRBV7-2, TRBJ2-1)
CASSPLAGEYNEQFF

SEQ ID NO: 624563 - protein, 17 aa, Homo sapiens
  CDR3 for alpha chain variable domain of TCR clone 312282 (TRAV23/DV6, TRAJ58)
CAARLLRGETSGSRLTL

SEQ ID NO: 624564 - protein, 15 aa, Homo sapiens
  CDR3 for beta chain variable domain of TCR clone 312282 (TRBV9, TRBJ1-6)
CASSVAGTGDSPLHF

SEQ ID NO: 624565 - protein, 13 aa, Homo sapiens
  CDR3 for alpha chain variable domain of TCR clone 312283 (TRAV8-3, TRAJ6)
CAARRGGSYIPTF

SEQ ID NO: 624566 - protein, 13 aa, Homo sapiens
  CDR3 for beta chain variable domain of TCR clone 312283 (TRBV10-3, TRBJ2-7)
CASKLAVNYEQYF

SEQ ID NO: 624567 - protein, 11 aa, Homo sapiens
  CDR3 for alpha chain variable domain of TCR clone 312284 (TRAV3, TRAJ21)
CALGNFNKFYF

SEQ ID NO: 624568 - protein, 16 aa, Homo sapiens
  CDR3 for beta chain variable domain of TCR clone 312284 (TRBV19, TRBJ2-1)
CASSKAGPSSYNEQFS

SEQ ID NO: 624569 - protein, 11 aa, Homo sapiens
  CDR3 for alpha chain variable domain of TCR clone 312285 (TRAV23/DV6, TRAJ49)
CAVAPVTSSIL

SEQ ID NO: 624570 - protein, 15 aa, Homo sapiens
  CDR3 for beta chain variable domain of TCR clone 312285 (TRBV19, TRBJ2-1)
CASSIAPGQYNEQFF

SEQ ID NO: 624571 - protein, 10 aa, Homo sapiens
  CDR3 for alpha chain variable domain of TCR clone 312286 (TRAV23/DV6, TRAJ57)
CAASSTLSQG

SEQ ID NO: 624572 - protein, 14 aa, Homo sapiens
  CDR3 for beta chain variable domain of TCR clone 312286 (TRBV19, TRBJ1-6)
CASSPGGPRSPLHF

SEQ ID NO: 624573 - protein, 12 aa, Homo sapiens
  CDR3 for alpha chain variable domain of TCR clone 312287 (TRAV2, TRAJ31)
CAVEDNNARLMF

SEQ ID NO: 624574 - protein, 17 aa, Homo sapiens
  CDR3 for beta chain variable domain of TCR clone 312287 (TRBV7-3, TRBJ2-3)
CASSPGGLAGFGDTQYF

SEQ ID NO: 624575 - protein, 13 aa, Homo sapiens
  CDR3 for alpha chain variable domain of TCR clone 312288 (TRAV29/DV5, TRAJ31)
CAASGNNNARLMF

SEQ ID NO: 624576 - protein, 12 aa, Homo sapiens
  CDR3 for beta chain variable domain of TCR clone 312288 (TRBV11-2, TRBJ2-1)
CASSPGNNEQFF

SEQ ID NO: 624577 - protein, 19 aa, Homo sapiens
  CDR3 for alpha chain variable domain of TCR clone 312289 (TRAV38-1, TRAJ53)
CAIMKHGLESGGSNYKLTF

SEQ ID NO: 624578 - protein, 13 aa, Homo sapiens
  CDR3 for beta chain variable domain of TCR clone 312289 (TRBV19, TRBJ2-7)
CASSPRQSYEQYF

SEQ ID NO: 624579 - protein, 14 aa, Homo sapiens
  CDR3 for alpha chain variable domain of TCR clone 312290 (TRAV3, TRAJ33)
CTVRDMDSNYQLIW

SEQ ID NO: 624580 - protein, 19 aa, Homo sapiens
  CDR3 for beta chain variable domain of TCR clone 312290 (TRBV7-3, TRBJ1-2)
CASSFPQGNDGELWLHLRF

SEQ ID NO: 624581 - protein, 15 aa, Homo sapiens
  CDR3 for alpha chain variable domain of TCR clone 312291 (TRAV27, TRAJ38)
CAARRNAGNNRKRIW

SEQ ID NO: 624582 - protein, 17 aa, Homo sapiens
  CDR3 for beta chain variable domain of TCR clone 312291 (TRBV24-1, TRBJ2-4)
CATSDAEARGVRNIQYF

SEQ ID NO: 624583 - protein, 20 aa, Homo sapiens
  CDR3 for alpha chain variable domain of TCR clone 312292 (TRAV21, )
CAVRQDAGNNHIQNPDPAVY

SEQ ID NO: 624584 - protein, 16 aa, Homo sapiens
  CDR3 for beta chain variable domain of TCR clone 312292 (TRBV7-3, TRBJ2-2)
CASSLKRGTLSGELFF

SEQ ID NO: 624585 - protein, 16 aa, Homo sapiens
  CDR3 for alpha chain variable domain of TCR clone 312293 (TRAV16, TRAJ52)
CALIAAGGTSYGKLTF

SEQ ID NO: 624586 - protein, 13 aa, Homo sapiens
  CDR3 for beta chain variable domain of TCR clone 312293 (TRBV3-1, TRBJ1-5)
CASSQFGDQPQHF

SEQ ID NO: 624587 - protein, 14 aa, Homo sapiens
  CDR3 for alpha chain variable domain of TCR clone 312294 (TRAV27, TRAJ17)
CRSTIRAAGNKLTF

SEQ ID NO: 624588 - protein, 16 aa, Homo sapiens
  CDR3 for beta chain variable domain of TCR clone 312294 (TRBV5-7, TRBJ2-5)
CAGTLAPAGGRETQYF

SEQ ID NO: 624589 - protein, 14 aa, Homo sapiens
  CDR3 for alpha chain variable domain of TCR clone 312295 (TRAV1-2, TRAJ8)
CAGREDTGFQKLVF

SEQ ID NO: 624590 - protein, 15 aa, Homo sapiens
  CDR3 for beta chain variable domain of TCR clone 312295 (TRBV6-3, TRBJ2-7)
CASSSPGTVFYEQYL

SEQ ID NO: 624591 - protein, 12 aa, Homo sapiens
  CDR3 for alpha chain variable domain of TCR clone 312296 (TRAV12-3, TRAJ17)
CAMTLTGNKLTF

SEQ ID NO: 624592 - protein, 15 aa, Homo sapiens
  CDR3 for beta chain variable domain of TCR clone 312296 (TRBV20-1, TRBJ2-7)
CIARDRVSGMDEQYL

SEQ ID NO: 624593 - protein, 14 aa, Homo sapiens
  CDR3 for alpha chain variable domain of TCR clone 312297 (TRAV13-1, TRAJ35)
CVASKGGFGNVLHC

SEQ ID NO: 624594 - protein, 13 aa, Homo sapiens
  CDR3 for beta chain variable domain of TCR clone 312297 (TRBV7-3, TRBJ1-1)
CASSQDGGAEAFF

SEQ ID NO: 624595 - protein, 16 aa, Homo sapiens
  CDR3 for alpha chain variable domain of TCR clone 312298 (TRAV23/DV6, TRAJ9)
CAASIGGNTGGFNTIF

SEQ ID NO: 624596 - protein, 14 aa, Homo sapiens
  CDR3 for beta chain variable domain of TCR clone 312298 (TRBV9, TRBJ2-7)
CASSVGVGSCEQYF

SEQ ID NO: 624597 - protein, 12 aa, Homo sapiens
  CDR3 for alpha chain variable domain of TCR clone 312299 (TRAV17, TRAJ31)
CATEQGNARLMF

SEQ ID NO: 624598 - protein, 15 aa, Homo sapiens
  CDR3 for beta chain variable domain of TCR clone 312299 (TRBV2, TRBJ2-1)
CASDIGLAGEGEQFF

SEQ ID NO: 624599 - protein, 13 aa, Homo sapiens
  CDR3 for alpha chain variable domain of TCR clone 312300 (TRAV26-1, TRAJ36)
CIVVGTGANNLFF

SEQ ID NO: 624600 - protein, 16 aa, Homo sapiens
  CDR3 for beta chain variable domain of TCR clone 312300 (TRBV10-3, TRBJ2-1)
CAISGVGDGGGGKQFF

SEQ ID NO: 624601 - protein, 16 aa, Homo sapiens
  CDR3 for alpha chain variable domain of TCR clone 312301 (TRAV12-3, TRAJ53)
CAMSPGSGGSNYKLAF

SEQ ID NO: 624602 - protein, 14 aa, Homo sapiens
  CDR3 for beta chain variable domain of TCR clone 312301 (TRBV7-9, TRBJ2-3)
CASSLEDGTDTQYF

SEQ ID NO: 624603 - protein, 16 aa, Homo sapiens
  CDR3 for alpha chain variable domain of TCR clone 312302 (TRAV38-1, TRAJ37)
CAFKGDGSSNTAKLIF

SEQ ID NO: 624604 - protein, 13 aa, Homo sapiens
  CDR3 for beta chain variable domain of TCR clone 312302 (TRBV12-4, TRBJ2-5)
CASSLFRREAQYF

SEQ ID NO: 624605 - protein, 16 aa, Homo sapiens
  CDR3 for alpha chain variable domain of TCR clone 312303 (TRAV27, TRAJ13)
CSGAKSDSGGYQKVTF

SEQ ID NO: 624606 - protein, 15 aa, Homo sapiens
  CDR3 for beta chain variable domain of TCR clone 312303 (TRBV29-1, TRBJ2-1)
CSVGGHALFYNEQFF

SEQ ID NO: 624607 - protein, 14 aa, Homo sapiens
  CDR3 for alpha chain variable domain of TCR clone 312304 (TRAV14/DV4, TRAJ42)
CPRGSLRSQGNLIF

SEQ ID NO: 624608 - protein, 18 aa, Homo sapiens
  CDR3 for beta chain variable domain of TCR clone 312304 (TRBV20-1, TRBJ2-3)
CSASGLAGGPGTTDTQYF

SEQ ID NO: 624609 - protein, 12 aa, Homo sapiens
  CDR3 for alpha chain variable domain of TCR clone 312305 (TRAV21, TRAJ58)
CALSASGSRLTF

SEQ ID NO: 624610 - protein, 15 aa, Homo sapiens
  CDR3 for beta chain variable domain of TCR clone 312305 (TRBV20-1, TRBJ2-7)
CSARDRVSGMDEQYF

SEQ ID NO: 624611 - protein, 17 aa, Homo sapiens
  CDR3 for alpha chain variable domain of TCR clone 312306 (TRAV16, TRAJ42)
CALSPQLYGGSQGNLIF

SEQ ID NO: 624612 - protein, 13 aa, Homo sapiens
  CDR3 for beta chain variable domain of TCR clone 312306 (TRBV19, TRBJ1-5)
CASSTRRDQPQHF

SEQ ID NO: 624613 - protein, 18 aa, Homo sapiens
  CDR3 for alpha chain variable domain of TCR clone 312307 (TRAV21, TRAJ52)
CAVRPSPAGGTSYVKLTC

SEQ ID NO: 624614 - protein, 17 aa, Homo sapiens
  CDR3 for beta chain variable domain of TCR clone 312307 (TRBV13, TRBJ2-3)
CASSLSRVAGGRNTQYF

SEQ ID NO: 624615 - protein, 18 aa, Homo sapiens
  CDR3 for alpha chain variable domain of TCR clone 312308 (TRAV26-2, TRAJ45)
CILRVDKYSGGGADRLTF

SEQ ID NO: 624616 - protein, 16 aa, Homo sapiens
  CDR3 for beta chain variable domain of TCR clone 312308 (TRBV2, TRBJ1-4)
CASNLLQGATNEKLFF

SEQ ID NO: 624617 - protein, 15 aa, Homo sapiens
  CDR3 for alpha chain variable domain of TCR clone 312309 (TRAV17, TRAJ37)
CATDGGSGNTGKLIF

SEQ ID NO: 624618 - protein, 15 aa, Homo sapiens
  CDR3 for beta chain variable domain of TCR clone 312309 (TRBV28, TRBJ2-5)
CASSSGRTIQETQYF

SEQ ID NO: 624619 - protein, 14 aa, Homo sapiens
  CDR3 for alpha chain variable domain of TCR clone 312310 (TRAV12-2, TRAJ29)
CAVRRNSGNTPLVF

SEQ ID NO: 624620 - protein, 13 aa, Homo sapiens
  CDR3 for beta chain variable domain of TCR clone 312310 (TRBV12-4, TRBJ2-1)
CASSHYTDNEQFY

SEQ ID NO: 624621 - protein, 16 aa, Homo sapiens
  CDR3 for alpha chain variable domain of TCR clone 312311 (TRAV3, TRAJ18)
CAVRDGRGSTLGRLYF

SEQ ID NO: 624622 - protein, 17 aa, Homo sapiens
  CDR3 for beta chain variable domain of TCR clone 312311 (TRBV7-3, TRBJ2-3)
CASSLMKRMRGADTQYF

SEQ ID NO: 624623 - protein, 16 aa, Homo sapiens
  CDR3 for alpha chain variable domain of TCR clone 312312 (TRAV8-3, TRAJ8)
CAVPRDGNTGFQKLVF

SEQ ID NO: 624624 - protein, 15 aa, Homo sapiens
  CDR3 for beta chain variable domain of TCR clone 312312 (TRBV3-1, TRBJ2-7)
CASSQVRQGAYEQYF

SEQ ID NO: 624625 - protein, 12 aa, Homo sapiens
  CDR3 for alpha chain variable domain of TCR clone 312313 (TRAV12-2, TRAJ30)
CAVRNRDDKSIF

SEQ ID NO: 624626 - protein, 15 aa, Homo sapiens
  CDR3 for beta chain variable domain of TCR clone 312313 (TRBV6-3, TRBJ1-5)
CASRVDRWSNQPQHF

SEQ ID NO: 624627 - protein, 13 aa, Homo sapiens
  CDR3 for alpha chain variable domain of TCR clone 312314 (TRAV13-1, TRAJ13)
CAASKGGYQKVTF

SEQ ID NO: 624628 - protein, 16 aa, Homo sapiens
  CDR3 for beta chain variable domain of TCR clone 312314 (TRBV18, TRBJ1-2)
CASSPQERVTIYGYTF

SEQ ID NO: 624629 - protein, 14 aa, Homo sapiens
  CDR3 for alpha chain variable domain of TCR clone 312315 (TRAV1-2, TRAJ33)
CAVRAPDSNYQLIW

SEQ ID NO: 624630 - protein, 15 aa, Homo sapiens
  CDR3 for beta chain variable domain of TCR clone 312315 (TRBV7-9, TRBJ1-6)
CASSSPGRGNSPLHF

SEQ ID NO: 624631 - protein, 13 aa, Homo sapiens
  CDR3 for alpha chain variable domain of TCR clone 312316 (TRAV22, TRAJ9)
CAVGSTGGFKTNF

SEQ ID NO: 624632 - protein, 13 aa, Homo sapiens
  CDR3 for beta chain variable domain of TCR clone 312316 (TRBV9, TRBJ2-7)
CASSVAGTGEQYF

SEQ ID NO: 624633 - protein, 13 aa, Homo sapiens
  CDR3 for alpha chain variable domain of TCR clone 312317 (TRAV8-2, TRAJ44)
CSRGAGTASKLTF

SEQ ID NO: 624634 - protein, 13 aa, Homo sapiens
  CDR3 for beta chain variable domain of TCR clone 312317 (TRBV12-4, TRBJ2-7)
RASSRQASYEQYF

SEQ ID NO: 624635 - protein, 14 aa, Homo sapiens
  CDR3 for alpha chain variable domain of TCR clone 312318 (TRAV1-2, TRAJ16)
CAVNRFSDGQKLLF

SEQ ID NO: 624636 - protein, 15 aa, Homo sapiens
  CDR3 for beta chain variable domain of TCR clone 312318 (TRBV19, TRBJ1-5)
CASSIVWADNQPQNF

SEQ ID NO: 624637 - protein, 15 aa, Homo sapiens
  CDR3 for alpha chain variable domain of TCR clone 312319 (TRAV29/DV5, TRAJ24)
CAASGATASWGTFQF

SEQ ID NO: 624638 - protein, 12 aa, Homo sapiens
  CDR3 for beta chain variable domain of TCR clone 312319 (TRBV11-2, TRBJ2-2)
CASSLPTGELFF

SEQ ID NO: 624639 - protein, 11 aa, Homo sapiens
  CDR3 for alpha chain variable domain of TCR clone 312320 (TRAV35, TRAJ34)
CWARNTDKLIF

SEQ ID NO: 624640 - protein, 14 aa, Homo sapiens
  CDR3 for beta chain variable domain of TCR clone 312320 (TRBV27, TRBJ2-2)
CASSLGAATGELFF

SEQ ID NO: 624641 - protein, 13 aa, Homo sapiens
  CDR3 for alpha chain variable domain of TCR clone 312321 (TRAV13-2, TRAJ8)
CAFMNTGFQKLLF

SEQ ID NO: 624642 - protein, 17 aa, Homo sapiens
  CDR3 for beta chain variable domain of TCR clone 312321 (TRBV28, TRBJ2-1)
CASSSARQALTYNEQFF

SEQ ID NO: 624643 - protein, 15 aa, Homo sapiens
  CDR3 for alpha chain variable domain of TCR clone 312322 (TRAV25, TRAJ53)
CAATGGGGSNYKLTF

SEQ ID NO: 624644 - protein, 19 aa, Homo sapiens
  CDR3 for beta chain variable domain of TCR clone 312322 (TRBV7-8, TRBJ2-3)
CASSFLSRNWGGGTDTQYF

SEQ ID NO: 624645 - protein, 15 aa, Homo sapiens
  CDR3 for alpha chain variable domain of TCR clone 312323 (TRAV21, TRAJ53)
CATLNSGGSNYKLTF

SEQ ID NO: 624646 - protein, 13 aa, Homo sapiens
  CDR3 for beta chain variable domain of TCR clone 312323 (TRBV12-4, TRBJ2-7)
CASSFVPAAEQCF

SEQ ID NO: 624647 - protein, 14 aa, Homo sapiens
  CDR3 for alpha chain variable domain of TCR clone 312324 (TRAV12-3, TRAJ10)
SHLPLTGGGSKLTF

SEQ ID NO: 624648 - protein, 14 aa, Homo sapiens
  CDR3 for beta chain variable domain of TCR clone 312324 (TRBV19, TRBJ2-1)
CASGKSTQYNEQFF

SEQ ID NO: 624649 - protein, 13 aa, Homo sapiens
  CDR3 for alpha chain variable domain of TCR clone 312325 (TRAV26-1, TRAJ33)
CIVRVEGNYQLLW

SEQ ID NO: 624650 - protein, 13 aa, Homo sapiens
  CDR3 for beta chain variable domain of TCR clone 312325 (TRBV6-3, TRBJ2-7)
CASTWGSSYEQYF

SEQ ID NO: 624651 - protein, 16 aa, Homo sapiens
  CDR3 for alpha chain variable domain of TCR clone 312326 (TRAV8-6, TRAJ58)
CAVSDHTETSGSRLTV

SEQ ID NO: 624652 - protein, 14 aa, Homo sapiens
  CDR3 for beta chain variable domain of TCR clone 312326 (TRBV7-2, TRBJ1-5)
CASSPRGGPQPQHF

SEQ ID NO: 624653 - protein, 10 aa, Homo sapiens
  CDR3 for alpha chain variable domain of TCR clone 312327 (TRAV26-1, TRAJ40)
CIAGTYKYIF

SEQ ID NO: 624654 - protein, 15 aa, Homo sapiens
  CDR3 for beta chain variable domain of TCR clone 312327 (TRBV19, TRBJ2-1)
FASSSPGVPLDEQFF

SEQ ID NO: 624655 - protein, 15 aa, Homo sapiens
  CDR3 for alpha chain variable domain of TCR clone 312328 (TRAV8-3, TRAJ20)
CAVEAKGANDYKLSF

SEQ ID NO: 624656 - protein, 12 aa, Homo sapiens
  CDR3 for beta chain variable domain of TCR clone 312328 (TRBV7-2, TRBJ1-2)
CASRDSIYGYTF

SEQ ID NO: 624657 - protein, 14 aa, Homo sapiens
  CDR3 for alpha chain variable domain of TCR clone 312329 (TRAV16, TRAJ32)
CALKSGGATNKLIF

SEQ ID NO: 624658 - protein, 17 aa, Homo sapiens
  CDR3 for beta chain variable domain of TCR clone 312329 (TRBV20-1, TRBJ2-1)
CSASSSGLAGSYNEQVF

SEQ ID NO: 624659 - protein, 16 aa, Homo sapiens
  CDR3 for alpha chain variable domain of TCR clone 312330 (TRAV12-3, TRAJ53)
CAMSPGSGGSNYKLTF

SEQ ID NO: 624660 - protein, 15 aa, Homo sapiens
  CDR3 for beta chain variable domain of TCR clone 312330 (TRBV25-1, TRBJ1-4)
CASSKRIATKEKLVF

SEQ ID NO: 624661 - protein, 14 aa, Homo sapiens
  CDR3 for alpha chain variable domain of TCR clone 312331 (TRAV17, TRAJ57)
CATDPKGGSEKLVF

SEQ ID NO: 624662 - protein, 18 aa, Homo sapiens
  CDR3 for beta chain variable domain of TCR clone 312331 (TRBV20-1, TRBJ2-3)
CSASGLAGGPGTTDTQYF

SEQ ID NO: 624663 - protein, 12 aa, Homo sapiens
  CDR3 for alpha chain variable domain of TCR clone 312332 (TRAV16, TRAJ34)
CAHSYNTDKLIF

SEQ ID NO: 624664 - protein, 16 aa, Homo sapiens
  CDR3 for beta chain variable domain of TCR clone 312332 (TRBV19, TRBJ2-2)
CASRSPGTGATGELFF

SEQ ID NO: 624665 - protein, 15 aa, Homo sapiens
  CDR3 for alpha chain variable domain of TCR clone 312333 (TRAV24, TRAJ24)
CARTMTTDSWGKFQF

SEQ ID NO: 624666 - protein, 15 aa, Homo sapiens
  CDR3 for beta chain variable domain of TCR clone 312333 (TRBV7-2, TRBJ2-7)
CASSLSGALTYEQYF

SEQ ID NO: 624667 - protein, 12 aa, Homo sapiens
  CDR3 for alpha chain variable domain of TCR clone 312334 (TRAV8-4, TRAJ43)
CAVSVNNNDMRF

SEQ ID NO: 624668 - protein, 15 aa, Homo sapiens
  CDR3 for beta chain variable domain of TCR clone 312334 (TRBV28, TRBJ1-4)
CASSVSGSGLEKLFF

SEQ ID NO: 624669 - protein, 16 aa, Homo sapiens
  CDR3 for alpha chain variable domain of TCR clone 312335 (TRAV26-1, TRAJ52)
CIVSNAGGTSYGKLTF

SEQ ID NO: 624670 - protein, 13 aa, Homo sapiens
  CDR3 for beta chain variable domain of TCR clone 312335 (TRBV7-9, TRBJ1-2)
CASSLKQNYGYTF

SEQ ID NO: 624671 - protein, 15 aa, Homo sapiens
  CDR3 for alpha chain variable domain of TCR clone 312336 (TRAV8-1, TRAJ8)
CAVNAMNTGFQKLVF

SEQ ID NO: 624672 - protein, 15 aa, Homo sapiens
  CDR3 for beta chain variable domain of TCR clone 312336 (TRBV10-3, TRBJ2-1)
CAIRNGTSGHNEQFF

SEQ ID NO: 624673 - protein, 12 aa, Homo sapiens
  CDR3 for alpha chain variable domain of TCR clone 312337 (TRAV12-1, TRAJ40)
CVVYSGTYKYIF

SEQ ID NO: 624674 - protein, 13 aa, Homo sapiens
  CDR3 for beta chain variable domain of TCR clone 312337 (TRBV19, TRBJ1-3)
CASRLSLGNTIYF

SEQ ID NO: 624675 - protein, 14 aa, Homo sapiens
  CDR3 for alpha chain variable domain of TCR clone 312338 (TRAV16, TRAJ33)
CALSAMDSNYQLLW

SEQ ID NO: 624676 - protein, 15 aa, Homo sapiens
  CDR3 for beta chain variable domain of TCR clone 312338 (TRBV28, TRBJ2-7)
CASSLEAYPIYEQYF

SEQ ID NO: 624677 - protein, 14 aa, Homo sapiens
  CDR3 for alpha chain variable domain of TCR clone 312339 (TRAV13-1, TRAJ24)
CAASLSDSWGKLQF

SEQ ID NO: 624678 - protein, 16 aa, Homo sapiens
  CDR3 for beta chain variable domain of TCR clone 312339 (TRBV7-9, TRBJ2-6)
CASSLKGPLRANVLTF

SEQ ID NO: 624679 - protein, 16 aa, Homo sapiens
  CDR3 for alpha chain variable domain of TCR clone 312340 (TRAV41, TRAJ34)
CSFQGIGSYNTDKPIF

SEQ ID NO: 624680 - protein, 13 aa, Homo sapiens
  CDR3 for beta chain variable domain of TCR clone 312340 (TRBV4-2, TRBJ2-1)
CASSPSTYNEQFF

SEQ ID NO: 624681 - protein, 16 aa, Homo sapiens
  CDR3 for alpha chain variable domain of TCR clone 312341 (TRAV30, TRAJ24)
CGPALVDADSWGKFQF

SEQ ID NO: 624682 - protein, 14 aa, Homo sapiens
  CDR3 for beta chain variable domain of TCR clone 312341 (TRBV12-5, TRBJ2-5)
CASGSRTHQETQYF

SEQ ID NO: 624683 - protein, 13 aa, Homo sapiens
  CDR3 for alpha chain variable domain of TCR clone 312342 (TRAV27, TRAJ45)
CRSSGGGADGLTF

SEQ ID NO: 624684 - protein, 17 aa, Homo sapiens
  CDR3 for beta chain variable domain of TCR clone 312342 (TRBV11-2, TRBJ2-1)
CASSLYPPAVEYNEQFF

SEQ ID NO: 624685 - protein, 14 aa, Homo sapiens
  CDR3 for alpha chain variable domain of TCR clone 312343 (TRAV1-2, TRAJ16)
CAVNRFSDGQKLLF

SEQ ID NO: 624686 - protein, 12 aa, Homo sapiens
  CDR3 for beta chain variable domain of TCR clone 312343 (TRBV7-6, TRBJ2-7)
CASSLAGSEQYF

SEQ ID NO: 624687 - protein, 14 aa, Homo sapiens
  CDR3 for alpha chain variable domain of TCR clone 312344 (TRAV29/DV5, TRAJ29)
CAARSNSGNTPLVF

SEQ ID NO: 624688 - protein, 17 aa, Homo sapiens
  CDR3 for beta chain variable domain of TCR clone 312344 (TRBV4-2, TRBJ2-1)
CASSQVSGLAMNNEQFF

SEQ ID NO: 624689 - protein, 14 aa, Homo sapiens
  CDR3 for alpha chain variable domain of TCR clone 312345 (TRAV8-3, TRAJ39)
CAVGANNAGNMLTF

SEQ ID NO: 624690 - protein, 12 aa, Homo sapiens
  CDR3 for beta chain variable domain of TCR clone 312345 (TRBV7-8, TRBJ2-1)
CASSALAGRVFL

SEQ ID NO: 624691 - protein, 17 aa, Homo sapiens
  CDR3 for alpha chain variable domain of TCR clone 312346 (TRAV3, TRAJ6)
CAVRDGPRAGGRYIPTF

SEQ ID NO: 624692 - protein, 13 aa, Homo sapiens
  CDR3 for beta chain variable domain of TCR clone 312346 (TRBV2, TRBJ2-5)
CASSDGIQETQYF

SEQ ID NO: 624693 - protein, 14 aa, Homo sapiens
  CDR3 for alpha chain variable domain of TCR clone 312347 (TRAV12-2, TRAJ15)
CAPHTGQAGTALIF

SEQ ID NO: 624694 - protein, 17 aa, Homo sapiens
  CDR3 for beta chain variable domain of TCR clone 312347 (TRBV7-8, TRBJ1-2)
CASSLRPLQGHLYGYTF

SEQ ID NO: 624695 - protein, 15 aa, Homo sapiens
  CDR3 for alpha chain variable domain of TCR clone 312348 (TRAV2, TRAJ9)
CAVDALNTGGFKTIF

SEQ ID NO: 624696 - protein, 14 aa, Homo sapiens
  CDR3 for beta chain variable domain of TCR clone 312348 (TRBV7-8, TRBJ2-5)
CASSATGGQETQYF

SEQ ID NO: 624697 - protein, 16 aa, Homo sapiens
  CDR3 for alpha chain variable domain of TCR clone 312349 (TRAV30, TRAJ24)
CGTEIVDADSWGKFQF

SEQ ID NO: 624698 - protein, 15 aa, Homo sapiens
  CDR3 for beta chain variable domain of TCR clone 312349 (TRBV12-4, TRBJ2-5)
CQQFFVRGRQETQYF

SEQ ID NO: 624699 - protein, 14 aa, Homo sapiens
  CDR3 for alpha chain variable domain of TCR clone 312350 (TRAV12-2, TRAJ40)
CAVKIPSGTSKYIF

SEQ ID NO: 624700 - protein, 19 aa, Homo sapiens
  CDR3 for beta chain variable domain of TCR clone 312350 (TRBV25-1, TRBJ2-2)
CAILVYRVDRGRKTGELFF

SEQ ID NO: 624701 - protein, 17 aa, Homo sapiens
  CDR3 for alpha chain variable domain of TCR clone 312351 (TRAV20, TRAJ53)
CAVQAQGSGGSNYKLTF

SEQ ID NO: 624702 - protein, 13 aa, Homo sapiens
  CDR3 for beta chain variable domain of TCR clone 312351 (TRBV19, TRBJ2-5)
CASSGRAGETQYF

SEQ ID NO: 624703 - protein, 15 aa, Homo sapiens
  CDR3 for alpha chain variable domain of TCR clone 312352 (TRAV29/DV5, TRAJ53)
CAASASGSSNYKLTF

SEQ ID NO: 624704 - protein, 19 aa, Homo sapiens
  CDR3 for beta chain variable domain of TCR clone 312352 (TRBV5-1, TRBJ2-3)
CASSLWLAGGITTTDTQYF

SEQ ID NO: 624705 - protein, 14 aa, Homo sapiens
  CDR3 for alpha chain variable domain of TCR clone 312353 (TRAV3, TRAJ34)
CAVRAPGNTDKLIF

SEQ ID NO: 624706 - protein, 17 aa, Homo sapiens
  CDR3 for beta chain variable domain of TCR clone 312353 (TRBV20-1, TRBJ2-7)
CSAAPGLARGISDEQYF

SEQ ID NO: 624707 - protein, 14 aa, Homo sapiens
  CDR3 for alpha chain variable domain of TCR clone 312354 (TRAV20, TRAJ20)
CAVRRGYNVYKLSF

SEQ ID NO: 624708 - protein, 13 aa, Homo sapiens
  CDR3 for beta chain variable domain of TCR clone 312354 (TRBV19, TRBJ2-5)
CASSETAPETQYF

SEQ ID NO: 624709 - protein, 12 aa, Homo sapiens
  CDR3 for alpha chain variable domain of TCR clone 312355 (TRAV25, TRAJ11)
CAGYSGYSTLTF

SEQ ID NO: 624710 - protein, 15 aa, Homo sapiens
  CDR3 for beta chain variable domain of TCR clone 312355 (TRBV7-9, TRBJ1-1)
CASSRPGTANTEAFF

SEQ ID NO: 624711 - protein, 14 aa, Homo sapiens
  CDR3 for alpha chain variable domain of TCR clone 312356 (TRAV3, TRAJ9)
CAVRLNTGGFKTIF

SEQ ID NO: 624712 - protein, 16 aa, Homo sapiens
  CDR3 for beta chain variable domain of TCR clone 312356 (TRBV28, TRBJ2-5)
CASSFSPAGGWETQYF

SEQ ID NO: 624713 - protein, 13 aa, Homo sapiens
  CDR3 for alpha chain variable domain of TCR clone 312357 (TRAV29/DV5, TRAJ31)
CAASRNNNARLLF

SEQ ID NO: 624714 - protein, 12 aa, Homo sapiens
  CDR3 for beta chain variable domain of TCR clone 312357 (TRBV14, TRBJ2-7)
CASSSLKGEQYF

SEQ ID NO: 624715 - protein, 14 aa, Homo sapiens
  CDR3 for alpha chain variable domain of TCR clone 312358 (TRAV23/DV6, TRAJ27)
CAASRDTNAGKSTV

SEQ ID NO: 624716 - protein, 13 aa, Homo sapiens
  CDR3 for beta chain variable domain of TCR clone 312358 (TRBV7-9, TRBJ1-2)
CASSLKQNYGYTF

SEQ ID NO: 624717 - protein, 12 aa, Homo sapiens
  CDR3 for alpha chain variable domain of TCR clone 312359 (TRAV8-3, TRAJ26)
CAGDYYGQNFVF

SEQ ID NO: 624718 - protein, 16 aa, Homo sapiens
  CDR3 for beta chain variable domain of TCR clone 312359 (TRBV9, TRBJ2-1)
CASSVGGGGNYNEQFF

SEQ ID NO: 624719 - protein, 15 aa, Homo sapiens
  CDR3 for alpha chain variable domain of TCR clone 312360 (TRAV3, TRAJ3)
CAVRDRDSSASKIIF

SEQ ID NO: 624720 - protein, 18 aa, Homo sapiens
  CDR3 for beta chain variable domain of TCR clone 312360 (TRBV25-1, TRBJ1-2)
CASSGIQNGQGLIFGYTF

SEQ ID NO: 624721 - protein, 15 aa, Homo sapiens
  CDR3 for alpha chain variable domain of TCR clone 312361 (TRAV26-2, TRAJ21)
CILSNTTSTTFTLDL

SEQ ID NO: 624722 - protein, 16 aa, Homo sapiens
  CDR3 for beta chain variable domain of TCR clone 312361 (TRBV4-2, TRBJ2-6)
CASSQARSSGANVLTF

SEQ ID NO: 624723 - protein, 15 aa, Homo sapiens
  CDR3 for alpha chain variable domain of TCR clone 312362 (TRAV3, TRAJ17)
CAVRDTGAAGNKLTF

SEQ ID NO: 624724 - protein, 15 aa, Homo sapiens
  CDR3 for beta chain variable domain of TCR clone 312362 (TRBV4-1, TRBJ1-2)
CASSQGQGAAYGYTF

SEQ ID NO: 624725 - protein, 15 aa, Homo sapiens
  CDR3 for alpha chain variable domain of TCR clone 312363 (TRAV30, TRAJ32)
CGTEILGGVTNKLIF

SEQ ID NO: 624726 - protein, 13 aa, Homo sapiens
  CDR3 for beta chain variable domain of TCR clone 312363 (TRBV6-3, TRBJ2-7)
CASSFSGGYEQYF

SEQ ID NO: 624727 - protein, 14 aa, Homo sapiens
  CDR3 for alpha chain variable domain of TCR clone 312364 (TRAV12-3, TRAJ10)
SHLPLPGGGNKLTF

SEQ ID NO: 624728 - protein, 14 aa, Homo sapiens
  CDR3 for beta chain variable domain of TCR clone 312364 (TRBV6-1, TRBJ1-3)
CASVQGGGGNTIYV

SEQ ID NO: 624729 - protein, 18 aa, Homo sapiens
  CDR3 for alpha chain variable domain of TCR clone 312365 (TRAV21, TRAJ52)
CAVRPSRAGGTSYGKLTF

SEQ ID NO: 624730 - protein, 14 aa, Homo sapiens
  CDR3 for beta chain variable domain of TCR clone 312365 (TRBV4-1, TRBJ2-2)
CASSQAVNTGELFF

SEQ ID NO: 624731 - protein, 12 aa, Homo sapiens
  CDR3 for alpha chain variable domain of TCR clone 312366 (TRAV1-2, TRAJ33)
CAALDSNYQLIW

SEQ ID NO: 624732 - protein, 17 aa, Homo sapiens
  CDR3 for beta chain variable domain of TCR clone 312366 (TRBV18, TRBJ2-6)
CASSPDRGVGGANVLTF

SEQ ID NO: 624733 - protein, 16 aa, Homo sapiens
  CDR3 for alpha chain variable domain of TCR clone 312367 (TRAV30, TRAJ24)
CGTEIVDADSWGKFQF

SEQ ID NO: 624734 - protein, 17 aa, Homo sapiens
  CDR3 for beta chain variable domain of TCR clone 312367 (TRBV7-2, TRBJ2-1)
CASSLGPPWGGLDEQFF

SEQ ID NO: 624735 - protein, 14 aa, Homo sapiens
  CDR3 for alpha chain variable domain of TCR clone 312368 (TRAV12-1, TRAJ17)
CVVNYKAAGNKLTF

SEQ ID NO: 624736 - protein, 15 aa, Homo sapiens
  CDR3 for beta chain variable domain of TCR clone 312368 (TRBV5-1, TRBJ2-7)
CASSPQGRPLDEQYF

SEQ ID NO: 624737 - protein, 11 aa, Homo sapiens
  CDR3 for alpha chain variable domain of TCR clone 312369 (TRAV17, TRAJ36)
CAPTGANNLFF

SEQ ID NO: 624738 - protein, 14 aa, Homo sapiens
  CDR3 for beta chain variable domain of TCR clone 312369 (TRBV19, TRBJ2-1)
CASPTFVLSGEQFF

SEQ ID NO: 624739 - protein, 15 aa, Homo sapiens
  CDR3 for alpha chain variable domain of TCR clone 312370 (TRAV9-2, TRAJ10)
CALKVLTGGGNKLTF

SEQ ID NO: 624740 - protein, 15 aa, Homo sapiens
  CDR3 for beta chain variable domain of TCR clone 312370 (TRBV20-1, TRBJ2-5)
RSASGTSGGGETQYF

SEQ ID NO: 624741 - protein, 15 aa, Homo sapiens
  CDR3 for alpha chain variable domain of TCR clone 312371 (TRAV27, TRAJ38)
CAARRNAGNNRKLIW

SEQ ID NO: 624742 - protein, 15 aa, Homo sapiens
  CDR3 for beta chain variable domain of TCR clone 312371 (TRBV7-2, TRBJ2-7)
CASSTPGLTRGEQYF

SEQ ID NO: 624743 - protein, 14 aa, Homo sapiens
  CDR3 for alpha chain variable domain of TCR clone 312372 (TRAV1-2, TRAJ8)
CAVREDTGFQELGF

SEQ ID NO: 624744 - protein, 17 aa, Homo sapiens
  CDR3 for beta chain variable domain of TCR clone 312372 (TRBV11-2, TRBJ2-1)
CASSLYPPGVEYNEQFF

SEQ ID NO: 624745 - protein, 16 aa, Homo sapiens
  CDR3 for alpha chain variable domain of TCR clone 312373 (TRAV12-2, TRAJ32)
CAVNLGQGSATNKLIF

SEQ ID NO: 624746 - protein, 14 aa, Homo sapiens
  CDR3 for beta chain variable domain of TCR clone 312373 (TRBV11-2, TRBJ2-3)
CASSRLARTDTQHF

SEQ ID NO: 624747 - protein, 12 aa, Homo sapiens
  CDR3 for alpha chain variable domain of TCR clone 312374 (TRAV35, TRAJ12)
CAGMDSSYKLIF

SEQ ID NO: 624748 - protein, 14 aa, Homo sapiens
  CDR3 for beta chain variable domain of TCR clone 312374 (TRBV28, TRBJ2-5)
CASSLYRGTENQYF

SEQ ID NO: 624749 - protein, 14 aa, Homo sapiens
  CDR3 for alpha chain variable domain of TCR clone 312375 (TRAV1-2, TRAJ8)
CAVREDTGFQKLVF

SEQ ID NO: 624750 - protein, 14 aa, Homo sapiens
  CDR3 for beta chain variable domain of TCR clone 312375 (TRBV20-1, TRBJ2-7)
GSAPELAGVGEQYF

SEQ ID NO: 624751 - protein, 15 aa, Homo sapiens
  CDR3 for alpha chain variable domain of TCR clone 312376 (TRAV26-1, TRAJ22)
CIVRVSFWFCKATDL

SEQ ID NO: 624752 - protein, 13 aa, Homo sapiens
  CDR3 for beta chain variable domain of TCR clone 312376 (TRBV20-1, TRBJ1-5)
CSASWGRSQPQHF

SEQ ID NO: 624753 - protein, 14 aa, Homo sapiens
  CDR3 for alpha chain variable domain of TCR clone 312377 (TRAV12-3, TRAJ10)
SHLPLTGGGNKLTF

SEQ ID NO: 624754 - protein, 14 aa, Homo sapiens
  CDR3 for beta chain variable domain of TCR clone 312377 (TRBV19, TRBJ2-1)
CASPTFVLSGEQSF

SEQ ID NO: 624755 - protein, 17 aa, Homo sapiens
  CDR3 for alpha chain variable domain of TCR clone 312378 (TRAV21, TRAJ52)
CAVGTNARGTSYGKLTF

SEQ ID NO: 624756 - protein, 13 aa, Homo sapiens
  CDR3 for beta chain variable domain of TCR clone 312378 (TRBV5-1, TRBJ1-2)
CASSFSGNLGYTF

SEQ ID NO: 624757 - protein, 11 aa, Homo sapiens
  CDR3 for alpha chain variable domain of TCR clone 312379 (TRAV12-1, TRAJ26)
CVVNYGQNFVF

SEQ ID NO: 624758 - protein, 13 aa, Homo sapiens
  CDR3 for beta chain variable domain of TCR clone 312379 (TRBV7-9, TRBJ2-5)
CASLPSGRETQYF

SEQ ID NO: 624759 - protein, 11 aa, Homo sapiens
  CDR3 for alpha chain variable domain of TCR clone 312380 (TRAV13-1, TRAJ6)
CATLGSYIPSF

SEQ ID NO: 624760 - protein, 13 aa, Homo sapiens
  CDR3 for beta chain variable domain of TCR clone 312380 (TRBV6-6, TRBJ2-1)
CASSLHQGDEQFF

SEQ ID NO: 624761 - protein, 15 aa, Homo sapiens
  CDR3 for alpha chain variable domain of TCR clone 312381 (TRAV17, TRAJ10)
CATDASGGGGDKLTF

SEQ ID NO: 624762 - protein, 14 aa, Homo sapiens
  CDR3 for beta chain variable domain of TCR clone 312381 (TRBV20-1, TRBJ2-5)
CSVTYRGRAETQYF

SEQ ID NO: 624763 - protein, 16 aa, Homo sapiens
  CDR3 for alpha chain variable domain of TCR clone 312382 (TRAV17, TRAJ22)
CATDALSSGSARQLTF

SEQ ID NO: 624764 - protein, 15 aa, Homo sapiens
  CDR3 for beta chain variable domain of TCR clone 312382 (TRBV5-1, TRBJ2-1)
CASSPPRAPYNEQFF

SEQ ID NO: 624765 - protein, 16 aa, Homo sapiens
  CDR3 for alpha chain variable domain of TCR clone 312383 (TRAV3, TRAJ32)
CCERRNYGGATNKLTF

SEQ ID NO: 624766 - protein, 13 aa, Homo sapiens
  CDR3 for beta chain variable domain of TCR clone 312383 (TRBV2, TRBJ1-1)
CASGEGGNTEAFF

SEQ ID NO: 624767 - protein, 15 aa, Homo sapiens
  CDR3 for alpha chain variable domain of TCR clone 312384 (TRAV17, TRAJ57)
CATGPSQGGSEKLFC

SEQ ID NO: 624768 - protein, 16 aa, Homo sapiens
  CDR3 for beta chain variable domain of TCR clone 312384 (TRBV12-4, TRBJ1-5)
CASSRPVGGSNQPQHF

SEQ ID NO: 624769 - protein, 13 aa, Homo sapiens
  CDR3 for alpha chain variable domain of TCR clone 312385 (TRAV35, TRAJ42)
CAGFPGTQGNLIF

SEQ ID NO: 624770 - protein, 14 aa, Homo sapiens
  CDR3 for beta chain variable domain of TCR clone 312385 (TRBV19, TRBJ2-1)
CASPTFVLSGEQFF

SEQ ID NO: 624771 - protein, 16 aa, Homo sapiens
  CDR3 for alpha chain variable domain of TCR clone 312386 (TRAV12-3, TRAJ53)
CTMSPGSGGSNYKLTF

SEQ ID NO: 624772 - protein, 15 aa, Homo sapiens
  CDR3 for beta chain variable domain of TCR clone 312386 (TRBV25-1, TRBJ1-4)
CASSKRIATNEKLFF

SEQ ID NO: 624773 - protein, 11 aa, Homo sapiens
  CDR3 for alpha chain variable domain of TCR clone 312387 (TRAV8-3, TRAJ15)
CAVGPGTALIF

SEQ ID NO: 624774 - protein, 14 aa, Homo sapiens
  CDR3 for beta chain variable domain of TCR clone 312387 (TRBV12-5, TRBJ2-5)
CASGSRTHQETQYF

SEQ ID NO: 624775 - protein, 15 aa, Homo sapiens
  CDR3 for alpha chain variable domain of TCR clone 312388 (TRAV38-1, TRAJ37)
CAFIHGSGNTGKLIF

SEQ ID NO: 624776 - protein, 12 aa, Homo sapiens
  CDR3 for beta chain variable domain of TCR clone 312388 (TRBV7-9, TRBJ1-4)
CASSTDREKLFF

SEQ ID NO: 624777 - protein, 14 aa, Homo sapiens
  CDR3 for alpha chain variable domain of TCR clone 312389 (TRAV12-2, TRAJ44)
CAVNPAGTASKLTF

SEQ ID NO: 624778 - protein, 15 aa, Homo sapiens
  CDR3 for beta chain variable domain of TCR clone 312389 (TRBV4-1, TRBJ1-4)
CASSDTGGTNEKLFF

SEQ ID NO: 624779 - protein, 13 aa, Homo sapiens
  CDR3 for alpha chain variable domain of TCR clone 312390 (TRAV17, TRAJ4)
CATKSGGYNKLIF

SEQ ID NO: 624780 - protein, 15 aa, Homo sapiens
  CDR3 for beta chain variable domain of TCR clone 312390 (TRBV20-1, TRBJ2-7)
CSARDRVSGMDEQYF

SEQ ID NO: 624781 - protein, 13 aa, Homo sapiens
  CDR3 for alpha chain variable domain of TCR clone 312391 (TRAV23/DV6, TRAJ15)
CAALPAGRNCSDL

SEQ ID NO: 624782 - protein, 18 aa, Homo sapiens
  CDR3 for beta chain variable domain of TCR clone 312391 (TRBV7-3, TRBJ2-3)
CASSSTGTYPGSTDTQYF

SEQ ID NO: 624783 - protein, 14 aa, Homo sapiens
  CDR3 for alpha chain variable domain of TCR clone 312392 (TRAV12-1, TRAJ30)
CVVNIGGRGDKIIF

SEQ ID NO: 624784 - protein, 14 aa, Homo sapiens
  CDR3 for beta chain variable domain of TCR clone 312392 (TRBV7-6, TRBJ2-3)
CASSLGTVTDTQYF

SEQ ID NO: 624785 - protein, 14 aa, Homo sapiens
  CDR3 for alpha chain variable domain of TCR clone 312393 (TRAV26-1, TRAJ38)
CIADNAGNNRKLIW

SEQ ID NO: 624786 - protein, 13 aa, Homo sapiens
  CDR3 for beta chain variable domain of TCR clone 312393 (TRBV4-1, TRBJ2-7)
SASSHGQAYEQYF

SEQ ID NO: 624787 - protein, 17 aa, Homo sapiens
  CDR3 for alpha chain variable domain of TCR clone 312394 (TRAV3, TRAJ6)
CAVRDGPRAGGSYIPTF

SEQ ID NO: 624788 - protein, 16 aa, Homo sapiens
  CDR3 for beta chain variable domain of TCR clone 312394 (TRBV27, TRBJ2-2)
CASSFRRLVRTGELFF

SEQ ID NO: 624789 - protein, 14 aa, Homo sapiens
  CDR3 for alpha chain variable domain of TCR clone 312395 (TRAV8-1, TRAJ22)
CAAPSSGSARQLTF

SEQ ID NO: 624790 - protein, 16 aa, Homo sapiens
  CDR3 for beta chain variable domain of TCR clone 312395 (TRBV12-4, TRBJ1-5)
CASSRPVGGSNQPQHF

SEQ ID NO: 624791 - protein, 18 aa, Homo sapiens
  CDR3 for alpha chain variable domain of TCR clone 312396 (TRAV26-2, TRAJ54)
CILRDVEVGIQGAQKLVF

SEQ ID NO: 624792 - protein, 16 aa, Homo sapiens
  CDR3 for beta chain variable domain of TCR clone 312396 (TRBV6-1, TRBJ2-5)
CASSETLDRGAETQFF

SEQ ID NO: 624793 - protein, 13 aa, Homo sapiens
  CDR3 for alpha chain variable domain of TCR clone 312397 (TRAV17, TRAJ9)
CATDYTGGFKTIF

SEQ ID NO: 624794 - protein, 12 aa, Homo sapiens
  CDR3 for beta chain variable domain of TCR clone 312397 (TRBV7-8, TRBJ2-7)
CASSLGDRGQYF

SEQ ID NO: 624795 - protein, 12 aa, Homo sapiens
  CDR3 for alpha chain variable domain of TCR clone 312398 (TRAV38-1, TRAJ32)
CAPVGATNKLIV

SEQ ID NO: 624796 - protein, 14 aa, Homo sapiens
  CDR3 for beta chain variable domain of TCR clone 312398 (TRBV29-1, TRBJ2-5)
CSVETSGSGETQYF

SEQ ID NO: 624797 - protein, 14 aa, Homo sapiens
  CDR3 for alpha chain variable domain of TCR clone 312399 (TRAV1-2, TRAJ8)
CAVREDTSFQKLVF

SEQ ID NO: 624798 - protein, 15 aa, Homo sapiens
  CDR3 for beta chain variable domain of TCR clone 312399 (TRBV20-1, TRBJ2-7)
CSARDRVSGMDEQYF

SEQ ID NO: 624799 - protein, 16 aa, Homo sapiens
  CDR3 for alpha chain variable domain of TCR clone 312400 (TRAV3, TRAJ37)
CAWRGKGSGNTGKLIF

SEQ ID NO: 624800 - protein, 13 aa, Homo sapiens
  CDR3 for beta chain variable domain of TCR clone 312400 (TRBV7-2, TRBJ2-2)
CASSSVRAGELFF

SEQ ID NO: 624801 - protein, 13 aa, Homo sapiens
  CDR3 for alpha chain variable domain of TCR clone 312401 (TRAV2, TRAJ15)
CAVASQAGTALIF

SEQ ID NO: 624802 - protein, 15 aa, Homo sapiens
  CDR3 for beta chain variable domain of TCR clone 312401 (TRBV20-1, TRBJ2-7)
CSARDRVSGMYEQYF

SEQ ID NO: 624803 - protein, 11 aa, Homo sapiens
  CDR3 for alpha chain variable domain of TCR clone 312402 (TRAV38-1, TRAJ15)
CASPGGTALIF

SEQ ID NO: 624804 - protein, 16 aa, Homo sapiens
  CDR3 for beta chain variable domain of TCR clone 312402 (TRBV19, TRBJ2-2)
CASRSPGTGATGELFF

SEQ ID NO: 624805 - protein, 16 aa, Homo sapiens
  CDR3 for alpha chain variable domain of TCR clone 312403 (TRAV3, TRAJ10)
CAVRDMRAGGGNKLTF

SEQ ID NO: 624806 - protein, 15 aa, Homo sapiens
  CDR3 for beta chain variable domain of TCR clone 312403 (TRBV3-1, TRBJ2-1)
CASSQQPSGGNEQFF

SEQ ID NO: 624807 - protein, 12 aa, Homo sapiens
  CDR3 for alpha chain variable domain of TCR clone 312404 (TRAV29/DV5, TRAJ29)
CASHSGNTPLVF

SEQ ID NO: 624808 - protein, 14 aa, Homo sapiens
  CDR3 for beta chain variable domain of TCR clone 312404 (TRBV19, TRBJ2-5)
CASSMTGQQETQYF

SEQ ID NO: 624809 - protein, 14 aa, Homo sapiens
  CDR3 for alpha chain variable domain of TCR clone 312405 (TRAV25, TRAJ35)
CARRMEGFGNVLHC

SEQ ID NO: 624810 - protein, 15 aa, Homo sapiens
  CDR3 for beta chain variable domain of TCR clone 312405 (TRBV11-2, TRBJ2-1)
CASSLGTSGLNEQFF

SEQ ID NO: 624811 - protein, 13 aa, Homo sapiens
  CDR3 for alpha chain variable domain of TCR clone 312406 (TRAV27, TRAJ42)
CAGARGSQGNLIF

SEQ ID NO: 624812 - protein, 14 aa, Homo sapiens
  CDR3 for beta chain variable domain of TCR clone 312406 (TRBV10-3, TRBJ2-2)
CHQDRREDTGELFF

SEQ ID NO: 624813 - protein, 15 aa, Homo sapiens
  CDR3 for alpha chain variable domain of TCR clone 312407 (TRAV2, TRAJ24)
CAVEVLTDSWGKYQF

SEQ ID NO: 624814 - protein, 16 aa, Homo sapiens
  CDR3 for beta chain variable domain of TCR clone 312407 (TRBV19, TRBJ2-1)
CASSMGSGRRSSSSCQ

SEQ ID NO: 624815 - protein, 12 aa, Homo sapiens
  CDR3 for alpha chain variable domain of TCR clone 312408 (TRAV27, TRAJ35)
CAGADFGNVLHC

SEQ ID NO: 624816 - protein, 12 aa, Homo sapiens
  CDR3 for beta chain variable domain of TCR clone 312408 (TRBV12-4, TRBJ1-2)
CASSFIWLHLRF

SEQ ID NO: 624817 - protein, 13 aa, Homo sapiens
  CDR3 for alpha chain variable domain of TCR clone 312409 (TRAV3, TRAJ3)
CAVADSSASKIIF

SEQ ID NO: 624818 - protein, 16 aa, Homo sapiens
  CDR3 for beta chain variable domain of TCR clone 312409 (TRBV5-1, TRBJ2-3)
CASSSGLAVYTDTQYF

SEQ ID NO: 624819 - protein, 15 aa, Homo sapiens
  CDR3 for alpha chain variable domain of TCR clone 312410 (TRAV8-3, TRAJ45)
CASSYSGGGADGLTF

SEQ ID NO: 624820 - protein, 16 aa, Homo sapiens
  CDR3 for beta chain variable domain of TCR clone 312410 (TRBV7-9, TRBJ2-2)
CASSGFGGANTGELFC

SEQ ID NO: 624821 - protein, 23 aa, Homo sapiens
  CDR3 for alpha chain variable domain of TCR clone 312411 (TRAV30, TRAJ29)
PAQLLRNLLLWHRAFSGNTPLVF

SEQ ID NO: 624822 - protein, 15 aa, Homo sapiens
  CDR3 for beta chain variable domain of TCR clone 312411 (TRBV5-1, TRBJ2-2)
CASSLFGHNTGELFF

SEQ ID NO: 624823 - protein, 12 aa, Homo sapiens
  CDR3 for alpha chain variable domain of TCR clone 312412 (TRAV12-2, TRAJ9)
CAVYNGGFKTIF

SEQ ID NO: 624824 - protein, 13 aa, Homo sapiens
  CDR3 for beta chain variable domain of TCR clone 312412 (TRBV7-2, TRBJ2-7)
CASSSPSGSEQYF

SEQ ID NO: 624825 - protein, 16 aa, Homo sapiens
  CDR3 for alpha chain variable domain of TCR clone 312413 (TRAV20, TRAJ22)
CAVRLVSSGSARQLTF

SEQ ID NO: 624826 - protein, 11 aa, Homo sapiens
  CDR3 for beta chain variable domain of TCR clone 312413 (TRBV12-4, TRBJ2-3)
CASTATDTQYF

SEQ ID NO: 624827 - protein, 14 aa, Homo sapiens
  CDR3 for alpha chain variable domain of TCR clone 312414 (TRAV12-2, TRAJ13)
CDVKKTGGYQKVTF

SEQ ID NO: 624828 - protein, 15 aa, Homo sapiens
  CDR3 for beta chain variable domain of TCR clone 312414 (TRBV27, TRBJ2-1)
CASSNGGGSSKEQFF

SEQ ID NO: 624829 - protein, 16 aa, Homo sapiens
  CDR3 for alpha chain variable domain of TCR clone 312415 (TRAV8-2, TRAJ48)
CVVSDVSNFGNEKLTF

SEQ ID NO: 624830 - protein, 14 aa, Homo sapiens
  CDR3 for beta chain variable domain of TCR clone 312415 (TRBV7-2, TRBJ2-7)
CASSLYPWRYEQYF

SEQ ID NO: 624831 - protein, 14 aa, Homo sapiens
  CDR3 for alpha chain variable domain of TCR clone 312416 (TRAV8-2, TRAJ4)
CVVSHSGGYNKLIF

SEQ ID NO: 624832 - protein, 12 aa, Homo sapiens
  CDR3 for beta chain variable domain of TCR clone 312416 (TRBV11-2, TRBJ2-2)
CASSLPTGELFF

SEQ ID NO: 624833 - protein, 16 aa, Homo sapiens
  CDR3 for alpha chain variable domain of TCR clone 312417 (TRAV8-2, TRAJ48)
CVVSDVSNFGNEKLTF

SEQ ID NO: 624834 - protein, 12 aa, Homo sapiens
  CDR3 for beta chain variable domain of TCR clone 312417 (TRBV11-2, TRBJ2-2)
CASSLPTGELFF

SEQ ID NO: 624835 - protein, 15 aa, Homo sapiens
  CDR3 for alpha chain variable domain of TCR clone 312418 (TRAV26-1, TRAJ40)
CIVRAVPSGTNKYIF

SEQ ID NO: 624836 - protein, 14 aa, Homo sapiens
  CDR3 for beta chain variable domain of TCR clone 312418 (TRBV19, TRBJ2-1)
CASKDPGLANEQFF

SEQ ID NO: 624837 - protein, 12 aa, Homo sapiens
  CDR3 for alpha chain variable domain of TCR clone 312419 (TRAV13-2, TRAJ8)
CAPWPGFQKLVF

SEQ ID NO: 624838 - protein, 14 aa, Homo sapiens
  CDR3 for beta chain variable domain of TCR clone 312419 (TRBV18, TRBJ1-5)
CASSRQQRNQPQHF

SEQ ID NO: 624839 - protein, 14 aa, Homo sapiens
  CDR3 for alpha chain variable domain of TCR clone 312420 (TRAV3, TRAJ30)
CAVRDIARDDKIIF

SEQ ID NO: 624840 - protein, 15 aa, Homo sapiens
  CDR3 for beta chain variable domain of TCR clone 312420 (TRBV10-3, TRBJ1-1)
CAISEAGTGGTEAFF

SEQ ID NO: 624841 - protein, 11 aa, Homo sapiens
  CDR3 for alpha chain variable domain of TCR clone 312421 (TRAV3, TRAJ21)
CAVGNFNKFYF

SEQ ID NO: 624842 - protein, 17 aa, Homo sapiens
  CDR3 for beta chain variable domain of TCR clone 312421 (TRBV20-1, TRBJ2-2)
CSASGSGQGGLTGELFF

SEQ ID NO: 624843 - protein, 14 aa, Homo sapiens
  CDR3 for alpha chain variable domain of TCR clone 312422 (TRAV12-1, TRAJ17)
CVVNYKAAGNKLTF

SEQ ID NO: 624844 - protein, 15 aa, Homo sapiens
  CDR3 for beta chain variable domain of TCR clone 312422 (TRBV11-2, TRBJ2-1)
CQQLRSKAGDNEQFF

SEQ ID NO: 624845 - protein, 19 aa, Homo sapiens
  CDR3 for alpha chain variable domain of TCR clone 312423 (TRAV3, TRAJ6)
CAVRDRNPSRSGGSYIPTL

SEQ ID NO: 624846 - protein, 16 aa, Homo sapiens
  CDR3 for beta chain variable domain of TCR clone 312423 (TRBV6-1, TRBJ2-5)
CASSETLDRGAETQYF

SEQ ID NO: 624847 - protein, 13 aa, Homo sapiens
  CDR3 for alpha chain variable domain of TCR clone 312424 (TRAV20, TRAJ20)
CAVQAGSGYKLSF

SEQ ID NO: 624848 - protein, 17 aa, Homo sapiens
  CDR3 for beta chain variable domain of TCR clone 312424 (TRBV20-1, TRBJ2-1)
CSASSSGLAGSYNEQFF

SEQ ID NO: 624849 - protein, 13 aa, Homo sapiens
  CDR3 for alpha chain variable domain of TCR clone 312425 (TRAV26-2, TRAJ57)
CILSRGGSEKLVF

SEQ ID NO: 624850 - protein, 13 aa, Homo sapiens
  CDR3 for beta chain variable domain of TCR clone 312425 (TRBV28, TRBJ2-5)
CASSSRNQETQYF

SEQ ID NO: 624851 - protein, 14 aa, Homo sapiens
  CDR3 for alpha chain variable domain of TCR clone 312426 (TRAV1-2, TRAJ16)
CAVNRFSDGQKLLF

SEQ ID NO: 624852 - protein, 13 aa, Homo sapiens
  CDR3 for beta chain variable domain of TCR clone 312426 (TRBV14, TRBJ1-1)
CASIQEAGTEAFF

SEQ ID NO: 624853 - protein, 16 aa, Homo sapiens
  CDR3 for alpha chain variable domain of TCR clone 312427 (TRAV12-2, TRAJ28)
CAVITDSGAGSYKLTF

SEQ ID NO: 624854 - protein, 12 aa, Homo sapiens
  CDR3 for beta chain variable domain of TCR clone 312427 (TRBV9, TRBJ2-2)
CASSLVAGELFF

SEQ ID NO: 624855 - protein, 14 aa, Homo sapiens
  CDR3 for alpha chain variable domain of TCR clone 312428 (TRAV21, TRAJ23)
CAIMIYNQGGKLIF

SEQ ID NO: 624856 - protein, 18 aa, Homo sapiens
  CDR3 for beta chain variable domain of TCR clone 312428 (TRBV20-1, TRBJ2-6)
CSAEMTPTHGSGANVLTF

SEQ ID NO: 624857 - protein, 12 aa, Homo sapiens
  CDR3 for alpha chain variable domain of TCR clone 312429 (TRAV8-4, TRAJ31)
CAVSDSNARLMF

SEQ ID NO: 624858 - protein, 14 aa, Homo sapiens
  CDR3 for beta chain variable domain of TCR clone 312429 (TRBV20-1, TRBJ2-7)
CSAKRGRSSYEQSF

SEQ ID NO: 624859 - protein, 10 aa, Homo sapiens
  CDR3 for alpha chain variable domain of TCR clone 312430 (TRAV35, TRAJ41)
RSVRRNALNF

SEQ ID NO: 624860 - protein, 14 aa, Homo sapiens
  CDR3 for beta chain variable domain of TCR clone 312430 (TRBV20-1, TRBJ1-2)
CSASEQGAVYGYTF

SEQ ID NO: 624861 - protein, 12 aa, Homo sapiens
  CDR3 for alpha chain variable domain of TCR clone 312431 (TRAV1-1, TRAJ24)
CAVRGSWGKFQV

SEQ ID NO: 624862 - protein, 16 aa, Homo sapiens
  CDR3 for beta chain variable domain of TCR clone 312431 (TRBV27, TRBJ2-2)
CASSFRGLVRTGELFF

SEQ ID NO: 624863 - protein, 13 aa, Homo sapiens
  CDR3 for alpha chain variable domain of TCR clone 312432 (TRAV29/DV5, TRAJ31)
CAASRNNNARPMF

SEQ ID NO: 624864 - protein, 15 aa, Homo sapiens
  CDR3 for beta chain variable domain of TCR clone 312432 (TRBV9, TRBJ1-6)
CASSVAGTGDSPLHF

SEQ ID NO: 624865 - protein, 15 aa, Homo sapiens
  CDR3 for alpha chain variable domain of TCR clone 312433 (TRAV26-2, TRAJ13)
CILRDLSGGYQKVTF

SEQ ID NO: 624866 - protein, 13 aa, Homo sapiens
  CDR3 for beta chain variable domain of TCR clone 312433 (TRBV7-3, TRBJ1-1)
CASSQDWGAEAFF

SEQ ID NO: 624867 - protein, 14 aa, Homo sapiens
  CDR3 for alpha chain variable domain of TCR clone 312434 (TRAV20, TRAJ42)
CAVQAGGRQGNLIF

SEQ ID NO: 624868 - protein, 14 aa, Homo sapiens
  CDR3 for beta chain variable domain of TCR clone 312434 (TRBV28, TRBJ1-2)
CASRIQGANYGYTS

SEQ ID NO: 624869 - protein, 14 aa, Homo sapiens
  CDR3 for alpha chain variable domain of TCR clone 312435 (TRAV13-1, TRAJ44)
CAAKATGTASKLTF

SEQ ID NO: 624870 - protein, 15 aa, Homo sapiens
  CDR3 for beta chain variable domain of TCR clone 312435 (TRBV12-4, TRBJ1-2)
CASRLGVAGNYGYTF

SEQ ID NO: 624871 - protein, 12 aa, Homo sapiens
  CDR3 for alpha chain variable domain of TCR clone 312436 (TRAV16, TRAJ56)
CAPTGANSKLTF

SEQ ID NO: 624872 - protein, 17 aa, Homo sapiens
  CDR3 for beta chain variable domain of TCR clone 312436 (TRBV27, TRBJ2-6)
CASSLTGFSSGANVLTF

SEQ ID NO: 624873 - protein, 16 aa, Homo sapiens
  CDR3 for alpha chain variable domain of TCR clone 312437 (TRAV21, TRAJ37)
CAVRPAGSSNTGKLIF

SEQ ID NO: 624874 - protein, 13 aa, Homo sapiens
  CDR3 for beta chain variable domain of TCR clone 312437 (TRBV7-9, TRBJ2-5)
CASPPSGRETQYF

SEQ ID NO: 624875 - protein, 12 aa, Homo sapiens
  CDR3 for alpha chain variable domain of TCR clone 312438 (TRAV16, TRAJ57)
CALEGGSEKLVV

SEQ ID NO: 624876 - protein, 12 aa, Homo sapiens
  CDR3 for beta chain variable domain of TCR clone 312438 (TRBV28, TRBJ2-7)
CASSGRPYEQYF

SEQ ID NO: 624877 - protein, 15 aa, Homo sapiens
  CDR3 for alpha chain variable domain of TCR clone 312439 (TRAV12-3, TRAJ6)
CAMSAASGGSYITTF

SEQ ID NO: 624878 - protein, 13 aa, Homo sapiens
  CDR3 for beta chain variable domain of TCR clone 312439 (TRBV20-1, TRBJ1-2)
CSASTERIYGYTF

SEQ ID NO: 624879 - protein, 11 aa, Homo sapiens
  CDR3 for alpha chain variable domain of TCR clone 312440 (TRAV2, TRAJ21)
CAVFNFNKFYF

SEQ ID NO: 624880 - protein, 15 aa, Homo sapiens
  CDR3 for beta chain variable domain of TCR clone 312440 (TRBV19, TRBJ2-4)
CASRGPRRGENIQYF

SEQ ID NO: 624881 - protein, 13 aa, Homo sapiens
  CDR3 for alpha chain variable domain of TCR clone 312441 (TRAV12-3, TRAJ33)
CAMSVNSNYQLIC

SEQ ID NO: 624882 - protein, 13 aa, Homo sapiens
  CDR3 for beta chain variable domain of TCR clone 312441 (TRBV7-2, TRBJ2-2)
CTSSLAVTGELFF

SEQ ID NO: 624883 - protein, 19 aa, Homo sapiens
  CDR3 for alpha chain variable domain of TCR clone 312442 (TRAV26-1, TRAJ50)
CCVLLHRQNPKTSYDKVIF

SEQ ID NO: 624884 - protein, 14 aa, Homo sapiens
  CDR3 for beta chain variable domain of TCR clone 312442 (TRBV6-3, TRBJ1-1)
CASSYQRRDTEAFF

SEQ ID NO: 624885 - protein, 17 aa, Homo sapiens
  CDR3 for alpha chain variable domain of TCR clone 312443 (TRAV13-1, TRAJ52)
CAAGRNAGGTSYGKLTL

SEQ ID NO: 624886 - protein, 12 aa, Homo sapiens
  CDR3 for beta chain variable domain of TCR clone 312443 (TRBV29-1, TRBJ1-3)
CSTRDSGNTIYF

SEQ ID NO: 624887 - protein, 12 aa, Homo sapiens
  CDR3 for alpha chain variable domain of TCR clone 312444 (TRAV27, TRAJ13)
CAGAGGYQKVTF

SEQ ID NO: 624888 - protein, 14 aa, Homo sapiens
  CDR3 for beta chain variable domain of TCR clone 312444 (TRBV20-1, TRBJ2-6)
QCSDRGPGANVLTF

SEQ ID NO: 624889 - protein, 15 aa, Homo sapiens
  CDR3 for alpha chain variable domain of TCR clone 312445 (TRAV8-4, TRAJ3)
CAVTGENLVPQCFQD

SEQ ID NO: 624890 - protein, 15 aa, Homo sapiens
  CDR3 for beta chain variable domain of TCR clone 312445 (TRBV6-5, TRBJ2-1)
CASSYDAGAGNEQFF

SEQ ID NO: 624891 - protein, 14 aa, Homo sapiens
  CDR3 for alpha chain variable domain of TCR clone 312446 (TRAV2, TRAJ37)
CAVDFTSNKGKLIF

SEQ ID NO: 624892 - protein, 13 aa, Homo sapiens
  CDR3 for beta chain variable domain of TCR clone 312446 (TRBV4-1, TRBJ2-2)
CASSQENTGELFF

SEQ ID NO: 624893 - protein, 15 aa, Homo sapiens
  CDR3 for alpha chain variable domain of TCR clone 312447 (TRAV12-1, TRAJ44)
CVVDEYTDTASKLTF

SEQ ID NO: 624894 - protein, 14 aa, Homo sapiens
  CDR3 for beta chain variable domain of TCR clone 312447 (TRBV12-4, TRBJ1-1)
CASSLGTGGTEAFF

SEQ ID NO: 624895 - protein, 15 aa, Homo sapiens
  CDR3 for alpha chain variable domain of TCR clone 312448 (TRAV2, TRAJ11)
CAVGGWNSGYSTLTF

SEQ ID NO: 624896 - protein, 14 aa, Homo sapiens
  CDR3 for beta chain variable domain of TCR clone 312448 (TRBV20-1, TRBJ2-1)
CSAQIGGSANEQFF

SEQ ID NO: 624897 - protein, 16 aa, Homo sapiens
  CDR3 for alpha chain variable domain of TCR clone 312449 (TRAV30, TRAJ24)
CGTEIVDADSWGTFQL

SEQ ID NO: 624898 - protein, 14 aa, Homo sapiens
  CDR3 for beta chain variable domain of TCR clone 312449 (TRBV12-5, TRBJ2-5)
CASGSRTHQETQYF

SEQ ID NO: 624899 - protein, 12 aa, Homo sapiens
  CDR3 for alpha chain variable domain of TCR clone 312450 (TRAV17, TRAJ21)
CALRYNFNNFYF

SEQ ID NO: 624900 - protein, 13 aa, Homo sapiens
  CDR3 for beta chain variable domain of TCR clone 312450 (TRBV24-1, TRBJ2-5)
CATSTGGTETQYF

SEQ ID NO: 624901 - protein, 18 aa, Homo sapiens
  CDR3 for alpha chain variable domain of TCR clone 312451 (TRAV13-1, TRAJ52)
CAASKRSAGGTSYGKLTF

SEQ ID NO: 624902 - protein, 14 aa, Homo sapiens
  CDR3 for beta chain variable domain of TCR clone 312451 (TRBV7-2, TRBJ2-2)
CASSLNSNTGELFF

SEQ ID NO: 624903 - protein, 16 aa, Homo sapiens
  CDR3 for alpha chain variable domain of TCR clone 312452 (TRAV27, TRAJ53)
CAAPEGSGGSKYKLTF

SEQ ID NO: 624904 - protein, 14 aa, Homo sapiens
  CDR3 for beta chain variable domain of TCR clone 312452 (TRBV4-3, TRBJ1-5)
CASSQGGQGWPQHF

SEQ ID NO: 624905 - protein, 14 aa, Homo sapiens
  CDR3 for alpha chain variable domain of TCR clone 312453 (TRAV1-2, TRAJ16)
CAVNRFSGGQKLLF

SEQ ID NO: 624906 - protein, 14 aa, Homo sapiens
  CDR3 for beta chain variable domain of TCR clone 312453 (TRBV20-1, TRBJ1-1)
SAVLHLGGGTEAFF

SEQ ID NO: 624907 - protein, 14 aa, Homo sapiens
  CDR3 for alpha chain variable domain of TCR clone 312454 (TRAV1-2, TRAJ8)
CAVREDTGFQKLVF

SEQ ID NO: 624908 - protein, 19 aa, Homo sapiens
  CDR3 for beta chain variable domain of TCR clone 312454 (TRBV2, TRBJ2-7)
CASSDDETSGRANDYEQYF

SEQ ID NO: 624909 - protein, 14 aa, Homo sapiens
  CDR3 for alpha chain variable domain of TCR clone 312455 (TRAV26-1, TRAJ45)
CIVRVVGSADGLTF

SEQ ID NO: 624910 - protein, 16 aa, Homo sapiens
  CDR3 for beta chain variable domain of TCR clone 312455 (TRBV7-9, TRBJ1-1)
CASSLTQVRSNTEAFF

SEQ ID NO: 624911 - protein, 14 aa, Homo sapiens
  CDR3 for alpha chain variable domain of TCR clone 312456 (TRAV35, TRAJ22)
CAGLRPGSARQLTF

SEQ ID NO: 624912 - protein, 15 aa, Homo sapiens
  CDR3 for beta chain variable domain of TCR clone 312456 (TRBV7-2, TRBJ2-1)
CASGSRTSREDEQFF

SEQ ID NO: 624913 - protein, 11 aa, Homo sapiens
  CDR3 for alpha chain variable domain of TCR clone 312457 (TRAV3, TRAJ21)
CAVGNFNKFYF

SEQ ID NO: 624914 - protein, 16 aa, Homo sapiens
  CDR3 for beta chain variable domain of TCR clone 312457 (TRBV11-2, TRBJ2-7)
CASSLAPTGVNYEQYF

SEQ ID NO: 624915 - protein, 16 aa, Homo sapiens
  CDR3 for alpha chain variable domain of TCR clone 312458 (TRAV3, TRAJ37)
CAVRVRGSGNPGKLII

SEQ ID NO: 624916 - protein, 11 aa, Homo sapiens
  CDR3 for beta chain variable domain of TCR clone 312458 (TRBV11-2, TRBJ2-2)
CASSLPGELFF

SEQ ID NO: 624917 - protein, 13 aa, Homo sapiens
  CDR3 for alpha chain variable domain of TCR clone 312459 (TRAV4, TRAJ34)
CLVPPYNTDKLIF

SEQ ID NO: 624918 - protein, 15 aa, Homo sapiens
  CDR3 for beta chain variable domain of TCR clone 312459 (TRBV28, TRBJ2-3)
CASSPDRQGANTQYF

SEQ ID NO: 624919 - protein, 14 aa, Homo sapiens
  CDR3 for alpha chain variable domain of TCR clone 312460 (TRAV12-2, TRAJ13)
CAVKKTGGYPKVTF

SEQ ID NO: 624920 - protein, 12 aa, Homo sapiens
  CDR3 for beta chain variable domain of TCR clone 312460 (TRBV11-2, TRBJ2-2)
CASSLGGGELFF

SEQ ID NO: 624921 - protein, 17 aa, Homo sapiens
  CDR3 for alpha chain variable domain of TCR clone 312461 (TRAV23/DV6, TRAJ57)
CAASSTLSHGGSEKLVF

SEQ ID NO: 624922 - protein, 16 aa, Homo sapiens
  CDR3 for beta chain variable domain of TCR clone 312461 (TRBV2, TRBJ1-4)
CASNLLQGATNEKLFF

SEQ ID NO: 624923 - protein, 13 aa, Homo sapiens
  CDR3 for alpha chain variable domain of TCR clone 312462 (TRAV20, TRAJ37)
CAGCSSNTGKLIF

SEQ ID NO: 624924 - protein, 21 aa, Homo sapiens
  CDR3 for beta chain variable domain of TCR clone 312462 (TRBV4-2, TRBJ2-3)
PCSQKTRPFISVPAAPDTQYF

SEQ ID NO: 624925 - protein, 17 aa, Homo sapiens
  CDR3 for alpha chain variable domain of TCR clone 312463 (TRAV8-3, TRAJ34)
CAIPGKLIFGTGTRLQV

SEQ ID NO: 624926 - protein, 17 aa, Homo sapiens
  CDR3 for beta chain variable domain of TCR clone 312463 (TRBV7-3, TRBJ2-5)
CASSLGSGRSGSETQYF

SEQ ID NO: 624927 - protein, 16 aa, Homo sapiens
  CDR3 for alpha chain variable domain of TCR clone 312464 (TRAV3, TRAJ4)
CAVRPSPSGGYNKLIF

SEQ ID NO: 624928 - protein, 12 aa, Homo sapiens
  CDR3 for beta chain variable domain of TCR clone 312464 (TRBV7-9, TRBJ1-5)
CASSPQGQHQHF

SEQ ID NO: 624929 - protein, 14 aa, Homo sapiens
  CDR3 for alpha chain variable domain of TCR clone 312465 (TRAV12-1, TRAJ26)
CVVKGSNYGQNFVF

SEQ ID NO: 624930 - protein, 17 aa, Homo sapiens
  CDR3 for beta chain variable domain of TCR clone 312465 (TRBV11-2, TRBJ2-6)
CASSLRDIFSGANVLTF

SEQ ID NO: 624931 - protein, 14 aa, Homo sapiens
  CDR3 for alpha chain variable domain of TCR clone 312466 (TRAV1-2, TRAJ16)
CAVNRCSDGQKLLF

SEQ ID NO: 624932 - protein, 14 aa, Homo sapiens
  CDR3 for beta chain variable domain of TCR clone 312466 (TRBV7-9, TRBJ2-3)
CASSLEDGTDTQYF

SEQ ID NO: 624933 - protein, 14 aa, Homo sapiens
  CDR3 for alpha chain variable domain of TCR clone 312467 (TRAV12-1, TRAJ17)
CVVNYKAAGNKLTF

SEQ ID NO: 624934 - protein, 12 aa, Homo sapiens
  CDR3 for beta chain variable domain of TCR clone 312467 (TRBV6-3, TRBJ2-1)
CASSGSYNEQFF

SEQ ID NO: 624935 - protein, 13 aa, Homo sapiens
  CDR3 for alpha chain variable domain of TCR clone 312468 (TRAV13-1, TRAJ5)
CAASDTGRRALTF

SEQ ID NO: 624936 - protein, 15 aa, Homo sapiens
  CDR3 for beta chain variable domain of TCR clone 312468 (TRBV4-1, TRBJ1-4)
CASSDTGGTDEKLFF

SEQ ID NO: 624937 - protein, 15 aa, Homo sapiens
  CDR3 for alpha chain variable domain of TCR clone 312469 (TRAV20, TRAJ23)
CAVQAVRSQGGKLIF

SEQ ID NO: 624938 - protein, 16 aa, Homo sapiens
  CDR3 for beta chain variable domain of TCR clone 312469 (TRBV27, TRBJ2-7)
CASSKQGRGWAYEQYF

SEQ ID NO: 624939 - protein, 16 aa, Homo sapiens
  CDR3 for alpha chain variable domain of TCR clone 312470 (TRAV23/DV6, TRAJ13)
CAASFSFSGGYQKVTF

SEQ ID NO: 624940 - protein, 12 aa, Homo sapiens
  CDR3 for beta chain variable domain of TCR clone 312470 (TRBV14, TRBJ2-5)
RASSQLKETQYF

SEQ ID NO: 624941 - protein, 11 aa, Homo sapiens
  CDR3 for alpha chain variable domain of TCR clone 312471 (TRAV12-1, TRAJ21)
CVVNNFNKFYF

SEQ ID NO: 624942 - protein, 14 aa, Homo sapiens
  CDR3 for beta chain variable domain of TCR clone 312471 (TRBV18, TRBJ2-7)
CASSPRGGAYQQYF

SEQ ID NO: 624943 - protein, 14 aa, Homo sapiens
  CDR3 for alpha chain variable domain of TCR clone 312472 (TRAV8-1, TRAJ27)
CAVNVCTNAGKSTF

SEQ ID NO: 624944 - protein, 15 aa, Homo sapiens
  CDR3 for beta chain variable domain of TCR clone 312472 (TRBV11-3, TRBJ2-2)
CASSLGGRPTGELFF

SEQ ID NO: 624945 - protein, 12 aa, Homo sapiens
  CDR3 for alpha chain variable domain of TCR clone 312473 (TRAV13-2, TRAJ8)
CAPGLGFQKLVF

SEQ ID NO: 624946 - protein, 15 aa, Homo sapiens
  CDR3 for beta chain variable domain of TCR clone 312473 (TRBV19, TRBJ1-6)
CASSTQGAVGSPLHF

SEQ ID NO: 624947 - protein, 13 aa, Homo sapiens
  CDR3 for alpha chain variable domain of TCR clone 312474 (TRAV8-3, TRAJ6)
CAVGSGGSYITTF

SEQ ID NO: 624948 - protein, 14 aa, Homo sapiens
  CDR3 for beta chain variable domain of TCR clone 312474 (TRBV11-2, TRBJ1-1)
CASSTQRGRTEAFF

SEQ ID NO: 624949 - protein, 15 aa, Homo sapiens
  CDR3 for alpha chain variable domain of TCR clone 312475 (TRAV17, TRAJ22)
CATAPISGSARQLTF

SEQ ID NO: 624950 - protein, 16 aa, Homo sapiens
  CDR3 for beta chain variable domain of TCR clone 312475 (TRBV4-2, TRBJ2-1)
CASSQGEGRTVNEQFF

SEQ ID NO: 624951 - protein, 14 aa, Homo sapiens
  CDR3 for alpha chain variable domain of TCR clone 312476 (TRAV3, TRAJ36)
CAVRDGTGANNLFF

SEQ ID NO: 624952 - protein, 19 aa, Homo sapiens
  CDR3 for beta chain variable domain of TCR clone 312476 (TRBV19, TRBJ2-6)
CASTPTCGRAASGANVLTF

SEQ ID NO: 624953 - protein, 17 aa, Homo sapiens
  CDR3 for alpha chain variable domain of TCR clone 312477 (TRAV3, TRAJ28)
CAVREAYSGAGSYQLTF

SEQ ID NO: 624954 - protein, 19 aa, Homo sapiens
  CDR3 for beta chain variable domain of TCR clone 312477 (TRBV25-1, TRBJ2-2)
CAILVYRVDRGRKTGELFF

SEQ ID NO: 624955 - protein, 15 aa, Homo sapiens
  CDR3 for alpha chain variable domain of TCR clone 312478 (TRAV12-1, TRAJ15)
CVVTRATQAGTALIF

SEQ ID NO: 624956 - protein, 14 aa, Homo sapiens
  CDR3 for beta chain variable domain of TCR clone 312478 (TRBV5-1, TRBJ1-1)
CASSLVSINTEAFF

SEQ ID NO: 624957 - protein, 14 aa, Homo sapiens
  CDR3 for alpha chain variable domain of TCR clone 312479 (TRAV29/DV5, TRAJ44)
CAAFLVVTASKLTF

SEQ ID NO: 624958 - protein, 15 aa, Homo sapiens
  CDR3 for beta chain variable domain of TCR clone 312479 (TRBV7-3, TRBJ2-2)
CASSETGQGTGELFF

SEQ ID NO: 624959 - protein, 14 aa, Homo sapiens
  CDR3 for alpha chain variable domain of TCR clone 312480 (TRAV12-2, TRAJ4)
CDEDLSGGYNKLIF

SEQ ID NO: 624960 - protein, 13 aa, Homo sapiens
  CDR3 for beta chain variable domain of TCR clone 312480 (TRBV7-9, TRBJ1-2)
CASSLKQNYGYTF

SEQ ID NO: 624961 - protein, 12 aa, Homo sapiens
  CDR3 for alpha chain variable domain of TCR clone 312481 (TRAV17, TRAJ36)
CATVTGANNLFF

SEQ ID NO: 624962 - protein, 15 aa, Homo sapiens
  CDR3 for beta chain variable domain of TCR clone 312481 (TRBV19, TRBJ1-2)
CASSTKTDTNYGYTF

SEQ ID NO: 624963 - protein, 17 aa, Homo sapiens
  CDR3 for alpha chain variable domain of TCR clone 312482 (TRAV12-2, TRAJ36)
CAVKDNLFFGTGTRLTV

SEQ ID NO: 624964 - protein, 15 aa, Homo sapiens
  CDR3 for beta chain variable domain of TCR clone 312482 (TRBV28, TRBJ2-2)
CASTLAGANTGELFF

SEQ ID NO: 624965 - protein, 17 aa, Homo sapiens
  CDR3 for alpha chain variable domain of TCR clone 312483 (TRAV21, TRAJ24)
CAGIRLRSPDSWGKLQF

SEQ ID NO: 624966 - protein, 15 aa, Homo sapiens
  CDR3 for beta chain variable domain of TCR clone 312483 (TRBV7-2, TRBJ2-3)
CASSPRGLSTDTQYF

SEQ ID NO: 624967 - protein, 14 aa, Homo sapiens
  CDR3 for alpha chain variable domain of TCR clone 312484 (TRAV35, TRAJ10)
CAGILTGGGNKLTF

SEQ ID NO: 624968 - protein, 11 aa, Homo sapiens
  CDR3 for beta chain variable domain of TCR clone 312484 (TRBV7-8, TRBJ2-7)
CASSLSLEQYF

SEQ ID NO: 624969 - protein, 13 aa, Homo sapiens
  CDR3 for alpha chain variable domain of TCR clone 312485 (TRAV20, TRAJ42)
CAVQGGSQGNRIF

SEQ ID NO: 624970 - protein, 15 aa, Homo sapiens
  CDR3 for beta chain variable domain of TCR clone 312485 (TRBV10-1, TRBJ2-1)
CASSEWRGTYNEQFF

SEQ ID NO: 624971 - protein, 16 aa, Homo sapiens
  CDR3 for alpha chain variable domain of TCR clone 312486 (TRAV3, TRAJ37)
CAVRPHGSGNTGKLIF

SEQ ID NO: 624972 - protein, 16 aa, Homo sapiens
  CDR3 for beta chain variable domain of TCR clone 312486 (TRBV9, TRBJ1-2)
CASSVEEKVAHYGYTF

SEQ ID NO: 624973 - protein, 12 aa, Homo sapiens
  CDR3 for alpha chain variable domain of TCR clone 312487 (TRAV25, TRAJ48)
CAGDFGNEKLTF

SEQ ID NO: 624974 - protein, 12 aa, Homo sapiens
  CDR3 for beta chain variable domain of TCR clone 312487 (TRBV2, TRBJ2-5)
CASREYGETQYF

SEQ ID NO: 624975 - protein, 13 aa, Homo sapiens
  CDR3 for alpha chain variable domain of TCR clone 312488 (TRAV2, TRAJ29)
CAAGNSGNTPLVF

SEQ ID NO: 624976 - protein, 18 aa, Homo sapiens
  CDR3 for beta chain variable domain of TCR clone 312488 (TRBV7-9, TRBJ1-2)
CASSPGGGGYKLWLHLRF

SEQ ID NO: 624977 - protein, 16 aa, Homo sapiens
  CDR3 for alpha chain variable domain of TCR clone 312489 (TRAV27, TRAJ48)
TAAQPGDTGLYLPLTF

SEQ ID NO: 624978 - protein, 14 aa, Homo sapiens
  CDR3 for beta chain variable domain of TCR clone 312489 (TRBV25-1, TRBJ2-7)
CASSEYGRGYERYF

SEQ ID NO: 624979 - protein, 13 aa, Homo sapiens
  CDR3 for alpha chain variable domain of TCR clone 312490 (TRAV24, TRAJ42)
CAFSTGSQGNLIF

SEQ ID NO: 624980 - protein, 13 aa, Homo sapiens
  CDR3 for beta chain variable domain of TCR clone 312490 (TRBV27, TRBJ2-7)
CASSLTTGYEQYF

SEQ ID NO: 624981 - protein, 15 aa, Homo sapiens
  CDR3 for alpha chain variable domain of TCR clone 312491 (TRAV26-1, TRAJ29)
CIVRVEGSGNTPLVF

SEQ ID NO: 624982 - protein, 12 aa, Homo sapiens
  CDR3 for beta chain variable domain of TCR clone 312491 (TRBV5-8, TRBJ1-2)
CASSFGVYGYTF

SEQ ID NO: 624983 - protein, 17 aa, Homo sapiens
  CDR3 for alpha chain variable domain of TCR clone 312492 (TRAV3, TRAJ6)
CAVRDGPRAGGSHIPTF

SEQ ID NO: 624984 - protein, 14 aa, Homo sapiens
  CDR3 for beta chain variable domain of TCR clone 312492 (TRBV7-2, TRBJ2-7)
CASSPKTRFYEQYF

SEQ ID NO: 624985 - protein, 14 aa, Homo sapiens
  CDR3 for alpha chain variable domain of TCR clone 312493 (TRAV17, TRAJ32)
CATDPGGATNKLIF

SEQ ID NO: 624986 - protein, 14 aa, Homo sapiens
  CDR3 for beta chain variable domain of TCR clone 312493 (TRBV2, TRBJ1-5)
CASSEHRGGQPQHF

SEQ ID NO: 624987 - protein, 17 aa, Homo sapiens
  CDR3 for alpha chain variable domain of TCR clone 312494 (TRAV3, TRAJ42)
CAVRDRDYGGSQGNLIF

SEQ ID NO: 624988 - protein, 16 aa, Homo sapiens
  CDR3 for beta chain variable domain of TCR clone 312494 (TRBV5-7, TRBJ2-5)
CASIRGQTGYQETQYF

SEQ ID NO: 624989 - protein, 13 aa, Homo sapiens
  CDR3 for alpha chain variable domain of TCR clone 312495 (TRAV20, TRAJ34)
CAVSSYNTDKLIF

SEQ ID NO: 624990 - protein, 15 aa, Homo sapiens
  CDR3 for beta chain variable domain of TCR clone 312495 (TRBV20-1, TRBJ1-2)
CSAAGEGARIYGFTF

SEQ ID NO: 624991 - protein, 14 aa, Homo sapiens
  CDR3 for alpha chain variable domain of TCR clone 312496 (TRAV27, TRAJ23)
CAGLSYNQGGKLIF

SEQ ID NO: 624992 - protein, 15 aa, Homo sapiens
  CDR3 for beta chain variable domain of TCR clone 312496 (TRBV19, TRBJ2-2)
CASSLNREVNGELFF

SEQ ID NO: 624993 - protein, 14 aa, Homo sapiens
  CDR3 for alpha chain variable domain of TCR clone 312497 (TRAV12-1, TRAJ29)
CVVNEGSGNTPLVF

SEQ ID NO: 624994 - protein, 13 aa, Homo sapiens
  CDR3 for beta chain variable domain of TCR clone 312497 (TRBV7-9, TRBJ2-3)
CASRPGSTDTQYF

SEQ ID NO: 624995 - protein, 15 aa, Homo sapiens
  CDR3 for alpha chain variable domain of TCR clone 312498 (TRAV12-1, TRAJ4)
CVVNGFSGGYNKLIF

SEQ ID NO: 624996 - protein, 15 aa, Homo sapiens
  CDR3 for beta chain variable domain of TCR clone 312498 (TRBV5-1, TRBJ2-1)
CASTGSGRTYNEQFF

SEQ ID NO: 624997 - protein, 15 aa, Homo sapiens
  CDR3 for alpha chain variable domain of TCR clone 312499 (TRAV3, TRAJ36)
CAVRASQTGANNLFF

SEQ ID NO: 624998 - protein, 15 aa, Homo sapiens
  CDR3 for beta chain variable domain of TCR clone 312499 (TRBV3-1, TRBJ2-1)
CASSQNYTPRGEQFF

SEQ ID NO: 624999 - protein, 12 aa, Homo sapiens
  CDR3 for alpha chain variable domain of TCR clone 312500 (TRAV2, TRAJ9)
CAVGAGGFKTIF

SEQ ID NO: 625000 - protein, 13 aa, Homo sapiens
  CDR3 for beta chain variable domain of TCR clone 312500 (TRBV12-4, TRBJ1-2)
CASSLRQGKGYTF

SEQ ID NO: 625001 - protein, 11 aa, Homo sapiens
  CDR3 for alpha chain variable domain of TCR clone 312501 (TRAV17, TRAJ39)
CATNPYNMLTF

SEQ ID NO: 625002 - protein, 13 aa, Homo sapiens
  CDR3 for beta chain variable domain of TCR clone 312501 (TRBV7-8, TRBJ2-1)
CASTRGAVDEQFF

SEQ ID NO: 625003 - protein, 13 aa, Homo sapiens
  CDR3 for alpha chain variable domain of TCR clone 312502 (TRAV26-1, TRAJ39)
CIVRVVAGNMLTF

SEQ ID NO: 625004 - protein, 14 aa, Homo sapiens
  CDR3 for beta chain variable domain of TCR clone 312502 (TRBV20-1, TRBJ2-5)
GSARRQGIRETQYF

SEQ ID NO: 625005 - protein, 15 aa, Homo sapiens
  CDR3 for alpha chain variable domain of TCR clone 312503 (TRAV12-3, TRAJ6)
CAMSATTGGSYIPTF

SEQ ID NO: 625006 - protein, 17 aa, Homo sapiens
  CDR3 for beta chain variable domain of TCR clone 312503 (TRBV14, TRBJ2-5)
CASSQASGRPSTSGQAR

SEQ ID NO: 625007 - protein, 11 aa, Homo sapiens
  CDR3 for alpha chain variable domain of TCR clone 312504 (TRAV13-1, TRAJ30)
FAASRDDKIIF

SEQ ID NO: 625008 - protein, 15 aa, Homo sapiens
  CDR3 for beta chain variable domain of TCR clone 312504 (TRBV18, TRBJ1-1)
CASSPSSWVNTEAFF

SEQ ID NO: 625009 - protein, 11 aa, Homo sapiens
  CDR3 for alpha chain variable domain of TCR clone 312505 (TRAV8-4, TRAJ20)
CAVTNVLTTTS

SEQ ID NO: 625010 - protein, 15 aa, Homo sapiens
  CDR3 for beta chain variable domain of TCR clone 312505 (TRBV12-4, TRBJ2-5)
CASSPPTGLQETQYF

SEQ ID NO: 625011 - protein, 16 aa, Homo sapiens
  CDR3 for alpha chain variable domain of TCR clone 312506 (TRAV30, TRAJ24)
CGTEIVDADSWGKFQF

SEQ ID NO: 625012 - protein, 12 aa, Homo sapiens
  CDR3 for beta chain variable domain of TCR clone 312506 (TRBV11-2, TRBJ2-2)
CPSSLGGGELFF

SEQ ID NO: 625013 - protein, 14 aa, Homo sapiens
  CDR3 for alpha chain variable domain of TCR clone 312507 (TRAV12-3, TRAJ9)
CAMSPNTRGFKTIF

SEQ ID NO: 625014 - protein, 12 aa, Homo sapiens
  CDR3 for beta chain variable domain of TCR clone 312507 (TRBV19, TRBJ1-5)
CARSIAQQPQHF

SEQ ID NO: 625015 - protein, 15 aa, Homo sapiens
  CDR3 for alpha chain variable domain of TCR clone 312508 (TRAV8-2, TRAJ16)
GVVSDGFSEGQKLLF

SEQ ID NO: 625016 - protein, 12 aa, Homo sapiens
  CDR3 for beta chain variable domain of TCR clone 312508 (TRBV12-4, TRBJ2-7)
CASSLGGYEQYF

SEQ ID NO: 625017 - protein, 14 aa, Homo sapiens
  CDR3 for alpha chain variable domain of TCR clone 312509 (TRAV1-1, TRAJ27)
CAVIYNTNAGKSTF

SEQ ID NO: 625018 - protein, 15 aa, Homo sapiens
  CDR3 for beta chain variable domain of TCR clone 312509 (TRBV6-3, TRBJ2-7)
CAISSPGTVFYEQYF

SEQ ID NO: 625019 - protein, 12 aa, Homo sapiens
  CDR3 for alpha chain variable domain of TCR clone 312510 (TRAV12-2, TRAJ49)
CAGLNTGKQFDF

SEQ ID NO: 625020 - protein, 14 aa, Homo sapiens
  CDR3 for beta chain variable domain of TCR clone 312510 (TRBV5-4, TRBJ2-3)
CASSLGQGADTQYF

SEQ ID NO: 625021 - protein, 14 aa, Homo sapiens
  CDR3 for alpha chain variable domain of TCR clone 312511 (TRAV3, TRAJ6)
CAVRDPWGSYIPTF

SEQ ID NO: 625022 - protein, 16 aa, Homo sapiens
  CDR3 for beta chain variable domain of TCR clone 312511 (TRBV27, TRBJ2-5)
CASSLSRTAGGETQYF

SEQ ID NO: 625023 - protein, 13 aa, Homo sapiens
  CDR3 for alpha chain variable domain of TCR clone 312512 (TRAV2, TRAJ15)
CAVASQAGTALIF

SEQ ID NO: 625024 - protein, 13 aa, Homo sapiens
  CDR3 for beta chain variable domain of TCR clone 312512 (TRBV14, TRBJ1-2)
CASSEDRRYGYTF

SEQ ID NO: 625025 - protein, 13 aa, Homo sapiens
  CDR3 for alpha chain variable domain of TCR clone 312513 (TRAV8-1, TRAJ23)
CAWRDNQGGKLIF

SEQ ID NO: 625026 - protein, 12 aa, Homo sapiens
  CDR3 for beta chain variable domain of TCR clone 312513 (TRBV11-2, TRBJ2-2)
CASSLGGGELFF

SEQ ID NO: 625027 - protein, 10 aa, Homo sapiens
  CDR3 for alpha chain variable domain of TCR clone 312514 (TRAV12-1, TRAJ41)
CVVPELKFRV

SEQ ID NO: 625028 - protein, 16 aa, Homo sapiens
  CDR3 for beta chain variable domain of TCR clone 312514 (TRBV19, TRBJ2-1)
CASSKAGPSSYNEQFF

SEQ ID NO: 625029 - protein, 14 aa, Homo sapiens
  CDR3 for alpha chain variable domain of TCR clone 312515 (TRAV26-1, TRAJ39)
CIVRGSRAGNMLTS

SEQ ID NO: 625030 - protein, 15 aa, Homo sapiens
  CDR3 for beta chain variable domain of TCR clone 312515 (TRBV7-9, TRBJ1-5)
CASSQGHQPNQPQHS

SEQ ID NO: 625031 - protein, 14 aa, Homo sapiens
  CDR3 for alpha chain variable domain of TCR clone 312516 (TRAV1-2, TRAJ15)
CAVRDRQAGTALIF

SEQ ID NO: 625032 - protein, 16 aa, Homo sapiens
  CDR3 for beta chain variable domain of TCR clone 312516 (TRBV11-2, TRBJ2-3)
CASSSRTSGGAGTQYF

SEQ ID NO: 625033 - protein, 14 aa, Homo sapiens
  CDR3 for alpha chain variable domain of TCR clone 312517 (TRAV26-2, TRAJ40)
CCVGYGGATNKLIF

SEQ ID NO: 625034 - protein, 13 aa, Homo sapiens
  CDR3 for beta chain variable domain of TCR clone 312517 (TRBV19, TRBJ2-5)
CASSMGGAGTQYF

SEQ ID NO: 625035 - protein, 10 aa, Homo sapiens
  CDR3 for alpha chain variable domain of TCR clone 312518 (TRAV14/DV4, TRAJ32)
PLTPTNKLIF

SEQ ID NO: 625036 - protein, 14 aa, Homo sapiens
  CDR3 for beta chain variable domain of TCR clone 312518 (TRBV28, TRBJ2-1)
CASSLVAPYNEQFF

SEQ ID NO: 625037 - protein, 15 aa, Homo sapiens
  CDR3 for alpha chain variable domain of TCR clone 312519 (TRAV20, TRAJ53)
CAVQASGGSNYKLTL

SEQ ID NO: 625038 - protein, 12 aa, Homo sapiens
  CDR3 for beta chain variable domain of TCR clone 312519 (TRBV7-8, TRBJ2-7)
CASGLSDIGQYF

SEQ ID NO: 625039 - protein, 14 aa, Homo sapiens
  CDR3 for alpha chain variable domain of TCR clone 312520 (TRAV38-1, TRAJ40)
CALRPTSGTYKYIF

SEQ ID NO: 625040 - protein, 14 aa, Homo sapiens
  CDR3 for beta chain variable domain of TCR clone 312520 (TRBV18, TRBJ2-7)
CASSSRTLAYEQYF

SEQ ID NO: 625041 - protein, 13 aa, Homo sapiens
  CDR3 for alpha chain variable domain of TCR clone 312521 (TRAV13-2, TRAJ48)
CAEMDFGNEKLTF

SEQ ID NO: 625042 - protein, 14 aa, Homo sapiens
  CDR3 for beta chain variable domain of TCR clone 312521 (TRBV7-3, TRBJ2-1)
CASSLAGGTNEQFF

SEQ ID NO: 625043 - protein, 16 aa, Homo sapiens
  CDR3 for alpha chain variable domain of TCR clone 312522 (TRAV21, TRAJ52)
CAVTNAGGTSYGKLTF

SEQ ID NO: 625044 - protein, 15 aa, Homo sapiens
  CDR3 for beta chain variable domain of TCR clone 312522 (TRBV2, TRBJ2-1)
CASSELAGSYNEQFF

SEQ ID NO: 625045 - protein, 13 aa, Homo sapiens
  CDR3 for alpha chain variable domain of TCR clone 312523 (TRAV39, TRAJ58)
CAGEETSGSRLTF

SEQ ID NO: 625046 - protein, 13 aa, Homo sapiens
  CDR3 for beta chain variable domain of TCR clone 312523 (TRBV15, TRBJ2-7)
CATSTTGHFEQYF

SEQ ID NO: 625047 - protein, 13 aa, Homo sapiens
  CDR3 for alpha chain variable domain of TCR clone 312524 (TRAV8-6, TRAJ5)
CAVLDTGRRALTV

SEQ ID NO: 625048 - protein, 12 aa, Homo sapiens
  CDR3 for beta chain variable domain of TCR clone 312524 (TRBV7-9, TRBJ1-6)
CASSASESPLHF

SEQ ID NO: 625049 - protein, 14 aa, Homo sapiens
  CDR3 for alpha chain variable domain of TCR clone 312525 (TRAV21, TRAJ38)
CAVMGTGNNRKLIW

SEQ ID NO: 625050 - protein, 13 aa, Homo sapiens
  CDR3 for beta chain variable domain of TCR clone 312525 (TRBV7-3, TRBJ2-5)
CASSIGFFETQYF

SEQ ID NO: 625051 - protein, 13 aa, Homo sapiens
  CDR3 for alpha chain variable domain of TCR clone 312526 (TRAV13-1, TRAJ21)
CAASIYNFNKFYF

SEQ ID NO: 625052 - protein, 13 aa, Homo sapiens
  CDR3 for beta chain variable domain of TCR clone 312526 (TRBV27, TRBJ1-4)
CDSSLMGDEKLFL

SEQ ID NO: 625053 - protein, 11 aa, Homo sapiens
  CDR3 for alpha chain variable domain of TCR clone 312527 (TRAV27, TRAJ43)
CAGANNNDMRF

SEQ ID NO: 625054 - protein, 14 aa, Homo sapiens
  CDR3 for beta chain variable domain of TCR clone 312527 (TRBV4-1, TRBJ2-2)
CASSQAVNTGELFF

SEQ ID NO: 625055 - protein, 16 aa, Homo sapiens
  CDR3 for alpha chain variable domain of TCR clone 312528 (TRAV23/DV6, TRAJ12)
CAAIDLGAMDSSYKLL

SEQ ID NO: 625056 - protein, 12 aa, Homo sapiens
  CDR3 for beta chain variable domain of TCR clone 312528 (TRBV10-3, TRBJ2-2)
CAIRENTGELFF

SEQ ID NO: 625057 - protein, 12 aa, Homo sapiens
  CDR3 for alpha chain variable domain of TCR clone 312529 (TRAV13-2, TRAJ8)
CAAWLGFQKLVF

SEQ ID NO: 625058 - protein, 12 aa, Homo sapiens
  CDR3 for beta chain variable domain of TCR clone 312529 (TRBV11-2, TRBJ2-2)
CASSLPTGELFF

SEQ ID NO: 625059 - protein, 13 aa, Homo sapiens
  CDR3 for alpha chain variable domain of TCR clone 312530 (TRAV2, TRAJ40)
CAVVTSGTYKYIF

SEQ ID NO: 625060 - protein, 17 aa, Homo sapiens
  CDR3 for beta chain variable domain of TCR clone 312530 (TRBV28, TRBJ2-7)
CASSPLPAGGKSYEQYF

SEQ ID NO: 625061 - protein, 15 aa, Homo sapiens
  CDR3 for alpha chain variable domain of TCR clone 312531 (TRAV3, TRAJ4)
CAVRDGTGGYNKLIF

SEQ ID NO: 625062 - protein, 11 aa, Homo sapiens
  CDR3 for beta chain variable domain of TCR clone 312531 (TRBV20-1, TRBJ2-5)
CGADRAETQYF

SEQ ID NO: 625063 - protein, 12 aa, Homo sapiens
  CDR3 for alpha chain variable domain of TCR clone 312532 (TRAV25, TRAJ42)
CAGGGSQGNLIF

SEQ ID NO: 625064 - protein, 14 aa, Homo sapiens
  CDR3 for beta chain variable domain of TCR clone 312532 (TRBV7-2, TRBJ2-7)
CASSLYPWRYEQYF

SEQ ID NO: 625065 - protein, 14 aa, Homo sapiens
  CDR3 for alpha chain variable domain of TCR clone 312533 (TRAV27, TRAJ15)
CAGFDNQAGTALIF

SEQ ID NO: 625066 - protein, 11 aa, Homo sapiens
  CDR3 for beta chain variable domain of TCR clone 312533 (TRBV29-1, TRBJ1-1)
CSVEVGTRTFF

SEQ ID NO: 625067 - protein, 15 aa, Homo sapiens
  CDR3 for alpha chain variable domain of TCR clone 312534 (TRAV8-4, TRAJ37)
CAVTYGSSNTGKLIF

SEQ ID NO: 625068 - protein, 16 aa, Homo sapiens
  CDR3 for beta chain variable domain of TCR clone 312534 (TRBV20-1, TRBJ2-4)
CSATSLAELAKNIQYF

SEQ ID NO: 625069 - protein, 18 aa, Homo sapiens
  CDR3 for alpha chain variable domain of TCR clone 312535 (TRAV13-1, TRAJ52)
CAAKNPNDGGTSYGKLTF

SEQ ID NO: 625070 - protein, 13 aa, Homo sapiens
  CDR3 for beta chain variable domain of TCR clone 312535 (TRBV2, TRBJ1-1)
CASSEGGNTEAFF

SEQ ID NO: 625071 - protein, 15 aa, Homo sapiens
  CDR3 for alpha chain variable domain of TCR clone 312536 (TRAV30, TRAJ32)
CGTEILGGATNKLIF

SEQ ID NO: 625072 - protein, 14 aa, Homo sapiens
  CDR3 for beta chain variable domain of TCR clone 312536 (TRBV5-4, TRBJ1-1)
CASSLDSRRDEAFF

SEQ ID NO: 625073 - protein, 12 aa, Homo sapiens
  CDR3 for alpha chain variable domain of TCR clone 312537 (TRAV8-3, TRAJ26)
CAGDNYGQNFVF

SEQ ID NO: 625074 - protein, 15 aa, Homo sapiens
  CDR3 for beta chain variable domain of TCR clone 312537 (TRBV7-9, TRBJ1-4)
CASSARTGGNEKLFF

SEQ ID NO: 625075 - protein, 13 aa, Homo sapiens
  CDR3 for alpha chain variable domain of TCR clone 312538 (TRAV1-2, TRAJ9)
CAALNTGGFKTIF

SEQ ID NO: 625076 - protein, 20 aa, Homo sapiens
  CDR3 for beta chain variable domain of TCR clone 312538 (TRBV28, TRBJ2-1)
CVSTPIGRSPGLAGGNEQFF

SEQ ID NO: 625077 - protein, 11 aa, Homo sapiens
  CDR3 for alpha chain variable domain of TCR clone 312539 (TRAV1-1, TRAJ30)
CAVSRDDKIIF

SEQ ID NO: 625078 - protein, 12 aa, Homo sapiens
  CDR3 for beta chain variable domain of TCR clone 312539 (TRBV2, TRBJ2-1)
CAYGPPGNEQFF

SEQ ID NO: 625079 - protein, 13 aa, Homo sapiens
  CDR3 for alpha chain variable domain of TCR clone 312540 (TRAV12-3, TRAJ9)
CAMRNTGGFKTTF

SEQ ID NO: 625080 - protein, 14 aa, Homo sapiens
  CDR3 for beta chain variable domain of TCR clone 312540 (TRBV11-2, TRBJ2-7)
CANSSTGEGYEQYF

SEQ ID NO: 625081 - protein, 16 aa, Homo sapiens
  CDR3 for alpha chain variable domain of TCR clone 312541 (TRAV8-3, TRAJ47)
CAVGEAGQEYGNKLVF

SEQ ID NO: 625082 - protein, 13 aa, Homo sapiens
  CDR3 for beta chain variable domain of TCR clone 312541 (TRBV19, TRBJ1-1)
CASSIGPQAEAFF

SEQ ID NO: 625083 - protein, 14 aa, Homo sapiens
  CDR3 for alpha chain variable domain of TCR clone 312542 (TRAV2, TRAJ9)
CAVEDRSGGFKTIF

SEQ ID NO: 625084 - protein, 19 aa, Homo sapiens
  CDR3 for beta chain variable domain of TCR clone 312542 (TRBV25-1, TRBJ2-2)
CAILVCRVDRGRKTGELFF

SEQ ID NO: 625085 - protein, 15 aa, Homo sapiens
  CDR3 for alpha chain variable domain of TCR clone 312543 (TRAV21, TRAJ24)
CAARSSTDSWGNLQF

SEQ ID NO: 625086 - protein, 15 aa, Homo sapiens
  CDR3 for beta chain variable domain of TCR clone 312543 (TRBV20-1, TRBJ1-1)
CSASRGVTGNTEAFF

SEQ ID NO: 625087 - protein, 12 aa, Homo sapiens
  CDR3 for alpha chain variable domain of TCR clone 312544 (TRAV13-1, TRAJ48)
CAANFGNEKLTF

SEQ ID NO: 625088 - protein, 14 aa, Homo sapiens
  CDR3 for beta chain variable domain of TCR clone 312544 (TRBV9, TRBJ1-2)
CASSVSTRSYSYTF

SEQ ID NO: 625089 - protein, 17 aa, Homo sapiens
  CDR3 for alpha chain variable domain of TCR clone 312545 (TRAV3, TRAJ6)
CAVRDGPRAGGSYIPTF

SEQ ID NO: 625090 - protein, 20 aa, Homo sapiens
  CDR3 for beta chain variable domain of TCR clone 312545 (TRBV28, TRBJ2-1)
CASTPIGRSPGLAAGNEQFF

SEQ ID NO: 625091 - protein, 14 aa, Homo sapiens
  CDR3 for alpha chain variable domain of TCR clone 312546 (TRAV21, TRAJ38)
CAVMGAGNNRKLIW

SEQ ID NO: 625092 - protein, 13 aa, Homo sapiens
  CDR3 for beta chain variable domain of TCR clone 312546 (TRBV7-3, TRBJ2-5)
CASSSGFFETQYF

SEQ ID NO: 625093 - protein, 12 aa, Homo sapiens
  CDR3 for alpha chain variable domain of TCR clone 312547 (TRAV26-1, TRAJ17)
CIVRSAGNKLTF

SEQ ID NO: 625094 - protein, 16 aa, Homo sapiens
  CDR3 for beta chain variable domain of TCR clone 312547 (TRBV6-5, TRBJ2-7)
CASSYFKVGISDEQYF

SEQ ID NO: 625095 - protein, 15 aa, Homo sapiens
  CDR3 for alpha chain variable domain of TCR clone 312548 (TRAV23/DV6, TRAJ3)
CAATTFALGGAVLPI

SEQ ID NO: 625096 - protein, 15 aa, Homo sapiens
  CDR3 for beta chain variable domain of TCR clone 312548 (TRBV19, TRBJ1-6)
CASSTQGAVGSPLHF

SEQ ID NO: 625097 - protein, 14 aa, Homo sapiens
  CDR3 for alpha chain variable domain of TCR clone 312549 (TRAV8-3, TRAJ27)
CAGGRNTKAGKSTF

SEQ ID NO: 625098 - protein, 15 aa, Homo sapiens
  CDR3 for beta chain variable domain of TCR clone 312549 (TRBV11-3, TRBJ2-5)
CASSLRGRVQETQYF

SEQ ID NO: 625099 - protein, 14 aa, Homo sapiens
  CDR3 for alpha chain variable domain of TCR clone 312550 (TRAV12-2, TRAJ44)
CAVNPAGTASKLTF

SEQ ID NO: 625100 - protein, 16 aa, Homo sapiens
  CDR3 for beta chain variable domain of TCR clone 312550 (TRBV27, TRBJ2-1)
SMNVEPGTSGDNEQFF

SEQ ID NO: 625101 - protein, 14 aa, Homo sapiens
  CDR3 for alpha chain variable domain of TCR clone 312551 (TRAV1-2, TRAJ8)
CAVREDTGFQKLVF

SEQ ID NO: 625102 - protein, 11 aa, Homo sapiens
  CDR3 for beta chain variable domain of TCR clone 312551 (TRBV7-3, TRBJ2-5)
CASSLSETQYF

SEQ ID NO: 625103 - protein, 16 aa, Homo sapiens
  CDR3 for alpha chain variable domain of TCR clone 312552 (TRAV4, TRAJ9)
CLVGDPNRPGGFKTII

SEQ ID NO: 625104 - protein, 16 aa, Homo sapiens
  CDR3 for beta chain variable domain of TCR clone 312552 (TRBV28, TRBJ1-4)
CASSPPYRGRSEKLFF

SEQ ID NO: 625105 - protein, 13 aa, Homo sapiens
  CDR3 for alpha chain variable domain of TCR clone 312553 (TRAV27, TRAJ49)
CAPRPYTGNQFYF

SEQ ID NO: 625106 - protein, 16 aa, Homo sapiens
  CDR3 for beta chain variable domain of TCR clone 312553 (TRBV4-1, TRBJ1-2)
CASSQDAGEVLYGYTF

SEQ ID NO: 625107 - protein, 14 aa, Homo sapiens
  CDR3 for alpha chain variable domain of TCR clone 312554 (TRAV17, TRAJ35)
CATDRPGFGNVLHC

SEQ ID NO: 625108 - protein, 15 aa, Homo sapiens
  CDR3 for beta chain variable domain of TCR clone 312554 (TRBV7-3, TRBJ2-1)
CASSPTGGGEVGQFF

SEQ ID NO: 625109 - protein, 12 aa, Homo sapiens
  CDR3 for alpha chain variable domain of TCR clone 312555 (TRAV21, TRAJ42)
CAVGGSQGNLIF

SEQ ID NO: 625110 - protein, 19 aa, Homo sapiens
  CDR3 for beta chain variable domain of TCR clone 312555 (TRBV5-1, TRBJ2-3)
CASSLTRIAADWITDTQYF

SEQ ID NO: 625111 - protein, 13 aa, Homo sapiens
  CDR3 for alpha chain variable domain of TCR clone 312556 (TRAV8-6, TRAJ33)
CAVSEGSNYQLIW

SEQ ID NO: 625112 - protein, 13 aa, Homo sapiens
  CDR3 for beta chain variable domain of TCR clone 312556 (TRBV11-2, TRBJ2-5)
CASSSTGEETQYF

SEQ ID NO: 625113 - protein, 14 aa, Homo sapiens
  CDR3 for alpha chain variable domain of TCR clone 312557 (TRAV1-2, TRAJ16)
CAVRSASDGQKLLF

SEQ ID NO: 625114 - protein, 13 aa, Homo sapiens
  CDR3 for beta chain variable domain of TCR clone 312557 (TRBV6-3, TRAJ28)
CASSPGPGEKLFF

SEQ ID NO: 625115 - protein, 12 aa, Homo sapiens
  CDR3 for alpha chain variable domain of TCR clone 312558 (TRAV3, TRAJ31)
CAVRDGNARLMF

SEQ ID NO: 625116 - protein, 13 aa, Homo sapiens
  CDR3 for beta chain variable domain of TCR clone 312558 (TRBV12-5, TRBJ2-3)
CASGDRQSDTQYF

SEQ ID NO: 625117 - protein, 17 aa, Homo sapiens
  CDR3 for alpha chain variable domain of TCR clone 312559 (TRAV38-2/DV8, TRAJ38)
CAYRSARGAGNNRKLIG

SEQ ID NO: 625118 - protein, 13 aa, Homo sapiens
  CDR3 for beta chain variable domain of TCR clone 312559 (TRBV6-5, TRBJ2-1)
CASRGRVGNEQFF

SEQ ID NO: 625119 - protein, 15 aa, Homo sapiens
  CDR3 for alpha chain variable domain of TCR clone 312560 (TRAV14/DV4, TRAJ22)
CNERGPPGSARQLTF

SEQ ID NO: 625120 - protein, 16 aa, Homo sapiens
  CDR3 for beta chain variable domain of TCR clone 312560 (TRBV19, TRBJ1-6)
GASSVAPVAGNSPLLF

SEQ ID NO: 625121 - protein, 14 aa, Homo sapiens
  CDR3 for alpha chain variable domain of TCR clone 312561 (TRAV16, TRAJ3)
CALSQYSSASKIIF

SEQ ID NO: 625122 - protein, 14 aa, Homo sapiens
  CDR3 for beta chain variable domain of TCR clone 312561 (TRBV4-2, TRBJ2-1)
CASGLDRAYNEQFF

SEQ ID NO: 625123 - protein, 16 aa, Homo sapiens
  CDR3 for alpha chain variable domain of TCR clone 312562 (TRAV14/DV4, TRAJ45)
CAMREGERGGADGLTF

SEQ ID NO: 625124 - protein, 15 aa, Homo sapiens
  CDR3 for beta chain variable domain of TCR clone 312562 (TRBV5-5, TRBJ1-5)
CASSSTPGSNQPQHF

SEQ ID NO: 625125 - protein, 14 aa, Homo sapiens
  CDR3 for alpha chain variable domain of TCR clone 312563 (TRAV3, TRAJ8)
CAVSLNAGFQKLVF

SEQ ID NO: 625126 - protein, 14 aa, Homo sapiens
  CDR3 for beta chain variable domain of TCR clone 312563 (TRBV6-6, TRBJ1-5)
CASVDSGFNQPQHF

SEQ ID NO: 625127 - protein, 15 aa, Homo sapiens
  CDR3 for alpha chain variable domain of TCR clone 312564 (TRAV2, TRAJ9)
CAVAALNTGGFKTFF

SEQ ID NO: 625128 - protein, 14 aa, Homo sapiens
  CDR3 for beta chain variable domain of TCR clone 312564 (TRBV7-8, TRBJ2-5)
CASSATGGQETQYF

SEQ ID NO: 625129 - protein, 10 aa, Homo sapiens
  CDR3 for alpha chain variable domain of TCR clone 312565 (TRAV16, TRAJ26)
CALEELWSEF

SEQ ID NO: 625130 - protein, 15 aa, Homo sapiens
  CDR3 for beta chain variable domain of TCR clone 312565 (TRBV7-2, TRBJ2-3)
CASSLTGTSTDTQYV

SEQ ID NO: 625131 - protein, 13 aa, Homo sapiens
  CDR3 for alpha chain variable domain of TCR clone 312566 (TRAV22, TRAJ29)
CAAGGSGNTPLVF

SEQ ID NO: 625132 - protein, 13 aa, Homo sapiens
  CDR3 for beta chain variable domain of TCR clone 312566 (TRBV4-2, TRBJ1-1)
CASSQAGNTEAFF

SEQ ID NO: 625133 - protein, 16 aa, Homo sapiens
  CDR3 for alpha chain variable domain of TCR clone 312567 (TRAV30, TRAJ24)
CGTAIVDADSWVKFQF

SEQ ID NO: 625134 - protein, 12 aa, Homo sapiens
  CDR3 for beta chain variable domain of TCR clone 312567 (TRBV11-2, TRBJ2-1)
CASSPGNNEQFF

SEQ ID NO: 625135 - protein, 14 aa, Homo sapiens
  CDR3 for alpha chain variable domain of TCR clone 312568 (TRAV1-2, TRAJ16)
CAVNRFSDGQKLLF

SEQ ID NO: 625136 - protein, 11 aa, Homo sapiens
  CDR3 for beta chain variable domain of TCR clone 312568 (TRBV12-4, TRBJ2-3)
CASTATDTQYI

SEQ ID NO: 625137 - protein, 16 aa, Homo sapiens
  CDR3 for alpha chain variable domain of TCR clone 312569 (TRAV30, TRAJ24)
CGTEIVDADSWGKFQV

SEQ ID NO: 625138 - protein, 13 aa, Homo sapiens
  CDR3 for beta chain variable domain of TCR clone 312569 (TRBV24-1, TRBJ2-2)
CATSDWSTGELFF

SEQ ID NO: 625139 - protein, 14 aa, Homo sapiens
  CDR3 for alpha chain variable domain of TCR clone 312570 (TRAV2, TRAJ20)
CAVEDEVNDYKLSF

SEQ ID NO: 625140 - protein, 15 aa, Homo sapiens
  CDR3 for beta chain variable domain of TCR clone 312570 (TRBV6-1, TRBJ2-3)
CASSEIAHSTDTQYF

SEQ ID NO: 625141 - protein, 14 aa, Homo sapiens
  CDR3 for alpha chain variable domain of TCR clone 312571 (TRAV16, TRAJ15)
CALSFNQAGTALIF

SEQ ID NO: 625142 - protein, 17 aa, Homo sapiens
  CDR3 for beta chain variable domain of TCR clone 312571 (TRBV13, TRBJ2-3)
CASSLSRVAGGRNTQYF

SEQ ID NO: 625143 - protein, 11 aa, Homo sapiens
  CDR3 for alpha chain variable domain of TCR clone 312572 (TRAV1-2, TRAJ20)
CAVSNDYKLSF

SEQ ID NO: 625144 - protein, 17 aa, Homo sapiens
  CDR3 for beta chain variable domain of TCR clone 312572 (TRBV7-8, TRBJ2-6)
CVSSAGTGGAGANVLTF

SEQ ID NO: 625145 - protein, 14 aa, Homo sapiens
  CDR3 for alpha chain variable domain of TCR clone 312573 (TRAV1-1, TRAJ30)
CAVRSLNRDDKIIF

SEQ ID NO: 625146 - protein, 13 aa, Homo sapiens
  CDR3 for beta chain variable domain of TCR clone 312573 (TRBV18, TRBJ1-1)
CASSGGRNTEAFF

SEQ ID NO: 625147 - protein, 14 aa, Homo sapiens
  CDR3 for alpha chain variable domain of TCR clone 312574 (TRAV17, TRAJ16)
CARADFSDGQKLLF

SEQ ID NO: 625148 - protein, 15 aa, Homo sapiens
  CDR3 for beta chain variable domain of TCR clone 312574 (TRBV18, TRBJ2-1)
CASSPPSASYNEQFF

SEQ ID NO: 625149 - protein, 15 aa, Homo sapiens
  CDR3 for alpha chain variable domain of TCR clone 312575 (TRAV2, TRAJ24)
CAVVRLKNSWGKLQF

SEQ ID NO: 625150 - protein, 16 aa, Homo sapiens
  CDR3 for beta chain variable domain of TCR clone 312575 (TRBV7-7, TRBJ2-3)
CASSPGTRGSTDTQYF

SEQ ID NO: 625151 - protein, 18 aa, Homo sapiens
  CDR3 for alpha chain variable domain of TCR clone 312576 (TRAV13-1, TRAJ52)
CAAKNPNAGGTSYGKLTF

SEQ ID NO: 625152 - protein, 19 aa, Homo sapiens
  CDR3 for beta chain variable domain of TCR clone 312576 (TRBV6-1, TRBJ2-3)
CASSERGGITDTQYWPRHP

SEQ ID NO: 625153 - protein, 14 aa, Homo sapiens
  CDR3 for alpha chain variable domain of TCR clone 312577 (TRAV13-2, TRAJ17)
CAENSKDAGNKLTF

SEQ ID NO: 625154 - protein, 12 aa, Homo sapiens
  CDR3 for beta chain variable domain of TCR clone 312577 (TRBV18, TRBJ2-1)
CASSSDEDEQFF

SEQ ID NO: 625155 - protein, 15 aa, Homo sapiens
  CDR3 for alpha chain variable domain of TCR clone 312578 (TRAV27, TRAJ17)
CRSTMIKAAGNKLTF

SEQ ID NO: 625156 - protein, 15 aa, Homo sapiens
  CDR3 for beta chain variable domain of TCR clone 312578 (TRBV5-7, TRBJ1-5)
CASSYGKLWDQPQHF

SEQ ID NO: 625157 - protein, 14 aa, Homo sapiens
  CDR3 for alpha chain variable domain of TCR clone 312579 (TRAV17, TRAJ57)
CATDPQGGSEKLVF

SEQ ID NO: 625158 - protein, 13 aa, Homo sapiens
  CDR3 for beta chain variable domain of TCR clone 312579 (TRBV13, TRBJ2-1)
CASTPGSYNEQLF

SEQ ID NO: 625159 - protein, 13 aa, Homo sapiens
  CDR3 for alpha chain variable domain of TCR clone 312580 (TRAV12-1, TRAJ22)
CVASGGAARQLTF

SEQ ID NO: 625160 - protein, 14 aa, Homo sapiens
  CDR3 for beta chain variable domain of TCR clone 312580 (TRBV11-3, TRBJ1-2)
CASSLGSGTYGYTF

SEQ ID NO: 625161 - protein, 14 aa, Homo sapiens
  CDR3 for alpha chain variable domain of TCR clone 312581 (TRAV12-2, TRAJ13)
CAVKKTGGYQKVTF

SEQ ID NO: 625162 - protein, 14 aa, Homo sapiens
  CDR3 for beta chain variable domain of TCR clone 312581 (TRBV5-1, TRBJ2-7)
CASTRGESLYEQYF

SEQ ID NO: 625163 - protein, 13 aa, Homo sapiens
  CDR3 for alpha chain variable domain of TCR clone 312582 (TRAV27, TRAJ9)
CAGGNTGGFKTIF

SEQ ID NO: 625164 - protein, 14 aa, Homo sapiens
  CDR3 for beta chain variable domain of TCR clone 312582 (TRBV11-2, TRBJ1-2)
CASSLGTANYGYTF

SEQ ID NO: 625165 - protein, 12 aa, Homo sapiens
  CDR3 for alpha chain variable domain of TCR clone 312583 (TRAV29/DV5, TRAJ49)
CAATDTGNQFYF

SEQ ID NO: 625166 - protein, 16 aa, Homo sapiens
  CDR3 for beta chain variable domain of TCR clone 312583 (TRBV27, TRBJ2-2)
CASSFRGLVRTGELFF

SEQ ID NO: 625167 - protein, 15 aa, Homo sapiens
  CDR3 for alpha chain variable domain of TCR clone 312584 (TRAV3, TRAJ3)
CAVRDMSSSASKIIF

SEQ ID NO: 625168 - protein, 17 aa, Homo sapiens
  CDR3 for beta chain variable domain of TCR clone 312584 (TRBV13, TRBJ2-3)
CASSLSRVAGGRNTQYF

SEQ ID NO: 625169 - protein, 16 aa, Homo sapiens
  CDR3 for alpha chain variable domain of TCR clone 312585 (TRAV35, TRAJ28)
CAGQRYSGAGSYQLTF

SEQ ID NO: 625170 - protein, 14 aa, Homo sapiens
  CDR3 for beta chain variable domain of TCR clone 312585 (TRBV18, TRBJ2-7)
CASSPRGGTYEQYF

SEQ ID NO: 625171 - protein, 13 aa, Homo sapiens
  CDR3 for alpha chain variable domain of TCR clone 312586 (TRAV8-3, TRAJ5)
FAVGPRGRRALTF

SEQ ID NO: 625172 - protein, 16 aa, Homo sapiens
  CDR3 for beta chain variable domain of TCR clone 312586 (TRBV11-3, TRBJ2-3)
CASSPGGLLGTDTQYF

SEQ ID NO: 625173 - protein, 20 aa, Homo sapiens
  CDR3 for alpha chain variable domain of TCR clone 312587 (TRAV8-3, TRAJ45)
LSTSVLWGSYSGGGADGLPF

SEQ ID NO: 625174 - protein, 11 aa, Homo sapiens
  CDR3 for beta chain variable domain of TCR clone 312587 (TRBV20-1, TRBJ2-5)
CSADRAETQYF

SEQ ID NO: 625175 - protein, 18 aa, Homo sapiens
  CDR3 for alpha chain variable domain of TCR clone 312588 (TRAV26-2, TRAJ54)
FILRDVEVGIQGAQKLVL

SEQ ID NO: 625176 - protein, 17 aa, Homo sapiens
  CDR3 for beta chain variable domain of TCR clone 312588 (TRBV20-1, TRBJ1-5)
CSASLSPGQGGNQPQHF

SEQ ID NO: 625177 - protein, 13 aa, Homo sapiens
  CDR3 for alpha chain variable domain of TCR clone 312589 (TRAV12-3, TRAJ33)
CAMSVNSNYQLIW

SEQ ID NO: 625178 - protein, 16 aa, Homo sapiens
  CDR3 for beta chain variable domain of TCR clone 312589 (TRBV13, TRBJ2-5)
CASSLRTGGSWKTQYF

SEQ ID NO: 625179 - protein, 13 aa, Homo sapiens
  CDR3 for alpha chain variable domain of TCR clone 312590 (TRAV27, TRAJ56)
CAGKPGANSKLTF

SEQ ID NO: 625180 - protein, 18 aa, Homo sapiens
  CDR3 for beta chain variable domain of TCR clone 312590 (TRBV11-2, TRBJ2-3)
CASSLAGASRGAPNTQYF

SEQ ID NO: 625181 - protein, 15 aa, Homo sapiens
  CDR3 for alpha chain variable domain of TCR clone 312591 (TRAV4, TRAJ39)
CLVDPNNNAGNMLTF

SEQ ID NO: 625182 - protein, 15 aa, Homo sapiens
  CDR3 for beta chain variable domain of TCR clone 312591 (TRBV11-2, TRBJ2-2)
CASRGLAANTGELFF

SEQ ID NO: 625183 - protein, 14 aa, Homo sapiens
  CDR3 for alpha chain variable domain of TCR clone 312592 (TRAV13-1, TRAJ5)
CASSPGSRRRALTF

SEQ ID NO: 625184 - protein, 17 aa, Homo sapiens
  CDR3 for beta chain variable domain of TCR clone 312592 (TRBV20-1, TRBJ2-1)
CSASSSGLAGSYNEQFF

SEQ ID NO: 625185 - protein, 15 aa, Homo sapiens
  CDR3 for alpha chain variable domain of TCR clone 312593 (TRAV26-1, TRAJ22)
ASSEYRSGSARQLTF

SEQ ID NO: 625186 - protein, 13 aa, Homo sapiens
  CDR3 for beta chain variable domain of TCR clone 312593 (TRBV7-9, TRBJ1-2)
CASSLKQDYGYTF

SEQ ID NO: 625187 - protein, 11 aa, Homo sapiens
  CDR3 for alpha chain variable domain of TCR clone 312594 (TRAV12-1, TRAJ30)
CVVNGQDKTIF

SEQ ID NO: 625188 - protein, 12 aa, Homo sapiens
  CDR3 for beta chain variable domain of TCR clone 312594 (TRBV27, TRBJ2-2)
CASKLFTGELFL

SEQ ID NO: 625189 - protein, 14 aa, Homo sapiens
  CDR3 for alpha chain variable domain of TCR clone 312595 (TRAV16, TRAJ17)
CAHRIKAAGNKLTF

SEQ ID NO: 625190 - protein, 17 aa, Homo sapiens
  CDR3 for beta chain variable domain of TCR clone 312595 (TRBV7-2, TRBJ2-3)
CASSSYSGTRRADTQYF

SEQ ID NO: 625191 - protein, 12 aa, Homo sapiens
  CDR3 for alpha chain variable domain of TCR clone 312596 (TRAV8-3, TRAJ40)
CAVTSGTFKYIF

SEQ ID NO: 625192 - protein, 14 aa, Homo sapiens
  CDR3 for beta chain variable domain of TCR clone 312596 (TRBV12-4, TRBJ2-3)
CASSGQGSTDTQYF

SEQ ID NO: 625193 - protein, 18 aa, Homo sapiens
  CDR3 for alpha chain variable domain of TCR clone 312597 (TRAV17, TRAJ45)
CATSLDLYSGGGADGLTF

SEQ ID NO: 625194 - protein, 16 aa, Homo sapiens
  CDR3 for beta chain variable domain of TCR clone 312597 (TRBV4-2, TRBJ1-1)
CASSQAGFGMNTEAFF

SEQ ID NO: 625195 - protein, 13 aa, Homo sapiens
  CDR3 for alpha chain variable domain of TCR clone 312598 (TRAV8-4, TRAJ48)
CAVSLFGNEKLTF

SEQ ID NO: 625196 - protein, 12 aa, Homo sapiens
  CDR3 for beta chain variable domain of TCR clone 312598 (TRBV7-8, TRBJ2-7)
CASSLGDREQYF

SEQ ID NO: 625197 - protein, 13 aa, Homo sapiens
  CDR3 for alpha chain variable domain of TCR clone 312599 (TRAV3, TRAJ21)
CAVREPDFNKFYF

SEQ ID NO: 625198 - protein, 15 aa, Homo sapiens
  CDR3 for beta chain variable domain of TCR clone 312599 (TRBV4-3, TRBJ1-1)
CASSQELGRGTEAFF

SEQ ID NO: 625199 - protein, 10 aa, Homo sapiens
  CDR3 for alpha chain variable domain of TCR clone 312600 (TRAV13-2, TRAJ24)
TTDSWGKLQF

SEQ ID NO: 625200 - protein, 16 aa, Homo sapiens
  CDR3 for beta chain variable domain of TCR clone 312600 (TRBV4-2, TRBJ2-3)
CASSQELAGDTDTQYF

SEQ ID NO: 625201 - protein, 12 aa, Homo sapiens
  CDR3 for alpha chain variable domain of TCR clone 312601 (TRAV16, TRAJ10)
CSRTGGGNKLTF

SEQ ID NO: 625202 - protein, 15 aa, Homo sapiens
  CDR3 for beta chain variable domain of TCR clone 312601 (TRBV7-3, TRBJ2-1)
CASSQRGGALSEQFF

SEQ ID NO: 625203 - protein, 14 aa, Homo sapiens
  CDR3 for alpha chain variable domain of TCR clone 312602 (TRAV23/DV6, TRAJ57)
CAASNQGGSEKLVF

SEQ ID NO: 625204 - protein, 14 aa, Homo sapiens
  CDR3 for beta chain variable domain of TCR clone 312602 (TRBV11-1, TRBJ2-5)
CASSLEAYQETQYF

SEQ ID NO: 625205 - protein, 12 aa, Homo sapiens
  CDR3 for alpha chain variable domain of TCR clone 312603 (TRAV1-2, TRAJ42)
CVAGGSQGNLIF

SEQ ID NO: 625206 - protein, 13 aa, Homo sapiens
  CDR3 for beta chain variable domain of TCR clone 312603 (TRBV15, TRBJ1-6)
CATSGGLNSPLHF

SEQ ID NO: 625207 - protein, 13 aa, Homo sapiens
  CDR3 for alpha chain variable domain of TCR clone 312604 (TRAV17, TRAJ5)
CALRGTGRRALTF

SEQ ID NO: 625208 - protein, 15 aa, Homo sapiens
  CDR3 for beta chain variable domain of TCR clone 312604 (TRBV5-1, TRBJ2-2)
CASSSQGGNTGELFF

SEQ ID NO: 625209 - protein, 13 aa, Homo sapiens
  CDR3 for alpha chain variable domain of TCR clone 312605 (TRAV12-3, TRAJ33)
CAMSVNSNYQLIW

SEQ ID NO: 625210 - protein, 14 aa, Homo sapiens
  CDR3 for beta chain variable domain of TCR clone 312605 (TRBV27, TRBJ2-5)
CASSSLKGWENQYF

SEQ ID NO: 625211 - protein, 14 aa, Homo sapiens
  CDR3 for alpha chain variable domain of TCR clone 312606 (TRAV1-2, TRAJ16)
CTVNRFSDGQKLLF

SEQ ID NO: 625212 - protein, 15 aa, Homo sapiens
  CDR3 for beta chain variable domain of TCR clone 312606 (TRBV5-5, TRBJ1-5)
CASSPTPGSNQPQHF

SEQ ID NO: 625213 - protein, 13 aa, Homo sapiens
  CDR3 for alpha chain variable domain of TCR clone 312607 (TRAV1-2, TRAJ20)
CAVRDGNDYKLSF

SEQ ID NO: 625214 - protein, 14 aa, Homo sapiens
  CDR3 for beta chain variable domain of TCR clone 312607 (TRBV4-1, TRBJ2-2)
CASSQAVNTGELFF

SEQ ID NO: 625215 - protein, 14 aa, Homo sapiens
  CDR3 for alpha chain variable domain of TCR clone 312608 (TRAV12-3, TRAJ35)
CAMSLIGFGNVLHC

SEQ ID NO: 625216 - protein, 12 aa, Homo sapiens
  CDR3 for beta chain variable domain of TCR clone 312608 (TRBV12-4, TRBJ1-1)
CASSLAGLEAVF

SEQ ID NO: 625217 - protein, 11 aa, Homo sapiens
  CDR3 for alpha chain variable domain of TCR clone 312609 (TRAV2, TRAJ33)
CAVDSNYQLIW

SEQ ID NO: 625218 - protein, 11 aa, Homo sapiens
  CDR3 for beta chain variable domain of TCR clone 312609 (TRBV7-8, TRBJ2-7)
CASSLSLEQYF

SEQ ID NO: 625219 - protein, 17 aa, Homo sapiens
  CDR3 for alpha chain variable domain of TCR clone 312610 (TRAV3, TRAJ6)
CAVRDGPRAGGSYIPTF

SEQ ID NO: 625220 - protein, 13 aa, Homo sapiens
  CDR3 for beta chain variable domain of TCR clone 312610 (TRBV18, TRBJ1-1)
CASSPETKPEAFF

SEQ ID NO: 625221 - protein, 14 aa, Homo sapiens
  CDR3 for alpha chain variable domain of TCR clone 312611 (TRAV20, TRAJ44)
CAVQDTGNASKLTF

SEQ ID NO: 625222 - protein, 12 aa, Homo sapiens
  CDR3 for beta chain variable domain of TCR clone 312611 (TRBV7-8, TRBJ2-7)
CASSLGDREQYF

SEQ ID NO: 625223 - protein, 18 aa, Homo sapiens
  CDR3 for alpha chain variable domain of TCR clone 312612 (TRAV13-1, TRAJ52)
CAAKNPNAGGTSYGKLTF

SEQ ID NO: 625224 - protein, 17 aa, Homo sapiens
  CDR3 for beta chain variable domain of TCR clone 312612 (TRBV11-2, TRBJ2-1)
CASSFCPPGVEYNEQFF

SEQ ID NO: 625225 - protein, 12 aa, Homo sapiens
  CDR3 for alpha chain variable domain of TCR clone 312613 (TRAV17, TRAJ21)
CALRYNFNKFYF

SEQ ID NO: 625226 - protein, 12 aa, Homo sapiens
  CDR3 for beta chain variable domain of TCR clone 312613 (TRBV7-8, TRBJ2-7)
CASSLGDREQYF

SEQ ID NO: 625227 - protein, 13 aa, Homo sapiens
  CDR3 for alpha chain variable domain of TCR clone 312614 (TRAV12-1, TRAJ40)
CVVNSSGTYKYIF

SEQ ID NO: 625228 - protein, 14 aa, Homo sapiens
  CDR3 for beta chain variable domain of TCR clone 312614 (TRBV2, TRBJ1-6)
CASEVSSYNSALHF

SEQ ID NO: 625229 - protein, 16 aa, Homo sapiens
  CDR3 for alpha chain variable domain of TCR clone 312615 (TRAV3, TRAJ10)
FAVRDMRAGGGNKLTF

SEQ ID NO: 625230 - protein, 14 aa, Homo sapiens
  CDR3 for beta chain variable domain of TCR clone 312615 (TRBV28, TRBJ2-2)
CASTRRSGDGELFF

SEQ ID NO: 625231 - protein, 12 aa, Homo sapiens
  CDR3 for alpha chain variable domain of TCR clone 312616 (TRAV38-2/DV8, TRAJ57)
CAWKGGPEKLVF

SEQ ID NO: 625232 - protein, 13 aa, Homo sapiens
  CDR3 for beta chain variable domain of TCR clone 312616 (TRBV5-1, TRBJ1-5)
CASSLAQDQPQHF

SEQ ID NO: 625233 - protein, 12 aa, Homo sapiens
  CDR3 for alpha chain variable domain of TCR clone 312617 (TRAV29/DV5, TRAJ49)
CAATDTGNQFYF

SEQ ID NO: 625234 - protein, 19 aa, Homo sapiens
  CDR3 for beta chain variable domain of TCR clone 312617 (TRBV25-1, TRBJ2-2)
CDILVYRVDRGRKTGELFF

SEQ ID NO: 625235 - protein, 11 aa, Homo sapiens
  CDR3 for alpha chain variable domain of TCR clone 312618 (TRAV12-3, TRAJ43)
CAMSVSNDMRF

SEQ ID NO: 625236 - protein, 17 aa, Homo sapiens
  CDR3 for beta chain variable domain of TCR clone 312618 (TRBV20-1, TRBJ2-1)
CSASSSGLAGSYHEQFF

SEQ ID NO: 625237 - protein, 15 aa, Homo sapiens
  CDR3 for alpha chain variable domain of TCR clone 312619 (TRAV13-1, TRAJ10)
CAATILTGGGNKLTF

SEQ ID NO: 625238 - protein, 15 aa, Homo sapiens
  CDR3 for beta chain variable domain of TCR clone 312619 (TRBV2, TRBJ2-7)
CASTLLGSRATEQYF

SEQ ID NO: 625239 - protein, 15 aa, Homo sapiens
  CDR3 for alpha chain variable domain of TCR clone 312620 (TRAV23/DV6, TRAJ12)
CAAIDLGAMDSSYKL

SEQ ID NO: 625240 - protein, 17 aa, Homo sapiens
  CDR3 for beta chain variable domain of TCR clone 312620 (TRBV15, TRBJ1-5)
CATSRAPPGTRNQPQHF

SEQ ID NO: 625241 - protein, 15 aa, Homo sapiens
  CDR3 for alpha chain variable domain of TCR clone 312621 (TRAV8-4, TRAJ37)
CAVNYGSSNTGKLIF

SEQ ID NO: 625242 - protein, 13 aa, Homo sapiens
  CDR3 for beta chain variable domain of TCR clone 312621 (TRBV12-4, TRBJ2-5)
CASSLGGSRTQYF

SEQ ID NO: 625243 - protein, 16 aa, Homo sapiens
  CDR3 for alpha chain variable domain of TCR clone 312622 (TRAV30, TRAJ24)
CGTEIVDADSWGKFQF

SEQ ID NO: 625244 - protein, 15 aa, Homo sapiens
  CDR3 for beta chain variable domain of TCR clone 312622 (TRBV11-2, TRBJ1-3)
CASSLSPLVRDTIYF

SEQ ID NO: 625245 - protein, 13 aa, Homo sapiens
  CDR3 for alpha chain variable domain of TCR clone 312623 (TRAV12-1, TRAJ40)
CVVPTSGTYKYIF

SEQ ID NO: 625246 - protein, 14 aa, Homo sapiens
  CDR3 for beta chain variable domain of TCR clone 312623 (TRBV7-9, TRBJ2-7)
CASSLSQGSYEQYF

SEQ ID NO: 625247 - protein, 12 aa, Homo sapiens
  CDR3 for alpha chain variable domain of TCR clone 312624 (TRAV17, TRAJ4)
CATRGGYNKLIF

SEQ ID NO: 625248 - protein, 13 aa, Homo sapiens
  CDR3 for beta chain variable domain of TCR clone 312624 (TRBV12-4, TRBJ1-2)
CASSLRQGKGYTF

SEQ ID NO: 625249 - protein, 19 aa, Homo sapiens
  CDR3 for alpha chain variable domain of TCR clone 312625 (TRAV38-1, TRAJ53)
CAFMKHGLESGGSNYKLTC

SEQ ID NO: 625250 - protein, 13 aa, Homo sapiens
  CDR3 for beta chain variable domain of TCR clone 312625 (TRBV19, TRBJ2-7)
CASSPRQSYEQYF

SEQ ID NO: 625251 - protein, 14 aa, Homo sapiens
  CDR3 for alpha chain variable domain of TCR clone 312626 (TRAV1-2, TRAJ16)
CAVNRFSDGQKLLF

SEQ ID NO: 625252 - protein, 11 aa, Homo sapiens
  CDR3 for beta chain variable domain of TCR clone 312626 (TRBV6-5, TRBJ2-3)
CASSTGDTQYF

SEQ ID NO: 625253 - protein, 14 aa, Homo sapiens
  CDR3 for alpha chain variable domain of TCR clone 312627 (TRAV1-2, TRAJ8)
CAVREDTGFQKLVF

SEQ ID NO: 625254 - protein, 14 aa, Homo sapiens
  CDR3 for beta chain variable domain of TCR clone 312627 (TRBV11-3, TRBJ2-7)
CASSFLRDSHEQYF

SEQ ID NO: 625255 - protein, 15 aa, Homo sapiens
  CDR3 for alpha chain variable domain of TCR clone 312628 (TRAV8-3, TRAJ32)
CAVGPYGGATNKLIF

SEQ ID NO: 625256 - protein, 14 aa, Homo sapiens
  CDR3 for beta chain variable domain of TCR clone 312628 (TRBV29-1, TRBJ2-2)
CRVLAETNTGELFF

SEQ ID NO: 625257 - protein, 17 aa, Homo sapiens
  CDR3 for alpha chain variable domain of TCR clone 312629 (TRAV3, TRAJ6)
CAVRDGPLAGGSYIPTF

SEQ ID NO: 625258 - protein, 14 aa, Homo sapiens
  CDR3 for beta chain variable domain of TCR clone 312629 (TRBV7-2, TRBJ2-7)
CASSPKTSFYEQYF

SEQ ID NO: 625259 - protein, 16 aa, Homo sapiens
  CDR3 for alpha chain variable domain of TCR clone 312630 (TRAV6, TRAJ37)
CALDIFGSSNTGTLIF

SEQ ID NO: 625260 - protein, 14 aa, Homo sapiens
  CDR3 for beta chain variable domain of TCR clone 312630 (TRBV5-7, TRBJ2-7)
CASSLRSATYEQYF

SEQ ID NO: 625261 - protein, 14 aa, Homo sapiens
  CDR3 for alpha chain variable domain of TCR clone 312631 (TRAV38-1, TRAJ45)
CASHSGGGADGLTF

SEQ ID NO: 625262 - protein, 15 aa, Homo sapiens
  CDR3 for beta chain variable domain of TCR clone 312631 (TRBV13, TRBJ2-5)
CASSLAGYREETQYF

SEQ ID NO: 625263 - protein, 14 aa, Homo sapiens
  CDR3 for alpha chain variable domain of TCR clone 312632 (TRAV8-4, TRAJ48)
CAVSETFGNEKLTF

SEQ ID NO: 625264 - protein, 14 aa, Homo sapiens
  CDR3 for beta chain variable domain of TCR clone 312632 (TRBV19, TRBJ2-1)
CASPTFVLSGEQFF

SEQ ID NO: 625265 - protein, 23 aa, Homo sapiens
  CDR3 for alpha chain variable domain of TCR clone 312633 (TRAV8-4, TRAJ38)
CARLNAGNNHIQNPDPAVYQLRD

SEQ ID NO: 625266 - protein, 14 aa, Homo sapiens
  CDR3 for beta chain variable domain of TCR clone 312633 (TRBV7-8, TRBJ2-3)
CASSLEAGTDTQHF

SEQ ID NO: 625267 - protein, 12 aa, Homo sapiens
  CDR3 for alpha chain variable domain of TCR clone 312634 (TRAV8-3, TRAJ20)
CAVGANDYKLSF

SEQ ID NO: 625268 - protein, 15 aa, Homo sapiens
  CDR3 for beta chain variable domain of TCR clone 312634 (TRBV28, TRBJ1-1)
CASTSTRGLNTEAFF

SEQ ID NO: 625269 - protein, 14 aa, Homo sapiens
  CDR3 for alpha chain variable domain of TCR clone 312635 (TRAV1-2, TRAJ16)
CAVNRFSDGQKLLF

SEQ ID NO: 625270 - protein, 14 aa, Homo sapiens
  CDR3 for beta chain variable domain of TCR clone 312635 (TRBV4-2, TRBJ1-5)
CASSQDSINQPQHF

SEQ ID NO: 625271 - protein, 14 aa, Homo sapiens
  CDR3 for alpha chain variable domain of TCR clone 312636 (TRAV8-4, TRAJ5)
CAVSTDTGRRALTF

SEQ ID NO: 625272 - protein, 14 aa, Homo sapiens
  CDR3 for beta chain variable domain of TCR clone 312636 (TRBV4-1, TRBJ1-1)
CASSPRVDNTEAFF

SEQ ID NO: 625273 - protein, 13 aa, Homo sapiens
  CDR3 for alpha chain variable domain of TCR clone 312637 (TRAV3, TRAJ31)
CAVREGNNARLMF

SEQ ID NO: 625274 - protein, 13 aa, Homo sapiens
  CDR3 for beta chain variable domain of TCR clone 312637 (TRBV10-3, TRBJ2-7)
CASKLAVNYEQYF

SEQ ID NO: 625275 - protein, 15 aa, Homo sapiens
  CDR3 for alpha chain variable domain of TCR clone 312638 (TRAV12-1, TRAJ8)
CVVNVENTGFQKLVF

SEQ ID NO: 625276 - protein, 14 aa, Homo sapiens
  CDR3 for beta chain variable domain of TCR clone 312638 (TRBV12-5, TRBJ2-5)
CASGSRTHQETQYF

SEQ ID NO: 625277 - protein, 14 aa, Homo sapiens
  CDR3 for alpha chain variable domain of TCR clone 312639 (TRAV41, TRAJ32)
CCPNYGGATNKPIF

SEQ ID NO: 625278 - protein, 15 aa, Homo sapiens
  CDR3 for beta chain variable domain of TCR clone 312639 (TRBV11-2, TRBJ2-1)
CASSKNRGLIYEQFF

SEQ ID NO: 625279 - protein, 16 aa, Homo sapiens
  CDR3 for alpha chain variable domain of TCR clone 312640 (TRAV16, TRAJ4)
CALSRMFSGGYNKLIF

SEQ ID NO: 625280 - protein, 11 aa, Homo sapiens
  CDR3 for beta chain variable domain of TCR clone 312640 (TRBV11-2, TRBJ1-1)
CASSINTEDFF

SEQ ID NO: 625281 - protein, 16 aa, Homo sapiens
  CDR3 for alpha chain variable domain of TCR clone 312641 (TRAV30, TRAJ24)
CGTEIVDADSWGKFQP

SEQ ID NO: 625282 - protein, 11 aa, Homo sapiens
  CDR3 for beta chain variable domain of TCR clone 312641 (TRBV29-1, TRBJ2-5)
CSEDRTGTQYF

SEQ ID NO: 625283 - protein, 14 aa, Homo sapiens
  CDR3 for alpha chain variable domain of TCR clone 312642 (TRAV8-3, TRAJ39)
CAVGAWGAGNMFTF

SEQ ID NO: 625284 - protein, 16 aa, Homo sapiens
  CDR3 for beta chain variable domain of TCR clone 312642 (TRBV7-2, TRBJ1-3)
CASSSGRVLSGNTIYF

SEQ ID NO: 625285 - protein, 14 aa, Homo sapiens
  CDR3 for alpha chain variable domain of TCR clone 312643 (TRAV29/DV5, TRAJ36)
CAARRKTGANHLFF

SEQ ID NO: 625286 - protein, 14 aa, Homo sapiens
  CDR3 for beta chain variable domain of TCR clone 312643 (TRBV28, TRBJ2-3)
CASSFVSGTDTQYF

SEQ ID NO: 625287 - protein, 16 aa, Homo sapiens
  CDR3 for alpha chain variable domain of TCR clone 312644 (TRAV12-2, TRAJ28)
CAVITDSGAGSYQLTF

SEQ ID NO: 625288 - protein, 15 aa, Homo sapiens
  CDR3 for beta chain variable domain of TCR clone 312644 (TRBV7-3, TRBJ2-2)
CASKANGANTGELFF

SEQ ID NO: 625289 - protein, 14 aa, Homo sapiens
  CDR3 for alpha chain variable domain of TCR clone 312645 (TRAV26-1, )
CIDIQNPDPAGYQL

SEQ ID NO: 625290 - protein, 19 aa, Homo sapiens
  CDR3 for beta chain variable domain of TCR clone 312645 (TRBV19, TRBJ2-5)
CASSIGQVTDFFLGETQYF

SEQ ID NO: 625291 - protein, 13 aa, Homo sapiens
  CDR3 for alpha chain variable domain of TCR clone 312646 (TRAV30, TRAJ29)
CGTEDSGNTPFVF

SEQ ID NO: 625292 - protein, 15 aa, Homo sapiens
  CDR3 for beta chain variable domain of TCR clone 312646 (TRBV6-1, TRBJ2-3)
CASSERGGITDTQYF

SEQ ID NO: 625293 - protein, 16 aa, Homo sapiens
  CDR3 for alpha chain variable domain of TCR clone 312647 (TRAV3, TRAJ37)
CAVRVRGSGSTGKLIF

SEQ ID NO: 625294 - protein, 16 aa, Homo sapiens
  CDR3 for beta chain variable domain of TCR clone 312647 (TRBV11-2, TRBJ2-7)
CASSPTTGGVSYEQYF

SEQ ID NO: 625295 - protein, 19 aa, Homo sapiens
  CDR3 for alpha chain variable domain of TCR clone 312648 (TRAV26-1, TRAJ52)
CIVRALRNAGGTSYGKLTF

SEQ ID NO: 625296 - protein, 15 aa, Homo sapiens
  CDR3 for beta chain variable domain of TCR clone 312648 (TRBV12-4, TRBJ2-5)
CASSPPTGLQETQYF

SEQ ID NO: 625297 - protein, 15 aa, Homo sapiens
  CDR3 for alpha chain variable domain of TCR clone 312649 (TRAV29/DV5, TRAJ48)
CAASLGGFGNEKLTF

SEQ ID NO: 625298 - protein, 11 aa, Homo sapiens
  CDR3 for beta chain variable domain of TCR clone 312649 (TRBV20-1, TRBJ2-3)
SSGTSSTTQYF

SEQ ID NO: 625299 - protein, 13 aa, Homo sapiens
  CDR3 for alpha chain variable domain of TCR clone 312650 (TRAV26-2, TRAJ43)
CILRAVNNNDMRF

SEQ ID NO: 625300 - protein, 13 aa, Homo sapiens
  CDR3 for beta chain variable domain of TCR clone 312650 (TRBV14, TRBJ2-1)
CASSQDRRNEQSF

SEQ ID NO: 625301 - protein, 11 aa, Homo sapiens
  CDR3 for alpha chain variable domain of TCR clone 312651 (TRAV3, TRAJ21)
CAVGNFNKFYF

SEQ ID NO: 625302 - protein, 16 aa, Homo sapiens
  CDR3 for beta chain variable domain of TCR clone 312651 (TRBV19, TRBJ2-2)
CASRSPGKGATGEPFF

SEQ ID NO: 625303 - protein, 14 aa, Homo sapiens
  CDR3 for alpha chain variable domain of TCR clone 312652 (TRAV21, TRAJ32)
CAVWDGGATNKLIF

SEQ ID NO: 625304 - protein, 15 aa, Homo sapiens
  CDR3 for beta chain variable domain of TCR clone 312652 (TRBV7-3, TRBJ2-3)
CASSLGLTLGDTQYF

SEQ ID NO: 625305 - protein, 15 aa, Homo sapiens
  CDR3 for alpha chain variable domain of TCR clone 312653 (TRAV13-1, TRAJ32)
CAASIYGGATNKLIF

SEQ ID NO: 625306 - protein, 17 aa, Homo sapiens
  CDR3 for beta chain variable domain of TCR clone 312653 (TRBV7-3, TRBJ2-5)
CASSLGSGRSGSETQYF

SEQ ID NO: 625307 - protein, 12 aa, Homo sapiens
  CDR3 for alpha chain variable domain of TCR clone 312654 (TRAV17, TRAJ20)
CATDGDDYKLSF

SEQ ID NO: 625308 - protein, 15 aa, Homo sapiens
  CDR3 for beta chain variable domain of TCR clone 312654 (TRBV7-2, TRBJ1-1)
CASSFAGDRDTEAFF

SEQ ID NO: 625309 - protein, 13 aa, Homo sapiens
  CDR3 for alpha chain variable domain of TCR clone 312655 (TRAV3, TRAJ29)
CAVRDIIDTPLVF

SEQ ID NO: 625310 - protein, 15 aa, Homo sapiens
  CDR3 for beta chain variable domain of TCR clone 312655 (TRBV12-4, TRBJ2-5)
CASSPPTGLQETQYF

SEQ ID NO: 625311 - protein, 13 aa, Homo sapiens
  CDR3 for alpha chain variable domain of TCR clone 312656 (TRAV12-3, TRAJ33)
CAMSVNSNYQLIW

SEQ ID NO: 625312 - protein, 18 aa, Homo sapiens
  CDR3 for beta chain variable domain of TCR clone 312656 (TRBV11-3, TRBJ2-2)
CASSPSQGAGANTGELFF

SEQ ID NO: 625313 - protein, 17 aa, Homo sapiens
  CDR3 for alpha chain variable domain of TCR clone 312657 (TRAV3, TRAJ6)
CAVRDGPRAGGSYIPTF

SEQ ID NO: 625314 - protein, 16 aa, Homo sapiens
  CDR3 for beta chain variable domain of TCR clone 312657 (TRBV7-3, TRBJ2-2)
CASSLKWGTLSGELFF

SEQ ID NO: 625315 - protein, 16 aa, Homo sapiens
  CDR3 for alpha chain variable domain of TCR clone 312658 (TRAV27, TRAJ52)
CAGAPAGGTSYGKLTF

SEQ ID NO: 625316 - protein, 12 aa, Homo sapiens
  CDR3 for beta chain variable domain of TCR clone 312658 (TRBV27, TRBJ2-1)
CASRGFYNEQFI

SEQ ID NO: 625317 - protein, 11 aa, Homo sapiens
  CDR3 for alpha chain variable domain of TCR clone 312659 (TRAV21, TRAJ34)
CAHYNTDKLIF

SEQ ID NO: 625318 - protein, 12 aa, Homo sapiens
  CDR3 for beta chain variable domain of TCR clone 312659 (TRBV7-6, TRBJ1-2)
CQSLVADYGYTF

SEQ ID NO: 625319 - protein, 14 aa, Homo sapiens
  CDR3 for alpha chain variable domain of TCR clone 312660 (TRAV12-2, TRAJ13)
CAVKKTGGYQKVTF

SEQ ID NO: 625320 - protein, 15 aa, Homo sapiens
  CDR3 for beta chain variable domain of TCR clone 312660 (TRBV5-1, TRBJ2-7)
CASSLGDFTTYEQYF

SEQ ID NO: 625321 - protein, 12 aa, Homo sapiens
  CDR3 for alpha chain variable domain of TCR clone 312661 (TRAV13-1, TRAJ48)
CAANFGNEKLTF

SEQ ID NO: 625322 - protein, 20 aa, Homo sapiens
  CDR3 for beta chain variable domain of TCR clone 312661 (TRBV3-1, TRBJ2-6)
CDSSPRPGLEGGAGDNVLTF

SEQ ID NO: 625323 - protein, 14 aa, Homo sapiens
  CDR3 for alpha chain variable domain of TCR clone 312662 (TRAV30, TRAJ33)
CGTVAPRSIYQLIW

SEQ ID NO: 625324 - protein, 14 aa, Homo sapiens
  CDR3 for beta chain variable domain of TCR clone 312662 (TRBV19, TRBJ2-1)
CASPTFVLSGEKFF

SEQ ID NO: 625325 - protein, 13 aa, Homo sapiens
  CDR3 for alpha chain variable domain of TCR clone 312663 (TRAV19, TRAJ26)
CALTFDYGQNFVF

SEQ ID NO: 625326 - protein, 14 aa, Homo sapiens
  CDR3 for beta chain variable domain of TCR clone 312663 (TRBV7-8, TRBJ2-3)
CASSLEAGTDTQYC

SEQ ID NO: 625327 - protein, 12 aa, Homo sapiens
  CDR3 for alpha chain variable domain of TCR clone 312664 (TRAV8-3, TRAJ41)
CAVALSVYALNF

SEQ ID NO: 625328 - protein, 17 aa, Homo sapiens
  CDR3 for beta chain variable domain of TCR clone 312664 (TRBV7-3, TRBJ2-2)
CASSLSGTSGGTGELFF

SEQ ID NO: 625329 - protein, 14 aa, Homo sapiens
  CDR3 for alpha chain variable domain of TCR clone 312665 (TRAV20, TRAJ29)
CAVQALVGNTPLVF

SEQ ID NO: 625330 - protein, 15 aa, Homo sapiens
  CDR3 for beta chain variable domain of TCR clone 312665 (TRBV29-1, TRBJ2-7)
CSVEFFDRGSYEQYF

SEQ ID NO: 625331 - protein, 14 aa, Homo sapiens
  CDR3 for alpha chain variable domain of TCR clone 312666 (TRAV1-2, TRAJ16)
CAVNRFSDGQKLFF

SEQ ID NO: 625332 - protein, 16 aa, Homo sapiens
  CDR3 for beta chain variable domain of TCR clone 312666 (TRBV19, TRBJ2-1)
CASSKAGPSSYNEQFF

SEQ ID NO: 625333 - protein, 12 aa, Homo sapiens
  CDR3 for alpha chain variable domain of TCR clone 312667 (TRAV2, TRAJ10)
CASTGGGNKLTF

SEQ ID NO: 625334 - protein, 20 aa, Homo sapiens
  CDR3 for beta chain variable domain of TCR clone 312667 (TRBV7-8, TRBJ2-2)
CASSHLFPGPTIHVTGELFF

SEQ ID NO: 625335 - protein, 15 aa, Homo sapiens
  CDR3 for alpha chain variable domain of TCR clone 312668 (TRAV35, TRAJ40)
CAGVPGASGTYKYIF

SEQ ID NO: 625336 - protein, 14 aa, Homo sapiens
  CDR3 for beta chain variable domain of TCR clone 312668 (TRBV11-2, TRBJ2-5)
CASSRTGGIETQYV

SEQ ID NO: 625337 - protein, 14 aa, Homo sapiens
  CDR3 for alpha chain variable domain of TCR clone 312669 (TRAV13-2, TRAJ11)
CAETGNSGYSTLTF

SEQ ID NO: 625338 - protein, 15 aa, Homo sapiens
  CDR3 for beta chain variable domain of TCR clone 312669 (TRBV5-1, TRBJ2-6)
CASSLDPSGANVLTF

SEQ ID NO: 625339 - protein, 12 aa, Homo sapiens
  CDR3 for alpha chain variable domain of TCR clone 312670 (TRAV21, TRAJ39)
CAADNAGNMLTF

SEQ ID NO: 625340 - protein, 15 aa, Homo sapiens
  CDR3 for beta chain variable domain of TCR clone 312670 (TRBV27, TRBJ2-1)
CASSDGGGSSNEQFF

SEQ ID NO: 625341 - protein, 15 aa, Homo sapiens
  CDR3 for alpha chain variable domain of TCR clone 312671 (TRAV3, TRAJ5)
CAVRDLDTGRSALTF

SEQ ID NO: 625342 - protein, 15 aa, Homo sapiens
  CDR3 for beta chain variable domain of TCR clone 312671 (TRBV5-1, TRBJ2-7)
CASSLNGGPAREQYF

SEQ ID NO: 625343 - protein, 12 aa, Homo sapiens
  CDR3 for alpha chain variable domain of TCR clone 312672 (TRAV22, TRAJ36)
CAVGTGANNLFF

SEQ ID NO: 625344 - protein, 17 aa, Homo sapiens
  CDR3 for beta chain variable domain of TCR clone 312672 (TRBV7-8, TRBJ2-6)
CVSSAGTGGAGANVLTF

SEQ ID NO: 625345 - protein, 14 aa, Homo sapiens
  CDR3 for alpha chain variable domain of TCR clone 312673 (TRAV16, TRAJ31)
CALSGRNNMARLMF

SEQ ID NO: 625346 - protein, 12 aa, Homo sapiens
  CDR3 for beta chain variable domain of TCR clone 312673 (TRBV11-2, TRBJ1-2)
CASSREGDGYTF

SEQ ID NO: 625347 - protein, 15 aa, Homo sapiens
  CDR3 for alpha chain variable domain of TCR clone 312674 (TRAV16, TRAJ22)
CSRGRLAMYLRQLTF

SEQ ID NO: 625348 - protein, 13 aa, Homo sapiens
  CDR3 for beta chain variable domain of TCR clone 312674 (TRBV18, TRBJ1-1)
CASSPGPSGEAFF

SEQ ID NO: 625349 - protein, 14 aa, Homo sapiens
  CDR3 for alpha chain variable domain of TCR clone 312675 (TRAV13-1, TRAJ10)
CAANEPGGGNKLTV

SEQ ID NO: 625350 - protein, 14 aa, Homo sapiens
  CDR3 for beta chain variable domain of TCR clone 312675 (TRBV6-6, TRBJ2-7)
CASSDSGAGYEQYF

SEQ ID NO: 625351 - protein, 13 aa, Homo sapiens
  CDR3 for alpha chain variable domain of TCR clone 312676 (TRAV12-1, TRAJ40)
CVLPTSGTYKYTF

SEQ ID NO: 625352 - protein, 13 aa, Homo sapiens
  CDR3 for beta chain variable domain of TCR clone 312676 (TRBV4-2, TRBJ1-1)
CASSQAGNTEAFF

SEQ ID NO: 625353 - protein, 13 aa, Homo sapiens
  CDR3 for alpha chain variable domain of TCR clone 312677 (TRAV21, TRAJ27)
CAARPGNAGKSTF

SEQ ID NO: 625354 - protein, 15 aa, Homo sapiens
  CDR3 for beta chain variable domain of TCR clone 312677 (TRBV11-2, TRBJ1-6)
CASSLDPWAVSPLHF

SEQ ID NO: 625355 - protein, 15 aa, Homo sapiens
  CDR3 for alpha chain variable domain of TCR clone 312678 (TRAV38-1, TRAJ37)
CAFIHGSGNTGKLIF

SEQ ID NO: 625356 - protein, 14 aa, Homo sapiens
  CDR3 for beta chain variable domain of TCR clone 312678 (TRBV29-1, TRBJ2-5)
CSVGTSGSGETQYF

SEQ ID NO: 625357 - protein, 13 aa, Homo sapiens
  CDR3 for alpha chain variable domain of TCR clone 312679 (TRAV2, TRAJ27)
CAVEAPMQANQPF

SEQ ID NO: 625358 - protein, 13 aa, Homo sapiens
  CDR3 for beta chain variable domain of TCR clone 312679 (TRBV10-2, TRBJ2-3)
CASSESGDHTQYF

SEQ ID NO: 625359 - protein, 14 aa, Homo sapiens
  CDR3 for alpha chain variable domain of TCR clone 312680 (TRAV22, TRAJ21)
CACRGGYNFNKFYF

SEQ ID NO: 625360 - protein, 16 aa, Homo sapiens
  CDR3 for beta chain variable domain of TCR clone 312680 (TRBV9, TRBJ1-2)
CASSVEEKVSPYGYTF

SEQ ID NO: 625361 - protein, 13 aa, Homo sapiens
  CDR3 for alpha chain variable domain of TCR clone 312681 (TRAV8-3, TRAJ28)
CAVGAVGSYQLTF

SEQ ID NO: 625362 - protein, 15 aa, Homo sapiens
  CDR3 for beta chain variable domain of TCR clone 312681 (TRBV7-6, TRBJ1-5)
CASSQSSGINQPQHF

SEQ ID NO: 625363 - protein, 14 aa, Homo sapiens
  CDR3 for alpha chain variable domain of TCR clone 312682 (TRAV13-1, TRAJ6)
CAASITGGSYIPTF

SEQ ID NO: 625364 - protein, 13 aa, Homo sapiens
  CDR3 for beta chain variable domain of TCR clone 312682 (TRBV12-4, TRBJ1-2)
CASSLDSNYGYTF

SEQ ID NO: 625365 - protein, 16 aa, Homo sapiens
  CDR3 for alpha chain variable domain of TCR clone 312683 (TRAV30, TRAJ24)
CGTEIVDADSLGKFQF

SEQ ID NO: 625366 - protein, 16 aa, Homo sapiens
  CDR3 for beta chain variable domain of TCR clone 312683 (TRBV7-3, TRBJ2-3)
ELSLMKRMRGADTQYF

SEQ ID NO: 625367 - protein, 13 aa, Homo sapiens
  CDR3 for alpha chain variable domain of TCR clone 312684 (TRAV13-1, TRAJ21)
CAASIYNFNKFYF

SEQ ID NO: 625368 - protein, 12 aa, Homo sapiens
  CDR3 for beta chain variable domain of TCR clone 312684 (TRBV27, TRBJ1-4)
CQQFDGDEKLFF

SEQ ID NO: 625369 - protein, 15 aa, Homo sapiens
  CDR3 for alpha chain variable domain of TCR clone 312685 (TRAV17, TRAJ4)
CATGTWSGGYNKLIF

SEQ ID NO: 625370 - protein, 15 aa, Homo sapiens
  CDR3 for beta chain variable domain of TCR clone 312685 (TRBV6-5, TRBJ2-1)
CASSKGLAGNNEQFF

SEQ ID NO: 625371 - protein, 10 aa, Homo sapiens
  CDR3 for alpha chain variable domain of TCR clone 312686 (TRAV25, TRAJ53)
CAGSNYKLTF

SEQ ID NO: 625372 - protein, 15 aa, Homo sapiens
  CDR3 for beta chain variable domain of TCR clone 312686 (TRBV11-3, TRBJ2-3)
CASNGGLDSTDTQYF

SEQ ID NO: 625373 - protein, 14 aa, Homo sapiens
  CDR3 for alpha chain variable domain of TCR clone 312687 (TRAV24, TRAJ37)
CASDGPSNTGKLIF

SEQ ID NO: 625374 - protein, 15 aa, Homo sapiens
  CDR3 for beta chain variable domain of TCR clone 312687 (TRBV7-3, TRBJ2-2)
CASKANGANTGELFF

SEQ ID NO: 625375 - protein, 12 aa, Homo sapiens
  CDR3 for alpha chain variable domain of TCR clone 312688 (TRAV12-2, TRAJ31)
CAVNTPDARLMF

SEQ ID NO: 625376 - protein, 17 aa, Homo sapiens
  CDR3 for beta chain variable domain of TCR clone 312688 (TRBV20-1, TRBJ1-6)
CSARGVYTFSYNSPLHL

SEQ ID NO: 625377 - protein, 17 aa, Homo sapiens
  CDR3 for alpha chain variable domain of TCR clone 312689 (TRAV38-2/DV8, TRAJ28)
CAYRFAYSGAGSYQLTF

SEQ ID NO: 625378 - protein, 16 aa, Homo sapiens
  CDR3 for beta chain variable domain of TCR clone 312689 (TRBV6-1, TRBJ1-3)
CASVQGGVETPYILER

SEQ ID NO: 625379 - protein, 16 aa, Homo sapiens
  CDR3 for alpha chain variable domain of TCR clone 312690 (TRAV27, TRAJ45)
CPPRGRRGGGADGLTF

SEQ ID NO: 625380 - protein, 13 aa, Homo sapiens
  CDR3 for beta chain variable domain of TCR clone 312690 (TRBV7-3, TRBJ1-1)
CASSQDWGAEAFF

SEQ ID NO: 625381 - protein, 14 aa, Homo sapiens
  CDR3 for alpha chain variable domain of TCR clone 312691 (TRAV8-1, TRAJ5)
CAVRTDTCRRALTF

SEQ ID NO: 625382 - protein, 12 aa, Homo sapiens
  CDR3 for beta chain variable domain of TCR clone 312691 (TRBV11-2, TRBJ2-1)
CASSPGNNEQFF

SEQ ID NO: 625383 - protein, 14 aa, Homo sapiens
  CDR3 for alpha chain variable domain of TCR clone 312692 (TRAV8-6, TRAJ53)
CAALVLGRNYKLTF

SEQ ID NO: 625384 - protein, 15 aa, Homo sapiens
  CDR3 for beta chain variable domain of TCR clone 312692 (TRBV20-1, TRBJ2-3)
CSAEPLAGHGDTQYF

SEQ ID NO: 625385 - protein, 13 aa, Homo sapiens
  CDR3 for alpha chain variable domain of TCR clone 312693 (TRAV12-2, TRAJ20)
CAVYPSNDYKLSF

SEQ ID NO: 625386 - protein, 16 aa, Homo sapiens
  CDR3 for beta chain variable domain of TCR clone 312693 (TRBV27, TRBJ2-2)
CASSFRGLVRTGELFF

SEQ ID NO: 625387 - protein, 14 aa, Homo sapiens
  CDR3 for alpha chain variable domain of TCR clone 312694 (TRAV4, TRAJ30)
CLGGDMNRDDKIIF

SEQ ID NO: 625388 - protein, 15 aa, Homo sapiens
  CDR3 for beta chain variable domain of TCR clone 312694 (TRBV7-2, TRBJ2-7)
CASSLSSGRTYEQYF

SEQ ID NO: 625389 - protein, 14 aa, Homo sapiens
  CDR3 for alpha chain variable domain of TCR clone 312695 (TRAV26-1, TRAJ34)
CIVRVAYNTDKLSF

SEQ ID NO: 625390 - protein, 19 aa, Homo sapiens
  CDR3 for beta chain variable domain of TCR clone 312695 (TRBV25-1, TRBJ2-2)
CAILVYRVDRGRKTGELFF

SEQ ID NO: 625391 - protein, 15 aa, Homo sapiens
  CDR3 for alpha chain variable domain of TCR clone 312696 (TRAV27, TRAJ38)
SAARRNAGNTRQLIW

SEQ ID NO: 625392 - protein, 13 aa, Homo sapiens
  CDR3 for beta chain variable domain of TCR clone 312696 (TRBV12-5, TRBJ2-3)
CASGDRQSDTQYF

SEQ ID NO: 625393 - protein, 11 aa, Homo sapiens
  CDR3 for alpha chain variable domain of TCR clone 312697 (TRAV2, TRAJ33)
CAVDSNYQLIW

SEQ ID NO: 625394 - protein, 11 aa, Homo sapiens
  CDR3 for beta chain variable domain of TCR clone 312697 (TRBV12-4, TRBJ2-5)
CASSFQGAQYF

SEQ ID NO: 625395 - protein, 15 aa, Homo sapiens
  CDR3 for alpha chain variable domain of TCR clone 312698 (TRAV38-1, TRAJ30)
CSFMMSYGGDDKIIF

SEQ ID NO: 625396 - protein, 13 aa, Homo sapiens
  CDR3 for beta chain variable domain of TCR clone 312698 (TRBV7-9, TRBJ1-2)
CASSLKQNYGYTF

SEQ ID NO: 625397 - protein, 11 aa, Homo sapiens
  CDR3 for alpha chain variable domain of TCR clone 312699 (TRAV3, TRAJ21)
CAVGNFNKFYF

SEQ ID NO: 625398 - protein, 12 aa, Homo sapiens
  CDR3 for beta chain variable domain of TCR clone 312699 (TRBV14, TRBJ2-5)
CASSQLKETQYF

SEQ ID NO: 625399 - protein, 14 aa, Homo sapiens
  CDR3 for alpha chain variable domain of TCR clone 312700 (TRAV14/DV4, TRAJ57)
CAMREEGGSEKLVV

SEQ ID NO: 625400 - protein, 14 aa, Homo sapiens
  CDR3 for beta chain variable domain of TCR clone 312700 (TRBV7-2, TRBJ2-7)
CASRSQGAAYEQYF

SEQ ID NO: 625401 - protein, 12 aa, Homo sapiens
  CDR3 for alpha chain variable domain of TCR clone 312701 (TRAV21, TRAJ11)
CAVRGGNSPLTF

SEQ ID NO: 625402 - protein, 15 aa, Homo sapiens
  CDR3 for beta chain variable domain of TCR clone 312701 (TRBV6-1, TRBJ2-7)
CASSEPIAATTEQYF

SEQ ID NO: 625403 - protein, 17 aa, Homo sapiens
  CDR3 for alpha chain variable domain of TCR clone 312702 (TRAV4, TRAJ13)
CIVGVQGSSGGYQKVTF

SEQ ID NO: 625404 - protein, 18 aa, Homo sapiens
  CDR3 for beta chain variable domain of TCR clone 312702 (TRBV15, TRBJ2-3)
CATSRDGARSWDTDTQDF

SEQ ID NO: 625405 - protein, 15 aa, Homo sapiens
  CDR3 for alpha chain variable domain of TCR clone 312703 (TRAV13-1, TRAJ39)
CAASPLNNAGNLLTF

SEQ ID NO: 625406 - protein, 15 aa, Homo sapiens
  CDR3 for beta chain variable domain of TCR clone 312703 (TRBV7-6, TRBJ2-1)
CASSSLAGEGNEQFF

SEQ ID NO: 625407 - protein, 17 aa, Homo sapiens
  CDR3 for alpha chain variable domain of TCR clone 312704 (TRAV12-3, TRAJ6)
CAMSARGGAGGRYRPTF

SEQ ID NO: 625408 - protein, 12 aa, Homo sapiens
  CDR3 for beta chain variable domain of TCR clone 312704 (TRBV12-4, TRBJ2-3)
CASSTLPDTQYF

SEQ ID NO: 625409 - protein, 14 aa, Homo sapiens
  CDR3 for alpha chain variable domain of TCR clone 312705 (TRAV21, TRAJ35)
CAVMPIGFGNVLHC

SEQ ID NO: 625410 - protein, 18 aa, Homo sapiens
  CDR3 for beta chain variable domain of TCR clone 312705 (TRBV7-2, TRBJ2-3)
CASSLKREGSGITDTQYF

SEQ ID NO: 625411 - protein, 13 aa, Homo sapiens
  CDR3 for alpha chain variable domain of TCR clone 312706 (TRAV19, TRAJ26)
CALTFDYGQNFFF

SEQ ID NO: 625412 - protein, 14 aa, Homo sapiens
  CDR3 for beta chain variable domain of TCR clone 312706 (TRBV7-8, TRBJ2-3)
CASSLEAGTDTQYF

SEQ ID NO: 625413 - protein, 16 aa, Homo sapiens
  CDR3 for alpha chain variable domain of TCR clone 312707 (TRAV30, TRAJ24)
CGTEIVDVDSWGKFQF

SEQ ID NO: 625414 - protein, 12 aa, Homo sapiens
  CDR3 for beta chain variable domain of TCR clone 312707 (TRBV11-2, TRBJ2-1)
CASSPGNNEQFF

SEQ ID NO: 625415 - protein, 14 aa, Homo sapiens
  CDR3 for alpha chain variable domain of TCR clone 312708 (TRAV27, TRAJ49)
CAGRPEGTGNQFYL

SEQ ID NO: 625416 - protein, 15 aa, Homo sapiens
  CDR3 for beta chain variable domain of TCR clone 312708 (TRBV19, TRBJ2-1)
CASSIQATSYNEQFF

SEQ ID NO: 625417 - protein, 10 aa, Homo sapiens
  CDR3 for alpha chain variable domain of TCR clone 312709 (TRAV2, TRAJ34)
CAVVNDKLIF

SEQ ID NO: 625418 - protein, 15 aa, Homo sapiens
  CDR3 for beta chain variable domain of TCR clone 312709 (TRBV3-1, TRBJ2-2)
CASSQDWTRAWELFF

SEQ ID NO: 625419 - protein, 14 aa, Homo sapiens
  CDR3 for alpha chain variable domain of TCR clone 312710 (TRAV9-2, TRAJ39)
CALYIYNAGNMLTF

SEQ ID NO: 625420 - protein, 18 aa, Homo sapiens
  CDR3 for beta chain variable domain of TCR clone 312710 (TRBV10-3, TRBJ2-7)
CAISESGRPSGGRVEQYF

SEQ ID NO: 625421 - protein, 13 aa, Homo sapiens
  CDR3 for alpha chain variable domain of TCR clone 312711 (TRAV27, TRAJ45)
CRSSGGGADGLTF

SEQ ID NO: 625422 - protein, 17 aa, Homo sapiens
  CDR3 for beta chain variable domain of TCR clone 312711 (TRBV6-1, TRBJ2-7)
CASRARLAGSPSYEQYF

SEQ ID NO: 625423 - protein, 12 aa, Homo sapiens
  CDR3 for alpha chain variable domain of TCR clone 312712 (TRAV1-2, TRAJ7)
CAVAYGNNRLAF

SEQ ID NO: 625424 - protein, 12 aa, Homo sapiens
  CDR3 for beta chain variable domain of TCR clone 312712 (TRBV12-4, TRBJ2-7)
CASSLGGYEQYF

SEQ ID NO: 625425 - protein, 13 aa, Homo sapiens
  CDR3 for alpha chain variable domain of TCR clone 312713 (TRAV8-3, TRAJ48)
CAVVPFGNEKLTF

SEQ ID NO: 625426 - protein, 14 aa, Homo sapiens
  CDR3 for beta chain variable domain of TCR clone 312713 (TRBV18, TRBJ2-7)
CASSPRGGPYEQYF

SEQ ID NO: 625427 - protein, 11 aa, Homo sapiens
  CDR3 for alpha chain variable domain of TCR clone 312714 (TRAV13-2, TRAJ26)
CAEIPGQNFFF

SEQ ID NO: 625428 - protein, 19 aa, Homo sapiens
  CDR3 for beta chain variable domain of TCR clone 312714 (TRBV19, TRBJ2-2)
CASTRPGLAGGRVTGELFF

SEQ ID NO: 625429 - protein, 15 aa, Homo sapiens
  CDR3 for alpha chain variable domain of TCR clone 312715 (TRAV1-2, TRAJ18)
CAWEGRGSTLGRLYF

SEQ ID NO: 625430 - protein, 17 aa, Homo sapiens
  CDR3 for beta chain variable domain of TCR clone 312715 (TRBV10-3, TRBJ1-4)
CAISESYGRWKNEKLFF

SEQ ID NO: 625431 - protein, 14 aa, Homo sapiens
  CDR3 for alpha chain variable domain of TCR clone 312716 (TRAV38-1, TRAJ45)
RAYYSGGGADGPTF

SEQ ID NO: 625432 - protein, 20 aa, Homo sapiens
  CDR3 for beta chain variable domain of TCR clone 312716 (TRBV28, TRBJ2-1)
CASTPIGRSPGLAGGNEQFF

SEQ ID NO: 625433 - protein, 17 aa, Homo sapiens
  CDR3 for alpha chain variable domain of TCR clone 312717 (TRAV35, TRAJ38)
CAGQLQRNAGNNRKLIW

SEQ ID NO: 625434 - protein, 15 aa, Homo sapiens
  CDR3 for beta chain variable domain of TCR clone 312717 (TRBV10-2, TRBJ2-6)
CASSEQGTGANVLTF

SEQ ID NO: 625435 - protein, 18 aa, Homo sapiens
  CDR3 for alpha chain variable domain of TCR clone 312718 (TRAV13-1, TRAJ52)
CAASKRSAGGTSYGKLTF

SEQ ID NO: 625436 - protein, 14 aa, Homo sapiens
  CDR3 for beta chain variable domain of TCR clone 312718 (TRBV2, TRBJ1-5)
CASSGTVSNQPQHF

SEQ ID NO: 625437 - protein, 15 aa, Homo sapiens
  CDR3 for alpha chain variable domain of TCR clone 312719 (TRAV12-1, TRAJ44)
CVVDEYTGTASKLTF

SEQ ID NO: 625438 - protein, 14 aa, Homo sapiens
  CDR3 for beta chain variable domain of TCR clone 312719 (TRBV5-1, TRBJ1-2)
CASSLEPVNYGHTF

SEQ ID NO: 625439 - protein, 16 aa, Homo sapiens
  CDR3 for alpha chain variable domain of TCR clone 312720 (TRAV29/DV5, TRAJ53)
CAENANSGGSNYKLTF

SEQ ID NO: 625440 - protein, 19 aa, Homo sapiens
  CDR3 for beta chain variable domain of TCR clone 312720 (TRBV28, TRBJ2-7)
CASSYSGTSRLGWVYEQYF

SEQ ID NO: 625441 - protein, 14 aa, Homo sapiens
  CDR3 for alpha chain variable domain of TCR clone 312721 (TRAV1-2, TRAJ16)
CAVNRFSDGQKLLF

SEQ ID NO: 625442 - protein, 15 aa, Homo sapiens
  CDR3 for beta chain variable domain of TCR clone 312721 (TRBV9, TRBJ1-6)
CASKVAGTGDSPLHF

SEQ ID NO: 625443 - protein, 12 aa, Homo sapiens
  CDR3 for alpha chain variable domain of TCR clone 312722 (TRAV17, TRAJ20)
CATYSNDYKLSF

SEQ ID NO: 625444 - protein, 13 aa, Homo sapiens
  CDR3 for beta chain variable domain of TCR clone 312722 (TRBV19, TRBJ2-7)
CASSPRQSYEQYF

SEQ ID NO: 625445 - protein, 11 aa, Homo sapiens
  CDR3 for alpha chain variable domain of TCR clone 312723 (TRAV2, TRAJ13)
CASGGYQKVTF

SEQ ID NO: 625446 - protein, 16 aa, Homo sapiens
  CDR3 for beta chain variable domain of TCR clone 312723 (TRBV4-3, TRBJ2-1)
CASSPALDRGVNEQFF

SEQ ID NO: 625447 - protein, 12 aa, Homo sapiens
  CDR3 for alpha chain variable domain of TCR clone 312724 (TRAV35, TRAJ43)
CAGAYNNNAMRF

SEQ ID NO: 625448 - protein, 14 aa, Homo sapiens
  CDR3 for beta chain variable domain of TCR clone 312724 (TRBV2, TRBJ2-2)
CASSWQGATGELFF

SEQ ID NO: 625449 - protein, 17 aa, Homo sapiens
  CDR3 for alpha chain variable domain of TCR clone 312725 (TRAV36/DV7, TRAJ52)
CAVAQRAGGTSYGKLTF

SEQ ID NO: 625450 - protein, 14 aa, Homo sapiens
  CDR3 for beta chain variable domain of TCR clone 312725 (TRBV7-8, TRBJ2-3)
CASSSRDSTDTQYF

SEQ ID NO: 625451 - protein, 17 aa, Homo sapiens
  CDR3 for alpha chain variable domain of TCR clone 312726 (TRAV3, TRAJ38)
CAVRDCLNAVNNSKLIW

SEQ ID NO: 625452 - protein, 14 aa, Homo sapiens
  CDR3 for beta chain variable domain of TCR clone 312726 (TRBV5-5, TRBJ1-5)
CASSGQGVDQPQHF

SEQ ID NO: 625453 - protein, 13 aa, Homo sapiens
  CDR3 for alpha chain variable domain of TCR clone 312727 (TRAV35, TRAJ36)
CAGPRIGANNLFF

SEQ ID NO: 625454 - protein, 15 aa, Homo sapiens
  CDR3 for beta chain variable domain of TCR clone 312727 (TRBV28, TRBJ2-5)
CASSPSWSYQENQYF

SEQ ID NO: 625455 - protein, 13 aa, Homo sapiens
  CDR3 for alpha chain variable domain of TCR clone 312728 (TRAV35, TRAJ21)
CAGQLSNFNKFYF

SEQ ID NO: 625456 - protein, 16 aa, Homo sapiens
  CDR3 for beta chain variable domain of TCR clone 312728 (TRBV28, TRBJ2-2)
CASSLEGGSNTGELFF

SEQ ID NO: 625457 - protein, 15 aa, Homo sapiens
  CDR3 for alpha chain variable domain of TCR clone 312729 (TRAV39, TRAJ42)
CAVVNYGGSQGNLIF

SEQ ID NO: 625458 - protein, 15 aa, Homo sapiens
  CDR3 for beta chain variable domain of TCR clone 312729 (TRBV10-3, TRBJ1-1)
CAISDLGRANTEAFV

SEQ ID NO: 625459 - protein, 17 aa, Homo sapiens
  CDR3 for alpha chain variable domain of TCR clone 312730 (TRAV26-1, TRAJ53)
CIVRVDDSGGSNYKLTF

SEQ ID NO: 625460 - protein, 14 aa, Homo sapiens
  CDR3 for beta chain variable domain of TCR clone 312730 (TRBV7-2, TRBJ2-4)
CASSLSGGANIQYF

SEQ ID NO: 625461 - protein, 14 aa, Homo sapiens
  CDR3 for alpha chain variable domain of TCR clone 312731 (TRAV1-2, TRAJ8)
CAVREGTGFQKLVF

SEQ ID NO: 625462 - protein, 16 aa, Homo sapiens
  CDR3 for beta chain variable domain of TCR clone 312731 (TRBV20-1, TRBJ2-1)
CSARDLKQGMNNEQFF

SEQ ID NO: 625463 - protein, 16 aa, Homo sapiens
  CDR3 for alpha chain variable domain of TCR clone 312732 (TRAV14/DV4, TRAJ53)
CAMREGGGGSNYKLTF

SEQ ID NO: 625464 - protein, 14 aa, Homo sapiens
  CDR3 for beta chain variable domain of TCR clone 312732 (TRBV2, TRBJ1-2)
CASNEGTGPYGYTF

SEQ ID NO: 625465 - protein, 11 aa, Homo sapiens
  CDR3 for alpha chain variable domain of TCR clone 312733 (TRAV12-3, TRAJ43)
CAMSVSNDMRF

SEQ ID NO: 625466 - protein, 16 aa, Homo sapiens
  CDR3 for beta chain variable domain of TCR clone 312733 (TRBV4-1, TRBJ1-1)
CASSQDAGMGNTEAFF

SEQ ID NO: 625467 - protein, 14 aa, Homo sapiens
  CDR3 for alpha chain variable domain of TCR clone 312734 (TRAV27, TRAJ12)
CAGARMDSSYKLIF

SEQ ID NO: 625468 - protein, 18 aa, Homo sapiens
  CDR3 for beta chain variable domain of TCR clone 312734 (TRBV10-3, TRBJ2-7)
WAISESGRPSGGRVEQYF

SEQ ID NO: 625469 - protein, 14 aa, Homo sapiens
  CDR3 for alpha chain variable domain of TCR clone 312735 (TRAV26-1, TRAJ38)
CIVDNAGNNRKLIW

SEQ ID NO: 625470 - protein, 15 aa, Homo sapiens
  CDR3 for beta chain variable domain of TCR clone 312735 (TRBV9, TRBJ1-6)
CASSVAGTGDSPLHF

SEQ ID NO: 625471 - protein, 14 aa, Homo sapiens
  CDR3 for alpha chain variable domain of TCR clone 312736 (TRAV26-1, TRAJ40)
CIVRLLSGTYKYIF

SEQ ID NO: 625472 - protein, 15 aa, Homo sapiens
  CDR3 for beta chain variable domain of TCR clone 312736 (TRBV5-1, TRBJ2-1)
CASSLVANSYNEQFF

SEQ ID NO: 625473 - protein, 14 aa, Homo sapiens
  CDR3 for alpha chain variable domain of TCR clone 312737 (TRAV29/DV5, TRAJ36)
CAARRKTGSNNLFF

SEQ ID NO: 625474 - protein, 15 aa, Homo sapiens
  CDR3 for beta chain variable domain of TCR clone 312737 (TRBV7-9, TRBJ1-4)
CASSARTGGNEKLFF

SEQ ID NO: 625475 - protein, 14 aa, Homo sapiens
  CDR3 for alpha chain variable domain of TCR clone 312738 (TRAV12-2, TRAJ40)
CAVKIPSGTYKYTF

SEQ ID NO: 625476 - protein, 14 aa, Homo sapiens
  CDR3 for beta chain variable domain of TCR clone 312738 (TRBV20-1, TRBJ1-1)
CSAQTRIGGTEAFL

SEQ ID NO: 625477 - protein, 15 aa, Homo sapiens
  CDR3 for alpha chain variable domain of TCR clone 312739 (TRAV29/DV5, TRAJ48)
CAASASNFGNEKLTF

SEQ ID NO: 625478 - protein, 14 aa, Homo sapiens
  CDR3 for beta chain variable domain of TCR clone 312739 (TRBV27, TRBJ2-2)
CASRPGVNTGELFF

SEQ ID NO: 625479 - protein, 12 aa, Homo sapiens
  CDR3 for alpha chain variable domain of TCR clone 312740 (TRAV1-1, TRAJ9)
CAVDTGGFKTIF

SEQ ID NO: 625480 - protein, 14 aa, Homo sapiens
  CDR3 for beta chain variable domain of TCR clone 312740 (TRBV7-8, TRBJ2-5)
CASSATGGQENQYF

SEQ ID NO: 625481 - protein, 17 aa, Homo sapiens
  CDR3 for alpha chain variable domain of TCR clone 312741 (TRAV3, TRAJ6)
CAVRDGPRAGGSYIPTF

SEQ ID NO: 625482 - protein, 16 aa, Homo sapiens
  CDR3 for beta chain variable domain of TCR clone 312741 (TRBV7-8, TRBJ2-3)
CASSTEGQRETDTQYF

SEQ ID NO: 625483 - protein, 14 aa, Homo sapiens
  CDR3 for alpha chain variable domain of TCR clone 312742 (TRAV20, TRAJ29)
CAVQAWVGNTPLVF

SEQ ID NO: 625484 - protein, 14 aa, Homo sapiens
  CDR3 for beta chain variable domain of TCR clone 312742 (TRBV11-2, TRBJ2-3)
CASSRLARTETQYF

SEQ ID NO: 625485 - protein, 13 aa, Homo sapiens
  CDR3 for alpha chain variable domain of TCR clone 312743 (TRAV21, TRAJ20)
CAVGLKVDYKLSF

SEQ ID NO: 625486 - protein, 20 aa, Homo sapiens
  CDR3 for beta chain variable domain of TCR clone 312743 (TRBV7-8, TRBJ2-2)
CASSHLFPGPTIHITGELFF

SEQ ID NO: 625487 - protein, 17 aa, Homo sapiens
  CDR3 for alpha chain variable domain of TCR clone 312744 (TRAV3, TRAJ38)
RAVRDCLNAGNNRKLIW

SEQ ID NO: 625488 - protein, 14 aa, Homo sapiens
  CDR3 for beta chain variable domain of TCR clone 312744 (TRBV12-5, TRBJ2-5)
CASGSRTHQETQYF

SEQ ID NO: 625489 - protein, 15 aa, Homo sapiens
  CDR3 for alpha chain variable domain of TCR clone 312745 (TRAV3, TRAJ22)
CAVRDRGGSARQLTF

SEQ ID NO: 625490 - protein, 15 aa, Homo sapiens
  CDR3 for beta chain variable domain of TCR clone 312745 (TRBV7-2, TRBJ2-7)
CASSLLGTGSYEQYF

SEQ ID NO: 625491 - protein, 13 aa, Homo sapiens
  CDR3 for alpha chain variable domain of TCR clone 312746 (TRAV29/DV5, TRAJ34)
CAARVDNTDKLIF

SEQ ID NO: 625492 - protein, 13 aa, Homo sapiens
  CDR3 for beta chain variable domain of TCR clone 312746 (TRBV12-5, TRBJ2-3)
CASGDRQSDTQYF

SEQ ID NO: 625493 - protein, 13 aa, Homo sapiens
  CDR3 for alpha chain variable domain of TCR clone 312747 (TRAV13-2, TRAJ48)
GAEMDFGNEKLTF

SEQ ID NO: 625494 - protein, 15 aa, Homo sapiens
  CDR3 for beta chain variable domain of TCR clone 312747 (TRBV7-9, TRBJ1-6)
CASSSPGRGNSPLHS

SEQ ID NO: 625495 - protein, 15 aa, Homo sapiens
  CDR3 for alpha chain variable domain of TCR clone 312748 (TRAV3, TRAJ3)
CAVRDRRRSASKIIF

SEQ ID NO: 625496 - protein, 17 aa, Homo sapiens
  CDR3 for beta chain variable domain of TCR clone 312748 (TRBV5-6, TRBJ2-5)
CQQHARFGQLYQETQYF

SEQ ID NO: 625497 - protein, 12 aa, Homo sapiens
  CDR3 for alpha chain variable domain of TCR clone 312749 (TRAV17, TRAJ20)
CATDSNDYKLSF

SEQ ID NO: 625498 - protein, 15 aa, Homo sapiens
  CDR3 for beta chain variable domain of TCR clone 312749 (TRBV10-1, TRBJ2-3)
CASSATSGGFDTQYF

SEQ ID NO: 625499 - protein, 14 aa, Homo sapiens
  CDR3 for alpha chain variable domain of TCR clone 312750 (TRAV30, TRAJ33)
CGTVAPRSNYQLIW

SEQ ID NO: 625500 - protein, 17 aa, Homo sapiens
  CDR3 for beta chain variable domain of TCR clone 312750 (TRBV5-1, TRBJ2-1)
CASSSTAGTSGRREQFF

SEQ ID NO: 625501 - protein, 12 aa, Homo sapiens
  CDR3 for alpha chain variable domain of TCR clone 312751 (TRAV13-1, TRAJ27)
CAADTNAGKSTF

SEQ ID NO: 625502 - protein, 14 aa, Homo sapiens
  CDR3 for beta chain variable domain of TCR clone 312751 (TRBV12-5, TRBJ2-5)
CASGSRTHQETQYF

SEQ ID NO: 625503 - protein, 14 aa, Homo sapiens
  CDR3 for alpha chain variable domain of TCR clone 312752 (TRAV12-2, TRAJ4)
CAVLIGGGYNKLIF

SEQ ID NO: 625504 - protein, 14 aa, Homo sapiens
  CDR3 for beta chain variable domain of TCR clone 312752 (TRBV5-1, TRBJ2-7)
CASSRGESLYEQYF

SEQ ID NO: 625505 - protein, 12 aa, Homo sapiens
  CDR3 for alpha chain variable domain of TCR clone 312753 (TRAV23/DV6, TRAJ33)
CAAEDSNYQLIW

SEQ ID NO: 625506 - protein, 13 aa, Homo sapiens
  CDR3 for beta chain variable domain of TCR clone 312753 (TRBV7-2, TRBJ1-1)
CASNLKGAKVAFF

SEQ ID NO: 625507 - protein, 14 aa, Homo sapiens
  CDR3 for alpha chain variable domain of TCR clone 312754 (TRAV17, TRAJ56)
CATDYTGANSKLIF

SEQ ID NO: 625508 - protein, 14 aa, Homo sapiens
  CDR3 for beta chain variable domain of TCR clone 312754 (TRBV18, TRBJ2-1)
CASSPVRGDNEQFF

SEQ ID NO: 625509 - protein, 11 aa, Homo sapiens
  CDR3 for alpha chain variable domain of TCR clone 312755 (TRAV16, TRAJ31)
CALFNNARLMF

SEQ ID NO: 625510 - protein, 15 aa, Homo sapiens
  CDR3 for beta chain variable domain of TCR clone 312755 (TRBV2, TRBJ2-7)
CASSEGLARSYEQYF

SEQ ID NO: 625511 - protein, 12 aa, Homo sapiens
  CDR3 for alpha chain variable domain of TCR clone 312756 (TRAV26-1, TRAJ35)
CIGLSFGNVLHC

SEQ ID NO: 625512 - protein, 15 aa, Homo sapiens
  CDR3 for beta chain variable domain of TCR clone 312756 (TRBV11-2, TRBJ1-6)
CASSLDPWAVSPLHF

SEQ ID NO: 625513 - protein, 15 aa, Homo sapiens
  CDR3 for alpha chain variable domain of TCR clone 312757 (TRAV4, TRAJ17)
CLVGDIGAAGNKLTF

SEQ ID NO: 625514 - protein, 14 aa, Homo sapiens
  CDR3 for beta chain variable domain of TCR clone 312757 (TRBV6-3, TRBJ2-7)
CASSYSVRVYEHYF

SEQ ID NO: 625515 - protein, 14 aa, Homo sapiens
  CDR3 for alpha chain variable domain of TCR clone 312758 (TRAV4, TRAJ32)
FLVNYGGATNKLIF

SEQ ID NO: 625516 - protein, 14 aa, Homo sapiens
  CDR3 for beta chain variable domain of TCR clone 312758 (TRBV15, TRBJ2-5)
CATSGGTRTETQYF

SEQ ID NO: 625517 - protein, 16 aa, Homo sapiens
  CDR3 for alpha chain variable domain of TCR clone 312759 (TRAV12-3, TRAJ53)
CAMSPGSGGSNYKLTF

SEQ ID NO: 625518 - protein, 15 aa, Homo sapiens
  CDR3 for beta chain variable domain of TCR clone 312759 (TRBV18, TRBJ2-7)
CASSPSSTGNYEEYF

SEQ ID NO: 625519 - protein, 12 aa, Homo sapiens
  CDR3 for alpha chain variable domain of TCR clone 312760 (TRAV2, TRAJ33)
CAVPDSNYQLIW

SEQ ID NO: 625520 - protein, 20 aa, Homo sapiens
  CDR3 for beta chain variable domain of TCR clone 312760 (TRBV19, TRBJ2-1)
CASSISRTGTSTRLNNEQFF

SEQ ID NO: 625521 - protein, 15 aa, Homo sapiens
  CDR3 for alpha chain variable domain of TCR clone 312761 (TRAV35, TRAJ38)
CAGFSNSGNNRKLIW

SEQ ID NO: 625522 - protein, 18 aa, Homo sapiens
  CDR3 for beta chain variable domain of TCR clone 312761 (TRBV3-1, TRBJ1-2)
CASSQDVIGWNGDYGYTF

SEQ ID NO: 625523 - protein, 11 aa, Homo sapiens
  CDR3 for alpha chain variable domain of TCR clone 312762 (TRAV3, TRAJ32)
CAVREGIMVVL

SEQ ID NO: 625524 - protein, 12 aa, Homo sapiens
  CDR3 for beta chain variable domain of TCR clone 312762 (TRBV7-8, TRBJ2-7)
CASSLGDREQYF

SEQ ID NO: 625525 - protein, 15 aa, Homo sapiens
  CDR3 for alpha chain variable domain of TCR clone 312763 (TRAV2, TRAJ9)
CAVEDRGTGGFKTIF

SEQ ID NO: 625526 - protein, 15 aa, Homo sapiens
  CDR3 for beta chain variable domain of TCR clone 312763 (TRBV7-2, TRBJ2-1)
CASSLASGRVNEQFF

SEQ ID NO: 625527 - protein, 16 aa, Homo sapiens
  CDR3 for alpha chain variable domain of TCR clone 312764 (TRAV8-3, TRAJ10)
CAVGPILTGGGDKLTF

SEQ ID NO: 625528 - protein, 16 aa, Homo sapiens
  CDR3 for beta chain variable domain of TCR clone 312764 (TRBV7-2, TRBJ2-5)
CASSSKWLSGQETQYF

SEQ ID NO: 625529 - protein, 18 aa, Homo sapiens
  CDR3 for alpha chain variable domain of TCR clone 312765 (TRAV8-3, TRAJ4)
WVRDPTSNDPGGYNKLSF

SEQ ID NO: 625530 - protein, 13 aa, Homo sapiens
  CDR3 for beta chain variable domain of TCR clone 312765 (TRBV20-1, TRBJ1-2)
CSATGIQGSGYTF

SEQ ID NO: 625531 - protein, 16 aa, Homo sapiens
  CDR3 for alpha chain variable domain of TCR clone 312766 (TRAV26-1, TRAJ32)
CIVRTNYGGATNKLIF

SEQ ID NO: 625532 - protein, 13 aa, Homo sapiens
  CDR3 for beta chain variable domain of TCR clone 312766 (TRBV10-3, TRBJ2-7)
CASKLAVNYEQYF

SEQ ID NO: 625533 - protein, 11 aa, Homo sapiens
  CDR3 for alpha chain variable domain of TCR clone 312767 (TRAV21, TRAJ48)
CAVDGNGELTF

SEQ ID NO: 625534 - protein, 16 aa, Homo sapiens
  CDR3 for beta chain variable domain of TCR clone 312767 (TRBV19, TRBJ2-1)
CASSSKGTRSYNEQFF

SEQ ID NO: 625535 - protein, 18 aa, Homo sapiens
  CDR3 for alpha chain variable domain of TCR clone 312768 (TRAV21, TRAJ52)
CAVRPSPAGGTRYGKLIF

SEQ ID NO: 625536 - protein, 17 aa, Homo sapiens
  CDR3 for beta chain variable domain of TCR clone 312768 (TRBV13, TRBJ2-3)
CASSLSRVAGGRNTQYF

SEQ ID NO: 625537 - protein, 15 aa, Homo sapiens
  CDR3 for alpha chain variable domain of TCR clone 312769 (TRAV21, TRAJ53)
CATSNSGGSNYKLTF

SEQ ID NO: 625538 - protein, 13 aa, Homo sapiens
  CDR3 for beta chain variable domain of TCR clone 312769 (TRBV7-2, TRBJ2-2)
CASSLAVTGELFF

SEQ ID NO: 625539 - protein, 16 aa, Homo sapiens
  CDR3 for alpha chain variable domain of TCR clone 312770 (TRAV23/DV6, TRAJ9)
FAASIGGNTGGFKTIF

SEQ ID NO: 625540 - protein, 14 aa, Homo sapiens
  CDR3 for beta chain variable domain of TCR clone 312770 (TRBV6-1, TRBJ1-3)
CASVQGGGGNTIYF

SEQ ID NO: 625541 - protein, 12 aa, Homo sapiens
  CDR3 for alpha chain variable domain of TCR clone 312771 (TRAV13-2, TRAJ23)
CAERHRGGKLIF

SEQ ID NO: 625542 - protein, 11 aa, Homo sapiens
  CDR3 for beta chain variable domain of TCR clone 312771 (TRBV25-1, TRBJ2-1)
CATTRISEQFF

SEQ ID NO: 625543 - protein, 23 aa, Homo sapiens
  CDR3 for alpha chain variable domain of TCR clone 312772 (TRAV21, TRAJ39)
AASQPGDSTTYPLLVNAGNMLTF

SEQ ID NO: 625544 - protein, 12 aa, Homo sapiens
  CDR3 for beta chain variable domain of TCR clone 312772 (TRBV3-1, TRBJ2-1)
CASSQGSSGQFF

SEQ ID NO: 625545 - protein, 14 aa, Homo sapiens
  CDR3 for alpha chain variable domain of TCR clone 312773 (TRAV8-3, TRAJ4)
CAAGAAGGYNKLIF

SEQ ID NO: 625546 - protein, 14 aa, Homo sapiens
  CDR3 for beta chain variable domain of TCR clone 312773 (TRBV12-5, TRBJ2-5)
CASGSRTHQETQYF

SEQ ID NO: 625547 - protein, 13 aa, Homo sapiens
  CDR3 for alpha chain variable domain of TCR clone 312774 (TRAV8-6, TRAJ54)
CAVSDHGARKLVF

SEQ ID NO: 625548 - protein, 17 aa, Homo sapiens
  CDR3 for beta chain variable domain of TCR clone 312774 (TRBV19, TRBJ1-1)
CASSIAGRGLMNTEAFF

SEQ ID NO: 625549 - protein, 15 aa, Homo sapiens
  CDR3 for alpha chain variable domain of TCR clone 312775 (TRAV4, TRAJ39)
CLVGPNNNSGNMLTF

SEQ ID NO: 625550 - protein, 15 aa, Homo sapiens
  CDR3 for beta chain variable domain of TCR clone 312775 (TRBV7-3, TRBJ2-1)
CASSPTGGGEVEQFF

SEQ ID NO: 625551 - protein, 14 aa, Homo sapiens
  CDR3 for alpha chain variable domain of TCR clone 312776 (TRAV13-2, TRAJ43)
CAEIPTYNNNDMRF

SEQ ID NO: 625552 - protein, 15 aa, Homo sapiens
  CDR3 for beta chain variable domain of TCR clone 312776 (TRBV7-9, TRBJ2-2)
CASGPLDTFPGELFY

SEQ ID NO: 625553 - protein, 14 aa, Homo sapiens
  CDR3 for alpha chain variable domain of TCR clone 312777 (TRAV21, TRAJ23)
CAIMIYNQGGKPIF

SEQ ID NO: 625554 - protein, 18 aa, Homo sapiens
  CDR3 for beta chain variable domain of TCR clone 312777 (TRBV20-1, TRBJ2-6)
CSAETTPTHGSGANVLTF

SEQ ID NO: 625555 - protein, 14 aa, Homo sapiens
  CDR3 for alpha chain variable domain of TCR clone 312778 (TRAV2, TRAJ9)
CAVEDRSGGFKTIV

SEQ ID NO: 625556 - protein, 15 aa, Homo sapiens
  CDR3 for beta chain variable domain of TCR clone 312778 (TRBV28, TRBJ2-7)
CASSLISGGSYEQYF

SEQ ID NO: 625557 - protein, 14 aa, Homo sapiens
  CDR3 for alpha chain variable domain of TCR clone 312779 (TRAV2, TRAJ23)
CAVGLRNQGGKLIF

SEQ ID NO: 625558 - protein, 14 aa, Homo sapiens
  CDR3 for beta chain variable domain of TCR clone 312779 (TRBV6-1, TRBJ1-3)
CASVQGGGGNTIYF

SEQ ID NO: 625559 - protein, 17 aa, Homo sapiens
  CDR3 for alpha chain variable domain of TCR clone 312780 (TRAV13-1, )
CAANIQNPDPGVYQLRD

SEQ ID NO: 625560 - protein, 14 aa, Homo sapiens
  CDR3 for beta chain variable domain of TCR clone 312780 (TRBV7-9, TRBJ2-1)
CASSPRDSLYEQFF

SEQ ID NO: 625561 - protein, 14 aa, Homo sapiens
  CDR3 for alpha chain variable domain of TCR clone 312781 (TRAV3, TRAJ42)
CCETLGGSQGNLTF

SEQ ID NO: 625562 - protein, 14 aa, Homo sapiens
  CDR3 for beta chain variable domain of TCR clone 312781 (TRBV19, TRBJ2-5)
CASSSSGIQETQYF

SEQ ID NO: 625563 - protein, 13 aa, Homo sapiens
  CDR3 for alpha chain variable domain of TCR clone 312782 (TRAV20, TRAJ21)
CAVEGYNFNKFSF

SEQ ID NO: 625564 - protein, 17 aa, Homo sapiens
  CDR3 for beta chain variable domain of TCR clone 312782 (TRBV7-3, TRBJ2-3)
CASSLMKRRRGAETQYF

SEQ ID NO: 625565 - protein, 14 aa, Homo sapiens
  CDR3 for alpha chain variable domain of TCR clone 312783 (TRAV1-2, TRAJ16)
CAVNRFSDGKKLLF

SEQ ID NO: 625566 - protein, 15 aa, Homo sapiens
  CDR3 for beta chain variable domain of TCR clone 312783 (TRBV20-1, TRBJ2-7)
CSARDRVSGMDEQYF

SEQ ID NO: 625567 - protein, 14 aa, Homo sapiens
  CDR3 for alpha chain variable domain of TCR clone 312784 (TRAV13-1, TRAJ35)
CAASKGGFGNVLHC

SEQ ID NO: 625568 - protein, 14 aa, Homo sapiens
  CDR3 for beta chain variable domain of TCR clone 312784 (TRBV7-8, TRBJ2-3)
CASSFPDGQDTQYC

SEQ ID NO: 625569 - protein, 13 aa, Homo sapiens
  CDR3 for alpha chain variable domain of TCR clone 312785 (TRAV20, TRAJ40)
CAVPFSGTYKYIF

SEQ ID NO: 625570 - protein, 13 aa, Homo sapiens
  CDR3 for beta chain variable domain of TCR clone 312785 (TRBV15, TRBJ2-5)
CATSQIGEETRYF

SEQ ID NO: 625571 - protein, 13 aa, Homo sapiens
  CDR3 for alpha chain variable domain of TCR clone 312786 (TRAV8-3, TRAJ5)
CAVGPRGRRALTF

SEQ ID NO: 625572 - protein, 16 aa, Homo sapiens
  CDR3 for beta chain variable domain of TCR clone 312786 (TRBV11-3, TRBJ2-3)
CASSPGALLGTDTQYF

SEQ ID NO: 625573 - protein, 16 aa, Homo sapiens
  CDR3 for alpha chain variable domain of TCR clone 312787 (TRAV4, TRAJ9)
CLVGDPNRPGGFKTIF

SEQ ID NO: 625574 - protein, 17 aa, Homo sapiens
  CDR3 for beta chain variable domain of TCR clone 312787 (TRBV11-2, TRBJ2-1)
CASSLYPPGVEYNEQFF

SEQ ID NO: 625575 - protein, 12 aa, Homo sapiens
  CDR3 for alpha chain variable domain of TCR clone 312788 (TRAV23/DV6, TRAJ17)
CAAKAAGNKLPF

SEQ ID NO: 625576 - protein, 17 aa, Homo sapiens
  CDR3 for beta chain variable domain of TCR clone 312788 (TRBV5-5, TRBJ1-1)
CASSLRFRGLMNTEAFF

SEQ ID NO: 625577 - protein, 13 aa, Homo sapiens
  CDR3 for alpha chain variable domain of TCR clone 312789 (TRAV12-1, TRAJ33)
CGDAPDSNYQVIW

SEQ ID NO: 625578 - protein, 12 aa, Homo sapiens
  CDR3 for beta chain variable domain of TCR clone 312789 (TRBV11-2, TRBJ2-2)
CASSLGGGELFF

SEQ ID NO: 625579 - protein, 15 aa, Homo sapiens
  CDR3 for alpha chain variable domain of TCR clone 312790 (TRAV2, TRAJ22)
CAVPSRGGSARQLTF

SEQ ID NO: 625580 - protein, 19 aa, Homo sapiens
  CDR3 for beta chain variable domain of TCR clone 312790 (TRBV7-9, TRBJ2-1)
CASSHNRGALLRSYNEQFF

SEQ ID NO: 625581 - protein, 16 aa, Homo sapiens
  CDR3 for alpha chain variable domain of TCR clone 312791 (TRAV12-3, TRAJ53)
CAISPGSGGTNYKLTF

SEQ ID NO: 625582 - protein, 11 aa, Homo sapiens
  CDR3 for beta chain variable domain of TCR clone 312791 (TRBV29-1, TRBJ2-5)
CSEDRTGTQYF

SEQ ID NO: 625583 - protein, 12 aa, Homo sapiens
  CDR3 for alpha chain variable domain of TCR clone 312792 (TRAV8-3, TRAJ26)
CAGDNYGQNFVF

SEQ ID NO: 625584 - protein, 14 aa, Homo sapiens
  CDR3 for beta chain variable domain of TCR clone 312792 (TRBV2, TRBJ2-5)
CASKRDGTTETQYF

SEQ ID NO: 625585 - protein, 17 aa, Homo sapiens
  CDR3 for alpha chain variable domain of TCR clone 312793 (TRAV12-1, TRAJ36)
CVVIKRSNWGKQPLLWA

SEQ ID NO: 625586 - protein, 17 aa, Homo sapiens
  CDR3 for beta chain variable domain of TCR clone 312793 (TRBV7-3, TRBJ2-3)
CASSLMKRMRGADTQYF

SEQ ID NO: 625587 - protein, 14 aa, Homo sapiens
  CDR3 for alpha chain variable domain of TCR clone 312794 (TRAV2, TRAJ37)
CAVDFTSNTGKLIF

SEQ ID NO: 625588 - protein, 15 aa, Homo sapiens
  CDR3 for beta chain variable domain of TCR clone 312794 (TRBV6-1, TRBJ1-3)
CASSDFGFSGNTIYF

SEQ ID NO: 625589 - protein, 12 aa, Homo sapiens
  CDR3 for alpha chain variable domain of TCR clone 312795 (TRAV12-1, TRAJ6)
CVVSERSYIPTF

SEQ ID NO: 625590 - protein, 17 aa, Homo sapiens
  CDR3 for beta chain variable domain of TCR clone 312795 (TRBV7-6, TRBJ2-5)
CASSSPQAGDPSETQYF

SEQ ID NO: 625591 - protein, 11 aa, Homo sapiens
  CDR3 for alpha chain variable domain of TCR clone 312796 (TRAV35, TRAJ34)
CWARNTDKPIF

SEQ ID NO: 625592 - protein, 14 aa, Homo sapiens
  CDR3 for beta chain variable domain of TCR clone 312796 (TRBV5-1, TRBJ2-7)
CASSRGEALYEQYF

SEQ ID NO: 625593 - protein, 15 aa, Homo sapiens
  CDR3 for alpha chain variable domain of TCR clone 312797 (TRAV8-3, TRAJ23)
CAVGDRYNQGGKLIF

SEQ ID NO: 625594 - protein, 15 aa, Homo sapiens
  CDR3 for beta chain variable domain of TCR clone 312797 (TRBV20-1, TRBJ2-7)
CSVRDRVSGMDEQYF

SEQ ID NO: 625595 - protein, 17 aa, Homo sapiens
  CDR3 for alpha chain variable domain of TCR clone 312798 (TRAV12-1, TRAJ13)
CVVNKRGEFGGLPESYL

SEQ ID NO: 625596 - protein, 17 aa, Homo sapiens
  CDR3 for beta chain variable domain of TCR clone 312798 (TRBV28, TRBJ2-5)
CASSTPEGDALQETQYF

SEQ ID NO: 625597 - protein, 14 aa, Homo sapiens
  CDR3 for alpha chain variable domain of TCR clone 312799 (TRAV26-1, TRAJ49)
CIVRLTNTGNQLYF

SEQ ID NO: 625598 - protein, 11 aa, Homo sapiens
  CDR3 for beta chain variable domain of TCR clone 312799 (TRBV29-1, TRBJ2-5)
CSEDRTGTQYF

SEQ ID NO: 625599 - protein, 16 aa, Homo sapiens
  CDR3 for alpha chain variable domain of TCR clone 312800 (TRAV14/DV4, TRAJ53)
CAMREGGGGSNYKLTF

SEQ ID NO: 625600 - protein, 19 aa, Homo sapiens
  CDR3 for beta chain variable domain of TCR clone 312800 (TRBV28, TRBJ2-4)
CASSFQPGGPAHSKNIQYV

SEQ ID NO: 625601 - protein, 12 aa, Homo sapiens
  CDR3 for alpha chain variable domain of TCR clone 312801 (TRAV8-3, TRAJ26)
CAGDNYGQNFVF

SEQ ID NO: 625602 - protein, 15 aa, Homo sapiens
  CDR3 for beta chain variable domain of TCR clone 312801 (TRBV11-2, TRBJ2-1)
CASSLGISGLNEQFF

SEQ ID NO: 625603 - protein, 14 aa, Homo sapiens
  CDR3 for alpha chain variable domain of TCR clone 312802 (TRAV12-2, TRAJ29)
FAVRRNSGNTPLVF

SEQ ID NO: 625604 - protein, 13 aa, Homo sapiens
  CDR3 for beta chain variable domain of TCR clone 312802 (TRBV12-4, TRBJ2-1)
CASSHYTDNEQFF

SEQ ID NO: 625605 - protein, 14 aa, Homo sapiens
  CDR3 for alpha chain variable domain of TCR clone 312803 (TRAV26-1, TRAJ38)
CIADNAGNNRKLIC

SEQ ID NO: 625606 - protein, 14 aa, Homo sapiens
  CDR3 for beta chain variable domain of TCR clone 312803 (TRBV11-2, TRBJ2-5)
CASSRTGGIETQYF

SEQ ID NO: 625607 - protein, 12 aa, Homo sapiens
  CDR3 for alpha chain variable domain of TCR clone 312804 (TRAV25, TRAJ53)
CKSGGSNYKLIF

SEQ ID NO: 625608 - protein, 17 aa, Homo sapiens
  CDR3 for beta chain variable domain of TCR clone 312804 (TRBV28, TRBJ2-7)
CASSPLHRASGVYEQYF

SEQ ID NO: 625609 - protein, 14 aa, Homo sapiens
  CDR3 for alpha chain variable domain of TCR clone 312805 (TRAV13-1, TRAJ20)
CAARPGSNDYKLSF

SEQ ID NO: 625610 - protein, 19 aa, Homo sapiens
  CDR3 for beta chain variable domain of TCR clone 312805 (TRBV25-1, TRBJ2-2)
CAILVYRVDRGRKTGELFF

SEQ ID NO: 625611 - protein, 13 aa, Homo sapiens
  CDR3 for alpha chain variable domain of TCR clone 312806 (TRAV3, TRAJ27)
CAVRPLGAGKSTF

SEQ ID NO: 625612 - protein, 13 aa, Homo sapiens
  CDR3 for beta chain variable domain of TCR clone 312806 (TRBV11-2, TRBJ2-1)
CASSLDLVNEQFF

SEQ ID NO: 625613 - protein, 15 aa, Homo sapiens
  CDR3 for alpha chain variable domain of TCR clone 312807 (TRAV3, TRAJ36)
CAVRASQIGANNLFF

SEQ ID NO: 625614 - protein, 13 aa, Homo sapiens
  CDR3 for beta chain variable domain of TCR clone 312807 (TRBV10-3, TRBJ1-2)
CAISERDSYGYTF

SEQ ID NO: 625615 - protein, 11 aa, Homo sapiens
  CDR3 for alpha chain variable domain of TCR clone 312808 (TRAV23/DV6, TRAJ48)
CAPRWGEKLTF

SEQ ID NO: 625616 - protein, 15 aa, Homo sapiens
  CDR3 for beta chain variable domain of TCR clone 312808 (TRBV12-4, TRBJ1-2)
CASSPITGGGYGYTF

SEQ ID NO: 625617 - protein, 15 aa, Homo sapiens
  CDR3 for alpha chain variable domain of TCR clone 312809 (TRAV3, TRAJ27)
CAVRDPLTNAGKSTC

SEQ ID NO: 625618 - protein, 14 aa, Homo sapiens
  CDR3 for beta chain variable domain of TCR clone 312809 (TRBV28, TRBJ2-1)
CQQYNRGGRSEQFF

SEQ ID NO: 625619 - protein, 15 aa, Homo sapiens
  CDR3 for alpha chain variable domain of TCR clone 312810 (TRAV2, TRAJ9)
CAVEDRGTGGFKTIF

SEQ ID NO: 625620 - protein, 13 aa, Homo sapiens
  CDR3 for beta chain variable domain of TCR clone 312810 (TRBV12-4, TRBJ1-1)
CASSFGEDTEAFF

SEQ ID NO: 625621 - protein, 15 aa, Homo sapiens
  CDR3 for alpha chain variable domain of TCR clone 312811 (TRAV12-1, TRAJ53)
CVVKSSGGSNYKLTF

SEQ ID NO: 625622 - protein, 12 aa, Homo sapiens
  CDR3 for beta chain variable domain of TCR clone 312811 (TRBV19, TRBJ2-1)
CASSRQGAEQFF

SEQ ID NO: 625623 - protein, 16 aa, Homo sapiens
  CDR3 for alpha chain variable domain of TCR clone 312812 (TRAV30, TRAJ24)
CGTEIVDAESWGRFQF

SEQ ID NO: 625624 - protein, 14 aa, Homo sapiens
  CDR3 for beta chain variable domain of TCR clone 312812 (TRBV12-5, TRBJ2-5)
CASGSRTHQETQYF

SEQ ID NO: 625625 - protein, 17 aa, Homo sapiens
  CDR3 for alpha chain variable domain of TCR clone 312813 (TRAV3, TRAJ6)
CAVRDGPRAGGSYIHTF

SEQ ID NO: 625626 - protein, 14 aa, Homo sapiens
  CDR3 for beta chain variable domain of TCR clone 312813 (TRBV7-2, TRBJ2-7)
CASSSKTSFYEQYF

SEQ ID NO: 625627 - protein, 13 aa, Homo sapiens
  CDR3 for alpha chain variable domain of TCR clone 312814 (TRAV12-2, TRAJ9)
CAVKWAGGFKTIF

SEQ ID NO: 625628 - protein, 17 aa, Homo sapiens
  CDR3 for beta chain variable domain of TCR clone 312814 (TRBV11-3, TRBJ2-5)
CASSRPGVRGGKETQYF

SEQ ID NO: 625629 - protein, 12 aa, Homo sapiens
  CDR3 for alpha chain variable domain of TCR clone 312815 (TRAV12-3, TRAJ17)
CAMTLTGNKLTF

SEQ ID NO: 625630 - protein, 13 aa, Homo sapiens
  CDR3 for beta chain variable domain of TCR clone 312815 (TRBV27, TRBJ2-7)
CASSLRHRYEQYF

SEQ ID NO: 625631 - protein, 16 aa, Homo sapiens
  CDR3 for alpha chain variable domain of TCR clone 312816 (TRAV17, TRAJ52)
CASSNAGGTSYGKLTF

SEQ ID NO: 625632 - protein, 13 aa, Homo sapiens
  CDR3 for beta chain variable domain of TCR clone 312816 (TRBV27, TRBJ1-6)
CASSLVLVSPLHF

SEQ ID NO: 625633 - protein, 15 aa, Homo sapiens
  CDR3 for alpha chain variable domain of TCR clone 312817 (TRAV13-1, TRAJ10)
CAAKALTGGGNKLTF

SEQ ID NO: 625634 - protein, 16 aa, Homo sapiens
  CDR3 for beta chain variable domain of TCR clone 312817 (TRBV19, TRBJ2-2)
CASSTARASNTGELFF

SEQ ID NO: 625635 - protein, 14 aa, Homo sapiens
  CDR3 for alpha chain variable domain of TCR clone 312818 (TRAV12-2, TRAJ24)
CAVTPADSWGKLQF

SEQ ID NO: 625636 - protein, 14 aa, Homo sapiens
  CDR3 for beta chain variable domain of TCR clone 312818 (TRBV18, TRBJ2-7)
CASSPRGGAYEQYF

SEQ ID NO: 625637 - protein, 14 aa, Homo sapiens
  CDR3 for alpha chain variable domain of TCR clone 312819 (TRAV9-2, TRAJ39)
CALYIYNAGNMLTF

SEQ ID NO: 625638 - protein, 14 aa, Homo sapiens
  CDR3 for beta chain variable domain of TCR clone 312819 (TRBV25-1, TRBJ2-1)
CASSVAGLENEQFF

SEQ ID NO: 625639 - protein, 14 aa, Homo sapiens
  CDR3 for alpha chain variable domain of TCR clone 312820 (TRAV3, TRAJ34)
CAVRDINNTDKLNF

SEQ ID NO: 625640 - protein, 13 aa, Homo sapiens
  CDR3 for beta chain variable domain of TCR clone 312820 (TRBV20-1, TRBJ1-1)
CSARGGGNTEAFF

SEQ ID NO: 625641 - protein, 12 aa, Homo sapiens
  CDR3 for alpha chain variable domain of TCR clone 312821 (TRAV13-1, TRAJ15)
CAASQAGTALIF

SEQ ID NO: 625642 - protein, 13 aa, Homo sapiens
  CDR3 for beta chain variable domain of TCR clone 312821 (TRBV4-1, TRBJ2-1)
CASSQEVQYEQFF

SEQ ID NO: 625643 - protein, 14 aa, Homo sapiens
  CDR3 for alpha chain variable domain of TCR clone 312822 (TRAV12-3, TRAJ10)
SHLPLTGGGNKLTF

SEQ ID NO: 625644 - protein, 15 aa, Homo sapiens
  CDR3 for beta chain variable domain of TCR clone 312822 (TRBV11-2, TRBJ1-6)
CASTLRGTGNSPLHF

SEQ ID NO: 625645 - protein, 11 aa, Homo sapiens
  CDR3 for alpha chain variable domain of TCR clone 312823 (TRAV17, TRAJ9)
CGFTGGFKTIY

SEQ ID NO: 625646 - protein, 14 aa, Homo sapiens
  CDR3 for beta chain variable domain of TCR clone 312823 (TRBV7-9, TRBJ2-2)
CASSLVQDTGELFF

SEQ ID NO: 625647 - protein, 14 aa, Homo sapiens
  CDR3 for alpha chain variable domain of TCR clone 312824 (TRAV12-2, TRAJ40)
CAVKIPAGAYKYIF

SEQ ID NO: 625648 - protein, 14 aa, Homo sapiens
  CDR3 for beta chain variable domain of TCR clone 312824 (TRBV20-1, TRBJ1-1)
CSAQTRIGGTEAFF

SEQ ID NO: 625649 - protein, 16 aa, Homo sapiens
  CDR3 for alpha chain variable domain of TCR clone 312825 (TRAV26-1, TRAJ50)
CIVRVEAGTSYAKVIF

SEQ ID NO: 625650 - protein, 13 aa, Homo sapiens
  CDR3 for beta chain variable domain of TCR clone 312825 (TRBV25-1, TRBJ1-2)
CASSENMGRGYTF

SEQ ID NO: 625651 - protein, 11 aa, Homo sapiens
  CDR3 for alpha chain variable domain of TCR clone 312826 (TRAV17, TRAJ36)
CAPTGAKSLFF

SEQ ID NO: 625652 - protein, 13 aa, Homo sapiens
  CDR3 for beta chain variable domain of TCR clone 312826 (TRBV12-4, TRBJ2-7)
CASSPTETYEQYF

SEQ ID NO: 625653 - protein, 11 aa, Homo sapiens
  CDR3 for alpha chain variable domain of TCR clone 312827 (TRAV3, TRAJ49)
CAPITGNQFYF

SEQ ID NO: 625654 - protein, 16 aa, Homo sapiens
  CDR3 for beta chain variable domain of TCR clone 312827 (TRBV5-1, TRBJ2-3)
CASSVFPMSSTDKQYF

SEQ ID NO: 625655 - protein, 14 aa, Homo sapiens
  CDR3 for alpha chain variable domain of TCR clone 312828 (TRAV4, TRAJ17)
CLVGDMAAGDKLTF

SEQ ID NO: 625656 - protein, 15 aa, Homo sapiens
  CDR3 for beta chain variable domain of TCR clone 312828 (TRBV5-5, TRBJ1-5)
CASSSTPGSNQPQHF

SEQ ID NO: 625657 - protein, 13 aa, Homo sapiens
  CDR3 for alpha chain variable domain of TCR clone 312829 (TRAV21, TRAJ27)
CAARPRNAGKSPF

SEQ ID NO: 625658 - protein, 14 aa, Homo sapiens
  CDR3 for beta chain variable domain of TCR clone 312829 (TRBV7-6, TRBJ2-3)
RASSLGTVTDTQYF

SEQ ID NO: 625659 - protein, 16 aa, Homo sapiens
  CDR3 for alpha chain variable domain of TCR clone 312830 (TRAV12-3, TRAJ53)
CAMSPGSGGSTYKLKF

SEQ ID NO: 625660 - protein, 11 aa, Homo sapiens
  CDR3 for beta chain variable domain of TCR clone 312830 (TRBV29-1, TRBJ2-5)
CSEDRTGTQYF

SEQ ID NO: 625661 - protein, 14 aa, Homo sapiens
  CDR3 for alpha chain variable domain of TCR clone 312831 (TRAV8-1, TRAJ23)
CAVGTYNQGGKLIF

SEQ ID NO: 625662 - protein, 12 aa, Homo sapiens
  CDR3 for beta chain variable domain of TCR clone 312831 (TRBV13, TRBJ2-1)
CASSLGAQEQFF

SEQ ID NO: 625663 - protein, 19 aa, Homo sapiens
  CDR3 for alpha chain variable domain of TCR clone 312832 (TRAV1-2, TRAJ26)
CLLPLCCERPDNYGQNFVF

SEQ ID NO: 625664 - protein, 14 aa, Homo sapiens
  CDR3 for beta chain variable domain of TCR clone 312832 (TRBV13, TRBJ2-5)
CASSLERVGETQYF

SEQ ID NO: 625665 - protein, 11 aa, Homo sapiens
  CDR3 for alpha chain variable domain of TCR clone 312833 (TRAV13-1, TRAJ20)
CAAKRRLQAQL

SEQ ID NO: 625666 - protein, 15 aa, Homo sapiens
  CDR3 for beta chain variable domain of TCR clone 312833 (TRBV2, TRBJ2-3)
CASSGEGTGADTQYF

SEQ ID NO: 625667 - protein, 18 aa, Homo sapiens
  CDR3 for alpha chain variable domain of TCR clone 312834 (TRAV26-2, TRAJ45)
CILRVDKYSGGGADGLTF

SEQ ID NO: 625668 - protein, 14 aa, Homo sapiens
  CDR3 for beta chain variable domain of TCR clone 312834 (TRBV19, TRBJ2-7)
CASSIFAGTYEQYF

SEQ ID NO: 625669 - protein, 16 aa, Homo sapiens
  CDR3 for alpha chain variable domain of TCR clone 312835 (TRAV30, TRAJ24)
CGTEILDADSWGKFQF

SEQ ID NO: 625670 - protein, 14 aa, Homo sapiens
  CDR3 for beta chain variable domain of TCR clone 312835 (TRBV12-5, TRBJ2-5)
CASGPRTHQETQYF

SEQ ID NO: 625671 - protein, 11 aa, Homo sapiens
  CDR3 for alpha chain variable domain of TCR clone 312836 (TRAV12-3, TRAJ43)
CAMSVSDDMRF

SEQ ID NO: 625672 - protein, 12 aa, Homo sapiens
  CDR3 for beta chain variable domain of TCR clone 312836 (TRBV24-1, TRBJ1-1)
CATLYPDTEAFF

SEQ ID NO: 625673 - protein, 15 aa, Homo sapiens
  CDR3 for alpha chain variable domain of TCR clone 312837 (TRAV3, TRAJ27)
CAVRDPLTNAGKLTF

SEQ ID NO: 625674 - protein, 15 aa, Homo sapiens
  CDR3 for beta chain variable domain of TCR clone 312837 (TRBV28, TRBJ2-1)
CASSIIAGGRSEQFF

SEQ ID NO: 625675 - protein, 12 aa, Homo sapiens
  CDR3 for alpha chain variable domain of TCR clone 312838 (TRAV12-2, TRAJ21)
CAPSDNFNKFSF

SEQ ID NO: 625676 - protein, 13 aa, Homo sapiens
  CDR3 for beta chain variable domain of TCR clone 312838 (TRBV7-3, TRBJ1-1)
CASSQDWGAEAFF

SEQ ID NO: 625677 - protein, 14 aa, Homo sapiens
  CDR3 for alpha chain variable domain of TCR clone 312839 (TRAV3, TRAJ40)
CCERRGTGTYKYIF

SEQ ID NO: 625678 - protein, 19 aa, Homo sapiens
  CDR3 for beta chain variable domain of TCR clone 312839 (TRBV25-1, TRBJ2-2)
CAILVYRVDRGRKTGELFF

SEQ ID NO: 625679 - protein, 14 aa, Homo sapiens
  CDR3 for alpha chain variable domain of TCR clone 312840 (TRAV8-1, TRAJ5)
CSVRTDTGRRALTF

SEQ ID NO: 625680 - protein, 12 aa, Homo sapiens
  CDR3 for beta chain variable domain of TCR clone 312840 (TRBV11-2, TRBJ2-1)
CASSPGNNEQFF

SEQ ID NO: 625681 - protein, 14 aa, Homo sapiens
  CDR3 for alpha chain variable domain of TCR clone 312841 (TRAV1-2, TRAJ8)
CAVREDTGFQKLVF

SEQ ID NO: 625682 - protein, 16 aa, Homo sapiens
  CDR3 for beta chain variable domain of TCR clone 312841 (TRBV20-1, TRBJ1-4)
CSAPGQGLLANEKLFF

SEQ ID NO: 625683 - protein, 12 aa, Homo sapiens
  CDR3 for alpha chain variable domain of TCR clone 312842 (TRAV13-2, TRAJ23)
CAERHRGGKLIF

SEQ ID NO: 625684 - protein, 13 aa, Homo sapiens
  CDR3 for beta chain variable domain of TCR clone 312842 (TRBV7-3, TRBJ2-7)
CASSQAGGYEQYF

SEQ ID NO: 625685 - protein, 12 aa, Homo sapiens
  CDR3 for alpha chain variable domain of TCR clone 312843 (TRAV8-3, TRAJ22)
FGGQSSARQLTF

SEQ ID NO: 625686 - protein, 14 aa, Homo sapiens
  CDR3 for beta chain variable domain of TCR clone 312843 (TRBV19, TRBJ2-5)
CASSMTGQQETQYF

SEQ ID NO: 625687 - protein, 15 aa, Homo sapiens
  CDR3 for alpha chain variable domain of TCR clone 312844 (TRAV17, TRAJ28)
CATDPSGAGSYQLTF

SEQ ID NO: 625688 - protein, 17 aa, Homo sapiens
  CDR3 for beta chain variable domain of TCR clone 312844 (TRBV28, TRBJ2-5)
CASSTPEGDALQETQYF

SEQ ID NO: 625689 - protein, 13 aa, Homo sapiens
  CDR3 for alpha chain variable domain of TCR clone 312845 (TRAV8-3, TRAJ6)
CAVEKGRSYIPTF

SEQ ID NO: 625690 - protein, 15 aa, Homo sapiens
  CDR3 for beta chain variable domain of TCR clone 312845 (TRBV28, TRBJ2-5)
CASSADRGRGETQYF

SEQ ID NO: 625691 - protein, 13 aa, Homo sapiens
  CDR3 for alpha chain variable domain of TCR clone 312846 (TRAV30, TRAJ24)
CGTVTVSWGKLQF

SEQ ID NO: 625692 - protein, 16 aa, Homo sapiens
  CDR3 for beta chain variable domain of TCR clone 312846 (TRBV7-3, TRBJ2-2)
CASSLKRGTLSGELFF

SEQ ID NO: 625693 - protein, 11 aa, Homo sapiens
  CDR3 for alpha chain variable domain of TCR clone 312847 (TRAV21, TRAJ39)
ILVNAGNMLTF

SEQ ID NO: 625694 - protein, 18 aa, Homo sapiens
  CDR3 for beta chain variable domain of TCR clone 312847 (TRBV7-2, TRBJ2-7)
CASSLSGRGLAGGYEQYF

SEQ ID NO: 625695 - protein, 14 aa, Homo sapiens
  CDR3 for alpha chain variable domain of TCR clone 312848 (TRAV2, TRAJ9)
CAVEDRSGGFKTIF

SEQ ID NO: 625696 - protein, 12 aa, Homo sapiens
  CDR3 for beta chain variable domain of TCR clone 312848 (TRBV18, TRBJ2-3)
CASSPLSDTQYF

SEQ ID NO: 625697 - protein, 16 aa, Homo sapiens
  CDR3 for alpha chain variable domain of TCR clone 312849 (TRAV21, TRAJ52)
CAVTNAGGTSYGKLTF

SEQ ID NO: 625698 - protein, 14 aa, Homo sapiens
  CDR3 for beta chain variable domain of TCR clone 312849 (TRBV5-1, TRBJ2-7)
CASSRGESLYEQYF

SEQ ID NO: 625699 - protein, 12 aa, Homo sapiens
  CDR3 for alpha chain variable domain of TCR clone 312850 (TRAV12-1, TRAJ40)
CVVPSGTYKYIF

SEQ ID NO: 625700 - protein, 15 aa, Homo sapiens
  CDR3 for beta chain variable domain of TCR clone 312850 (TRBV12-4, TRBJ2-1)
CASSPLSGRNNEQFL

SEQ ID NO: 625701 - protein, 17 aa, Homo sapiens
  CDR3 for alpha chain variable domain of TCR clone 312851 (TRAV8-6, TRAJ58)
CAVSSWVGETSGSRLTF

SEQ ID NO: 625702 - protein, 14 aa, Homo sapiens
  CDR3 for beta chain variable domain of TCR clone 312851 (TRBV6-1, TRBJ1-3)
CGSVQGGGGNTIYF

SEQ ID NO: 625703 - protein, 15 aa, Homo sapiens
  CDR3 for alpha chain variable domain of TCR clone 312852 (TRAV17, TRAJ57)
WATGPSQGGSEKLVF

SEQ ID NO: 625704 - protein, 14 aa, Homo sapiens
  CDR3 for beta chain variable domain of TCR clone 312852 (TRBV12-5, TRBJ2-5)
CASGSRTHQETQYF

SEQ ID NO: 625705 - protein, 15 aa, Homo sapiens
  CDR3 for alpha chain variable domain of TCR clone 312853 (TRAV2, TRAJ13)
CCLLLCFGGYQKVTF

SEQ ID NO: 625706 - protein, 14 aa, Homo sapiens
  CDR3 for beta chain variable domain of TCR clone 312853 (TRBV19, TRBJ2-1)
CASSKDRGQDEQFF

SEQ ID NO: 625707 - protein, 15 aa, Homo sapiens
  CDR3 for alpha chain variable domain of TCR clone 312854 (TRAV26-1, TRAJ29)
CIVRVEGSGNKPFVF

SEQ ID NO: 625708 - protein, 14 aa, Homo sapiens
  CDR3 for beta chain variable domain of TCR clone 312854 (TRBV18, TRBJ2-5)
CASSPGVSQETQYF

SEQ ID NO: 625709 - protein, 14 aa, Homo sapiens
  CDR3 for alpha chain variable domain of TCR clone 312855 (TRAV2, TRAJ9)
CAVEDRSVGFKTIF

SEQ ID NO: 625710 - protein, 17 aa, Homo sapiens
  CDR3 for beta chain variable domain of TCR clone 312855 (TRBV11-2, TRBJ2-1)
CASSLYPPGVEYNEQFF

SEQ ID NO: 625711 - protein, 15 aa, Homo sapiens
  CDR3 for alpha chain variable domain of TCR clone 312856 (TRAV12-1, TRAJ4)
CVVNPFSGGYNKLIF

SEQ ID NO: 625712 - protein, 16 aa, Homo sapiens
  CDR3 for beta chain variable domain of TCR clone 312856 (TRBV5-1, TRBJ1-1)
CASSKTGTEVGTEAFI

SEQ ID NO: 625713 - protein, 15 aa, Homo sapiens
  CDR3 for alpha chain variable domain of TCR clone 312857 (TRAV21, TRAJ53)
CATLNSGGSNYKLTF

SEQ ID NO: 625714 - protein, 15 aa, Homo sapiens
  CDR3 for beta chain variable domain of TCR clone 312857 (TRBV20-1, TRBJ2-7)
CSARDRVSGIDEQYF

SEQ ID NO: 625715 - protein, 14 aa, Homo sapiens
  CDR3 for alpha chain variable domain of TCR clone 312858 (TRAV8-4, TRAJ13)
CAVTLSGGYLKVTF

SEQ ID NO: 625716 - protein, 16 aa, Homo sapiens
  CDR3 for beta chain variable domain of TCR clone 312858 (TRBV19, TRBJ2-2)
CASRSPGTGATGELFF

SEQ ID NO: 625717 - protein, 14 aa, Homo sapiens
  CDR3 for alpha chain variable domain of TCR clone 312859 (TRAV17, TRAJ6)
CATDASGGSYIPTV

SEQ ID NO: 625718 - protein, 19 aa, Homo sapiens
  CDR3 for beta chain variable domain of TCR clone 312859 (TRBV4-3, TRBJ2-7)
CASSQEFIGWQVTPYEQYF

SEQ ID NO: 625719 - protein, 16 aa, Homo sapiens
  CDR3 for alpha chain variable domain of TCR clone 312860 (TRAV3, TRAJ10)
CAVRDMRAGGGTKLTF

SEQ ID NO: 625720 - protein, 15 aa, Homo sapiens
  CDR3 for beta chain variable domain of TCR clone 312860 (TRBV20-1, TRBJ2-7)
CSARDRVSGMDEQYF

SEQ ID NO: 625721 - protein, 11 aa, Homo sapiens
  CDR3 for alpha chain variable domain of TCR clone 312861 (TRAV13-1, TRAJ30)
CAASRDDQIIV

SEQ ID NO: 625722 - protein, 15 aa, Homo sapiens
  CDR3 for beta chain variable domain of TCR clone 312861 (TRBV18, TRBJ1-1)
CASSPSSWVNTEAFF

SEQ ID NO: 625723 - protein, 17 aa, Homo sapiens
  CDR3 for alpha chain variable domain of TCR clone 312862 (TRAV3, TRAJ38)
CAVRDCLNAGNNRKLIW

SEQ ID NO: 625724 - protein, 14 aa, Homo sapiens
  CDR3 for beta chain variable domain of TCR clone 312862 (TRBV5-5, TRBJ1-5)
CASSGQAVDQHQHF

SEQ ID NO: 625725 - protein, 11 aa, Homo sapiens
  CDR3 for alpha chain variable domain of TCR clone 312863 (TRAV12-3, TRAJ27)
CAMANAGKSTF

SEQ ID NO: 625726 - protein, 15 aa, Homo sapiens
  CDR3 for beta chain variable domain of TCR clone 312863 (TRBV20-1, TRBJ1-1)
CSARVGGTLKLSLDK

SEQ ID NO: 625727 - protein, 17 aa, Homo sapiens
  CDR3 for alpha chain variable domain of TCR clone 312864 (TRAV23/DV6, TRAJ58)
FAARLLRGETSGSRLTF

SEQ ID NO: 625728 - protein, 15 aa, Homo sapiens
  CDR3 for beta chain variable domain of TCR clone 312864 (TRBV9, TRBJ1-6)
CASSVAGTGDSPLHF

SEQ ID NO: 625729 - protein, 13 aa, Homo sapiens
  CDR3 for alpha chain variable domain of TCR clone 312865 (TRAV4, TRAJ34)
CLVGDYNTDKLIF

SEQ ID NO: 625730 - protein, 23 aa, Homo sapiens
  CDR3 for beta chain variable domain of TCR clone 312865 (TRBV4-2, TRBJ2-3)
GASSQDPPRASSISGGRGDTQYF

SEQ ID NO: 625731 - protein, 12 aa, Homo sapiens
  CDR3 for alpha chain variable domain of TCR clone 312866 (TRAV1-2, TRAJ24)
CAVGGSWGKCQF

SEQ ID NO: 625732 - protein, 15 aa, Homo sapiens
  CDR3 for beta chain variable domain of TCR clone 312866 (TRBV6-1, TRBJ2-7)
CASSEGVGNPYEQYF

SEQ ID NO: 625733 - protein, 14 aa, Homo sapiens
  CDR3 for alpha chain variable domain of TCR clone 312867 (TRAV13-2, TRAJ17)
CAENSKAAGNKLTF

SEQ ID NO: 625734 - protein, 14 aa, Homo sapiens
  CDR3 for beta chain variable domain of TCR clone 312867 (TRBV11-2, TRBJ2-3)
CASSRLARTDTQYF

SEQ ID NO: 625735 - protein, 14 aa, Homo sapiens
  CDR3 for alpha chain variable domain of TCR clone 312868 (TRAV20, TRAJ22)
CAVALVGSARQLTF

SEQ ID NO: 625736 - protein, 17 aa, Homo sapiens
  CDR3 for beta chain variable domain of TCR clone 312868 (TRBV13, TRBJ2-3)
CASSLSRVAGGRNTQYF

SEQ ID NO: 625737 - protein, 17 aa, Homo sapiens
  CDR3 for alpha chain variable domain of TCR clone 312869 (TRAV8-3, TRAJ34)
CAIPGKLIFGTGTRLQV

SEQ ID NO: 625738 - protein, 12 aa, Homo sapiens
  CDR3 for beta chain variable domain of TCR clone 312869 (TRBV11-2, TRBJ2-5)
CASSLGQETQFF

SEQ ID NO: 625739 - protein, 14 aa, Homo sapiens
  CDR3 for alpha chain variable domain of TCR clone 312870 (TRAV27, TRAJ22)
CAGLPSGSARQLTF

SEQ ID NO: 625740 - protein, 16 aa, Homo sapiens
  CDR3 for beta chain variable domain of TCR clone 312870 (TRBV4-2, TRBJ2-1)
CASSHDDNPEGAQEFF

SEQ ID NO: 625741 - protein, 13 aa, Homo sapiens
  CDR3 for alpha chain variable domain of TCR clone 312871 (TRAV16, TRAJ37)
CALSSSNTGKLIF

SEQ ID NO: 625742 - protein, 13 aa, Homo sapiens
  CDR3 for beta chain variable domain of TCR clone 312871 (TRBV2, TRBJ1-6)
CASEDSLNSTLHF

SEQ ID NO: 625743 - protein, 14 aa, Homo sapiens
  CDR3 for alpha chain variable domain of TCR clone 312872 (TRAV13-1, TRAJ23)
CAASRLGRGGKLIF

SEQ ID NO: 625744 - protein, 15 aa, Homo sapiens
  CDR3 for beta chain variable domain of TCR clone 312872 (TRBV7-2, TRBJ2-1)
CASSLVARRYNEQFF

SEQ ID NO: 625745 - protein, 10 aa, Homo sapiens
  CDR3 for alpha chain variable domain of TCR clone 312873 (TRAV8-2, TRAJ29)
CTGGNTPLVF

SEQ ID NO: 625746 - protein, 13 aa, Homo sapiens
  CDR3 for beta chain variable domain of TCR clone 312873 (TRBV20-1, TRBJ1-1)
CSAMGGGNTEAFF

SEQ ID NO: 625747 - protein, 15 aa, Homo sapiens
  CDR3 for alpha chain variable domain of TCR clone 312874 (TRAV17, TRAJ16)
CATALRFSDGQKPLF

SEQ ID NO: 625748 - protein, 15 aa, Homo sapiens
  CDR3 for beta chain variable domain of TCR clone 312874 (TRBV13, TRBJ1-5)
CASSFGQGGVQPQHF

SEQ ID NO: 625749 - protein, 14 aa, Homo sapiens
  CDR3 for alpha chain variable domain of TCR clone 312875 (TRAV12-2, TRAJ17)
CSVNIKAAGNKLTF

SEQ ID NO: 625750 - protein, 16 aa, Homo sapiens
  CDR3 for beta chain variable domain of TCR clone 312875 (TRBV20-1, TRBJ2-6)
CSASSQGYDGANVLSF

SEQ ID NO: 625751 - protein, 14 aa, Homo sapiens
  CDR3 for alpha chain variable domain of TCR clone 312876 (TRAV20, TRAJ56)
CAVQFGGANSKLTF

SEQ ID NO: 625752 - protein, 17 aa, Homo sapiens
  CDR3 for beta chain variable domain of TCR clone 312876 (TRBV11-1, TRBJ2-7)
CASSLLDGGDSAYEQYF

SEQ ID NO: 625753 - protein, 14 aa, Homo sapiens
  CDR3 for alpha chain variable domain of TCR clone 312877 (TRAV8-3, TRAJ20)
CAVGPRGNDYKLSL

SEQ ID NO: 625754 - protein, 11 aa, Homo sapiens
  CDR3 for beta chain variable domain of TCR clone 312877 (TRBV10-3, TRBJ2-2)
CATKGTGELCF

SEQ ID NO: 625755 - protein, 13 aa, Homo sapiens
  CDR3 for alpha chain variable domain of TCR clone 312878 (TRAV36/DV7, TRAJ41)
CAVEANSGYALNF

SEQ ID NO: 625756 - protein, 15 aa, Homo sapiens
  CDR3 for beta chain variable domain of TCR clone 312878 (TRBV20-1, TRBJ2-7)
CSARDRVSGMDEQYF

SEQ ID NO: 625757 - protein, 13 aa, Homo sapiens
  CDR3 for alpha chain variable domain of TCR clone 312879 (TRAV1-2, TRAJ9)
CAALNTGGFKTIF

SEQ ID NO: 625758 - protein, 16 aa, Homo sapiens
  CDR3 for beta chain variable domain of TCR clone 312879 (TRBV15, TRBJ2-3)
CATSRGGPRGGYTQYF

SEQ ID NO: 625759 - protein, 14 aa, Homo sapiens
  CDR3 for alpha chain variable domain of TCR clone 312880 (TRAV1-2, TRAJ16)
CAVNRFSDGQKLLF

SEQ ID NO: 625760 - protein, 16 aa, Homo sapiens
  CDR3 for beta chain variable domain of TCR clone 312880 (TRBV4-1, TRBJ1-4)
CASSQDLRRGGEKLFF

SEQ ID NO: 625761 - protein, 11 aa, Homo sapiens
  CDR3 for alpha chain variable domain of TCR clone 312881 (TRAV1-1, TRAJ30)
CAQNRDGKIIF

SEQ ID NO: 625762 - protein, 14 aa, Homo sapiens
  CDR3 for beta chain variable domain of TCR clone 312881 (TRBV7-8, TRBJ2-7)
CASSPGLADYEQYF

SEQ ID NO: 625763 - protein, 14 aa, Homo sapiens
  CDR3 for alpha chain variable domain of TCR clone 312882 (TRAV8-3, TRAJ39)
CAVWAWGAGNMLTF

SEQ ID NO: 625764 - protein, 16 aa, Homo sapiens
  CDR3 for beta chain variable domain of TCR clone 312882 (TRBV7-2, TRBJ1-3)
CASSSGRVLSGNTIYF

SEQ ID NO: 625765 - protein, 12 aa, Homo sapiens
  CDR3 for alpha chain variable domain of TCR clone 312883 (TRAV21, TRAJ11)
CAVRGGNSTLTF

SEQ ID NO: 625766 - protein, 15 aa, Homo sapiens
  CDR3 for beta chain variable domain of TCR clone 312883 (TRBV5-4, TRBJ2-7)
CASSRFGTGSYEQYF

SEQ ID NO: 625767 - protein, 17 aa, Homo sapiens
  CDR3 for alpha chain variable domain of TCR clone 312884 (TRAV3, TRAJ6)
CAVRDGPRAGGSYIPTF

SEQ ID NO: 625768 - protein, 12 aa, Homo sapiens
  CDR3 for beta chain variable domain of TCR clone 312884 (TRBV7-8, TRBJ2-5)
CASSPSVQTQYF

SEQ ID NO: 625769 - protein, 10 aa, Homo sapiens
  CDR3 for alpha chain variable domain of TCR clone 312885 (TRAV30, TRAJ48)
CGIGNEKLTF

SEQ ID NO: 625770 - protein, 14 aa, Homo sapiens
  CDR3 for beta chain variable domain of TCR clone 312885 (TRBV7-2, TRBJ2-7)
CASSPKTSFCEQYF

SEQ ID NO: 625771 - protein, 13 aa, Homo sapiens
  CDR3 for alpha chain variable domain of TCR clone 312886 (TRAV20, TRAJ21)
CAVEGYNFNKFYF

SEQ ID NO: 625772 - protein, 15 aa, Homo sapiens
  CDR3 for beta chain variable domain of TCR clone 312886 (TRBV7-2, TRBJ2-1)
CASSSGLAGGNEQFF

SEQ ID NO: 625773 - protein, 14 aa, Homo sapiens
  CDR3 for alpha chain variable domain of TCR clone 312887 (TRAV17, TRAJ39)
CATDPVREGNMLTF

SEQ ID NO: 625774 - protein, 12 aa, Homo sapiens
  CDR3 for beta chain variable domain of TCR clone 312887 (TRBV11-2, TRBJ2-1)
CASSPGNNEQFF

SEQ ID NO: 625775 - protein, 15 aa, Homo sapiens
  CDR3 for alpha chain variable domain of TCR clone 312888 (TRAV8-2, TRAJ40)
CVVLGTTSGTYKYIL

SEQ ID NO: 625776 - protein, 16 aa, Homo sapiens
  CDR3 for beta chain variable domain of TCR clone 312888 (TRBV25-1, TRBJ1-1)
CASSGDRDRGRIEAFF

SEQ ID NO: 625777 - protein, 17 aa, Homo sapiens
  CDR3 for alpha chain variable domain of TCR clone 312889 (TRAV3, TRAJ6)
CAVRDGPRAGGSYRPTF

SEQ ID NO: 625778 - protein, 20 aa, Homo sapiens
  CDR3 for beta chain variable domain of TCR clone 312889 (TRBV28, TRBJ2-1)
CASTPIGRSPVLAGGNEQFF

SEQ ID NO: 625779 - protein, 11 aa, Homo sapiens
  CDR3 for alpha chain variable domain of TCR clone 312890 (TRAV13-1, TRAJ39)
RASHAGNMLTF

SEQ ID NO: 625780 - protein, 14 aa, Homo sapiens
  CDR3 for beta chain variable domain of TCR clone 312890 (TRBV11-2, TRBJ1-5)
CASSLDRGRQPQHF

SEQ ID NO: 625781 - protein, 15 aa, Homo sapiens
  CDR3 for alpha chain variable domain of TCR clone 312891 (TRAV1-2, TRAJ15)
CAVDVMGSAGNALIF

SEQ ID NO: 625782 - protein, 13 aa, Homo sapiens
  CDR3 for beta chain variable domain of TCR clone 312891 (TRBV20-1, TRBJ1-1)
CSAFDRENTEAFF

SEQ ID NO: 625783 - protein, 14 aa, Homo sapiens
  CDR3 for alpha chain variable domain of TCR clone 312892 (TRAV8-3, TRAJ4)
CAVGAAGGYNKLIF

SEQ ID NO: 625784 - protein, 17 aa, Homo sapiens
  CDR3 for beta chain variable domain of TCR clone 312892 (TRBV15, TRBJ1-1)
CATSRVGGADGDTEAFF

SEQ ID NO: 625785 - protein, 11 aa, Homo sapiens
  CDR3 for alpha chain variable domain of TCR clone 312893 (TRAV1-2, TRAJ20)
CGVANDYKLSF

SEQ ID NO: 625786 - protein, 18 aa, Homo sapiens
  CDR3 for beta chain variable domain of TCR clone 312893 (TRBV20-1, TRBJ2-6)
CSAETTPTHGSGANVLTF

SEQ ID NO: 625787 - protein, 13 aa, Homo sapiens
  CDR3 for alpha chain variable domain of TCR clone 312894 (TRAV21, TRAJ45)
CAVMGGGADGLTF

SEQ ID NO: 625788 - protein, 14 aa, Homo sapiens
  CDR3 for beta chain variable domain of TCR clone 312894 (TRBV4-3, TRBJ1-4)
CASSPSQRNEKLFF

SEQ ID NO: 625789 - protein, 15 aa, Homo sapiens
  CDR3 for alpha chain variable domain of TCR clone 312895 (TRAV21, TRAJ45)
CAVSYSGGGADGITF

SEQ ID NO: 625790 - protein, 13 aa, Homo sapiens
  CDR3 for beta chain variable domain of TCR clone 312895 (TRBV20-1, TRBJ2-5)
CSAATELQETQYF

SEQ ID NO: 625791 - protein, 11 aa, Homo sapiens
  CDR3 for alpha chain variable domain of TCR clone 312896 (TRAV2, TRAJ13)
CASGGYQEVTF

SEQ ID NO: 625792 - protein, 16 aa, Homo sapiens
  CDR3 for beta chain variable domain of TCR clone 312896 (TRBV6-1, TRBJ2-5)
CASSGTLDRGAETQYF

SEQ ID NO: 625793 - protein, 11 aa, Homo sapiens
  CDR3 for alpha chain variable domain of TCR clone 312897 (TRAV3, TRAJ17)
PRGAAGNKLTF

SEQ ID NO: 625794 - protein, 16 aa, Homo sapiens
  CDR3 for beta chain variable domain of TCR clone 312897 (TRBV7-6, TRBJ2-1)
CSSSAPGPSSYNEQFF

SEQ ID NO: 625795 - protein, 13 aa, Homo sapiens
  CDR3 for alpha chain variable domain of TCR clone 312898 (TRAV13-1, TRAJ21)
CAARKGNFNKFYF

SEQ ID NO: 625796 - protein, 16 aa, Homo sapiens
  CDR3 for beta chain variable domain of TCR clone 312898 (TRBV5-4, TRBJ2-3)
CASSWGTSGGTDTQYF

SEQ ID NO: 625797 - protein, 22 aa, Homo sapiens
  CDR3 for alpha chain variable domain of TCR clone 312899 (TRAV4, TRAJ37)
CLVGDGRLWQPRQTNLWARDNF

SEQ ID NO: 625798 - protein, 15 aa, Homo sapiens
  CDR3 for beta chain variable domain of TCR clone 312899 (TRBV6-6, TRBJ1-1)
CASSYASGAGTEAFF

SEQ ID NO: 625799 - protein, 15 aa, Homo sapiens
  CDR3 for alpha chain variable domain of TCR clone 312900 (TRAV26-1, TRAJ29)
CIVKVEGSGNTPLVF

SEQ ID NO: 625800 - protein, 15 aa, Homo sapiens
  CDR3 for beta chain variable domain of TCR clone 312900 (TRBV28, TRBJ2-5)
CASSPGQGSIETQYF

SEQ ID NO: 625801 - protein, 14 aa, Homo sapiens
  CDR3 for alpha chain variable domain of TCR clone 312901 (TRAV35, TRAJ22)
FAGLRPGSARQLTF

SEQ ID NO: 625802 - protein, 14 aa, Homo sapiens
  CDR3 for beta chain variable domain of TCR clone 312901 (TRBV11-3, TRBJ2-3)
CASSSGQGPDTQYF

SEQ ID NO: 625803 - protein, 14 aa, Homo sapiens
  CDR3 for alpha chain variable domain of TCR clone 312902 (TRAV30, TRAJ44)
CGTESAGTASKLTF

SEQ ID NO: 625804 - protein, 14 aa, Homo sapiens
  CDR3 for beta chain variable domain of TCR clone 312902 (TRBV7-2, TRBJ2-7)
CASSPKTSFYEQYF

SEQ ID NO: 625805 - protein, 13 aa, Homo sapiens
  CDR3 for alpha chain variable domain of TCR clone 312903 (TRAV17, TRAJ40)
CAGALGGTYKYIF

SEQ ID NO: 625806 - protein, 16 aa, Homo sapiens
  CDR3 for beta chain variable domain of TCR clone 312903 (TRBV7-3, TRBJ2-1)
CASSLEGYRSYNEQFF

SEQ ID NO: 625807 - protein, 12 aa, Homo sapiens
  CDR3 for alpha chain variable domain of TCR clone 312904 (TRAV2, TRAJ33)
CAFMDSNYQLIW

SEQ ID NO: 625808 - protein, 15 aa, Homo sapiens
  CDR3 for beta chain variable domain of TCR clone 312904 (TRBV7-3, TRBJ2-2)
CASSETGQGTGELFF

SEQ ID NO: 625809 - protein, 13 aa, Homo sapiens
  CDR3 for alpha chain variable domain of TCR clone 312905 (TRAV12-1, TRAJ11)
CVVNRAGYSTLTI

SEQ ID NO: 625810 - protein, 16 aa, Homo sapiens
  CDR3 for beta chain variable domain of TCR clone 312905 (TRBV27, TRBJ2-2)
CASSLRPGGAPGELFF

SEQ ID NO: 625811 - protein, 16 aa, Homo sapiens
  CDR3 for alpha chain variable domain of TCR clone 312906 (TRAV16, TRAJ4)
CARSRMFSVGYNKLIF

SEQ ID NO: 625812 - protein, 16 aa, Homo sapiens
  CDR3 for beta chain variable domain of TCR clone 312906 (TRBV24-1, TRBJ2-3)
CATSDPGTGATDTQYF

SEQ ID NO: 625813 - protein, 12 aa, Homo sapiens
  CDR3 for alpha chain variable domain of TCR clone 312907 (TRAV16, TRAJ10)
CSRTGGGNKLTF

SEQ ID NO: 625814 - protein, 15 aa, Homo sapiens
  CDR3 for beta chain variable domain of TCR clone 312907 (TRBV6-3, TRBJ2-7)
CASRSPGTVFYEQYF

SEQ ID NO: 625815 - protein, 16 aa, Homo sapiens
  CDR3 for alpha chain variable domain of TCR clone 312908 (TRAV16, TRAJ4)
CSLSRMFSGGYNKPIF

SEQ ID NO: 625816 - protein, 16 aa, Homo sapiens
  CDR3 for beta chain variable domain of TCR clone 312908 (TRBV24-1, TRBJ2-3)
CATSDPGTGATDTQYF

SEQ ID NO: 625817 - protein, 15 aa, Homo sapiens
  CDR3 for alpha chain variable domain of TCR clone 312909 (TRAV3, TRAJ17)
CAVSPKEAAVNKLTS

SEQ ID NO: 625818 - protein, 12 aa, Homo sapiens
  CDR3 for beta chain variable domain of TCR clone 312909 (TRBV7-9, TRBJ1-6)
CASSLMTSPLHF

SEQ ID NO: 625819 - protein, 17 aa, Homo sapiens
  CDR3 for alpha chain variable domain of TCR clone 312910 (TRAV12-2, TRAJ4)
CAVNVRPVSGGYNKLLF

SEQ ID NO: 625820 - protein, 17 aa, Homo sapiens
  CDR3 for beta chain variable domain of TCR clone 312910 (TRBV6-3, TRBJ2-1)
CASSYSSGTRGLDEQFF

SEQ ID NO: 625821 - protein, 15 aa, Homo sapiens
  CDR3 for alpha chain variable domain of TCR clone 312911 (TRAV12-2, TRAJ53)
CAVNGGGGSNYKLTF

SEQ ID NO: 625822 - protein, 15 aa, Homo sapiens
  CDR3 for beta chain variable domain of TCR clone 312911 (TRBV5-7, TRBJ2-1)
CASSRRLAGDNEQFF

SEQ ID NO: 625823 - protein, 14 aa, Homo sapiens
  CDR3 for alpha chain variable domain of TCR clone 312912 (TRAV12-3, TRAJ5)
CAMTWDTGRRALTF

SEQ ID NO: 625824 - protein, 20 aa, Homo sapiens
  CDR3 for beta chain variable domain of TCR clone 312912 (TRBV7-8, TRBJ2-2)
CASSHLFPGPTIHITGELFF

SEQ ID NO: 625825 - protein, 12 aa, Homo sapiens
  CDR3 for alpha chain variable domain of TCR clone 312913 (TRAV12-3, TRAJ17)
CAMTLTGNKLTF

SEQ ID NO: 625826 - protein, 15 aa, Homo sapiens
  CDR3 for beta chain variable domain of TCR clone 312913 (TRBV11-2, TRBJ2-2)
CASSSDGVNAGELFF

SEQ ID NO: 625827 - protein, 12 aa, Homo sapiens
  CDR3 for alpha chain variable domain of TCR clone 312914 (TRAV8-6, TRAJ33)
CAVPDSNYQLIW

SEQ ID NO: 625828 - protein, 15 aa, Homo sapiens
  CDR3 for beta chain variable domain of TCR clone 312914 (TRBV4-3, TRBJ1-2)
CASSRGQGRNYGYTF

SEQ ID NO: 625829 - protein, 11 aa, Homo sapiens
  CDR3 for alpha chain variable domain of TCR clone 312915 (TRAV1-1, TRAJ39)
CAVRAPLIMQA

SEQ ID NO: 625830 - protein, 13 aa, Homo sapiens
  CDR3 for beta chain variable domain of TCR clone 312915 (TRBV12-4, TRBJ1-5)
CASSPDRAQPQHF

SEQ ID NO: 625831 - protein, 12 aa, Homo sapiens
  CDR3 for alpha chain variable domain of TCR clone 312916 (TRAV12-3, TRAJ17)
CEVTLTGNKITF

SEQ ID NO: 625832 - protein, 15 aa, Homo sapiens
  CDR3 for beta chain variable domain of TCR clone 312916 (TRBV20-1, TRBJ2-7)
CSARDWVSGMDEQYF

SEQ ID NO: 625833 - protein, 14 aa, Homo sapiens
  CDR3 for alpha chain variable domain of TCR clone 312917 (TRAV12-1, TRAJ38)
CGELKAGNNRKLIW

SEQ ID NO: 625834 - protein, 12 aa, Homo sapiens
  CDR3 for beta chain variable domain of TCR clone 312917 (TRBV24-1, TRBJ1-1)
CATLYPDTGAFF

SEQ ID NO: 625835 - protein, 12 aa, Homo sapiens
  CDR3 for alpha chain variable domain of TCR clone 312918 (TRAV12-1, TRAJ40)
CVVYSGTYKYIF

SEQ ID NO: 625836 - protein, 18 aa, Homo sapiens
  CDR3 for beta chain variable domain of TCR clone 312918 (TRBV11-2, TRBJ2-3)
CASSCGGAARGAPNTQYF

SEQ ID NO: 625837 - protein, 15 aa, Homo sapiens
  CDR3 for alpha chain variable domain of TCR clone 312919 (TRAV8-4, TRAJ3)
CAVTGENLVQRGFQD

SEQ ID NO: 625838 - protein, 16 aa, Homo sapiens
  CDR3 for beta chain variable domain of TCR clone 312919 (TRBV5-7, TRBJ2-7)
PAANEGGGRGSYEQYF

SEQ ID NO: 625839 - protein, 15 aa, Homo sapiens
  CDR3 for alpha chain variable domain of TCR clone 312920 (TRAV3, TRAJ17)
CAVRDGTAAGNKLTF

SEQ ID NO: 625840 - protein, 12 aa, Homo sapiens
  CDR3 for beta chain variable domain of TCR clone 312920 (TRBV12-4, TRBJ2-1)
CASSPGRNEQFF

SEQ ID NO: 625841 - protein, 15 aa, Homo sapiens
  CDR3 for alpha chain variable domain of TCR clone 312921 (TRAV16, TRAJ58)
CAPKRGNQCLEVDLW

SEQ ID NO: 625842 - protein, 13 aa, Homo sapiens
  CDR3 for beta chain variable domain of TCR clone 312921 (TRBV20-1, TRBJ2-2)
CSASAAGTGELFF

SEQ ID NO: 625843 - protein, 12 aa, Homo sapiens
  CDR3 for alpha chain variable domain of TCR clone 312922 (TRAV23/DV6, TRAJ16)
CAARGRGQKLLF

SEQ ID NO: 625844 - protein, 15 aa, Homo sapiens
  CDR3 for beta chain variable domain of TCR clone 312922 (TRBV15, TRBJ2-1)
CATSRPGQGLHEQCF

SEQ ID NO: 625845 - protein, 11 aa, Homo sapiens
  CDR3 for alpha chain variable domain of TCR clone 312923 (TRAV3, TRAJ21)
CAVGNFNKFYF

SEQ ID NO: 625846 - protein, 15 aa, Homo sapiens
  CDR3 for beta chain variable domain of TCR clone 312923 (TRBV19, TRBJ2-1)
CASIKGRGPYNEQFF

SEQ ID NO: 625847 - protein, 22 aa, Homo sapiens
  CDR3 for alpha chain variable domain of TCR clone 312924 (TRAV8-6, TRAJ32)
CAVSALWWCYKQAHLWNWHSAC

SEQ ID NO: 625848 - protein, 13 aa, Homo sapiens
  CDR3 for beta chain variable domain of TCR clone 312924 (TRBV11-2, TRBJ2-5)
CASGHGAKETQYF

SEQ ID NO: 625849 - protein, 15 aa, Homo sapiens
  CDR3 for alpha chain variable domain of TCR clone 312925 (TRAV27, TRAJ38)
CAARRNAGNNRKLIW

SEQ ID NO: 625850 - protein, 17 aa, Homo sapiens
  CDR3 for beta chain variable domain of TCR clone 312925 (TRBV20-1, TRBJ2-2)
CSASGSGQGGLAGELFF

SEQ ID NO: 625851 - protein, 15 aa, Homo sapiens
  CDR3 for alpha chain variable domain of TCR clone 312926 (TRAV12-2, TRAJ50)
CAVNGLETSYDKVIF

SEQ ID NO: 625852 - protein, 16 aa, Homo sapiens
  CDR3 for beta chain variable domain of TCR clone 312926 (TRBV2, TRBJ2-1)
CASSVGGSLSYNEQFF

SEQ ID NO: 625853 - protein, 16 aa, Homo sapiens
  CDR3 for alpha chain variable domain of TCR clone 312927 (TRAV17, TRAJ28)
CATASGSGAESYQLTF

SEQ ID NO: 625854 - protein, 11 aa, Homo sapiens
  CDR3 for beta chain variable domain of TCR clone 312927 (TRBV7-9, TRBJ2-5)
CASSLGETQYF

SEQ ID NO: 625855 - protein, 14 aa, Homo sapiens
  CDR3 for alpha chain variable domain of TCR clone 312928 (TRAV1-2, TRAJ16)
CAVNRFSDGQKLPF

SEQ ID NO: 625856 - protein, 17 aa, Homo sapiens
  CDR3 for beta chain variable domain of TCR clone 312928 (TRBV13, TRBJ2-3)
CASSLSRVAGWRNTQYF

SEQ ID NO: 625857 - protein, 15 aa, Homo sapiens
  CDR3 for alpha chain variable domain of TCR clone 312929 (TRAV17, TRAJ57)
CATGPSQGGSEKLVF

SEQ ID NO: 625858 - protein, 15 aa, Homo sapiens
  CDR3 for beta chain variable domain of TCR clone 312929 (TRBV5-8, TRBJ1-5)
CASSWTPGTPQPQHF

SEQ ID NO: 625859 - protein, 13 aa, Homo sapiens
  CDR3 for alpha chain variable domain of TCR clone 312930 (TRAV13-1, TRAJ6)
CAGRRGGSYIPTF

SEQ ID NO: 625860 - protein, 16 aa, Homo sapiens
  CDR3 for beta chain variable domain of TCR clone 312930 (TRBV7-9, TRBJ2-2)
CASSLATGVGTGELFF

SEQ ID NO: 625861 - protein, 13 aa, Homo sapiens
  CDR3 for alpha chain variable domain of TCR clone 312931 (TRAV12-3, TRAJ33)
CAMSVNSNYQLIW

SEQ ID NO: 625862 - protein, 16 aa, Homo sapiens
  CDR3 for beta chain variable domain of TCR clone 312931 (TRBV7-3, TRBJ2-3)
CASSLSGYRAEDTQYF

SEQ ID NO: 625863 - protein, 15 aa, Homo sapiens
  CDR3 for alpha chain variable domain of TCR clone 312932 (TRAV34, TRAJ36)
CGAPSRLGWANNLFF

SEQ ID NO: 625864 - protein, 16 aa, Homo sapiens
  CDR3 for beta chain variable domain of TCR clone 312932 (TRBV4-3, TRBJ2-1)
CASSYRRLGSWDEQFF

SEQ ID NO: 625865 - protein, 14 aa, Homo sapiens
  CDR3 for alpha chain variable domain of TCR clone 312933 (TRAV26-1, TRAJ26)
CIVRATFLGQNFVF

SEQ ID NO: 625866 - protein, 14 aa, Homo sapiens
  CDR3 for beta chain variable domain of TCR clone 312933 (TRBV20-1, TRBJ2-7)
CSAWTALSSYEQYF

SEQ ID NO: 625867 - protein, 13 aa, Homo sapiens
  CDR3 for alpha chain variable domain of TCR clone 312934 (TRAV8-6, TRAJ34)
CAVSDQGTDKLIF

SEQ ID NO: 625868 - protein, 14 aa, Homo sapiens
  CDR3 for beta chain variable domain of TCR clone 312934 (TRBV12-4, TRBJ1-1)
CASTWTGYDTEAFF

SEQ ID NO: 625869 - protein, 14 aa, Homo sapiens
  CDR3 for alpha chain variable domain of TCR clone 312935 (TRAV12-2, TRAJ53)
CAVKGGGSNYKLTV

SEQ ID NO: 625870 - protein, 15 aa, Homo sapiens
  CDR3 for beta chain variable domain of TCR clone 312935 (TRBV11-2, TRBJ2-2)
CASSLDTGNTGELFF

SEQ ID NO: 625871 - protein, 16 aa, Homo sapiens
  CDR3 for alpha chain variable domain of TCR clone 312936 (TRAV3, TRAJ27)
CAVRDPQGTNAGKSTF

SEQ ID NO: 625872 - protein, 16 aa, Homo sapiens
  CDR3 for beta chain variable domain of TCR clone 312936 (TRBV20-1, TRBJ1-2)
CSASMGQGVANYGYTF

SEQ ID NO: 625873 - protein, 17 aa, Homo sapiens
  CDR3 for alpha chain variable domain of TCR clone 312937 (TRAV13-1, TRAJ52)
CAASSGAGGTSYGKLTF

SEQ ID NO: 625874 - protein, 14 aa, Homo sapiens
  CDR3 for beta chain variable domain of TCR clone 312937 (TRBV4-1, TRBJ2-2)
CASSQPLGTGELFF

SEQ ID NO: 625875 - protein, 12 aa, Homo sapiens
  CDR3 for alpha chain variable domain of TCR clone 312938 (TRAV21, TRAJ27)
CAANTNAGKSTF

SEQ ID NO: 625876 - protein, 15 aa, Homo sapiens
  CDR3 for beta chain variable domain of TCR clone 312938 (TRBV11-3, TRBJ2-3)
CASLRDGREGDTQYF

SEQ ID NO: 625877 - protein, 17 aa, Homo sapiens
  CDR3 for alpha chain variable domain of TCR clone 312939 (TRAV38-2/DV8, TRAJ38)
CAYRSARGAGNNRKLIW

SEQ ID NO: 625878 - protein, 13 aa, Homo sapiens
  CDR3 for beta chain variable domain of TCR clone 312939 (TRBV6-5, TRBJ2-1)
CASRGRVGNGQFF

SEQ ID NO: 625879 - protein, 18 aa, Homo sapiens
  CDR3 for alpha chain variable domain of TCR clone 312940 (TRAV21, TRAJ52)
CAVKPSPAGGTSYGKLTF

SEQ ID NO: 625880 - protein, 15 aa, Homo sapiens
  CDR3 for beta chain variable domain of TCR clone 312940 (TRBV19, TRBJ1-1)
CASTSGQIQNTEAFF

SEQ ID NO: 625881 - protein, 12 aa, Homo sapiens
  CDR3 for alpha chain variable domain of TCR clone 312941 (TRAV1-2, TRAJ7)
CAVAYGNNRLAF

SEQ ID NO: 625882 - protein, 16 aa, Homo sapiens
  CDR3 for beta chain variable domain of TCR clone 312941 (TRBV5-1, TRBJ2-7)
CASSPMTGALSYEQYS

SEQ ID NO: 625883 - protein, 18 aa, Homo sapiens
  CDR3 for alpha chain variable domain of TCR clone 312942 (TRAV13-1, TRAJ52)
CAAKDPNAGGTSYGKLTF

SEQ ID NO: 625884 - protein, 15 aa, Homo sapiens
  CDR3 for beta chain variable domain of TCR clone 312942 (TRBV28, TRBJ2-1)
CASSIIAGGRSEQFF

SEQ ID NO: 625885 - protein, 14 aa, Homo sapiens
  CDR3 for alpha chain variable domain of TCR clone 312943 (TRAV27, TRAJ44)
CAASFTGTASKLTF

SEQ ID NO: 625886 - protein, 15 aa, Homo sapiens
  CDR3 for beta chain variable domain of TCR clone 312943 (TRBV12-4, TRBJ2-2)
CASSPQPGSTGELFF

SEQ ID NO: 625887 - protein, 18 aa, Homo sapiens
  CDR3 for alpha chain variable domain of TCR clone 312944 (TRAV12-3, TRAJ52)
CAMSVGGAGGTSYGKLTF

SEQ ID NO: 625888 - protein, 13 aa, Homo sapiens
  CDR3 for beta chain variable domain of TCR clone 312944 (TRBV9, TRBJ2-7)
CASSVDPTGEQYF

SEQ ID NO: 625889 - protein, 11 aa, Homo sapiens
  CDR3 for alpha chain variable domain of TCR clone 312945 (TRAV1-2, TRAJ40)
CAVPGTYKYIF

SEQ ID NO: 625890 - protein, 14 aa, Homo sapiens
  CDR3 for beta chain variable domain of TCR clone 312945 (TRBV7-2, TRBJ2-5)
CASSFTQGQETQYF

SEQ ID NO: 625891 - protein, 14 aa, Homo sapiens
  CDR3 for alpha chain variable domain of TCR clone 312946 (TRAV26-1, TRAJ34)
CIVRVAYNLDKLIF

SEQ ID NO: 625892 - protein, 16 aa, Homo sapiens
  CDR3 for beta chain variable domain of TCR clone 312946 (TRBV2, TRBJ2-3)
CASSTSVEGVTDTQYF

SEQ ID NO: 625893 - protein, 16 aa, Homo sapiens
  CDR3 for alpha chain variable domain of TCR clone 312947 (TRAV12-3, TRAJ53)
CAMSPGIGGSNYKLTF

SEQ ID NO: 625894 - protein, 13 aa, Homo sapiens
  CDR3 for beta chain variable domain of TCR clone 312947 (TRBV7-3, TRBJ1-1)
CASSQDWGAEAFF

SEQ ID NO: 625895 - protein, 14 aa, Homo sapiens
  CDR3 for alpha chain variable domain of TCR clone 312948 (TRAV12-2, TRAJ4)
CAEYPSGGYNKLIF

SEQ ID NO: 625896 - protein, 13 aa, Homo sapiens
  CDR3 for beta chain variable domain of TCR clone 312948 (TRBV7-9, TRBJ1-2)
CASSLKQNYGYTF

SEQ ID NO: 625897 - protein, 14 aa, Homo sapiens
  CDR3 for alpha chain variable domain of TCR clone 312949 (TRAV26-1, TRAJ38)
CIADNAGNNRKLIW

SEQ ID NO: 625898 - protein, 17 aa, Homo sapiens
  CDR3 for beta chain variable domain of TCR clone 312949 (TRBV7-9, TRBJ2-3)
CASSPTAAGDLTDTQYF

SEQ ID NO: 625899 - protein, 14 aa, Homo sapiens
  CDR3 for alpha chain variable domain of TCR clone 312950 (TRAV20, TRAJ16)
CAVRFFSDVQKLLF

SEQ ID NO: 625900 - protein, 16 aa, Homo sapiens
  CDR3 for beta chain variable domain of TCR clone 312950 (TRBV5-1, TRBJ2-3)
CASSSIGAGSTDTQYF

SEQ ID NO: 625901 - protein, 14 aa, Homo sapiens
  CDR3 for alpha chain variable domain of TCR clone 312951 (TRAV16, TRAJ42)
CALLAGGSQGNLIF

SEQ ID NO: 625902 - protein, 15 aa, Homo sapiens
  CDR3 for beta chain variable domain of TCR clone 312951 (TRBV4-1, TRBJ1-4)
CASSDTGGTNEKLFF

SEQ ID NO: 625903 - protein, 15 aa, Homo sapiens
  CDR3 for alpha chain variable domain of TCR clone 312952 (TRAV26-1, TRAJ29)
CIVRVEGSGNTPLAF

SEQ ID NO: 625904 - protein, 15 aa, Homo sapiens
  CDR3 for beta chain variable domain of TCR clone 312952 (TRBV7-9, TRBJ1-5)
CASSQGHQPTQPQHF

SEQ ID NO: 625905 - protein, 11 aa, Homo sapiens
  CDR3 for alpha chain variable domain of TCR clone 312953 (TRAV2, TRAJ36)
CAVDQTGQTTS

SEQ ID NO: 625906 - protein, 12 aa, Homo sapiens
  CDR3 for beta chain variable domain of TCR clone 312953 (TRBV19, TRBJ1-1)
CASMNRYTEAFF

SEQ ID NO: 625907 - protein, 22 aa, Homo sapiens
  CDR3 for alpha chain variable domain of TCR clone 312954 (TRAV27, )
CAARRNAGNDHIQNPDPAVYQL

SEQ ID NO: 625908 - protein, 13 aa, Homo sapiens
  CDR3 for beta chain variable domain of TCR clone 312954 (TRBV27, TRBJ2-7)
CASSFSQGYEQYF

SEQ ID NO: 625909 - protein, 13 aa, Homo sapiens
  CDR3 for alpha chain variable domain of TCR clone 312955 (TRAV12-1, TRAJ33)
CGDPPDSNYQLIW

SEQ ID NO: 625910 - protein, 13 aa, Homo sapiens
  CDR3 for beta chain variable domain of TCR clone 312955 (TRBV7-6, TRBJ1-2)
CSSSLVADYGYIF

SEQ ID NO: 625911 - protein, 16 aa, Homo sapiens
  CDR3 for alpha chain variable domain of TCR clone 312956 (TRAV13-1, TRAJ10)
CAASSHFTGGVNKLTF

SEQ ID NO: 625912 - protein, 15 aa, Homo sapiens
  CDR3 for beta chain variable domain of TCR clone 312956 (TRBV7-9, TRBJ1-6)
CASSSPGRGNSPLHF

SEQ ID NO: 625913 - protein, 17 aa, Homo sapiens
  CDR3 for alpha chain variable domain of TCR clone 312957 (TRAV4, TRAJ13)
CLVGVQGSSGGYQKVTI

SEQ ID NO: 625914 - protein, 18 aa, Homo sapiens
  CDR3 for beta chain variable domain of TCR clone 312957 (TRBV15, TRBJ2-3)
CATSRDGARSWDTDTQYF

SEQ ID NO: 625915 - protein, 13 aa, Homo sapiens
  CDR3 for alpha chain variable domain of TCR clone 312958 (TRAV2, TRAJ40)
CAVVTSGTYKYIF

SEQ ID NO: 625916 - protein, 16 aa, Homo sapiens
  CDR3 for beta chain variable domain of TCR clone 312958 (TRBV7-2, TRBJ2-3)
CASSLVALYSTDTQYF

SEQ ID NO: 625917 - protein, 11 aa, Homo sapiens
  CDR3 for alpha chain variable domain of TCR clone 312959 (TRAV4, TRAJ31)
CLVGDNARLMF

SEQ ID NO: 625918 - protein, 16 aa, Homo sapiens
  CDR3 for beta chain variable domain of TCR clone 312959 (TRBV7-2, TRBJ2-5)
CASSSKWWSGQEAQYF

SEQ ID NO: 625919 - protein, 16 aa, Homo sapiens
  CDR3 for alpha chain variable domain of TCR clone 312960 (TRAV8-6, TRAJ28)
CAVTTKPGAGSYQLTF

SEQ ID NO: 625920 - protein, 16 aa, Homo sapiens
  CDR3 for beta chain variable domain of TCR clone 312960 (TRBV12-4, TRBJ2-5)
CASSWRPSGDLETQYF

SEQ ID NO: 625921 - protein, 12 aa, Homo sapiens
  CDR3 for alpha chain variable domain of TCR clone 312961 (TRAV12-3, TRAJ17)
CAMKLTGNKLTF

SEQ ID NO: 625922 - protein, 15 aa, Homo sapiens
  CDR3 for beta chain variable domain of TCR clone 312961 (TRBV20-1, TRBJ2-7)
CSTRDRVSGMDEQYF

SEQ ID NO: 625923 - protein, 22 aa, Homo sapiens
  CDR3 for alpha chain variable domain of TCR clone 312962 (TRAV8-2, TRAJ45)
HLTKPSAHMSDAAEYSADGLTF

SEQ ID NO: 625924 - protein, 12 aa, Homo sapiens
  CDR3 for beta chain variable domain of TCR clone 312962 (TRBV18, TRBJ2-5)
CASSPSKETQYF

SEQ ID NO: 625925 - protein, 15 aa, Homo sapiens
  CDR3 for alpha chain variable domain of TCR clone 312963 (TRAV13-2, TRAJ45)
CAESDSGGGADGLTF

SEQ ID NO: 625926 - protein, 17 aa, Homo sapiens
  CDR3 for beta chain variable domain of TCR clone 312963 (TRBV27, TRBJ1-6)
CASSLDQLSAYNSPLHF

SEQ ID NO: 625927 - protein, 14 aa, Homo sapiens
  CDR3 for alpha chain variable domain of TCR clone 312964 (TRAV16, TRAJ33)
CALSTMDSNYQLIW

SEQ ID NO: 625928 - protein, 15 aa, Homo sapiens
  CDR3 for beta chain variable domain of TCR clone 312964 (TRBV7-9, TRBJ1-4)
CASSRTGGFNEKLFF

SEQ ID NO: 625929 - protein, 11 aa, Homo sapiens
  CDR3 for alpha chain variable domain of TCR clone 312965 (TRAV23/DV6, TRAJ48)
CAPRSGEKLTF

SEQ ID NO: 625930 - protein, 14 aa, Homo sapiens
  CDR3 for beta chain variable domain of TCR clone 312965 (TRBV29-1, TRBJ1-3)
CSVADRVVGNTIYF

SEQ ID NO: 625931 - protein, 12 aa, Homo sapiens
  CDR3 for alpha chain variable domain of TCR clone 312966 (TRAV17, TRAJ43)
CSTDAFPADMRF

SEQ ID NO: 625932 - protein, 14 aa, Homo sapiens
  CDR3 for beta chain variable domain of TCR clone 312966 (TRBV20-1, TRBJ2-3)
CSARDGGSTDTQYF

SEQ ID NO: 625933 - protein, 12 aa, Homo sapiens
  CDR3 for alpha chain variable domain of TCR clone 312967 (TRAV8-3, TRAJ27)
CAVGAETGKSTF

SEQ ID NO: 625934 - protein, 14 aa, Homo sapiens
  CDR3 for beta chain variable domain of TCR clone 312967 (TRBV2, TRBJ2-1)
CASRLIVGHDEQFF

SEQ ID NO: 625935 - protein, 17 aa, Homo sapiens
  CDR3 for alpha chain variable domain of TCR clone 312968 (TRAV13-1, TRAJ52)
CAAGRNAGGTSYGKLPF

SEQ ID NO: 625936 - protein, 13 aa, Homo sapiens
  CDR3 for beta chain variable domain of TCR clone 312968 (TRBV7-2, TRBJ1-1)
CARNLKGAKVAFF

SEQ ID NO: 625937 - protein, 14 aa, Homo sapiens
  CDR3 for alpha chain variable domain of TCR clone 312969 (TRAV3, TRAJ9)
CAVRLNTGGFKTIF

SEQ ID NO: 625938 - protein, 15 aa, Homo sapiens
  CDR3 for beta chain variable domain of TCR clone 312969 (TRBV7-2, TRBJ2-1)
CASSLGSGRVNEQFF

SEQ ID NO: 625939 - protein, 15 aa, Homo sapiens
  CDR3 for alpha chain variable domain of TCR clone 312970 (TRAV3, TRAJ5)
CAVRDLYTGRRALTC

SEQ ID NO: 625940 - protein, 16 aa, Homo sapiens
  CDR3 for beta chain variable domain of TCR clone 312970 (TRBV20-1, TRBJ1-4)
CSAPGQGLLTNEKLFF

SEQ ID NO: 625941 - protein, 11 aa, Homo sapiens
  CDR3 for alpha chain variable domain of TCR clone 312971 (TRAV8-1, TRAJ43)
CAVTNDMRFGA

SEQ ID NO: 625942 - protein, 14 aa, Homo sapiens
  CDR3 for beta chain variable domain of TCR clone 312971 (TRBV12-5, TRBJ2-5)
CASGSRTHQETQYF

SEQ ID NO: 625943 - protein, 16 aa, Homo sapiens
  CDR3 for alpha chain variable domain of TCR clone 312972 (TRAV3, TRAJ37)
CAVRGKGSGHTGKLIF

SEQ ID NO: 625944 - protein, 13 aa, Homo sapiens
  CDR3 for beta chain variable domain of TCR clone 312972 (TRBV14, TRBJ2-7)
CASSQDRRYKQYF

SEQ ID NO: 625945 - protein, 18 aa, Homo sapiens
  CDR3 for alpha chain variable domain of TCR clone 312973 (TRAV13-1, TRAJ52)
CAASKRSAGGTSYGKLTF

SEQ ID NO: 625946 - protein, 13 aa, Homo sapiens
  CDR3 for beta chain variable domain of TCR clone 312973 (TRBV12-4, TRBJ1-2)
CASSLRQGKGFTF

SEQ ID NO: 625947 - protein, 14 aa, Homo sapiens
  CDR3 for alpha chain variable domain of TCR clone 312974 (TRAV13-1, TRAJ39)
CAAPPNNAGNMLTF

SEQ ID NO: 625948 - protein, 13 aa, Homo sapiens
  CDR3 for beta chain variable domain of TCR clone 312974 (TRBV7-9, TRBJ2-4)
CATEGLAGNIQYF

SEQ ID NO: 625949 - protein, 14 aa, Homo sapiens
  CDR3 for alpha chain variable domain of TCR clone 312975 (TRAV13-1, TRAJ39)
CAASKNNAGNMLTL

SEQ ID NO: 625950 - protein, 15 aa, Homo sapiens
  CDR3 for beta chain variable domain of TCR clone 312975 (TRBV7-9, TRBJ1-6)
CASSSPGRGNSPLHF

SEQ ID NO: 625951 - protein, 15 aa, Homo sapiens
  CDR3 for alpha chain variable domain of TCR clone 312976 (TRAV3, TRAJ9)
CAVIDINTGGFKTIF

SEQ ID NO: 625952 - protein, 13 aa, Homo sapiens
  CDR3 for beta chain variable domain of TCR clone 312976 (TRBV19, TRBJ2-7)
CASSIPSVREQYF

SEQ ID NO: 625953 - protein, 10 aa, Homo sapiens
  CDR3 for alpha chain variable domain of TCR clone 312977 (TRAV12-1, TRAJ41)
CVVPELKFRV

SEQ ID NO: 625954 - protein, 13 aa, Homo sapiens
  CDR3 for beta chain variable domain of TCR clone 312977 (TRBV7-2, TRBJ1-4)
CASSLAGLEKLFF

SEQ ID NO: 625955 - protein, 10 aa, Homo sapiens
  CDR3 for alpha chain variable domain of TCR clone 312978 (TRAV23/DV6, TRAJ43)
CAAAVAALEQ

SEQ ID NO: 625956 - protein, 16 aa, Homo sapiens
  CDR3 for beta chain variable domain of TCR clone 312978 (TRBV18, TRBJ1-2)
CASSPPERVTIYDYPF

SEQ ID NO: 625957 - protein, 15 aa, Homo sapiens
  CDR3 for alpha chain variable domain of TCR clone 312979 (TRAV8-3, TRAJ45)
CASSYSGVGSYGLTF

SEQ ID NO: 625958 - protein, 13 aa, Homo sapiens
  CDR3 for beta chain variable domain of TCR clone 312979 (TRBV7-9, TRBJ2-7)
CASSFAGAYEQYF

SEQ ID NO: 625959 - protein, 16 aa, Homo sapiens
  CDR3 for alpha chain variable domain of TCR clone 312980 (TRAV30, TRAJ24)
CGTEIVDADSWGKFQF

SEQ ID NO: 625960 - protein, 11 aa, Homo sapiens
  CDR3 for beta chain variable domain of TCR clone 312980 (TRBV11-2, TRBJ2-7)
CASSSDYEQYF

SEQ ID NO: 625961 - protein, 18 aa, Homo sapiens
  CDR3 for alpha chain variable domain of TCR clone 312981 (TRAV21, TRAJ13)
CAVPRSFWGLPESYLWNW

SEQ ID NO: 625962 - protein, 15 aa, Homo sapiens
  CDR3 for beta chain variable domain of TCR clone 312981 (TRBV7-9, TRBJ1-6)
CTSSSPGRGNSPLLF

SEQ ID NO: 625963 - protein, 12 aa, Homo sapiens
  CDR3 for alpha chain variable domain of TCR clone 312982 (TRAV12-2, TRAJ44)
CSVTGTASKLTF

SEQ ID NO: 625964 - protein, 17 aa, Homo sapiens
  CDR3 for beta chain variable domain of TCR clone 312982 (TRBV20-1, TRBJ1-1)
CSASGAGGGLGKTEAFF

SEQ ID NO: 625965 - protein, 13 aa, Homo sapiens
  CDR3 for alpha chain variable domain of TCR clone 312983 (TRAV8-6, TRAJ49)
CAVITNTGNQFYF

SEQ ID NO: 625966 - protein, 17 aa, Homo sapiens
  CDR3 for beta chain variable domain of TCR clone 312983 (TRBV19, TRBJ2-7)
CASSISFYDSYPYEQYF

SEQ ID NO: 625967 - protein, 13 aa, Homo sapiens
  CDR3 for alpha chain variable domain of TCR clone 312984 (TRAV2, TRAJ15)
CAVASQAGTALIF

SEQ ID NO: 625968 - protein, 15 aa, Homo sapiens
  CDR3 for beta chain variable domain of TCR clone 312984 (TRBV28, TRBJ2-7)
CASSLISGGSYEQYF

SEQ ID NO: 625969 - protein, 15 aa, Homo sapiens
  CDR3 for alpha chain variable domain of TCR clone 312985 (TRAV26-1, TRAJ22)
CIVRVSFWFCKATDL

SEQ ID NO: 625970 - protein, 13 aa, Homo sapiens
  CDR3 for beta chain variable domain of TCR clone 312985 (TRBV29-1, TRBJ1-1)
CSVGDSRNTEAFF

SEQ ID NO: 625971 - protein, 14 aa, Homo sapiens
  CDR3 for alpha chain variable domain of TCR clone 312986 (TRAV17, TRAJ4)
CATAPLCGYNKLIF

SEQ ID NO: 625972 - protein, 13 aa, Homo sapiens
  CDR3 for beta chain variable domain of TCR clone 312986 (TRBV12-4, TRBJ1-3)
CASSLASGNTIYF

SEQ ID NO: 625973 - protein, 18 aa, Homo sapiens
  CDR3 for alpha chain variable domain of TCR clone 312987 (TRAV21, TRAJ52)
CAVRPSPAGGTSYGKLTF

SEQ ID NO: 625974 - protein, 14 aa, Homo sapiens
  CDR3 for beta chain variable domain of TCR clone 312987 (TRBV5-1, TRBJ2-7)
CASSQNRLEYEQYF

SEQ ID NO: 625975 - protein, 13 aa, Homo sapiens
  CDR3 for alpha chain variable domain of TCR clone 312988 (TRAV13-2, TRAJ13)
CAERPGGYQKVTF

SEQ ID NO: 625976 - protein, 18 aa, Homo sapiens
  CDR3 for beta chain variable domain of TCR clone 312988 (TRBV7-2, TRBJ2-3)
CASSLKREGSGITDTQYF

SEQ ID NO: 625977 - protein, 13 aa, Homo sapiens
  CDR3 for alpha chain variable domain of TCR clone 312989 (TRAV27, TRAJ41)
CAGEGNSGYALNF

SEQ ID NO: 625978 - protein, 14 aa, Homo sapiens
  CDR3 for beta chain variable domain of TCR clone 312989 (TRBV7-2, TRBJ1-1)
CASSFMTGTTEAFF

SEQ ID NO: 625979 - protein, 13 aa, Homo sapiens
  CDR3 for alpha chain variable domain of TCR clone 312990 (TRAV30, TRAJ24)
CGTVTDSWWKLQF

SEQ ID NO: 625980 - protein, 13 aa, Homo sapiens
  CDR3 for beta chain variable domain of TCR clone 312990 (TRBV10-2, TRBJ1-1)
CASNDQMNTEAFF

SEQ ID NO: 625981 - protein, 13 aa, Homo sapiens
  CDR3 for alpha chain variable domain of TCR clone 312991 (TRAV8-3, TRAJ43)
CAVGPDNNNVMRF

SEQ ID NO: 625982 - protein, 14 aa, Homo sapiens
  CDR3 for beta chain variable domain of TCR clone 312991 (TRBV19, TRBJ2-1)
CASPTFVLSGEQFF

SEQ ID NO: 625983 - protein, 13 aa, Homo sapiens
  CDR3 for alpha chain variable domain of TCR clone 312992 (TRAV12-3, TRAJ4)
CAMTERGYNKLIF

SEQ ID NO: 625984 - protein, 17 aa, Homo sapiens
  CDR3 for beta chain variable domain of TCR clone 312992 (TRBV28, TRBJ2-3)
WASSLQVGPSSTDTQYF

SEQ ID NO: 625985 - protein, 16 aa, Homo sapiens
  CDR3 for alpha chain variable domain of TCR clone 312993 (TRAV1-2, TRAJ10)
CAVRGVLTGGGNKLTF

SEQ ID NO: 625986 - protein, 16 aa, Homo sapiens
  CDR3 for beta chain variable domain of TCR clone 312993 (TRBV15, TRBJ2-1)
CHQQRLGLAGNNEQFF

SEQ ID NO: 625987 - protein, 12 aa, Homo sapiens
  CDR3 for alpha chain variable domain of TCR clone 312994 (TRAV23/DV6, TRAJ30)
CAASKGDEKSIF

SEQ ID NO: 625988 - protein, 15 aa, Homo sapiens
  CDR3 for beta chain variable domain of TCR clone 312994 (TRBV29-1, TRBJ2-1)
CSGRDRKSAYNEQFF

SEQ ID NO: 625989 - protein, 13 aa, Homo sapiens
  CDR3 for alpha chain variable domain of TCR clone 312995 (TRAV12-3, TRAJ47)
CAMKKEYGNKLVF

SEQ ID NO: 625990 - protein, 10 aa, Homo sapiens
  CDR3 for beta chain variable domain of TCR clone 312995 (TRBV5-1, TRBJ2-2)
CASSLAGLSG

SEQ ID NO: 625991 - protein, 13 aa, Homo sapiens
  CDR3 for alpha chain variable domain of TCR clone 312996 (TRAV13-1, TRAJ28)
CAANEAGSYQLTY

SEQ ID NO: 625992 - protein, 15 aa, Homo sapiens
  CDR3 for beta chain variable domain of TCR clone 312996 (TRBV7-9, TRBJ1-6)
CASSSPGRGNSPLHF

SEQ ID NO: 625993 - protein, 15 aa, Homo sapiens
  CDR3 for alpha chain variable domain of TCR clone 312997 (TRAV34, TRAJ38)
CGADFTPGNNRKRIW

SEQ ID NO: 625994 - protein, 14 aa, Homo sapiens
  CDR3 for beta chain variable domain of TCR clone 312997 (TRBV11-2, TRBJ2-3)
CASSLGGGANTQYF

SEQ ID NO: 625995 - protein, 12 aa, Homo sapiens
  CDR3 for alpha chain variable domain of TCR clone 312998 (TRAV12-2, TRAJ36)
SATLERANNLFF

SEQ ID NO: 625996 - protein, 11 aa, Homo sapiens
  CDR3 for beta chain variable domain of TCR clone 312998 (TRBV11-2, TRBJ2-2)
CASSLPGELFF

SEQ ID NO: 625997 - protein, 13 aa, Homo sapiens
  CDR3 for alpha chain variable domain of TCR clone 312999 (TRAV27, TRAJ41)
CAGEGNSGYALNF

SEQ ID NO: 625998 - protein, 16 aa, Homo sapiens
  CDR3 for beta chain variable domain of TCR clone 312999 (TRBV7-2, TRBJ1-1)
CASSFLTGTTEAFLDK

SEQ ID NO: 625999 - protein, 13 aa, Homo sapiens
  CDR3 for alpha chain variable domain of TCR clone 313000 (TRAV1-2, TRAJ12)
CAVSMDSSYKLIF

SEQ ID NO: 626000 - protein, 15 aa, Homo sapiens
  CDR3 for beta chain variable domain of TCR clone 313000 (TRBV6-1, TRBJ2-3)
CASSERGGITDTQYF

SEQ ID NO: 626001 - protein, 14 aa, Homo sapiens
  CDR3 for alpha chain variable domain of TCR clone 313001 (TRAV1-2, TRAJ8)
CGVREDTGFQKLVF

SEQ ID NO: 626002 - protein, 14 aa, Homo sapiens
  CDR3 for beta chain variable domain of TCR clone 313001 (TRBV15, TRBJ2-3)
CATRSGTSTDTQYI

SEQ ID NO: 626003 - protein, 13 aa, Homo sapiens
  CDR3 for alpha chain variable domain of TCR clone 313002 (TRAV36/DV7, TRAJ57)
CAVVLGGSEKLSL

SEQ ID NO: 626004 - protein, 14 aa, Homo sapiens
  CDR3 for beta chain variable domain of TCR clone 313002 (TRBV4-1, TRBJ1-2)
CASSQDGQVRGYTF

SEQ ID NO: 626005 - protein, 13 aa, Homo sapiens
  CDR3 for alpha chain variable domain of TCR clone 313003 (TRAV13-1, TRAJ12)
CAASPDSSYQLIF

SEQ ID NO: 626006 - protein, 16 aa, Homo sapiens
  CDR3 for beta chain variable domain of TCR clone 313003 (TRBV15, TRBJ2-1)
CATSRERLAGAYEQFF

SEQ ID NO: 626007 - protein, 14 aa, Homo sapiens
  CDR3 for alpha chain variable domain of TCR clone 313004 (TRAV35, TRAJ13)
CAGSPSGGYQKVTF

SEQ ID NO: 626008 - protein, 17 aa, Homo sapiens
  CDR3 for beta chain variable domain of TCR clone 313004 (TRBV11-2, TRBJ2-1)
CASSLYPPGVEYNEQFF

SEQ ID NO: 626009 - protein, 12 aa, Homo sapiens
  CDR3 for alpha chain variable domain of TCR clone 313005 (TRAV17, TRAJ12)
CATLRSSYKLIF

SEQ ID NO: 626010 - protein, 14 aa, Homo sapiens
  CDR3 for beta chain variable domain of TCR clone 313005 (TRBV19, TRBJ2-1)
CARGARSFQWEKFF

SEQ ID NO: 626011 - protein, 16 aa, Homo sapiens
  CDR3 for alpha chain variable domain of TCR clone 313006 (TRAV12-2, TRAJ32)
CAVNLGQGGAINKLIF

SEQ ID NO: 626012 - protein, 17 aa, Homo sapiens
  CDR3 for beta chain variable domain of TCR clone 313006 (TRBV19, TRBJ2-7)
CASSISFYDSYPYEQYF

SEQ ID NO: 626013 - protein, 11 aa, Homo sapiens
  CDR3 for alpha chain variable domain of TCR clone 313007 (TRAV12-2, TRAJ33)
CAVGSNYQLIW

SEQ ID NO: 626014 - protein, 14 aa, Homo sapiens
  CDR3 for beta chain variable domain of TCR clone 313007 (TRBV6-1, TRBJ2-2)
CASVEHVESGELFF

SEQ ID NO: 626015 - protein, 18 aa, Homo sapiens
  CDR3 for alpha chain variable domain of TCR clone 313008 (TRAV13-1, TRAJ31)
CAAIVTMPDPCLEMELSW

SEQ ID NO: 626016 - protein, 11 aa, Homo sapiens
  CDR3 for beta chain variable domain of TCR clone 313008 (TRBV20-1, TRBJ2-7)
CSARTSYEQYF

SEQ ID NO: 626017 - protein, 14 aa, Homo sapiens
  CDR3 for alpha chain variable domain of TCR clone 313009 (TRAV29/DV5, TRAJ36)
CAARRKTGANNLFF

SEQ ID NO: 626018 - protein, 13 aa, Homo sapiens
  CDR3 for beta chain variable domain of TCR clone 313009 (TRBV4-1, TRBJ2-7)
CASSQGQAYEQYF

SEQ ID NO: 626019 - protein, 13 aa, Homo sapiens
  CDR3 for alpha chain variable domain of TCR clone 313010 (TRAV13-2, TRAJ53)
CAENMGSNYKLKL

SEQ ID NO: 626020 - protein, 13 aa, Homo sapiens
  CDR3 for beta chain variable domain of TCR clone 313010 (TRBV4-1, TRBJ2-2)
CASSQENTGELFF

SEQ ID NO: 626021 - protein, 13 aa, Homo sapiens
  CDR3 for alpha chain variable domain of TCR clone 313011 (TRAV12-2, TRAJ9)
CAVLETGGFKTIF

SEQ ID NO: 626022 - protein, 15 aa, Homo sapiens
  CDR3 for beta chain variable domain of TCR clone 313011 (TRBV6-3, TRBJ2-7)
CASSRTGVKLYEQYF

SEQ ID NO: 626023 - protein, 15 aa, Homo sapiens
  CDR3 for alpha chain variable domain of TCR clone 313012 (TRAV12-1, TRAJ36)
CVVNEHQTGANNPFF

SEQ ID NO: 626024 - protein, 14 aa, Homo sapiens
  CDR3 for beta chain variable domain of TCR clone 313012 (TRBV10-3, TRBJ2-5)
CASRTSGGQETQYF

SEQ ID NO: 626025 - protein, 23 aa, Homo sapiens
  CDR3 for alpha chain variable domain of TCR clone 313013 (TRAV26-1, TRAJ38)
CIADNAGNNRIQNPDPAGYQLRD

SEQ ID NO: 626026 - protein, 13 aa, Homo sapiens
  CDR3 for beta chain variable domain of TCR clone 313013 (TRBV20-1, TRBJ1-1)
CSARGGGNTEAFF

SEQ ID NO: 626027 - protein, 13 aa, Homo sapiens
  CDR3 for alpha chain variable domain of TCR clone 313014 (TRAV12-3, TRAJ9)
CAMRNTGGFKTIF

SEQ ID NO: 626028 - protein, 14 aa, Homo sapiens
  CDR3 for beta chain variable domain of TCR clone 313014 (TRBV5-1, TRBJ2-3)
CASSVGTGTDTQYF

SEQ ID NO: 626029 - protein, 12 aa, Homo sapiens
  CDR3 for alpha chain variable domain of TCR clone 313015 (TRAV13-1, TRAJ21)
CAAKEGFNKFYF

SEQ ID NO: 626030 - protein, 15 aa, Homo sapiens
  CDR3 for beta chain variable domain of TCR clone 313015 (TRBV28, TRBJ2-2)
CASTLEGARGGELFF

SEQ ID NO: 626031 - protein, 15 aa, Homo sapiens
  CDR3 for alpha chain variable domain of TCR clone 313016 (TRAV8-3, TRAJ7)
CAVGSISYGNNRLAF

SEQ ID NO: 626032 - protein, 15 aa, Homo sapiens
  CDR3 for beta chain variable domain of TCR clone 313016 (TRBV4-2, TRBJ1-1)
CASSQEDLHRTEAFF

SEQ ID NO: 626033 - protein, 15 aa, Homo sapiens
  CDR3 for alpha chain variable domain of TCR clone 313017 (TRAV25, TRAJ53)
CAATGGGGSNYKLTF

SEQ ID NO: 626034 - protein, 13 aa, Homo sapiens
  CDR3 for beta chain variable domain of TCR clone 313017 (TRBV19, TRBJ1-3)
CASRLSLGNTIYF

SEQ ID NO: 626035 - protein, 14 aa, Homo sapiens
  CDR3 for alpha chain variable domain of TCR clone 313018 (TRAV12-1, TRAJ17)
CVVNFKAAGNRLTF

SEQ ID NO: 626036 - protein, 17 aa, Homo sapiens
  CDR3 for beta chain variable domain of TCR clone 313018 (TRBV20-1, TRBJ2-1)
CSASASGLAGSYNEQFF

SEQ ID NO: 626037 - protein, 15 aa, Homo sapiens
  CDR3 for alpha chain variable domain of TCR clone 313019 (TRAV4, TRAJ39)
CLVGPNNNAGNMLTF

SEQ ID NO: 626038 - protein, 14 aa, Homo sapiens
  CDR3 for beta chain variable domain of TCR clone 313019 (TRBV12-5, TRBJ2-5)
CASGSRTHQETQYF

SEQ ID NO: 626039 - protein, 16 aa, Homo sapiens
  CDR3 for alpha chain variable domain of TCR clone 313020 (TRAV8-3, TRAJ44)
CAVGASNTGTASKLTF

SEQ ID NO: 626040 - protein, 15 aa, Homo sapiens
  CDR3 for beta chain variable domain of TCR clone 313020 (TRBV27, TRBJ1-5)
CASTFNSGSNQPQHF

SEQ ID NO: 626041 - protein, 14 aa, Homo sapiens
  CDR3 for alpha chain variable domain of TCR clone 313021 (TRAV26-1, TRAJ48)
CIVRVGFGNEELTF

SEQ ID NO: 626042 - protein, 13 aa, Homo sapiens
  CDR3 for beta chain variable domain of TCR clone 313021 (TRBV11-3, TRBJ2-3)
CASSHDTKDTQYF

SEQ ID NO: 626043 - protein, 13 aa, Homo sapiens
  CDR3 for alpha chain variable domain of TCR clone 313022 (TRAV21, TRAJ27)
CAARPDNAGRSTF

SEQ ID NO: 626044 - protein, 13 aa, Homo sapiens
  CDR3 for beta chain variable domain of TCR clone 313022 (TRBV18, TRBJ2-7)
CASQSGGGYEQYF

SEQ ID NO: 626045 - protein, 13 aa, Homo sapiens
  CDR3 for alpha chain variable domain of TCR clone 313023 (TRAV1-1, TRAJ23)
CAVVANQGGKLIF

SEQ ID NO: 626046 - protein, 16 aa, Homo sapiens
  CDR3 for beta chain variable domain of TCR clone 313023 (TRBV5-5, TRBJ1-2)
CASSPTWGRGLYGYTL

SEQ ID NO: 626047 - protein, 12 aa, Homo sapiens
  CDR3 for alpha chain variable domain of TCR clone 313024 (TRAV2, TRAJ33)
CAVPDSNYQLIW

SEQ ID NO: 626048 - protein, 20 aa, Homo sapiens
  CDR3 for beta chain variable domain of TCR clone 313024 (TRBV19, TRBJ2-1)
CASSISRTVTSSRLNNEQFF

SEQ ID NO: 626049 - protein, 14 aa, Homo sapiens
  CDR3 for alpha chain variable domain of TCR clone 313025 (TRAV12-3, TRAJ10)
SHLPLTGGGNKLTF

SEQ ID NO: 626050 - protein, 14 aa, Homo sapiens
  CDR3 for beta chain variable domain of TCR clone 313025 (TRBV7-2, TRBJ2-2)
CTSSLNSNTGELFF

SEQ ID NO: 626051 - protein, 13 aa, Homo sapiens
  CDR3 for alpha chain variable domain of TCR clone 313026 (TRAV35, TRAJ48)
CAGHEFGNEKLIF

SEQ ID NO: 626052 - protein, 16 aa, Homo sapiens
  CDR3 for beta chain variable domain of TCR clone 313026 (TRBV12-5, TRBJ2-5)
CASGPRTSGNQETQYF

SEQ ID NO: 626053 - protein, 14 aa, Homo sapiens
  CDR3 for alpha chain variable domain of TCR clone 313027 (TRAV12-2, TRAJ44)
CAVNPAGTASKLTF

SEQ ID NO: 626054 - protein, 14 aa, Homo sapiens
  CDR3 for beta chain variable domain of TCR clone 313027 (TRBV27, TRBJ2-3)
CATWTSGRPWGQYF

SEQ ID NO: 626055 - protein, 13 aa, Homo sapiens
  CDR3 for alpha chain variable domain of TCR clone 313028 (TRAV27, TRAJ41)
CAGEGNSGYALNL

SEQ ID NO: 626056 - protein, 14 aa, Homo sapiens
  CDR3 for beta chain variable domain of TCR clone 313028 (TRBV5-4, TRBJ1-1)
CASSLDSRRDEAFF

SEQ ID NO: 626057 - protein, 14 aa, Homo sapiens
  CDR3 for alpha chain variable domain of TCR clone 313029 (TRAV13-1, TRAJ28)
CAASKGAGSYQLNF

SEQ ID NO: 626058 - protein, 16 aa, Homo sapiens
  CDR3 for beta chain variable domain of TCR clone 313029 (TRBV4-2, TRBJ2-3)
CASSQDGARGGVKQYF

SEQ ID NO: 626059 - protein, 12 aa, Homo sapiens
  CDR3 for alpha chain variable domain of TCR clone 313030 (TRAV13-1, TRAJ21)
CAAKEGFNKFYF

SEQ ID NO: 626060 - protein, 12 aa, Homo sapiens
  CDR3 for beta chain variable domain of TCR clone 313030 (TRBV3-1, TRBJ2-1)
CASSQGSSGQFF

SEQ ID NO: 626061 - protein, 11 aa, Homo sapiens
  CDR3 for alpha chain variable domain of TCR clone 313031 (TRAV35, TRAJ12)
RRMDSSYKLIF

SEQ ID NO: 626062 - protein, 14 aa, Homo sapiens
  CDR3 for beta chain variable domain of TCR clone 313031 (TRBV19, TRBJ1-1)
CASSTNRGDTEAFF

SEQ ID NO: 626063 - protein, 14 aa, Homo sapiens
  CDR3 for alpha chain variable domain of TCR clone 313032 (TRAV26-1, TRAJ21)
CIVRVAHNFNKFYF

SEQ ID NO: 626064 - protein, 15 aa, Homo sapiens
  CDR3 for beta chain variable domain of TCR clone 313032 (TRBV20-1, TRBJ2-7)
CSAESGTSGAYEQYF

SEQ ID NO: 626065 - protein, 12 aa, Homo sapiens
  CDR3 for alpha chain variable domain of TCR clone 313033 (TRAV13-2, TRAJ23)
CAERHRGGKLIF

SEQ ID NO: 626066 - protein, 15 aa, Homo sapiens
  CDR3 for beta chain variable domain of TCR clone 313033 (TRBV20-1, TRBJ2-1)
CSARFSAGGLNEQFF

SEQ ID NO: 626067 - protein, 11 aa, Homo sapiens
  CDR3 for alpha chain variable domain of TCR clone 313034 (TRAV27, TRAJ20)
CAGADAYKLSF

SEQ ID NO: 626068 - protein, 13 aa, Homo sapiens
  CDR3 for beta chain variable domain of TCR clone 313034 (TRBV11-3, TRBJ1-2)
CASSQRTSRGYTF

SEQ ID NO: 626069 - protein, 10 aa, Homo sapiens
  CDR3 for alpha chain variable domain of TCR clone 313035 (TRAV21, TRAJ31)
CAVDNARLMF

SEQ ID NO: 626070 - protein, 13 aa, Homo sapiens
  CDR3 for beta chain variable domain of TCR clone 313035 (TRBV4-1, TRBJ1-1)
CARSRKMNTEAFF

SEQ ID NO: 626071 - protein, 12 aa, Homo sapiens
  CDR3 for alpha chain variable domain of TCR clone 313036 (TRAV16, TRAJ27)
FALNHQCRQINL

SEQ ID NO: 626072 - protein, 13 aa, Homo sapiens
  CDR3 for beta chain variable domain of TCR clone 313036 (TRBV7-9, TRBJ1-2)
CASSLKQNYGYTF

SEQ ID NO: 626073 - protein, 14 aa, Homo sapiens
  CDR3 for alpha chain variable domain of TCR clone 313037 (TRAV4, TRAJ26)
CLVGPHNYGQNFVF

SEQ ID NO: 626074 - protein, 14 aa, Homo sapiens
  CDR3 for beta chain variable domain of TCR clone 313037 (TRBV7-3, TRBJ2-2)
CASSSGGYTGELFF

SEQ ID NO: 626075 - protein, 13 aa, Homo sapiens
  CDR3 for alpha chain variable domain of TCR clone 313038 (TRAV13-1, TRAJ11)
CAASIRGYSTLTF

SEQ ID NO: 626076 - protein, 14 aa, Homo sapiens
  CDR3 for beta chain variable domain of TCR clone 313038 (TRBV12-4, TRBJ1-1)
CASSLGTGGTEAFF

SEQ ID NO: 626077 - protein, 14 aa, Homo sapiens
  CDR3 for alpha chain variable domain of TCR clone 313039 (TRAV35, TRAJ33)
CAGSSQDSNHQLIW

SEQ ID NO: 626078 - protein, 18 aa, Homo sapiens
  CDR3 for beta chain variable domain of TCR clone 313039 (TRBV7-3, TRBJ2-1)
CASSLTLASGRAMVSSSS

SEQ ID NO: 626079 - protein, 13 aa, Homo sapiens
  CDR3 for alpha chain variable domain of TCR clone 313040 (TRAV38-1, TRAJ42)
CARWGGSQGNLIF

SEQ ID NO: 626080 - protein, 13 aa, Homo sapiens
  CDR3 for beta chain variable domain of TCR clone 313040 (TRBV28, TRBJ2-7)
CASSPSGTYEQYF

SEQ ID NO: 626081 - protein, 13 aa, Homo sapiens
  CDR3 for alpha chain variable domain of TCR clone 313041 (TRAV12-3, TRAJ30)
CAMSAKWDDKIIF

SEQ ID NO: 626082 - protein, 15 aa, Homo sapiens
  CDR3 for beta chain variable domain of TCR clone 313041 (TRBV9, TRBJ1-6)
CASSVAGTGDSPLHF

SEQ ID NO: 626083 - protein, 14 aa, Homo sapiens
  CDR3 for alpha chain variable domain of TCR clone 313042 (TRAV13-1, TRAJ35)
CSASKGGFVNVLHC

SEQ ID NO: 626084 - protein, 13 aa, Homo sapiens
  CDR3 for beta chain variable domain of TCR clone 313042 (TRBV7-3, TRBJ1-1)
CASSQDWGAEAFF

SEQ ID NO: 626085 - protein, 11 aa, Homo sapiens
  CDR3 for alpha chain variable domain of TCR clone 313043 (TRAV2, TRAJ13)
CASGGYQKVTF

SEQ ID NO: 626086 - protein, 15 aa, Homo sapiens
  CDR3 for beta chain variable domain of TCR clone 313043 (TRBV11-2, TRBJ2-1)
CASSKNRGLIYEQFF

SEQ ID NO: 626087 - protein, 13 aa, Homo sapiens
  CDR3 for alpha chain variable domain of TCR clone 313044 (TRAV2, TRAJ40)
CAVVTSGTYKYIF

SEQ ID NO: 626088 - protein, 13 aa, Homo sapiens
  CDR3 for beta chain variable domain of TCR clone 313044 (TRBV4-2, TRBJ2-3)
CASSQDWQHTQYF

SEQ ID NO: 626089 - protein, 16 aa, Homo sapiens
  CDR3 for alpha chain variable domain of TCR clone 313045 (TRAV23/DV6, TRAJ34)
CAASGALSYNTDKLIF

SEQ ID NO: 626090 - protein, 17 aa, Homo sapiens
  CDR3 for beta chain variable domain of TCR clone 313045 (TRBV11-2, TRBJ2-1)
CASSLYPPGVEYNEQFF

SEQ ID NO: 626091 - protein, 17 aa, Homo sapiens
  CDR3 for alpha chain variable domain of TCR clone 313046 (TRAV13-1, TRAJ28)
CAASPPYSGAGSYQLTF

SEQ ID NO: 626092 - protein, 12 aa, Homo sapiens
  CDR3 for beta chain variable domain of TCR clone 313046 (TRBV7-9, TRBJ2-7)
CASSFGSYEQYF

SEQ ID NO: 626093 - protein, 12 aa, Homo sapiens
  CDR3 for alpha chain variable domain of TCR clone 313047 (TRAV12-3, TRAJ17)
CAMTLTDNKLTF

SEQ ID NO: 626094 - protein, 16 aa, Homo sapiens
  CDR3 for beta chain variable domain of TCR clone 313047 (TRBV20-1, TRBJ1-4)
CSAPGQSLLTNEKLFF

SEQ ID NO: 626095 - protein, 12 aa, Homo sapiens
  CDR3 for alpha chain variable domain of TCR clone 313048 (TRAV12-2, TRAJ9)
CAVYNGGFETIL

SEQ ID NO: 626096 - protein, 14 aa, Homo sapiens
  CDR3 for beta chain variable domain of TCR clone 313048 (TRBV6-1, TRBJ1-5)
CASSETGMEQPQHF

SEQ ID NO: 626097 - protein, 15 aa, Homo sapiens
  CDR3 for alpha chain variable domain of TCR clone 313049 (TRAV3, TRAJ47)
CAVRDIGEYGNKLVF

SEQ ID NO: 626098 - protein, 15 aa, Homo sapiens
  CDR3 for beta chain variable domain of TCR clone 313049 (TRBV5-1, TRBJ1-1)
CASSLAPRGNTEAFF

SEQ ID NO: 626099 - protein, 15 aa, Homo sapiens
  CDR3 for alpha chain variable domain of TCR clone 313050 (TRAV12-3, TRAJ6)
CAMGATSGGSYIPKF

SEQ ID NO: 626100 - protein, 11 aa, Homo sapiens
  CDR3 for beta chain variable domain of TCR clone 313050 (TRBV20-1, TRBJ1-5)
CSAQGDQPQHF

SEQ ID NO: 626101 - protein, 12 aa, Homo sapiens
  CDR3 for alpha chain variable domain of TCR clone 313051 (TRAV8-3, TRAJ7)
CAVEGGNNRLAF

SEQ ID NO: 626102 - protein, 15 aa, Homo sapiens
  CDR3 for beta chain variable domain of TCR clone 313051 (TRBV10-3, TRBJ2-1)
CAISDVQDRAYEQFF

SEQ ID NO: 626103 - protein, 14 aa, Homo sapiens
  CDR3 for alpha chain variable domain of TCR clone 313052 (TRAV8-1, TRAJ5)
CAVRTDTGRRALTF

SEQ ID NO: 626104 - protein, 14 aa, Homo sapiens
  CDR3 for beta chain variable domain of TCR clone 313052 (TRBV4-3, TRBJ2-2)
CASSQGHVTGELFF

SEQ ID NO: 626105 - protein, 17 aa, Homo sapiens
  CDR3 for alpha chain variable domain of TCR clone 313053 (TRAV13-1, TRAJ42)
CAASELWRRPRKSHLWK

SEQ ID NO: 626106 - protein, 15 aa, Homo sapiens
  CDR3 for beta chain variable domain of TCR clone 313053 (TRBV20-1, TRBJ2-1)
CSASSAGSSYNEQFF

SEQ ID NO: 626107 - protein, 15 aa, Homo sapiens
  CDR3 for alpha chain variable domain of TCR clone 313054 (TRAV38-1, TRAJ37)
CAFIHGSGNTGKLIF

SEQ ID NO: 626108 - protein, 12 aa, Homo sapiens
  CDR3 for beta chain variable domain of TCR clone 313054 (TRBV7-9, TRBJ2-7)
CASSFGSFEQYF

SEQ ID NO: 626109 - protein, 16 aa, Homo sapiens
  CDR3 for alpha chain variable domain of TCR clone 313055 (TRAV38-1, TRAJ45)
CAFMKGLGGGADGLTF

SEQ ID NO: 626110 - protein, 15 aa, Homo sapiens
  CDR3 for beta chain variable domain of TCR clone 313055 (TRBV20-1, TRBJ2-7)
CSAREGRDSLYEQYF

SEQ ID NO: 626111 - protein, 16 aa, Homo sapiens
  CDR3 for alpha chain variable domain of TCR clone 313056 (TRAV35, TRAJ28)
CAGQRYSGAGSYQLTF

SEQ ID NO: 626112 - protein, 15 aa, Homo sapiens
  CDR3 for beta chain variable domain of TCR clone 313056 (TRBV20-1, TRBJ2-7)
CSARDRVSGMDGQYF

SEQ ID NO: 626113 - protein, 13 aa, Homo sapiens
  CDR3 for alpha chain variable domain of TCR clone 313057 (TRAV12-1, TRAJ7)
CVVNMRGNNRFAF

SEQ ID NO: 626114 - protein, 15 aa, Homo sapiens
  CDR3 for beta chain variable domain of TCR clone 313057 (TRBV27, TRBJ2-3)
CASSLGLAATDTQYF

SEQ ID NO: 626115 - protein, 11 aa, Homo sapiens
  CDR3 for alpha chain variable domain of TCR clone 313058 (TRAV1-1, TRAJ23)
CAVRQGGKLIF

SEQ ID NO: 626116 - protein, 14 aa, Homo sapiens
  CDR3 for beta chain variable domain of TCR clone 313058 (TRBV18, TRBJ2-5)
CASSPGVSQETQYL

SEQ ID NO: 626117 - protein, 13 aa, Homo sapiens
  CDR3 for alpha chain variable domain of TCR clone 313059 (TRAV1-2, TRAJ9)
CAVLTTGGFTTIF

SEQ ID NO: 626118 - protein, 14 aa, Homo sapiens
  CDR3 for beta chain variable domain of TCR clone 313059 (TRBV20-1, TRBJ2-3)
CSARGGTSTDTQYF

SEQ ID NO: 626119 - protein, 17 aa, Homo sapiens
  CDR3 for alpha chain variable domain of TCR clone 313060 (TRAV12-2, TRAJ6)
RAPQGPPRAGGSYIPTF

SEQ ID NO: 626120 - protein, 16 aa, Homo sapiens
  CDR3 for beta chain variable domain of TCR clone 313060 (TRBV19, TRBJ2-2)
CASSTARASNTGELFF

SEQ ID NO: 626121 - protein, 11 aa, Homo sapiens
  CDR3 for alpha chain variable domain of TCR clone 313061 (TRAV12-3, TRAJ27)
CAMANAGKSTF

SEQ ID NO: 626122 - protein, 15 aa, Homo sapiens
  CDR3 for beta chain variable domain of TCR clone 313061 (TRBV28, TRBJ2-3)
CAPTFRDWSTDTQYF

SEQ ID NO: 626123 - protein, 12 aa, Homo sapiens
  CDR3 for alpha chain variable domain of TCR clone 313062 (TRAV3, TRAJ31)
CAVRDGNARLMF

SEQ ID NO: 626124 - protein, 16 aa, Homo sapiens
  CDR3 for beta chain variable domain of TCR clone 313062 (TRBV7-3, TRBJ2-1)
CASSLEGYRSYNEQVF

SEQ ID NO: 626125 - protein, 13 aa, Homo sapiens
  CDR3 for alpha chain variable domain of TCR clone 313063 (TRAV16, TRAJ37)
CSLGSGNTGKLIF

SEQ ID NO: 626126 - protein, 14 aa, Homo sapiens
  CDR3 for beta chain variable domain of TCR clone 313063 (TRBV27, TRBJ2-5)
CASSSLKGWETQYF

SEQ ID NO: 626127 - protein, 17 aa, Homo sapiens
  CDR3 for alpha chain variable domain of TCR clone 313064 (TRAV13-1, TRAJ52)
CAASSGAGGTSYGQLPF

SEQ ID NO: 626128 - protein, 15 aa, Homo sapiens
  CDR3 for beta chain variable domain of TCR clone 313064 (TRBV2, TRBJ2-1)
CASSELAGSYNEQFF

SEQ ID NO: 626129 - protein, 13 aa, Homo sapiens
  CDR3 for alpha chain variable domain of TCR clone 313065 (TRAV3, TRAJ17)
CAVPRAAGNKLTF

SEQ ID NO: 626130 - protein, 16 aa, Homo sapiens
  CDR3 for beta chain variable domain of TCR clone 313065 (TRBV20-1, TRBJ1-4)
CSAPGQGLLTNEKLFF

SEQ ID NO: 626131 - protein, 16 aa, Homo sapiens
  CDR3 for alpha chain variable domain of TCR clone 313066 (TRAV38-1, TRAJ42)
CAFMKLGGGSQGNLIF

SEQ ID NO: 626132 - protein, 12 aa, Homo sapiens
  CDR3 for beta chain variable domain of TCR clone 313066 (TRBV2, TRBJ2-1)
CAKREGYNEQFF

SEQ ID NO: 626133 - protein, 13 aa, Homo sapiens
  CDR3 for alpha chain variable domain of TCR clone 313067 (TRAV12-1, TRAJ16)
CLVNGPDGQKLLF

SEQ ID NO: 626134 - protein, 13 aa, Homo sapiens
  CDR3 for beta chain variable domain of TCR clone 313067 (TRBV2, TRBJ1-1)
CARNPTGGFHAFF

SEQ ID NO: 626135 - protein, 13 aa, Homo sapiens
  CDR3 for alpha chain variable domain of TCR clone 313068 (TRAV1-2, TRAJ9)
CAALNTGGFKTIF

SEQ ID NO: 626136 - protein, 13 aa, Homo sapiens
  CDR3 for beta chain variable domain of TCR clone 313068 (TRBV19, TRBJ1-2)
CAISVPGQHRYTF

SEQ ID NO: 626137 - protein, 13 aa, Homo sapiens
  CDR3 for alpha chain variable domain of TCR clone 313069 (TRAV13-2, TRAJ48)
CAEMDFGNEKLTF

SEQ ID NO: 626138 - protein, 13 aa, Homo sapiens
  CDR3 for beta chain variable domain of TCR clone 313069 (TRBV13, TRBJ2-5)
CASSPEVVETQYF

SEQ ID NO: 626139 - protein, 13 aa, Homo sapiens
  CDR3 for alpha chain variable domain of TCR clone 313070 (TRAV9-2, TRAJ39)
ALYIYNAGNMLTF

SEQ ID NO: 626140 - protein, 16 aa, Homo sapiens
  CDR3 for beta chain variable domain of TCR clone 313070 (TRBV11-2, TRBJ1-2)
CACSLDTGGADYGYTF

SEQ ID NO: 626141 - protein, 10 aa, Homo sapiens
  CDR3 for alpha chain variable domain of TCR clone 313071 (TRAV12-1, TRAJ43)
CVVHNNDMRF

SEQ ID NO: 626142 - protein, 16 aa, Homo sapiens
  CDR3 for beta chain variable domain of TCR clone 313071 (TRBV7-3, TRBJ2-2)
CASSLKRGTLSGELFF

SEQ ID NO: 626143 - protein, 17 aa, Homo sapiens
  CDR3 for alpha chain variable domain of TCR clone 313072 (TRAV20, TRAJ42)
CAVQAWGCGGSQGNLIF

SEQ ID NO: 626144 - protein, 16 aa, Homo sapiens
  CDR3 for beta chain variable domain of TCR clone 313072 (TRBV29-1, TRBJ2-5)
CSVGGLAGDYQETQYF

SEQ ID NO: 626145 - protein, 12 aa, Homo sapiens
  CDR3 for alpha chain variable domain of TCR clone 313073 (TRAV13-2, TRAJ8)
CAPWLGFQKLVF

SEQ ID NO: 626146 - protein, 15 aa, Homo sapiens
  CDR3 for beta chain variable domain of TCR clone 313073 (TRBV29-1, TRBJ2-1)
CSGRDRKISHNEQFF

SEQ ID NO: 626147 - protein, 16 aa, Homo sapiens
  CDR3 for alpha chain variable domain of TCR clone 313074 (TRAV30, TRAJ24)
CGTEIVDADSWRKFQF

SEQ ID NO: 626148 - protein, 14 aa, Homo sapiens
  CDR3 for beta chain variable domain of TCR clone 313074 (TRBV29-1, TRBJ1-3)
CSVADRVVGNTIYF

SEQ ID NO: 626149 - protein, 13 aa, Homo sapiens
  CDR3 for alpha chain variable domain of TCR clone 313075 (TRAV1-2, TRAJ9)
CAALNTGGFKTIF

SEQ ID NO: 626150 - protein, 17 aa, Homo sapiens
  CDR3 for beta chain variable domain of TCR clone 313075 (TRBV5-1, TRBJ2-7)
FAPAADNPGQIPYEQYF

SEQ ID NO: 626151 - protein, 13 aa, Homo sapiens
  CDR3 for alpha chain variable domain of TCR clone 313076 (TRAV13-2, TRAJ53)
CAENMGSNYKLTF

SEQ ID NO: 626152 - protein, 16 aa, Homo sapiens
  CDR3 for beta chain variable domain of TCR clone 313076 (TRBV4-1, TRBJ2-3)
CASSQSTSGAEDTQYF

SEQ ID NO: 626153 - protein, 16 aa, Homo sapiens
  CDR3 for alpha chain variable domain of TCR clone 313077 (TRAV14/DV4, TRAJ53)
CAMREGGGGSNYKLTF

SEQ ID NO: 626154 - protein, 15 aa, Homo sapiens
  CDR3 for beta chain variable domain of TCR clone 313077 (TRBV5-5, TRBJ1-5)
CASSSTPGSNQPQHF

SEQ ID NO: 626155 - protein, 11 aa, Homo sapiens
  CDR3 for alpha chain variable domain of TCR clone 313078 (TRAV26-1, TRAJ37)
CIVRVGRKLIF

SEQ ID NO: 626156 - protein, 14 aa, Homo sapiens
  CDR3 for beta chain variable domain of TCR clone 313078 (TRBV9, TRBJ2-4)
CASSPSGTSGLQYF

SEQ ID NO: 626157 - protein, 13 aa, Homo sapiens
  CDR3 for alpha chain variable domain of TCR clone 313079 (TRAV20, TRAJ45)
CAVKKRRCRRTHL

SEQ ID NO: 626158 - protein, 14 aa, Homo sapiens
  CDR3 for beta chain variable domain of TCR clone 313079 (TRBV15, TRBJ2-5)
FATSIRGLGETQYF

SEQ ID NO: 626159 - protein, 15 aa, Homo sapiens
  CDR3 for alpha chain variable domain of TCR clone 313080 (TRAV26-1, TRAJ29)
CIVRVEGSGNTPLVL

SEQ ID NO: 626160 - protein, 14 aa, Homo sapiens
  CDR3 for beta chain variable domain of TCR clone 313080 (TRBV5-7, TRBJ2-4)
CASTLSGVKNIQYF

SEQ ID NO: 626161 - protein, 21 aa, Homo sapiens
  CDR3 for alpha chain variable domain of TCR clone 313081 (TRAV1-1, TRAJ6)
CLLLLRCERLERTGGSYIPTF

SEQ ID NO: 626162 - protein, 17 aa, Homo sapiens
  CDR3 for beta chain variable domain of TCR clone 313081 (TRBV20-1, TRBJ2-3)
CSARGTGSPTGTDTQYF

SEQ ID NO: 626163 - protein, 12 aa, Homo sapiens
  CDR3 for alpha chain variable domain of TCR clone 313082 (TRAV21, TRAJ20)
CAVRGKDYKLSF

SEQ ID NO: 626164 - protein, 14 aa, Homo sapiens
  CDR3 for beta chain variable domain of TCR clone 313082 (TRBV7-8, TRBJ2-7)
CASSQTQGADEQYF

SEQ ID NO: 626165 - protein, 13 aa, Homo sapiens
  CDR3 for alpha chain variable domain of TCR clone 313083 (TRAV13-1, TRAJ39)
CAASIWAGNMLTF

SEQ ID NO: 626166 - protein, 15 aa, Homo sapiens
  CDR3 for beta chain variable domain of TCR clone 313083 (TRBV7-9, TRBJ1-1)
CDSSLLEQGGTEAFF

SEQ ID NO: 626167 - protein, 15 aa, Homo sapiens
  CDR3 for alpha chain variable domain of TCR clone 313084 (TRAV2, TRAJ15)
CAVEDRGQAGTALIF

SEQ ID NO: 626168 - protein, 13 aa, Homo sapiens
  CDR3 for beta chain variable domain of TCR clone 313084 (TRBV12-4, TRBJ2-5)
CASSLGGSRTQYV

SEQ ID NO: 626169 - protein, 13 aa, Homo sapiens
  CDR3 for alpha chain variable domain of TCR clone 313085 (TRAV27, TRAJ53)
CAPSGGSNYTLTF

SEQ ID NO: 626170 - protein, 15 aa, Homo sapiens
  CDR3 for beta chain variable domain of TCR clone 313085 (TRBV6-1, TRBJ2-3)
CASSENWNGGGRQYF

SEQ ID NO: 626171 - protein, 14 aa, Homo sapiens
  CDR3 for alpha chain variable domain of TCR clone 313086 (TRAV3, TRAJ40)
CAVRDRRGTYKYIF

SEQ ID NO: 626172 - protein, 14 aa, Homo sapiens
  CDR3 for beta chain variable domain of TCR clone 313086 (TRBV7-2, TRBJ2-2)
CASRGQGAAGELFC

SEQ ID NO: 626173 - protein, 16 aa, Homo sapiens
  CDR3 for alpha chain variable domain of TCR clone 313087 (TRAV21, TRAJ37)
CAVRPRGSSNTGKLIF

SEQ ID NO: 626174 - protein, 13 aa, Homo sapiens
  CDR3 for beta chain variable domain of TCR clone 313087 (TRBV7-9, TRBJ2-5)
CASLSPGQETHYF

SEQ ID NO: 626175 - protein, 12 aa, Homo sapiens
  CDR3 for alpha chain variable domain of TCR clone 313088 (TRAV12-3, TRAJ17)
CAMTLTGDKLTF

SEQ ID NO: 626176 - protein, 15 aa, Homo sapiens
  CDR3 for beta chain variable domain of TCR clone 313088 (TRBV11-1, TRBJ2-7)
CASSLNYGASYEQYF

SEQ ID NO: 626177 - protein, 15 aa, Homo sapiens
  CDR3 for alpha chain variable domain of TCR clone 313089 (TRAV3, TRAJ32)
CAVSSYGGATKKLIF

SEQ ID NO: 626178 - protein, 13 aa, Homo sapiens
  CDR3 for beta chain variable domain of TCR clone 313089 (TRBV20-1, TRBJ2-7)
CSARPSTNYEQYF

SEQ ID NO: 626179 - protein, 16 aa, Homo sapiens
  CDR3 for alpha chain variable domain of TCR clone 313090 (TRAV3, TRAJ3)
CAVRDRAKSSASKIMF

SEQ ID NO: 626180 - protein, 13 aa, Homo sapiens
  CDR3 for beta chain variable domain of TCR clone 313090 (TRBV10-3, TRBJ2-7)
CASKLAVNYEQYF

SEQ ID NO: 626181 - protein, 16 aa, Homo sapiens
  CDR3 for alpha chain variable domain of TCR clone 313091 (TRAV8-3, TRAJ13)
CAVGAYPSGGYQKITF

SEQ ID NO: 626182 - protein, 16 aa, Homo sapiens
  CDR3 for beta chain variable domain of TCR clone 313091 (TRBV2, TRBJ2-3)
CASSTSVEGVTDTQYF

SEQ ID NO: 626183 - protein, 16 aa, Homo sapiens
  CDR3 for alpha chain variable domain of TCR clone 313092 (TRAV17, TRAJ28)
CATASVPGAGSYQLPF

SEQ ID NO: 626184 - protein, 11 aa, Homo sapiens
  CDR3 for beta chain variable domain of TCR clone 313092 (TRBV7-9, TRBJ2-5)
CASSLGETQYF

SEQ ID NO: 626185 - protein, 16 aa, Homo sapiens
  CDR3 for alpha chain variable domain of TCR clone 313093 (TRAV30, TRAJ24)
CGTEIVDADSWGKFQF

SEQ ID NO: 626186 - protein, 15 aa, Homo sapiens
  CDR3 for beta chain variable domain of TCR clone 313093 (TRBV9, TRBJ1-6)
CARSVAGTGDSPLHF

SEQ ID NO: 626187 - protein, 12 aa, Homo sapiens
  CDR3 for alpha chain variable domain of TCR clone 313094 (TRAV12-1, TRAJ31)
CVVSLLRARLMF

SEQ ID NO: 626188 - protein, 15 aa, Homo sapiens
  CDR3 for beta chain variable domain of TCR clone 313094 (TRBV3-1, TRBJ1-2)
CASSHTGRGGYGYTF

SEQ ID NO: 626189 - protein, 13 aa, Homo sapiens
  CDR3 for alpha chain variable domain of TCR clone 313095 (TRAV3, TRAJ20)
CAVRDTGDYKLSF

SEQ ID NO: 626190 - protein, 13 aa, Homo sapiens
  CDR3 for beta chain variable domain of TCR clone 313095 (TRBV4-1, TRBJ2-2)
CASSQENTGELFF

SEQ ID NO: 626191 - protein, 11 aa, Homo sapiens
  CDR3 for alpha chain variable domain of TCR clone 313096 (TRAV16, TRAJ20)
CALSEGFKAAL

SEQ ID NO: 626192 - protein, 13 aa, Homo sapiens
  CDR3 for beta chain variable domain of TCR clone 313096 (TRBV7-3, TRBJ2-1)
CASSLGSYNEQFF

SEQ ID NO: 626193 - protein, 15 aa, Homo sapiens
  CDR3 for alpha chain variable domain of TCR clone 313097 (TRAV21, TRAJ24)
CAARSSTDSWAKLQF

SEQ ID NO: 626194 - protein, 13 aa, Homo sapiens
  CDR3 for beta chain variable domain of TCR clone 313097 (TRBV11-2, TRBJ2-5)
CASSSTGEETQYF

SEQ ID NO: 626195 - protein, 23 aa, Homo sapiens
  CDR3 for alpha chain variable domain of TCR clone 313098 (TRAV26-1, TRAJ38)
CIADNAGNNHIKNPDPAVYQLRD

SEQ ID NO: 626196 - protein, 12 aa, Homo sapiens
  CDR3 for beta chain variable domain of TCR clone 313098 (TRBV11-2, TRBJ2-2)
CASSLGGGELFF

SEQ ID NO: 626197 - protein, 13 aa, Homo sapiens
  CDR3 for alpha chain variable domain of TCR clone 313099 (TRAV12-2, TRAJ50)
CAVLVTSYDKVIF

SEQ ID NO: 626198 - protein, 14 aa, Homo sapiens
  CDR3 for beta chain variable domain of TCR clone 313099 (TRBV9, TRBJ2-1)
CASSVEPRGKEQFF

SEQ ID NO: 626199 - protein, 16 aa, Homo sapiens
  CDR3 for alpha chain variable domain of TCR clone 313100 (TRAV3, TRAJ10)
CAVRDMRAGGGNKLTF

SEQ ID NO: 626200 - protein, 14 aa, Homo sapiens
  CDR3 for beta chain variable domain of TCR clone 313100 (TRBV19, TRBJ1-6)
CASSFGTGYSPLHF

SEQ ID NO: 626201 - protein, 14 aa, Homo sapiens
  CDR3 for alpha chain variable domain of TCR clone 313101 (TRAV20, TRAJ10)
CAVRVEGGGNKLTF

SEQ ID NO: 626202 - protein, 13 aa, Homo sapiens
  CDR3 for beta chain variable domain of TCR clone 313101 (TRBV7-3, TRBJ1-1)
CASSRDWGAEAFF

SEQ ID NO: 626203 - protein, 12 aa, Homo sapiens
  CDR3 for alpha chain variable domain of TCR clone 313102 (TRAV17, TRAJ11)
CATDKGYSTLTF

SEQ ID NO: 626204 - protein, 13 aa, Homo sapiens
  CDR3 for beta chain variable domain of TCR clone 313102 (TRBV28, TRBJ2-7)
CASTPGLAGEQYF

SEQ ID NO: 626205 - protein, 15 aa, Homo sapiens
  CDR3 for alpha chain variable domain of TCR clone 313103 (TRAV38-2/DV8, TRAJ45)
CAYWDSGGGADGLTF

SEQ ID NO: 626206 - protein, 15 aa, Homo sapiens
  CDR3 for beta chain variable domain of TCR clone 313103 (TRBV6-6, TRBJ2-7)
CASSYSYGGSYEQYF

SEQ ID NO: 626207 - protein, 12 aa, Homo sapiens
  CDR3 for alpha chain variable domain of TCR clone 313104 (TRAV12-3, TRAJ43)
CAISSNNNDMRL

SEQ ID NO: 626208 - protein, 15 aa, Homo sapiens
  CDR3 for beta chain variable domain of TCR clone 313104 (TRBV27, TRBJ1-4)
CASSPRHATNEKLFF

SEQ ID NO: 626209 - protein, 13 aa, Homo sapiens
  CDR3 for alpha chain variable domain of TCR clone 313105 (TRAV13-1, TRAJ6)
CAARRGGSYIPTF

SEQ ID NO: 626210 - protein, 16 aa, Homo sapiens
  CDR3 for beta chain variable domain of TCR clone 313105 (TRBV7-9, TRBJ2-2)
CASSLATGVGTGEPFF

SEQ ID NO: 626211 - protein, 16 aa, Homo sapiens
  CDR3 for alpha chain variable domain of TCR clone 313106 (TRAV17, TRAJ17)
CATALQEEAAGNKLNF

SEQ ID NO: 626212 - protein, 12 aa, Homo sapiens
  CDR3 for beta chain variable domain of TCR clone 313106 (TRBV4-2, TRBJ2-5)
CASGGAQETQYF

SEQ ID NO: 626213 - protein, 17 aa, Homo sapiens
  CDR3 for alpha chain variable domain of TCR clone 313107 (TRAV13-2, TRAJ42)
CAEKGKNYGGSQGNLIF

SEQ ID NO: 626214 - protein, 16 aa, Homo sapiens
  CDR3 for beta chain variable domain of TCR clone 313107 (TRBV7-9, TRBJ2-1)
GASSLGTGWDYNEQFF

SEQ ID NO: 626215 - protein, 12 aa, Homo sapiens
  CDR3 for alpha chain variable domain of TCR clone 313108 (TRAV23/DV6, TRAJ31)
CAARRLGARLMF

SEQ ID NO: 626216 - protein, 13 aa, Homo sapiens
  CDR3 for beta chain variable domain of TCR clone 313108 (TRBV28, TRBJ2-7)
CASKAGGVYEQYF

SEQ ID NO: 626217 - protein, 17 aa, Homo sapiens
  CDR3 for alpha chain variable domain of TCR clone 313109 (TRAV3, TRAJ12)
CAVRDGGRMDSSYKLIF

SEQ ID NO: 626218 - protein, 17 aa, Homo sapiens
  CDR3 for beta chain variable domain of TCR clone 313109 (TRBV4-1, TRBJ2-7)
CASSRDPLGVRGGEQYF

SEQ ID NO: 626219 - protein, 13 aa, Homo sapiens
  CDR3 for alpha chain variable domain of TCR clone 313110 (TRAV1-1, TRAJ13)
CAVNSWGYQKVTF

SEQ ID NO: 626220 - protein, 12 aa, Homo sapiens
  CDR3 for beta chain variable domain of TCR clone 313110 (TRBV28, TRBJ2-1)
CASSVQINEQFF

SEQ ID NO: 626221 - protein, 15 aa, Homo sapiens
  CDR3 for alpha chain variable domain of TCR clone 313111 (TRAV26-1, TRAJ40)
CIVRAVPSGTYKCIF

SEQ ID NO: 626222 - protein, 14 aa, Homo sapiens
  CDR3 for beta chain variable domain of TCR clone 313111 (TRBV19, TRBJ2-1)
CASKDPGLANEQFF

SEQ ID NO: 626223 - protein, 12 aa, Homo sapiens
  CDR3 for alpha chain variable domain of TCR clone 313112 (TRAV8-3, TRAJ27)
CAVGAEAGKSTF

SEQ ID NO: 626224 - protein, 14 aa, Homo sapiens
  CDR3 for beta chain variable domain of TCR clone 313112 (TRBV2, TRBJ2-1)
CASRLIVGQDEQFF

SEQ ID NO: 626225 - protein, 13 aa, Homo sapiens
  CDR3 for alpha chain variable domain of TCR clone 313113 (TRAV2, TRAJ40)
CAVVTSGTYKYIF

SEQ ID NO: 626226 - protein, 14 aa, Homo sapiens
  CDR3 for beta chain variable domain of TCR clone 313113 (TRBV11-3, TRBJ2-1)
CASSSTTSGSVQFF

SEQ ID NO: 626227 - protein, 14 aa, Homo sapiens
  CDR3 for alpha chain variable domain of TCR clone 313114 (TRAV9-2, TRAJ39)
CALYIYNAGNSLTF

SEQ ID NO: 626228 - protein, 13 aa, Homo sapiens
  CDR3 for beta chain variable domain of TCR clone 313114 (TRBV11-3, TRBJ1-1)
CASSRQPNTEAFF

SEQ ID NO: 626229 - protein, 13 aa, Homo sapiens
  CDR3 for alpha chain variable domain of TCR clone 313115 (TRAV3, TRAJ43)
CAVRDTRGGDMRF

SEQ ID NO: 626230 - protein, 15 aa, Homo sapiens
  CDR3 for beta chain variable domain of TCR clone 313115 (TRBV6-5, TRBJ1-5)
CASSYSRRSNKPQHF

SEQ ID NO: 626231 - protein, 16 aa, Homo sapiens
  CDR3 for alpha chain variable domain of TCR clone 313116 (TRAV8-1, TRAJ52)
CRDLPAGGTSYGKLTF

SEQ ID NO: 626232 - protein, 14 aa, Homo sapiens
  CDR3 for beta chain variable domain of TCR clone 313116 (TRBV20-1, TRBJ2-5)
CSAHRQGLWETQYF

SEQ ID NO: 626233 - protein, 15 aa, Homo sapiens
  CDR3 for alpha chain variable domain of TCR clone 313117 (TRAV27, TRAJ53)
CRAINRGGSNYKLTF

SEQ ID NO: 626234 - protein, 14 aa, Homo sapiens
  CDR3 for beta chain variable domain of TCR clone 313117 (TRBV11-2, TRBJ1-2)
CASSLGTANYGYTF

SEQ ID NO: 626235 - protein, 14 aa, Homo sapiens
  CDR3 for alpha chain variable domain of TCR clone 313118 (TRAV2, TRAJ9)
CAVEDRSGGFKTIF

SEQ ID NO: 626236 - protein, 15 aa, Homo sapiens
  CDR3 for beta chain variable domain of TCR clone 313118 (TRBV7-3, TRBJ2-2)
CASKANGANTGELFF

SEQ ID NO: 626237 - protein, 23 aa, Homo sapiens
  CDR3 for alpha chain variable domain of TCR clone 313119 (TRAV12-2, TRAJ43)
SLLIRDSQPSDSATYLCSFDMRF

SEQ ID NO: 626238 - protein, 18 aa, Homo sapiens
  CDR3 for beta chain variable domain of TCR clone 313119 (TRBV20-1, TRBJ2-3)
CSASGLAGGPGTTDTQYF

SEQ ID NO: 626239 - protein, 14 aa, Homo sapiens
  CDR3 for alpha chain variable domain of TCR clone 313120 (TRAV35, TRAJ22)
CAGLRPGSARQLTF

SEQ ID NO: 626240 - protein, 12 aa, Homo sapiens
  CDR3 for beta chain variable domain of TCR clone 313120 (TRBV28, TRBJ2-6)
CAIQAGANVLTF

SEQ ID NO: 626241 - protein, 18 aa, Homo sapiens
  CDR3 for alpha chain variable domain of TCR clone 313121 (TRAV26-1, TRAJ23)
CIVRVGLEVWNQGGKLIF

SEQ ID NO: 626242 - protein, 13 aa, Homo sapiens
  CDR3 for beta chain variable domain of TCR clone 313121 (TRBV7-6, TRBJ1-2)
CASSLVADYGYTF

SEQ ID NO: 626243 - protein, 12 aa, Homo sapiens
  CDR3 for alpha chain variable domain of TCR clone 313122 (TRAV8-1, TRAJ31)
CAVINNNARLMF

SEQ ID NO: 626244 - protein, 15 aa, Homo sapiens
  CDR3 for beta chain variable domain of TCR clone 313122 (TRBV20-1, TRBJ2-2)
CSARGGQGNTGELSF

SEQ ID NO: 626245 - protein, 14 aa, Homo sapiens
  CDR3 for alpha chain variable domain of TCR clone 313123 (TRAV8-3, TRAJ20)
CAVGPRGNDYKLSF

SEQ ID NO: 626246 - protein, 11 aa, Homo sapiens
  CDR3 for beta chain variable domain of TCR clone 313123 (TRBV10-3, TRBJ2-2)
CATKGTGELFL

SEQ ID NO: 626247 - protein, 13 aa, Homo sapiens
  CDR3 for alpha chain variable domain of TCR clone 313124 (TRAV38-2/DV8, TRAJ34)
CAYRTWNTDKLIF

SEQ ID NO: 626248 - protein, 18 aa, Homo sapiens
  CDR3 for beta chain variable domain of TCR clone 313124 (TRBV6-6, TRBJ1-3)
CASSYPKWDSISGNTIYF

SEQ ID NO: 626249 - protein, 14 aa, Homo sapiens
  CDR3 for alpha chain variable domain of TCR clone 313125 (TRAV12-2, TRAJ53)
CAVKGGGSNYKLTF

SEQ ID NO: 626250 - protein, 15 aa, Homo sapiens
  CDR3 for beta chain variable domain of TCR clone 313125 (TRBV11-2, TRBJ2-2)
CASSLETGNTGELFF

SEQ ID NO: 626251 - protein, 14 aa, Homo sapiens
  CDR3 for alpha chain variable domain of TCR clone 313126 (TRAV9-2, TRAJ39)
CALYIYNAGNMLTF

SEQ ID NO: 626252 - protein, 16 aa, Homo sapiens
  CDR3 for beta chain variable domain of TCR clone 313126 (TRBV6-1, TRBJ1-3)
CASVQGGLETPYILER

SEQ ID NO: 626253 - protein, 16 aa, Homo sapiens
  CDR3 for alpha chain variable domain of TCR clone 313127 (TRAV30, TRAJ24)
CGTEIVDADSWGKFQF

SEQ ID NO: 626254 - protein, 17 aa, Homo sapiens
  CDR3 for beta chain variable domain of TCR clone 313127 (TRBV20-1, TRBJ2-1)
CSARDPLAGVGDNEQFF

SEQ ID NO: 626255 - protein, 17 aa, Homo sapiens
  CDR3 for alpha chain variable domain of TCR clone 313128 (TRAV26-1, TRAJ37)
CIVRVITVSSNTGKLIF

SEQ ID NO: 626256 - protein, 18 aa, Homo sapiens
  CDR3 for beta chain variable domain of TCR clone 313128 (TRBV4-1, TRBJ2-3)
CASSLPPNRGPFTDTQYF

SEQ ID NO: 626257 - protein, 13 aa, Homo sapiens
  CDR3 for alpha chain variable domain of TCR clone 313129 (TRAV17, TRAJ15)
CATDARAGIALIF

SEQ ID NO: 626258 - protein, 15 aa, Homo sapiens
  CDR3 for beta chain variable domain of TCR clone 313129 (TRBV20-1, TRBJ2-7)
CSARDRVSGMDEQYF

SEQ ID NO: 626259 - protein, 12 aa, Homo sapiens
  CDR3 for alpha chain variable domain of TCR clone 313130 (TRAV8-3, TRAJ26)
CAGDNYGQNFVF

SEQ ID NO: 626260 - protein, 13 aa, Homo sapiens
  CDR3 for beta chain variable domain of TCR clone 313130 (TRBV12-4, TRBJ1-2)
CASSSGSKDGYTF

SEQ ID NO: 626261 - protein, 11 aa, Homo sapiens
  CDR3 for alpha chain variable domain of TCR clone 313131 (TRAV12-1, TRAJ26)
CVVAYGQNFVF

SEQ ID NO: 626262 - protein, 14 aa, Homo sapiens
  CDR3 for beta chain variable domain of TCR clone 313131 (TRBV11-2, TRBJ2-3)
CASSRLARTDTQYF

SEQ ID NO: 626263 - protein, 14 aa, Homo sapiens
  CDR3 for alpha chain variable domain of TCR clone 313132 (TRAV12-1, TRAJ3)
CGAARYSSASKIIF

SEQ ID NO: 626264 - protein, 15 aa, Homo sapiens
  CDR3 for beta chain variable domain of TCR clone 313132 (TRBV7-2, TRBJ2-6)
CASSREGSGANVPTF

SEQ ID NO: 626265 - protein, 13 aa, Homo sapiens
  CDR3 for alpha chain variable domain of TCR clone 313133 (TRAV12-3, TRAJ33)
CAMSVNSNYQLIW

SEQ ID NO: 626266 - protein, 13 aa, Homo sapiens
  CDR3 for beta chain variable domain of TCR clone 313133 (TRBV27, TRBJ2-3)
CASSLSQGDTQYF

SEQ ID NO: 626267 - protein, 16 aa, Homo sapiens
  CDR3 for alpha chain variable domain of TCR clone 313134 (TRAV3, TRAJ37)
CSVRVRGSGNTGKLIF

SEQ ID NO: 626268 - protein, 10 aa, Homo sapiens
  CDR3 for beta chain variable domain of TCR clone 313134 (TRBV11-2, TRBJ2-2)
CQQLTRELFF

SEQ ID NO: 626269 - protein, 17 aa, Homo sapiens
  CDR3 for alpha chain variable domain of TCR clone 313135 (TRAV38-2/DV8, TRAJ28)
CAFLTLYSGAGSYQLTF

SEQ ID NO: 626270 - protein, 22 aa, Homo sapiens
  CDR3 for beta chain variable domain of TCR clone 313135 (TRBV7-2, TRBJ2-5)
RRTRPCISGPAAWQGGGETQYF

SEQ ID NO: 626271 - protein, 11 aa, Homo sapiens
  CDR3 for alpha chain variable domain of TCR clone 313136 (TRAV2, TRAJ33)
CAVESNYQLIW

SEQ ID NO: 626272 - protein, 16 aa, Homo sapiens
  CDR3 for beta chain variable domain of TCR clone 313136 (TRBV11-2, TRBJ2-7)
CASSTVTAPKTYEQYF

SEQ ID NO: 626273 - protein, 13 aa, Homo sapiens
  CDR3 for alpha chain variable domain of TCR clone 313137 (TRAV2, TRAJ15)
CAVASQARTALIF

SEQ ID NO: 626274 - protein, 14 aa, Homo sapiens
  CDR3 for beta chain variable domain of TCR clone 313137 (TRBV5-1, TRBJ2-7)
CASSRGESLYEQYF

SEQ ID NO: 626275 - protein, 15 aa, Homo sapiens
  CDR3 for alpha chain variable domain of TCR clone 313138 (TRAV12-3, TRAJ6)
CAMSATSGGSYIPTF

SEQ ID NO: 626276 - protein, 15 aa, Homo sapiens
  CDR3 for beta chain variable domain of TCR clone 313138 (TRBV5-1, TRBJ1-1)
CASSVDRLGNTEAFF

SEQ ID NO: 626277 - protein, 13 aa, Homo sapiens
  CDR3 for alpha chain variable domain of TCR clone 313139 (TRAV23/DV6, TRAJ27)
CAESKPMQANQPL

SEQ ID NO: 626278 - protein, 14 aa, Homo sapiens
  CDR3 for beta chain variable domain of TCR clone 313139 (TRBV5-4, TRBJ1-1)
CASSLDSRRDEAFF

SEQ ID NO: 626279 - protein, 17 aa, Homo sapiens
  CDR3 for alpha chain variable domain of TCR clone 313140 (TRAV22, TRAJ53)
CAVEFSNSGGSNYKLTF

SEQ ID NO: 626280 - protein, 16 aa, Homo sapiens
  CDR3 for beta chain variable domain of TCR clone 313140 (TRBV19, TRBJ2-1)
CASSEAGPSSYNEQFF

SEQ ID NO: 626281 - protein, 14 aa, Homo sapiens
  CDR3 for alpha chain variable domain of TCR clone 313141 (TRAV1-2, TRAJ8)
CAVREDTGFQKLVF

SEQ ID NO: 626282 - protein, 17 aa, Homo sapiens
  CDR3 for beta chain variable domain of TCR clone 313141 (TRBV11-2, TRBJ2-1)
WASSLYPPGVGYNEQFF

SEQ ID NO: 626283 - protein, 12 aa, Homo sapiens
  CDR3 for alpha chain variable domain of TCR clone 313142 (TRAV13-1, TRAJ49)
CAASPMGNQFYF

SEQ ID NO: 626284 - protein, 17 aa, Homo sapiens
  CDR3 for beta chain variable domain of TCR clone 313142 (TRBV5-1, TRBJ2-5)
CASSLLGLAANQETQYF

SEQ ID NO: 626285 - protein, 15 aa, Homo sapiens
  CDR3 for alpha chain variable domain of TCR clone 313143 (TRAV26-1, TRAJ23)
CIVRVAGYQGGKLIF

SEQ ID NO: 626286 - protein, 18 aa, Homo sapiens
  CDR3 for beta chain variable domain of TCR clone 313143 (TRBV28, TRBJ2-1)
CASSSPSGRANSYNEQFF

SEQ ID NO: 626287 - protein, 13 aa, Homo sapiens
  CDR3 for alpha chain variable domain of TCR clone 313144 (TRAV12-2, TRAJ10)
CAVPTGGGNKLTF

SEQ ID NO: 626288 - protein, 14 aa, Homo sapiens
  CDR3 for beta chain variable domain of TCR clone 313144 (TRBV25-1, TRBJ1-1)
CASAHLGGNTEAFF

SEQ ID NO: 626289 - protein, 13 aa, Homo sapiens
  CDR3 for alpha chain variable domain of TCR clone 313145 (TRAV1-2, TRAJ9)
CAALNTGGFKTIF

SEQ ID NO: 626290 - protein, 15 aa, Homo sapiens
  CDR3 for beta chain variable domain of TCR clone 313145 (TRBV19, TRBJ1-2)
CASSVPDRMATHSVR

SEQ ID NO: 626291 - protein, 13 aa, Homo sapiens
  CDR3 for alpha chain variable domain of TCR clone 313146 (TRAV21, TRAJ27)
CAARPGNAGKSTF

SEQ ID NO: 626292 - protein, 15 aa, Homo sapiens
  CDR3 for beta chain variable domain of TCR clone 313146 (TRBV20-1, TRBJ1-1)
CSARGGGTLKLSLDK

SEQ ID NO: 626293 - protein, 14 aa, Homo sapiens
  CDR3 for alpha chain variable domain of TCR clone 313147 (TRAV12-2, TRAJ17)
CAVLFKAAGNKLTF

SEQ ID NO: 626294 - protein, 13 aa, Homo sapiens
  CDR3 for beta chain variable domain of TCR clone 313147 (TRBV18, TRBJ2-7)
CASSRSGSYEQYF

SEQ ID NO: 626295 - protein, 16 aa, Homo sapiens
  CDR3 for alpha chain variable domain of TCR clone 313148 (TRAV30, TRAJ24)
CGTEIVDADSWGKFQF

SEQ ID NO: 626296 - protein, 14 aa, Homo sapiens
  CDR3 for beta chain variable domain of TCR clone 313148 (TRBV19, TRBJ2-1)
CASPTYVLSGEQFF

SEQ ID NO: 626297 - protein, 13 aa, Homo sapiens
  CDR3 for alpha chain variable domain of TCR clone 313149 (TRAV21, TRAJ27)
CAARPGNAGKSTF

SEQ ID NO: 626298 - protein, 14 aa, Homo sapiens
  CDR3 for beta chain variable domain of TCR clone 313149 (TRBV20-1, TRBJ2-1)
CSAAGRGEYNEQFF

SEQ ID NO: 626299 - protein, 15 aa, Homo sapiens
  CDR3 for alpha chain variable domain of TCR clone 313150 (TRAV21, TRAJ24)
CAARSSTDSWGKLQF

SEQ ID NO: 626300 - protein, 15 aa, Homo sapiens
  CDR3 for beta chain variable domain of TCR clone 313150 (TRBV27, TRBJ2-3)
CATTRTTSATDTQYF

SEQ ID NO: 626301 - protein, 18 aa, Homo sapiens
  CDR3 for alpha chain variable domain of TCR clone 313151 (TRAV21, TRAJ52)
CAVRPSPAGGTSCGKLTF

SEQ ID NO: 626302 - protein, 17 aa, Homo sapiens
  CDR3 for beta chain variable domain of TCR clone 313151 (TRBV13, TRBJ2-3)
CASSLARIAGGRNTQYF

SEQ ID NO: 626303 - protein, 17 aa, Homo sapiens
  CDR3 for alpha chain variable domain of TCR clone 313152 (TRAV27, TRAJ20)
ASTSVRSPTSSDYKLSF

SEQ ID NO: 626304 - protein, 18 aa, Homo sapiens
  CDR3 for beta chain variable domain of TCR clone 313152 (TRBV20-1, TRBJ2-6)
CSARTLAGGPSGANVLTF

SEQ ID NO: 626305 - protein, 15 aa, Homo sapiens
  CDR3 for alpha chain variable domain of TCR clone 313153 (TRAV8-3, TRAJ6)
CAVGPLGGGRYIPTF

SEQ ID NO: 626306 - protein, 14 aa, Homo sapiens
  CDR3 for beta chain variable domain of TCR clone 313153 (TRBV19, TRBJ2-2)
CASSTGQGAGELFF

SEQ ID NO: 626307 - protein, 11 aa, Homo sapiens
  CDR3 for alpha chain variable domain of TCR clone 313154 (TRAV30, TRAJ43)
CGTDGNNDMRF

SEQ ID NO: 626308 - protein, 13 aa, Homo sapiens
  CDR3 for beta chain variable domain of TCR clone 313154 (TRBV7-6, TRBJ1-2)
CASSLVADYGYTF

SEQ ID NO: 626309 - protein, 15 aa, Homo sapiens
  CDR3 for alpha chain variable domain of TCR clone 313155 (TRAV26-1, TRAJ23)
CIVRVAGYQGGKLIF

SEQ ID NO: 626310 - protein, 18 aa, Homo sapiens
  CDR3 for beta chain variable domain of TCR clone 313155 (TRBV28, TRBJ2-1)
CASSSTSGRANYYNEQFF

SEQ ID NO: 626311 - protein, 13 aa, Homo sapiens
  CDR3 for alpha chain variable domain of TCR clone 313156 (TRAV1-1, TRAJ9)
CAAKNTGGFKTIF

SEQ ID NO: 626312 - protein, 14 aa, Homo sapiens
  CDR3 for beta chain variable domain of TCR clone 313156 (TRBV20-1, TRBJ2-1)
CSAQIGGSANKQFL

SEQ ID NO: 626313 - protein, 18 aa, Homo sapiens
  CDR3 for alpha chain variable domain of TCR clone 313157 (TRAV12-3, TRAJ10)
SPVIQHLPLTGGGNKLTF

SEQ ID NO: 626314 - protein, 12 aa, Homo sapiens
  CDR3 for beta chain variable domain of TCR clone 313157 (TRBV7-3, TRBJ2-5)
CASSSPGGTQYF

SEQ ID NO: 626315 - protein, 12 aa, Homo sapiens
  CDR3 for alpha chain variable domain of TCR clone 313158 (TRAV17, TRAJ39)
CATGAAGNMLTF

SEQ ID NO: 626316 - protein, 13 aa, Homo sapiens
  CDR3 for beta chain variable domain of TCR clone 313158 (TRBV19, TRBJ1-2)
CASSVPGQDGYTF

SEQ ID NO: 626317 - protein, 14 aa, Homo sapiens
  CDR3 for alpha chain variable domain of TCR clone 313159 (TRAV36/DV7, TRAJ48)
CAQRRDFGNEKLTF

SEQ ID NO: 626318 - protein, 14 aa, Homo sapiens
  CDR3 for beta chain variable domain of TCR clone 313159 (TRBV28, TRBJ2-4)
CASTQVTGVNVQYF

SEQ ID NO: 626319 - protein, 15 aa, Homo sapiens
  CDR3 for alpha chain variable domain of TCR clone 313160 (TRAV12-1, TRAJ44)
CVADLPTGTASKLTF

SEQ ID NO: 626320 - protein, 13 aa, Homo sapiens
  CDR3 for beta chain variable domain of TCR clone 313160 (TRBV12-4, TRBJ1-2)
CAGSSGLTVISTF

SEQ ID NO: 626321 - protein, 14 aa, Homo sapiens
  CDR3 for alpha chain variable domain of TCR clone 313161 (TRAV13-2, TRAJ43)
CAEIPTYDNNDMRF

SEQ ID NO: 626322 - protein, 15 aa, Homo sapiens
  CDR3 for beta chain variable domain of TCR clone 313161 (TRBV7-9, TRBJ2-2)
CDSGPLDTFPGELFF

SEQ ID NO: 626323 - protein, 18 aa, Homo sapiens
  CDR3 for alpha chain variable domain of TCR clone 313162 (TRAV12-3, TRAJ52)
CAMSVGGAGGTSYGKLTF

SEQ ID NO: 626324 - protein, 16 aa, Homo sapiens
  CDR3 for beta chain variable domain of TCR clone 313162 (TRBV7-9, TRBJ1-2)
CASSISLDRGGYGYTC

SEQ ID NO: 626325 - protein, 14 aa, Homo sapiens
  CDR3 for alpha chain variable domain of TCR clone 313163 (TRAV13-2, TRAJ17)
CAENSKAAGNTLTF

SEQ ID NO: 626326 - protein, 15 aa, Homo sapiens
  CDR3 for beta chain variable domain of TCR clone 313163 (TRBV27, TRBJ2-1)
CASSNGGGSSNEQFF

SEQ ID NO: 626327 - protein, 14 aa, Homo sapiens
  CDR3 for alpha chain variable domain of TCR clone 313164 (TRAV12-1, TRAJ23)
CVVMIYNQGGKLIF

SEQ ID NO: 626328 - protein, 23 aa, Homo sapiens
  CDR3 for beta chain variable domain of TCR clone 313164 (TRBV7-3, TRBJ1-6)
CASSLTSRDEASDSSSYNSPHHF

SEQ ID NO: 626329 - protein, 14 aa, Homo sapiens
  CDR3 for alpha chain variable domain of TCR clone 313165 (TRAV2, TRAJ9)
CAVEDRSGGFKTIF

SEQ ID NO: 626330 - protein, 11 aa, Homo sapiens
  CDR3 for beta chain variable domain of TCR clone 313165 (TRBV7-9, TRBJ2-5)
CASSLGETRYF

SEQ ID NO: 626331 - protein, 13 aa, Homo sapiens
  CDR3 for alpha chain variable domain of TCR clone 313166 (TRAV13-1, TRAJ33)
CAASRAGNYPLIW

SEQ ID NO: 626332 - protein, 12 aa, Homo sapiens
  CDR3 for beta chain variable domain of TCR clone 313166 (TRBV11-2, TRBJ1-2)
CASSREGDGYTF

SEQ ID NO: 626333 - protein, 14 aa, Homo sapiens
  CDR3 for alpha chain variable domain of TCR clone 313167 (TRAV8-2, TRAJ11)
CVVSEKSGYSTLTF

SEQ ID NO: 626334 - protein, 14 aa, Homo sapiens
  CDR3 for beta chain variable domain of TCR clone 313167 (TRBV19, TRBJ2-1)
CASPTFVLSGEQFF

SEQ ID NO: 626335 - protein, 14 aa, Homo sapiens
  CDR3 for alpha chain variable domain of TCR clone 313168 (TRAV3, TRAJ9)
CAVRLNTGGFKTIF

SEQ ID NO: 626336 - protein, 13 aa, Homo sapiens
  CDR3 for beta chain variable domain of TCR clone 313168 (TRBV6-1, TRBJ1-1)
CASSRQGNTEAFF

SEQ ID NO: 626337 - protein, 11 aa, Homo sapiens
  CDR3 for alpha chain variable domain of TCR clone 313169 (TRAV12-3, TRAJ43)
CAMSVSNDMRF

SEQ ID NO: 626338 - protein, 16 aa, Homo sapiens
  CDR3 for beta chain variable domain of TCR clone 313169 (TRBV7-2, TRBJ2-2)
CASSPESSGITGELFF

SEQ ID NO: 626339 - protein, 14 aa, Homo sapiens
  CDR3 for alpha chain variable domain of TCR clone 313170 (TRAV1-2, TRAJ8)
CAVREDTGFQKLVF

SEQ ID NO: 626340 - protein, 16 aa, Homo sapiens
  CDR3 for beta chain variable domain of TCR clone 313170 (TRBV11-2, TRBJ2-5)
CSSSGQGYSPQETQYF

SEQ ID NO: 626341 - protein, 11 aa, Homo sapiens
  CDR3 for alpha chain variable domain of TCR clone 313171 (TRAV12-3, TRAJ20)
CAMSYDYKLSF

SEQ ID NO: 626342 - protein, 14 aa, Homo sapiens
  CDR3 for beta chain variable domain of TCR clone 313171 (TRBV7-2, TRBJ2-7)
CASSPKTGFYEQYF

SEQ ID NO: 626343 - protein, 11 aa, Homo sapiens
  CDR3 for alpha chain variable domain of TCR clone 313172 (TRAV13-1, TRAJ43)
CAAHNNTDMRF

SEQ ID NO: 626344 - protein, 15 aa, Homo sapiens
  CDR3 for beta chain variable domain of TCR clone 313172 (TRBV6-1, TRBJ2-2)
CASSRLRGDTGELFF

SEQ ID NO: 626345 - protein, 15 aa, Homo sapiens
  CDR3 for alpha chain variable domain of TCR clone 313173 (TRAV12-1, TRAJ40)
CVVNGDTSGTYKYIF

SEQ ID NO: 626346 - protein, 13 aa, Homo sapiens
  CDR3 for beta chain variable domain of TCR clone 313173 (TRBV6-1, TRBJ2-1)
CASEGSSYNEQFF

SEQ ID NO: 626347 - protein, 14 aa, Homo sapiens
  CDR3 for alpha chain variable domain of TCR clone 313174 (TRAV2, TRAJ9)
CAVEDRSGGFTTIF

SEQ ID NO: 626348 - protein, 16 aa, Homo sapiens
  CDR3 for beta chain variable domain of TCR clone 313174 (TRBV15, TRBJ2-7)
CATSRDGGIPSYEQYF

SEQ ID NO: 626349 - protein, 14 aa, Homo sapiens
  CDR3 for alpha chain variable domain of TCR clone 313175 (TRAV12-2, TRAJ13)
CAVQKTGGYQKVTF

SEQ ID NO: 626350 - protein, 15 aa, Homo sapiens
  CDR3 for beta chain variable domain of TCR clone 313175 (TRBV15, TRBJ1-1)
CATSLQGGRNTEAFF

SEQ ID NO: 626351 - protein, 17 aa, Homo sapiens
  CDR3 for alpha chain variable domain of TCR clone 313176 (TRAV3, TRAJ6)
CSVRDGPRAGGSYIPTF

SEQ ID NO: 626352 - protein, 13 aa, Homo sapiens
  CDR3 for beta chain variable domain of TCR clone 313176 (TRBV7-3, TRBJ1-1)
CASSQDWGAEAFF

SEQ ID NO: 626353 - protein, 13 aa, Homo sapiens
  CDR3 for alpha chain variable domain of TCR clone 313177 (TRAV1-2, TRAJ27)
CAVFNTNAGKSTF

SEQ ID NO: 626354 - protein, 17 aa, Homo sapiens
  CDR3 for beta chain variable domain of TCR clone 313177 (TRBV11-2, TRBJ2-4)
CAISLGEGEGGKNIQYF

SEQ ID NO: 626355 - protein, 12 aa, Homo sapiens
  CDR3 for alpha chain variable domain of TCR clone 313178 (TRAV26-2, TRAJ21)
CILKGNFNKFYF

SEQ ID NO: 626356 - protein, 15 aa, Homo sapiens
  CDR3 for beta chain variable domain of TCR clone 313178 (TRBV20-1, TRBJ1-1)
CSASRGVTGNTEAFF

SEQ ID NO: 626357 - protein, 15 aa, Homo sapiens
  CDR3 for alpha chain variable domain of TCR clone 313179 (TRAV4, TRAJ8)
CLVGEQHTGFQKLVF

SEQ ID NO: 626358 - protein, 15 aa, Homo sapiens
  CDR3 for beta chain variable domain of TCR clone 313179 (TRBV7-9, TRBJ1-5)
CASSQGHQPNQPQHF

SEQ ID NO: 626359 - protein, 12 aa, Homo sapiens
  CDR3 for alpha chain variable domain of TCR clone 313180 (TRAV12-3, TRAJ17)
CEMTLTGNKLTF

SEQ ID NO: 626360 - protein, 15 aa, Homo sapiens
  CDR3 for beta chain variable domain of TCR clone 313180 (TRBV20-1, TRBJ2-7)
CSARDRVSGMDEQCF

SEQ ID NO: 626361 - protein, 12 aa, Homo sapiens
  CDR3 for alpha chain variable domain of TCR clone 313181 (TRAV26-1, TRAJ23)
CIVTPQGGKLIF

SEQ ID NO: 626362 - protein, 13 aa, Homo sapiens
  CDR3 for beta chain variable domain of TCR clone 313181 (TRBV6-6, TRBJ1-5)
RASSRGSNQPQHF

SEQ ID NO: 626363 - protein, 13 aa, Homo sapiens
  CDR3 for alpha chain variable domain of TCR clone 313182 (TRAV3, TRAJ30)
CAVRDRGDDKIIF

SEQ ID NO: 626364 - protein, 15 aa, Homo sapiens
  CDR3 for beta chain variable domain of TCR clone 313182 (TRBV2, TRBJ2-1)
CASSEEREGDNEQFF

SEQ ID NO: 626365 - protein, 18 aa, Homo sapiens
  CDR3 for alpha chain variable domain of TCR clone 313183 (TRAV21, TRAJ52)
CAVRPSPAGGTSYGKLTF

SEQ ID NO: 626366 - protein, 14 aa, Homo sapiens
  CDR3 for beta chain variable domain of TCR clone 313183 (TRBV11-2, TRBJ1-5)
CASSLDRGRPPQHF

SEQ ID NO: 626367 - protein, 12 aa, Homo sapiens
  CDR3 for alpha chain variable domain of TCR clone 313184 (TRAV8-3, TRAJ26)
CAGDNYSQNFVF

SEQ ID NO: 626368 - protein, 12 aa, Homo sapiens
  CDR3 for beta chain variable domain of TCR clone 313184 (TRBV11-2, TRBJ2-1)
CASSPGNNEQFF

SEQ ID NO: 626369 - protein, 14 aa, Homo sapiens
  CDR3 for alpha chain variable domain of TCR clone 313185 (TRAV26-1, TRAJ21)
CIVRPPYNFNKFYF

SEQ ID NO: 626370 - protein, 13 aa, Homo sapiens
  CDR3 for beta chain variable domain of TCR clone 313185 (TRBV20-1, TRBJ2-5)
CSASLTGRETQYF

SEQ ID NO: 626371 - protein, 15 aa, Homo sapiens
  CDR3 for alpha chain variable domain of TCR clone 313186 (TRAV13-1, TRAJ17)
CAASIHGGCRQQANF

SEQ ID NO: 626372 - protein, 16 aa, Homo sapiens
  CDR3 for beta chain variable domain of TCR clone 313186 (TRBV20-1, TRBJ2-2)
CSARAGLAGVTGELFF

SEQ ID NO: 626373 - protein, 16 aa, Homo sapiens
  CDR3 for alpha chain variable domain of TCR clone 313187 (TRAV23/DV6, TRAJ9)
CAASIGGNTGGFKTIF

SEQ ID NO: 626374 - protein, 17 aa, Homo sapiens
  CDR3 for beta chain variable domain of TCR clone 313187 (TRBV20-1, TRBJ2-1)
CSASSSGLAGSYNEQFF

SEQ ID NO: 626375 - protein, 12 aa, Homo sapiens
  CDR3 for alpha chain variable domain of TCR clone 313188 (TRAV12-3, TRAJ17)
CATTLTGNKLTF

SEQ ID NO: 626376 - protein, 15 aa, Homo sapiens
  CDR3 for beta chain variable domain of TCR clone 313188 (TRBV20-1, TRBJ2-7)
CSARGRVSGMDEQYF

SEQ ID NO: 626377 - protein, 10 aa, Homo sapiens
  CDR3 for alpha chain variable domain of TCR clone 313189 (TRAV23/DV6, TRAJ31)
CARGGARLMF

SEQ ID NO: 626378 - protein, 15 aa, Homo sapiens
  CDR3 for beta chain variable domain of TCR clone 313189 (TRBV7-6, TRBJ1-5)
CASSQSSGINQPQHF

SEQ ID NO: 626379 - protein, 18 aa, Homo sapiens
  CDR3 for alpha chain variable domain of TCR clone 313190 (TRAV21, TRAJ52)
CAVSPSPAGGTSYGKLSF

SEQ ID NO: 626380 - protein, 17 aa, Homo sapiens
  CDR3 for beta chain variable domain of TCR clone 313190 (TRBV13, TRBJ2-3)
CASSLSRVAGGRNTQYF

SEQ ID NO: 626381 - protein, 18 aa, Homo sapiens
  CDR3 for alpha chain variable domain of TCR clone 313191 (TRAV26-2, TRAJ45)
CILRVDKYSGGGADGLTF

SEQ ID NO: 626382 - protein, 15 aa, Homo sapiens
  CDR3 for beta chain variable domain of TCR clone 313191 (TRBV5-1, TRBJ2-1)
CASSPPRAPYNEQFF

SEQ ID NO: 626383 - protein, 16 aa, Homo sapiens
  CDR3 for alpha chain variable domain of TCR clone 313192 (TRAV26-1, TRAJ23)
CIVRPHGNNQGGTLIF

SEQ ID NO: 626384 - protein, 13 aa, Homo sapiens
  CDR3 for beta chain variable domain of TCR clone 313192 (TRBV27, TRBJ2-7)
CASSLTTGYEQYF

SEQ ID NO: 626385 - protein, 16 aa, Homo sapiens
  CDR3 for alpha chain variable domain of TCR clone 313193 (TRAV14/DV4, TRAJ54)
CAMREGRIQGAQKLVF

SEQ ID NO: 626386 - protein, 18 aa, Homo sapiens
  CDR3 for beta chain variable domain of TCR clone 313193 (TRBV18, TRBJ1-3)
CASSQRGGAGPSGNTIYF

SEQ ID NO: 626387 - protein, 23 aa, Homo sapiens
  CDR3 for alpha chain variable domain of TCR clone 313194 (TRAV12-2, TRAJ6)
CAVNVSRKLHTYIWKRNQPYCSF

SEQ ID NO: 626388 - protein, 12 aa, Homo sapiens
  CDR3 for beta chain variable domain of TCR clone 313194 (TRBV29-1, TRBJ2-3)
CSVTGGADTQYF

SEQ ID NO: 626389 - protein, 15 aa, Homo sapiens
  CDR3 for alpha chain variable domain of TCR clone 313195 (TRAV2, TRAJ24)
CAVVRLKNSWGKLQF

SEQ ID NO: 626390 - protein, 16 aa, Homo sapiens
  CDR3 for beta chain variable domain of TCR clone 313195 (TRBV7-7, TRBJ2-3)
CASSRGGGGWGVTQFF

SEQ ID NO: 626391 - protein, 14 aa, Homo sapiens
  CDR3 for alpha chain variable domain of TCR clone 313196 (TRAV29/DV5, TRAJ48)
CAASLDFGNEKLTF

SEQ ID NO: 626392 - protein, 15 aa, Homo sapiens
  CDR3 for beta chain variable domain of TCR clone 313196 (TRBV27, TRBJ2-7)
CASSTAGTGSYEQYF

SEQ ID NO: 626393 - protein, 19 aa, Homo sapiens
  CDR3 for alpha chain variable domain of TCR clone 313197 (TRAV8-3, TRAJ34)
LSTSVLWVWGLRNTDKLIF

SEQ ID NO: 626394 - protein, 11 aa, Homo sapiens
  CDR3 for beta chain variable domain of TCR clone 313197 (TRBV11-2, TRBJ2-2)
CASSLPGELFF

SEQ ID NO: 626395 - protein, 18 aa, Homo sapiens
  CDR3 for alpha chain variable domain of TCR clone 313198 (TRAV12-3, TRAJ52)
CAMSRTNAGGTSYGKRTF

SEQ ID NO: 626396 - protein, 17 aa, Homo sapiens
  CDR3 for beta chain variable domain of TCR clone 313198 (TRBV13, TRBJ2-3)
CASSLSRVAGGRNTQYF

SEQ ID NO: 626397 - protein, 15 aa, Homo sapiens
  CDR3 for alpha chain variable domain of TCR clone 313199 (TRAV26-1, TRAJ29)
CIFRVEGSGNTPLVF

SEQ ID NO: 626398 - protein, 14 aa, Homo sapiens
  CDR3 for beta chain variable domain of TCR clone 313199 (TRBV18, TRBJ2-5)
CASSPGASQETQYF

SEQ ID NO: 626399 - protein, 14 aa, Homo sapiens
  CDR3 for alpha chain variable domain of TCR clone 313200 (TRAV23/DV6, TRAJ45)
CAASWGGGADGLTF

SEQ ID NO: 626400 - protein, 16 aa, Homo sapiens
  CDR3 for beta chain variable domain of TCR clone 313200 (TRBV11-3, TRBJ2-5)
CASSSVVAGSTETQYF

SEQ ID NO: 626401 - protein, 15 aa, Homo sapiens
  CDR3 for alpha chain variable domain of TCR clone 313201 (TRAV12-3, TRAJ13)
CAMSTRSGGYQKVTF

SEQ ID NO: 626402 - protein, 21 aa, Homo sapiens
  CDR3 for beta chain variable domain of TCR clone 313201 (TRBV3-1, TRBJ2-7)
CISVPAAKKGGGRSWHYEQYF

SEQ ID NO: 626403 - protein, 14 aa, Homo sapiens
  CDR3 for alpha chain variable domain of TCR clone 313202 (TRAV26-1, TRAJ38)
CIADNAGNNRKLVW

SEQ ID NO: 626404 - protein, 13 aa, Homo sapiens
  CDR3 for beta chain variable domain of TCR clone 313202 (TRBV19, TRBJ1-2)
CASSVPGQDGYTF

SEQ ID NO: 626405 - protein, 13 aa, Homo sapiens
  CDR3 for alpha chain variable domain of TCR clone 313203 (TRAV27, TRAJ8)
CAGGPTGFQKLVF

SEQ ID NO: 626406 - protein, 12 aa, Homo sapiens
  CDR3 for beta chain variable domain of TCR clone 313203 (TRBV11-2, TRBJ2-2)
CASSLGGGELFL

SEQ ID NO: 626407 - protein, 13 aa, Homo sapiens
  CDR3 for alpha chain variable domain of TCR clone 313204 (TRAV38-1, TRAJ7)
FAFMMDGNNRLAF

SEQ ID NO: 626408 - protein, 14 aa, Homo sapiens
  CDR3 for beta chain variable domain of TCR clone 313204 (TRBV5-1, TRBJ2-7)
CASSRGESLYEQYF

SEQ ID NO: 626409 - protein, 10 aa, Homo sapiens
  CDR3 for alpha chain variable domain of TCR clone 313205 (TRAV17, TRAJ52)
SATSYGKLTF

SEQ ID NO: 626410 - protein, 15 aa, Homo sapiens
  CDR3 for beta chain variable domain of TCR clone 313205 (TRBV11-2, TRBJ2-1)
CASSLGTSGLNEQFF

SEQ ID NO: 626411 - protein, 10 aa, Homo sapiens
  CDR3 for alpha chain variable domain of TCR clone 313206 (TRAV12-2, TRAJ10)
CAAWTGVETP

SEQ ID NO: 626412 - protein, 14 aa, Homo sapiens
  CDR3 for beta chain variable domain of TCR clone 313206 (TRBV5-5, TRBJ1-2)
CASSLDPYNYGYTF

SEQ ID NO: 626413 - protein, 13 aa, Homo sapiens
  CDR3 for alpha chain variable domain of TCR clone 313207 (TRAV3, TRAJ16)
CAVRDRNGQKLLF

SEQ ID NO: 626414 - protein, 15 aa, Homo sapiens
  CDR3 for beta chain variable domain of TCR clone 313207 (TRBV5-1, TRBJ2-1)
CTSSPPRAPYNEQLF

SEQ ID NO: 626415 - protein, 13 aa, Homo sapiens
  CDR3 for alpha chain variable domain of TCR clone 313208 (TRAV3, TRAJ30)
CAVRDRGDDKNIF

SEQ ID NO: 626416 - protein, 16 aa, Homo sapiens
  CDR3 for beta chain variable domain of TCR clone 313208 (TRBV7-3, TRBJ2-2)
CASSLKRGTLSGELFF

SEQ ID NO: 626417 - protein, 14 aa, Homo sapiens
  CDR3 for alpha chain variable domain of TCR clone 313209 (TRAV8-4, TRAJ17)
CAVSSPAAGNKLTF

SEQ ID NO: 626418 - protein, 15 aa, Homo sapiens
  CDR3 for beta chain variable domain of TCR clone 313209 (TRBV9, TRBJ1-6)
CASSVAGTGDSPLHF

SEQ ID NO: 626419 - protein, 16 aa, Homo sapiens
  CDR3 for alpha chain variable domain of TCR clone 313210 (TRAV16, TRAJ4)
CALSRMFSGGYNKLIF

SEQ ID NO: 626420 - protein, 20 aa, Homo sapiens
  CDR3 for beta chain variable domain of TCR clone 313210 (TRBV7-8, TRBJ2-2)
CASSHLFPGPTIHITGELFF

SEQ ID NO: 626421 - protein, 14 aa, Homo sapiens
  CDR3 for alpha chain variable domain of TCR clone 313211 (TRAV1-1, TRAJ27)
CAVIYNTNAGKSTF

SEQ ID NO: 626422 - protein, 14 aa, Homo sapiens
  CDR3 for beta chain variable domain of TCR clone 313211 (TRBV6-5, TRBJ1-2)
CTSSYDGTGGGYTF

SEQ ID NO: 626423 - protein, 18 aa, Homo sapiens
  CDR3 for alpha chain variable domain of TCR clone 313212 (TRAV12-3, TRAJ52)
CAMSVGGAGGTSYGKLTF

SEQ ID NO: 626424 - protein, 15 aa, Homo sapiens
  CDR3 for beta chain variable domain of TCR clone 313212 (TRBV18, TRBJ1-2)
CASSPPQGLLGGYTF

SEQ ID NO: 626425 - protein, 16 aa, Homo sapiens
  CDR3 for alpha chain variable domain of TCR clone 313213 (TRAV29/DV5, TRAJ36)
CAASAGVETGANNLFF

SEQ ID NO: 626426 - protein, 15 aa, Homo sapiens
  CDR3 for beta chain variable domain of TCR clone 313213 (TRBV7-9, TRBJ2-5)
CASSLVAGGLETQYF

SEQ ID NO: 626427 - protein, 12 aa, Homo sapiens
  CDR3 for alpha chain variable domain of TCR clone 313214 (TRAV12-3, TRAJ17)
CAMTLTVNKLTF

SEQ ID NO: 626428 - protein, 17 aa, Homo sapiens
  CDR3 for beta chain variable domain of TCR clone 313214 (TRBV11-2, TRBJ2-1)
CASSLYPPGVEYNEQFF

SEQ ID NO: 626429 - protein, 17 aa, Homo sapiens
  CDR3 for alpha chain variable domain of TCR clone 313215 (TRAV3, TRAJ6)
CAVRDGPSAGGSYIPTF

SEQ ID NO: 626430 - protein, 14 aa, Homo sapiens
  CDR3 for beta chain variable domain of TCR clone 313215 (TRBV20-1, TRBJ2-7)
CSAKRGRSSYEKYF

SEQ ID NO: 626431 - protein, 13 aa, Homo sapiens
  CDR3 for alpha chain variable domain of TCR clone 313216 (TRAV16, TRAJ9)
CALSNTGGFKTIF

SEQ ID NO: 626432 - protein, 12 aa, Homo sapiens
  CDR3 for beta chain variable domain of TCR clone 313216 (TRBV7-9, TRBJ2-7)
CASSFGSYEQYF

SEQ ID NO: 626433 - protein, 14 aa, Homo sapiens
  CDR3 for alpha chain variable domain of TCR clone 313217 (TRAV13-1, TRAJ44)
CAAKATGTASKLTF

SEQ ID NO: 626434 - protein, 15 aa, Homo sapiens
  CDR3 for beta chain variable domain of TCR clone 313217 (TRBV4-1, TRBJ2-5)
CASSQWDLYQETQYF

SEQ ID NO: 626435 - protein, 12 aa, Homo sapiens
  CDR3 for alpha chain variable domain of TCR clone 313218 (TRAV30, TRAJ20)
CGTESNDYKLSF

SEQ ID NO: 626436 - protein, 15 aa, Homo sapiens
  CDR3 for beta chain variable domain of TCR clone 313218 (TRBV9, TRBJ2-7)
CANSAVPIPGYEQYF

SEQ ID NO: 626437 - protein, 11 aa, Homo sapiens
  CDR3 for alpha chain variable domain of TCR clone 313219 (TRAV16, TRAJ34)
CALYNTDKLIF

SEQ ID NO: 626438 - protein, 14 aa, Homo sapiens
  CDR3 for beta chain variable domain of TCR clone 313219 (TRBV7-3, TRBJ2-2)
CASSSGGYTGQLFF

SEQ ID NO: 626439 - protein, 17 aa, Homo sapiens
  CDR3 for alpha chain variable domain of TCR clone 313220 (TRAV4, TRAJ13)
CLVGVQGSSGGYQKVTF

SEQ ID NO: 626440 - protein, 14 aa, Homo sapiens
  CDR3 for beta chain variable domain of TCR clone 313220 (TRBV18, TRBJ2-5)
CASSPGVSQETQYF

SEQ ID NO: 626441 - protein, 16 aa, Homo sapiens
  CDR3 for alpha chain variable domain of TCR clone 313221 (TRAV30, TRAJ24)
CGTEIVDADSWGKFQF

SEQ ID NO: 626442 - protein, 14 aa, Homo sapiens
  CDR3 for beta chain variable domain of TCR clone 313221 (TRBV12-5, TRBJ2-5)
CAGGSRTHQETQYL

SEQ ID NO: 626443 - protein, 12 aa, Homo sapiens
  CDR3 for alpha chain variable domain of TCR clone 313222 (TRAV36/DV7, TRAJ40)
CAVGKGTYKYIF

SEQ ID NO: 626444 - protein, 14 aa, Homo sapiens
  CDR3 for beta chain variable domain of TCR clone 313222 (TRBV19, TRBJ2-3)
CASSIDLGGDTQYF

SEQ ID NO: 626445 - protein, 14 aa, Homo sapiens
  CDR3 for alpha chain variable domain of TCR clone 313223 (TRAV8-3, TRAJ4)
CAVGASGGYNKLIF

SEQ ID NO: 626446 - protein, 17 aa, Homo sapiens
  CDR3 for beta chain variable domain of TCR clone 313223 (TRBV11-2, TRBJ2-1)
CASSLYPPGAEYNEQFF

SEQ ID NO: 626447 - protein, 14 aa, Homo sapiens
  CDR3 for alpha chain variable domain of TCR clone 313224 (TRAV20, TRAJ10)
CAVRVEGGGNKLTF

SEQ ID NO: 626448 - protein, 14 aa, Homo sapiens
  CDR3 for beta chain variable domain of TCR clone 313224 (TRBV2, TRBJ2-1)
CASSEARIYNEQFF

SEQ ID NO: 626449 - protein, 14 aa, Homo sapiens
  CDR3 for alpha chain variable domain of TCR clone 313225 (TRAV12-1, TRAJ9)
CVVNRGTGGFKTIF

SEQ ID NO: 626450 - protein, 15 aa, Homo sapiens
  CDR3 for beta chain variable domain of TCR clone 313225 (TRBV7-2, TRBJ2-1)
CASTHGTGIYNEQFF

SEQ ID NO: 626451 - protein, 15 aa, Homo sapiens
  CDR3 for alpha chain variable domain of TCR clone 313226 (TRAV29/DV5, TRAJ24)
WAASGATDSWGKFQF

SEQ ID NO: 626452 - protein, 12 aa, Homo sapiens
  CDR3 for beta chain variable domain of TCR clone 313226 (TRBV11-2, TRBJ2-2)
CASSLPTGELFF

SEQ ID NO: 626453 - protein, 14 aa, Homo sapiens
  CDR3 for alpha chain variable domain of TCR clone 313227 (TRAV2, TRAJ9)
CAVDDRSGGFKTIF

SEQ ID NO: 626454 - protein, 15 aa, Homo sapiens
  CDR3 for beta chain variable domain of TCR clone 313227 (TRBV12-4, TRBJ2-5)
CASSLSGAFQETQYF

SEQ ID NO: 626455 - protein, 16 aa, Homo sapiens
  CDR3 for alpha chain variable domain of TCR clone 313228 (TRAV12-2, TRAJ18)
CAVTTDRGSPLGRLYF

SEQ ID NO: 626456 - protein, 14 aa, Homo sapiens
  CDR3 for beta chain variable domain of TCR clone 313228 (TRBV4-2, TRBJ1-5)
CASSQDSINQPQHF

SEQ ID NO: 626457 - protein, 13 aa, Homo sapiens
  CDR3 for alpha chain variable domain of TCR clone 313229 (TRAV3, TRAJ21)
CAVANSTNFTLDL

SEQ ID NO: 626458 - protein, 16 aa, Homo sapiens
  CDR3 for beta chain variable domain of TCR clone 313229 (TRBV19, TRBJ2-1)
CASSKAGPSSYNEQFF

SEQ ID NO: 626459 - protein, 13 aa, Homo sapiens
  CDR3 for alpha chain variable domain of TCR clone 313230 (TRAV12-3, TRAJ13)
CAMSSGGYQKGTF

SEQ ID NO: 626460 - protein, 16 aa, Homo sapiens
  CDR3 for beta chain variable domain of TCR clone 313230 (TRBV4-1, TRBJ2-7)
CASSRGDILNSYEQYF

SEQ ID NO: 626461 - protein, 16 aa, Homo sapiens
  CDR3 for alpha chain variable domain of TCR clone 313231 (TRAV30, TRAJ24)
CGTEIVDADSWGKFQL

SEQ ID NO: 626462 - protein, 13 aa, Homo sapiens
  CDR3 for beta chain variable domain of TCR clone 313231 (TRBV12-5, TRBJ2-3)
CASGDRQSDTQYF

SEQ ID NO: 626463 - protein, 13 aa, Homo sapiens
  CDR3 for alpha chain variable domain of TCR clone 313232 (TRAV21, TRAJ58)
CAVKGASGSRLTF

SEQ ID NO: 626464 - protein, 15 aa, Homo sapiens
  CDR3 for beta chain variable domain of TCR clone 313232 (TRBV25-1, TRBJ2-4)
CASSETESAKNIQYF

SEQ ID NO: 626465 - protein, 12 aa, Homo sapiens
  CDR3 for alpha chain variable domain of TCR clone 313233 (TRAV26-1, TRAJ48)
CIAALGNEKLTF

SEQ ID NO: 626466 - protein, 17 aa, Homo sapiens
  CDR3 for beta chain variable domain of TCR clone 313233 (TRBV7-6, TRBJ2-1)
CASSFGLAGGTYNEQFF

SEQ ID NO: 626467 - protein, 15 aa, Homo sapiens
  CDR3 for alpha chain variable domain of TCR clone 313234 (TRAV3, TRAJ5)
GAVRDRKTGRRALTF

SEQ ID NO: 626468 - protein, 15 aa, Homo sapiens
  CDR3 for beta chain variable domain of TCR clone 313234 (TRBV7-8, TRBJ2-1)
RASSLADSLYNEQFF

SEQ ID NO: 626469 - protein, 14 aa, Homo sapiens
  CDR3 for alpha chain variable domain of TCR clone 313235 (TRAV12-1, TRAJ13)
CVVIDSGGYQKVTF

SEQ ID NO: 626470 - protein, 12 aa, Homo sapiens
  CDR3 for beta chain variable domain of TCR clone 313235 (TRBV29-1, TRBJ2-3)
CSVTGGADTQYL

SEQ ID NO: 626471 - protein, 14 aa, Homo sapiens
  CDR3 for alpha chain variable domain of TCR clone 313236 (TRAV17, TRAJ16)
CATADFSDGQNLLF

SEQ ID NO: 626472 - protein, 12 aa, Homo sapiens
  CDR3 for beta chain variable domain of TCR clone 313236 (TRBV24-1, TRBJ1-1)
CATLYPDTEASF

SEQ ID NO: 626473 - protein, 14 aa, Homo sapiens
  CDR3 for alpha chain variable domain of TCR clone 313237 (TRAV13-1, TRAJ35)
CAASKGGFGNVLHC

SEQ ID NO: 626474 - protein, 17 aa, Homo sapiens
  CDR3 for beta chain variable domain of TCR clone 313237 (TRBV4-1, TRBJ2-5)
CASSQDQTGGPQETQYF

SEQ ID NO: 626475 - protein, 15 aa, Homo sapiens
  CDR3 for alpha chain variable domain of TCR clone 313238 (TRAV21, TRAJ37)
CAVRPTLSNTGKLIF

SEQ ID NO: 626476 - protein, 15 aa, Homo sapiens
  CDR3 for beta chain variable domain of TCR clone 313238 (TRBV18, TRBJ2-7)
CASSPSSTGNYEQYF

SEQ ID NO: 626477 - protein, 14 aa, Homo sapiens
  CDR3 for alpha chain variable domain of TCR clone 313239 (TRAV17, TRAJ57)
CATDPQGGSETLVF

SEQ ID NO: 626478 - protein, 14 aa, Homo sapiens
  CDR3 for beta chain variable domain of TCR clone 313239 (TRBV5-8, TRBJ2-3)
CASSLGQGTDTQYF

SEQ ID NO: 626479 - protein, 13 aa, Homo sapiens
  CDR3 for alpha chain variable domain of TCR clone 313240 (TRAV1-2, TRAJ9)
CAALNTGGFKTIF

SEQ ID NO: 626480 - protein, 16 aa, Homo sapiens
  CDR3 for beta chain variable domain of TCR clone 313240 (TRBV7-2, TRBJ2-5)
CASSPFPTGGEETQYF

SEQ ID NO: 626481 - protein, 15 aa, Homo sapiens
  CDR3 for alpha chain variable domain of TCR clone 313241 (TRAV13-1, TRAJ32)
CAASIYGGAANKPIF

SEQ ID NO: 626482 - protein, 17 aa, Homo sapiens
  CDR3 for beta chain variable domain of TCR clone 313241 (TRBV7-3, TRBJ2-5)
CASSLGSGRSGSETQYF

SEQ ID NO: 626483 - protein, 18 aa, Homo sapiens
  CDR3 for alpha chain variable domain of TCR clone 313242 (TRAV21, TRAJ52)
CAVRPSPAGGTSYGELTL

SEQ ID NO: 626484 - protein, 17 aa, Homo sapiens
  CDR3 for beta chain variable domain of TCR clone 313242 (TRBV13, TRBJ2-3)
CASSLSRVAGGRNTQYF

SEQ ID NO: 626485 - protein, 14 aa, Homo sapiens
  CDR3 for alpha chain variable domain of TCR clone 313243 (TRAV1-2, TRAJ8)
CAVREDTGFQKLVF

SEQ ID NO: 626486 - protein, 15 aa, Homo sapiens
  CDR3 for beta chain variable domain of TCR clone 313243 (TRBV10-1, TRBJ2-1)
CASSTGTELYNEQIF

SEQ ID NO: 626487 - protein, 13 aa, Homo sapiens
  CDR3 for alpha chain variable domain of TCR clone 313244 (TRAV8-4, TRAJ11)
CAVSSSGYSTLTF

SEQ ID NO: 626488 - protein, 13 aa, Homo sapiens
  CDR3 for beta chain variable domain of TCR clone 313244 (TRBV10-3, TRBJ2-7)
CASKLAVNYEQYF

SEQ ID NO: 626489 - protein, 14 aa, Homo sapiens
  CDR3 for alpha chain variable domain of TCR clone 313245 (TRAV2, TRAJ9)
CALEDRSGGFKTIF

SEQ ID NO: 626490 - protein, 14 aa, Homo sapiens
  CDR3 for beta chain variable domain of TCR clone 313245 (TRBV18, TRBJ2-7)
CASSPRGGAYEQYF

SEQ ID NO: 626491 - protein, 14 aa, Homo sapiens
  CDR3 for alpha chain variable domain of TCR clone 313246 (TRAV13-2, TRAJ10)
RAETFTGGGNKLTF

SEQ ID NO: 626492 - protein, 16 aa, Homo sapiens
  CDR3 for beta chain variable domain of TCR clone 313246 (TRBV18, TRBJ2-7)
CASSPRSQGISYEQYF

SEQ ID NO: 626493 - protein, 14 aa, Homo sapiens
  CDR3 for alpha chain variable domain of TCR clone 313247 (TRAV8-2, TRAJ5)
CVVDMDTGRIALTF

SEQ ID NO: 626494 - protein, 15 aa, Homo sapiens
  CDR3 for beta chain variable domain of TCR clone 313247 (TRBV5-7, TRBJ2-1)
CASSYISGRGNEQFF

SEQ ID NO: 626495 - protein, 15 aa, Homo sapiens
  CDR3 for alpha chain variable domain of TCR clone 313248 (TRAV12-1, TRAJ41)
CVVNSRTGAGYALNF

SEQ ID NO: 626496 - protein, 11 aa, Homo sapiens
  CDR3 for beta chain variable domain of TCR clone 313248 (TRBV6-4, TRBJ2-1)
CASSDSYAQFF

SEQ ID NO: 626497 - protein, 12 aa, Homo sapiens
  CDR3 for alpha chain variable domain of TCR clone 313249 (TRAV2, TRAJ5)
CALDTDRRALTF

SEQ ID NO: 626498 - protein, 15 aa, Homo sapiens
  CDR3 for beta chain variable domain of TCR clone 313249 (TRBV10-3, TRBJ2-1)
CAISDVQDRAYEQFF

SEQ ID NO: 626499 - protein, 18 aa, Homo sapiens
  CDR3 for alpha chain variable domain of TCR clone 313250 (TRAV26-1, TRAJ23)
CIVRVGPVVWNQGGKLIF

SEQ ID NO: 626500 - protein, 12 aa, Homo sapiens
  CDR3 for beta chain variable domain of TCR clone 313250 (TRBV7-2, TRBJ1-6)
CASSLSSSPLHF

SEQ ID NO: 626501 - protein, 15 aa, Homo sapiens
  CDR3 for alpha chain variable domain of TCR clone 313251 (TRAV38-1, TRAJ57)
CAFMDSQGGSEKLVF

SEQ ID NO: 626502 - protein, 16 aa, Homo sapiens
  CDR3 for beta chain variable domain of TCR clone 313251 (TRBV11-2, TRBJ2-7)
CASSPTTGGVSYEQYF

SEQ ID NO: 626503 - protein, 14 aa, Homo sapiens
  CDR3 for alpha chain variable domain of TCR clone 313252 (TRAV38-1, TRAJ49)
CAFMPRNTGNQFYF

SEQ ID NO: 626504 - protein, 15 aa, Homo sapiens
  CDR3 for beta chain variable domain of TCR clone 313252 (TRBV7-9, TRBJ1-5)
CASSQGHQPNQPQHF

SEQ ID NO: 626505 - protein, 14 aa, Homo sapiens
  CDR3 for alpha chain variable domain of TCR clone 313253 (TRAV16, TRAJ33)
CALSAMDSNYQLIW

SEQ ID NO: 626506 - protein, 12 aa, Homo sapiens
  CDR3 for beta chain variable domain of TCR clone 313253 (TRBV28, TRBJ2-6)
CAIQAGANILTF

SEQ ID NO: 626507 - protein, 18 aa, Homo sapiens
  CDR3 for alpha chain variable domain of TCR clone 313254 (TRAV21, TRAJ52)
CAVRPSPAGGTSYGKLTF

SEQ ID NO: 626508 - protein, 14 aa, Homo sapiens
  CDR3 for beta chain variable domain of TCR clone 313254 (TRBV11-3, TRBJ2-3)
CASSSGQGPDTQYF

SEQ ID NO: 626509 - protein, 18 aa, Homo sapiens
  CDR3 for alpha chain variable domain of TCR clone 313255 (TRAV21, TRAJ52)
CAARPSPAGGTSYGKLTF

SEQ ID NO: 626510 - protein, 13 aa, Homo sapiens
  CDR3 for beta chain variable domain of TCR clone 313255 (TRBV7-3, TRBJ1-1)
CASSQEWGAEAFF

SEQ ID NO: 626511 - protein, 15 aa, Homo sapiens
  CDR3 for alpha chain variable domain of TCR clone 313256 (TRAV1-2, TRAJ26)
CAVRDLITMVRILSL

SEQ ID NO: 626512 - protein, 13 aa, Homo sapiens
  CDR3 for beta chain variable domain of TCR clone 313256 (TRBV19, TRBJ1-2)
CASSQGQVYGDTF

SEQ ID NO: 626513 - protein, 22 aa, Homo sapiens
  CDR3 for alpha chain variable domain of TCR clone 313257 (TRAV27, TRAJ38)
CAARRNAGNNHIQNPDPAVYQL

SEQ ID NO: 626514 - protein, 13 aa, Homo sapiens
  CDR3 for beta chain variable domain of TCR clone 313257 (TRBV28, TRBJ2-5)
CASRDRGRKTQYF

SEQ ID NO: 626515 - protein, 12 aa, Homo sapiens
  CDR3 for alpha chain variable domain of TCR clone 313258 (TRAV1-2, TRAJ24)
CAVGGSWGKFQF

SEQ ID NO: 626516 - protein, 12 aa, Homo sapiens
  CDR3 for beta chain variable domain of TCR clone 313258 (TRBV11-2, TRBJ2-5)
CASSLVGETQYF

SEQ ID NO: 626517 - protein, 11 aa, Homo sapiens
  CDR3 for alpha chain variable domain of TCR clone 313259 (TRAV12-1, TRAJ43)
CVEYDNNDMRF

SEQ ID NO: 626518 - protein, 15 aa, Homo sapiens
  CDR3 for beta chain variable domain of TCR clone 313259 (TRBV18, TRBJ2-5)
CARSPRASEAETQYF

SEQ ID NO: 626519 - protein, 12 aa, Homo sapiens
  CDR3 for alpha chain variable domain of TCR clone 313260 (TRAV12-3, TRAJ17)
CAMTLTGNKLTF

SEQ ID NO: 626520 - protein, 15 aa, Homo sapiens
  CDR3 for beta chain variable domain of TCR clone 313260 (TRBV12-4, TRBJ1-6)
CASSLGGQGTSPLHF

SEQ ID NO: 626521 - protein, 12 aa, Homo sapiens
  CDR3 for alpha chain variable domain of TCR clone 313261 (TRAV21, TRAJ33)
CAKMDSNYQLIW

SEQ ID NO: 626522 - protein, 16 aa, Homo sapiens
  CDR3 for beta chain variable domain of TCR clone 313261 (TRBV7-9, TRBJ1-2)
CASSLGFSSGEDGYTF

SEQ ID NO: 626523 - protein, 14 aa, Homo sapiens
  CDR3 for alpha chain variable domain of TCR clone 313262 (TRAV1-1, TRAJ27)
CAVIYNTNADKSTF

SEQ ID NO: 626524 - protein, 15 aa, Homo sapiens
  CDR3 for beta chain variable domain of TCR clone 313262 (TRBV28, TRBJ2-1)
CASSIIAGGRSEQFF

SEQ ID NO: 626525 - protein, 14 aa, Homo sapiens
  CDR3 for alpha chain variable domain of TCR clone 313263 (TRAV12-2, TRAJ13)
CVVKKTGGYQKVTF

SEQ ID NO: 626526 - protein, 16 aa, Homo sapiens
  CDR3 for beta chain variable domain of TCR clone 313263 (TRBV7-9, TRBJ2-3)
CAGSPWREVGTDTQYF

SEQ ID NO: 626527 - protein, 13 aa, Homo sapiens
  CDR3 for alpha chain variable domain of TCR clone 313264 (TRAV8-1, TRAJ23)
CAWRDNQGGKLIF

SEQ ID NO: 626528 - protein, 16 aa, Homo sapiens
  CDR3 for beta chain variable domain of TCR clone 313264 (TRBV11-2, TRBJ2-7)
CASSPTTGGVSYEQYF

SEQ ID NO: 626529 - protein, 10 aa, Homo sapiens
  CDR3 for alpha chain variable domain of TCR clone 313265 (TRAV12-3, TRAJ49)
CAMNDDQFYF

SEQ ID NO: 626530 - protein, 14 aa, Homo sapiens
  CDR3 for beta chain variable domain of TCR clone 313265 (TRBV20-1, TRBJ2-4)
CSASGRVGENIQYF

SEQ ID NO: 626531 - protein, 14 aa, Homo sapiens
  CDR3 for alpha chain variable domain of TCR clone 313266 (TRAV12-3, TRAJ42)
CAMNYGGSQGNLIL

SEQ ID NO: 626532 - protein, 12 aa, Homo sapiens
  CDR3 for beta chain variable domain of TCR clone 313266 (TRBV11-2, TRBJ2-2)
CASSLGGGELFF

SEQ ID NO: 626533 - protein, 16 aa, Homo sapiens
  CDR3 for alpha chain variable domain of TCR clone 313267 (TRAV30, TRAJ24)
CGTEIVDVDSWGKFQF

SEQ ID NO: 626534 - protein, 18 aa, Homo sapiens
  CDR3 for beta chain variable domain of TCR clone 313267 (TRBV7-9, TRBJ2-7)
CASSLTTSGSRTWYEQYF

SEQ ID NO: 626535 - protein, 14 aa, Homo sapiens
  CDR3 for alpha chain variable domain of TCR clone 313268 (TRAV13-2, TRAJ17)
CAENSKAAGNKLTF

SEQ ID NO: 626536 - protein, 14 aa, Homo sapiens
  CDR3 for beta chain variable domain of TCR clone 313268 (TRBV4-1, TRBJ2-7)
CASIPSREGFEQYF

SEQ ID NO: 626537 - protein, 17 aa, Homo sapiens
  CDR3 for alpha chain variable domain of TCR clone 313269 (TRAV12-2, TRAJ22)
CAVNRIPFAGSARQLTF

SEQ ID NO: 626538 - protein, 13 aa, Homo sapiens
  CDR3 for beta chain variable domain of TCR clone 313269 (TRBV11-3, TRBJ1-1)
CASSSNRDTEAFF

SEQ ID NO: 626539 - protein, 15 aa, Homo sapiens
  CDR3 for alpha chain variable domain of TCR clone 313270 (TRAV13-2, TRAJ45)
CAESDSGGGADGLTF

SEQ ID NO: 626540 - protein, 17 aa, Homo sapiens
  CDR3 for beta chain variable domain of TCR clone 313270 (TRBV27, TRBJ1-6)
CASSLDQLSSYNSHLHF

SEQ ID NO: 626541 - protein, 16 aa, Homo sapiens
  CDR3 for alpha chain variable domain of TCR clone 313271 (TRAV30, TRAJ24)
CGTEMVDADSWGKFQF

SEQ ID NO: 626542 - protein, 15 aa, Homo sapiens
  CDR3 for beta chain variable domain of TCR clone 313271 (TRBV12-4, TRBJ2-7)
CASSQRTSGNYEQYF

SEQ ID NO: 626543 - protein, 16 aa, Homo sapiens
  CDR3 for alpha chain variable domain of TCR clone 313272 (TRAV27, TRAJ13)
CAGAKSDSGGYQKVTF

SEQ ID NO: 626544 - protein, 14 aa, Homo sapiens
  CDR3 for beta chain variable domain of TCR clone 313272 (TRBV3-1, TRBJ2-5)
CASSQGPDQETQYF

SEQ ID NO: 626545 - protein, 12 aa, Homo sapiens
  CDR3 for alpha chain variable domain of TCR clone 313273 (TRAV21, TRAJ33)
CAKMNSNYQLIG

SEQ ID NO: 626546 - protein, 16 aa, Homo sapiens
  CDR3 for beta chain variable domain of TCR clone 313273 (TRBV20-1, TRBJ2-2)
CSASASGIPGAGELFF

SEQ ID NO: 626547 - protein, 14 aa, Homo sapiens
  CDR3 for alpha chain variable domain of TCR clone 313274 (TRAV17, TRAJ31)
CATVLRNNNARLMF

SEQ ID NO: 626548 - protein, 14 aa, Homo sapiens
  CDR3 for beta chain variable domain of TCR clone 313274 (TRBV12-4, TRBJ2-5)
CAGSLWQKQETQYF

SEQ ID NO: 626549 - protein, 14 aa, Homo sapiens
  CDR3 for alpha chain variable domain of TCR clone 313275 (TRAV1-2, TRAJ27)
FAVRSGTNAGKSTF

SEQ ID NO: 626550 - protein, 15 aa, Homo sapiens
  CDR3 for beta chain variable domain of TCR clone 313275 (TRBV18, TRBJ2-7)
CASSPLQGRTYEQYF

SEQ ID NO: 626551 - protein, 12 aa, Homo sapiens
  CDR3 for alpha chain variable domain of TCR clone 313276 (TRAV12-3, TRAJ17)
CAMTLTGNKLTF

SEQ ID NO: 626552 - protein, 13 aa, Homo sapiens
  CDR3 for beta chain variable domain of TCR clone 313276 (TRBV27, TRBJ2-1)
CASRTLGVGEQFC

SEQ ID NO: 626553 - protein, 23 aa, Homo sapiens
  CDR3 for alpha chain variable domain of TCR clone 313277 (TRAV26-1, TRAJ38)
CIADNAGNNHIQNPDLAVYQLRD

SEQ ID NO: 626554 - protein, 13 aa, Homo sapiens
  CDR3 for beta chain variable domain of TCR clone 313277 (TRBV7-3, TRBJ1-1)
CASSQDWGAEAFF

SEQ ID NO: 626555 - protein, 15 aa, Homo sapiens
  CDR3 for alpha chain variable domain of TCR clone 313278 (TRAV12-2, TRAJ53)
CAVSGGGGSNYKLTF

SEQ ID NO: 626556 - protein, 13 aa, Homo sapiens
  CDR3 for beta chain variable domain of TCR clone 313278 (TRBV3-1, TRBJ1-1)
CASSPGVINEAFF

SEQ ID NO: 626557 - protein, 12 aa, Homo sapiens
  CDR3 for alpha chain variable domain of TCR clone 313279 (TRAV12-3, TRAJ17)
CALTLTGNKLTF

SEQ ID NO: 626558 - protein, 15 aa, Homo sapiens
  CDR3 for beta chain variable domain of TCR clone 313279 (TRBV20-1, TRBJ2-7)
CSARDRVSGMDEQDF

SEQ ID NO: 626559 - protein, 15 aa, Homo sapiens
  CDR3 for alpha chain variable domain of TCR clone 313280 (TRAV17, TRAJ57)
CATGPSQGGSEKLVF

SEQ ID NO: 626560 - protein, 15 aa, Homo sapiens
  CDR3 for beta chain variable domain of TCR clone 313280 (TRBV7-2, TRBJ1-2)
CGSSPRAGWNYGYTF

SEQ ID NO: 626561 - protein, 15 aa, Homo sapiens
  CDR3 for alpha chain variable domain of TCR clone 313281 (TRAV35, TRAJ41)
CAGQLFSNSGYDLNF

SEQ ID NO: 626562 - protein, 14 aa, Homo sapiens
  CDR3 for beta chain variable domain of TCR clone 313281 (TRBV7-2, TRBJ1-2)
CASSRGGTNYGYTF

SEQ ID NO: 626563 - protein, 14 aa, Homo sapiens
  CDR3 for alpha chain variable domain of TCR clone 313282 (TRAV29/DV5, TRAJ34)
CAASASGNTDKLIF

SEQ ID NO: 626564 - protein, 14 aa, Homo sapiens
  CDR3 for beta chain variable domain of TCR clone 313282 (TRBV4-3, TRBJ1-4)
CASSPLQRNEKLFF

SEQ ID NO: 626565 - protein, 16 aa, Homo sapiens
  CDR3 for alpha chain variable domain of TCR clone 313283 (TRAV3, TRAJ37)
CAVRGAGSGNTGKLIF

SEQ ID NO: 626566 - protein, 13 aa, Homo sapiens
  CDR3 for beta chain variable domain of TCR clone 313283 (TRBV14, TRBJ2-7)
CASSQDRRYEQYF

SEQ ID NO: 626567 - protein, 18 aa, Homo sapiens
  CDR3 for alpha chain variable domain of TCR clone 313284 (TRAV13-1, TRAJ52)
CAASKRSAGGTSYGKLTF

SEQ ID NO: 626568 - protein, 16 aa, Homo sapiens
  CDR3 for beta chain variable domain of TCR clone 313284 (TRBV27, TRBJ2-2)
CASSFRGLVRTGELFF

SEQ ID NO: 626569 - protein, 16 aa, Homo sapiens
  CDR3 for alpha chain variable domain of TCR clone 313285 (TRAV3, TRAJ10)
CAVRDMRAGGGNKLTF

SEQ ID NO: 626570 - protein, 16 aa, Homo sapiens
  CDR3 for beta chain variable domain of TCR clone 313285 (TRBV20-1, TRBJ2-1)
CSALTWTSGSYNEQFF

SEQ ID NO: 626571 - protein, 17 aa, Homo sapiens
  CDR3 for alpha chain variable domain of TCR clone 313286 (TRAV36/DV7, TRAJ52)
CAVAQRAGGTSYGKLTF

SEQ ID NO: 626572 - protein, 16 aa, Homo sapiens
  CDR3 for beta chain variable domain of TCR clone 313286 (TRBV19, TRBJ2-2)
CASSFPGQGLAGELFF

SEQ ID NO: 626573 - protein, 17 aa, Homo sapiens
  CDR3 for alpha chain variable domain of TCR clone 313287 (TRAV3, TRAJ42)
CAVRYRDYGGSQGNLIF

SEQ ID NO: 626574 - protein, 15 aa, Homo sapiens
  CDR3 for beta chain variable domain of TCR clone 313287 (TRBV6-6, TRBJ2-7)
RASSYSYGGSYEQYF

SEQ ID NO: 626575 - protein, 17 aa, Homo sapiens
  CDR3 for alpha chain variable domain of TCR clone 313288 (TRAV14/DV4, TRAJ32)
CAMRERSFGGATNKLIF

SEQ ID NO: 626576 - protein, 11 aa, Homo sapiens
  CDR3 for beta chain variable domain of TCR clone 313288 (TRBV7-8, TRBJ2-7)
CASSLSLEQYF

SEQ ID NO: 626577 - protein, 11 aa, Homo sapiens
  CDR3 for alpha chain variable domain of TCR clone 313289 (TRAV35, TRAJ34)
CWARNTDKLIF

SEQ ID NO: 626578 - protein, 15 aa, Homo sapiens
  CDR3 for beta chain variable domain of TCR clone 313289 (TRBV20-1, TRBJ1-1)
CSASRGVAGNTEAFF

SEQ ID NO: 626579 - protein, 15 aa, Homo sapiens
  CDR3 for alpha chain variable domain of TCR clone 313290 (TRAV23/DV6, TRAJ18)
CAARYRGSTLGRLYF

SEQ ID NO: 626580 - protein, 16 aa, Homo sapiens
  CDR3 for beta chain variable domain of TCR clone 313290 (TRBV20-1, TRBJ1-2)
CSASMGQGVANYGDTF

SEQ ID NO: 626581 - protein, 12 aa, Homo sapiens
  CDR3 for alpha chain variable domain of TCR clone 313291 (TRAV12-3, TRAJ40)
CAVSSGTYKYIF

SEQ ID NO: 626582 - protein, 15 aa, Homo sapiens
  CDR3 for beta chain variable domain of TCR clone 313291 (TRBV7-9, TRBJ2-7)
WASSPGGGLTYEQYI

SEQ ID NO: 626583 - protein, 12 aa, Homo sapiens
  CDR3 for alpha chain variable domain of TCR clone 313292 (TRAV21, TRAJ42)
CAVGGSQGNLIF

SEQ ID NO: 626584 - protein, 17 aa, Homo sapiens
  CDR3 for beta chain variable domain of TCR clone 313292 (TRBV20-1, TRBJ2-1)
CSASSSGLAGSYNEQFF

SEQ ID NO: 626585 - protein, 13 aa, Homo sapiens
  CDR3 for alpha chain variable domain of TCR clone 313293 (TRAV1-1, TRAJ9)
CAAKILEASKLSF

SEQ ID NO: 626586 - protein, 14 aa, Homo sapiens
  CDR3 for beta chain variable domain of TCR clone 313293 (TRBV20-1, TRBJ2-1)
CSAQIGGSANEQFF

SEQ ID NO: 626587 - protein, 14 aa, Homo sapiens
  CDR3 for alpha chain variable domain of TCR clone 313294 (TRAV9-2, TRAJ39)
CALYIYNAGNMLTF

SEQ ID NO: 626588 - protein, 14 aa, Homo sapiens
  CDR3 for beta chain variable domain of TCR clone 313294 (TRBV7-2, TRBJ2-7)
CASRSQGAAYEQYL

SEQ ID NO: 626589 - protein, 14 aa, Homo sapiens
  CDR3 for alpha chain variable domain of TCR clone 313295 (TRAV20, TRAJ56)
CAVQFGGANSKLTF

SEQ ID NO: 626590 - protein, 12 aa, Homo sapiens
  CDR3 for beta chain variable domain of TCR clone 313295 (TRBV12-4, TRBJ2-7)
CASSLGGYEQYF

SEQ ID NO: 626591 - protein, 12 aa, Homo sapiens
  CDR3 for alpha chain variable domain of TCR clone 313296 (TRAV8-3, TRAJ26)
CAGDNYVQNFVF

SEQ ID NO: 626592 - protein, 13 aa, Homo sapiens
  CDR3 for beta chain variable domain of TCR clone 313296 (TRBV5-1, TRBJ2-5)
CASSLIPAETQYF

SEQ ID NO: 626593 - protein, 15 aa, Homo sapiens
  CDR3 for alpha chain variable domain of TCR clone 313297 (TRAV26-2, TRAJ9)
CILRDVNTGGFKTIF

SEQ ID NO: 626594 - protein, 14 aa, Homo sapiens
  CDR3 for beta chain variable domain of TCR clone 313297 (TRBV7-2, TRBJ1-2)
CASSGPTGIYGYTF

SEQ ID NO: 626595 - protein, 15 aa, Homo sapiens
  CDR3 for alpha chain variable domain of TCR clone 313298 (TRAV12-1, TRAJ44)
CVVDTPQGTASKLTF

SEQ ID NO: 626596 - protein, 13 aa, Homo sapiens
  CDR3 for beta chain variable domain of TCR clone 313298 (TRBV7-3, TRBJ1-1)
CASSLTQGTEAFF

SEQ ID NO: 626597 - protein, 13 aa, Homo sapiens
  CDR3 for alpha chain variable domain of TCR clone 313299 (TRAV8-3, TRAJ21)
CAVGAYNFDKFYF

SEQ ID NO: 626598 - protein, 16 aa, Homo sapiens
  CDR3 for beta chain variable domain of TCR clone 313299 (TRBV19, TRBJ2-1)
CASSMGGGSSYNEQFF

SEQ ID NO: 626599 - protein, 14 aa, Homo sapiens
  CDR3 for alpha chain variable domain of TCR clone 313300 (TRAV1-2, TRAJ16)
CAVNRFSDGQKLPF

SEQ ID NO: 626600 - protein, 13 aa, Homo sapiens
  CDR3 for beta chain variable domain of TCR clone 313300 (TRBV10-2, TRBJ2-7)
CASGASGGYEQYF

SEQ ID NO: 626601 - protein, 15 aa, Homo sapiens
  CDR3 for alpha chain variable domain of TCR clone 313301 (TRAV12-1, TRAJ44)
CVVIVNTGTASKLTF

SEQ ID NO: 626602 - protein, 16 aa, Homo sapiens
  CDR3 for beta chain variable domain of TCR clone 313301 (TRBV20-1, TRBJ2-5)
CSPGGTSGGYMETQYF

SEQ ID NO: 626603 - protein, 13 aa, Homo sapiens
  CDR3 for alpha chain variable domain of TCR clone 313302 (TRAV12-3, TRAJ53)
CAMRGGSNYKLTF

SEQ ID NO: 626604 - protein, 14 aa, Homo sapiens
  CDR3 for beta chain variable domain of TCR clone 313302 (TRBV5-4, TRBJ1-1)
CASSLDSRRDEAFF

SEQ ID NO: 626605 - protein, 15 aa, Homo sapiens
  CDR3 for alpha chain variable domain of TCR clone 313303 (TRAV12-3, TRAJ6)
CAMSATTGGGYIPTF

SEQ ID NO: 626606 - protein, 13 aa, Homo sapiens
  CDR3 for beta chain variable domain of TCR clone 313303 (TRBV7-2, TRBJ2-7)
CASSSPSGSEQYF

SEQ ID NO: 626607 - protein, 13 aa, Homo sapiens
  CDR3 for alpha chain variable domain of TCR clone 313304 (TRAV26-1, TRAJ34)
CIVRPWITDELIF

SEQ ID NO: 626608 - protein, 14 aa, Homo sapiens
  CDR3 for beta chain variable domain of TCR clone 313304 (TRBV12-4, TRBJ1-4)
CASSRQGANEKLFF

SEQ ID NO: 626609 - protein, 15 aa, Homo sapiens
  CDR3 for alpha chain variable domain of TCR clone 313305 (TRAV3, TRAJ22)
CAVRDRGGSARQLTF

SEQ ID NO: 626610 - protein, 15 aa, Homo sapiens
  CDR3 for beta chain variable domain of TCR clone 313305 (TRBV7-9, TRBJ1-5)
CASSQGHQPNQHQHF

SEQ ID NO: 626611 - protein, 14 aa, Homo sapiens
  CDR3 for alpha chain variable domain of TCR clone 313306 (TRAV8-3, TRAJ4)
CAVGAAGGYNKLIF

SEQ ID NO: 626612 - protein, 15 aa, Homo sapiens
  CDR3 for beta chain variable domain of TCR clone 313306 (TRBV6-1, TRBJ2-3)
CASSERGGITDTQYF

SEQ ID NO: 626613 - protein, 13 aa, Homo sapiens
  CDR3 for alpha chain variable domain of TCR clone 313307 (TRAV20, TRAJ3)
CASCYSSASKIIF

SEQ ID NO: 626614 - protein, 16 aa, Homo sapiens
  CDR3 for beta chain variable domain of TCR clone 313307 (TRBV6-1, TRBJ1-6)
CASSSDGSPRNSPLHF

SEQ ID NO: 626615 - protein, 15 aa, Homo sapiens
  CDR3 for alpha chain variable domain of TCR clone 313308 (TRAV27, TRAJ38)
CAARRNAGNNRKLIW

SEQ ID NO: 626616 - protein, 13 aa, Homo sapiens
  CDR3 for beta chain variable domain of TCR clone 313308 (TRBV12-5, TRBJ2-3)
CASGERQLDTQYF

SEQ ID NO: 626617 - protein, 17 aa, Homo sapiens
  CDR3 for alpha chain variable domain of TCR clone 313309 (TRAV8-6, TRAJ58)
CALSSWVGETSGSRLIF

SEQ ID NO: 626618 - protein, 17 aa, Homo sapiens
  CDR3 for beta chain variable domain of TCR clone 313309 (TRBV11-2, TRBJ2-1)
CASSLYPPGVEYNEQFF

SEQ ID NO: 626619 - protein, 14 aa, Homo sapiens
  CDR3 for alpha chain variable domain of TCR clone 313310 (TRAV35, TRAJ22)
CAGLRPGSARQLTF

SEQ ID NO: 626620 - protein, 15 aa, Homo sapiens
  CDR3 for beta chain variable domain of TCR clone 313310 (TRBV12-4, TRBJ2-5)
CASSPQTGLQEAQYF

SEQ ID NO: 626621 - protein, 17 aa, Homo sapiens
  CDR3 for alpha chain variable domain of TCR clone 313311 (TRAV26-2, TRAJ42)
FILRDVGYGGSQGNLIF

SEQ ID NO: 626622 - protein, 16 aa, Homo sapiens
  CDR3 for beta chain variable domain of TCR clone 313311 (TRBV6-5, TRBJ2-1)
CASSETLAGHYNEQFF

SEQ ID NO: 626623 - protein, 12 aa, Homo sapiens
  CDR3 for alpha chain variable domain of TCR clone 313312 (TRAV35, TRAJ49)
CAGWNTGNQFYS

SEQ ID NO: 626624 - protein, 16 aa, Homo sapiens
  CDR3 for beta chain variable domain of TCR clone 313312 (TRBV5-1, TRBJ2-2)
CASSLWDTTNTGELFF

SEQ ID NO: 626625 - protein, 20 aa, Homo sapiens
  CDR3 for alpha chain variable domain of TCR clone 313313 (TRAV1-1, TRAJ39)
CLLLLRCESSAYNAGNMLTF

SEQ ID NO: 626626 - protein, 13 aa, Homo sapiens
  CDR3 for beta chain variable domain of TCR clone 313313 (TRBV12-4, TRBJ1-5)
CASSPDRAEHQHC

SEQ ID NO: 626627 - protein, 15 aa, Homo sapiens
  CDR3 for alpha chain variable domain of TCR clone 313314 (TRAV13-1, TRAJ48)
CAASGANFGNEKLTF

SEQ ID NO: 626628 - protein, 13 aa, Homo sapiens
  CDR3 for beta chain variable domain of TCR clone 313314 (TRBV7-9, TRBJ1-2)
CASSLKQNYGYTF

SEQ ID NO: 626629 - protein, 14 aa, Homo sapiens
  CDR3 for alpha chain variable domain of TCR clone 313315 (TRAV21, TRAJ38)
CAVMGAGNNRKLVW

SEQ ID NO: 626630 - protein, 13 aa, Homo sapiens
  CDR3 for beta chain variable domain of TCR clone 313315 (TRBV7-3, TRBJ2-5)
CASSIGFFETQYF

SEQ ID NO: 626631 - protein, 14 aa, Homo sapiens
  CDR3 for alpha chain variable domain of TCR clone 313316 (TRAV12-2, TRAJ17)
CAVNIKAAGNKLTF

SEQ ID NO: 626632 - protein, 15 aa, Homo sapiens
  CDR3 for beta chain variable domain of TCR clone 313316 (TRBV2, TRBJ2-1)
CASSELAGSYNKQFF

SEQ ID NO: 626633 - protein, 13 aa, Homo sapiens
  CDR3 for alpha chain variable domain of TCR clone 313317 (TRAV17, TRAJ9)
CATDHTGGFKTIF

SEQ ID NO: 626634 - protein, 16 aa, Homo sapiens
  CDR3 for beta chain variable domain of TCR clone 313317 (TRBV27, TRBJ2-2)
CASSFRGLVRTGELFF

SEQ ID NO: 626635 - protein, 13 aa, Homo sapiens
  CDR3 for alpha chain variable domain of TCR clone 313318 (TRAV3, TRAJ31)
CAVSEGNNARLMF

SEQ ID NO: 626636 - protein, 15 aa, Homo sapiens
  CDR3 for beta chain variable domain of TCR clone 313318 (TRBV6-1, TRBJ1-1)
CASRTPGQLNTEAFF

SEQ ID NO: 626637 - protein, 14 aa, Homo sapiens
  CDR3 for alpha chain variable domain of TCR clone 313319 (TRAV12-1, TRAJ9)
CVVTLNTGGFKTIF

SEQ ID NO: 626638 - protein, 15 aa, Homo sapiens
  CDR3 for beta chain variable domain of TCR clone 313319 (TRBV28, TRBJ2-1)
CASSFQEGVYNEQFF

SEQ ID NO: 626639 - protein, 13 aa, Homo sapiens
  CDR3 for alpha chain variable domain of TCR clone 313320 (TRAV21, TRAJ20)
CAVGLRVDYKLSF

SEQ ID NO: 626640 - protein, 11 aa, Homo sapiens
  CDR3 for beta chain variable domain of TCR clone 313320 (TRBV12-4, TRBJ2-2)
CASSSAGELFF

SEQ ID NO: 626641 - protein, 16 aa, Homo sapiens
  CDR3 for alpha chain variable domain of TCR clone 313321 (TRAV30, TRAJ24)
CDTEIVDADSWWKFQF

SEQ ID NO: 626642 - protein, 15 aa, Homo sapiens
  CDR3 for beta chain variable domain of TCR clone 313321 (TRBV20-1, TRBJ2-7)
CSARDRVSGMDEQYF

SEQ ID NO: 626643 - protein, 15 aa, Homo sapiens
  CDR3 for alpha chain variable domain of TCR clone 313322 (TRAV10, TRAJ6)
CVVRPRTGGSYIHTF

SEQ ID NO: 626644 - protein, 13 aa, Homo sapiens
  CDR3 for beta chain variable domain of TCR clone 313322 (TRBV7-9, TRBJ1-2)
CASSVKQNYGYTF

SEQ ID NO: 626645 - protein, 12 aa, Homo sapiens
  CDR3 for alpha chain variable domain of TCR clone 313323 (TRAV12-1, TRAJ40)
CVVYSETYKYIF

SEQ ID NO: 626646 - protein, 18 aa, Homo sapiens
  CDR3 for beta chain variable domain of TCR clone 313323 (TRBV11-2, TRBJ2-3)
WASSVGGASRGAPNTQYF

SEQ ID NO: 626647 - protein, 14 aa, Homo sapiens
  CDR3 for alpha chain variable domain of TCR clone 313324 (TRAV8-4, TRAJ13)
CAVTLSGGYQKVTF

SEQ ID NO: 626648 - protein, 16 aa, Homo sapiens
  CDR3 for beta chain variable domain of TCR clone 313324 (TRBV19, TRBJ2-2)
CAGRSPGTGATGELFF

SEQ ID NO: 626649 - protein, 13 aa, Homo sapiens
  CDR3 for alpha chain variable domain of TCR clone 313325 (TRAV17, TRAJ21)
CATDGSNVNKFYF

SEQ ID NO: 626650 - protein, 13 aa, Homo sapiens
  CDR3 for beta chain variable domain of TCR clone 313325 (TRBV11-3, TRBJ1-1)
CASTGSLNTEAFF

SEQ ID NO: 626651 - protein, 16 aa, Homo sapiens
  CDR3 for alpha chain variable domain of TCR clone 313326 (TRAV30, TRAJ24)
CGTELVDADSWGKFQV

SEQ ID NO: 626652 - protein, 13 aa, Homo sapiens
  CDR3 for beta chain variable domain of TCR clone 313326 (TRBV12-4, TRBJ2-5)
CASSPGTEETQYF

SEQ ID NO: 626653 - protein, 15 aa, Homo sapiens
  CDR3 for alpha chain variable domain of TCR clone 313327 (TRAV36/DV7, TRAJ53)
CAVEGSGGSNYKLTF

SEQ ID NO: 626654 - protein, 14 aa, Homo sapiens
  CDR3 for beta chain variable domain of TCR clone 313327 (TRBV7-2, TRBJ1-2)
CASSLGGQGYGYTF

SEQ ID NO: 626655 - protein, 14 aa, Homo sapiens
  CDR3 for alpha chain variable domain of TCR clone 313328 (TRAV38-1, TRAJ54)
CAFMSPSGAQKLVF

SEQ ID NO: 626656 - protein, 14 aa, Homo sapiens
  CDR3 for beta chain variable domain of TCR clone 313328 (TRBV7-3, TRBJ2-1)
CASSLAGGTNEQFF

SEQ ID NO: 626657 - protein, 13 aa, Homo sapiens
  CDR3 for alpha chain variable domain of TCR clone 313329 (TRAV21, TRAJ27)
CAALNTNAGKSTF

SEQ ID NO: 626658 - protein, 14 aa, Homo sapiens
  CDR3 for beta chain variable domain of TCR clone 313329 (TRBV27, TRBJ1-1)
CATSLLSGLSEAFF

SEQ ID NO: 626659 - protein, 10 aa, Homo sapiens
  CDR3 for alpha chain variable domain of TCR clone 313330 (TRAV1-2, TRAJ31)
CVSEDARLMF

SEQ ID NO: 626660 - protein, 12 aa, Homo sapiens
  CDR3 for beta chain variable domain of TCR clone 313330 (TRBV7-8, TRBJ2-7)
CASSLGDREQYF

SEQ ID NO: 626661 - protein, 18 aa, Homo sapiens
  CDR3 for alpha chain variable domain of TCR clone 313331 (TRAV12-3, TRAJ52)
CAMSVGGAGGTSYGKLTF

SEQ ID NO: 626662 - protein, 14 aa, Homo sapiens
  CDR3 for beta chain variable domain of TCR clone 313331 (TRBV5-1, TRBJ2-5)
CASSLWQIQETQYF

SEQ ID NO: 626663 - protein, 14 aa, Homo sapiens
  CDR3 for alpha chain variable domain of TCR clone 313332 (TRAV8-3, TRAJ17)
CAVGAQTAGNKITF

SEQ ID NO: 626664 - protein, 11 aa, Homo sapiens
  CDR3 for beta chain variable domain of TCR clone 313332 (TRBV29-1, TRBJ1-4)
CSVSSGEKLFL

SEQ ID NO: 626665 - protein, 13 aa, Homo sapiens
  CDR3 for alpha chain variable domain of TCR clone 313333 (TRAV12-1, TRAJ22)
CVASGGSARQLPF

SEQ ID NO: 626666 - protein, 14 aa, Homo sapiens
  CDR3 for beta chain variable domain of TCR clone 313333 (TRBV13, TRBJ2-5)
CASSLERVGETQYF

SEQ ID NO: 626667 - protein, 15 aa, Homo sapiens
  CDR3 for alpha chain variable domain of TCR clone 313334 (TRAV26-1, TRAJ40)
CIVRAVPSVTYKYIF

SEQ ID NO: 626668 - protein, 14 aa, Homo sapiens
  CDR3 for beta chain variable domain of TCR clone 313334 (TRBV19, TRBJ2-1)
CASKDPGLANEQFF

SEQ ID NO: 626669 - protein, 13 aa, Homo sapiens
  CDR3 for alpha chain variable domain of TCR clone 313335 (TRAV35, TRAJ48)
CAGHEFGNEKLTL

SEQ ID NO: 626670 - protein, 13 aa, Homo sapiens
  CDR3 for beta chain variable domain of TCR clone 313335 (TRBV7-2, TRBJ1-6)
CASSLVGSSPLHF

SEQ ID NO: 626671 - protein, 14 aa, Homo sapiens
  CDR3 for alpha chain variable domain of TCR clone 313336 (TRAV2, TRAJ37)
CAVDFTSNTGKLIF

SEQ ID NO: 626672 - protein, 14 aa, Homo sapiens
  CDR3 for beta chain variable domain of TCR clone 313336 (TRBV4-2, TRBJ2-1)
CASRRGGPGNEQFF

SEQ ID NO: 626673 - protein, 18 aa, Homo sapiens
  CDR3 for alpha chain variable domain of TCR clone 313337 (TRAV8-4, TRAJ52)
CAVTRANAGGTSYGKLTF

SEQ ID NO: 626674 - protein, 20 aa, Homo sapiens
  CDR3 for beta chain variable domain of TCR clone 313337 (TRBV19, TRBJ2-1)
CASSISRTVTSTRLNNEQFF

SEQ ID NO: 626675 - protein, 15 aa, Homo sapiens
  CDR3 for alpha chain variable domain of TCR clone 313338 (TRAV8-3, TRAJ11)
CAVGLLNSGYSTLTS

SEQ ID NO: 626676 - protein, 23 aa, Homo sapiens
  CDR3 for beta chain variable domain of TCR clone 313338 (TRBV7-9, TRBJ1-2)
EAQLEKSRLLSDRFSPGEDGYTF

SEQ ID NO: 626677 - protein, 16 aa, Homo sapiens
  CDR3 for alpha chain variable domain of TCR clone 313339 (TRAV16, TRAJ54)
CALSPPLIQGAQKLVF

SEQ ID NO: 626678 - protein, 14 aa, Homo sapiens
  CDR3 for beta chain variable domain of TCR clone 313339 (TRBV25-1, TRBJ1-1)
CASTHLGGNTEAFF

SEQ ID NO: 626679 - protein, 12 aa, Homo sapiens
  CDR3 for alpha chain variable domain of TCR clone 313340 (TRAV12-1, TRAJ40)
CVVYSGTYKYIF

SEQ ID NO: 626680 - protein, 15 aa, Homo sapiens
  CDR3 for beta chain variable domain of TCR clone 313340 (TRBV27, TRBJ1-6)
CASSFDGGLGSTLHF

SEQ ID NO: 626681 - protein, 19 aa, Homo sapiens
  CDR3 for alpha chain variable domain of TCR clone 313341 (TRAV1-2, TRAJ26)
CLLPLCCERTDNYGQNFVF

SEQ ID NO: 626682 - protein, 17 aa, Homo sapiens
  CDR3 for beta chain variable domain of TCR clone 313341 (TRBV28, TRBJ2-5)
CASSRQGGLAGAETQYF

SEQ ID NO: 626683 - protein, 16 aa, Homo sapiens
  CDR3 for alpha chain variable domain of TCR clone 313342 (TRAV30, TRAJ24)
CGTEIVDADSWGKFQF

SEQ ID NO: 626684 - protein, 13 aa, Homo sapiens
  CDR3 for beta chain variable domain of TCR clone 313342 (TRBV12-4, TRBJ2-1)
CASSRAGHNEQFF

SEQ ID NO: 626685 - protein, 14 aa, Homo sapiens
  CDR3 for alpha chain variable domain of TCR clone 313343 (TRAV35, TRAJ22)
CAGLRPGSARHLTF

SEQ ID NO: 626686 - protein, 14 aa, Homo sapiens
  CDR3 for beta chain variable domain of TCR clone 313343 (TRBV5-1, TRBJ2-7)
CASSRGESLYEQYF

SEQ ID NO: 626687 - protein, 15 aa, Homo sapiens
  CDR3 for alpha chain variable domain of TCR clone 313344 (TRAV21, TRAJ24)
CAARSSTDSWGKLQF

SEQ ID NO: 626688 - protein, 13 aa, Homo sapiens
  CDR3 for beta chain variable domain of TCR clone 313344 (TRBV2, TRBJ2-7)
CASSVGGSGEQYF

SEQ ID NO: 626689 - protein, 15 aa, Homo sapiens
  CDR3 for alpha chain variable domain of TCR clone 313345 (TRAV21, TRAJ42)
CAVTDYGGSQGNLIF

SEQ ID NO: 626690 - protein, 14 aa, Homo sapiens
  CDR3 for beta chain variable domain of TCR clone 313345 (TRBV12-5, TRBJ2-5)
CASGSRTHQETQYF

SEQ ID NO: 626691 - protein, 14 aa, Homo sapiens
  CDR3 for alpha chain variable domain of TCR clone 313346 (TRAV12-2, TRAJ40)
CAVKSPSGTYKDIF

SEQ ID NO: 626692 - protein, 14 aa, Homo sapiens
  CDR3 for beta chain variable domain of TCR clone 313346 (TRBV20-1, TRBJ1-1)
CSAQTRIGGTEAFF

SEQ ID NO: 626693 - protein, 13 aa, Homo sapiens
  CDR3 for alpha chain variable domain of TCR clone 313347 (TRAV8-4, TRAJ30)
CAVSVNRDDKIIF

SEQ ID NO: 626694 - protein, 13 aa, Homo sapiens
  CDR3 for beta chain variable domain of TCR clone 313347 (TRBV3-1, TRBJ2-2)
CASLARGSGELFF

SEQ ID NO: 626695 - protein, 16 aa, Homo sapiens
  CDR3 for alpha chain variable domain of TCR clone 313348 (TRAV12-3, TRAJ53)
CAMSPGSGGSNYKLTF

SEQ ID NO: 626696 - protein, 17 aa, Homo sapiens
  CDR3 for beta chain variable domain of TCR clone 313348 (TRBV20-1, TRBJ2-1)
CSARDPLAGVWDNEQFF

SEQ ID NO: 626697 - protein, 13 aa, Homo sapiens
  CDR3 for alpha chain variable domain of TCR clone 313349 (TRAV12-1, TRAJ39)
CVVPQPAGNMLTF

SEQ ID NO: 626698 - protein, 17 aa, Homo sapiens
  CDR3 for beta chain variable domain of TCR clone 313349 (TRBV4-1, TRBJ2-5)
CASSQDLTGGPIETQYF

SEQ ID NO: 626699 - protein, 15 aa, Homo sapiens
  CDR3 for alpha chain variable domain of TCR clone 313350 (TRAV14/DV4, TRAJ49)
CAMREGMNTGNQFYF

SEQ ID NO: 626700 - protein, 13 aa, Homo sapiens
  CDR3 for beta chain variable domain of TCR clone 313350 (TRBV14, TRBJ1-1)
CASSREFGTEAFF

SEQ ID NO: 626701 - protein, 14 aa, Homo sapiens
  CDR3 for alpha chain variable domain of TCR clone 313351 (TRAV12-3, TRAJ10)
SHLPLTGGGNKLNF

SEQ ID NO: 626702 - protein, 12 aa, Homo sapiens
  CDR3 for beta chain variable domain of TCR clone 313351 (TRBV7-8, TRBJ2-7)
CASSLGDREQYF

SEQ ID NO: 626703 - protein, 16 aa, Homo sapiens
  CDR3 for alpha chain variable domain of TCR clone 313352 (TRAV12-3, TRAJ53)
CAMSPGSGCSNYKLTF

SEQ ID NO: 626704 - protein, 11 aa, Homo sapiens
  CDR3 for beta chain variable domain of TCR clone 313352 (TRBV29-1, TRBJ2-5)
CSEDQTGTQYF

SEQ ID NO: 626705 - protein, 13 aa, Homo sapiens
  CDR3 for alpha chain variable domain of TCR clone 313353 (TRAV21, TRAJ27)
CAARPGHAGKSTF

SEQ ID NO: 626706 - protein, 15 aa, Homo sapiens
  CDR3 for beta chain variable domain of TCR clone 313353 (TRBV7-2, TRBJ2-1)
CASSSRTSREDEQFF

SEQ ID NO: 626707 - protein, 17 aa, Homo sapiens
  CDR3 for alpha chain variable domain of TCR clone 313354 (TRAV26-1, TRAJ53)
CVVRVDDSGGSNYKLTF

SEQ ID NO: 626708 - protein, 15 aa, Homo sapiens
  CDR3 for beta chain variable domain of TCR clone 313354 (TRBV20-1, TRBJ2-7)
CSARDRVSGMDEQYF

SEQ ID NO: 626709 - protein, 13 aa, Homo sapiens
  CDR3 for alpha chain variable domain of TCR clone 313355 (TRAV21, TRAJ27)
CAARPRNAGKQTF

SEQ ID NO: 626710 - protein, 15 aa, Homo sapiens
  CDR3 for beta chain variable domain of TCR clone 313355 (TRBV5-1, TRBJ2-5)
CASSFKGGDQETQYF

SEQ ID NO: 626711 - protein, 15 aa, Homo sapiens
  CDR3 for alpha chain variable domain of TCR clone 313356 (TRAV17, TRAJ16)
CATALRVSDGQKLLF

SEQ ID NO: 626712 - protein, 15 aa, Homo sapiens
  CDR3 for beta chain variable domain of TCR clone 313356 (TRBV13, TRBJ1-5)
CASSFGQGGVQPQHF

SEQ ID NO: 626713 - protein, 16 aa, Homo sapiens
  CDR3 for alpha chain variable domain of TCR clone 313357 (TRAV38-2/DV8, TRAJ45)
CAYTTTSGGGADGLTF

SEQ ID NO: 626714 - protein, 12 aa, Homo sapiens
  CDR3 for beta chain variable domain of TCR clone 313357 (TRBV7-9, TRBJ2-7)
CASSIKREEQYF

SEQ ID NO: 626715 - protein, 16 aa, Homo sapiens
  CDR3 for alpha chain variable domain of TCR clone 313358 (TRAV12-1, TRAJ21)
CVVLSGYFGSGTKLNV

SEQ ID NO: 626716 - protein, 13 aa, Homo sapiens
  CDR3 for beta chain variable domain of TCR clone 313358 (TRBV7-3, TRBJ1-1)
CASSHDWGAEAFF

SEQ ID NO: 626717 - protein, 13 aa, Homo sapiens
  CDR3 for alpha chain variable domain of TCR clone 313359 (TRAV20, TRAJ50)
CAVQQTSYDKVIF

SEQ ID NO: 626718 - protein, 16 aa, Homo sapiens
  CDR3 for beta chain variable domain of TCR clone 313359 (TRBV27, TRBJ2-1)
GASSSLTSGSGNEQFF

SEQ ID NO: 626719 - protein, 16 aa, Homo sapiens
  CDR3 for alpha chain variable domain of TCR clone 313360 (TRAV3, TRAJ10)
CAVRDMREGGGNKLTF

SEQ ID NO: 626720 - protein, 16 aa, Homo sapiens
  CDR3 for beta chain variable domain of TCR clone 313360 (TRBV6-1, TRBJ2-5)
CASSETLGRGAETQYF

SEQ ID NO: 626721 - protein, 13 aa, Homo sapiens
  CDR3 for alpha chain variable domain of TCR clone 313361 (TRAV20, TRAJ20)
CAVRGVRDYKLSF

SEQ ID NO: 626722 - protein, 14 aa, Homo sapiens
  CDR3 for beta chain variable domain of TCR clone 313361 (TRBV19, TRBJ2-2)
CASTVTANTGELFF

SEQ ID NO: 626723 - protein, 17 aa, Homo sapiens
  CDR3 for alpha chain variable domain of TCR clone 313362 (TRAV3, TRAJ6)
CAVRDGPRAGGSSIPTF

SEQ ID NO: 626724 - protein, 12 aa, Homo sapiens
  CDR3 for beta chain variable domain of TCR clone 313362 (TRBV20-1, TRBJ2-1)
CSAQYTYNEQFF

SEQ ID NO: 626725 - protein, 13 aa, Homo sapiens
  CDR3 for alpha chain variable domain of TCR clone 313363 (TRAV3, TRAJ21)
CAVREPDFNKFYF

SEQ ID NO: 626726 - protein, 15 aa, Homo sapiens
  CDR3 for beta chain variable domain of TCR clone 313363 (TRBV27, TRBJ2-2)
CASFRGLVRTGELFF

SEQ ID NO: 626727 - protein, 14 aa, Homo sapiens
  CDR3 for alpha chain variable domain of TCR clone 313364 (TRAV1-2, TRAJ8)
CAVREDTGFQTLVF

SEQ ID NO: 626728 - protein, 16 aa, Homo sapiens
  CDR3 for beta chain variable domain of TCR clone 313364 (TRBV28, TRBJ1-4)
CASSPPYRGRSEKLFF

SEQ ID NO: 626729 - protein, 16 aa, Homo sapiens
  CDR3 for alpha chain variable domain of TCR clone 313365 (TRAV8-6, TRAJ4)
CAVTKIVSGGYNKLIF

SEQ ID NO: 626730 - protein, 17 aa, Homo sapiens
  CDR3 for beta chain variable domain of TCR clone 313365 (TRBV20-1, TRBJ2-1)
CSASSSGLAGSYNEQFF

SEQ ID NO: 626731 - protein, 16 aa, Homo sapiens
  CDR3 for alpha chain variable domain of TCR clone 313366 (TRAV12-2, TRAJ6)
CAAPLAGSGGSYIPTF

SEQ ID NO: 626732 - protein, 10 aa, Homo sapiens
  CDR3 for beta chain variable domain of TCR clone 313366 (TRBV28, TRBJ1-2)
CAISSDRAVF

SEQ ID NO: 626733 - protein, 11 aa, Homo sapiens
  CDR3 for alpha chain variable domain of TCR clone 313367 (TRAV8-3, TRAJ15)
CAVGPGTALIF

SEQ ID NO: 626734 - protein, 18 aa, Homo sapiens
  CDR3 for beta chain variable domain of TCR clone 313367 (TRBV18, TRBJ2-3)
CPSSYTSGAAGGTDTQYF

SEQ ID NO: 626735 - protein, 15 aa, Homo sapiens
  CDR3 for alpha chain variable domain of TCR clone 313368 (TRAV2, TRAJ13)
CCLLLCFRGYQKVTF

SEQ ID NO: 626736 - protein, 16 aa, Homo sapiens
  CDR3 for beta chain variable domain of TCR clone 313368 (TRBV2, TRBJ2-1)
CASSVGGSLSYNEQFF

SEQ ID NO: 626737 - protein, 12 aa, Homo sapiens
  CDR3 for alpha chain variable domain of TCR clone 313369 (TRAV12-3, TRAJ17)
CAMTLTGNKLTF

SEQ ID NO: 626738 - protein, 17 aa, Homo sapiens
  CDR3 for beta chain variable domain of TCR clone 313369 (TRBV18, TRBJ2-3)
CASSSRGPASSTDTQYF

SEQ ID NO: 626739 - protein, 16 aa, Homo sapiens
  CDR3 for alpha chain variable domain of TCR clone 313370 (TRAV30, TRAJ24)
CGTEVVDADSWGKFQF

SEQ ID NO: 626740 - protein, 14 aa, Homo sapiens
  CDR3 for beta chain variable domain of TCR clone 313370 (TRBV12-5, TRBJ2-5)
CASGSRTLQETQYF

SEQ ID NO: 626741 - protein, 14 aa, Homo sapiens
  CDR3 for alpha chain variable domain of TCR clone 313371 (TRAV12-2, TRAJ13)
CAVKKTGGYQKVTF

SEQ ID NO: 626742 - protein, 16 aa, Homo sapiens
  CDR3 for beta chain variable domain of TCR clone 313371 (TRBV7-9, TRBJ1-2)
CASSLAPLRAAYGHTF

SEQ ID NO: 626743 - protein, 12 aa, Homo sapiens
  CDR3 for alpha chain variable domain of TCR clone 313372 (TRAV21, TRAJ33)
CAKMDSNYQLIW

SEQ ID NO: 626744 - protein, 16 aa, Homo sapiens
  CDR3 for beta chain variable domain of TCR clone 313372 (TRBV20-1, TRBJ1-2)
CSASMGQGVANYGYTF

SEQ ID NO: 626745 - protein, 15 aa, Homo sapiens
  CDR3 for alpha chain variable domain of TCR clone 313373 (TRAV9-2, TRAJ32)
CALSPLWWCYKQAHL

SEQ ID NO: 626746 - protein, 14 aa, Homo sapiens
  CDR3 for beta chain variable domain of TCR clone 313373 (TRBV7-9, TRBJ2-3)
CASSLEQGTNTQYF

SEQ ID NO: 626747 - protein, 12 aa, Homo sapiens
  CDR3 for alpha chain variable domain of TCR clone 313374 (TRAV13-1, TRAJ9)
CASHTGGFKTIF

SEQ ID NO: 626748 - protein, 13 aa, Homo sapiens
  CDR3 for beta chain variable domain of TCR clone 313374 (TRBV12-4, TRBJ1-2)
CASSSGSKYGYTF

SEQ ID NO: 626749 - protein, 14 aa, Homo sapiens
  CDR3 for alpha chain variable domain of TCR clone 313375 (TRAV12-2, TRAJ13)
CAVKKTGGYQKVTF

SEQ ID NO: 626750 - protein, 15 aa, Homo sapiens
  CDR3 for beta chain variable domain of TCR clone 313375 (TRBV11-2, TRBJ2-1)
CASSLGPDSYNEQFF

SEQ ID NO: 626751 - protein, 13 aa, Homo sapiens
  CDR3 for alpha chain variable domain of TCR clone 313376 (TRAV36/DV7, TRAJ53)
CAISGGSNYKLTF

SEQ ID NO: 626752 - protein, 13 aa, Homo sapiens
  CDR3 for beta chain variable domain of TCR clone 313376 (TRBV28, TRBJ2-7)
CASSLPSRYEQYF

SEQ ID NO: 626753 - protein, 11 aa, Homo sapiens
  CDR3 for alpha chain variable domain of TCR clone 313377 (TRAV2, TRAJ33)
CAVDSNYQLIW

SEQ ID NO: 626754 - protein, 14 aa, Homo sapiens
  CDR3 for beta chain variable domain of TCR clone 313377 (TRBV2, TRBJ2-3)
CASSEGQNTDTQYF

SEQ ID NO: 626755 - protein, 13 aa, Homo sapiens
  CDR3 for alpha chain variable domain of TCR clone 313378 (TRAV16, TRAJ58)
CALSIPSGSRLTF

SEQ ID NO: 626756 - protein, 16 aa, Homo sapiens
  CDR3 for beta chain variable domain of TCR clone 313378 (TRBV29-1, TRBJ2-6)
CSVEDITYSGANVLIF

SEQ ID NO: 626757 - protein, 12 aa, Homo sapiens
  CDR3 for alpha chain variable domain of TCR clone 313379 (TRAV35, TRAJ53)
CAGLGSNYKLTF

SEQ ID NO: 626758 - protein, 15 aa, Homo sapiens
  CDR3 for beta chain variable domain of TCR clone 313379 (TRBV13, TRBJ2-5)
CASSFRPGRGETQSF

SEQ ID NO: 626759 - protein, 16 aa, Homo sapiens
  CDR3 for alpha chain variable domain of TCR clone 313380 (TRAV21, TRAJ52)
CSVTNAGCTSYGKLTF

SEQ ID NO: 626760 - protein, 16 aa, Homo sapiens
  CDR3 for beta chain variable domain of TCR clone 313380 (TRBV2, TRBJ2-1)
CASSVGGSLSYNEQFF

SEQ ID NO: 626761 - protein, 12 aa, Homo sapiens
  CDR3 for alpha chain variable domain of TCR clone 313381 (TRAV8-2, TRAJ45)
CCQGGGADGLTF

SEQ ID NO: 626762 - protein, 15 aa, Homo sapiens
  CDR3 for beta chain variable domain of TCR clone 313381 (TRBV19, TRBJ1-1)
CASSIRRQMNTEAFF

SEQ ID NO: 626763 - protein, 13 aa, Homo sapiens
  CDR3 for alpha chain variable domain of TCR clone 313382 (TRAV1-2, TRAJ20)
CAVRDGNDYKLSF

SEQ ID NO: 626764 - protein, 16 aa, Homo sapiens
  CDR3 for beta chain variable domain of TCR clone 313382 (TRBV27, TRBJ2-7)
CASSSERRDSAYEQYF

SEQ ID NO: 626765 - protein, 16 aa, Homo sapiens
  CDR3 for alpha chain variable domain of TCR clone 313383 (TRAV12-2, TRAJ18)
CAVTTDRGSTLGRLYF

SEQ ID NO: 626766 - protein, 13 aa, Homo sapiens
  CDR3 for beta chain variable domain of TCR clone 313383 (TRBV10-3, TRBJ2-7)
CASKLAVNYEQYF

SEQ ID NO: 626767 - protein, 14 aa, Homo sapiens
  CDR3 for alpha chain variable domain of TCR clone 313384 (TRAV38-1, TRAJ29)
CAFITPSGNTPLVF

SEQ ID NO: 626768 - protein, 14 aa, Homo sapiens
  CDR3 for beta chain variable domain of TCR clone 313384 (TRBV18, TRBJ2-7)
CASSPRGGAYEQYF

SEQ ID NO: 626769 - protein, 11 aa, Homo sapiens
  CDR3 for alpha chain variable domain of TCR clone 313385 (TRAV3, TRAJ21)
CVVGNFNKFYF

SEQ ID NO: 626770 - protein, 15 aa, Homo sapiens
  CDR3 for beta chain variable domain of TCR clone 313385 (TRBV6-3, TRBJ2-7)
CASSSPGTVFYEQYF

SEQ ID NO: 626771 - protein, 13 aa, Homo sapiens
  CDR3 for alpha chain variable domain of TCR clone 313386 (TRAV21, TRAJ27)
CAARPGNAGKSPF

SEQ ID NO: 626772 - protein, 13 aa, Homo sapiens
  CDR3 for beta chain variable domain of TCR clone 313386 (TRBV13, TRBJ2-1)
CASILGVRGEQFF

SEQ ID NO: 626773 - protein, 12 aa, Homo sapiens
  CDR3 for alpha chain variable domain of TCR clone 313387 (TRAV12-3, TRAJ17)
CAMTLTGNKLTF

SEQ ID NO: 626774 - protein, 13 aa, Homo sapiens
  CDR3 for beta chain variable domain of TCR clone 313387 (TRBV5-1, TRBJ1-2)
CASSSTGVYGYTF

SEQ ID NO: 626775 - protein, 23 aa, Homo sapiens
  CDR3 for alpha chain variable domain of TCR clone 313388 (TRAV1-2, TRAJ8)
CAVREDTGFQKLVLELAPDFWSV

SEQ ID NO: 626776 - protein, 14 aa, Homo sapiens
  CDR3 for beta chain variable domain of TCR clone 313388 (TRBV5-4, TRBJ1-1)
CASSLDSRRDEAFF

SEQ ID NO: 626777 - protein, 14 aa, Homo sapiens
  CDR3 for alpha chain variable domain of TCR clone 313389 (TRAV13-1, TRAJ16)
CAAAYFFRWPEAAL

SEQ ID NO: 626778 - protein, 17 aa, Homo sapiens
  CDR3 for beta chain variable domain of TCR clone 313389 (TRBV7-9, TRBJ2-3)
CASSPTVAGDLTDTQYF

SEQ ID NO: 626779 - protein, 13 aa, Homo sapiens
  CDR3 for alpha chain variable domain of TCR clone 313390 (TRAV12-1, TRAJ34)
CVVTGYNTDKLIF

SEQ ID NO: 626780 - protein, 18 aa, Homo sapiens
  CDR3 for beta chain variable domain of TCR clone 313390 (TRBV6-6, TRBJ1-3)
CASSYSKWDSISGNTIYF

SEQ ID NO: 626781 - protein, 16 aa, Homo sapiens
  CDR3 for alpha chain variable domain of TCR clone 313391 (TRAV35, TRAJ28)
CAGQRYSGAASYQLTF

SEQ ID NO: 626782 - protein, 14 aa, Homo sapiens
  CDR3 for beta chain variable domain of TCR clone 313391 (TRBV18, TRBJ2-7)
CASSPRGGAYEQYF

SEQ ID NO: 626783 - protein, 12 aa, Homo sapiens
  CDR3 for alpha chain variable domain of TCR clone 313392 (TRAV12-3, TRAJ17)
CAMTLTGNKLTF

SEQ ID NO: 626784 - protein, 14 aa, Homo sapiens
  CDR3 for beta chain variable domain of TCR clone 313392 (TRBV3-1, TRBJ2-5)
CASSQAVRQETQYF

SEQ ID NO: 626785 - protein, 14 aa, Homo sapiens
  CDR3 for alpha chain variable domain of TCR clone 313393 (TRAV12-2, TRAJ13)
CAVNPYGGYQKVTF

SEQ ID NO: 626786 - protein, 13 aa, Homo sapiens
  CDR3 for beta chain variable domain of TCR clone 313393 (TRBV20-1, TRBJ1-6)
CSAKLGGTSPLHF

SEQ ID NO: 626787 - protein, 17 aa, Homo sapiens
  CDR3 for alpha chain variable domain of TCR clone 313394 (TRAV3, TRAJ6)
CAVRGGPRAGGSYIPTF

SEQ ID NO: 626788 - protein, 14 aa, Homo sapiens
  CDR3 for beta chain variable domain of TCR clone 313394 (TRBV7-2, TRBJ2-7)
CASSPKTSFYEQCS

SEQ ID NO: 626789 - protein, 15 aa, Homo sapiens
  CDR3 for alpha chain variable domain of TCR clone 313395 (TRAV23/DV6, TRAJ45)
CAASARGGGADGLTF

SEQ ID NO: 626790 - protein, 15 aa, Homo sapiens
  CDR3 for beta chain variable domain of TCR clone 313395 (TRBV5-1, TRBJ2-5)
CASSSGREMVETQYL

SEQ ID NO: 626791 - protein, 12 aa, Homo sapiens
  CDR3 for alpha chain variable domain of TCR clone 313396 (TRAV12-3, TRAJ17)
CAMTLTGNKLTF

SEQ ID NO: 626792 - protein, 15 aa, Homo sapiens
  CDR3 for beta chain variable domain of TCR clone 313396 (TRBV6-3, TRBJ2-2)
CASSFLATLTGELSF

SEQ ID NO: 626793 - protein, 14 aa, Homo sapiens
  CDR3 for alpha chain variable domain of TCR clone 313397 (TRAV12-2, TRAJ13)
CAVKKTGGYQKVTF

SEQ ID NO: 626794 - protein, 14 aa, Homo sapiens
  CDR3 for beta chain variable domain of TCR clone 313397 (TRBV19, TRBJ2-3)
CASSIDLGGDTQYF

SEQ ID NO: 626795 - protein, 16 aa, Homo sapiens
  CDR3 for alpha chain variable domain of TCR clone 313398 (TRAV12-2, TRAJ13)
CAVKKTGGYQKVTLEL

SEQ ID NO: 626796 - protein, 15 aa, Homo sapiens
  CDR3 for beta chain variable domain of TCR clone 313398 (TRBV7-2, TRBJ2-1)
CASSLASGRVNEQFF

SEQ ID NO: 626797 - protein, 13 aa, Homo sapiens
  CDR3 for alpha chain variable domain of TCR clone 313399 (TRAV39, TRAJ58)
CAGEETSGPRLTS

SEQ ID NO: 626798 - protein, 13 aa, Homo sapiens
  CDR3 for beta chain variable domain of TCR clone 313399 (TRBV15, TRBJ2-7)
CATSTTGHYEQYF

SEQ ID NO: 626799 - protein, 12 aa, Homo sapiens
  CDR3 for alpha chain variable domain of TCR clone 313400 (TRAV8-3, TRAJ34)
CAVLTNTDKLIF

SEQ ID NO: 626800 - protein, 14 aa, Homo sapiens
  CDR3 for beta chain variable domain of TCR clone 313400 (TRBV27, TRBJ2-7)
RASSLARGHYEQYF

SEQ ID NO: 626801 - protein, 14 aa, Homo sapiens
  CDR3 for alpha chain variable domain of TCR clone 313401 (TRAV17, TRAJ34)
CATDEGYNTDKLIF

SEQ ID NO: 626802 - protein, 16 aa, Homo sapiens
  CDR3 for beta chain variable domain of TCR clone 313401 (TRBV4-1, TRBJ1-4)
CASSQDLRRGGEKLFC

SEQ ID NO: 626803 - protein, 17 aa, Homo sapiens
  CDR3 for alpha chain variable domain of TCR clone 313402 (TRAV23/DV6, TRAJ53)
CAASKLGSGGSNYKLTF

SEQ ID NO: 626804 - protein, 14 aa, Homo sapiens
  CDR3 for beta chain variable domain of TCR clone 313402 (TRBV7-9, TRBJ2-3)
CASSLEQGTNTQYV

SEQ ID NO: 626805 - protein, 12 aa, Homo sapiens
  CDR3 for alpha chain variable domain of TCR clone 313403 (TRAV13-2, TRAJ8)
CAPWLGFQKLVF

SEQ ID NO: 626806 - protein, 13 aa, Homo sapiens
  CDR3 for beta chain variable domain of TCR clone 313403 (TRBV12-4, TRBJ1-5)
CASSPDSAQPQHF

SEQ ID NO: 626807 - protein, 15 aa, Homo sapiens
  CDR3 for alpha chain variable domain of TCR clone 313404 (TRAV8-3, TRAJ32)
CAVGPDGGATNKLIF

SEQ ID NO: 626808 - protein, 14 aa, Homo sapiens
  CDR3 for beta chain variable domain of TCR clone 313404 (TRBV29-1, TRBJ2-2)
CSVLAETNTGELFF

SEQ ID NO: 626809 - protein, 15 aa, Homo sapiens
  CDR3 for alpha chain variable domain of TCR clone 313405 (TRAV12-1, TRAJ44)
CVADLPTGTASKLTF

SEQ ID NO: 626810 - protein, 15 aa, Homo sapiens
  CDR3 for beta chain variable domain of TCR clone 313405 (TRBV3-1, TRBJ2-7)
CASSQDAGRTYEQYF

SEQ ID NO: 626811 - protein, 13 aa, Homo sapiens
  CDR3 for alpha chain variable domain of TCR clone 313406 (TRAV12-1, TRAJ9)
CVVLNTGGFKTIF

SEQ ID NO: 626812 - protein, 13 aa, Homo sapiens
  CDR3 for beta chain variable domain of TCR clone 313406 (TRBV12-4, TRBJ1-1)
CASSPGTGFEAFF

SEQ ID NO: 626813 - protein, 11 aa, Homo sapiens
  CDR3 for alpha chain variable domain of TCR clone 313407 (TRAV1-1, TRAJ23)
CAVRQGGKLIF

SEQ ID NO: 626814 - protein, 17 aa, Homo sapiens
  CDR3 for beta chain variable domain of TCR clone 313407 (TRBV7-6, TRBJ2-5)
CASSSPQAGDPSETQYF

SEQ ID NO: 626815 - protein, 13 aa, Homo sapiens
  CDR3 for alpha chain variable domain of TCR clone 313408 (TRAV12-2, TRAJ18)
CAVRGSTLGRLYF

SEQ ID NO: 626816 - protein, 12 aa, Homo sapiens
  CDR3 for beta chain variable domain of TCR clone 313408 (TRBV11-2, TRBJ2-7)
CASSLPTYEQYF

SEQ ID NO: 626817 - protein, 11 aa, Homo sapiens
  CDR3 for alpha chain variable domain of TCR clone 313409 (TRAV13-1, TRAJ20)
CAASNDYKLSF

SEQ ID NO: 626818 - protein, 15 aa, Homo sapiens
  CDR3 for beta chain variable domain of TCR clone 313409 (TRBV6-3, TRBJ2-7)
CASSSPGIVFYEQYF

SEQ ID NO: 626819 - protein, 14 aa, Homo sapiens
  CDR3 for alpha chain variable domain of TCR clone 313410 (TRAV2, TRAJ26)
CAVARDNYGQNFVF

SEQ ID NO: 626820 - protein, 15 aa, Homo sapiens
  CDR3 for beta chain variable domain of TCR clone 313410 (TRBV28, TRBJ2-4)
CASRAPLLAKNIQYF

SEQ ID NO: 626821 - protein, 11 aa, Homo sapiens
  CDR3 for alpha chain variable domain of TCR clone 313411 (TRAV2, TRAJ13)
CASGGYQKVTF

SEQ ID NO: 626822 - protein, 18 aa, Homo sapiens
  CDR3 for beta chain variable domain of TCR clone 313411 (TRBV20-1, TRBJ2-6)
CSAETTLTHGSGANVLTF

SEQ ID NO: 626823 - protein, 16 aa, Homo sapiens
  CDR3 for alpha chain variable domain of TCR clone 313412 (TRAV27, TRAJ52)
CAGAGAGGTSYGKLTF

SEQ ID NO: 626824 - protein, 17 aa, Homo sapiens
  CDR3 for beta chain variable domain of TCR clone 313412 (TRBV24-1, TRBJ2-3)
CATSDLPSGEDTDTQYV

SEQ ID NO: 626825 - protein, 12 aa, Homo sapiens
  CDR3 for alpha chain variable domain of TCR clone 313413 (TRAV2, TRAJ31)
CAVEDNNARLML

SEQ ID NO: 626826 - protein, 13 aa, Homo sapiens
  CDR3 for beta chain variable domain of TCR clone 313413 (TRBV19, TRBJ2-7)
CASSIDRTYEQYF

SEQ ID NO: 626827 - protein, 14 aa, Homo sapiens
  CDR3 for alpha chain variable domain of TCR clone 313414 (TRAV1-2, TRAJ16)
CAVNRFSDGQKLLF

SEQ ID NO: 626828 - protein, 17 aa, Homo sapiens
  CDR3 for beta chain variable domain of TCR clone 313414 (TRBV7-7, TRBJ2-3)
CASSLGGGITSTDTQYF

SEQ ID NO: 626829 - protein, 15 aa, Homo sapiens
  CDR3 for alpha chain variable domain of TCR clone 313415 (TRAV3, TRAJ3)
CAVRDMSSSASKIIF

SEQ ID NO: 626830 - protein, 14 aa, Homo sapiens
  CDR3 for beta chain variable domain of TCR clone 313415 (TRBV7-2, TRBJ2-5)
CASSPRGSSETQYF

SEQ ID NO: 626831 - protein, 12 aa, Homo sapiens
  CDR3 for alpha chain variable domain of TCR clone 313416 (TRAV9-2, TRAJ36)
CALKKGANNLFF

SEQ ID NO: 626832 - protein, 16 aa, Homo sapiens
  CDR3 for beta chain variable domain of TCR clone 313416 (TRBV20-1, TRBJ1-4)
CSAPGQGLVTNEKLFF

SEQ ID NO: 626833 - protein, 16 aa, Homo sapiens
  CDR3 for alpha chain variable domain of TCR clone 313417 (TRAV30, TRAJ24)
CGTEIVDADSWGKFQF

SEQ ID NO: 626834 - protein, 16 aa, Homo sapiens
  CDR3 for beta chain variable domain of TCR clone 313417 (TRBV5-1, TRBJ2-7)
CASSLVAGGPSGEQYF

SEQ ID NO: 626835 - protein, 16 aa, Homo sapiens
  CDR3 for alpha chain variable domain of TCR clone 313418 (TRAV30, TRAJ24)
CGTEILDADSWGKFQL

SEQ ID NO: 626836 - protein, 14 aa, Homo sapiens
  CDR3 for beta chain variable domain of TCR clone 313418 (TRBV12-5, TRBJ2-5)
CASGSRTHQETQYF

SEQ ID NO: 626837 - protein, 15 aa, Homo sapiens
  CDR3 for alpha chain variable domain of TCR clone 313419 (TRAV30, TRAJ32)
CGTEILGGATNKLIF

SEQ ID NO: 626838 - protein, 17 aa, Homo sapiens
  CDR3 for beta chain variable domain of TCR clone 313419 (TRBV5-4, TRBJ2-1)
CASSSAGGRGPYNVQFF

SEQ ID NO: 626839 - protein, 15 aa, Homo sapiens
  CDR3 for alpha chain variable domain of TCR clone 313420 (TRAV13-1, TRAJ3)
CAASKLASSASKRIF

SEQ ID NO: 626840 - protein, 16 aa, Homo sapiens
  CDR3 for beta chain variable domain of TCR clone 313420 (TRBV25-1, TRBJ1-5)
CASGAPTVNSNQPQHF

SEQ ID NO: 626841 - protein, 16 aa, Homo sapiens
  CDR3 for alpha chain variable domain of TCR clone 313421 (TRAV8-4, TRAJ5)
CAVSPLTDTGRRALTF

SEQ ID NO: 626842 - protein, 14 aa, Homo sapiens
  CDR3 for beta chain variable domain of TCR clone 313421 (TRBV19, TRBJ1-6)
CASSTDGWNSPLHC

SEQ ID NO: 626843 - protein, 13 aa, Homo sapiens
  CDR3 for alpha chain variable domain of TCR clone 313422 (TRAV26-1, TRAJ48)
CIVRVVGDEKLTF

SEQ ID NO: 626844 - protein, 19 aa, Homo sapiens
  CDR3 for beta chain variable domain of TCR clone 313422 (TRBV11-3, TRBJ2-2)
CASSTRPVAKTTNTGELFF

SEQ ID NO: 626845 - protein, 14 aa, Homo sapiens
  CDR3 for alpha chain variable domain of TCR clone 313423 (TRAV13-2, TRAJ32)
CAENYGGATNKLIF

SEQ ID NO: 626846 - protein, 15 aa, Homo sapiens
  CDR3 for beta chain variable domain of TCR clone 313423 (TRBV12-4, TRBJ2-5)
CASTLNSGRGETQYV

SEQ ID NO: 626847 - protein, 14 aa, Homo sapiens
  CDR3 for alpha chain variable domain of TCR clone 313424 (TRAV16, TRAJ33)
CALSAMDSNYELIW

SEQ ID NO: 626848 - protein, 16 aa, Homo sapiens
  CDR3 for beta chain variable domain of TCR clone 313424 (TRBV12-4, TRBJ2-3)
CASSFPSNTNTDTQYF

SEQ ID NO: 626849 - protein, 14 aa, Homo sapiens
  CDR3 for alpha chain variable domain of TCR clone 313425 (TRAV16, TRAJ3)
CALSQYSSASKIIF

SEQ ID NO: 626850 - protein, 14 aa, Homo sapiens
  CDR3 for beta chain variable domain of TCR clone 313425 (TRBV7-2, TRBJ2-2)
CASRGQGAAGELFF

SEQ ID NO: 626851 - protein, 14 aa, Homo sapiens
  CDR3 for alpha chain variable domain of TCR clone 313426 (TRAV1-2, TRAJ8)
CAVREDTGFQKLVV

SEQ ID NO: 626852 - protein, 16 aa, Homo sapiens
  CDR3 for beta chain variable domain of TCR clone 313426 (TRBV4-1, TRBJ1-4)
CASSQDLRRGGEKLFF

SEQ ID NO: 626853 - protein, 16 aa, Homo sapiens
  CDR3 for alpha chain variable domain of TCR clone 313427 (TRAV3, TRAJ10)
CAVRDMSAGGGNKLTF

SEQ ID NO: 626854 - protein, 15 aa, Homo sapiens
  CDR3 for beta chain variable domain of TCR clone 313427 (TRBV6-3, TRBJ2-7)
CASSSPGTVFYEQYF

SEQ ID NO: 626855 - protein, 14 aa, Homo sapiens
  CDR3 for alpha chain variable domain of TCR clone 313428 (TRAV8-4, TRAJ9)
CAVRINTGGFKTSV

SEQ ID NO: 626856 - protein, 14 aa, Homo sapiens
  CDR3 for beta chain variable domain of TCR clone 313428 (TRBV5-1, TRBJ1-1)
CASSLQGASTEAFF

SEQ ID NO: 626857 - protein, 16 aa, Homo sapiens
  CDR3 for alpha chain variable domain of TCR clone 313429 (TRAV4, TRAJ42)
CLVGPIYGGSQGNLIF

SEQ ID NO: 626858 - protein, 16 aa, Homo sapiens
  CDR3 for beta chain variable domain of TCR clone 313429 (TRBV2, TRBJ1-3)
CASSRTGGSTGNTIYF

SEQ ID NO: 626859 - protein, 14 aa, Homo sapiens
  CDR3 for alpha chain variable domain of TCR clone 313430 (TRAV2, TRAJ9)
CAVEDRSGGFKTIF

SEQ ID NO: 626860 - protein, 19 aa, Homo sapiens
  CDR3 for beta chain variable domain of TCR clone 313430 (TRBV25-1, TRBJ2-2)
WAILVYRVDRGRKTGELFF

SEQ ID NO: 626861 - protein, 14 aa, Homo sapiens
  CDR3 for alpha chain variable domain of TCR clone 313431 (TRAV2, TRAJ41)
CAVGTSNSGYALNF

SEQ ID NO: 626862 - protein, 13 aa, Homo sapiens
  CDR3 for beta chain variable domain of TCR clone 313431 (TRBV4-1, TRBJ2-1)
CASSQEAQYEQFF

SEQ ID NO: 626863 - protein, 13 aa, Homo sapiens
  CDR3 for alpha chain variable domain of TCR clone 313432 (TRAV12-3, TRAJ33)
CAMSVNSNYQLIW

SEQ ID NO: 626864 - protein, 17 aa, Homo sapiens
  CDR3 for beta chain variable domain of TCR clone 313432 (TRBV7-3, TRBJ2-3)
RASSLMKRMRGADTQYF

SEQ ID NO: 626865 - protein, 14 aa, Homo sapiens
  CDR3 for alpha chain variable domain of TCR clone 313433 (TRAV26-1, TRAJ11)
CIVPLYSGYSTLTF

SEQ ID NO: 626866 - protein, 13 aa, Homo sapiens
  CDR3 for beta chain variable domain of TCR clone 313433 (TRBV7-9, TRBJ1-2)
CASSLKQNYGYTF

SEQ ID NO: 626867 - protein, 12 aa, Homo sapiens
  CDR3 for alpha chain variable domain of TCR clone 313434 (TRAV38-1, TRAJ32)
CAPLGATNKLIF

SEQ ID NO: 626868 - protein, 14 aa, Homo sapiens
  CDR3 for beta chain variable domain of TCR clone 313434 (TRBV29-1, TRBJ2-5)
CIVETSGSGETQYF

SEQ ID NO: 626869 - protein, 15 aa, Homo sapiens
  CDR3 for alpha chain variable domain of TCR clone 313435 (TRAV12-3, TRAJ6)
RAMSPASGGSYIPTF

SEQ ID NO: 626870 - protein, 14 aa, Homo sapiens
  CDR3 for beta chain variable domain of TCR clone 313435 (TRBV20-1, TRBJ1-1)
CSAQTRIGGTEASF

SEQ ID NO: 626871 - protein, 14 aa, Homo sapiens
  CDR3 for alpha chain variable domain of TCR clone 313436 (TRAV14/DV4, TRAJ41)
CARGGPDSGYVLNF

SEQ ID NO: 626872 - protein, 15 aa, Homo sapiens
  CDR3 for beta chain variable domain of TCR clone 313436 (TRBV19, TRBJ2-1)
CASSIQATSYNEQFF

SEQ ID NO: 626873 - protein, 12 aa, Homo sapiens
  CDR3 for alpha chain variable domain of TCR clone 313437 (TRAV27, TRAJ35)
CAGADFGNVLHC

SEQ ID NO: 626874 - protein, 10 aa, Homo sapiens
  CDR3 for beta chain variable domain of TCR clone 313437 (TRBV7-9, TRBJ1-1)
CASSFTEAFF

SEQ ID NO: 626875 - protein, 13 aa, Homo sapiens
  CDR3 for alpha chain variable domain of TCR clone 313438 (TRAV12-2, TRAJ42)
CAVKRGSQGNPIF

SEQ ID NO: 626876 - protein, 12 aa, Homo sapiens
  CDR3 for beta chain variable domain of TCR clone 313438 (TRBV5-7, TRBJ1-2)
CASSLVQNGYAF

SEQ ID NO: 626877 - protein, 23 aa, Homo sapiens
  CDR3 for alpha chain variable domain of TCR clone 313439 (TRAV8-6, TRAJ38)
CAVRNAGNNHIQNPDPDVYQLRD

SEQ ID NO: 626878 - protein, 15 aa, Homo sapiens
  CDR3 for beta chain variable domain of TCR clone 313439 (TRBV4-1, TRBJ2-2)
CASSEGQGITGELFF

SEQ ID NO: 626879 - protein, 14 aa, Homo sapiens
  CDR3 for alpha chain variable domain of TCR clone 313440 (TRAV12-3, TRAJ57)
CARALEGGSEKLVF

SEQ ID NO: 626880 - protein, 17 aa, Homo sapiens
  CDR3 for beta chain variable domain of TCR clone 313440 (TRBV11-3, TRBJ2-3)
CASSLGRTGGGTDTQYF

SEQ ID NO: 626881 - protein, 14 aa, Homo sapiens
  CDR3 for alpha chain variable domain of TCR clone 313441 (TRAV3, TRAJ21)
CAVESQANSNKFYF

SEQ ID NO: 626882 - protein, 13 aa, Homo sapiens
  CDR3 for beta chain variable domain of TCR clone 313441 (TRBV12-4, TRBJ1-2)
CASSLRQGKGYTF

SEQ ID NO: 626883 - protein, 11 aa, Homo sapiens
  CDR3 for alpha chain variable domain of TCR clone 313442 (TRAV2, TRAJ13)
CASGGYQKVPF

SEQ ID NO: 626884 - protein, 16 aa, Homo sapiens
  CDR3 for beta chain variable domain of TCR clone 313442 (TRBV6-1, TRBJ2-5)
CASSETLDRGAETQYF

SEQ ID NO: 626885 - protein, 14 aa, Homo sapiens
  CDR3 for alpha chain variable domain of TCR clone 313443 (TRAV13-2, TRAJ43)
CAEIPTYNNNEMRF

SEQ ID NO: 626886 - protein, 14 aa, Homo sapiens
  CDR3 for beta chain variable domain of TCR clone 313443 (TRBV7-2, TRBJ2-7)
CASSSISGFSEQYF

SEQ ID NO: 626887 - protein, 14 aa, Homo sapiens
  CDR3 for alpha chain variable domain of TCR clone 313444 (TRAV1-2, TRAJ29)
CAVRELTSATPLVF

SEQ ID NO: 626888 - protein, 14 aa, Homo sapiens
  CDR3 for beta chain variable domain of TCR clone 313444 (TRBV12-4, TRBJ1-3)
CASTLTGAGNTIYF

SEQ ID NO: 626889 - protein, 13 aa, Homo sapiens
  CDR3 for alpha chain variable domain of TCR clone 313445 (TRAV13-1, TRAJ37)
CAAVSGNTGKLIF

SEQ ID NO: 626890 - protein, 17 aa, Homo sapiens
  CDR3 for beta chain variable domain of TCR clone 313445 (TRBV10-2, TRBJ1-6)
CASSENRGSSYNSPLHI

SEQ ID NO: 626891 - protein, 17 aa, Homo sapiens
  CDR3 for alpha chain variable domain of TCR clone 313446 (TRAV12-3, TRAJ57)
CAASSTLSQGGSEKLVF

SEQ ID NO: 626892 - protein, 14 aa, Homo sapiens
  CDR3 for beta chain variable domain of TCR clone 313446 (TRBV25-1, TRBJ1-1)
CASTHLGGNTEAFF

SEQ ID NO: 626893 - protein, 12 aa, Homo sapiens
  CDR3 for alpha chain variable domain of TCR clone 313447 (TRAV21, TRAJ11)
CAATSGYSTLTF

SEQ ID NO: 626894 - protein, 14 aa, Homo sapiens
  CDR3 for beta chain variable domain of TCR clone 313447 (TRBV7-6, TRBJ2-3)
CASSLGTVTDTQYF

SEQ ID NO: 626895 - protein, 11 aa, Homo sapiens
  CDR3 for alpha chain variable domain of TCR clone 313448 (TRAV1-1, TRAJ23)
CAVRQGGKLIC

SEQ ID NO: 626896 - protein, 14 aa, Homo sapiens
  CDR3 for beta chain variable domain of TCR clone 313448 (TRBV19, TRBJ2-1)
CASPTFVLSGEQFF

SEQ ID NO: 626897 - protein, 12 aa, Homo sapiens
  CDR3 for alpha chain variable domain of TCR clone 313449 (TRAV12-3, TRAJ17)
CAMTLTGNKLTF

SEQ ID NO: 626898 - protein, 16 aa, Homo sapiens
  CDR3 for beta chain variable domain of TCR clone 313449 (TRBV18, TRBJ2-2)
CASSPPRTANTGELFF

SEQ ID NO: 626899 - protein, 14 aa, Homo sapiens
  CDR3 for alpha chain variable domain of TCR clone 313450 (TRAV27, TRAJ37)
CRSQGSSNTGKLIF

SEQ ID NO: 626900 - protein, 15 aa, Homo sapiens
  CDR3 for beta chain variable domain of TCR clone 313450 (TRBV10-2, TRBJ2-6)
CASSEQGTGANVLTF

SEQ ID NO: 626901 - protein, 15 aa, Homo sapiens
  CDR3 for alpha chain variable domain of TCR clone 313451 (TRAV27, TRAJ38)
CAARRNAGNNRQLIW

SEQ ID NO: 626902 - protein, 16 aa, Homo sapiens
  CDR3 for beta chain variable domain of TCR clone 313451 (TRBV6-1, TRBJ1-2)
CASSEANSIINYGYTF

SEQ ID NO: 626903 - protein, 15 aa, Homo sapiens
  CDR3 for alpha chain variable domain of TCR clone 313452 (TRAV34, TRAJ38)
CGADFTPGTNRKLIW

SEQ ID NO: 626904 - protein, 15 aa, Homo sapiens
  CDR3 for beta chain variable domain of TCR clone 313452 (TRBV11-3, TRBJ2-3)
CASLKDGREGDTQYF

SEQ ID NO: 626905 - protein, 19 aa, Homo sapiens
  CDR3 for alpha chain variable domain of TCR clone 313453 (TRAV1-2, TRAJ18)
CLLPLCCERRGSTLGRLSF

SEQ ID NO: 626906 - protein, 16 aa, Homo sapiens
  CDR3 for beta chain variable domain of TCR clone 313453 (TRBV12-4, TRBJ1-5)
CASSRPVGGSNQPQHF

SEQ ID NO: 626907 - protein, 14 aa, Homo sapiens
  CDR3 for alpha chain variable domain of TCR clone 313454 (TRAV2, TRAJ9)
CAVEDRSGGFQTIL

SEQ ID NO: 626908 - protein, 18 aa, Homo sapiens
  CDR3 for beta chain variable domain of TCR clone 313454 (TRBV20-1, TRBJ2-5)
CSQTGDSRRLGGKETQYF

SEQ ID NO: 626909 - protein, 14 aa, Homo sapiens
  CDR3 for alpha chain variable domain of TCR clone 313455 (TRAV26-1, TRAJ44)
CIVRPTGTASKLTF

SEQ ID NO: 626910 - protein, 12 aa, Homo sapiens
  CDR3 for beta chain variable domain of TCR clone 313455 (TRBV11-3, TRBJ1-1)
CAGSLRDSEAFF

SEQ ID NO: 626911 - protein, 13 aa, Homo sapiens
  CDR3 for alpha chain variable domain of TCR clone 313456 (TRAV27, TRAJ40)
CAGPPSGTYKYIF

SEQ ID NO: 626912 - protein, 14 aa, Homo sapiens
  CDR3 for beta chain variable domain of TCR clone 313456 (TRBV12-4, TRBJ2-5)
CASSLWQKQETQYF

SEQ ID NO: 626913 - protein, 12 aa, Homo sapiens
  CDR3 for alpha chain variable domain of TCR clone 313457 (TRAV13-2, TRAJ23)
CAERHRGGKLIF

SEQ ID NO: 626914 - protein, 15 aa, Homo sapiens
  CDR3 for beta chain variable domain of TCR clone 313457 (TRBV7-3, TRBJ2-1)
CASSQRGGALIEQFF

SEQ ID NO: 626915 - protein, 15 aa, Homo sapiens
  CDR3 for alpha chain variable domain of TCR clone 313458 (TRAV12-1, TRAJ9)
CVVSFGDTGGFKTIF

SEQ ID NO: 626916 - protein, 13 aa, Homo sapiens
  CDR3 for beta chain variable domain of TCR clone 313458 (TRBV2, TRBJ1-4)
CASIERAGEKLFF

SEQ ID NO: 626917 - protein, 14 aa, Homo sapiens
  CDR3 for alpha chain variable domain of TCR clone 313459 (TRAV23/DV6, TRAJ4)
CAANLSGGYNKLIF

SEQ ID NO: 626918 - protein, 17 aa, Homo sapiens
  CDR3 for beta chain variable domain of TCR clone 313459 (TRBV4-1, TRBJ1-3)
CASSPPRGIRFGNTIYF

SEQ ID NO: 626919 - protein, 12 aa, Homo sapiens
  CDR3 for alpha chain variable domain of TCR clone 313460 (TRAV13-1, TRAJ9)
CASHTGGFKTIF

SEQ ID NO: 626920 - protein, 16 aa, Homo sapiens
  CDR3 for beta chain variable domain of TCR clone 313460 (TRBV7-3, TRBJ2-2)
CASSLKRGTLSGELFF

SEQ ID NO: 626921 - protein, 15 aa, Homo sapiens
  CDR3 for alpha chain variable domain of TCR clone 313461 (TRAV20, TRAJ43)
CAVQAGKSSNNDMRF

SEQ ID NO: 626922 - protein, 14 aa, Homo sapiens
  CDR3 for beta chain variable domain of TCR clone 313461 (TRBV7-2, TRBJ2-5)
CASSPRGSSETQYF

SEQ ID NO: 626923 - protein, 20 aa, Homo sapiens
  CDR3 for alpha chain variable domain of TCR clone 313462 (TRAV26-1, TRAJ38)
CIADNAGNNHIQNPDPAVYQ

SEQ ID NO: 626924 - protein, 13 aa, Homo sapiens
  CDR3 for beta chain variable domain of TCR clone 313462 (TRBV20-1, TRBJ2-1)
CSARSSPRDEQFF

SEQ ID NO: 626925 - protein, 16 aa, Homo sapiens
  CDR3 for alpha chain variable domain of TCR clone 313463 (TRAV12-3, TRAJ52)
CAMGVLVVLAMESLHL

SEQ ID NO: 626926 - protein, 13 aa, Homo sapiens
  CDR3 for beta chain variable domain of TCR clone 313463 (TRBV20-1, TRBJ2-5)
CSARGDYQETQYF

SEQ ID NO: 626927 - protein, 12 aa, Homo sapiens
  CDR3 for alpha chain variable domain of TCR clone 313464 (TRAV13-2, TRAJ8)
CAPWLGFQQLVF

SEQ ID NO: 626928 - protein, 14 aa, Homo sapiens
  CDR3 for beta chain variable domain of TCR clone 313464 (TRBV18, TRBJ1-5)
CASSRQQRNQPQHF

SEQ ID NO: 626929 - protein, 13 aa, Homo sapiens
  CDR3 for alpha chain variable domain of TCR clone 313465 (TRAV3, TRAJ27)
CAVRPLGAGKSTF

SEQ ID NO: 626930 - protein, 14 aa, Homo sapiens
  CDR3 for beta chain variable domain of TCR clone 313465 (TRBV13, TRBJ2-7)
CASSLKGASYEQYF

SEQ ID NO: 626931 - protein, 16 aa, Homo sapiens
  CDR3 for alpha chain variable domain of TCR clone 313466 (TRAV24, TRAJ53)
CAFNMGGGGSNYKLTF

SEQ ID NO: 626932 - protein, 15 aa, Homo sapiens
  CDR3 for beta chain variable domain of TCR clone 313466 (TRBV20-1, TRBJ2-7)
CSAESGTSGAYEQYF

SEQ ID NO: 626933 - protein, 16 aa, Homo sapiens
  CDR3 for alpha chain variable domain of TCR clone 313467 (TRAV12-3, TRAJ53)
CAMSPGSGGSNYKLTF

SEQ ID NO: 626934 - protein, 15 aa, Homo sapiens
  CDR3 for beta chain variable domain of TCR clone 313467 (TRBV18, TRBJ2-7)
CASSPSSTGNYEQCF

SEQ ID NO: 626935 - protein, 15 aa, Homo sapiens
  CDR3 for alpha chain variable domain of TCR clone 313468 (TRAV25, TRAJ52)
CAGRPGGTRYGKLTF

SEQ ID NO: 626936 - protein, 16 aa, Homo sapiens
  CDR3 for beta chain variable domain of TCR clone 313468 (TRBV12-4, TRBJ1-5)
CASSSGPRGSNQPQHF

SEQ ID NO: 626937 - protein, 14 aa, Homo sapiens
  CDR3 for alpha chain variable domain of TCR clone 313469 (TRAV12-2, TRAJ17)
CAVLFKSAGNKLTF

SEQ ID NO: 626938 - protein, 12 aa, Homo sapiens
  CDR3 for beta chain variable domain of TCR clone 313469 (TRBV11-2, TRBJ2-2)
CASSLGGGELFF

SEQ ID NO: 626939 - protein, 14 aa, Homo sapiens
  CDR3 for alpha chain variable domain of TCR clone 313470 (TRAV27, TRAJ36)
CAGPPKKGANNLFF

SEQ ID NO: 626940 - protein, 15 aa, Homo sapiens
  CDR3 for beta chain variable domain of TCR clone 313470 (TRBV18, TRBJ2-7)
CASSPASTPNYEQYF

SEQ ID NO: 626941 - protein, 12 aa, Homo sapiens
  CDR3 for alpha chain variable domain of TCR clone 313471 (TRAV21, TRAJ49)
CALNDGGNQFYF

SEQ ID NO: 626942 - protein, 14 aa, Homo sapiens
  CDR3 for beta chain variable domain of TCR clone 313471 (TRBV18, TRBJ2-7)
CASSPRGGSYEQYF

SEQ ID NO: 626943 - protein, 13 aa, Homo sapiens
  CDR3 for alpha chain variable domain of TCR clone 313472 (TRAV34, TRAJ22)
CGAGAGSARQLTF

SEQ ID NO: 626944 - protein, 16 aa, Homo sapiens
  CDR3 for beta chain variable domain of TCR clone 313472 (TRBV7-3, TRBJ2-1)
CASSKPLAGGYNEQFL

SEQ ID NO: 626945 - protein, 18 aa, Homo sapiens
  CDR3 for alpha chain variable domain of TCR clone 313473 (TRAV21, TRAJ52)
CAVRPSPAGGTRYGKRTF

SEQ ID NO: 626946 - protein, 16 aa, Homo sapiens
  CDR3 for beta chain variable domain of TCR clone 313473 (TRBV7-3, TRBJ2-1)
CASSLEGYRSYNEQFF

SEQ ID NO: 626947 - protein, 15 aa, Homo sapiens
  CDR3 for alpha chain variable domain of TCR clone 313474 (TRAV1-2, TRAJ15)
CAVDVMGSAGTALIF

SEQ ID NO: 626948 - protein, 13 aa, Homo sapiens
  CDR3 for beta chain variable domain of TCR clone 313474 (TRBV7-9, TRBJ1-2)
CASSLKQNYGYTF

SEQ ID NO: 626949 - protein, 14 aa, Homo sapiens
  CDR3 for alpha chain variable domain of TCR clone 313475 (TRAV1-2, TRAJ8)
CAVREDTGFQKLVF

SEQ ID NO: 626950 - protein, 13 aa, Homo sapiens
  CDR3 for beta chain variable domain of TCR clone 313475 (TRBV4-1, TRBJ2-7)
CASSWTGGYEQYF

SEQ ID NO: 626951 - protein, 15 aa, Homo sapiens
  CDR3 for alpha chain variable domain of TCR clone 313476 (TRAV21, TRAJ53)
CATLDSGGSNYKLTF

SEQ ID NO: 626952 - protein, 16 aa, Homo sapiens
  CDR3 for beta chain variable domain of TCR clone 313476 (TRBV9, TRBJ2-1)
CASSVGGGGNYNEQFC

SEQ ID NO: 626953 - protein, 13 aa, Homo sapiens
  CDR3 for alpha chain variable domain of TCR clone 313477 (TRAV23/DV6, TRAJ22)
CAPYSGSARQLTF

SEQ ID NO: 626954 - protein, 14 aa, Homo sapiens
  CDR3 for beta chain variable domain of TCR clone 313477 (TRBV19, TRBJ2-1)
CASPTFVLSGEQFF

SEQ ID NO: 626955 - protein, 15 aa, Homo sapiens
  CDR3 for alpha chain variable domain of TCR clone 313478 (TRAV8-3, TRAJ28)
CAVGELWGWELPTHF

SEQ ID NO: 626956 - protein, 14 aa, Homo sapiens
  CDR3 for beta chain variable domain of TCR clone 313478 (TRBV7-2, TRBJ2-1)
CASSLGVGYNEQFF

SEQ ID NO: 626957 - protein, 15 aa, Homo sapiens
  CDR3 for alpha chain variable domain of TCR clone 313479 (TRAV26-1, TRAJ3)
CIVRSGYSSASKIIF

SEQ ID NO: 626958 - protein, 14 aa, Homo sapiens
  CDR3 for beta chain variable domain of TCR clone 313479 (TRBV13, TRBJ2-5)
CASYRRLAEETQYV

SEQ ID NO: 626959 - protein, 13 aa, Homo sapiens
  CDR3 for alpha chain variable domain of TCR clone 313480 (TRAV17, TRAJ5)
CAPMATGRRALTF

SEQ ID NO: 626960 - protein, 16 aa, Homo sapiens
  CDR3 for beta chain variable domain of TCR clone 313480 (TRBV27, TRBJ2-7)
CASSSERRDSAYEQYF

SEQ ID NO: 626961 - protein, 17 aa, Homo sapiens
  CDR3 for alpha chain variable domain of TCR clone 313481 (TRAV3, TRAJ6)
CAVRDGPRAGGSYIPTF

SEQ ID NO: 626962 - protein, 13 aa, Homo sapiens
  CDR3 for beta chain variable domain of TCR clone 313481 (TRBV12-4, TRBJ1-2)
CASSPGLTVISTF

SEQ ID NO: 626963 - protein, 13 aa, Homo sapiens
  CDR3 for alpha chain variable domain of TCR clone 313482 (TRAV13-1, TRAJ39)
CSKYSNAGNMLTF

SEQ ID NO: 626964 - protein, 17 aa, Homo sapiens
  CDR3 for beta chain variable domain of TCR clone 313482 (TRBV7-7, TRBJ1-1)
CASIGDRPNLGVTEAFF

SEQ ID NO: 626965 - protein, 13 aa, Homo sapiens
  CDR3 for alpha chain variable domain of TCR clone 313483 (TRAV17, TRAJ39)
CATDSNAGNMLTF

SEQ ID NO: 626966 - protein, 15 aa, Homo sapiens
  CDR3 for beta chain variable domain of TCR clone 313483 (TRBV5-1, TRBJ2-3)
CASSVTSGSTDTQYF

SEQ ID NO: 626967 - protein, 13 aa, Homo sapiens
  CDR3 for alpha chain variable domain of TCR clone 313484 (TRAV39, TRAJ58)
CAGEETRGSRLTF

SEQ ID NO: 626968 - protein, 15 aa, Homo sapiens
  CDR3 for beta chain variable domain of TCR clone 313484 (TRBV4-1, TRBJ2-7)
CASSQNTGRLYEQYF

SEQ ID NO: 626969 - protein, 12 aa, Homo sapiens
  CDR3 for alpha chain variable domain of TCR clone 313485 (TRAV8-3, TRAJ26)
CAGDNYDQNFVF

SEQ ID NO: 626970 - protein, 12 aa, Homo sapiens
  CDR3 for beta chain variable domain of TCR clone 313485 (TRBV11-2, TRBJ2-1)
CASSPGNNEQFF

SEQ ID NO: 626971 - protein, 11 aa, Homo sapiens
  CDR3 for alpha chain variable domain of TCR clone 313486 (TRAV1-2, TRAJ20)
CALANDYKISF

SEQ ID NO: 626972 - protein, 16 aa, Homo sapiens
  CDR3 for beta chain variable domain of TCR clone 313486 (TRBV13, TRBJ2-7)
CASSSRESGRTYDQYF

SEQ ID NO: 626973 - protein, 11 aa, Homo sapiens
  CDR3 for alpha chain variable domain of TCR clone 313487 (TRAV2, TRAJ13)
CASGGYQKVTF

SEQ ID NO: 626974 - protein, 14 aa, Homo sapiens
  CDR3 for beta chain variable domain of TCR clone 313487 (TRBV12-4, TRBJ1-1)
CASSSARGYTEAFF

SEQ ID NO: 626975 - protein, 14 aa, Homo sapiens
  CDR3 for alpha chain variable domain of TCR clone 313488 (TRAV12-2, TRAJ44)
CAVNPAGTASKLTF

SEQ ID NO: 626976 - protein, 11 aa, Homo sapiens
  CDR3 for beta chain variable domain of TCR clone 313488 (TRBV10-3, TRBJ2-7)
CAISEGLEQYF

SEQ ID NO: 626977 - protein, 16 aa, Homo sapiens
  CDR3 for alpha chain variable domain of TCR clone 313489 (TRAV8-3, TRAJ13)
CAVGAYPSGGYQRVTF

SEQ ID NO: 626978 - protein, 14 aa, Homo sapiens
  CDR3 for beta chain variable domain of TCR clone 313489 (TRBV18, TRBJ2-5)
CASSPRASSETQYF

SEQ ID NO: 626979 - protein, 15 aa, Homo sapiens
  CDR3 for alpha chain variable domain of TCR clone 313490 (TRAV3, TRAJ22)
CAVRDRGGAARQLTF

SEQ ID NO: 626980 - protein, 16 aa, Homo sapiens
  CDR3 for beta chain variable domain of TCR clone 313490 (TRBV5-4, TRBJ2-3)
CASQQPGADGADTQYF

SEQ ID NO: 626981 - protein, 12 aa, Homo sapiens
  CDR3 for alpha chain variable domain of TCR clone 313491 (TRAV29/DV5, TRAJ49)
CAATDTGNQFYF

SEQ ID NO: 626982 - protein, 19 aa, Homo sapiens
  CDR3 for beta chain variable domain of TCR clone 313491 (TRBV25-1, TRBJ2-2)
CVILVSRVDRGRKTGELFF

SEQ ID NO: 626983 - protein, 16 aa, Homo sapiens
  CDR3 for alpha chain variable domain of TCR clone 313492 (TRAV3, TRAJ4)
CAVRGTFSGGYNKLIF

SEQ ID NO: 626984 - protein, 13 aa, Homo sapiens
  CDR3 for beta chain variable domain of TCR clone 313492 (TRBV7-9, TRBJ2-3)
CASSPGSTDTQYF

SEQ ID NO: 626985 - protein, 12 aa, Homo sapiens
  CDR3 for alpha chain variable domain of TCR clone 313493 (TRAV22, TRAJ29)
CAPSSGNTPLVF

SEQ ID NO: 626986 - protein, 14 aa, Homo sapiens
  CDR3 for beta chain variable domain of TCR clone 313493 (TRBV11-2, TRBJ2-7)
CASSLGAGAYEQYF

SEQ ID NO: 626987 - protein, 13 aa, Homo sapiens
  CDR3 for alpha chain variable domain of TCR clone 313494 (TRAV17, TRAJ34)
CATDLYNTDKLIF

SEQ ID NO: 626988 - protein, 14 aa, Homo sapiens
  CDR3 for beta chain variable domain of TCR clone 313494 (TRBV4-1, TRBJ2-3)
CASSQDWSTDTQYF

SEQ ID NO: 626989 - protein, 14 aa, Homo sapiens
  CDR3 for alpha chain variable domain of TCR clone 313495 (TRAV35, TRAJ22)
CAVLRPGSARHLTF

SEQ ID NO: 626990 - protein, 15 aa, Homo sapiens
  CDR3 for beta chain variable domain of TCR clone 313495 (TRBV12-4, TRBJ2-5)
CASSPPTGLQETQYF

SEQ ID NO: 626991 - protein, 13 aa, Homo sapiens
  CDR3 for alpha chain variable domain of TCR clone 313496 (TRAV1-1, TRAJ13)
CAMNSGGYQKVTF

SEQ ID NO: 626992 - protein, 12 aa, Homo sapiens
  CDR3 for beta chain variable domain of TCR clone 313496 (TRBV28, TRBJ2-1)
CASSVQINEQFF

SEQ ID NO: 626993 - protein, 14 aa, Homo sapiens
  CDR3 for alpha chain variable domain of TCR clone 313497 (TRAV26-2, TRAJ38)
CILYNAGNNRKLIW

SEQ ID NO: 626994 - protein, 13 aa, Homo sapiens
  CDR3 for beta chain variable domain of TCR clone 313497 (TRBV7-9, TRBJ2-2)
CASSLDPTGELFF

SEQ ID NO: 626995 - protein, 16 aa, Homo sapiens
  CDR3 for alpha chain variable domain of TCR clone 313498 (TRAV8-2, TRAJ7)
CVVSEGLYYGNNRLAF

SEQ ID NO: 626996 - protein, 16 aa, Homo sapiens
  CDR3 for beta chain variable domain of TCR clone 313498 (TRBV20-1, TRBJ1-4)
CSAPGQGLLTNEKLFF

SEQ ID NO: 626997 - protein, 15 aa, Homo sapiens
  CDR3 for alpha chain variable domain of TCR clone 313499 (TRAV13-1, TRAJ16)
CAARYKMARSCSLQG

SEQ ID NO: 626998 - protein, 13 aa, Homo sapiens
  CDR3 for beta chain variable domain of TCR clone 313499 (TRBV4-1, TRBJ2-1)
CASSQAGGDEQFF

SEQ ID NO: 626999 - protein, 21 aa, Homo sapiens
  CDR3 for alpha chain variable domain of TCR clone 313500 (TRAV21, TRAJ57)
SLVTQPPTSAVTQGGSEKLVF

SEQ ID NO: 627000 - protein, 16 aa, Homo sapiens
  CDR3 for beta chain variable domain of TCR clone 313500 (TRBV29-1, TRBJ2-7)
CSVEDAEDGTAYEQYF

SEQ ID NO: 627001 - protein, 15 aa, Homo sapiens
  CDR3 for alpha chain variable domain of TCR clone 313501 (TRAV17, TRAJ10)
CATVLLMGGGNKLTF

SEQ ID NO: 627002 - protein, 17 aa, Homo sapiens
  CDR3 for beta chain variable domain of TCR clone 313501 (TRBV11-2, TRBJ2-1)
CASSLYPPGVEYNEQFS

SEQ ID NO: 627003 - protein, 15 aa, Homo sapiens
  CDR3 for alpha chain variable domain of TCR clone 313502 (TRAV9-2, TRAJ49)
CALSPPDHTGNQFYF

SEQ ID NO: 627004 - protein, 14 aa, Homo sapiens
  CDR3 for beta chain variable domain of TCR clone 313502 (TRBV12-5, TRBJ2-5)
CASGSRTHQETQYF

SEQ ID NO: 627005 - protein, 11 aa, Homo sapiens
  CDR3 for alpha chain variable domain of TCR clone 313503 (TRAV12-2, TRAJ31)
CAILNNARLMF

SEQ ID NO: 627006 - protein, 16 aa, Homo sapiens
  CDR3 for beta chain variable domain of TCR clone 313503 (TRBV13, TRBJ2-2)
CASSPRTGEHTGELLF

SEQ ID NO: 627007 - protein, 13 aa, Homo sapiens
  CDR3 for alpha chain variable domain of TCR clone 313504 (TRAV23/DV6, TRAJ16)
CAASISDGQNLLF

SEQ ID NO: 627008 - protein, 15 aa, Homo sapiens
  CDR3 for beta chain variable domain of TCR clone 313504 (TRBV2, TRBJ2-2)
CASSRETVGTGELFF

SEQ ID NO: 627009 - protein, 15 aa, Homo sapiens
  CDR3 for alpha chain variable domain of TCR clone 313505 (TRAV26-1, TRAJ39)
CIVRVYNNAGNMLTF

SEQ ID NO: 627010 - protein, 13 aa, Homo sapiens
  CDR3 for beta chain variable domain of TCR clone 313505 (TRBV7-9, TRBJ2-3)
CASSPGSTDTQYF

SEQ ID NO: 627011 - protein, 14 aa, Homo sapiens
  CDR3 for alpha chain variable domain of TCR clone 313506 (TRAV17, TRAJ17)
CATDHRAAGNKLTF

SEQ ID NO: 627012 - protein, 15 aa, Homo sapiens
  CDR3 for beta chain variable domain of TCR clone 313506 (TRBV11-3, TRBJ2-3)
CASLKDGREGDTQYF

SEQ ID NO: 627013 - protein, 14 aa, Homo sapiens
  CDR3 for alpha chain variable domain of TCR clone 313507 (TRAV12-3, TRAJ10)
SHLPLTGGGNKLTF

SEQ ID NO: 627014 - protein, 12 aa, Homo sapiens
  CDR3 for beta chain variable domain of TCR clone 313507 (TRBV7-9, TRBJ1-5)
CASSPQGQPQHF

SEQ ID NO: 627015 - protein, 13 aa, Homo sapiens
  CDR3 for alpha chain variable domain of TCR clone 313508 (TRAV27, TRAJ42)
CAGARGSQGNIIF

SEQ ID NO: 627016 - protein, 14 aa, Homo sapiens
  CDR3 for beta chain variable domain of TCR clone 313508 (TRBV20-1, TRBJ1-1)
CSAQTRIGGTEAFF

SEQ ID NO: 627017 - protein, 16 aa, Homo sapiens
  CDR3 for alpha chain variable domain of TCR clone 313509 (TRAV23/DV6, TRAJ52)
CAARPSGGTSYGKLTS

SEQ ID NO: 627018 - protein, 13 aa, Homo sapiens
  CDR3 for beta chain variable domain of TCR clone 313509 (TRBV7-9, TRBJ1-1)
CASSLSGETEAFF

SEQ ID NO: 627019 - protein, 14 aa, Homo sapiens
  CDR3 for alpha chain variable domain of TCR clone 313510 (TRAV35, TRAJ22)
CAGLRPGSARQLTF

SEQ ID NO: 627020 - protein, 15 aa, Homo sapiens
  CDR3 for beta chain variable domain of TCR clone 313510 (TRBV12-4, TRBJ2-5)
CASSPPTGLQETEYF

SEQ ID NO: 627021 - protein, 12 aa, Homo sapiens
  CDR3 for alpha chain variable domain of TCR clone 313511 (TRAV2, TRAJ34)
CAVGANTDKLIF

SEQ ID NO: 627022 - protein, 13 aa, Homo sapiens
  CDR3 for beta chain variable domain of TCR clone 313511 (TRBV7-3, TRBJ1-1)
CASSQDWGAEAFF

SEQ ID NO: 627023 - protein, 17 aa, Homo sapiens
  CDR3 for alpha chain variable domain of TCR clone 313512 (TRAV3, TRAJ42)
CAVRDRDYGGSQGDIIF

SEQ ID NO: 627024 - protein, 15 aa, Homo sapiens
  CDR3 for beta chain variable domain of TCR clone 313512 (TRBV6-6, TRBJ2-7)
CASSYSYGGSYEQYF

SEQ ID NO: 627025 - protein, 14 aa, Homo sapiens
  CDR3 for alpha chain variable domain of TCR clone 313513 (TRAV35, TRAJ40)
CAGHPISGTYKYIF

SEQ ID NO: 627026 - protein, 14 aa, Homo sapiens
  CDR3 for beta chain variable domain of TCR clone 313513 (TRBV7-2, TRBJ2-7)
CASSPKTSFYEQYF

SEQ ID NO: 627027 - protein, 12 aa, Homo sapiens
  CDR3 for alpha chain variable domain of TCR clone 313514 (TRAV13-1, TRAJ20)
CAARQNDYKLSF

SEQ ID NO: 627028 - protein, 15 aa, Homo sapiens
  CDR3 for beta chain variable domain of TCR clone 313514 (TRBV7-2, TRBJ2-5)
CASSGILAGAETQYF

SEQ ID NO: 627029 - protein, 14 aa, Homo sapiens
  CDR3 for alpha chain variable domain of TCR clone 313515 (TRAV30, TRAJ26)
CGTEIVSYGQNFVF

SEQ ID NO: 627030 - protein, 12 aa, Homo sapiens
  CDR3 for beta chain variable domain of TCR clone 313515 (TRBV24-1, TRBJ1-1)
CATSDPGLEAFF

SEQ ID NO: 627031 - protein, 15 aa, Homo sapiens
  CDR3 for alpha chain variable domain of TCR clone 313516 (TRAV25, TRAJ52)
CAGRPGGTSYGKLTF

SEQ ID NO: 627032 - protein, 14 aa, Homo sapiens
  CDR3 for beta chain variable domain of TCR clone 313516 (TRBV18, TRBJ2-7)
CASSPRGGAYEQYF

SEQ ID NO: 627033 - protein, 16 aa, Homo sapiens
  CDR3 for alpha chain variable domain of TCR clone 313517 (TRAV16, TRAJ52)
CALSGVGGTSYGELTF

SEQ ID NO: 627034 - protein, 14 aa, Homo sapiens
  CDR3 for beta chain variable domain of TCR clone 313517 (TRBV19, TRBJ1-2)
CASSIQGQAYGYTF

SEQ ID NO: 627035 - protein, 16 aa, Homo sapiens
  CDR3 for alpha chain variable domain of TCR clone 313518 (TRAV3, TRAJ5)
CAVRNLMDKGRRALTF

SEQ ID NO: 627036 - protein, 16 aa, Homo sapiens
  CDR3 for beta chain variable domain of TCR clone 313518 (TRBV4-2, TRBJ2-7)
CASSQEGLANSYEQYF

SEQ ID NO: 627037 - protein, 16 aa, Homo sapiens
  CDR3 for alpha chain variable domain of TCR clone 313519 (TRAV14/DV4, TRAJ20)
CAMREGRSRDDYKLSF

SEQ ID NO: 627038 - protein, 17 aa, Homo sapiens
  CDR3 for beta chain variable domain of TCR clone 313519 (TRBV15, TRBJ1-2)
CATSGREIDVVNYGYTF

SEQ ID NO: 627039 - protein, 15 aa, Homo sapiens
  CDR3 for alpha chain variable domain of TCR clone 313520 (TRAV26-1, TRAJ29)
CIVRVEGSGYTPLVF

SEQ ID NO: 627040 - protein, 14 aa, Homo sapiens
  CDR3 for beta chain variable domain of TCR clone 313520 (TRBV25-1, TRBJ1-1)
CASTHLGGNTEAFF

SEQ ID NO: 627041 - protein, 16 aa, Homo sapiens
  CDR3 for alpha chain variable domain of TCR clone 313521 (TRAV30, TRAJ24)
CGTEMVDADRWGKFQF

SEQ ID NO: 627042 - protein, 14 aa, Homo sapiens
  CDR3 for beta chain variable domain of TCR clone 313521 (TRBV12-5, TRBJ2-5)
CASGSRTHQETQYF

SEQ ID NO: 627043 - protein, 20 aa, Homo sapiens
  CDR3 for alpha chain variable domain of TCR clone 313522 (TRAV21, TRAJ4)
AASQPGDSATLAGGYNKLIF

SEQ ID NO: 627044 - protein, 18 aa, Homo sapiens
  CDR3 for beta chain variable domain of TCR clone 313522 (TRBV28, TRBJ1-3)
CASSPPGTVTSSGNTIYF

SEQ ID NO: 627045 - protein, 11 aa, Homo sapiens
  CDR3 for alpha chain variable domain of TCR clone 313523 (TRAV1-2, TRAJ20)
CAVAHDYKLSF

SEQ ID NO: 627046 - protein, 18 aa, Homo sapiens
  CDR3 for beta chain variable domain of TCR clone 313523 (TRBV20-1, TRBJ2-6)
CSAETTPTHGSGANVLTF

SEQ ID NO: 627047 - protein, 17 aa, Homo sapiens
  CDR3 for alpha chain variable domain of TCR clone 313524 (TRAV38-1, TRAJ45)
CAFMRSHSGGGAYGLTF

SEQ ID NO: 627048 - protein, 15 aa, Homo sapiens
  CDR3 for beta chain variable domain of TCR clone 313524 (TRBV7-2, TRBJ2-3)
CASSLVVRGPDTQYF

SEQ ID NO: 627049 - protein, 14 aa, Homo sapiens
  CDR3 for alpha chain variable domain of TCR clone 313525 (TRAV12-2, TRAJ40)
CAVKIPSGTYKYIF

SEQ ID NO: 627050 - protein, 17 aa, Homo sapiens
  CDR3 for beta chain variable domain of TCR clone 313525 (TRBV7-8, TRBJ2-6)
CASSAGTGGAGADVLTF

SEQ ID NO: 627051 - protein, 14 aa, Homo sapiens
  CDR3 for alpha chain variable domain of TCR clone 313526 (TRAV17, TRAJ22)
CATSPSGSARQLTF

SEQ ID NO: 627052 - protein, 15 aa, Homo sapiens
  CDR3 for beta chain variable domain of TCR clone 313526 (TRBV18, TRBJ1-2)
CASSPGNGLGYGYTF

SEQ ID NO: 627053 - protein, 14 aa, Homo sapiens
  CDR3 for alpha chain variable domain of TCR clone 313527 (TRAV1-2, TRAJ8)
CAVREDTGFQKLVF

SEQ ID NO: 627054 - protein, 12 aa, Homo sapiens
  CDR3 for beta chain variable domain of TCR clone 313527 (TRBV7-8, TRBJ2-7)
CASSLGDRVQYF

SEQ ID NO: 627055 - protein, 13 aa, Homo sapiens
  CDR3 for alpha chain variable domain of TCR clone 313528 (TRAV21, TRAJ27)
CAALNTNAGKSTF

SEQ ID NO: 627056 - protein, 15 aa, Homo sapiens
  CDR3 for beta chain variable domain of TCR clone 313528 (TRBV7-2, TRBJ2-1)
CASTHGTGIYNEQFF

SEQ ID NO: 627057 - protein, 19 aa, Homo sapiens
  CDR3 for alpha chain variable domain of TCR clone 313529 (TRAV3, TRAJ37)
CAVRDIVGGYPSNTGKLIF

SEQ ID NO: 627058 - protein, 14 aa, Homo sapiens
  CDR3 for beta chain variable domain of TCR clone 313529 (TRBV7-8, TRBJ2-5)
CASSATGGQETQYF

SEQ ID NO: 627059 - protein, 18 aa, Homo sapiens
  CDR3 for alpha chain variable domain of TCR clone 313530 (TRAV17, TRAJ45)
CATSLYLYSGGGADGLTF

SEQ ID NO: 627060 - protein, 15 aa, Homo sapiens
  CDR3 for beta chain variable domain of TCR clone 313530 (TRBV11-2, TRBJ2-1)
CASSKNRGLIYEQFF

SEQ ID NO: 627061 - protein, 16 aa, Homo sapiens
  CDR3 for alpha chain variable domain of TCR clone 313531 (TRAV13-1, TRAJ37)
CAASSLGSSNTGKLIF

SEQ ID NO: 627062 - protein, 16 aa, Homo sapiens
  CDR3 for beta chain variable domain of TCR clone 313531 (TRBV19, TRBJ2-1)
CASSKAGPSSYNEQFF

SEQ ID NO: 627063 - protein, 13 aa, Homo sapiens
  CDR3 for alpha chain variable domain of TCR clone 313532 (TRAV27, TRAJ45)
CRSPGGGADGLTF

SEQ ID NO: 627064 - protein, 15 aa, Homo sapiens
  CDR3 for beta chain variable domain of TCR clone 313532 (TRBV9, TRBJ1-6)
CASSVAGTGDSPLHF

SEQ ID NO: 627065 - protein, 13 aa, Homo sapiens
  CDR3 for alpha chain variable domain of TCR clone 313533 (TRAV20, TRAJ37)
CAVCSSNTGKLIL

SEQ ID NO: 627066 - protein, 11 aa, Homo sapiens
  CDR3 for beta chain variable domain of TCR clone 313533 (TRBV12-4, TRBJ2-3)
CASTATDTQYF

SEQ ID NO: 627067 - protein, 14 aa, Homo sapiens
  CDR3 for alpha chain variable domain of TCR clone 313534 (TRAV1-2, TRAJ8)
CAVREATGFQKLVF

SEQ ID NO: 627068 - protein, 13 aa, Homo sapiens
  CDR3 for beta chain variable domain of TCR clone 313534 (TRBV12-4, TRBJ1-2)
CASSVRQGKGYTF

SEQ ID NO: 627069 - protein, 23 aa, Homo sapiens
  CDR3 for alpha chain variable domain of TCR clone 313535 (TRAV26-1, TRAJ38)
CIANNAGNNHIQNPDPAVYQLSD

SEQ ID NO: 627070 - protein, 13 aa, Homo sapiens
  CDR3 for beta chain variable domain of TCR clone 313535 (TRBV20-1, TRBJ1-1)
CSARGGGNTEAFF

SEQ ID NO: 627071 - protein, 11 aa, Homo sapiens
  CDR3 for alpha chain variable domain of TCR clone 313536 (TRAV12-1, TRAJ30)
CVVNGQDKIIF

SEQ ID NO: 627072 - protein, 12 aa, Homo sapiens
  CDR3 for beta chain variable domain of TCR clone 313536 (TRBV27, TRBJ2-2)
CASKLFTGELCF

SEQ ID NO: 627073 - protein, 14 aa, Homo sapiens
  CDR3 for alpha chain variable domain of TCR clone 313537 (TRAV1-2, TRAJ8)
CAVREDTGFQKLVF

SEQ ID NO: 627074 - protein, 13 aa, Homo sapiens
  CDR3 for beta chain variable domain of TCR clone 313537 (TRBV12-4, TRBJ1-5)
CASSPDMAQPQHF

SEQ ID NO: 627075 - protein, 15 aa, Homo sapiens
  CDR3 for alpha chain variable domain of TCR clone 313538 (TRAV13-1, TRAJ37)
CSKFLGSSNTGKLIF

SEQ ID NO: 627076 - protein, 12 aa, Homo sapiens
  CDR3 for beta chain variable domain of TCR clone 313538 (TRBV6-1, TRBJ2-5)
CASSEGRETQYF

SEQ ID NO: 627077 - protein, 15 aa, Homo sapiens
  CDR3 for alpha chain variable domain of TCR clone 313539 (TRAV12-2, TRAJ53)
CAVNGGGGGNYKLTF

SEQ ID NO: 627078 - protein, 14 aa, Homo sapiens
  CDR3 for beta chain variable domain of TCR clone 313539 (TRBV18, TRBJ2-7)
CASSPRGGAYEQYF

SEQ ID NO: 627079 - protein, 17 aa, Homo sapiens
  CDR3 for alpha chain variable domain of TCR clone 313540 (TRAV3, TRAJ6)
CAVRAGTRAGGSYIPTF

SEQ ID NO: 627080 - protein, 15 aa, Homo sapiens
  CDR3 for beta chain variable domain of TCR clone 313540 (TRBV20-1, TRBJ1-1)
CSASWDRFLNAEAFF

SEQ ID NO: 627081 - protein, 14 aa, Homo sapiens
  CDR3 for alpha chain variable domain of TCR clone 313541 (TRAV17, TRAJ34)
CSTVPTYNTDKLIF

SEQ ID NO: 627082 - protein, 18 aa, Homo sapiens
  CDR3 for beta chain variable domain of TCR clone 313541 (TRBV23-1, TRBJ2-1)
TVSLRQRSEKWLKNEQFF

SEQ ID NO: 627083 - protein, 21 aa, Homo sapiens
  CDR3 for alpha chain variable domain of TCR clone 313542 (TRAV3, )
CAVRPTPDIQNPDPAVYQLRD

SEQ ID NO: 627084 - protein, 14 aa, Homo sapiens
  CDR3 for beta chain variable domain of TCR clone 313542 (TRBV7-9, TRBJ2-4)
CASSLAMGGNIQYF

SEQ ID NO: 627085 - protein, 15 aa, Homo sapiens
  CDR3 for alpha chain variable domain of TCR clone 313543 (TRAV8-3, TRAJ45)
CASSYAGGGADGLTF

SEQ ID NO: 627086 - protein, 15 aa, Homo sapiens
  CDR3 for beta chain variable domain of TCR clone 313543 (TRBV6-3, TRBJ2-7)
CASSSPGTVFYEQYF

SEQ ID NO: 627087 - protein, 14 aa, Homo sapiens
  CDR3 for alpha chain variable domain of TCR clone 313544 (TRAV17, TRAJ35)
CATDRPGFGNVLHC

SEQ ID NO: 627088 - protein, 18 aa, Homo sapiens
  CDR3 for beta chain variable domain of TCR clone 313544 (TRBV11-3, TRBJ2-2)
CASSTRPGAKTTNTGELF

SEQ ID NO: 627089 - protein, 14 aa, Homo sapiens
  CDR3 for alpha chain variable domain of TCR clone 313545 (TRAV25, TRAJ22)
CAVRSSGSARQLTF

SEQ ID NO: 627090 - protein, 16 aa, Homo sapiens
  CDR3 for beta chain variable domain of TCR clone 313545 (TRBV4-2, TRBJ1-1)
CASSPTPGRAAPEAFF

SEQ ID NO: 627091 - protein, 10 aa, Homo sapiens
  CDR3 for alpha chain variable domain of TCR clone 313546 (TRAV1-2, TRAJ34)
CAVNTDKLIF

SEQ ID NO: 627092 - protein, 18 aa, Homo sapiens
  CDR3 for beta chain variable domain of TCR clone 313546 (TRBV7-9, TRBJ2-7)
CASSLSTSGSRTWYEQYF

SEQ ID NO: 627093 - protein, 12 aa, Homo sapiens
  CDR3 for alpha chain variable domain of TCR clone 313547 (TRAV12-1, TRAJ6)
CVVSERSYIPTF

SEQ ID NO: 627094 - protein, 12 aa, Homo sapiens
  CDR3 for beta chain variable domain of TCR clone 313547 (TRBV7-3, TRBJ2-1)
PAAYGLAGAQFF

SEQ ID NO: 627095 - protein, 13 aa, Homo sapiens
  CDR3 for alpha chain variable domain of TCR clone 313548 (TRAV13-1, TRAJ11)
CAAVLAGYSTLTF

SEQ ID NO: 627096 - protein, 13 aa, Homo sapiens
  CDR3 for beta chain variable domain of TCR clone 313548 (TRBV7-8, TRBJ2-1)
CASTRDAVDEQFF

SEQ ID NO: 627097 - protein, 16 aa, Homo sapiens
  CDR3 for alpha chain variable domain of TCR clone 313549 (TRAV12-3, TRAJ53)
CAMSPGSGGSNYKLTF

SEQ ID NO: 627098 - protein, 15 aa, Homo sapiens
  CDR3 for beta chain variable domain of TCR clone 313549 (TRBV4-2, TRBJ1-1)
CQQPSGVWMNTEAFF

SEQ ID NO: 627099 - protein, 14 aa, Homo sapiens
  CDR3 for alpha chain variable domain of TCR clone 313550 (TRAV20, TRAJ18)
CTVGRGSTLGRLYF

SEQ ID NO: 627100 - protein, 14 aa, Homo sapiens
  CDR3 for beta chain variable domain of TCR clone 313550 (TRBV28, TRBJ2-4)
CASTQVTGVNIQYF

SEQ ID NO: 627101 - protein, 15 aa, Homo sapiens
  CDR3 for alpha chain variable domain of TCR clone 313551 (TRAV12-2, TRAJ43)
CAFDMRFGAGTRLTV

SEQ ID NO: 627102 - protein, 18 aa, Homo sapiens
  CDR3 for beta chain variable domain of TCR clone 313551 (TRBV20-1, TRBJ2-3)
GSASGLAGGPGTTDTQYL

SEQ ID NO: 627103 - protein, 14 aa, Homo sapiens
  CDR3 for alpha chain variable domain of TCR clone 313552 (TRAV8-3, TRAJ35)
CAVVQQGFGNVLHC

SEQ ID NO: 627104 - protein, 15 aa, Homo sapiens
  CDR3 for beta chain variable domain of TCR clone 313552 (TRBV6-1, TRBJ2-2)
CASSAGQGYTGELFF

SEQ ID NO: 627105 - protein, 13 aa, Homo sapiens
  CDR3 for alpha chain variable domain of TCR clone 313553 (TRAV13-1, TRAJ21)
CAARIYNFNKFYF

SEQ ID NO: 627106 - protein, 12 aa, Homo sapiens
  CDR3 for beta chain variable domain of TCR clone 313553 (TRBV11-2, TRBJ2-1)
CASSPGNSEQFF

SEQ ID NO: 627107 - protein, 13 aa, Homo sapiens
  CDR3 for alpha chain variable domain of TCR clone 313554 (TRAV3, TRAJ15)
YAVRDQAGTALIF

SEQ ID NO: 627108 - protein, 15 aa, Homo sapiens
  CDR3 for beta chain variable domain of TCR clone 313554 (TRBV11-1, TRBJ2-7)
CASSLNYGASYQQYF

SEQ ID NO: 627109 - protein, 15 aa, Homo sapiens
  CDR3 for alpha chain variable domain of TCR clone 313555 (TRAV12-2, TRAJ57)
CAVSRGQGGSEKLVF

SEQ ID NO: 627110 - protein, 13 aa, Homo sapiens
  CDR3 for beta chain variable domain of TCR clone 313555 (TRBV11-2, TRBJ1-4)
CASSPGTLEKLFF

SEQ ID NO: 627111 - protein, 17 aa, Homo sapiens
  CDR3 for alpha chain variable domain of TCR clone 313556 (TRAV3, TRAJ12)
CAVRDGGRMDSSYKLIF

SEQ ID NO: 627112 - protein, 16 aa, Homo sapiens
  CDR3 for beta chain variable domain of TCR clone 313556 (TRBV19, TRBJ2-1)
CASSMGGGSSYNEQFF

SEQ ID NO: 627113 - protein, 16 aa, Homo sapiens
  CDR3 for alpha chain variable domain of TCR clone 313557 (TRAV1-2, TRAJ16)
CAVNRFSMARSCSLQG

SEQ ID NO: 627114 - protein, 14 aa, Homo sapiens
  CDR3 for beta chain variable domain of TCR clone 313557 (TRBV7-9, TRBJ2-3)
CASSLEDGTDTQYF

SEQ ID NO: 627115 - protein, 12 aa, Homo sapiens
  CDR3 for alpha chain variable domain of TCR clone 313558 (TRAV3, TRAJ20)
CAVRDGDYKLSF

SEQ ID NO: 627116 - protein, 16 aa, Homo sapiens
  CDR3 for beta chain variable domain of TCR clone 313558 (TRBV2, TRBJ2-1)
CASRLNTASAYNEQFF

SEQ ID NO: 627117 - protein, 13 aa, Homo sapiens
  CDR3 for alpha chain variable domain of TCR clone 313559 (TRAV36/DV7, TRAJ7)
CAVERYGNNRLAF

SEQ ID NO: 627118 - protein, 14 aa, Homo sapiens
  CDR3 for beta chain variable domain of TCR clone 313559 (TRBV7-2, TRBJ2-7)
CASSGLAGRGEQYF

SEQ ID NO: 627119 - protein, 14 aa, Homo sapiens
  CDR3 for alpha chain variable domain of TCR clone 313560 (TRAV12-1, TRAJ9)
CVVTCDTGGFKTIF

SEQ ID NO: 627120 - protein, 16 aa, Homo sapiens
  CDR3 for beta chain variable domain of TCR clone 313560 (TRBV29-1, TRBJ1-2)
CSVEANRDIANYGYTF

SEQ ID NO: 627121 - protein, 11 aa, Homo sapiens
  CDR3 for alpha chain variable domain of TCR clone 313561 (TRAV12-1, TRAJ15)
CVVNAGTALIF

SEQ ID NO: 627122 - protein, 16 aa, Homo sapiens
  CDR3 for beta chain variable domain of TCR clone 313561 (TRBV28, TRBJ2-1)
CASSSRVRDSYNEQFI

SEQ ID NO: 627123 - protein, 14 aa, Homo sapiens
  CDR3 for alpha chain variable domain of TCR clone 313562 (TRAV1-2, TRAJ16)
CAVNRFSDGQKLLF

SEQ ID NO: 627124 - protein, 14 aa, Homo sapiens
  CDR3 for beta chain variable domain of TCR clone 313562 (TRBV19, TRBJ2-1)
CASSMGSGATEQFF

SEQ ID NO: 627125 - protein, 14 aa, Homo sapiens
  CDR3 for alpha chain variable domain of TCR clone 313563 (TRAV1-2, TRAJ16)
CAVNRFSDGQKLLF

SEQ ID NO: 627126 - protein, 14 aa, Homo sapiens
  CDR3 for beta chain variable domain of TCR clone 313563 (TRBV19, TRBJ2-7)
CASSIEASSYEQYF

SEQ ID NO: 627127 - protein, 14 aa, Homo sapiens
  CDR3 for alpha chain variable domain of TCR clone 313564 (TRAV12-1, TRAJ43)
CVVNGRSNNNDMRF

SEQ ID NO: 627128 - protein, 13 aa, Homo sapiens
  CDR3 for beta chain variable domain of TCR clone 313564 (TRBV10-3, TRBJ2-7)
CASKLAVNYEHYF

SEQ ID NO: 627129 - protein, 11 aa, Homo sapiens
  CDR3 for alpha chain variable domain of TCR clone 313565 (TRAV35, TRAJ34)
CWARNTDKLIF

SEQ ID NO: 627130 - protein, 13 aa, Homo sapiens
  CDR3 for beta chain variable domain of TCR clone 313565 (TRBV7-8, TRBJ2-7)
CASSFAGLYEQYF

SEQ ID NO: 627131 - protein, 14 aa, Homo sapiens
  CDR3 for alpha chain variable domain of TCR clone 313566 (TRAV8-4, TRAJ9)
CAVRINTGGFKTIS

SEQ ID NO: 627132 - protein, 16 aa, Homo sapiens
  CDR3 for beta chain variable domain of TCR clone 313566 (TRBV20-1, TRBJ1-4)
CSAPGQGLLTNEKLFF

SEQ ID NO: 627133 - protein, 16 aa, Homo sapiens
  CDR3 for alpha chain variable domain of TCR clone 313567 (TRAV3, TRAJ37)
CAVRPHGSGNTVKLIF

SEQ ID NO: 627134 - protein, 11 aa, Homo sapiens
  CDR3 for beta chain variable domain of TCR clone 313567 (TRBV10-3, TRBJ2-7)
CAISEGLEQYF

SEQ ID NO: 627135 - protein, 17 aa, Homo sapiens
  CDR3 for alpha chain variable domain of TCR clone 313568 (TRAV3, TRAJ6)
CAVRDGPRAGGSYIPTF

SEQ ID NO: 627136 - protein, 14 aa, Homo sapiens
  CDR3 for beta chain variable domain of TCR clone 313568 (TRBV7-2, TRBJ2-7)
CGSSPKASFYEQYF

SEQ ID NO: 627137 - protein, 12 aa, Homo sapiens
  CDR3 for alpha chain variable domain of TCR clone 313569 (TRAV3, TRAJ31)
CAVGDGNARLRF

SEQ ID NO: 627138 - protein, 18 aa, Homo sapiens
  CDR3 for beta chain variable domain of TCR clone 313569 (TRBV7-2, TRBJ2-3)
CASSLKREGSGITDTQYF

SEQ ID NO: 627139 - protein, 12 aa, Homo sapiens
  CDR3 for alpha chain variable domain of TCR clone 313570 (TRAV17, TRAJ20)
CATDSNDYKLSF

SEQ ID NO: 627140 - protein, 16 aa, Homo sapiens
  CDR3 for beta chain variable domain of TCR clone 313570 (TRBV7-2, TRBJ1-2)
CASSSNQDGRGGGYTF

SEQ ID NO: 627141 - protein, 11 aa, Homo sapiens
  CDR3 for alpha chain variable domain of TCR clone 313571 (TRAV21, TRAJ34)
CAHYNTDKLIF

SEQ ID NO: 627142 - protein, 17 aa, Homo sapiens
  CDR3 for beta chain variable domain of TCR clone 313571 (TRBV7-8, TRBJ2-6)
CASSAGTGGAGANVLTF

SEQ ID NO: 627143 - protein, 16 aa, Homo sapiens
  CDR3 for alpha chain variable domain of TCR clone 313572 (TRAV12-1, TRAJ12)
CVVNTLLMDSSYKLIF

SEQ ID NO: 627144 - protein, 13 aa, Homo sapiens
  CDR3 for beta chain variable domain of TCR clone 313572 (TRBV12-4, TRBJ2-7)
CASSPTETYEQYF

SEQ ID NO: 627145 - protein, 12 aa, Homo sapiens
  CDR3 for alpha chain variable domain of TCR clone 313573 (TRAV8-6, TRAJ33)
CAVTDSNYQLIW

SEQ ID NO: 627146 - protein, 14 aa, Homo sapiens
  CDR3 for beta chain variable domain of TCR clone 313573 (TRBV7-2, TRBJ2-7)
CASSPKTSFYEQYF

SEQ ID NO: 627147 - protein, 14 aa, Homo sapiens
  CDR3 for alpha chain variable domain of TCR clone 313574 (TRAV9-2, TRAJ39)
CALYIYNAGNMLAF

SEQ ID NO: 627148 - protein, 15 aa, Homo sapiens
  CDR3 for beta chain variable domain of TCR clone 313574 (TRBV28, TRBJ1-3)
CASSMGWASGNTIYF

SEQ ID NO: 627149 - protein, 13 aa, Homo sapiens
  CDR3 for alpha chain variable domain of TCR clone 313575 (TRAV29/DV5, TRAJ31)
CAASRNNNARLMF

SEQ ID NO: 627150 - protein, 12 aa, Homo sapiens
  CDR3 for beta chain variable domain of TCR clone 313575 (TRBV11-2, TRBJ2-1)
CASSPGNNDQFF

SEQ ID NO: 627151 - protein, 14 aa, Homo sapiens
  CDR3 for alpha chain variable domain of TCR clone 313576 (TRAV12-2, TRAJ15)
CAPHTGQAGTALLF

SEQ ID NO: 627152 - protein, 14 aa, Homo sapiens
  CDR3 for beta chain variable domain of TCR clone 313576 (TRBV7-8, TRBJ2-7)
CASSPRDRVYEQYF

SEQ ID NO: 627153 - protein, 13 aa, Homo sapiens
  CDR3 for alpha chain variable domain of TCR clone 313577 (TRAV1-1, TRAJ9)
CAAKNTGGFKTIF

SEQ ID NO: 627154 - protein, 14 aa, Homo sapiens
  CDR3 for beta chain variable domain of TCR clone 313577 (TRBV4-1, TRBJ2-3)
CASSQDWSTDTQYF

SEQ ID NO: 627155 - protein, 18 aa, Homo sapiens
  CDR3 for alpha chain variable domain of TCR clone 313578 (TRAV12-3, TRAJ52)
CAMSVGGAGGTSYGTLTF

SEQ ID NO: 627156 - protein, 15 aa, Homo sapiens
  CDR3 for beta chain variable domain of TCR clone 313578 (TRBV27, TRBJ1-6)
CASSFDRGLGSHLHF

SEQ ID NO: 627157 - protein, 10 aa, Homo sapiens
  CDR3 for alpha chain variable domain of TCR clone 313579 (TRAV23/DV6, TRAJ57)
CAASSTLSQG

SEQ ID NO: 627158 - protein, 14 aa, Homo sapiens
  CDR3 for beta chain variable domain of TCR clone 313579 (TRBV2, TRBJ2-1)
CASGTSGGLNEQFF

SEQ ID NO: 627159 - protein, 14 aa, Homo sapiens
  CDR3 for alpha chain variable domain of TCR clone 313580 (TRAV12-2, TRAJ13)
CAVKKTGGYQKVTF

SEQ ID NO: 627160 - protein, 16 aa, Homo sapiens
  CDR3 for beta chain variable domain of TCR clone 313580 (TRBV2, TRBJ2-1)
CASRSPAGGKYSEQFF

SEQ ID NO: 627161 - protein, 14 aa, Homo sapiens
  CDR3 for alpha chain variable domain of TCR clone 313581 (TRAV35, TRAJ22)
CAGLRPGSARQLTF

SEQ ID NO: 627162 - protein, 15 aa, Homo sapiens
  CDR3 for beta chain variable domain of TCR clone 313581 (TRBV12-5, TRBJ2-2)
CASGRLGGNAGELFF

SEQ ID NO: 627163 - protein, 15 aa, Homo sapiens
  CDR3 for alpha chain variable domain of TCR clone 313582 (TRAV40, TRAJ45)
CLLDDLGGGADGLTF

SEQ ID NO: 627164 - protein, 13 aa, Homo sapiens
  CDR3 for beta chain variable domain of TCR clone 313582 (TRBV7-9, TRBJ1-2)
CASSLKQNYGYTF

SEQ ID NO: 627165 - protein, 14 aa, Homo sapiens
  CDR3 for alpha chain variable domain of TCR clone 313583 (TRAV12-2, TRAJ17)
CAVPFKAAGNKLTF

SEQ ID NO: 627166 - protein, 17 aa, Homo sapiens
  CDR3 for beta chain variable domain of TCR clone 313583 (TRBV20-1, TRBJ2-2)
CSASGSGQGGLAGELFF

SEQ ID NO: 627167 - protein, 15 aa, Homo sapiens
  CDR3 for alpha chain variable domain of TCR clone 313584 (TRAV4, TRAJ10)
GLVGDEEGGGNKLTF

SEQ ID NO: 627168 - protein, 15 aa, Homo sapiens
  CDR3 for beta chain variable domain of TCR clone 313584 (TRBV7-2, TRBJ2-7)
CASSLTGQGTYEQYF

SEQ ID NO: 627169 - protein, 12 aa, Homo sapiens
  CDR3 for alpha chain variable domain of TCR clone 313585 (TRAV29/DV5, TRAJ41)
CAASDSGYAPNF

SEQ ID NO: 627170 - protein, 14 aa, Homo sapiens
  CDR3 for beta chain variable domain of TCR clone 313585 (TRBV2, TRBJ1-5)
CASHAGEGDQPQHF

SEQ ID NO: 627171 - protein, 15 aa, Homo sapiens
  CDR3 for alpha chain variable domain of TCR clone 313586 (TRAV3, TRAJ22)
CAVRDRGGSARQLTF

SEQ ID NO: 627172 - protein, 16 aa, Homo sapiens
  CDR3 for beta chain variable domain of TCR clone 313586 (TRBV11-2, TRBJ2-1)
SASARGSYSHHNEQFF

SEQ ID NO: 627173 - protein, 13 aa, Homo sapiens
  CDR3 for alpha chain variable domain of TCR clone 313587 (TRAV12-1, TRAJ47)
CVVNPGYGNKLVF

SEQ ID NO: 627174 - protein, 14 aa, Homo sapiens
  CDR3 for beta chain variable domain of TCR clone 313587 (TRBV5-5, TRBJ1-5)
CASSGQGVDQPQHF

SEQ ID NO: 627175 - protein, 13 aa, Homo sapiens
  CDR3 for alpha chain variable domain of TCR clone 313588 (TRAV35, TRAJ33)
CAEQLYGVYQLIW

SEQ ID NO: 627176 - protein, 14 aa, Homo sapiens
  CDR3 for beta chain variable domain of TCR clone 313588 (TRBV7-2, TRBJ1-1)
CASSLGGAGTGAFF

SEQ ID NO: 627177 - protein, 13 aa, Homo sapiens
  CDR3 for alpha chain variable domain of TCR clone 313589 (TRAV23/DV6, TRAJ22)
CAPYSGSARQLTL

SEQ ID NO: 627178 - protein, 13 aa, Homo sapiens
  CDR3 for beta chain variable domain of TCR clone 313589 (TRBV19, TRBJ1-1)
CASSGQVNTEAFF

SEQ ID NO: 627179 - protein, 15 aa, Homo sapiens
  CDR3 for alpha chain variable domain of TCR clone 313590 (TRAV26-2, TRAJ54)
CILRDVRQGAQKLVF

SEQ ID NO: 627180 - protein, 13 aa, Homo sapiens
  CDR3 for beta chain variable domain of TCR clone 313590 (TRBV7-9, TRBJ1-1)
CASSLAGVTEAFF

SEQ ID NO: 627181 - protein, 15 aa, Homo sapiens
  CDR3 for alpha chain variable domain of TCR clone 313591 (TRAV25, TRAJ52)
CAGTSGSTSYGRLTF

SEQ ID NO: 627182 - protein, 16 aa, Homo sapiens
  CDR3 for beta chain variable domain of TCR clone 313591 (TRBV15, TRBJ1-2)
CATSRGPRTGGGGYTF

SEQ ID NO: 627183 - protein, 15 aa, Homo sapiens
  CDR3 for alpha chain variable domain of TCR clone 313592 (TRAV3, TRAJ22)
CAVRDRGGSARQLTF

SEQ ID NO: 627184 - protein, 15 aa, Homo sapiens
  CDR3 for beta chain variable domain of TCR clone 313592 (TRBV19, TRBJ2-7)
CASSTSPTGSGEQYF

SEQ ID NO: 627185 - protein, 15 aa, Homo sapiens
  CDR3 for alpha chain variable domain of TCR clone 313593 (TRAV12-1, TRAJ36)
CVVNEHQTGANNLFF

SEQ ID NO: 627186 - protein, 14 aa, Homo sapiens
  CDR3 for beta chain variable domain of TCR clone 313593 (TRBV6-1, TRBJ1-3)
CASVQGGGGNTIYF

SEQ ID NO: 627187 - protein, 17 aa, Homo sapiens
  CDR3 for alpha chain variable domain of TCR clone 313594 (TRAV12-2, TRAJ52)
CAVNPYAGGTSYGKLTF

SEQ ID NO: 627188 - protein, 18 aa, Homo sapiens
  CDR3 for beta chain variable domain of TCR clone 313594 (TRBV6-4, TRBJ2-1)
CTSSPDRMGSGSINEQFF

SEQ ID NO: 627189 - protein, 13 aa, Homo sapiens
  CDR3 for alpha chain variable domain of TCR clone 313595 (TRAV12-3, TRAJ35)
CAMAIGFGNVLHC

SEQ ID NO: 627190 - protein, 15 aa, Homo sapiens
  CDR3 for beta chain variable domain of TCR clone 313595 (TRBV20-1, TRBJ2-1)
CSARGSVTYYNEQFF

SEQ ID NO: 627191 - protein, 14 aa, Homo sapiens
  CDR3 for alpha chain variable domain of TCR clone 313596 (TRAV1-2, TRAJ8)
CAVREDTGFQKLVF

SEQ ID NO: 627192 - protein, 12 aa, Homo sapiens
  CDR3 for beta chain variable domain of TCR clone 313596 (TRBV7-8, TRBJ2-7)
CASSTGDREQYF

SEQ ID NO: 627193 - protein, 12 aa, Homo sapiens
  CDR3 for alpha chain variable domain of TCR clone 313597 (TRAV21, TRAJ58)
CAAETSGSRLTF

SEQ ID NO: 627194 - protein, 17 aa, Homo sapiens
  CDR3 for beta chain variable domain of TCR clone 313597 (TRBV4-1, TRBJ1-4)
CASSQEGPRGVEEKLFF

SEQ ID NO: 627195 - protein, 15 aa, Homo sapiens
  CDR3 for alpha chain variable domain of TCR clone 313598 (TRAV3, TRAJ22)
CAVRDRGGSARQLTF

SEQ ID NO: 627196 - protein, 14 aa, Homo sapiens
  CDR3 for beta chain variable domain of TCR clone 313598 (TRBV2, TRBJ2-1)
CASRLIVGHDEQFF

SEQ ID NO: 627197 - protein, 13 aa, Homo sapiens
  CDR3 for alpha chain variable domain of TCR clone 313599 (TRAV2, TRAJ5)
CAVQDTGRRALTF

SEQ ID NO: 627198 - protein, 15 aa, Homo sapiens
  CDR3 for beta chain variable domain of TCR clone 313599 (TRBV7-3, TRBJ2-1)
CASSPTGGGEVEQFF

SEQ ID NO: 627199 - protein, 17 aa, Homo sapiens
  CDR3 for alpha chain variable domain of TCR clone 313600 (TRAV13-1, TRAJ28)
CAASPPYSGAGSYQLTF

SEQ ID NO: 627200 - protein, 15 aa, Homo sapiens
  CDR3 for beta chain variable domain of TCR clone 313600 (TRBV28, TRBJ2-5)
CASSSGRTIQETQYF

SEQ ID NO: 627201 - protein, 20 aa, Homo sapiens
  CDR3 for alpha chain variable domain of TCR clone 313601 (TRAV12-1, TRAJ42)
SSVIQPPTSVKGGSQGTLIF

SEQ ID NO: 627202 - protein, 18 aa, Homo sapiens
  CDR3 for beta chain variable domain of TCR clone 313601 (TRBV11-2, TRBJ2-3)
CASSLGGASRGAPNTQYF

SEQ ID NO: 627203 - protein, 13 aa, Homo sapiens
  CDR3 for alpha chain variable domain of TCR clone 313602 (TRAV35, TRAJ42)
CAGFPGSQGNRIF

SEQ ID NO: 627204 - protein, 12 aa, Homo sapiens
  CDR3 for beta chain variable domain of TCR clone 313602 (TRBV11-2, TRBJ2-1)
CASSPGNNEQFF

SEQ ID NO: 627205 - protein, 12 aa, Homo sapiens
  CDR3 for alpha chain variable domain of TCR clone 313603 (TRAV21, TRAJ8)
CAVNTGFQKLVF

SEQ ID NO: 627206 - protein, 17 aa, Homo sapiens
  CDR3 for beta chain variable domain of TCR clone 313603 (TRBV11-2, TRBJ2-1)
CASSLYPPGVKYNEQFF

SEQ ID NO: 627207 - protein, 17 aa, Homo sapiens
  CDR3 for alpha chain variable domain of TCR clone 313604 (TRAV3, TRAJ7)
CAVRDMSPLEGTTDSLL

SEQ ID NO: 627208 - protein, 17 aa, Homo sapiens
  CDR3 for beta chain variable domain of TCR clone 313604 (TRBV15, TRBJ1-2)
CANSGREIDVVNYGYTF

SEQ ID NO: 627209 - protein, 11 aa, Homo sapiens
  CDR3 for alpha chain variable domain of TCR clone 313605 (TRAV1-2, TRAJ40)
CAVPGTYKYLF

SEQ ID NO: 627210 - protein, 13 aa, Homo sapiens
  CDR3 for beta chain variable domain of TCR clone 313605 (TRBV27, TRBJ1-4)
CASSLMGDEKLFF

SEQ ID NO: 627211 - protein, 14 aa, Homo sapiens
  CDR3 for alpha chain variable domain of TCR clone 313606 (TRAV13-1, TRAJ44)
CAAKATGTACKLTF

SEQ ID NO: 627212 - protein, 17 aa, Homo sapiens
  CDR3 for beta chain variable domain of TCR clone 313606 (TRBV7-3, TRBJ2-3)
CASSLMKRMRGADTQYF

SEQ ID NO: 627213 - protein, 12 aa, Homo sapiens
  CDR3 for alpha chain variable domain of TCR clone 313607 (TRAV13-1, TRAJ21)
CAAKEGFNKFYF

SEQ ID NO: 627214 - protein, 14 aa, Homo sapiens
  CDR3 for beta chain variable domain of TCR clone 313607 (TRBV7-2, TRBJ2-5)
CASGLSGGGETQYF

SEQ ID NO: 627215 - protein, 14 aa, Homo sapiens
  CDR3 for alpha chain variable domain of TCR clone 313608 (TRAV8-1, TRAJ24)
CAVNAADSWGKLQF

SEQ ID NO: 627216 - protein, 14 aa, Homo sapiens
  CDR3 for beta chain variable domain of TCR clone 313608 (TRBV20-1, TRBJ1-1)
CSAQTRIGGTEAFF

SEQ ID NO: 627217 - protein, 14 aa, Homo sapiens
  CDR3 for alpha chain variable domain of TCR clone 313609 (TRAV8-3, TRAJ4)
CAVGASGGYYKLIF

SEQ ID NO: 627218 - protein, 16 aa, Homo sapiens
  CDR3 for beta chain variable domain of TCR clone 313609 (TRBV4-3, TRBJ2-2)
CASSHLQGSGTGELFF

SEQ ID NO: 627219 - protein, 11 aa, Homo sapiens
  CDR3 for alpha chain variable domain of TCR clone 313610 (TRAV2, TRAJ33)
CAVDSNYQLIW

SEQ ID NO: 627220 - protein, 14 aa, Homo sapiens
  CDR3 for beta chain variable domain of TCR clone 313610 (TRBV11-2, TRBJ2-3)
CASSRLARTDTQYS

SEQ ID NO: 627221 - protein, 19 aa, Homo sapiens
  CDR3 for alpha chain variable domain of TCR clone 313611 (TRAV38-1, TRAJ53)
CAFMKHGLESGGSNYKLTF

SEQ ID NO: 627222 - protein, 13 aa, Homo sapiens
  CDR3 for beta chain variable domain of TCR clone 313611 (TRBV19, TRBJ2-7)
CATSPRQSYEQYF

SEQ ID NO: 627223 - protein, 14 aa, Homo sapiens
  CDR3 for alpha chain variable domain of TCR clone 313612 (TRAV17, TRAJ12)
CSILPMDSSYKLIF

SEQ ID NO: 627224 - protein, 15 aa, Homo sapiens
  CDR3 for beta chain variable domain of TCR clone 313612 (TRBV5-1, TRBJ1-1)
CASSLGEGENTEAFF

SEQ ID NO: 627225 - protein, 23 aa, Homo sapiens
  CDR3 for alpha chain variable domain of TCR clone 313613 (TRAV3, TRAJ42)
CAVRRVEEAKDITSLEKALNSLL

SEQ ID NO: 627226 - protein, 14 aa, Homo sapiens
  CDR3 for beta chain variable domain of TCR clone 313613 (TRBV19, TRBJ2-5)
CASSSSGIQETQYF

SEQ ID NO: 627227 - protein, 12 aa, Homo sapiens
  CDR3 for alpha chain variable domain of TCR clone 313614 (TRAV25, TRAJ38)
CAGTGNNRKLIW

SEQ ID NO: 627228 - protein, 16 aa, Homo sapiens
  CDR3 for beta chain variable domain of TCR clone 313614 (TRBV7-7, TRBJ2-1)
CASSPRTGSSYNEQFF

SEQ ID NO: 627229 - protein, 16 aa, Homo sapiens
  CDR3 for alpha chain variable domain of TCR clone 313615 (TRAV12-3, TRAJ45)
CAMGWGSGGGADGLTF

SEQ ID NO: 627230 - protein, 14 aa, Homo sapiens
  CDR3 for beta chain variable domain of TCR clone 313615 (TRBV15, TRBJ2-1)
CATSGVEDYNEQFF

SEQ ID NO: 627231 - protein, 14 aa, Homo sapiens
  CDR3 for alpha chain variable domain of TCR clone 313616 (TRAV38-1, TRAJ40)
CALRPTSGTHKYIF

SEQ ID NO: 627232 - protein, 16 aa, Homo sapiens
  CDR3 for beta chain variable domain of TCR clone 313616 (TRBV6-1, TRBJ1-2)
CASSGAWQGRSHGYTF

SEQ ID NO: 627233 - protein, 15 aa, Homo sapiens
  CDR3 for alpha chain variable domain of TCR clone 313617 (TRAV35, TRAJ58)
CAGRRQETSGSRLTF

SEQ ID NO: 627234 - protein, 16 aa, Homo sapiens
  CDR3 for beta chain variable domain of TCR clone 313617 (TRBV12-4, TRBJ1-5)
CASRQPVEGSNQPQHF

SEQ ID NO: 627235 - protein, 13 aa, Homo sapiens
  CDR3 for alpha chain variable domain of TCR clone 313618 (TRAV12-3, TRAJ13)
CAMSSGGHQKVTF

SEQ ID NO: 627236 - protein, 11 aa, Homo sapiens
  CDR3 for beta chain variable domain of TCR clone 313618 (TRBV7-8, TRBJ2-7)
CASSLSLEQYF

SEQ ID NO: 627237 - protein, 14 aa, Homo sapiens
  CDR3 for alpha chain variable domain of TCR clone 313619 (TRAV1-2, TRAJ16)
CAVNRFSDGQKLLF

SEQ ID NO: 627238 - protein, 14 aa, Homo sapiens
  CDR3 for beta chain variable domain of TCR clone 313619 (TRBV20-1, TRBJ2-7)
CSARVRDSPYEQYF

SEQ ID NO: 627239 - protein, 13 aa, Homo sapiens
  CDR3 for alpha chain variable domain of TCR clone 313620 (TRAV3, TRAJ15)
CAVRDQAGTALIF

SEQ ID NO: 627240 - protein, 16 aa, Homo sapiens
  CDR3 for beta chain variable domain of TCR clone 313620 (TRBV11-2, TRBJ2-3)
CASSSRTSGGAGTQYF

SEQ ID NO: 627241 - protein, 14 aa, Homo sapiens
  CDR3 for alpha chain variable domain of TCR clone 313621 (TRAV12-3, TRAJ9)
CAMSPNTGGIKTIF

SEQ ID NO: 627242 - protein, 15 aa, Homo sapiens
  CDR3 for beta chain variable domain of TCR clone 313621 (TRBV6-5, TRBJ2-1)
CASSYDAGAGNEQFF

SEQ ID NO: 627243 - protein, 13 aa, Homo sapiens
  CDR3 for alpha chain variable domain of TCR clone 313622 (TRAV8-3, TRAJ48)
CAVVPFGNEKLTV

SEQ ID NO: 627244 - protein, 15 aa, Homo sapiens
  CDR3 for beta chain variable domain of TCR clone 313622 (TRBV11-2, TRBJ2-1)
CASSSPSTRYNEQFF

SEQ ID NO: 627245 - protein, 12 aa, Homo sapiens
  CDR3 for alpha chain variable domain of TCR clone 313623 (TRAV8-3, TRAJ41)
CAVALSGYALNF

SEQ ID NO: 627246 - protein, 15 aa, Homo sapiens
  CDR3 for beta chain variable domain of TCR clone 313623 (TRBV19, TRBJ2-2)
CASSPRTGWTGELFF

SEQ ID NO: 627247 - protein, 11 aa, Homo sapiens
  CDR3 for alpha chain variable domain of TCR clone 313624 (TRAV8-3, TRAJ49)
CPVNTGSQFYF

SEQ ID NO: 627248 - protein, 12 aa, Homo sapiens
  CDR3 for beta chain variable domain of TCR clone 313624 (TRBV11-2, TRBJ2-7)
CASSPPADEQYF

SEQ ID NO: 627249 - protein, 12 aa, Homo sapiens
  CDR3 for alpha chain variable domain of TCR clone 313625 (TRAV20, TRAJ10)
CAVLPGGNKLTF

SEQ ID NO: 627250 - protein, 16 aa, Homo sapiens
  CDR3 for beta chain variable domain of TCR clone 313625 (TRBV12-5, TRBJ2-5)
CASGPRTSGNQETQYF

SEQ ID NO: 627251 - protein, 15 aa, Homo sapiens
  CDR3 for alpha chain variable domain of TCR clone 313626 (TRAV2, TRAJ9)
CAVEDRGTGGFTTIF

SEQ ID NO: 627252 - protein, 14 aa, Homo sapiens
  CDR3 for beta chain variable domain of TCR clone 313626 (TRBV12-5, TRBJ2-5)
CASGSRTHQETQYF

SEQ ID NO: 627253 - protein, 11 aa, Homo sapiens
  CDR3 for alpha chain variable domain of TCR clone 313627 (TRAV3, TRAJ17)
PRGAAGNKQTF

SEQ ID NO: 627254 - protein, 12 aa, Homo sapiens
  CDR3 for beta chain variable domain of TCR clone 313627 (TRBV18, TRBJ2-1)
CASSSDEDEQFF

SEQ ID NO: 627255 - protein, 15 aa, Homo sapiens
  CDR3 for alpha chain variable domain of TCR clone 313628 (TRAV8-3, TRAJ40)
CADPSLGSGTYKYIF

SEQ ID NO: 627256 - protein, 16 aa, Homo sapiens
  CDR3 for beta chain variable domain of TCR clone 313628 (TRBV7-3, TRBJ2-3)
CASSLSGYRPEDTQYF

SEQ ID NO: 627257 - protein, 16 aa, Homo sapiens
  CDR3 for alpha chain variable domain of TCR clone 313629 (TRAV30, TRAJ24)
CGTAIVDAGSWGKFPF

SEQ ID NO: 627258 - protein, 14 aa, Homo sapiens
  CDR3 for beta chain variable domain of TCR clone 313629 (TRBV12-5, TRBJ2-5)
CASGSRTHQETQYF

SEQ ID NO: 627259 - protein, 14 aa, Homo sapiens
  CDR3 for alpha chain variable domain of TCR clone 313630 (TRAV14/DV4, TRAJ15)
CAMRRDQAGNALSF

SEQ ID NO: 627260 - protein, 16 aa, Homo sapiens
  CDR3 for beta chain variable domain of TCR clone 313630 (TRBV15, TRBJ2-3)
CATSRDLGIVTDTQYF

SEQ ID NO: 627261 - protein, 15 aa, Homo sapiens
  CDR3 for alpha chain variable domain of TCR clone 313631 (TRAV26-1, TRAJ5)
CIVRAQHTGRRALTF

SEQ ID NO: 627262 - protein, 16 aa, Homo sapiens
  CDR3 for beta chain variable domain of TCR clone 313631 (TRBV20-1, TRBJ1-4)
CSARPYGGELNEKLFF

SEQ ID NO: 627263 - protein, 15 aa, Homo sapiens
  CDR3 for alpha chain variable domain of TCR clone 313632 (TRAV1-2, TRAJ13)
CAVRGSSGGYQKVTF

SEQ ID NO: 627264 - protein, 13 aa, Homo sapiens
  CDR3 for beta chain variable domain of TCR clone 313632 (TRBV4-1, TRBJ2-2)
CASSQENTGELFF

SEQ ID NO: 627265 - protein, 12 aa, Homo sapiens
  CDR3 for alpha chain variable domain of TCR clone 313633 (TRAV2, TRAJ5)
CALDTGRRALTF

SEQ ID NO: 627266 - protein, 15 aa, Homo sapiens
  CDR3 for beta chain variable domain of TCR clone 313633 (TRBV10-3, TRBJ2-1)
CAISDVQDRAYKQFF

SEQ ID NO: 627267 - protein, 12 aa, Homo sapiens
  CDR3 for alpha chain variable domain of TCR clone 313634 (TRAV1-1, TRAJ39)
CAVPVVGNMLTF

SEQ ID NO: 627268 - protein, 15 aa, Homo sapiens
  CDR3 for beta chain variable domain of TCR clone 313634 (TRBV28, TRBJ2-1)
CASSIIAEGRSEQFF

SEQ ID NO: 627269 - protein, 15 aa, Homo sapiens
  CDR3 for alpha chain variable domain of TCR clone 313635 (TRAV13-1, TRAJ17)
CAASIERAAGNKLTF

SEQ ID NO: 627270 - protein, 15 aa, Homo sapiens
  CDR3 for beta chain variable domain of TCR clone 313635 (TRBV6-1, TRBJ2-3)
CASSQRGGITDTQYF

SEQ ID NO: 627271 - protein, 14 aa, Homo sapiens
  CDR3 for alpha chain variable domain of TCR clone 313636 (TRAV29/DV5, TRAJ43)
CAAIHSYNKNDMRF

SEQ ID NO: 627272 - protein, 14 aa, Homo sapiens
  CDR3 for beta chain variable domain of TCR clone 313636 (TRBV12-4, TRBJ2-5)
CASSSTEGTKTQYF

SEQ ID NO: 627273 - protein, 12 aa, Homo sapiens
  CDR3 for alpha chain variable domain of TCR clone 313637 (TRAV12-1, TRAJ40)
CVVYSGTYKYIF

SEQ ID NO: 627274 - protein, 15 aa, Homo sapiens
  CDR3 for beta chain variable domain of TCR clone 313637 (TRBV7-9, TRBJ1-6)
CASSSPVRGNSPLHF

SEQ ID NO: 627275 - protein, 11 aa, Homo sapiens
  CDR3 for alpha chain variable domain of TCR clone 313638 (TRAV1-2, TRAJ31)
CAVNNNARLMF

SEQ ID NO: 627276 - protein, 13 aa, Homo sapiens
  CDR3 for beta chain variable domain of TCR clone 313638 (TRBV4-1, TRBJ2-1)
CASSQAGGDEQFF

SEQ ID NO: 627277 - protein, 15 aa, Homo sapiens
  CDR3 for alpha chain variable domain of TCR clone 313639 (TRAV21, TRAJ38)
CAVRQDAGNNRKLSW

SEQ ID NO: 627278 - protein, 11 aa, Homo sapiens
  CDR3 for beta chain variable domain of TCR clone 313639 (TRBV29-1, TRBJ2-5)
CSEDRTGTQYF

SEQ ID NO: 627279 - protein, 14 aa, Homo sapiens
  CDR3 for alpha chain variable domain of TCR clone 313640 (TRAV1-2, TRAJ16)
CAVNRFSDGQKLLF

SEQ ID NO: 627280 - protein, 13 aa, Homo sapiens
  CDR3 for beta chain variable domain of TCR clone 313640 (TRBV10-3, TRBJ2-7)
CASNLAVNYEQYF

SEQ ID NO: 627281 - protein, 14 aa, Homo sapiens
  CDR3 for alpha chain variable domain of TCR clone 313641 (TRAV17, TRAJ23)
CATALGGQGGKLIF

SEQ ID NO: 627282 - protein, 13 aa, Homo sapiens
  CDR3 for beta chain variable domain of TCR clone 313641 (TRBV3-1, TRBJ2-5)
CASSPPAAETHYF

SEQ ID NO: 627283 - protein, 12 aa, Homo sapiens
  CDR3 for alpha chain variable domain of TCR clone 313642 (TRAV13-2, TRAJ8)
CAPWLGFQKLVF

SEQ ID NO: 627284 - protein, 15 aa, Homo sapiens
  CDR3 for beta chain variable domain of TCR clone 313642 (TRBV19, TRBJ2-7)
CASSIGGGLVNEQYF

SEQ ID NO: 627285 - protein, 14 aa, Homo sapiens
  CDR3 for alpha chain variable domain of TCR clone 313643 (TRAV12-1, TRAJ45)
CVVNSGGGADGLTF

SEQ ID NO: 627286 - protein, 15 aa, Homo sapiens
  CDR3 for beta chain variable domain of TCR clone 313643 (TRBV12-4, TRBJ2-5)
CASSPPTGLQETQYF

SEQ ID NO: 627287 - protein, 14 aa, Homo sapiens
  CDR3 for alpha chain variable domain of TCR clone 313644 (TRAV13-1, TRAJ6)
CAASITGGSYIPTF

SEQ ID NO: 627288 - protein, 15 aa, Homo sapiens
  CDR3 for beta chain variable domain of TCR clone 313644 (TRBV12-4, TRBJ2-5)
CASSPPTGLQETQYF

SEQ ID NO: 627289 - protein, 16 aa, Homo sapiens
  CDR3 for alpha chain variable domain of TCR clone 313645 (TRAV23/DV6, TRAJ52)
CAASMNGGNSYGKLTF

SEQ ID NO: 627290 - protein, 16 aa, Homo sapiens
  CDR3 for beta chain variable domain of TCR clone 313645 (TRBV27, TRBJ2-2)
CASSFRGLVRTGELFF

SEQ ID NO: 627291 - protein, 13 aa, Homo sapiens
  CDR3 for alpha chain variable domain of TCR clone 313646 (TRAV16, TRAJ4)
CALRTGGYNKLIF

SEQ ID NO: 627292 - protein, 13 aa, Homo sapiens
  CDR3 for beta chain variable domain of TCR clone 313646 (TRBV20-1, TRBJ2-7)
CSARGDTQDEQYF

SEQ ID NO: 627293 - protein, 13 aa, Homo sapiens
  CDR3 for alpha chain variable domain of TCR clone 313647 (TRAV17, TRAJ5)
CALRGTGRRALTF

SEQ ID NO: 627294 - protein, 14 aa, Homo sapiens
  CDR3 for beta chain variable domain of TCR clone 313647 (TRBV10-3, TRBJ1-2)
CAISDGGRNYGDTF

SEQ ID NO: 627295 - protein, 12 aa, Homo sapiens
  CDR3 for alpha chain variable domain of TCR clone 313648 (TRAV17, TRAJ53)
CAGGGSNYKLPF

SEQ ID NO: 627296 - protein, 16 aa, Homo sapiens
  CDR3 for beta chain variable domain of TCR clone 313648 (TRBV11-2, TRBJ2-3)
CASSFQGRGALDTQYF

SEQ ID NO: 627297 - protein, 21 aa, Homo sapiens
  CDR3 for alpha chain variable domain of TCR clone 313649 (TRAV1-1, TRAJ30)
CLLLLRCEREGGENRDDKIIF

SEQ ID NO: 627298 - protein, 13 aa, Homo sapiens
  CDR3 for beta chain variable domain of TCR clone 313649 (TRBV19, TRBJ2-1)
CASSIGTGNEQFF

SEQ ID NO: 627299 - protein, 15 aa, Homo sapiens
  CDR3 for alpha chain variable domain of TCR clone 313650 (TRAV17, TRAJ52)
CATEAGGTSYGKLTF

SEQ ID NO: 627300 - protein, 16 aa, Homo sapiens
  CDR3 for beta chain variable domain of TCR clone 313650 (TRBV20-1, TRBJ2-1)
CSAGRPAGGPYNEQCF

SEQ ID NO: 627301 - protein, 16 aa, Homo sapiens
  CDR3 for alpha chain variable domain of TCR clone 313651 (TRAV14/DV4, TRAJ54)
CAMREGRIQGAQKLVF

SEQ ID NO: 627302 - protein, 17 aa, Homo sapiens
  CDR3 for beta chain variable domain of TCR clone 313651 (TRBV20-1, TRBJ1-1)
CSASRGVTGNTEASLDK

SEQ ID NO: 627303 - protein, 11 aa, Homo sapiens
  CDR3 for alpha chain variable domain of TCR clone 313652 (TRAV13-1, TRAJ39)
SASHAGNMLTF

SEQ ID NO: 627304 - protein, 16 aa, Homo sapiens
  CDR3 for beta chain variable domain of TCR clone 313652 (TRBV20-1, TRBJ1-4)
CSARPYGGELNEKLFF

SEQ ID NO: 627305 - protein, 15 aa, Homo sapiens
  CDR3 for alpha chain variable domain of TCR clone 313653 (TRAV3, TRAJ13)
CAVRDIGGGYQKVTF

SEQ ID NO: 627306 - protein, 14 aa, Homo sapiens
  CDR3 for beta chain variable domain of TCR clone 313653 (TRBV19, TRBJ2-1)
CASPTFVLSGEQFF

SEQ ID NO: 627307 - protein, 14 aa, Homo sapiens
  CDR3 for alpha chain variable domain of TCR clone 313654 (TRAV1-2, TRAJ16)
CAVNRFSDGQKLLF

SEQ ID NO: 627308 - protein, 12 aa, Homo sapiens
  CDR3 for beta chain variable domain of TCR clone 313654 (TRBV27, TRBJ2-1)
CASRGFYNEQFF

SEQ ID NO: 627309 - protein, 13 aa, Homo sapiens
  CDR3 for alpha chain variable domain of TCR clone 313655 (TRAV26-2, TRAJ43)
CILRAVNNNDMRF

SEQ ID NO: 627310 - protein, 14 aa, Homo sapiens
  CDR3 for beta chain variable domain of TCR clone 313655 (TRBV7-7, TRBJ2-2)
CATRQDSDTGELFF

SEQ ID NO: 627311 - protein, 12 aa, Homo sapiens
  CDR3 for alpha chain variable domain of TCR clone 313656 (TRAV27, TRAJ33)
CAGDGSNYQLIW

SEQ ID NO: 627312 - protein, 16 aa, Homo sapiens
  CDR3 for beta chain variable domain of TCR clone 313656 (TRBV19, TRBJ1-1)
CASSPTRFWPGTEAFF

SEQ ID NO: 627313 - protein, 14 aa, Homo sapiens
  CDR3 for alpha chain variable domain of TCR clone 313657 (TRAV12-2, TRAJ17)
CAVLFTAAGNKLTF

SEQ ID NO: 627314 - protein, 17 aa, Homo sapiens
  CDR3 for beta chain variable domain of TCR clone 313657 (TRBV11-2, TRBJ2-1)
CASSLYPPGVEYNEQFF

SEQ ID NO: 627315 - protein, 14 aa, Homo sapiens
  CDR3 for alpha chain variable domain of TCR clone 313658 (TRAV12-2, TRAJ44)
CAVNLAGTASKLTF

SEQ ID NO: 627316 - protein, 13 aa, Homo sapiens
  CDR3 for beta chain variable domain of TCR clone 313658 (TRBV20-1, TRBJ1-6)
CSAPLGVGSPLHF

SEQ ID NO: 627317 - protein, 16 aa, Homo sapiens
  CDR3 for alpha chain variable domain of TCR clone 313659 (TRAV13-1, TRAJ48)
CAASIFGDFGNEKLTF

SEQ ID NO: 627318 - protein, 11 aa, Homo sapiens
  CDR3 for beta chain variable domain of TCR clone 313659 (TRBV27, TRBJ2-3)
CASSLGDTQYF

SEQ ID NO: 627319 - protein, 17 aa, Homo sapiens
  CDR3 for alpha chain variable domain of TCR clone 313660 (TRAV23/DV6, TRAJ57)
CAASSTPSQGGSETLVF

SEQ ID NO: 627320 - protein, 14 aa, Homo sapiens
  CDR3 for beta chain variable domain of TCR clone 313660 (TRBV25-1, TRBJ1-1)
CASTHLGGNTEAFF

SEQ ID NO: 627321 - protein, 14 aa, Homo sapiens
  CDR3 for alpha chain variable domain of TCR clone 313661 (TRAV12-3, TRAJ10)
SHLPLTGGGNKLTF

SEQ ID NO: 627322 - protein, 11 aa, Homo sapiens
  CDR3 for beta chain variable domain of TCR clone 313661 (TRBV20-1, TRBJ2-5)
CSADRGETQYF

SEQ ID NO: 627323 - protein, 13 aa, Homo sapiens
  CDR3 for alpha chain variable domain of TCR clone 313662 (TRAV3, TRAJ27)
CALRPPGAGKSTF

SEQ ID NO: 627324 - protein, 12 aa, Homo sapiens
  CDR3 for beta chain variable domain of TCR clone 313662 (TRBV7-9, TRBJ2-7)
CATRTDAYEQYF

SEQ ID NO: 627325 - protein, 10 aa, Homo sapiens
  CDR3 for alpha chain variable domain of TCR clone 313663 (TRAV8-3, TRAJ43)
CAVALADMRF

SEQ ID NO: 627326 - protein, 20 aa, Homo sapiens
  CDR3 for beta chain variable domain of TCR clone 313663 (TRBV7-8, TRBJ2-2)
CASSHLFPGPTIHITGELFF

SEQ ID NO: 627327 - protein, 14 aa, Homo sapiens
  CDR3 for alpha chain variable domain of TCR clone 313664 (TRAV2, TRAJ9)
CAVEDRSGGFKTIF

SEQ ID NO: 627328 - protein, 13 aa, Homo sapiens
  CDR3 for beta chain variable domain of TCR clone 313664 (TRBV7-9, TRBJ1-2)
CASSLKQNYGYTY

SEQ ID NO: 627329 - protein, 14 aa, Homo sapiens
  CDR3 for alpha chain variable domain of TCR clone 313665 (TRAV9-2, TRAJ39)
CALYIYNAGNMLTF

SEQ ID NO: 627330 - protein, 16 aa, Homo sapiens
  CDR3 for beta chain variable domain of TCR clone 313665 (TRBV11-3, TRBJ2-5)
CASSSVVAGSTETRYF

SEQ ID NO: 627331 - protein, 16 aa, Homo sapiens
  CDR3 for alpha chain variable domain of TCR clone 313666 (TRAV3, TRAJ37)
CAVRGKGSGNTGKLIF

SEQ ID NO: 627332 - protein, 16 aa, Homo sapiens
  CDR3 for beta chain variable domain of TCR clone 313666 (TRBV12-4, TRBJ1-5)
CASSRPVGGSNQPRHF

SEQ ID NO: 627333 - protein, 17 aa, Homo sapiens
  CDR3 for alpha chain variable domain of TCR clone 313667 (TRAV3, TRAJ38)
CAVRDCLNAGNNRKLIW

SEQ ID NO: 627334 - protein, 16 aa, Homo sapiens
  CDR3 for beta chain variable domain of TCR clone 313667 (TRBV27, TRBJ2-2)
CASSFRGLVRTGVLFF

SEQ ID NO: 627335 - protein, 13 aa, Homo sapiens
  CDR3 for alpha chain variable domain of TCR clone 313668 (TRAV13-1, TRAJ5)
CAASDTGRRALTF

SEQ ID NO: 627336 - protein, 13 aa, Homo sapiens
  CDR3 for beta chain variable domain of TCR clone 313668 (TRBV10-3, TRBJ1-2)
CAISERDSYGYTF

SEQ ID NO: 627337 - protein, 13 aa, Homo sapiens
  CDR3 for alpha chain variable domain of TCR clone 313669 (TRAV21, TRAJ24)
GLMTTDSWGKLQF

SEQ ID NO: 627338 - protein, 16 aa, Homo sapiens
  CDR3 for beta chain variable domain of TCR clone 313669 (TRBV7-3, TRBJ2-2)
CASSLKRGTLSGELFF

SEQ ID NO: 627339 - protein, 12 aa, Homo sapiens
  CDR3 for alpha chain variable domain of TCR clone 313670 (TRAV12-1, TRAJ5)
CVADTGRRALTF

SEQ ID NO: 627340 - protein, 14 aa, Homo sapiens
  CDR3 for beta chain variable domain of TCR clone 313670 (TRBV2, TRBJ1-1)
CARSEQWGDTEAFF

SEQ ID NO: 627341 - protein, 18 aa, Homo sapiens
  CDR3 for alpha chain variable domain of TCR clone 313671 (TRAV12-3, TRAJ52)
CAMSVGGARGTSYGKLTF

SEQ ID NO: 627342 - protein, 23 aa, Homo sapiens
  CDR3 for beta chain variable domain of TCR clone 313671 (TRBV7-9, TRBJ1-2)
EAQLEKSRLLSDRFSSGEDGYTF

SEQ ID NO: 627343 - protein, 15 aa, Homo sapiens
  CDR3 for alpha chain variable domain of TCR clone 313672 (TRAV13-1, TRAJ52)
CALRTGGTSYGKLTF

SEQ ID NO: 627344 - protein, 14 aa, Homo sapiens
  CDR3 for beta chain variable domain of TCR clone 313672 (TRBV20-1, TRBJ2-5)
CSASDAGSGETQYF

SEQ ID NO: 627345 - protein, 10 aa, Homo sapiens
  CDR3 for alpha chain variable domain of TCR clone 313673 (TRAV26-1, TRAJ22)
CIISLNFFWF

SEQ ID NO: 627346 - protein, 15 aa, Homo sapiens
  CDR3 for beta chain variable domain of TCR clone 313673 (TRBV4-2, TRBJ1-2)
CASSQRTGGRDGYTF

SEQ ID NO: 627347 - protein, 14 aa, Homo sapiens
  CDR3 for alpha chain variable domain of TCR clone 313674 (TRAV8-4, TRAJ3)
CAVSRYSSASKIIF

SEQ ID NO: 627348 - protein, 14 aa, Homo sapiens
  CDR3 for beta chain variable domain of TCR clone 313674 (TRBV20-1, TRBJ2-5)
CSAHRQGLWETQYF

SEQ ID NO: 627349 - protein, 12 aa, Homo sapiens
  CDR3 for alpha chain variable domain of TCR clone 313675 (TRAV13-1, TRAJ30)
CAASYRDDKIIF

SEQ ID NO: 627350 - protein, 15 aa, Homo sapiens
  CDR3 for beta chain variable domain of TCR clone 313675 (TRBV28, TRBJ2-7)
CASSPGGRGFYEQYF

SEQ ID NO: 627351 - protein, 15 aa, Homo sapiens
  CDR3 for alpha chain variable domain of TCR clone 313676 (TRAV27, TRAJ38)
CAARRNAGNNRKLIW

SEQ ID NO: 627352 - protein, 14 aa, Homo sapiens
  CDR3 for beta chain variable domain of TCR clone 313676 (TRBV2, TRBJ1-1)
CASRSGTMNTEAFF

SEQ ID NO: 627353 - protein, 11 aa, Homo sapiens
  CDR3 for alpha chain variable domain of TCR clone 313677 (TRAV12-1, TRAJ40)
CVLLRNLQIHL

SEQ ID NO: 627354 - protein, 18 aa, Homo sapiens
  CDR3 for beta chain variable domain of TCR clone 313677 (TRBV12-4, TRBJ2-2)
CASSLVAGTRGRTGELFF

SEQ ID NO: 627355 - protein, 10 aa, Homo sapiens
  CDR3 for alpha chain variable domain of TCR clone 313678 (TRAV23/DV6, TRAJ57)
CAASSTLSQG

SEQ ID NO: 627356 - protein, 14 aa, Homo sapiens
  CDR3 for beta chain variable domain of TCR clone 313678 (TRBV7-2, TRBJ2-1)
CASSPGLAGNEQFF

SEQ ID NO: 627357 - protein, 10 aa, Homo sapiens
  CDR3 for alpha chain variable domain of TCR clone 313679 (TRAV26-1, TRAJ22)
RSGSARQLTF

SEQ ID NO: 627358 - protein, 16 aa, Homo sapiens
  CDR3 for beta chain variable domain of TCR clone 313679 (TRBV24-1, TRBJ2-3)
CATSDRRQDLTDTQYF

SEQ ID NO: 627359 - protein, 12 aa, Homo sapiens
  CDR3 for alpha chain variable domain of TCR clone 313680 (TRAV3, TRAJ43)
CAVRDPNNDMRF

SEQ ID NO: 627360 - protein, 16 aa, Homo sapiens
  CDR3 for beta chain variable domain of TCR clone 313680 (TRBV24-1, TRBJ2-3)
CATSDPGTGATDTQYF

SEQ ID NO: 627361 - protein, 13 aa, Homo sapiens
  CDR3 for alpha chain variable domain of TCR clone 313681 (TRAV29/DV5, TRAJ49)
CAASTNTGNQLYF

SEQ ID NO: 627362 - protein, 13 aa, Homo sapiens
  CDR3 for beta chain variable domain of TCR clone 313681 (TRBV7-2, TRBJ1-4)
CASSLAGLEKLFF

SEQ ID NO: 627363 - protein, 14 aa, Homo sapiens
  CDR3 for alpha chain variable domain of TCR clone 313682 (TRAV8-2, TRAJ37)
CVVSISGNTGKLIF

SEQ ID NO: 627364 - protein, 13 aa, Homo sapiens
  CDR3 for beta chain variable domain of TCR clone 313682 (TRBV19, TRBJ1-2)
CASSQGQVYGYTF

SEQ ID NO: 627365 - protein, 12 aa, Homo sapiens
  CDR3 for alpha chain variable domain of TCR clone 313683 (TRAV13-1, TRAJ49)
CAASIAGNQFYF

SEQ ID NO: 627366 - protein, 12 aa, Homo sapiens
  CDR3 for beta chain variable domain of TCR clone 313683 (TRBV19, TRBJ2-3)
CATTSSTDTQYF

SEQ ID NO: 627367 - protein, 14 aa, Homo sapiens
  CDR3 for alpha chain variable domain of TCR clone 313684 (TRAV12-2, TRAJ6)
CASKWGGGIYIPTF

SEQ ID NO: 627368 - protein, 13 aa, Homo sapiens
  CDR3 for beta chain variable domain of TCR clone 313684 (TRBV2, TRBJ1-1)
CASSEGGNTEAFF

SEQ ID NO: 627369 - protein, 15 aa, Homo sapiens
  CDR3 for alpha chain variable domain of TCR clone 313685 (TRAV17, TRAJ56)
CATEPFTGANSKLTF

SEQ ID NO: 627370 - protein, 15 aa, Homo sapiens
  CDR3 for beta chain variable domain of TCR clone 313685 (TRBV28, TRBJ1-5)
CASSRTGGYVQPRHF

SEQ ID NO: 627371 - protein, 15 aa, Homo sapiens
  CDR3 for alpha chain variable domain of TCR clone 313686 (TRAV29/DV5, TRAJ42)
CAAKTDGGSQGNLIF

SEQ ID NO: 627372 - protein, 14 aa, Homo sapiens
  CDR3 for beta chain variable domain of TCR clone 313686 (TRBV15, TRBJ2-3)
CATRGGTSTDTQYF

SEQ ID NO: 627373 - protein, 14 aa, Homo sapiens
  CDR3 for alpha chain variable domain of TCR clone 313687 (TRAV12-2, TRAJ13)
CAVKNTGGYQKVTF

SEQ ID NO: 627374 - protein, 16 aa, Homo sapiens
  CDR3 for beta chain variable domain of TCR clone 313687 (TRBV12-4, TRBJ2-5)
CASSFFVRGRQETQYF

SEQ ID NO: 627375 - protein, 16 aa, Homo sapiens
  CDR3 for alpha chain variable domain of TCR clone 313688 (TRAV8-3, TRAJ18)
CAGALDRGSTLGRLYF

SEQ ID NO: 627376 - protein, 11 aa, Homo sapiens
  CDR3 for beta chain variable domain of TCR clone 313688 (TRBV29-1, TRBJ1-1)
CSVEILTEAFF

SEQ ID NO: 627377 - protein, 15 aa, Homo sapiens
  CDR3 for alpha chain variable domain of TCR clone 313689 (TRAV13-1, TRAJ44)
CAASRNTGTASKLTF

SEQ ID NO: 627378 - protein, 14 aa, Homo sapiens
  CDR3 for beta chain variable domain of TCR clone 313689 (TRBV11-2, TRBJ1-2)
CASSLYRCNYGYTF

SEQ ID NO: 627379 - protein, 15 aa, Homo sapiens
  CDR3 for alpha chain variable domain of TCR clone 313690 (TRAV3, TRAJ29)
CAVRAPLSATTPLVF

SEQ ID NO: 627380 - protein, 15 aa, Homo sapiens
  CDR3 for beta chain variable domain of TCR clone 313690 (TRBV28, TRBJ1-1)
CASRIKGGLNTEAFF

SEQ ID NO: 627381 - protein, 14 aa, Homo sapiens
  CDR3 for alpha chain variable domain of TCR clone 313691 (TRAV12-2, TRAJ45)
CAVYSGGGADGLTF

SEQ ID NO: 627382 - protein, 14 aa, Homo sapiens
  CDR3 for beta chain variable domain of TCR clone 313691 (TRBV7-9, TRBJ2-7)
CASSLSQGSYEQYF

SEQ ID NO: 627383 - protein, 11 aa, Homo sapiens
  CDR3 for alpha chain variable domain of TCR clone 313692 (TRAV17, TRAJ43)
CATPRSNDMRF

SEQ ID NO: 627384 - protein, 15 aa, Homo sapiens
  CDR3 for beta chain variable domain of TCR clone 313692 (TRBV11-2, TRBJ2-1)
CASSLGTSGLNGQFC

SEQ ID NO: 627385 - protein, 13 aa, Homo sapiens
  CDR3 for alpha chain variable domain of TCR clone 313693 (TRAV8-3, TRAJ28)
CAVGAVGSYQLTF

SEQ ID NO: 627386 - protein, 15 aa, Homo sapiens
  CDR3 for beta chain variable domain of TCR clone 313693 (TRBV7-9, TRBJ1-5)
CASSQGHQPNKHQHF

SEQ ID NO: 627387 - protein, 17 aa, Homo sapiens
  CDR3 for alpha chain variable domain of TCR clone 313694 (TRAV13-1, TRAJ52)
CAASSGAGGTSYGKLTF

SEQ ID NO: 627388 - protein, 16 aa, Homo sapiens
  CDR3 for beta chain variable domain of TCR clone 313694 (TRBV4-3, TRBJ2-1)
CASSPALDRGVNEQFF

SEQ ID NO: 627389 - protein, 13 aa, Homo sapiens
  CDR3 for alpha chain variable domain of TCR clone 313695 (TRAV30, TRAJ53)
CGTVTGSNYKLTF

SEQ ID NO: 627390 - protein, 14 aa, Homo sapiens
  CDR3 for beta chain variable domain of TCR clone 313695 (TRBV19, TRBJ2-1)
CASPTFVLSGEQFF

SEQ ID NO: 627391 - protein, 22 aa, Homo sapiens
  CDR3 for alpha chain variable domain of TCR clone 313696 (TRAV27, TRAJ41)
CAVRTQIPDIQNPDPAVYQLRD

SEQ ID NO: 627392 - protein, 16 aa, Homo sapiens
  CDR3 for beta chain variable domain of TCR clone 313696 (TRBV5-1, TRBJ2-3)
CASSLGLAVYTDTQYC

SEQ ID NO: 627393 - protein, 14 aa, Homo sapiens
  CDR3 for alpha chain variable domain of TCR clone 313697 (TRAV29/DV5, TRAJ36)
CAARRKTGANNLFF

SEQ ID NO: 627394 - protein, 17 aa, Homo sapiens
  CDR3 for beta chain variable domain of TCR clone 313697 (TRBV5-1, TRBJ2-2)
CASSLVGLSGGTGELFF

SEQ ID NO: 627395 - protein, 15 aa, Homo sapiens
  CDR3 for alpha chain variable domain of TCR clone 313698 (TRAV29/DV5, TRAJ42)
CAAKTDGGSQGNLIF

SEQ ID NO: 627396 - protein, 14 aa, Homo sapiens
  CDR3 for beta chain variable domain of TCR clone 313698 (TRBV7-8, TRBJ2-7)
CASTFRGGPNEQYF

SEQ ID NO: 627397 - protein, 12 aa, Homo sapiens
  CDR3 for alpha chain variable domain of TCR clone 313699 (TRAV8-4, TRAJ37)
GAVRSNTGKLIF

SEQ ID NO: 627398 - protein, 16 aa, Homo sapiens
  CDR3 for beta chain variable domain of TCR clone 313699 (TRBV7-2, TRBJ2-3)
CASSLVGDASTDTQYF

SEQ ID NO: 627399 - protein, 13 aa, Homo sapiens
  CDR3 for alpha chain variable domain of TCR clone 313700 (TRAV2, TRAJ40)
CAVVTSGTYEYIF

SEQ ID NO: 627400 - protein, 15 aa, Homo sapiens
  CDR3 for beta chain variable domain of TCR clone 313700 (TRBV11-3, TRBJ2-3)
CASRKDGREGDAQYF

SEQ ID NO: 627401 - protein, 15 aa, Homo sapiens
  CDR3 for alpha chain variable domain of TCR clone 313701 (TRAV13-1, TRAJ17)
FAASIERAAGNKLTF

SEQ ID NO: 627402 - protein, 12 aa, Homo sapiens
  CDR3 for beta chain variable domain of TCR clone 313701 (TRBV5-7, TRBJ1-1)
CASSLGRGKAFF

SEQ ID NO: 627403 - protein, 11 aa, Homo sapiens
  CDR3 for alpha chain variable domain of TCR clone 313702 (TRAV12-1, TRAJ8)
CVVTGFQKLVF

SEQ ID NO: 627404 - protein, 14 aa, Homo sapiens
  CDR3 for beta chain variable domain of TCR clone 313702 (TRBV18, TRBJ2-7)
CASSPRGGAYEQYF

SEQ ID NO: 627405 - protein, 16 aa, Homo sapiens
  CDR3 for alpha chain variable domain of TCR clone 313703 (TRAV2, TRAJ32)
CAVEDGYGGATNKLIF

SEQ ID NO: 627406 - protein, 14 aa, Homo sapiens
  CDR3 for beta chain variable domain of TCR clone 313703 (TRBV4-1, TRBJ2-2)
CASSQAVDTGELFF

SEQ ID NO: 627407 - protein, 21 aa, Homo sapiens
  CDR3 for alpha chain variable domain of TCR clone 313704 (TRAV25, TRAJ47)
TATQTTDVGTYFWEYGNKLVV

SEQ ID NO: 627408 - protein, 16 aa, Homo sapiens
  CDR3 for beta chain variable domain of TCR clone 313704 (TRBV6-6, TRBJ2-1)
CASSWGGQGPYNEQFF

SEQ ID NO: 627409 - protein, 13 aa, Homo sapiens
  CDR3 for alpha chain variable domain of TCR clone 313705 (TRAV36/DV7, TRAJ24)
CAVETDSWGKLQF

SEQ ID NO: 627410 - protein, 19 aa, Homo sapiens
  CDR3 for beta chain variable domain of TCR clone 313705 (TRBV12-4, TRBJ2-5)
CASSRRWVTELGQKETQYF

SEQ ID NO: 627411 - protein, 22 aa, Homo sapiens
  CDR3 for alpha chain variable domain of TCR clone 313706 (TRAV12-2, TRAJ32)
CSSETPSPVIQPPKSATSKLIF

SEQ ID NO: 627412 - protein, 15 aa, Homo sapiens
  CDR3 for beta chain variable domain of TCR clone 313706 (TRBV28, TRBJ2-5)
CASSADRGRGETQYF

SEQ ID NO: 627413 - protein, 19 aa, Homo sapiens
  CDR3 for alpha chain variable domain of TCR clone 313707 (TRAV21, TRAJ20)
SLVTQPPTSVLPNDYKLSF

SEQ ID NO: 627414 - protein, 16 aa, Homo sapiens
  CDR3 for beta chain variable domain of TCR clone 313707 (TRBV20-1, TRBJ1-4)
CSAPGQGLLTNEKLFF

SEQ ID NO: 627415 - protein, 13 aa, Homo sapiens
  CDR3 for alpha chain variable domain of TCR clone 313708 (TRAV36/DV7, TRAJ37)
CAVFPSNTGKLIF

SEQ ID NO: 627416 - protein, 14 aa, Homo sapiens
  CDR3 for beta chain variable domain of TCR clone 313708 (TRBV7-2, TRBJ2-7)
CASSPKTSFYEQYF

SEQ ID NO: 627417 - protein, 13 aa, Homo sapiens
  CDR3 for alpha chain variable domain of TCR clone 313709 (TRAV17, TRAJ15)
CATDARAGNALIF

SEQ ID NO: 627418 - protein, 15 aa, Homo sapiens
  CDR3 for beta chain variable domain of TCR clone 313709 (TRBV20-1, TRBJ2-7)
CSARDRVSGMDEQYF

SEQ ID NO: 627419 - protein, 18 aa, Homo sapiens
  CDR3 for alpha chain variable domain of TCR clone 313710 (TRAV21, TRAJ52)
CAVRPSPAGGTSYGKLTF

SEQ ID NO: 627420 - protein, 15 aa, Homo sapiens
  CDR3 for beta chain variable domain of TCR clone 313710 (TRBV7-9, TRBJ2-7)
CASGSSGLAVYEQYF

SEQ ID NO: 627421 - protein, 14 aa, Homo sapiens
  CDR3 for alpha chain variable domain of TCR clone 313711 (TRAV12-2, TRAJ11)
CAVNRESGYSTLTF

SEQ ID NO: 627422 - protein, 10 aa, Homo sapiens
  CDR3 for beta chain variable domain of TCR clone 313711 (TRBV20-1, TRBJ2-5)
CSARFETQYC

SEQ ID NO: 627423 - protein, 15 aa, Homo sapiens
  CDR3 for alpha chain variable domain of TCR clone 313712 (TRAV8-3, TRAJ6)
CAVGPLGGGSYIPTF

SEQ ID NO: 627424 - protein, 16 aa, Homo sapiens
  CDR3 for beta chain variable domain of TCR clone 313712 (TRBV12-5, TRBJ2-5)
CASGPRTSGNRETQYF

SEQ ID NO: 627425 - protein, 18 aa, Homo sapiens
  CDR3 for alpha chain variable domain of TCR clone 313713 (TRAV3, TRAJ12)
CAVRDEMVRWIADINLSS

SEQ ID NO: 627426 - protein, 15 aa, Homo sapiens
  CDR3 for beta chain variable domain of TCR clone 313713 (TRBV5-5, TRBJ1-5)
CASSLKGGGEQPQHF

SEQ ID NO: 627427 - protein, 11 aa, Homo sapiens
  CDR3 for alpha chain variable domain of TCR clone 313714 (TRAV35, TRAJ39)
APTNAGNMLTF

SEQ ID NO: 627428 - protein, 16 aa, Homo sapiens
  CDR3 for beta chain variable domain of TCR clone 313714 (TRBV2, TRBJ2-3)
CASSTSVEGVTDTQYF

SEQ ID NO: 627429 - protein, 15 aa, Homo sapiens
  CDR3 for alpha chain variable domain of TCR clone 313715 (TRAV8-2, TRAJ40)
CVVLGTTSGTYKYIF

SEQ ID NO: 627430 - protein, 17 aa, Homo sapiens
  CDR3 for beta chain variable domain of TCR clone 313715 (TRBV20-1, TRBJ2-2)
CSASGSGQGGLTGELFF

SEQ ID NO: 627431 - protein, 12 aa, Homo sapiens
  CDR3 for alpha chain variable domain of TCR clone 313716 (TRAV12-1, TRAJ34)
CVVPLNTDKPIF

SEQ ID NO: 627432 - protein, 14 aa, Homo sapiens
  CDR3 for beta chain variable domain of TCR clone 313716 (TRBV19, TRBJ1-1)
CASLRTGLNTEAFF

SEQ ID NO: 627433 - protein, 14 aa, Homo sapiens
  CDR3 for alpha chain variable domain of TCR clone 313717 (TRAV9-2, TRAJ39)
CALHIYNAGNMLTF

SEQ ID NO: 627434 - protein, 17 aa, Homo sapiens
  CDR3 for beta chain variable domain of TCR clone 313717 (TRBV18, TRBJ2-2)
CASSQRSSGQGPGELFF

SEQ ID NO: 627435 - protein, 15 aa, Homo sapiens
  CDR3 for alpha chain variable domain of TCR clone 313718 (TRAV13-1, TRAJ44)
CAASRGSGTASKLTF

SEQ ID NO: 627436 - protein, 14 aa, Homo sapiens
  CDR3 for beta chain variable domain of TCR clone 313718 (TRBV7-2, TRBJ2-5)
CASSPRGSSETQYF

SEQ ID NO: 627437 - protein, 11 aa, Homo sapiens
  CDR3 for alpha chain variable domain of TCR clone 313719 (TRAV12-2, TRAJ26)
CALEGGQNFVF

SEQ ID NO: 627438 - protein, 17 aa, Homo sapiens
  CDR3 for beta chain variable domain of TCR clone 313719 (TRBV20-1, TRBJ2-1)
CSASGGENTGAYNEQFF

SEQ ID NO: 627439 - protein, 13 aa, Homo sapiens
  CDR3 for alpha chain variable domain of TCR clone 313720 (TRAV12-3, TRAJ9)
CAMRNTGGFKTIF

SEQ ID NO: 627440 - protein, 14 aa, Homo sapiens
  CDR3 for beta chain variable domain of TCR clone 313720 (TRBV11-2, TRBJ2-7)
CASISTGEGYEQYF

SEQ ID NO: 627441 - protein, 12 aa, Homo sapiens
  CDR3 for alpha chain variable domain of TCR clone 313721 (TRAV26-2, TRAJ47)
CILVEYGNKLVF

SEQ ID NO: 627442 - protein, 16 aa, Homo sapiens
  CDR3 for beta chain variable domain of TCR clone 313721 (TRBV18, TRBJ1-4)
CASSPLVGDGAEKLFF

SEQ ID NO: 627443 - protein, 11 aa, Homo sapiens
  CDR3 for alpha chain variable domain of TCR clone 313722 (TRAV25, TRAJ47)
CAGLYGNKLVF

SEQ ID NO: 627444 - protein, 11 aa, Homo sapiens
  CDR3 for beta chain variable domain of TCR clone 313722 (TRBV29-1, TRBJ2-5)
CSEDRTGTQYF

SEQ ID NO: 627445 - protein, 16 aa, Homo sapiens
  CDR3 for alpha chain variable domain of TCR clone 313723 (TRAV30, TRAJ24)
CGTEIVDADSWGKFQF

SEQ ID NO: 627446 - protein, 17 aa, Homo sapiens
  CDR3 for beta chain variable domain of TCR clone 313723 (TRBV5-1, TRBJ2-1)
CASSLAGLTGGSGEQFF

SEQ ID NO: 627447 - protein, 14 aa, Homo sapiens
  CDR3 for alpha chain variable domain of TCR clone 313724 (TRAV20, TRAJ21)
CAAGGIYNFNKFYF

SEQ ID NO: 627448 - protein, 12 aa, Homo sapiens
  CDR3 for beta chain variable domain of TCR clone 313724 (TRBV12-4, TRBJ2-1)
CASRLVRVEQFF

SEQ ID NO: 627449 - protein, 14 aa, Homo sapiens
  CDR3 for alpha chain variable domain of TCR clone 313725 (TRAV14/DV4, TRAJ42)
CPRGSLRSQGNLIF

SEQ ID NO: 627450 - protein, 13 aa, Homo sapiens
  CDR3 for beta chain variable domain of TCR clone 313725 (TRBV10-3, TRBJ2-7)
CASKLAVNYEQYF

SEQ ID NO: 627451 - protein, 17 aa, Homo sapiens
  CDR3 for alpha chain variable domain of TCR clone 313726 (TRAV3, TRAJ42)
CAVRDRDYGGSQGNLIF

SEQ ID NO: 627452 - protein, 14 aa, Homo sapiens
  CDR3 for beta chain variable domain of TCR clone 313726 (TRBV19, TRBJ2-5)
CASSMTGQQETPYF

SEQ ID NO: 627453 - protein, 14 aa, Homo sapiens
  CDR3 for alpha chain variable domain of TCR clone 313727 (TRAV1-2, TRAJ8)
CAVREGTGFQKLVF

SEQ ID NO: 627454 - protein, 15 aa, Homo sapiens
  CDR3 for beta chain variable domain of TCR clone 313727 (TRBV20-1, TRBJ2-7)
CSAREGRDSLYEQYF

SEQ ID NO: 627455 - protein, 11 aa, Homo sapiens
  CDR3 for alpha chain variable domain of TCR clone 313728 (TRAV12-2, TRAJ9)
CCVTGGFKTIF

SEQ ID NO: 627456 - protein, 13 aa, Homo sapiens
  CDR3 for beta chain variable domain of TCR clone 313728 (TRBV12-4, TRBJ1-1)
CASSPGTGFEAFF

SEQ ID NO: 627457 - protein, 14 aa, Homo sapiens
  CDR3 for alpha chain variable domain of TCR clone 313729 (TRAV4, TRAJ23)
CLVGAGNQGGKLIF

SEQ ID NO: 627458 - protein, 11 aa, Homo sapiens
  CDR3 for beta chain variable domain of TCR clone 313729 (TRBV29-1, TRBJ2-5)
CSEDRTGTQYF

SEQ ID NO: 627459 - protein, 13 aa, Homo sapiens
  CDR3 for alpha chain variable domain of TCR clone 313730 (TRAV21, TRAJ27)
CAARPGNAGKSTF

SEQ ID NO: 627460 - protein, 15 aa, Homo sapiens
  CDR3 for beta chain variable domain of TCR clone 313730 (TRBV18, TRBJ2-3)
CASSPLAGETDTQYF

SEQ ID NO: 627461 - protein, 14 aa, Homo sapiens
  CDR3 for alpha chain variable domain of TCR clone 313731 (TRAV3, TRAJ34)
CAVRAPGHTDKLIF

SEQ ID NO: 627462 - protein, 17 aa, Homo sapiens
  CDR3 for beta chain variable domain of TCR clone 313731 (TRBV20-1, TRBJ2-7)
CSAAPGLARGISYEQYF

SEQ ID NO: 627463 - protein, 16 aa, Homo sapiens
  CDR3 for alpha chain variable domain of TCR clone 313732 (TRAV30, TRAJ24)
CGTEIVDADSWGKFQF

SEQ ID NO: 627464 - protein, 15 aa, Homo sapiens
  CDR3 for beta chain variable domain of TCR clone 313732 (TRBV20-1, TRBJ2-4)
CSARDLTGGPKIQYF

SEQ ID NO: 627465 - protein, 14 aa, Homo sapiens
  CDR3 for alpha chain variable domain of TCR clone 313733 (TRAV38-1, TRAJ40)
CALRPTSGTYKYIF

SEQ ID NO: 627466 - protein, 14 aa, Homo sapiens
  CDR3 for beta chain variable domain of TCR clone 313733 (TRBV25-1, TRBJ1-1)
CASTRLVGNTEAFF

SEQ ID NO: 627467 - protein, 13 aa, Homo sapiens
  CDR3 for alpha chain variable domain of TCR clone 313734 (TRAV36/DV7, TRAJ40)
CAVDTSGTYKYIF

SEQ ID NO: 627468 - protein, 15 aa, Homo sapiens
  CDR3 for beta chain variable domain of TCR clone 313734 (TRBV7-2, TRBJ2-1)
CASSFQADEYNEQFF

SEQ ID NO: 627469 - protein, 13 aa, Homo sapiens
  CDR3 for alpha chain variable domain of TCR clone 313735 (TRAV13-1, TRAJ37)
CAARSGNTGKLSF

SEQ ID NO: 627470 - protein, 14 aa, Homo sapiens
  CDR3 for beta chain variable domain of TCR clone 313735 (TRBV12-4, TRBJ2-3)
CASSLGQGTDTQYF

SEQ ID NO: 627471 - protein, 10 aa, Homo sapiens
  CDR3 for alpha chain variable domain of TCR clone 313736 (TRAV3, TRAJ30)
CALREIEIIF

SEQ ID NO: 627472 - protein, 14 aa, Homo sapiens
  CDR3 for beta chain variable domain of TCR clone 313736 (TRBV15, TRBJ2-3)
CATRSGTSTDTQYF

SEQ ID NO: 627473 - protein, 14 aa, Homo sapiens
  CDR3 for alpha chain variable domain of TCR clone 313737 (TRAV9-2, TRAJ39)
CALYIYNAGNMLTF

SEQ ID NO: 627474 - protein, 14 aa, Homo sapiens
  CDR3 for beta chain variable domain of TCR clone 313737 (TRBV28, TRBJ1-5)
CASIPYGLEQPQHF

SEQ ID NO: 627475 - protein, 18 aa, Homo sapiens
  CDR3 for alpha chain variable domain of TCR clone 313738 (TRAV21, TRAJ52)
CAVRPSPAGGTSYGKLTF

SEQ ID NO: 627476 - protein, 13 aa, Homo sapiens
  CDR3 for beta chain variable domain of TCR clone 313738 (TRBV9, TRBJ2-1)
CASSPSGGNEQFF

SEQ ID NO: 627477 - protein, 15 aa, Homo sapiens
  CDR3 for alpha chain variable domain of TCR clone 313739 (TRAV2, TRAJ9)
CAVEDRGTGGFKTIF

SEQ ID NO: 627478 - protein, 13 aa, Homo sapiens
  CDR3 for beta chain variable domain of TCR clone 313739 (TRBV19, TRBJ2-7)
CASRKAGGSEQYF

SEQ ID NO: 627479 - protein, 14 aa, Homo sapiens
  CDR3 for alpha chain variable domain of TCR clone 313740 (TRAV13-1, TRAJ32)
CAARGSGATNKLIF

SEQ ID NO: 627480 - protein, 18 aa, Homo sapiens
  CDR3 for beta chain variable domain of TCR clone 313740 (TRBV11-2, TRBJ2-3)
CASSLGGASRGAPNTQYF

SEQ ID NO: 627481 - protein, 16 aa, Homo sapiens
  CDR3 for alpha chain variable domain of TCR clone 313741 (TRAV30, TRAJ24)
CGTEIVDADSWGKFQF

SEQ ID NO: 627482 - protein, 11 aa, Homo sapiens
  CDR3 for beta chain variable domain of TCR clone 313741 (TRBV6-1, TRBJ2-7)
CASSDLYEQYF

SEQ ID NO: 627483 - protein, 14 aa, Homo sapiens
  CDR3 for alpha chain variable domain of TCR clone 313742 (TRAV1-2, TRAJ13)
CAVKNSGGYQKVTF

SEQ ID NO: 627484 - protein, 11 aa, Homo sapiens
  CDR3 for beta chain variable domain of TCR clone 313742 (TRBV7-3, TRBJ2-5)
CQQLPGRDQYF

SEQ ID NO: 627485 - protein, 17 aa, Homo sapiens
  CDR3 for alpha chain variable domain of TCR clone 313743 (TRAV13-1, TRAJ28)
CAASPPYSGAGSYQLTF

SEQ ID NO: 627486 - protein, 17 aa, Homo sapiens
  CDR3 for beta chain variable domain of TCR clone 313743 (TRBV20-1, TRBJ2-1)
CSARDPLAGVWDNEQFF

SEQ ID NO: 627487 - protein, 14 aa, Homo sapiens
  CDR3 for alpha chain variable domain of TCR clone 313744 (TRAV12-2, TRAJ45)
CAVNSGGGADGRTF

SEQ ID NO: 627488 - protein, 18 aa, Homo sapiens
  CDR3 for beta chain variable domain of TCR clone 313744 (TRBV7-2, TRBJ2-7)
CASSLAQGLRDSSYEQYF

SEQ ID NO: 627489 - protein, 13 aa, Homo sapiens
  CDR3 for alpha chain variable domain of TCR clone 313745 (TRAV36/DV7, TRAJ54)
CAVDIQGGQKLVF

SEQ ID NO: 627490 - protein, 14 aa, Homo sapiens
  CDR3 for beta chain variable domain of TCR clone 313745 (TRBV19, TRBJ2-7)
CSSNFRDTFTGMYF

SEQ ID NO: 627491 - protein, 14 aa, Homo sapiens
  CDR3 for alpha chain variable domain of TCR clone 313746 (TRAV12-3, TRAJ15)
CAMIPPQAGTALIF

SEQ ID NO: 627492 - protein, 12 aa, Homo sapiens
  CDR3 for beta chain variable domain of TCR clone 313746 (TRBV11-2, TRBJ2-2)
SASSFGGGELFF

SEQ ID NO: 627493 - protein, 17 aa, Homo sapiens
  CDR3 for alpha chain variable domain of TCR clone 313747 (TRAV17, TRAJ28)
CSTDAVYSGAGSYQLTF

SEQ ID NO: 627494 - protein, 14 aa, Homo sapiens
  CDR3 for beta chain variable domain of TCR clone 313747 (TRBV6-1, TRBJ1-3)
CASVQGGGGNTIYF

SEQ ID NO: 627495 - protein, 16 aa, Homo sapiens
  CDR3 for alpha chain variable domain of TCR clone 313748 (TRAV3, TRAJ37)
CAVRGKGSGNTGKLIF

SEQ ID NO: 627496 - protein, 15 aa, Homo sapiens
  CDR3 for beta chain variable domain of TCR clone 313748 (TRBV7-8, TRBJ1-2)
CASSLVRDGGLGYTF

SEQ ID NO: 627497 - protein, 23 aa, Homo sapiens
  CDR3 for alpha chain variable domain of TCR clone 313749 (TRAV8-4, TRAJ38)
CAPLNAGNNHIQNPDPAVYQLRD

SEQ ID NO: 627498 - protein, 12 aa, Homo sapiens
  CDR3 for beta chain variable domain of TCR clone 313749 (TRBV6-1, TRBJ2-7)
CASSEPLYEQYF

SEQ ID NO: 627499 - protein, 12 aa, Homo sapiens
  CDR3 for alpha chain variable domain of TCR clone 313750 (TRAV13-2, TRAJ23)
CAERHRGGKLIF

SEQ ID NO: 627500 - protein, 15 aa, Homo sapiens
  CDR3 for beta chain variable domain of TCR clone 313750 (TRBV7-2, TRBJ2-5)
CASTPRGASGETQYF

SEQ ID NO: 627501 - protein, 10 aa, Homo sapiens
  CDR3 for alpha chain variable domain of TCR clone 313751 (TRAV27, TRAJ58)
SETSGSRLTF

SEQ ID NO: 627502 - protein, 14 aa, Homo sapiens
  CDR3 for beta chain variable domain of TCR clone 313751 (TRBV7-2, TRBJ2-7)
CASRSQGAAYEQYF

SEQ ID NO: 627503 - protein, 10 aa, Homo sapiens
  CDR3 for alpha chain variable domain of TCR clone 313752 (TRAV23/DV6, TRAJ57)
CAESSTLSQG

SEQ ID NO: 627504 - protein, 14 aa, Homo sapiens
  CDR3 for beta chain variable domain of TCR clone 313752 (TRBV20-1, TRBJ2-7)
CSAKRGRSSYEQYF

SEQ ID NO: 627505 - protein, 12 aa, Homo sapiens
  CDR3 for alpha chain variable domain of TCR clone 313753 (TRAV20, TRAJ34)
CAVKDNTDKLIF

SEQ ID NO: 627506 - protein, 21 aa, Homo sapiens
  CDR3 for beta chain variable domain of TCR clone 313753 (TRBV7-9, TRBJ2-7)
RGTRPCISVPAAVRGPYEQYF

SEQ ID NO: 627507 - protein, 10 aa, Homo sapiens
  CDR3 for alpha chain variable domain of TCR clone 313754 (TRAV23/DV6, TRAJ43)
CAAAVAALEQ

SEQ ID NO: 627508 - protein, 15 aa, Homo sapiens
  CDR3 for beta chain variable domain of TCR clone 313754 (TRBV6-5, TRBJ2-1)
CASSYDAGAGNEQFF

SEQ ID NO: 627509 - protein, 13 aa, Homo sapiens
  CDR3 for alpha chain variable domain of TCR clone 313755 (TRAV8-3, TRAJ28)
CAVGAVGSYQLTF

SEQ ID NO: 627510 - protein, 12 aa, Homo sapiens
  CDR3 for beta chain variable domain of TCR clone 313755 (TRBV14, TRBJ2-7)
CASSSLKGEQYF

SEQ ID NO: 627511 - protein, 13 aa, Homo sapiens
  CDR3 for alpha chain variable domain of TCR clone 313756 (TRAV8-4, TRAJ36)
CAVSEGGANNLFF

SEQ ID NO: 627512 - protein, 18 aa, Homo sapiens
  CDR3 for beta chain variable domain of TCR clone 313756 (TRBV7-9, TRBJ2-7)
CASSLTTSGSRTWYEQYF

SEQ ID NO: 627513 - protein, 13 aa, Homo sapiens
  CDR3 for alpha chain variable domain of TCR clone 313757 (TRAV21, TRAJ57)
CAVTQGGSEKLVF

SEQ ID NO: 627514 - protein, 15 aa, Homo sapiens
  CDR3 for beta chain variable domain of TCR clone 313757 (TRBV5-1, TRBJ1-1)
CASISTTGTNTEAFF

SEQ ID NO: 627515 - protein, 17 aa, Homo sapiens
  CDR3 for alpha chain variable domain of TCR clone 313758 (TRAV29/DV5, TRAJ10)
CSVLLGRATGGGNKLTF

SEQ ID NO: 627516 - protein, 17 aa, Homo sapiens
  CDR3 for beta chain variable domain of TCR clone 313758 (TRBV7-8, TRBJ2-6)
CASSAGTGGAGANVLTF

SEQ ID NO: 627517 - protein, 14 aa, Homo sapiens
  CDR3 for alpha chain variable domain of TCR clone 313759 (TRAV8-1, TRAJ5)
CAVSMDTGRRALTF

SEQ ID NO: 627518 - protein, 15 aa, Homo sapiens
  CDR3 for beta chain variable domain of TCR clone 313759 (TRBV19, TRBJ2-4)
CASRGPRRGENIEYF

SEQ ID NO: 627519 - protein, 14 aa, Homo sapiens
  CDR3 for alpha chain variable domain of TCR clone 313760 (TRAV1-2, TRAJ8)
CAVRADTGFRKLVF

SEQ ID NO: 627520 - protein, 15 aa, Homo sapiens
  CDR3 for beta chain variable domain of TCR clone 313760 (TRBV6-3, TRBJ2-7)
CASSSPGTVFYEQYF

SEQ ID NO: 627521 - protein, 12 aa, Homo sapiens
  CDR3 for alpha chain variable domain of TCR clone 313761 (TRAV21, TRAJ37)
CAVRGNTGKLIF

SEQ ID NO: 627522 - protein, 14 aa, Homo sapiens
  CDR3 for beta chain variable domain of TCR clone 313761 (TRBV19, TRBJ2-1)
CDSEVTGARNEQFF

SEQ ID NO: 627523 - protein, 13 aa, Homo sapiens
  CDR3 for alpha chain variable domain of TCR clone 313762 (TRAV1-1, TRAJ9)
CAAKNTGGLKTIF

SEQ ID NO: 627524 - protein, 14 aa, Homo sapiens
  CDR3 for beta chain variable domain of TCR clone 313762 (TRBV20-1, TRBJ2-1)
CSAQIGGAANEQFF

SEQ ID NO: 627525 - protein, 14 aa, Homo sapiens
  CDR3 for alpha chain variable domain of TCR clone 313763 (TRAV2, TRAJ37)
CAVDFTSNTGKLIY

SEQ ID NO: 627526 - protein, 13 aa, Homo sapiens
  CDR3 for beta chain variable domain of TCR clone 313763 (TRBV20-1, TRBJ1-1)
CSAPLGGGTEAFF

SEQ ID NO: 627527 - protein, 20 aa, Homo sapiens
  CDR3 for alpha chain variable domain of TCR clone 313764 (TRAV26-1, TRAJ42)
CCVLLHRQTYYGGSQGNLIF

SEQ ID NO: 627528 - protein, 15 aa, Homo sapiens
  CDR3 for beta chain variable domain of TCR clone 313764 (TRBV7-2, TRBJ2-1)
CASSLVGSSYNEQFF

SEQ ID NO: 627529 - protein, 16 aa, Homo sapiens
  CDR3 for alpha chain variable domain of TCR clone 313765 (TRAV30, TRAJ24)
CGTEIVDADSWGKFQV

SEQ ID NO: 627530 - protein, 14 aa, Homo sapiens
  CDR3 for beta chain variable domain of TCR clone 313765 (TRBV12-5, TRBJ2-5)
CASGSRTHQETHYF

SEQ ID NO: 627531 - protein, 12 aa, Homo sapiens
  CDR3 for alpha chain variable domain of TCR clone 313766 (TRAV8-3, TRAJ26)
CAGDNYGQNVVF

SEQ ID NO: 627532 - protein, 11 aa, Homo sapiens
  CDR3 for beta chain variable domain of TCR clone 313766 (TRBV29-1, TRBJ2-5)
CSEDRTGTQYF

SEQ ID NO: 627533 - protein, 17 aa, Homo sapiens
  CDR3 for alpha chain variable domain of TCR clone 313767 (TRAV3, TRAJ42)
CAVRDRDYGGSQGNLIF

SEQ ID NO: 627534 - protein, 15 aa, Homo sapiens
  CDR3 for beta chain variable domain of TCR clone 313767 (TRBV6-6, TRBJ2-7)
CASSSSYGGSYEQYF

SEQ ID NO: 627535 - protein, 15 aa, Homo sapiens
  CDR3 for alpha chain variable domain of TCR clone 313768 (TRAV3, TRAJ5)
CAVRDLYTGRRELTF

SEQ ID NO: 627536 - protein, 16 aa, Homo sapiens
  CDR3 for beta chain variable domain of TCR clone 313768 (TRBV20-1, TRBJ1-4)
CSAPGQGLLTNEKLFF

SEQ ID NO: 627537 - protein, 12 aa, Homo sapiens
  CDR3 for alpha chain variable domain of TCR clone 313769 (TRAV12-2, TRAJ29)
CAVDSGSTPLVF

SEQ ID NO: 627538 - protein, 13 aa, Homo sapiens
  CDR3 for beta chain variable domain of TCR clone 313769 (TRBV19, TRBJ1-2)
CASSQGQVYGYTF

SEQ ID NO: 627539 - protein, 20 aa, Homo sapiens
  CDR3 for alpha chain variable domain of TCR clone 313770 (TRAV26-1, TRAJ42)
CCVLLHRQTYYGGSQGNLIF

SEQ ID NO: 627540 - protein, 13 aa, Homo sapiens
  CDR3 for beta chain variable domain of TCR clone 313770 (TRBV7-2, TRBJ2-7)
CASSSPSGSEQYF

SEQ ID NO: 627541 - protein, 13 aa, Homo sapiens
  CDR3 for alpha chain variable domain of TCR clone 313771 (TRAV35, TRAJ48)
CAGHGFGNEKLTF

SEQ ID NO: 627542 - protein, 14 aa, Homo sapiens
  CDR3 for beta chain variable domain of TCR clone 313771 (TRBV19, TRBJ2-1)
CASPTFVLSGEQFF

SEQ ID NO: 627543 - protein, 16 aa, Homo sapiens
  CDR3 for alpha chain variable domain of TCR clone 313772 (TRAV1-2, TRAJ10)
CAVRGVLTGGGNKLTF

SEQ ID NO: 627544 - protein, 15 aa, Homo sapiens
  CDR3 for beta chain variable domain of TCR clone 313772 (TRBV15, TRBJ1-5)
CATSRDPVSNQPQHY

SEQ ID NO: 627545 - protein, 12 aa, Homo sapiens
  CDR3 for alpha chain variable domain of TCR clone 313773 (TRAV35, TRAJ54)
CADLQGAKKLVF

SEQ ID NO: 627546 - protein, 14 aa, Homo sapiens
  CDR3 for beta chain variable domain of TCR clone 313773 (TRBV7-2, TRBJ2-1)
CASSPGLAGNEQFF

SEQ ID NO: 627547 - protein, 14 aa, Homo sapiens
  CDR3 for alpha chain variable domain of TCR clone 313774 (TRAV12-3, TRAJ54)
CAMRGIQGAQKLVF

SEQ ID NO: 627548 - protein, 13 aa, Homo sapiens
  CDR3 for beta chain variable domain of TCR clone 313774 (TRBV19, TRBJ1-1)
CASSPSNGCEAFF

SEQ ID NO: 627549 - protein, 14 aa, Homo sapiens
  CDR3 for alpha chain variable domain of TCR clone 313775 (TRAV17, TRAJ35)
CATDSPGFGNVLHC

SEQ ID NO: 627550 - protein, 19 aa, Homo sapiens
  CDR3 for beta chain variable domain of TCR clone 313775 (TRBV11-3, TRBJ2-2)
CASSTRPGAKTTNTGELFF

SEQ ID NO: 627551 - protein, 17 aa, Homo sapiens
  CDR3 for alpha chain variable domain of TCR clone 313776 (TRAV3, TRAJ12)
CAVRDGGRMDSSDKLIF

SEQ ID NO: 627552 - protein, 15 aa, Homo sapiens
  CDR3 for beta chain variable domain of TCR clone 313776 (TRBV5-1, TRBJ2-1)
CASSPPRAPYNEQFF

SEQ ID NO: 627553 - protein, 13 aa, Homo sapiens
  CDR3 for alpha chain variable domain of TCR clone 313777 (TRAV3, TRAJ4)
CAVRDGGYNKMIF

SEQ ID NO: 627554 - protein, 14 aa, Homo sapiens
  CDR3 for beta chain variable domain of TCR clone 313777 (TRBV12-4, TRBJ1-2)
CASSSSAAGSSYTF

SEQ ID NO: 627555 - protein, 15 aa, Homo sapiens
  CDR3 for alpha chain variable domain of TCR clone 313778 (TRAV14/DV4, TRAJ46)
CAVREKKSSGDKLPF

SEQ ID NO: 627556 - protein, 13 aa, Homo sapiens
  CDR3 for beta chain variable domain of TCR clone 313778 (TRBV20-1, TRBJ2-5)
CSAREAFQETQYF

SEQ ID NO: 627557 - protein, 16 aa, Homo sapiens
  CDR3 for alpha chain variable domain of TCR clone 313779 (TRAV30, TRAJ24)
CGTEIVDADSWGKFQF

SEQ ID NO: 627558 - protein, 15 aa, Homo sapiens
  CDR3 for beta chain variable domain of TCR clone 313779 (TRBV7-3, TRBJ2-7)
CASSVRLAGSYEQYF

SEQ ID NO: 627559 - protein, 13 aa, Homo sapiens
  CDR3 for alpha chain variable domain of TCR clone 313780 (TRAV26-2, TRAJ57)
CILSRVGSEKLVF

SEQ ID NO: 627560 - protein, 16 aa, Homo sapiens
  CDR3 for beta chain variable domain of TCR clone 313780 (TRBV18, TRBJ1-5)
CASSPRTGGGNQPQHF

SEQ ID NO: 627561 - protein, 12 aa, Homo sapiens
  CDR3 for alpha chain variable domain of TCR clone 313781 (TRAV8-3, TRAJ20)
CAVGANDYKLSF

SEQ ID NO: 627562 - protein, 16 aa, Homo sapiens
  CDR3 for beta chain variable domain of TCR clone 313781 (TRBV19, TRBJ2-2)
CASRSQGTGATGELFF

SEQ ID NO: 627563 - protein, 18 aa, Homo sapiens
  CDR3 for alpha chain variable domain of TCR clone 313782 (TRAV21, TRAJ52)
CAVRPSPPGGTSYGKLTF

SEQ ID NO: 627564 - protein, 17 aa, Homo sapiens
  CDR3 for beta chain variable domain of TCR clone 313782 (TRBV13, TRBJ2-3)
CSSSLSRVAGGRNTQYF

SEQ ID NO: 627565 - protein, 14 aa, Homo sapiens
  CDR3 for alpha chain variable domain of TCR clone 313783 (TRAV29/DV5, TRAJ48)
CAAMALFGTEKLTF

SEQ ID NO: 627566 - protein, 15 aa, Homo sapiens
  CDR3 for beta chain variable domain of TCR clone 313783 (TRBV7-2, TRBJ2-1)
CASTHGTGIDNEQFF

SEQ ID NO: 627567 - protein, 15 aa, Homo sapiens
  CDR3 for alpha chain variable domain of TCR clone 313784 (TRAV17, TRAJ40)
CATVSSTSGTYKYIF

SEQ ID NO: 627568 - protein, 14 aa, Homo sapiens
  CDR3 for beta chain variable domain of TCR clone 313784 (TRBV25-1, TRBJ1-1)
CASTHLGGNTEAFF

SEQ ID NO: 627569 - protein, 14 aa, Homo sapiens
  CDR3 for alpha chain variable domain of TCR clone 313785 (TRAV20, TRAJ56)
CAVQFGGANSKLTF

SEQ ID NO: 627570 - protein, 15 aa, Homo sapiens
  CDR3 for beta chain variable domain of TCR clone 313785 (TRBV27, TRBJ2-1)
CASSNGGGSSNEQFF

SEQ ID NO: 627571 - protein, 14 aa, Homo sapiens
  CDR3 for alpha chain variable domain of TCR clone 313786 (TRAV12-3, TRAJ10)
SHLPLTGGGNKLTF

SEQ ID NO: 627572 - protein, 15 aa, Homo sapiens
  CDR3 for beta chain variable domain of TCR clone 313786 (TRBV7-2, TRBJ1-6)
CASSLGPDRGMPLHF

SEQ ID NO: 627573 - protein, 11 aa, Homo sapiens
  CDR3 for alpha chain variable domain of TCR clone 313787 (TRAV13-1, TRAJ39)
CASHAGNMLTF

SEQ ID NO: 627574 - protein, 13 aa, Homo sapiens
  CDR3 for beta chain variable domain of TCR clone 313787 (TRBV4-1, TRBJ2-2)
CASSQENTGELFF

SEQ ID NO: 627575 - protein, 16 aa, Homo sapiens
  CDR3 for alpha chain variable domain of TCR clone 313788 (TRAV30, TRAJ24)
CVTEIVAADSWGKFQF

SEQ ID NO: 627576 - protein, 13 aa, Homo sapiens
  CDR3 for beta chain variable domain of TCR clone 313788 (TRBV7-3, TRBJ1-1)
CASSQDWGAEAFF

SEQ ID NO: 627577 - protein, 14 aa, Homo sapiens
  CDR3 for alpha chain variable domain of TCR clone 313789 (TRAV26-1, TRAJ34)
CIVRVAYNTDKLIF

SEQ ID NO: 627578 - protein, 15 aa, Homo sapiens
  CDR3 for beta chain variable domain of TCR clone 313789 (TRBV29-1, TRBJ2-1)
CSVRTSLSSYNEQFF

SEQ ID NO: 627579 - protein, 15 aa, Homo sapiens
  CDR3 for alpha chain variable domain of TCR clone 313790 (TRAV3, TRAJ20)
CAVRDIKLSDYKLSF

SEQ ID NO: 627580 - protein, 15 aa, Homo sapiens
  CDR3 for beta chain variable domain of TCR clone 313790 (TRBV7-9, TRBJ1-6)
CASSSPGRGNSPPLF

SEQ ID NO: 627581 - protein, 17 aa, Homo sapiens
  CDR3 for alpha chain variable domain of TCR clone 313791 (TRAV21, TRAJ52)
CAVGVNAGGTSYGKLTF

SEQ ID NO: 627582 - protein, 13 aa, Homo sapiens
  CDR3 for beta chain variable domain of TCR clone 313791 (TRBV5-1, TRBJ1-2)
CASSFQGNYGYAF

SEQ ID NO: 627583 - protein, 14 aa, Homo sapiens
  CDR3 for alpha chain variable domain of TCR clone 313792 (TRAV21, TRAJ35)
CAVMPIGFGNVLHC

SEQ ID NO: 627584 - protein, 12 aa, Homo sapiens
  CDR3 for beta chain variable domain of TCR clone 313792 (TRBV7-9, TRBJ2-7)
GASSMKREEQYF

SEQ ID NO: 627585 - protein, 16 aa, Homo sapiens
  CDR3 for alpha chain variable domain of TCR clone 313793 (TRAV8-1, TRAJ48)
CAVTLISNFVNEKLTF

SEQ ID NO: 627586 - protein, 12 aa, Homo sapiens
  CDR3 for beta chain variable domain of TCR clone 313793 (TRBV20-1, TRBJ1-2)
CSAPGFNYGYTF

SEQ ID NO: 627587 - protein, 14 aa, Homo sapiens
  CDR3 for alpha chain variable domain of TCR clone 313794 (TRAV12-2, TRAJ13)
CAVKKTGGYQKVTF

SEQ ID NO: 627588 - protein, 13 aa, Homo sapiens
  CDR3 for beta chain variable domain of TCR clone 313794 (TRBV20-1, TRBJ1-1)
CSAILGQGTEAFF

SEQ ID NO: 627589 - protein, 23 aa, Homo sapiens
  CDR3 for alpha chain variable domain of TCR clone 313795 (TRAV26-1, TRAJ38)
CIADNAGNNHIQNPDPAVYQLRD

SEQ ID NO: 627590 - protein, 13 aa, Homo sapiens
  CDR3 for beta chain variable domain of TCR clone 313795 (TRBV7-9, TRBJ2-1)
CASSLGTVNEQFY

SEQ ID NO: 627591 - protein, 14 aa, Homo sapiens
  CDR3 for alpha chain variable domain of TCR clone 313796 (TRAV8-6, TRAJ13)
CAVFSSGGYQKVTF

SEQ ID NO: 627592 - protein, 14 aa, Homo sapiens
  CDR3 for beta chain variable domain of TCR clone 313796 (TRBV7-2, TRBJ1-5)
CASSLTGNNQPQHY

SEQ ID NO: 627593 - protein, 14 aa, Homo sapiens
  CDR3 for alpha chain variable domain of TCR clone 313797 (TRAV8-4, TRAJ48)
CAVSETYGNEKLTF

SEQ ID NO: 627594 - protein, 14 aa, Homo sapiens
  CDR3 for beta chain variable domain of TCR clone 313797 (TRBV13, TRBJ2-7)
CASSLEGASYEQYF

SEQ ID NO: 627595 - protein, 17 aa, Homo sapiens
  CDR3 for alpha chain variable domain of TCR clone 313798 (TRAV3, TRAJ42)
CAVRDRGYGGSQGNLIF

SEQ ID NO: 627596 - protein, 14 aa, Homo sapiens
  CDR3 for beta chain variable domain of TCR clone 313798 (TRBV4-1, TRBJ2-2)
CASSQAVNTGELFF

SEQ ID NO: 627597 - protein, 14 aa, Homo sapiens
  CDR3 for alpha chain variable domain of TCR clone 313799 (TRAV35, TRAJ40)
CAGSTTSGTYKYIF

SEQ ID NO: 627598 - protein, 15 aa, Homo sapiens
  CDR3 for beta chain variable domain of TCR clone 313799 (TRBV6-3, TRBJ2-7)
CASSSPGTVFYEQYF

SEQ ID NO: 627599 - protein, 16 aa, Homo sapiens
  CDR3 for alpha chain variable domain of TCR clone 313800 (TRAV30, TRAJ24)
FVTEIVDADSWGKFQF

SEQ ID NO: 627600 - protein, 15 aa, Homo sapiens
  CDR3 for beta chain variable domain of TCR clone 313800 (TRBV7-3, TRBJ2-2)
CASSETGQGTGELFF

SEQ ID NO: 627601 - protein, 12 aa, Homo sapiens
  CDR3 for alpha chain variable domain of TCR clone 313801 (TRAV12-1, TRAJ34)
CAVAGATDKLIF

SEQ ID NO: 627602 - protein, 16 aa, Homo sapiens
  CDR3 for beta chain variable domain of TCR clone 313801 (TRBV7-2, TRBJ1-2)
CASSSNQDRRGHGYTF

SEQ ID NO: 627603 - protein, 17 aa, Homo sapiens
  CDR3 for alpha chain variable domain of TCR clone 313802 (TRAV23/DV6, TRAJ53)
CAASKLGSGGSNYKLTF

SEQ ID NO: 627604 - protein, 14 aa, Homo sapiens
  CDR3 for beta chain variable domain of TCR clone 313802 (TRBV7-2, TRBJ2-7)
CASRSQGAAYEQYF

SEQ ID NO: 627605 - protein, 11 aa, Homo sapiens
  CDR3 for alpha chain variable domain of TCR clone 313803 (TRAV1-1, TRAJ39)
CAVPVVGNMLT

SEQ ID NO: 627606 - protein, 12 aa, Homo sapiens
  CDR3 for beta chain variable domain of TCR clone 313803 (TRBV2, TRBJ1-2)
CASSGQTYGYTF

SEQ ID NO: 627607 - protein, 14 aa, Homo sapiens
  CDR3 for alpha chain variable domain of TCR clone 313804 (TRAV2, TRAJ39)
CAVEGDNAGNMLTF

SEQ ID NO: 627608 - protein, 12 aa, Homo sapiens
  CDR3 for beta chain variable domain of TCR clone 313804 (TRBV28, TRBJ2-7)
CASSFSSYEQYF

SEQ ID NO: 627609 - protein, 15 aa, Homo sapiens
  CDR3 for alpha chain variable domain of TCR clone 313805 (TRAV3, TRAJ4)
CAVRDGTCGYNKLIF

SEQ ID NO: 627610 - protein, 13 aa, Homo sapiens
  CDR3 for beta chain variable domain of TCR clone 313805 (TRBV12-5, TRBJ1-2)
CASGVRTGNGYTF

SEQ ID NO: 627611 - protein, 15 aa, Homo sapiens
  CDR3 for alpha chain variable domain of TCR clone 313806 (TRAV12-2, TRAJ53)
CAVNGGGGSNYKLTF

SEQ ID NO: 627612 - protein, 15 aa, Homo sapiens
  CDR3 for beta chain variable domain of TCR clone 313806 (TRBV20-1, TRBJ2-7)
CSARDRVSVMDEQYF

SEQ ID NO: 627613 - protein, 14 aa, Homo sapiens
  CDR3 for alpha chain variable domain of TCR clone 313807 (TRAV12-1, TRAJ37)
CVVTGSSNTGNLIF

SEQ ID NO: 627614 - protein, 20 aa, Homo sapiens
  CDR3 for beta chain variable domain of TCR clone 313807 (TRBV23-1, TRBJ2-5)
CISAPAVPERVLLIQETQYF

SEQ ID NO: 627615 - protein, 13 aa, Homo sapiens
  CDR3 for alpha chain variable domain of TCR clone 313808 (TRAV8-3, TRAJ5)
CAVGPRGRRALTF

SEQ ID NO: 627616 - protein, 16 aa, Homo sapiens
  CDR3 for beta chain variable domain of TCR clone 313808 (TRBV11-3, TRBJ2-3)
CVSSPGGLLGTDTQYF

SEQ ID NO: 627617 - protein, 13 aa, Homo sapiens
  CDR3 for alpha chain variable domain of TCR clone 313809 (TRAV21, TRAJ27)
CAARPGNAGESTF

SEQ ID NO: 627618 - protein, 14 aa, Homo sapiens
  CDR3 for beta chain variable domain of TCR clone 313809 (TRBV11-2, TRBJ2-7)
CASSLGAGAYEQYF

SEQ ID NO: 627619 - protein, 16 aa, Homo sapiens
  CDR3 for alpha chain variable domain of TCR clone 313810 (TRAV27, TRAJ13)
CAGAKSDSGGYKKVTF

SEQ ID NO: 627620 - protein, 15 aa, Homo sapiens
  CDR3 for beta chain variable domain of TCR clone 313810 (TRBV29-1, TRBJ2-1)
CSVGRHALLYNEQFF

SEQ ID NO: 627621 - protein, 14 aa, Homo sapiens
  CDR3 for alpha chain variable domain of TCR clone 313811 (TRAV2, TRAJ22)
CAVEVKRAERQLTF

SEQ ID NO: 627622 - protein, 14 aa, Homo sapiens
  CDR3 for beta chain variable domain of TCR clone 313811 (TRBV19, TRBJ2-2)
CASTPGYSGGELFF

SEQ ID NO: 627623 - protein, 15 aa, Homo sapiens
  CDR3 for alpha chain variable domain of TCR clone 313812 (TRAV12-2, TRAJ53)
CAVNGGGGSNYKLTF

SEQ ID NO: 627624 - protein, 17 aa, Homo sapiens
  CDR3 for beta chain variable domain of TCR clone 313812 (TRBV5-7, TRBJ2-5)
CASSWIQDRGREGTQYF

SEQ ID NO: 627625 - protein, 13 aa, Homo sapiens
  CDR3 for alpha chain variable domain of TCR clone 313813 (TRAV29/DV5, TRAJ48)
CAASSFGNEKVTF

SEQ ID NO: 627626 - protein, 14 aa, Homo sapiens
  CDR3 for beta chain variable domain of TCR clone 313813 (TRBV3-1, TRBJ2-2)
CASSQDWVQGELFF

SEQ ID NO: 627627 - protein, 14 aa, Homo sapiens
  CDR3 for alpha chain variable domain of TCR clone 313814 (TRAV1-2, TRAJ16)
CAVNRISDGQKLLF

SEQ ID NO: 627628 - protein, 17 aa, Homo sapiens
  CDR3 for beta chain variable domain of TCR clone 313814 (TRBV15, TRBJ1-2)
CATSGREIDVVNYGYTF

SEQ ID NO: 627629 - protein, 13 aa, Homo sapiens
  CDR3 for alpha chain variable domain of TCR clone 313815 (TRAV8-2, TRAJ26)
CVVSLGYGQNFVF

SEQ ID NO: 627630 - protein, 12 aa, Homo sapiens
  CDR3 for beta chain variable domain of TCR clone 313815 (TRBV7-8, TRBJ2-7)
CASSLGDREQYF

SEQ ID NO: 627631 - protein, 15 aa, Homo sapiens
  CDR3 for alpha chain variable domain of TCR clone 313816 (TRAV12-3, TRAJ6)
CAMSATTGGSYIPTF

SEQ ID NO: 627632 - protein, 16 aa, Homo sapiens
  CDR3 for beta chain variable domain of TCR clone 313816 (TRBV10-3, TRBJ1-5)
CAISDQVGAPNQPQHF

SEQ ID NO: 627633 - protein, 16 aa, Homo sapiens
  CDR3 for alpha chain variable domain of TCR clone 313817 (TRAV3, TRAJ4)
CAVRPSPSGGYNKLIF

SEQ ID NO: 627634 - protein, 12 aa, Homo sapiens
  CDR3 for beta chain variable domain of TCR clone 313817 (TRBV7-9, TRBJ2-7)
SASSQGDYEQYF

SEQ ID NO: 627635 - protein, 15 aa, Homo sapiens
  CDR3 for alpha chain variable domain of TCR clone 313818 (TRAV12-1, TRAJ36)
CVVNEHHTGANNLFF

SEQ ID NO: 627636 - protein, 12 aa, Homo sapiens
  CDR3 for beta chain variable domain of TCR clone 313818 (TRBV29-1, TRBJ2-3)
CSVTGGADTQYF

SEQ ID NO: 627637 - protein, 16 aa, Homo sapiens
  CDR3 for alpha chain variable domain of TCR clone 313819 (TRAV23/DV6, TRAJ48)
CEESGVVNFGNEKLTL

SEQ ID NO: 627638 - protein, 15 aa, Homo sapiens
  CDR3 for beta chain variable domain of TCR clone 313819 (TRBV20-1, TRBJ2-5)
CSAGLAGVSQETQYF

SEQ ID NO: 627639 - protein, 14 aa, Homo sapiens
  CDR3 for alpha chain variable domain of TCR clone 313820 (TRAV12-2, TRAJ13)
CAVKKTGGYQKVTL

SEQ ID NO: 627640 - protein, 15 aa, Homo sapiens
  CDR3 for beta chain variable domain of TCR clone 313820 (TRBV27, TRBJ2-1)
CASSNGGGPSNEQFF

SEQ ID NO: 627641 - protein, 13 aa, Homo sapiens
  CDR3 for alpha chain variable domain of TCR clone 313821 (TRAV12-2, TRAJ20)
RAVYTSNDYKLSF

SEQ ID NO: 627642 - protein, 15 aa, Homo sapiens
  CDR3 for beta chain variable domain of TCR clone 313821 (TRBV27, TRBJ2-5)
CASSLYPRGGETQYF

SEQ ID NO: 627643 - protein, 15 aa, Homo sapiens
  CDR3 for alpha chain variable domain of TCR clone 313822 (TRAV23/DV6, TRAJ13)
CAAWPGGGVHQKVTF

SEQ ID NO: 627644 - protein, 17 aa, Homo sapiens
  CDR3 for beta chain variable domain of TCR clone 313822 (TRBV19, TRBJ2-7)
CASSISFYDSYPYEQYF

SEQ ID NO: 627645 - protein, 14 aa, Homo sapiens
  CDR3 for alpha chain variable domain of TCR clone 313823 (TRAV8-1, TRAJ5)
CAVRTDTGRSALTF

SEQ ID NO: 627646 - protein, 12 aa, Homo sapiens
  CDR3 for beta chain variable domain of TCR clone 313823 (TRBV11-2, TRBJ2-1)
CASSPGNNEQFF

SEQ ID NO: 627647 - protein, 13 aa, Homo sapiens
  CDR3 for alpha chain variable domain of TCR clone 313824 (TRAV23/DV6, TRAJ16)
CAASISDGQKLLF

SEQ ID NO: 627648 - protein, 14 aa, Homo sapiens
  CDR3 for beta chain variable domain of TCR clone 313824 (TRBV28, TRBJ1-5)
CASSLFPGVQPQHF

SEQ ID NO: 627649 - protein, 14 aa, Homo sapiens
  CDR3 for alpha chain variable domain of TCR clone 313825 (TRAV12-3, TRAJ30)
CAMSLLNRDDKIIF

SEQ ID NO: 627650 - protein, 12 aa, Homo sapiens
  CDR3 for beta chain variable domain of TCR clone 313825 (TRBV11-2, TRBJ2-2)
CARSLGGGELFF

SEQ ID NO: 627651 - protein, 12 aa, Homo sapiens
  CDR3 for alpha chain variable domain of TCR clone 313826 (TRAV13-1, TRAJ42)
SVLRGSPGNLIF

SEQ ID NO: 627652 - protein, 13 aa, Homo sapiens
  CDR3 for beta chain variable domain of TCR clone 313826 (TRBV2, TRBJ1-4)
CASSELGVEKLFF

SEQ ID NO: 627653 - protein, 13 aa, Homo sapiens
  CDR3 for alpha chain variable domain of TCR clone 313827 (TRAV36/DV7, TRAJ37)
CAVFSSNTGQLIF

SEQ ID NO: 627654 - protein, 15 aa, Homo sapiens
  CDR3 for beta chain variable domain of TCR clone 313827 (TRBV12-4, TRBJ2-5)
CQQFFVRGRQETQYF

SEQ ID NO: 627655 - protein, 14 aa, Homo sapiens
  CDR3 for alpha chain variable domain of TCR clone 313828 (TRAV1-2, TRAJ8)
YAAREDTGFQKLVF

SEQ ID NO: 627656 - protein, 13 aa, Homo sapiens
  CDR3 for beta chain variable domain of TCR clone 313828 (TRBV19, TRBJ1-2)
CASSVPGQDGYTV

SEQ ID NO: 627657 - protein, 13 aa, Homo sapiens
  CDR3 for alpha chain variable domain of TCR clone 313829 (TRAV13-1, TRAJ24)
CAARLTAGGNCSL

SEQ ID NO: 627658 - protein, 16 aa, Homo sapiens
  CDR3 for beta chain variable domain of TCR clone 313829 (TRBV3-1, TRBJ1-2)
CASSQGQGVQRDGYTF

SEQ ID NO: 627659 - protein, 13 aa, Homo sapiens
  CDR3 for alpha chain variable domain of TCR clone 313830 (TRAV8-4, TRAJ10)
CAAFTGGGNILTF

SEQ ID NO: 627660 - protein, 15 aa, Homo sapiens
  CDR3 for beta chain variable domain of TCR clone 313830 (TRBV2, TRBJ2-3)
CASSDSEKATDTQYF

SEQ ID NO: 627661 - protein, 16 aa, Homo sapiens
  CDR3 for alpha chain variable domain of TCR clone 313831 (TRAV21, TRAJ37)
CAVRPRGSSNTGKLIF

SEQ ID NO: 627662 - protein, 15 aa, Homo sapiens
  CDR3 for beta chain variable domain of TCR clone 313831 (TRBV6-1, TRBJ2-4)
CASSEAVWTINIQYF

SEQ ID NO: 627663 - protein, 15 aa, Homo sapiens
  CDR3 for alpha chain variable domain of TCR clone 313832 (TRAV21, TRAJ53)
FATLNSGGSNYKLTF

SEQ ID NO: 627664 - protein, 16 aa, Homo sapiens
  CDR3 for beta chain variable domain of TCR clone 313832 (TRBV29-1, TRBJ1-2)
CSVEANRDIANYGYTF

SEQ ID NO: 627665 - protein, 15 aa, Homo sapiens
  CDR3 for alpha chain variable domain of TCR clone 313833 (TRAV1-2, TRAJ26)
CAVRDLITMVRILSF

SEQ ID NO: 627666 - protein, 20 aa, Homo sapiens
  CDR3 for beta chain variable domain of TCR clone 313833 (TRBV7-8, TRBJ2-1)
CASSLAHRLAGVRSYNEQFF

SEQ ID NO: 627667 - protein, 14 aa, Homo sapiens
  CDR3 for alpha chain variable domain of TCR clone 313834 (TRAV3, TRAJ7)
CAVREEEREQQTRF

SEQ ID NO: 627668 - protein, 15 aa, Homo sapiens
  CDR3 for beta chain variable domain of TCR clone 313834 (TRBV20-1, TRBJ1-5)
CSAFKNVQRNQPQHF

SEQ ID NO: 627669 - protein, 12 aa, Homo sapiens
  CDR3 for alpha chain variable domain of TCR clone 313835 (TRAV35, TRAJ49)
CAGWNTGNQFYF

SEQ ID NO: 627670 - protein, 17 aa, Homo sapiens
  CDR3 for beta chain variable domain of TCR clone 313835 (TRBV7-8, TRBJ2-6)
CASSAGTGGAGANVLTF

SEQ ID NO: 627671 - protein, 14 aa, Homo sapiens
  CDR3 for alpha chain variable domain of TCR clone 313836 (TRAV17, TRAJ57)
CATDPQGGSEQRVF

SEQ ID NO: 627672 - protein, 16 aa, Homo sapiens
  CDR3 for beta chain variable domain of TCR clone 313836 (TRBV20-1, TRBJ1-4)
CSAPGQGLLTNEKLFF

SEQ ID NO: 627673 - protein, 11 aa, Homo sapiens
  CDR3 for alpha chain variable domain of TCR clone 313837 (TRAV12-1, TRAJ43)
CVEYDNNDMRF

SEQ ID NO: 627674 - protein, 15 aa, Homo sapiens
  CDR3 for beta chain variable domain of TCR clone 313837 (TRBV7-3, TRBJ2-1)
CASSPTGGGEVEQFF

SEQ ID NO: 627675 - protein, 16 aa, Homo sapiens
  CDR3 for alpha chain variable domain of TCR clone 313838 (TRAV23/DV6, TRAJ52)
FAARPPGGTSYGKLTF

SEQ ID NO: 627676 - protein, 14 aa, Homo sapiens
  CDR3 for beta chain variable domain of TCR clone 313838 (TRBV20-1, TRBJ2-3)
CSARDASSTDTQYF

SEQ ID NO: 627677 - protein, 14 aa, Homo sapiens
  CDR3 for alpha chain variable domain of TCR clone 313839 (TRAV29/DV5, TRAJ36)
FAARRKTGANNLFF

SEQ ID NO: 627678 - protein, 15 aa, Homo sapiens
  CDR3 for beta chain variable domain of TCR clone 313839 (TRBV29-1, TRBJ2-1)
CSGRDRKSSYNEQFF

SEQ ID NO: 627679 - protein, 14 aa, Homo sapiens
  CDR3 for alpha chain variable domain of TCR clone 313840 (TRAV1-1, TRAJ28)
CAAPSGAGSYQLTF

SEQ ID NO: 627680 - protein, 17 aa, Homo sapiens
  CDR3 for beta chain variable domain of TCR clone 313840 (TRBV5-1, TRBJ2-5)
CASSPVALGQNQETQYF

SEQ ID NO: 627681 - protein, 13 aa, Homo sapiens
  CDR3 for alpha chain variable domain of TCR clone 313841 (TRAV13-2, TRAJ5)
CAESDTGRRARTF

SEQ ID NO: 627682 - protein, 14 aa, Homo sapiens
  CDR3 for beta chain variable domain of TCR clone 313841 (TRBV2, TRBJ1-1)
CASTQVGENTEAFF

SEQ ID NO: 627683 - protein, 11 aa, Homo sapiens
  CDR3 for alpha chain variable domain of TCR clone 313842 (TRAV3, TRAJ21)
CAVGNFNKFYF

SEQ ID NO: 627684 - protein, 17 aa, Homo sapiens
  CDR3 for beta chain variable domain of TCR clone 313842 (TRBV20-1, TRBJ2-1)
CIASSSGLAGSYNEQFF

SEQ ID NO: 627685 - protein, 12 aa, Homo sapiens
  CDR3 for alpha chain variable domain of TCR clone 313843 (TRAV13-1, TRAJ11)
CAADSGYSTLTF

SEQ ID NO: 627686 - protein, 12 aa, Homo sapiens
  CDR3 for beta chain variable domain of TCR clone 313843 (TRBV27, TRBJ2-7)
CASSGGFYEQYF

SEQ ID NO: 627687 - protein, 15 aa, Homo sapiens
  CDR3 for alpha chain variable domain of TCR clone 313844 (TRAV13-1, TRAJ5)
CAVSPIDTGRRALTF

SEQ ID NO: 627688 - protein, 18 aa, Homo sapiens
  CDR3 for beta chain variable domain of TCR clone 313844 (TRBV4-1, TRBJ2-2)
CASSCRTSGGEGPGELFF

SEQ ID NO: 627689 - protein, 12 aa, Homo sapiens
  CDR3 for alpha chain variable domain of TCR clone 313845 (TRAV3, TRAJ26)
CAVRDYGQNFFF

SEQ ID NO: 627690 - protein, 14 aa, Homo sapiens
  CDR3 for beta chain variable domain of TCR clone 313845 (TRBV11-2, TRBJ2-1)
CASSLDLIIDEQFF

SEQ ID NO: 627691 - protein, 14 aa, Homo sapiens
  CDR3 for alpha chain variable domain of TCR clone 313846 (TRAV26-1, TRAJ3)
CIVRVGSSASKIIF

SEQ ID NO: 627692 - protein, 20 aa, Homo sapiens
  CDR3 for beta chain variable domain of TCR clone 313846 (TRBV4-1, TRBJ2-2)
CASSQASPPGLASNTGELFF

SEQ ID NO: 627693 - protein, 11 aa, Homo sapiens
  CDR3 for alpha chain variable domain of TCR clone 313847 (TRAV2, TRAJ33)
CAVESNYQLIW

SEQ ID NO: 627694 - protein, 12 aa, Homo sapiens
  CDR3 for beta chain variable domain of TCR clone 313847 (TRBV11-2, TRBJ2-2)
CAISLGGGELFF

SEQ ID NO: 627695 - protein, 15 aa, Homo sapiens
  CDR3 for alpha chain variable domain of TCR clone 313848 (TRAV21, TRAJ53)
CATLNSGGSNYKLTF

SEQ ID NO: 627696 - protein, 15 aa, Homo sapiens
  CDR3 for beta chain variable domain of TCR clone 313848 (TRBV6-1, TRBJ2-4)
CASSEAVWTINIQYV

SEQ ID NO: 627697 - protein, 14 aa, Homo sapiens
  CDR3 for alpha chain variable domain of TCR clone 313849 (TRAV1-2, TRAJ16)
CAVNRFSDGQKLLF

SEQ ID NO: 627698 - protein, 12 aa, Homo sapiens
  CDR3 for beta chain variable domain of TCR clone 313849 (TRBV5-1, TRBJ2-5)
CASSWDQGTQYF

SEQ ID NO: 627699 - protein, 12 aa, Homo sapiens
  CDR3 for alpha chain variable domain of TCR clone 313850 (TRAV17, TRAJ39)
CATGAAGNMLTL

SEQ ID NO: 627700 - protein, 18 aa, Homo sapiens
  CDR3 for beta chain variable domain of TCR clone 313850 (TRBV18, TRBJ2-3)
CASSYTSGAAGGTDTQYF

SEQ ID NO: 627701 - protein, 12 aa, Homo sapiens
  CDR3 for alpha chain variable domain of TCR clone 313851 (TRAV16, TRAJ15)
CALKPGRNCSDL

SEQ ID NO: 627702 - protein, 16 aa, Homo sapiens
  CDR3 for beta chain variable domain of TCR clone 313851 (TRBV7-9, TRBJ1-2)
CASSLGFSSGEDGYTF

SEQ ID NO: 627703 - protein, 13 aa, Homo sapiens
  CDR3 for alpha chain variable domain of TCR clone 313852 (TRAV21, TRAJ27)
CAARPGNAGKSTF

SEQ ID NO: 627704 - protein, 16 aa, Homo sapiens
  CDR3 for beta chain variable domain of TCR clone 313852 (TRBV11-2, TRBJ1-1)
CASSLRQGGEHSKAFF

SEQ ID NO: 627705 - protein, 12 aa, Homo sapiens
  CDR3 for alpha chain variable domain of TCR clone 313853 (TRAV12-3, TRAJ20)
CAMVRGDYKLSF

SEQ ID NO: 627706 - protein, 14 aa, Homo sapiens
  CDR3 for beta chain variable domain of TCR clone 313853 (TRBV5-5, TRBJ1-5)
CASSGQGVYQPQHF

SEQ ID NO: 627707 - protein, 13 aa, Homo sapiens
  CDR3 for alpha chain variable domain of TCR clone 313854 (TRAV2, TRAJ40)
CAVVTSGTYKHIF

SEQ ID NO: 627708 - protein, 14 aa, Homo sapiens
  CDR3 for beta chain variable domain of TCR clone 313854 (TRBV6-1, TRBJ1-3)
CASVQGGGGNTIYF

SEQ ID NO: 627709 - protein, 15 aa, Homo sapiens
  CDR3 for alpha chain variable domain of TCR clone 313855 (TRAV8-3, TRAJ15)
CAVGAPNQAGTSLIL

SEQ ID NO: 627710 - protein, 14 aa, Homo sapiens
  CDR3 for beta chain variable domain of TCR clone 313855 (TRBV20-1, TRBJ2-1)
CSPNDEASYNEQFF

SEQ ID NO: 627711 - protein, 13 aa, Homo sapiens
  CDR3 for alpha chain variable domain of TCR clone 313856 (TRAV29/DV5, TRAJ31)
CAASRNNNARLMF

SEQ ID NO: 627712 - protein, 15 aa, Homo sapiens
  CDR3 for beta chain variable domain of TCR clone 313856 (TRBV5-1, TRBJ1-3)
CASSLEGGSGNTLYF

SEQ ID NO: 627713 - protein, 12 aa, Homo sapiens
  CDR3 for alpha chain variable domain of TCR clone 313857 (TRAV12-3, TRAJ40)
CAMSSGTYKYIF

SEQ ID NO: 627714 - protein, 14 aa, Homo sapiens
  CDR3 for beta chain variable domain of TCR clone 313857 (TRBV5-1, TRBJ2-2)
CASSLVEGSGELFF

SEQ ID NO: 627715 - protein, 17 aa, Homo sapiens
  CDR3 for alpha chain variable domain of TCR clone 313858 (TRAV1-1, TRAJ11)
CAGYSTLTFGKGTMLLV

SEQ ID NO: 627716 - protein, 14 aa, Homo sapiens
  CDR3 for beta chain variable domain of TCR clone 313858 (TRBV12-4, TRBJ1-4)
CQQFSSATNEKLFF

SEQ ID NO: 627717 - protein, 14 aa, Homo sapiens
  CDR3 for alpha chain variable domain of TCR clone 313859 (TRAV13-1, TRAJ35)
CAASKGGFGNVLHC

SEQ ID NO: 627718 - protein, 17 aa, Homo sapiens
  CDR3 for beta chain variable domain of TCR clone 313859 (TRBV5-1, TRBJ2-2)
CASSEKPNFANTGELFF

SEQ ID NO: 627719 - protein, 14 aa, Homo sapiens
  CDR3 for alpha chain variable domain of TCR clone 313860 (TRAV1-2, TRAJ8)
CAVREDTGFQTLVF

SEQ ID NO: 627720 - protein, 13 aa, Homo sapiens
  CDR3 for beta chain variable domain of TCR clone 313860 (TRBV10-3, TRBJ2-7)
CASKLAVNYEQYF

SEQ ID NO: 627721 - protein, 14 aa, Homo sapiens
  CDR3 for alpha chain variable domain of TCR clone 313861 (TRAV9-2, TRAJ39)
CALYIYNSGNMLTF

SEQ ID NO: 627722 - protein, 13 aa, Homo sapiens
  CDR3 for beta chain variable domain of TCR clone 313861 (TRBV11-3, TRBJ1-1)
CASSRQPNTEAFF

SEQ ID NO: 627723 - protein, 12 aa, Homo sapiens
  CDR3 for alpha chain variable domain of TCR clone 313862 (TRAV25, TRAJ53)
CQSGGSNYKLTF

SEQ ID NO: 627724 - protein, 15 aa, Homo sapiens
  CDR3 for beta chain variable domain of TCR clone 313862 (TRBV5-1, TRBJ1-1)
CASSSTTGTNTEAFF

SEQ ID NO: 627725 - protein, 13 aa, Homo sapiens
  CDR3 for alpha chain variable domain of TCR clone 313863 (TRAV12-3, TRAJ9)
CAMRNTGGFKTIF

SEQ ID NO: 627726 - protein, 13 aa, Homo sapiens
  CDR3 for beta chain variable domain of TCR clone 313863 (TRBV4-1, TRBJ2-2)
CASSQENTGELFF

SEQ ID NO: 627727 - protein, 13 aa, Homo sapiens
  CDR3 for alpha chain variable domain of TCR clone 313864 (TRAV8-3, TRAJ28)
CAVGAVGSYQLTF

SEQ ID NO: 627728 - protein, 16 aa, Homo sapiens
  CDR3 for beta chain variable domain of TCR clone 313864 (TRBV5-1, TRBJ2-7)
CASSWEGLAGLYEQYF

SEQ ID NO: 627729 - protein, 12 aa, Homo sapiens
  CDR3 for alpha chain variable domain of TCR clone 313865 (TRAV21, TRAJ33)
CAKMDSNYQLIW

SEQ ID NO: 627730 - protein, 16 aa, Homo sapiens
  CDR3 for beta chain variable domain of TCR clone 313865 (TRBV10-3, TRBJ2-1)
CAIRGGGRGDYNEQFF

SEQ ID NO: 627731 - protein, 13 aa, Homo sapiens
  CDR3 for alpha chain variable domain of TCR clone 313866 (TRAV12-3, TRAJ33)
CAMSVNSNYQLIW

SEQ ID NO: 627732 - protein, 14 aa, Homo sapiens
  CDR3 for beta chain variable domain of TCR clone 313866 (TRBV20-1, TRBJ2-7)
CSAKRGRSSYEQYF

SEQ ID NO: 627733 - protein, 15 aa, Homo sapiens
  CDR3 for alpha chain variable domain of TCR clone 313867 (TRAV8-2, TRAJ40)
CVELGTTSGTYKYIF

SEQ ID NO: 627734 - protein, 16 aa, Homo sapiens
  CDR3 for beta chain variable domain of TCR clone 313867 (TRBV7-3, TRBJ2-1)
CASSLEGYRSYNEQFF

SEQ ID NO: 627735 - protein, 14 aa, Homo sapiens
  CDR3 for alpha chain variable domain of TCR clone 313868 (TRAV2, TRAJ37)
CAVDFTSNTGKLIF

SEQ ID NO: 627736 - protein, 15 aa, Homo sapiens
  CDR3 for beta chain variable domain of TCR clone 313868 (TRBV19, TRBJ2-3)
CASSIAGGSTDTQYF

SEQ ID NO: 627737 - protein, 16 aa, Homo sapiens
  CDR3 for alpha chain variable domain of TCR clone 313869 (TRAV26-1, TRAJ32)
FIVRTNYGGATNKLIF

SEQ ID NO: 627738 - protein, 14 aa, Homo sapiens
  CDR3 for beta chain variable domain of TCR clone 313869 (TRBV6-1, TRBJ1-3)
CASVQGGGGNTIYF

SEQ ID NO: 627739 - protein, 13 aa, Homo sapiens
  CDR3 for alpha chain variable domain of TCR clone 313870 (TRAV21, TRAJ27)
CAARPSNAGKSTF

SEQ ID NO: 627740 - protein, 16 aa, Homo sapiens
  CDR3 for beta chain variable domain of TCR clone 313870 (TRBV20-1, TRBJ1-2)
CSASMGQCVANYGYTF

SEQ ID NO: 627741 - protein, 12 aa, Homo sapiens
  CDR3 for alpha chain variable domain of TCR clone 313871 (TRAV27, TRAJ9)
CAGESGGVKTIF

SEQ ID NO: 627742 - protein, 14 aa, Homo sapiens
  CDR3 for beta chain variable domain of TCR clone 313871 (TRBV6-1, TRBJ2-1)
CASAKDGFYNEQFF

SEQ ID NO: 627743 - protein, 17 aa, Homo sapiens
  CDR3 for alpha chain variable domain of TCR clone 313872 (TRAV26-1, TRAJ58)
CIVRVGAEETSGSRLTF

SEQ ID NO: 627744 - protein, 13 aa, Homo sapiens
  CDR3 for beta chain variable domain of TCR clone 313872 (TRBV12-5, TRBJ1-2)
CASGVLTGNGYTF

SEQ ID NO: 627745 - protein, 13 aa, Homo sapiens
  CDR3 for alpha chain variable domain of TCR clone 313873 (TRAV20, TRAJ37)
CAGCSSNTGILIF

SEQ ID NO: 627746 - protein, 15 aa, Homo sapiens
  CDR3 for beta chain variable domain of TCR clone 313873 (TRBV7-2, TRBJ2-1)
CASSFQADEYNEQFF

SEQ ID NO: 627747 - protein, 12 aa, Homo sapiens
  CDR3 for alpha chain variable domain of TCR clone 313874 (TRAV12-3, TRAJ17)
CAMTLTGNKLTC

SEQ ID NO: 627748 - protein, 15 aa, Homo sapiens
  CDR3 for beta chain variable domain of TCR clone 313874 (TRBV6-6, TRBJ2-5)
CASSPGGGLEETQYF

SEQ ID NO: 627749 - protein, 11 aa, Homo sapiens
  CDR3 for alpha chain variable domain of TCR clone 313875 (TRAV23/DV6, TRAJ17)
CKWAAGNKQTF

SEQ ID NO: 627750 - protein, 14 aa, Homo sapiens
  CDR3 for beta chain variable domain of TCR clone 313875 (TRBV6-1, TRBJ2-7)
CASSGGSYLYGQYF

SEQ ID NO: 627751 - protein, 14 aa, Homo sapiens
  CDR3 for alpha chain variable domain of TCR clone 313876 (TRAV12-3, TRAJ10)
SHLPLTGGGNKLTF

SEQ ID NO: 627752 - protein, 15 aa, Homo sapiens
  CDR3 for beta chain variable domain of TCR clone 313876 (TRBV5-4, TRBJ2-7)
CASSLEWGPSYEQYF

SEQ ID NO: 627753 - protein, 13 aa, Homo sapiens
  CDR3 for alpha chain variable domain of TCR clone 313877 (TRAV20, TRAJ20)
CAVQALNDYKLSF

SEQ ID NO: 627754 - protein, 13 aa, Homo sapiens
  CDR3 for beta chain variable domain of TCR clone 313877 (TRBV4-2, TRBJ1-1)
CASSQAGNTEAFF

SEQ ID NO: 627755 - protein, 11 aa, Homo sapiens
  CDR3 for alpha chain variable domain of TCR clone 313878 (TRAV2, TRAJ33)
CALDVNYQLIW

SEQ ID NO: 627756 - protein, 15 aa, Homo sapiens
  CDR3 for beta chain variable domain of TCR clone 313878 (TRBV19, TRBJ1-1)
CASTSGQIQNTEAFF

SEQ ID NO: 627757 - protein, 13 aa, Homo sapiens
  CDR3 for alpha chain variable domain of TCR clone 313879 (TRAV27, TRAJ6)
CAGGTRGSYIPTF

SEQ ID NO: 627758 - protein, 15 aa, Homo sapiens
  CDR3 for beta chain variable domain of TCR clone 313879 (TRBV6-3, TRBJ1-4)
CASSSPGQENEKLFF

SEQ ID NO: 627759 - protein, 11 aa, Homo sapiens
  CDR3 for alpha chain variable domain of TCR clone 313880 (TRAV4, TRAJ43)
CLVVFGNDMRF

SEQ ID NO: 627760 - protein, 12 aa, Homo sapiens
  CDR3 for beta chain variable domain of TCR clone 313880 (TRBV6-5, TRBJ1-1)
CASSYGGTEAFF

SEQ ID NO: 627761 - protein, 14 aa, Homo sapiens
  CDR3 for alpha chain variable domain of TCR clone 313881 (TRAV12-2, TRAJ13)
CAVKKTGGSQKVIF

SEQ ID NO: 627762 - protein, 15 aa, Homo sapiens
  CDR3 for beta chain variable domain of TCR clone 313881 (TRBV27, TRBJ2-1)
CASSNGGGSSNEQFF

SEQ ID NO: 627763 - protein, 13 aa, Homo sapiens
  CDR3 for alpha chain variable domain of TCR clone 313882 (TRAV27, TRAJ17)
CAGRRAAGNKLTF

SEQ ID NO: 627764 - protein, 16 aa, Homo sapiens
  CDR3 for beta chain variable domain of TCR clone 313882 (TRBV2, TRBJ2-7)
CASSEPWTGPSYEQYF

SEQ ID NO: 627765 - protein, 17 aa, Homo sapiens
  CDR3 for alpha chain variable domain of TCR clone 313883 (TRAV3, TRAJ6)
CAVRDGPRAGGSYIPTF

SEQ ID NO: 627766 - protein, 14 aa, Homo sapiens
  CDR3 for beta chain variable domain of TCR clone 313883 (TRBV28, TRBJ2-2)
CASRIRSGTGELFF

SEQ ID NO: 627767 - protein, 13 aa, Homo sapiens
  CDR3 for alpha chain variable domain of TCR clone 313884 (TRAV20, TRAJ54)
CAVKAGGAQKLVF

SEQ ID NO: 627768 - protein, 14 aa, Homo sapiens
  CDR3 for beta chain variable domain of TCR clone 313884 (TRBV20-1, TRBJ2-7)
CSAKTGTGGYEQYF

SEQ ID NO: 627769 - protein, 12 aa, Homo sapiens
  CDR3 for alpha chain variable domain of TCR clone 313885 (TRAV41, TRAJ58)
CAVETSGSRLTF

SEQ ID NO: 627770 - protein, 20 aa, Homo sapiens
  CDR3 for beta chain variable domain of TCR clone 313885 (TRBV7-8, TRBJ2-2)
CASSHLFPGPTIHITGELFF

SEQ ID NO: 627771 - protein, 13 aa, Homo sapiens
  CDR3 for alpha chain variable domain of TCR clone 313886 (TRAV8-3, TRAJ36)
YAVGATGANNLFF

SEQ ID NO: 627772 - protein, 15 aa, Homo sapiens
  CDR3 for beta chain variable domain of TCR clone 313886 (TRBV7-2, TRBJ1-2)
CASSPRAGWNYGYTF

SEQ ID NO: 627773 - protein, 13 aa, Homo sapiens
  CDR3 for alpha chain variable domain of TCR clone 313887 (TRAV13-1, TRAJ39)
CSKYSNAGNMLTF

SEQ ID NO: 627774 - protein, 16 aa, Homo sapiens
  CDR3 for beta chain variable domain of TCR clone 313887 (TRBV7-2, TRBJ2-3)
CASSLVALYRTDTQYF

SEQ ID NO: 627775 - protein, 14 aa, Homo sapiens
  CDR3 for alpha chain variable domain of TCR clone 313888 (TRAV1-2, TRAJ16)
CAVNRFSDGQTLLF

SEQ ID NO: 627776 - protein, 13 aa, Homo sapiens
  CDR3 for beta chain variable domain of TCR clone 313888 (TRBV12-4, TRBJ2-5)
CDSSLGGSRTQYF

SEQ ID NO: 627777 - protein, 13 aa, Homo sapiens
  CDR3 for alpha chain variable domain of TCR clone 313889 (TRAV21, TRAJ27)
CAARPRNAGKSPF

SEQ ID NO: 627778 - protein, 14 aa, Homo sapiens
  CDR3 for beta chain variable domain of TCR clone 313889 (TRBV7-6, TRBJ2-3)
CASSLGTVTDTQYF

SEQ ID NO: 627779 - protein, 13 aa, Homo sapiens
  CDR3 for alpha chain variable domain of TCR clone 313890 (TRAV35, TRAJ57)
CAGSQGRSEKLVC

SEQ ID NO: 627780 - protein, 14 aa, Homo sapiens
  CDR3 for beta chain variable domain of TCR clone 313890 (TRBV25-1, TRBJ1-1)
CASTHLGGNTEAFF

SEQ ID NO: 627781 - protein, 14 aa, Homo sapiens
  CDR3 for alpha chain variable domain of TCR clone 313891 (TRAV8-3, TRAJ4)
CAVGAAGGYNKLIF

SEQ ID NO: 627782 - protein, 15 aa, Homo sapiens
  CDR3 for beta chain variable domain of TCR clone 313891 (TRBV6-5, TRBJ2-1)
CASSYDSGAGNEQFF

SEQ ID NO: 627783 - protein, 12 aa, Homo sapiens
  CDR3 for alpha chain variable domain of TCR clone 313892 (TRAV27, TRAJ9)
CAGESGGFKTIF

SEQ ID NO: 627784 - protein, 15 aa, Homo sapiens
  CDR3 for beta chain variable domain of TCR clone 313892 (TRBV28, TRBJ2-3)
CASSRITPGTDTQYF

SEQ ID NO: 627785 - protein, 13 aa, Homo sapiens
  CDR3 for alpha chain variable domain of TCR clone 313893 (TRAV2, TRAJ10)
CAVETGGGNKRTF

SEQ ID NO: 627786 - protein, 14 aa, Homo sapiens
  CDR3 for beta chain variable domain of TCR clone 313893 (TRBV20-1, TRBJ2-3)
CSAGGRRGTDTQYF

SEQ ID NO: 627787 - protein, 14 aa, Homo sapiens
  CDR3 for alpha chain variable domain of TCR clone 313894 (TRAV9-2, TRAJ36)
CALPWRTGANKLFF

SEQ ID NO: 627788 - protein, 13 aa, Homo sapiens
  CDR3 for beta chain variable domain of TCR clone 313894 (TRBV2, TRBJ1-1)
CARNPTGGFHAFF

SEQ ID NO: 627789 - protein, 14 aa, Homo sapiens
  CDR3 for alpha chain variable domain of TCR clone 313895 (TRAV1-2, TRAJ16)
CAVRGFSDGQKLLF

SEQ ID NO: 627790 - protein, 15 aa, Homo sapiens
  CDR3 for beta chain variable domain of TCR clone 313895 (TRBV10-2, TRBJ2-6)
CASSEQGTGANVLTF

SEQ ID NO: 627791 - protein, 14 aa, Homo sapiens
  CDR3 for alpha chain variable domain of TCR clone 313896 (TRAV8-3, TRAJ4)
CAVGAAGGYNKLIF

SEQ ID NO: 627792 - protein, 15 aa, Homo sapiens
  CDR3 for beta chain variable domain of TCR clone 313896 (TRBV6-5, TRBJ2-1)
CASSYDAGAGNKQFF

SEQ ID NO: 627793 - protein, 14 aa, Homo sapiens
  CDR3 for alpha chain variable domain of TCR clone 313897 (TRAV17, TRAJ57)
CATDPQGGSEKLVF

SEQ ID NO: 627794 - protein, 18 aa, Homo sapiens
  CDR3 for beta chain variable domain of TCR clone 313897 (TRBV6-6, TRBJ1-3)
CAISYSKWDSISGDTIYF

SEQ ID NO: 627795 - protein, 14 aa, Homo sapiens
  CDR3 for alpha chain variable domain of TCR clone 313898 (TRAV25, TRAJ27)
CAGEHLTNAGKSTF

SEQ ID NO: 627796 - protein, 19 aa, Homo sapiens
  CDR3 for beta chain variable domain of TCR clone 313898 (TRBV4-1, TRBJ2-1)
CASSQGPLPGLGSRNEQFF

SEQ ID NO: 627797 - protein, 17 aa, Homo sapiens
  CDR3 for alpha chain variable domain of TCR clone 313899 (TRAV4, )
CLVDIQNPDPAAYQLRD

SEQ ID NO: 627798 - protein, 15 aa, Homo sapiens
  CDR3 for beta chain variable domain of TCR clone 313899 (TRBV20-1, TRBJ1-5)
CSARVGRVVSQPQHF

SEQ ID NO: 627799 - protein, 12 aa, Homo sapiens
  CDR3 for alpha chain variable domain of TCR clone 313900 (TRAV21, TRAJ6)
AAVKGGNYIPTF

SEQ ID NO: 627800 - protein, 13 aa, Homo sapiens
  CDR3 for beta chain variable domain of TCR clone 313900 (TRBV11-2, TRBJ1-1)
CASSFTENTEAFF

SEQ ID NO: 627801 - protein, 16 aa, Homo sapiens
  CDR3 for alpha chain variable domain of TCR clone 313901 (TRAV30, TRAJ24)
CGTEIVDADSWGEFQF

SEQ ID NO: 627802 - protein, 16 aa, Homo sapiens
  CDR3 for beta chain variable domain of TCR clone 313901 (TRBV6-1, TRBJ2-1)
CASILRQGSSYNEQFF

SEQ ID NO: 627803 - protein, 14 aa, Homo sapiens
  CDR3 for alpha chain variable domain of TCR clone 313902 (TRAV2, TRAJ37)
CAVDFTSNTGKLIS

SEQ ID NO: 627804 - protein, 15 aa, Homo sapiens
  CDR3 for beta chain variable domain of TCR clone 313902 (TRBV20-1, TRBJ1-1)
CSASRGVTGNTEAVF

SEQ ID NO: 627805 - protein, 14 aa, Homo sapiens
  CDR3 for alpha chain variable domain of TCR clone 313903 (TRAV12-3, TRAJ6)
CAMSATGGSYIPTF

SEQ ID NO: 627806 - protein, 13 aa, Homo sapiens
  CDR3 for beta chain variable domain of TCR clone 313903 (TRBV7-3, TRBJ1-1)
CASSQDWGAEAFF

SEQ ID NO: 627807 - protein, 12 aa, Homo sapiens
  CDR3 for alpha chain variable domain of TCR clone 313904 (TRAV35, TRAJ28)
GVEGAGSYQLTF

SEQ ID NO: 627808 - protein, 14 aa, Homo sapiens
  CDR3 for beta chain variable domain of TCR clone 313904 (TRBV25-1, TRBJ1-1)
CASTHLGGNTEAFF

SEQ ID NO: 627809 - protein, 21 aa, Homo sapiens
  CDR3 for alpha chain variable domain of TCR clone 313905 (TRAV12-1, TRAJ32)
SSVIRPPTSMNYGGATNQLIF

SEQ ID NO: 627810 - protein, 15 aa, Homo sapiens
  CDR3 for beta chain variable domain of TCR clone 313905 (TRBV7-9, TRBJ2-2)
CASGPLDTFPGELFF

SEQ ID NO: 627811 - protein, 14 aa, Homo sapiens
  CDR3 for alpha chain variable domain of TCR clone 313906 (TRAV1-2, TRAJ16)
CAVNRCSDGQKLLF

SEQ ID NO: 627812 - protein, 13 aa, Homo sapiens
  CDR3 for beta chain variable domain of TCR clone 313906 (TRBV18, TRBJ2-5)
CASSPAGKETQYF

SEQ ID NO: 627813 - protein, 13 aa, Homo sapiens
  CDR3 for alpha chain variable domain of TCR clone 313907 (TRAV38-1, TRAJ42)
LARWGGSQGNLIF

SEQ ID NO: 627814 - protein, 10 aa, Homo sapiens
  CDR3 for beta chain variable domain of TCR clone 313907 (TRBV2, TRBJ2-5)
RASSAATQYF

SEQ ID NO: 627815 - protein, 13 aa, Homo sapiens
  CDR3 for alpha chain variable domain of TCR clone 313908 (TRAV13-1, TRAJ41)
CAASNDSGYALNF

SEQ ID NO: 627816 - protein, 13 aa, Homo sapiens
  CDR3 for beta chain variable domain of TCR clone 313908 (TRBV11-3, TRBJ2-3)
CASSFTGPDTQYF

SEQ ID NO: 627817 - protein, 13 aa, Homo sapiens
  CDR3 for alpha chain variable domain of TCR clone 313909 (TRAV3, TRAJ20)
CCEAFCNDYKLSF

SEQ ID NO: 627818 - protein, 15 aa, Homo sapiens
  CDR3 for beta chain variable domain of TCR clone 313909 (TRBV19, TRBJ2-6)
CASVRRDSGGNVLTF

SEQ ID NO: 627819 - protein, 12 aa, Homo sapiens
  CDR3 for alpha chain variable domain of TCR clone 313910 (TRAV2, TRAJ9)
CAVGAGGLKTIF

SEQ ID NO: 627820 - protein, 12 aa, Homo sapiens
  CDR3 for beta chain variable domain of TCR clone 313910 (TRBV12-4, TRBJ2-3)
CASSSTTDTQYF

SEQ ID NO: 627821 - protein, 14 aa, Homo sapiens
  CDR3 for alpha chain variable domain of TCR clone 313911 (TRAV8-1, TRAJ34)
CAVNPSYNTDKLIF

SEQ ID NO: 627822 - protein, 16 aa, Homo sapiens
  CDR3 for beta chain variable domain of TCR clone 313911 (TRBV7-2, TRBJ2-6)
CASSLAGRSGADVLTF

SEQ ID NO: 627823 - protein, 15 aa, Homo sapiens
  CDR3 for alpha chain variable domain of TCR clone 313912 (TRAV26-1, TRAJ42)
CIVRVKGGSQGNLIF

SEQ ID NO: 627824 - protein, 14 aa, Homo sapiens
  CDR3 for beta chain variable domain of TCR clone 313912 (TRBV19, TRBJ2-2)
CATTGHANTGELFV

SEQ ID NO: 627825 - protein, 16 aa, Homo sapiens
  CDR3 for alpha chain variable domain of TCR clone 313913 (TRAV3, TRAJ10)
CAVRDLRAGGGNKLTF

SEQ ID NO: 627826 - protein, 20 aa, Homo sapiens
  CDR3 for beta chain variable domain of TCR clone 313913 (TRBV11-3, TRBJ2-7)
CASSQRTSGSLRAVLRAGHQ

SEQ ID NO: 627827 - protein, 13 aa, Homo sapiens
  CDR3 for alpha chain variable domain of TCR clone 313914 (TRAV1-1, TRAJ9)
CAAKNTGGFKTIF

SEQ ID NO: 627828 - protein, 16 aa, Homo sapiens
  CDR3 for beta chain variable domain of TCR clone 313914 (TRBV3-1, TRBJ1-2)
CASSQGQGVQRDGYTF

SEQ ID NO: 627829 - protein, 13 aa, Homo sapiens
  CDR3 for alpha chain variable domain of TCR clone 313915 (TRAV2, TRAJ12)
CAVGAGSSYKLIF

SEQ ID NO: 627830 - protein, 13 aa, Homo sapiens
  CDR3 for beta chain variable domain of TCR clone 313915 (TRBV20-1, TRBJ1-1)
CSARGGGNTEAFF

SEQ ID NO: 627831 - protein, 16 aa, Homo sapiens
  CDR3 for alpha chain variable domain of TCR clone 313916 (TRAV21, TRAJ37)
CAVRTAGSTDTGKLIF

SEQ ID NO: 627832 - protein, 13 aa, Homo sapiens
  CDR3 for beta chain variable domain of TCR clone 313916 (TRBV7-9, TRBJ2-5)
CASLPSGRETQYF

SEQ ID NO: 627833 - protein, 14 aa, Homo sapiens
  CDR3 for alpha chain variable domain of TCR clone 313917 (TRAV21, TRAJ35)
CAVMPIGFGNVLHC

SEQ ID NO: 627834 - protein, 17 aa, Homo sapiens
  CDR3 for beta chain variable domain of TCR clone 313917 (TRBV4-2, TRBJ1-1)
CASTQFGGGSGNTEAFF

SEQ ID NO: 627835 - protein, 14 aa, Homo sapiens
  CDR3 for alpha chain variable domain of TCR clone 313918 (TRAV13-1, TRAJ35)
CAASKGGFGNVLHF

SEQ ID NO: 627836 - protein, 13 aa, Homo sapiens
  CDR3 for beta chain variable domain of TCR clone 313918 (TRBV7-3, TRBJ1-1)
CDSSQDWGAEAFF

SEQ ID NO: 627837 - protein, 16 aa, Homo sapiens
  CDR3 for alpha chain variable domain of TCR clone 313919 (TRAV13-1, TRAJ48)
CAASIFGNFGNEKLTV

SEQ ID NO: 627838 - protein, 12 aa, Homo sapiens
  CDR3 for beta chain variable domain of TCR clone 313919 (TRBV14, TRBJ2-4)
CASSNLKSIQYF

SEQ ID NO: 627839 - protein, 13 aa, Homo sapiens
  CDR3 for alpha chain variable domain of TCR clone 313920 (TRAV8-3, TRAJ44)
CAVVPGTASKLTF

SEQ ID NO: 627840 - protein, 13 aa, Homo sapiens
  CDR3 for beta chain variable domain of TCR clone 313920 (TRBV7-2, TRBJ1-4)
CASSLAGLEKLFF

SEQ ID NO: 627841 - protein, 12 aa, Homo sapiens
  CDR3 for alpha chain variable domain of TCR clone 313921 (TRAV12-1, TRAJ40)
CVVYSGTYKYIF

SEQ ID NO: 627842 - protein, 15 aa, Homo sapiens
  CDR3 for beta chain variable domain of TCR clone 313921 (TRBV27, TRBJ1-6)
GASSFDRGLGSPLHF

SEQ ID NO: 627843 - protein, 14 aa, Homo sapiens
  CDR3 for alpha chain variable domain of TCR clone 313922 (TRAV12-2, TRAJ13)
CAVKKTGGYQKVTF

SEQ ID NO: 627844 - protein, 14 aa, Homo sapiens
  CDR3 for beta chain variable domain of TCR clone 313922 (TRBV7-9, TRBJ1-1)
CASTPLQSYTEAFF

SEQ ID NO: 627845 - protein, 14 aa, Homo sapiens
  CDR3 for alpha chain variable domain of TCR clone 313923 (TRAV16, TRAJ17)
CAPRIKAAGNKRTF

SEQ ID NO: 627846 - protein, 17 aa, Homo sapiens
  CDR3 for beta chain variable domain of TCR clone 313923 (TRBV7-2, TRBJ2-3)
CASSSYSGTRRADTQYF

SEQ ID NO: 627847 - protein, 14 aa, Homo sapiens
  CDR3 for alpha chain variable domain of TCR clone 313924 (TRAV8-4, TRAJ23)
CAVSAPGSGGKLIF

SEQ ID NO: 627848 - protein, 13 aa, Homo sapiens
  CDR3 for beta chain variable domain of TCR clone 313924 (TRBV7-2, TRBJ2-2)
CASSLAVTGELFF

SEQ ID NO: 627849 - protein, 12 aa, Homo sapiens
  CDR3 for alpha chain variable domain of TCR clone 313925 (TRAV12-3, TRAJ34)
CAMGYNTDKLIF

SEQ ID NO: 627850 - protein, 15 aa, Homo sapiens
  CDR3 for beta chain variable domain of TCR clone 313925 (TRBV28, TRBJ2-1)
CASSIIAGGRSEQFV

SEQ ID NO: 627851 - protein, 13 aa, Homo sapiens
  CDR3 for alpha chain variable domain of TCR clone 313926 (TRAV8-3, TRAJ44)
CAVVPGTASKLTF

SEQ ID NO: 627852 - protein, 14 aa, Homo sapiens
  CDR3 for beta chain variable domain of TCR clone 313926 (TRBV11-2, TRBJ2-3)
CASSRIARTDTQYF

SEQ ID NO: 627853 - protein, 15 aa, Homo sapiens
  CDR3 for alpha chain variable domain of TCR clone 313927 (TRAV3, TRAJ5)
CAVRDLDTGRRALTF

SEQ ID NO: 627854 - protein, 13 aa, Homo sapiens
  CDR3 for beta chain variable domain of TCR clone 313927 (TRBV3-1, TRBJ2-7)
CASSLRDGYEQYF

SEQ ID NO: 627855 - protein, 18 aa, Homo sapiens
  CDR3 for alpha chain variable domain of TCR clone 313928 (TRAV21, TRAJ52)
CAVRPSPAGGTSYGKLTF

SEQ ID NO: 627856 - protein, 14 aa, Homo sapiens
  CDR3 for beta chain variable domain of TCR clone 313928 (TRBV19, TRBJ1-5)
CASRAPDSFLSQHF

SEQ ID NO: 627857 - protein, 15 aa, Homo sapiens
  CDR3 for alpha chain variable domain of TCR clone 313929 (TRAV29/DV5, TRAJ24)
CAASGATDSWGKFQF

SEQ ID NO: 627858 - protein, 15 aa, Homo sapiens
  CDR3 for beta chain variable domain of TCR clone 313929 (TRBV28, TRBJ2-7)
CASKKPSGRAYEQYF

SEQ ID NO: 627859 - protein, 14 aa, Homo sapiens
  CDR3 for alpha chain variable domain of TCR clone 313930 (TRAV14/DV4, TRAJ57)
CAMREEGGSEKLVF

SEQ ID NO: 627860 - protein, 15 aa, Homo sapiens
  CDR3 for beta chain variable domain of TCR clone 313930 (TRBV7-3, TRBJ1-1)
CASSPRADRNTEAFF

SEQ ID NO: 627861 - protein, 14 aa, Homo sapiens
  CDR3 for alpha chain variable domain of TCR clone 313931 (TRAV3, TRAJ21)
CAVRDAYNFKKFYF

SEQ ID NO: 627862 - protein, 17 aa, Homo sapiens
  CDR3 for beta chain variable domain of TCR clone 313931 (TRBV20-1, TRBJ1-6)
CSARGGYTFSYNSPLHF

SEQ ID NO: 627863 - protein, 22 aa, Homo sapiens
  CDR3 for alpha chain variable domain of TCR clone 313932 (TRAV8-4, TRAJ9)
CAVRINTGGFKTILEQEQDYLL

SEQ ID NO: 627864 - protein, 15 aa, Homo sapiens
  CDR3 for beta chain variable domain of TCR clone 313932 (TRBV10-2, TRBJ2-6)
CASSEQGTGANVLTF

SEQ ID NO: 627865 - protein, 10 aa, Homo sapiens
  CDR3 for alpha chain variable domain of TCR clone 313933 (TRAV12-3, TRAJ49)
CAMNDDQFYF

SEQ ID NO: 627866 - protein, 13 aa, Homo sapiens
  CDR3 for beta chain variable domain of TCR clone 313933 (TRBV20-1, TRBJ1-6)
CSAPLGVGSPLHF

SEQ ID NO: 627867 - protein, 17 aa, Homo sapiens
  CDR3 for alpha chain variable domain of TCR clone 313934 (TRAV4, TRAJ13)
CLVGVQGSSGGYQKVTF

SEQ ID NO: 627868 - protein, 16 aa, Homo sapiens
  CDR3 for beta chain variable domain of TCR clone 313934 (TRBV15, TRBJ2-5)
CATSRYLEAAQETQYF

SEQ ID NO: 627869 - protein, 16 aa, Homo sapiens
  CDR3 for alpha chain variable domain of TCR clone 313935 (TRAV1-2, TRAJ10)
CAVRDQGGGGGNKLTF

SEQ ID NO: 627870 - protein, 13 aa, Homo sapiens
  CDR3 for beta chain variable domain of TCR clone 313935 (TRBV29-1, TRBJ1-1)
CSVGDSRNTEAFC

SEQ ID NO: 627871 - protein, 13 aa, Homo sapiens
  CDR3 for alpha chain variable domain of TCR clone 313936 (TRAV20, TRAJ54)
CAVQAGGTQKLGF

SEQ ID NO: 627872 - protein, 14 aa, Homo sapiens
  CDR3 for beta chain variable domain of TCR clone 313936 (TRBV20-1, TRBJ2-7)
CSAKTGTGGYEQYF

SEQ ID NO: 627873 - protein, 13 aa, Homo sapiens
  CDR3 for alpha chain variable domain of TCR clone 313937 (TRAV21, TRAJ27)
CAARPGNAGKSTF

SEQ ID NO: 627874 - protein, 13 aa, Homo sapiens
  CDR3 for beta chain variable domain of TCR clone 313937 (TRBV13, TRBJ2-1)
CGSILGGRGEQFF

SEQ ID NO: 627875 - protein, 12 aa, Homo sapiens
  CDR3 for alpha chain variable domain of TCR clone 313938 (TRAV30, TRAJ20)
CGTASNDYKLSF

SEQ ID NO: 627876 - protein, 15 aa, Homo sapiens
  CDR3 for beta chain variable domain of TCR clone 313938 (TRBV20-1, TRBJ2-7)
CSARDRVSGMDEQYF

SEQ ID NO: 627877 - protein, 14 aa, Homo sapiens
  CDR3 for alpha chain variable domain of TCR clone 313939 (TRAV12-1, TRAJ3)
CGAARYSSASKIIF

SEQ ID NO: 627878 - protein, 15 aa, Homo sapiens
  CDR3 for beta chain variable domain of TCR clone 313939 (TRBV7-2, TRBJ2-6)
CASSRAGSGANVLPF

SEQ ID NO: 627879 - protein, 13 aa, Homo sapiens
  CDR3 for alpha chain variable domain of TCR clone 313940 (TRAV8-3, TRAJ36)
CAVGTTGANNLFF

SEQ ID NO: 627880 - protein, 13 aa, Homo sapiens
  CDR3 for beta chain variable domain of TCR clone 313940 (TRBV7-7, TRBJ2-5)
CASSRSGQETQYF

SEQ ID NO: 627881 - protein, 16 aa, Homo sapiens
  CDR3 for alpha chain variable domain of TCR clone 313941 (TRAV12-1, TRAJ13)
CVVNLEVSGGYQKVTF

SEQ ID NO: 627882 - protein, 16 aa, Homo sapiens
  CDR3 for beta chain variable domain of TCR clone 313941 (TRBV24-1, TRBJ2-6)
CATSGRKASGANVLTF

SEQ ID NO: 627883 - protein, 14 aa, Homo sapiens
  CDR3 for alpha chain variable domain of TCR clone 313942 (TRAV12-2, TRAJ40)
CAVKIPSGTYKYTF

SEQ ID NO: 627884 - protein, 14 aa, Homo sapiens
  CDR3 for beta chain variable domain of TCR clone 313942 (TRBV7-9, TRBJ2-2)
CASSLGHRTGELFF

SEQ ID NO: 627885 - protein, 14 aa, Homo sapiens
  CDR3 for alpha chain variable domain of TCR clone 313943 (TRAV17, TRAJ15)
CATMGIQAGTALIF

SEQ ID NO: 627886 - protein, 15 aa, Homo sapiens
  CDR3 for beta chain variable domain of TCR clone 313943 (TRBV11-2, TRBJ2-1)
CASSLGPDSYNEQFF

SEQ ID NO: 627887 - protein, 12 aa, Homo sapiens
  CDR3 for alpha chain variable domain of TCR clone 313944 (TRAV12-3, TRAJ17)
RAMTLTGNKLTF

SEQ ID NO: 627888 - protein, 13 aa, Homo sapiens
  CDR3 for beta chain variable domain of TCR clone 313944 (TRBV20-1, TRBJ2-5)
CSARGDDQETQYF

SEQ ID NO: 627889 - protein, 12 aa, Homo sapiens
  CDR3 for alpha chain variable domain of TCR clone 313945 (TRAV17, TRAJ31)
CATEQGSARLMF

SEQ ID NO: 627890 - protein, 15 aa, Homo sapiens
  CDR3 for beta chain variable domain of TCR clone 313945 (TRBV27, TRBJ2-7)
CASSKAGRGGYEQYF

SEQ ID NO: 627891 - protein, 17 aa, Homo sapiens
  CDR3 for alpha chain variable domain of TCR clone 313946 (TRAV13-1, TRAJ28)
CAASPPYSGAGSYRLTF

SEQ ID NO: 627892 - protein, 14 aa, Homo sapiens
  CDR3 for beta chain variable domain of TCR clone 313946 (TRBV24-1, TRBJ1-1)
CATSIPRGDTEAFF

SEQ ID NO: 627893 - protein, 13 aa, Homo sapiens
  CDR3 for alpha chain variable domain of TCR clone 313947 (TRAV21, TRAJ36)
CAVIKTGANNLFF

SEQ ID NO: 627894 - protein, 13 aa, Homo sapiens
  CDR3 for beta chain variable domain of TCR clone 313947 (TRBV29-1, TRBJ2-3)
CSATRGGRDTHYF

SEQ ID NO: 627895 - protein, 14 aa, Homo sapiens
  CDR3 for alpha chain variable domain of TCR clone 313948 (TRAV2, TRAJ9)
CAVEDRSGGFKTIF

SEQ ID NO: 627896 - protein, 17 aa, Homo sapiens
  CDR3 for beta chain variable domain of TCR clone 313948 (TRBV13, TRBJ2-3)
CASSLSRVAGGRSTQYF

SEQ ID NO: 627897 - protein, 18 aa, Homo sapiens
  CDR3 for alpha chain variable domain of TCR clone 313949 (TRAV21, TRAJ52)
CAVRPSPAGGTSYGKLTF

SEQ ID NO: 627898 - protein, 16 aa, Homo sapiens
  CDR3 for beta chain variable domain of TCR clone 313949 (TRBV7-3, TRBJ2-1)
SASSLEGYRSYNEQFF

SEQ ID NO: 627899 - protein, 14 aa, Homo sapiens
  CDR3 for alpha chain variable domain of TCR clone 313950 (TRAV13-2, TRAJ42)
CGEWVGGSQGNLIF

SEQ ID NO: 627900 - protein, 11 aa, Homo sapiens
  CDR3 for beta chain variable domain of TCR clone 313950 (TRBV12-4, TRBJ2-3)
CASTATDTQYF

SEQ ID NO: 627901 - protein, 10 aa, Homo sapiens
  CDR3 for alpha chain variable domain of TCR clone 313951 (TRAV30, TRAJ48)
CGIGDEKLTF

SEQ ID NO: 627902 - protein, 15 aa, Homo sapiens
  CDR3 for beta chain variable domain of TCR clone 313951 (TRBV7-9, TRBJ2-2)
CASGPLDTFPGELFF

SEQ ID NO: 627903 - protein, 13 aa, Homo sapiens
  CDR3 for alpha chain variable domain of TCR clone 313952 (TRAV13-1, TRAJ43)
CAASNLLTCALEQ

SEQ ID NO: 627904 - protein, 18 aa, Homo sapiens
  CDR3 for beta chain variable domain of TCR clone 313952 (TRBV11-2, TRBJ2-3)
CASSLGGASRGAPNTQYF

SEQ ID NO: 627905 - protein, 16 aa, Homo sapiens
  CDR3 for alpha chain variable domain of TCR clone 313953 (TRAV3, TRAJ10)
CAVRDMRAGGGNKLTF

SEQ ID NO: 627906 - protein, 14 aa, Homo sapiens
  CDR3 for beta chain variable domain of TCR clone 313953 (TRBV7-8, TRBJ2-3)
CPSSLEAGTDTQYF

SEQ ID NO: 627907 - protein, 14 aa, Homo sapiens
  CDR3 for alpha chain variable domain of TCR clone 313954 (TRAV35, TRAJ38)
CAGSNAGNNRKLIW

SEQ ID NO: 627908 - protein, 11 aa, Homo sapiens
  CDR3 for beta chain variable domain of TCR clone 313954 (TRBV19, TRBJ1-2)
CASSISSGYTF

SEQ ID NO: 627909 - protein, 18 aa, Homo sapiens
  CDR3 for alpha chain variable domain of TCR clone 313955 (TRAV13-1, TRAJ52)
CAAKNPNAGGTSYGKLTF

SEQ ID NO: 627910 - protein, 15 aa, Homo sapiens
  CDR3 for beta chain variable domain of TCR clone 313955 (TRBV6-6, TRBJ2-5)
CASSPGGGLEETQYF

SEQ ID NO: 627911 - protein, 14 aa, Homo sapiens
  CDR3 for alpha chain variable domain of TCR clone 313956 (TRAV2, TRAJ9)
CAVEDRSGGFKTIS

SEQ ID NO: 627912 - protein, 15 aa, Homo sapiens
  CDR3 for beta chain variable domain of TCR clone 313956 (TRBV28, TRBJ1-3)
CASSMGWASGNTIYF

SEQ ID NO: 627913 - protein, 15 aa, Homo sapiens
  CDR3 for alpha chain variable domain of TCR clone 313957 (TRAV13-2, TRAJ40)
CAEHRSRQGTYKYNF

SEQ ID NO: 627914 - protein, 15 aa, Homo sapiens
  CDR3 for beta chain variable domain of TCR clone 313957 (TRBV19, TRBJ2-1)
CASSMGWNSNNEQFF

SEQ ID NO: 627915 - protein, 13 aa, Homo sapiens
  CDR3 for alpha chain variable domain of TCR clone 313958 (TRAV25, TRAJ30)
CAGRVDRDDKIIF

SEQ ID NO: 627916 - protein, 17 aa, Homo sapiens
  CDR3 for beta chain variable domain of TCR clone 313958 (TRBV7-9, TRBJ2-6)
CASSFGAGYSGVNVLTF

SEQ ID NO: 627917 - protein, 14 aa, Homo sapiens
  CDR3 for alpha chain variable domain of TCR clone 313959 (TRAV1-2, TRAJ16)
CAVNRFSDGQTLLF

SEQ ID NO: 627918 - protein, 15 aa, Homo sapiens
  CDR3 for beta chain variable domain of TCR clone 313959 (TRBV7-9, TRBJ1-6)
CASSSPGRGNSTLHF

SEQ ID NO: 627919 - protein, 17 aa, Homo sapiens
  CDR3 for alpha chain variable domain of TCR clone 313960 (TRAV3, TRAJ6)
CAVRDGPRAGGSYIPTF

SEQ ID NO: 627920 - protein, 15 aa, Homo sapiens
  CDR3 for beta chain variable domain of TCR clone 313960 (TRBV19, TRBJ1-1)
CASSIGGGRNTEAFF

SEQ ID NO: 627921 - protein, 16 aa, Homo sapiens
  CDR3 for alpha chain variable domain of TCR clone 313961 (TRAV12-1, TRAJ42)
CVVTSYYGGSQGNLIF

SEQ ID NO: 627922 - protein, 15 aa, Homo sapiens
  CDR3 for beta chain variable domain of TCR clone 313961 (TRBV4-3, TRBJ2-7)
CASSQGGRGIYEQYF

SEQ ID NO: 627923 - protein, 13 aa, Homo sapiens
  CDR3 for alpha chain variable domain of TCR clone 313962 (TRAV8-3, TRAJ40)
CAVVVSGTYKYSF

SEQ ID NO: 627924 - protein, 15 aa, Homo sapiens
  CDR3 for beta chain variable domain of TCR clone 313962 (TRBV7-2, TRBJ2-1)
CASRKTGSSYNEQFF

SEQ ID NO: 627925 - protein, 17 aa, Homo sapiens
  CDR3 for alpha chain variable domain of TCR clone 313963 (TRAV17, TRAJ23)
CATASPMIYNQGGKLIF

SEQ ID NO: 627926 - protein, 16 aa, Homo sapiens
  CDR3 for beta chain variable domain of TCR clone 313963 (TRBV7-8, TRBJ2-6)
CASRVGDSSGANVLTF

SEQ ID NO: 627927 - protein, 12 aa, Homo sapiens
  CDR3 for alpha chain variable domain of TCR clone 313964 (TRAV2, TRAJ40)
CCGTSGTYKYIF

SEQ ID NO: 627928 - protein, 16 aa, Homo sapiens
  CDR3 for beta chain variable domain of TCR clone 313964 (TRBV7-9, TRBJ1-3)
CASSLGAGSSGNTIYF

SEQ ID NO: 627929 - protein, 14 aa, Homo sapiens
  CDR3 for alpha chain variable domain of TCR clone 313965 (TRAV30, TRAJ33)
CGTERRFSNYQLIW

SEQ ID NO: 627930 - protein, 13 aa, Homo sapiens
  CDR3 for beta chain variable domain of TCR clone 313965 (TRBV29-1, TRBJ2-2)
CSTTGVNTGELFF

SEQ ID NO: 627931 - protein, 14 aa, Homo sapiens
  CDR3 for alpha chain variable domain of TCR clone 313966 (TRAV2, TRAJ39)
CAVEVNNAGNMLTF

SEQ ID NO: 627932 - protein, 20 aa, Homo sapiens
  CDR3 for beta chain variable domain of TCR clone 313966 (TRBV28, TRBJ2-1)
CASTPIGRSPGLAGGNEQFF

SEQ ID NO: 627933 - protein, 19 aa, Homo sapiens
  CDR3 for alpha chain variable domain of TCR clone 313967 (TRAV13-1, TRAJ52)
CAASPYQNAGGTSYGKLTF

SEQ ID NO: 627934 - protein, 10 aa, Homo sapiens
  CDR3 for beta chain variable domain of TCR clone 313967 (TRBV19, TRBJ2-7)
CARTVQGRAP

SEQ ID NO: 627935 - protein, 15 aa, Homo sapiens
  CDR3 for alpha chain variable domain of TCR clone 313968 (TRAV3, TRAJ5)
CAVRELDTGRRAITF

SEQ ID NO: 627936 - protein, 13 aa, Homo sapiens
  CDR3 for beta chain variable domain of TCR clone 313968 (TRBV12-4, TRBJ2-7)
CASSPTETYEQYF

SEQ ID NO: 627937 - protein, 14 aa, Homo sapiens
  CDR3 for alpha chain variable domain of TCR clone 313969 (TRAV12-3, TRAJ10)
SHLPLTGGGNKLSF

SEQ ID NO: 627938 - protein, 15 aa, Homo sapiens
  CDR3 for beta chain variable domain of TCR clone 313969 (TRBV10-2, TRBJ2-6)
CASSEQGTGANVLTF

SEQ ID NO: 627939 - protein, 15 aa, Homo sapiens
  CDR3 for alpha chain variable domain of TCR clone 313970 (TRAV3, TRAJ29)
CAVRDSISGNTPLAF

SEQ ID NO: 627940 - protein, 15 aa, Homo sapiens
  CDR3 for beta chain variable domain of TCR clone 313970 (TRBV18, TRBJ2-3)
CASSPGLAGGDTQYF

SEQ ID NO: 627941 - protein, 16 aa, Homo sapiens
  CDR3 for alpha chain variable domain of TCR clone 313971 (TRAV30, TRAJ24)
CGTEIVDADSWGKFQF

SEQ ID NO: 627942 - protein, 18 aa, Homo sapiens
  CDR3 for beta chain variable domain of TCR clone 313971 (TRBV7-9, TRBJ2-1)
CASSTGLAEGSSYNEQFF

SEQ ID NO: 627943 - protein, 17 aa, Homo sapiens
  CDR3 for alpha chain variable domain of TCR clone 313972 (TRAV29/DV5, TRAJ52)
CAASARAGGTSYGKLTF

SEQ ID NO: 627944 - protein, 13 aa, Homo sapiens
  CDR3 for beta chain variable domain of TCR clone 313972 (TRBV4-2, TRBJ1-1)
CASSQAGNTEAFF

SEQ ID NO: 627945 - protein, 16 aa, Homo sapiens
  CDR3 for alpha chain variable domain of TCR clone 313973 (TRAV30, TRAJ24)
CGTEIVDADSWGKFQF

SEQ ID NO: 627946 - protein, 15 aa, Homo sapiens
  CDR3 for beta chain variable domain of TCR clone 313973 (TRBV27, TRBJ2-1)
CASGNGGGSSNEQFF

SEQ ID NO: 627947 - protein, 13 aa, Homo sapiens
  CDR3 for alpha chain variable domain of TCR clone 313974 (TRAV13-2, TRAJ53)
CAENTGSNYKLTF

SEQ ID NO: 627948 - protein, 13 aa, Homo sapiens
  CDR3 for beta chain variable domain of TCR clone 313974 (TRBV4-1, TRBJ2-2)
CASSQENTGELFF

SEQ ID NO: 627949 - protein, 23 aa, Homo sapiens
  CDR3 for alpha chain variable domain of TCR clone 313975 (TRAV12-1, TRAJ23)
SSVIQPPTSVWWYGDNQGGKLIF

SEQ ID NO: 627950 - protein, 13 aa, Homo sapiens
  CDR3 for beta chain variable domain of TCR clone 313975 (TRBV2, TRBJ1-4)
CASNRGTNEKLFF

SEQ ID NO: 627951 - protein, 14 aa, Homo sapiens
  CDR3 for alpha chain variable domain of TCR clone 313976 (TRAV1-2, TRAJ16)
CAVNLSSDGQKLLF

SEQ ID NO: 627952 - protein, 15 aa, Homo sapiens
  CDR3 for beta chain variable domain of TCR clone 313976 (TRBV9, TRBJ1-6)
CASSVAGTGDSPLHF

SEQ ID NO: 627953 - protein, 17 aa, Homo sapiens
  CDR3 for alpha chain variable domain of TCR clone 313977 (TRAV8-3, TRAJ8)
CAVGPNEPRLSETCILN

SEQ ID NO: 627954 - protein, 13 aa, Homo sapiens
  CDR3 for beta chain variable domain of TCR clone 313977 (TRBV10-2, TRBJ2-3)
CASSESGDHTQYF

SEQ ID NO: 627955 - protein, 14 aa, Homo sapiens
  CDR3 for alpha chain variable domain of TCR clone 313978 (TRAV9-2, TRAJ39)
CALYIYNAGNMLTI

SEQ ID NO: 627956 - protein, 15 aa, Homo sapiens
  CDR3 for beta chain variable domain of TCR clone 313978 (TRBV4-1, TRBJ1-4)
CASSDTGGTNEKLFF

SEQ ID NO: 627957 - protein, 16 aa, Homo sapiens
  CDR3 for alpha chain variable domain of TCR clone 313979 (TRAV27, TRAJ48)
TAAQPSDTGLYLPLTF

SEQ ID NO: 627958 - protein, 13 aa, Homo sapiens
  CDR3 for beta chain variable domain of TCR clone 313979 (TRBV7-2, TRBJ2-5)
CASSQTSVETQYF

SEQ ID NO: 627959 - protein, 14 aa, Homo sapiens
  CDR3 for alpha chain variable domain of TCR clone 313980 (TRAV12-3, TRAJ10)
SHLPLTEGGNKLTF

SEQ ID NO: 627960 - protein, 16 aa, Homo sapiens
  CDR3 for beta chain variable domain of TCR clone 313980 (TRBV4-1, TRBJ1-4)
CASSQDLRRGGEKLFF

SEQ ID NO: 627961 - protein, 15 aa, Homo sapiens
  CDR3 for alpha chain variable domain of TCR clone 313981 (TRAV17, TRAJ57)
CATGPSQGGSEKLVF

SEQ ID NO: 627962 - protein, 17 aa, Homo sapiens
  CDR3 for beta chain variable domain of TCR clone 313981 (TRBV20-1, TRBJ2-4)
CSARDWASGGRENIQYF

SEQ ID NO: 627963 - protein, 19 aa, Homo sapiens
  CDR3 for alpha chain variable domain of TCR clone 313982 (TRAV3, TRAJ37)
CAVRDIVGGYPSNTGKLIF

SEQ ID NO: 627964 - protein, 14 aa, Homo sapiens
  CDR3 for beta chain variable domain of TCR clone 313982 (TRBV7-8, TRBJ2-3)
CASSLEAGTDTQDF

SEQ ID NO: 627965 - protein, 13 aa, Homo sapiens
  CDR3 for alpha chain variable domain of TCR clone 313983 (TRAV1-2, TRAJ9)
CAALNTGGFKTIF

SEQ ID NO: 627966 - protein, 16 aa, Homo sapiens
  CDR3 for beta chain variable domain of TCR clone 313983 (TRBV7-2, TRBJ2-7)
CASSLVMWVGSYEQYF

SEQ ID NO: 627967 - protein, 13 aa, Homo sapiens
  CDR3 for alpha chain variable domain of TCR clone 313984 (TRAV30, TRAJ24)
CGTVTDSWGKLQF

SEQ ID NO: 627968 - protein, 14 aa, Homo sapiens
  CDR3 for beta chain variable domain of TCR clone 313984 (TRBV6-3, TRBJ2-2)
CASTYAPGTGELFF

SEQ ID NO: 627969 - protein, 14 aa, Homo sapiens
  CDR3 for alpha chain variable domain of TCR clone 313985 (TRAV1-2, TRAJ16)
CAVNRFSDGQKLPV

SEQ ID NO: 627970 - protein, 14 aa, Homo sapiens
  CDR3 for beta chain variable domain of TCR clone 313985 (TRBV7-3, TRBJ1-1)
CASSLKGGNTEAFF

SEQ ID NO: 627971 - protein, 15 aa, Homo sapiens
  CDR3 for alpha chain variable domain of TCR clone 313986 (TRAV8-1, TRAJ23)
CAVNSHYNQGGKLIF

SEQ ID NO: 627972 - protein, 13 aa, Homo sapiens
  CDR3 for beta chain variable domain of TCR clone 313986 (TRBV12-4, TRBJ2-2)
CASSITGSGELFF

SEQ ID NO: 627973 - protein, 16 aa, Homo sapiens
  CDR3 for alpha chain variable domain of TCR clone 313987 (TRAV12-1, TRAJ48)
CVVNMVSNFGTEKLTF

SEQ ID NO: 627974 - protein, 18 aa, Homo sapiens
  CDR3 for beta chain variable domain of TCR clone 313987 (TRBV11-2, TRBJ2-6)
CASSLNPFLGTGANDLTF

SEQ ID NO: 627975 - protein, 14 aa, Homo sapiens
  CDR3 for alpha chain variable domain of TCR clone 313988 (TRAV4, TRAJ11)
CLVGEYSGYSTLTF

SEQ ID NO: 627976 - protein, 13 aa, Homo sapiens
  CDR3 for beta chain variable domain of TCR clone 313988 (TRBV10-2, TRBJ2-7)
CASGASGGYEQYF

SEQ ID NO: 627977 - protein, 15 aa, Homo sapiens
  CDR3 for alpha chain variable domain of TCR clone 313989 (TRAV17, TRAJ22)
CATVAPSGSARQLTF

SEQ ID NO: 627978 - protein, 16 aa, Homo sapiens
  CDR3 for beta chain variable domain of TCR clone 313989 (TRBV10-3, TRBJ2-7)
YAISADYADRPYEQYF

SEQ ID NO: 627979 - protein, 15 aa, Homo sapiens
  CDR3 for alpha chain variable domain of TCR clone 313990 (TRAV12-1, TRAJ44)
CVADVPTGTASKLTF

SEQ ID NO: 627980 - protein, 13 aa, Homo sapiens
  CDR3 for beta chain variable domain of TCR clone 313990 (TRBV20-1, TRBJ2-5)
CSARGDYQETQYF

SEQ ID NO: 627981 - protein, 13 aa, Homo sapiens
  CDR3 for alpha chain variable domain of TCR clone 313991 (TRAV30, TRAJ24)
CGTVTDSWGKLQF

SEQ ID NO: 627982 - protein, 11 aa, Homo sapiens
  CDR3 for beta chain variable domain of TCR clone 313991 (TRBV10-3, TRBJ2-7)
CAISEGLEQYF

SEQ ID NO: 627983 - protein, 15 aa, Homo sapiens
  CDR3 for alpha chain variable domain of TCR clone 313992 (TRAV4, TRAJ3)
CLVGDSDSRASKIIF

SEQ ID NO: 627984 - protein, 14 aa, Homo sapiens
  CDR3 for beta chain variable domain of TCR clone 313992 (TRBV7-9, TRBJ2-7)
CASSLQQGGYEQYF

SEQ ID NO: 627985 - protein, 12 aa, Homo sapiens
  CDR3 for alpha chain variable domain of TCR clone 313993 (TRAV13-1, TRAJ21)
CAAKEGFNNFYF

SEQ ID NO: 627986 - protein, 13 aa, Homo sapiens
  CDR3 for beta chain variable domain of TCR clone 313993 (TRBV19, TRBJ2-7)
CASNPRQSYEQYF

SEQ ID NO: 627987 - protein, 15 aa, Homo sapiens
  CDR3 for alpha chain variable domain of TCR clone 313994 (TRAV3, TRAJ13)
CAVRDIAGGYQKVTF

SEQ ID NO: 627988 - protein, 17 aa, Homo sapiens
  CDR3 for beta chain variable domain of TCR clone 313994 (TRBV11-2, TRBJ2-1)
CASSLYPPGVEYNEQFF

SEQ ID NO: 627989 - protein, 11 aa, Homo sapiens
  CDR3 for alpha chain variable domain of TCR clone 313995 (TRAV26-1, TRAJ43)
CIVRPYNDMRF

SEQ ID NO: 627990 - protein, 15 aa, Homo sapiens
  CDR3 for beta chain variable domain of TCR clone 313995 (TRBV10-2, TRBJ2-6)
CASSEQGTGANVLTF

SEQ ID NO: 627991 - protein, 13 aa, Homo sapiens
  CDR3 for alpha chain variable domain of TCR clone 313996 (TRAV12-1, TRAJ31)
CVVNMNNNARLMF

SEQ ID NO: 627992 - protein, 15 aa, Homo sapiens
  CDR3 for beta chain variable domain of TCR clone 313996 (TRBV4-1, TRBJ1-2)
CASSQGQGAANGYTF

SEQ ID NO: 627993 - protein, 16 aa, Homo sapiens
  CDR3 for alpha chain variable domain of TCR clone 313997 (TRAV12-3, TRAJ53)
CAMSPGSGGSNYKLTF

SEQ ID NO: 627994 - protein, 14 aa, Homo sapiens
  CDR3 for beta chain variable domain of TCR clone 313997 (TRBV11-3, TRBJ1-6)
CASSFSGGDSPLHF

SEQ ID NO: 627995 - protein, 13 aa, Homo sapiens
  CDR3 for alpha chain variable domain of TCR clone 313998 (TRAV4, TRAJ28)
CLFIWGWELPTHF

SEQ ID NO: 627996 - protein, 14 aa, Homo sapiens
  CDR3 for beta chain variable domain of TCR clone 313998 (TRBV7-9, TRBJ2-5)
CASSLDTAHETQYF

SEQ ID NO: 627997 - protein, 14 aa, Homo sapiens
  CDR3 for alpha chain variable domain of TCR clone 313999 (TRAV30, TRAJ33)
CGTVAPRSNYQLIW

SEQ ID NO: 627998 - protein, 15 aa, Homo sapiens
  CDR3 for beta chain variable domain of TCR clone 313999 (TRBV2, TRBJ2-1)
CASSELAGSYNEQFF

SEQ ID NO: 627999 - protein, 14 aa, Homo sapiens
  CDR3 for alpha chain variable domain of TCR clone 314000 (TRAV17, TRAJ37)
CAMDGSSNTGKLIF

SEQ ID NO: 628000 - protein, 13 aa, Homo sapiens
  CDR3 for beta chain variable domain of TCR clone 314000 (TRBV11-2, TRBJ2-1)
CASSLDLVNEQFF

SEQ ID NO: 628001 - protein, 12 aa, Homo sapiens
  CDR3 for alpha chain variable domain of TCR clone 314001 (TRAV12-3, TRAJ17)
CAMTLTGNKPTF

SEQ ID NO: 628002 - protein, 12 aa, Homo sapiens
  CDR3 for beta chain variable domain of TCR clone 314001 (TRBV12-4, TRBJ2-7)
CASSLGGYEQYF

SEQ ID NO: 628003 - protein, 12 aa, Homo sapiens
  CDR3 for alpha chain variable domain of TCR clone 314002 (TRAV35, TRAJ30)
CAGLNRDDKIIF

SEQ ID NO: 628004 - protein, 15 aa, Homo sapiens
  CDR3 for beta chain variable domain of TCR clone 314002 (TRBV9, TRBJ1-6)
CASSVAGTGYSALDF

SEQ ID NO: 628005 - protein, 11 aa, Homo sapiens
  CDR3 for alpha chain variable domain of TCR clone 314003 (TRAV16, TRAJ26)
CSRGTMVNFVF

SEQ ID NO: 628006 - protein, 15 aa, Homo sapiens
  CDR3 for beta chain variable domain of TCR clone 314003 (TRBV7-2, TRBJ2-3)
CASSLTGTSTDTQYF

SEQ ID NO: 628007 - protein, 12 aa, Homo sapiens
  CDR3 for alpha chain variable domain of TCR clone 314004 (TRAV2, TRAJ33)
CAVPDSNYELIW

SEQ ID NO: 628008 - protein, 20 aa, Homo sapiens
  CDR3 for beta chain variable domain of TCR clone 314004 (TRBV19, TRBJ2-1)
CASSISRTVTSTRLNNEQFF

SEQ ID NO: 628009 - protein, 14 aa, Homo sapiens
  CDR3 for alpha chain variable domain of TCR clone 314005 (TRAV3, TRAJ17)
CAVRDAASGNKLTF

SEQ ID NO: 628010 - protein, 13 aa, Homo sapiens
  CDR3 for beta chain variable domain of TCR clone 314005 (TRBV2, TRBJ1-1)
CASSVSGYTEAFF

SEQ ID NO: 628011 - protein, 13 aa, Homo sapiens
  CDR3 for alpha chain variable domain of TCR clone 314006 (TRAV2, TRAJ40)
CAVVTLGTYKYIF

SEQ ID NO: 628012 - protein, 14 aa, Homo sapiens
  CDR3 for beta chain variable domain of TCR clone 314006 (TRBV19, TRBJ2-1)
CASPTVVLSGEQFF

SEQ ID NO: 628013 - protein, 20 aa, Homo sapiens
  CDR3 for alpha chain variable domain of TCR clone 314007 (TRAV16, TRAJ32)
CSRGRLSHVLGGGATNKLIF

SEQ ID NO: 628014 - protein, 15 aa, Homo sapiens
  CDR3 for beta chain variable domain of TCR clone 314007 (TRBV9, TRBJ1-6)
CASSVAGTGDSPLHV

SEQ ID NO: 628015 - protein, 10 aa, Homo sapiens
  CDR3 for alpha chain variable domain of TCR clone 314008 (TRAV21, TRAJ31)
CAVDNARLMF

SEQ ID NO: 628016 - protein, 13 aa, Homo sapiens
  CDR3 for beta chain variable domain of TCR clone 314008 (TRBV19, TRBJ1-1)
CASSIGPQAEAFF

SEQ ID NO: 628017 - protein, 13 aa, Homo sapiens
  CDR3 for alpha chain variable domain of TCR clone 314009 (TRAV38-2/DV8, TRAJ34)
CAYRTWNTDKLIF

SEQ ID NO: 628018 - protein, 11 aa, Homo sapiens
  CDR3 for beta chain variable domain of TCR clone 314009 (TRBV19, TRBJ1-1)
CASSIGSEAFF

SEQ ID NO: 628019 - protein, 12 aa, Homo sapiens
  CDR3 for alpha chain variable domain of TCR clone 314010 (TRAV16, TRAJ10)
CSRTGGGNKLTF

SEQ ID NO: 628020 - protein, 14 aa, Homo sapiens
  CDR3 for beta chain variable domain of TCR clone 314010 (TRBV12-4, TRBJ2-5)
CASSLWQKQETQYF

SEQ ID NO: 628021 - protein, 13 aa, Homo sapiens
  CDR3 for alpha chain variable domain of TCR clone 314011 (TRAV8-3, TRAJ6)
CAVGSVGSYRPTF

SEQ ID NO: 628022 - protein, 14 aa, Homo sapiens
  CDR3 for beta chain variable domain of TCR clone 314011 (TRBV11-2, TRBJ1-1)
CASSTQRGRTEAFF

SEQ ID NO: 628023 - protein, 14 aa, Homo sapiens
  CDR3 for alpha chain variable domain of TCR clone 314012 (TRAV4, TRAJ6)
CLVGEAGGSYIPTF

SEQ ID NO: 628024 - protein, 15 aa, Homo sapiens
  CDR3 for beta chain variable domain of TCR clone 314012 (TRBV7-9, TRBJ2-6)
CASSFNREGANVLTF

SEQ ID NO: 628025 - protein, 15 aa, Homo sapiens
  CDR3 for alpha chain variable domain of TCR clone 314013 (TRAV27, TRAJ38)
CAARRNAGNNRKLIW

SEQ ID NO: 628026 - protein, 14 aa, Homo sapiens
  CDR3 for beta chain variable domain of TCR clone 314013 (TRBV7-8, TRBJ1-5)
CASSLGAFNQPQHF

SEQ ID NO: 628027 - protein, 12 aa, Homo sapiens
  CDR3 for alpha chain variable domain of TCR clone 314014 (TRAV2, TRAJ9)
CAVGAGGFKTIF

SEQ ID NO: 628028 - protein, 13 aa, Homo sapiens
  CDR3 for beta chain variable domain of TCR clone 314014 (TRBV7-9, TRBJ2-5)
CASLSPGQETQYF

SEQ ID NO: 628029 - protein, 15 aa, Homo sapiens
  CDR3 for alpha chain variable domain of TCR clone 314015 (TRAV21, TRAJ24)
CAARSSTDSWGKLQF

SEQ ID NO: 628030 - protein, 13 aa, Homo sapiens
  CDR3 for beta chain variable domain of TCR clone 314015 (TRBV20-1, TRBJ2-5)
CSARDNYMETQYF

SEQ ID NO: 628031 - protein, 14 aa, Homo sapiens
  CDR3 for alpha chain variable domain of TCR clone 314016 (TRAV12-3, TRAJ10)
SHPPLTGGGNKLTF

SEQ ID NO: 628032 - protein, 13 aa, Homo sapiens
  CDR3 for beta chain variable domain of TCR clone 314016 (TRBV19, TRBJ2-7)
CASSKQGGYEQYF

SEQ ID NO: 628033 - protein, 14 aa, Homo sapiens
  CDR3 for alpha chain variable domain of TCR clone 314017 (TRAV12-2, TRAJ40)
CAVKIPSGTSKYTF

SEQ ID NO: 628034 - protein, 14 aa, Homo sapiens
  CDR3 for beta chain variable domain of TCR clone 314017 (TRBV20-1, TRBJ1-1)
CSAQTRIGGTEAFF

SEQ ID NO: 628035 - protein, 11 aa, Homo sapiens
  CDR3 for alpha chain variable domain of TCR clone 314018 (TRAV2, TRAJ21)
CAVVNFNKFYF

SEQ ID NO: 628036 - protein, 14 aa, Homo sapiens
  CDR3 for beta chain variable domain of TCR clone 314018 (TRBV15, TRBJ2-3)
CATRSWTSTDTQYF

SEQ ID NO: 628037 - protein, 16 aa, Homo sapiens
  CDR3 for alpha chain variable domain of TCR clone 314019 (TRAV1-2, TRAJ10)
CAVRGVLTGGGKKLTF

SEQ ID NO: 628038 - protein, 13 aa, Homo sapiens
  CDR3 for beta chain variable domain of TCR clone 314019 (TRBV19, TRBJ1-2)
CASSVPGQDGYTF

SEQ ID NO: 628039 - protein, 14 aa, Homo sapiens
  CDR3 for alpha chain variable domain of TCR clone 314020 (TRAV1-2, TRAJ8)
CAVREDTGSQKLVF

SEQ ID NO: 628040 - protein, 14 aa, Homo sapiens
  CDR3 for beta chain variable domain of TCR clone 314020 (TRBV11-3, TRBJ2-3)
CASSRLARTDTQYF

SEQ ID NO: 628041 - protein, 17 aa, Homo sapiens
  CDR3 for alpha chain variable domain of TCR clone 314021 (TRAV12-2, TRAJ6)
CAPQGPPRAGGSYIPTV

SEQ ID NO: 628042 - protein, 16 aa, Homo sapiens
  CDR3 for beta chain variable domain of TCR clone 314021 (TRBV19, TRBJ2-2)
CASSTARASNTGELFF

SEQ ID NO: 628043 - protein, 15 aa, Homo sapiens
  CDR3 for alpha chain variable domain of TCR clone 314022 (TRAV8-6, TRAJ11)
CAVSDRRSGYSTLTF

SEQ ID NO: 628044 - protein, 16 aa, Homo sapiens
  CDR3 for beta chain variable domain of TCR clone 314022 (TRBV7-9, TRBJ2-2)
CASSGFGGANTGELFF

SEQ ID NO: 628045 - protein, 11 aa, Homo sapiens
  CDR3 for alpha chain variable domain of TCR clone 314023 (TRAV3, TRAJ21)
RAVGNFNKFYF

SEQ ID NO: 628046 - protein, 16 aa, Homo sapiens
  CDR3 for beta chain variable domain of TCR clone 314023 (TRBV19, TRBJ2-1)
CASSKAGTSSYNEQFF

SEQ ID NO: 628047 - protein, 14 aa, Homo sapiens
  CDR3 for alpha chain variable domain of TCR clone 314024 (TRAV29/DV5, TRAJ36)
CAARRKTGANNLFF

SEQ ID NO: 628048 - protein, 15 aa, Homo sapiens
  CDR3 for beta chain variable domain of TCR clone 314024 (TRBV10-2, TRBJ2-5)
CASRGSGGPQETQYV

SEQ ID NO: 628049 - protein, 11 aa, Homo sapiens
  CDR3 for alpha chain variable domain of TCR clone 314025 (TRAV3, TRAJ21)
CAVGNFNKFYF

SEQ ID NO: 628050 - protein, 16 aa, Homo sapiens
  CDR3 for beta chain variable domain of TCR clone 314025 (TRBV19, TRBJ2-1)
CASSTAGPSSSNEQFF

SEQ ID NO: 628051 - protein, 15 aa, Homo sapiens
  CDR3 for alpha chain variable domain of TCR clone 314026 (TRAV12-2, TRAJ43)
CAFDMRFGAGTRLTV

SEQ ID NO: 628052 - protein, 14 aa, Homo sapiens
  CDR3 for beta chain variable domain of TCR clone 314026 (TRBV5-1, TRBJ2-3)
CASSLFGPTDTQYF

SEQ ID NO: 628053 - protein, 15 aa, Homo sapiens
  CDR3 for alpha chain variable domain of TCR clone 314027 (TRAV25, TRAJ52)
CAGTSGGTSYGKLTC

SEQ ID NO: 628054 - protein, 13 aa, Homo sapiens
  CDR3 for beta chain variable domain of TCR clone 314027 (TRBV6-5, TRBJ2-5)
CASSPQGGETQYF

SEQ ID NO: 628055 - protein, 16 aa, Homo sapiens
  CDR3 for alpha chain variable domain of TCR clone 314028 (TRAV8-4, TRAJ9)
CAVAFNTGGFKNYLWS

SEQ ID NO: 628056 - protein, 15 aa, Homo sapiens
  CDR3 for beta chain variable domain of TCR clone 314028 (TRBV7-9, TRBJ2-2)
CASSPETGAGGELFF

SEQ ID NO: 628057 - protein, 14 aa, Homo sapiens
  CDR3 for alpha chain variable domain of TCR clone 314029 (TRAV12-2, TRAJ4)
CAEDLSGGHNKLIF

SEQ ID NO: 628058 - protein, 13 aa, Homo sapiens
  CDR3 for beta chain variable domain of TCR clone 314029 (TRBV7-9, TRBJ1-2)
CASSLKQNYGYTY

SEQ ID NO: 628059 - protein, 13 aa, Homo sapiens
  CDR3 for alpha chain variable domain of TCR clone 314030 (TRAV12-3, TRAJ21)
CAPGPHNFNKFYF

SEQ ID NO: 628060 - protein, 15 aa, Homo sapiens
  CDR3 for beta chain variable domain of TCR clone 314030 (TRBV10-3, TRBJ2-3)
CAISLTCGGTDTQYF

SEQ ID NO: 628061 - protein, 17 aa, Homo sapiens
  CDR3 for alpha chain variable domain of TCR clone 314031 (TRAV8-6, TRAJ58)
CAVRSWVGETSGSRLTF

SEQ ID NO: 628062 - protein, 14 aa, Homo sapiens
  CDR3 for beta chain variable domain of TCR clone 314031 (TRBV4-2, TRBJ2-1)
CTSGLDRAYNEQFF

SEQ ID NO: 628063 - protein, 15 aa, Homo sapiens
  CDR3 for alpha chain variable domain of TCR clone 314032 (TRAV8-4, TRAJ3)
CAVTGENLVQQCFQD

SEQ ID NO: 628064 - protein, 16 aa, Homo sapiens
  CDR3 for beta chain variable domain of TCR clone 314032 (TRBV4-2, TRBJ1-1)
CASSKAGFGMNTEAFF

SEQ ID NO: 628065 - protein, 14 aa, Homo sapiens
  CDR3 for alpha chain variable domain of TCR clone 314033 (TRAV36/DV7, TRAJ40)
CAVETTSGTYQYIF

SEQ ID NO: 628066 - protein, 13 aa, Homo sapiens
  CDR3 for beta chain variable domain of TCR clone 314033 (TRBV10-3, TRBJ2-5)
CAMTSGAGETQYF

SEQ ID NO: 628067 - protein, 16 aa, Homo sapiens
  CDR3 for alpha chain variable domain of TCR clone 314034 (TRAV30, TRAJ24)
CGTEIVDADSWGKFQF

SEQ ID NO: 628068 - protein, 15 aa, Homo sapiens
  CDR3 for beta chain variable domain of TCR clone 314034 (TRBV5-1, TRBJ1-1)
CASGSTTGTNTEAFF

SEQ ID NO: 628069 - protein, 14 aa, Homo sapiens
  CDR3 for alpha chain variable domain of TCR clone 314035 (TRAV12-2, TRAJ13)
CAVKKTGGYQKGTF

SEQ ID NO: 628070 - protein, 14 aa, Homo sapiens
  CDR3 for beta chain variable domain of TCR clone 314035 (TRBV7-2, TRBJ2-7)
CASSPKTSFYEQYF

SEQ ID NO: 628071 - protein, 14 aa, Homo sapiens
  CDR3 for alpha chain variable domain of TCR clone 314036 (TRAV12-2, TRAJ13)
CAVKKTGGYRKGTF

SEQ ID NO: 628072 - protein, 15 aa, Homo sapiens
  CDR3 for beta chain variable domain of TCR clone 314036 (TRBV27, TRBJ2-1)
CASSNGGGSSNEQFF

SEQ ID NO: 628073 - protein, 16 aa, Homo sapiens
  CDR3 for alpha chain variable domain of TCR clone 314037 (TRAV30, TRAJ24)
RGTEIVDADSWGKFQF

SEQ ID NO: 628074 - protein, 16 aa, Homo sapiens
  CDR3 for beta chain variable domain of TCR clone 314037 (TRBV19, TRBJ2-1)
CASSKAGPSSYNEQFF

SEQ ID NO: 628075 - protein, 13 aa, Homo sapiens
  CDR3 for alpha chain variable domain of TCR clone 314038 (TRAV8-4, TRAJ48)
CAASLFGNEKLTF

SEQ ID NO: 628076 - protein, 15 aa, Homo sapiens
  CDR3 for beta chain variable domain of TCR clone 314038 (TRBV20-1, TRBJ2-7)
CSARKGLAESYEQYF

SEQ ID NO: 628077 - protein, 13 aa, Homo sapiens
  CDR3 for alpha chain variable domain of TCR clone 314039 (TRAV8-3, TRAJ28)
CAVGAVGSYQLTF

SEQ ID NO: 628078 - protein, 15 aa, Homo sapiens
  CDR3 for beta chain variable domain of TCR clone 314039 (TRBV27, TRBJ2-1)
CASSNGGGSSNEQFF

SEQ ID NO: 628079 - protein, 15 aa, Homo sapiens
  CDR3 for alpha chain variable domain of TCR clone 314040 (TRAV29/DV5, TRAJ29)
CAASERSSGNTPLVF

SEQ ID NO: 628080 - protein, 15 aa, Homo sapiens
  CDR3 for beta chain variable domain of TCR clone 314040 (TRBV6-1, TRBJ2-7)
CASSVQRGVYYEQYF

SEQ ID NO: 628081 - protein, 12 aa, Homo sapiens
  CDR3 for alpha chain variable domain of TCR clone 314041 (TRAV8-1, TRAJ26)
CAVNNYGQNFVF

SEQ ID NO: 628082 - protein, 12 aa, Homo sapiens
  CDR3 for beta chain variable domain of TCR clone 314041 (TRBV5-5, TRBJ2-5)
CASSYVGETQYF

SEQ ID NO: 628083 - protein, 14 aa, Homo sapiens
  CDR3 for alpha chain variable domain of TCR clone 314042 (TRAV12-2, TRAJ40)
CAVKIPSGTSKYIF

SEQ ID NO: 628084 - protein, 20 aa, Homo sapiens
  CDR3 for beta chain variable domain of TCR clone 314042 (TRBV28, TRBJ2-1)
CASTPSGRSPGLAGGNEQFF

SEQ ID NO: 628085 - protein, 12 aa, Homo sapiens
  CDR3 for alpha chain variable domain of TCR clone 314043 (TRAV21, TRAJ49)
CAVNAGGNQFYF

SEQ ID NO: 628086 - protein, 14 aa, Homo sapiens
  CDR3 for beta chain variable domain of TCR clone 314043 (TRBV18, TRBJ2-1)
CQLTPGGLYNEQFF

SEQ ID NO: 628087 - protein, 14 aa, Homo sapiens
  CDR3 for alpha chain variable domain of TCR clone 314044 (TRAV1-2, TRAJ8)
CAVREDTGFQTLVF

SEQ ID NO: 628088 - protein, 12 aa, Homo sapiens
  CDR3 for beta chain variable domain of TCR clone 314044 (TRBV7-2, TRBJ2-5)
CASSQYQETQYF

SEQ ID NO: 628089 - protein, 15 aa, Homo sapiens
  CDR3 for alpha chain variable domain of TCR clone 314045 (TRAV8-3, TRAJ21)
CAVGALPPRGYKFYF

SEQ ID NO: 628090 - protein, 14 aa, Homo sapiens
  CDR3 for beta chain variable domain of TCR clone 314045 (TRBV16, TRBJ2-7)
CASSQWGRLYEQYF

SEQ ID NO: 628091 - protein, 14 aa, Homo sapiens
  CDR3 for alpha chain variable domain of TCR clone 314046 (TRAV30, TRAJ26)
CGTAIVSYGQNFFF

SEQ ID NO: 628092 - protein, 13 aa, Homo sapiens
  CDR3 for beta chain variable domain of TCR clone 314046 (TRBV19, TRBJ1-3)
CASRVALGNTIYF

SEQ ID NO: 628093 - protein, 16 aa, Homo sapiens
  CDR3 for alpha chain variable domain of TCR clone 314047 (TRAV23/DV6, TRAJ48)
CAASGVVNFGDEKLTF

SEQ ID NO: 628094 - protein, 15 aa, Homo sapiens
  CDR3 for beta chain variable domain of TCR clone 314047 (TRBV7-9, TRBJ2-1)
CASSLGWGRANEQFF

SEQ ID NO: 628095 - protein, 15 aa, Homo sapiens
  CDR3 for alpha chain variable domain of TCR clone 314048 (TRAV17, TRAJ57)
CATGPSQGGSEKLVF

SEQ ID NO: 628096 - protein, 13 aa, Homo sapiens
  CDR3 for beta chain variable domain of TCR clone 314048 (TRBV27, TRBJ1-4)
CASSLMGDEKLFC

SEQ ID NO: 628097 - protein, 16 aa, Homo sapiens
  CDR3 for alpha chain variable domain of TCR clone 314049 (TRAV1-2, TRAJ16)
CAVNRFQMARSCSLQG

SEQ ID NO: 628098 - protein, 12 aa, Homo sapiens
  CDR3 for beta chain variable domain of TCR clone 314049 (TRBV11-2, TRBJ2-2)
CASSLGGGELFF

SEQ ID NO: 628099 - protein, 16 aa, Homo sapiens
  CDR3 for alpha chain variable domain of TCR clone 314050 (TRAV30, TRAJ24)
CGTEIVDADSWGKFQF

SEQ ID NO: 628100 - protein, 14 aa, Homo sapiens
  CDR3 for beta chain variable domain of TCR clone 314050 (TRBV20-1, TRBJ1-1)
CSEQTRIGGTEAFF

SEQ ID NO: 628101 - protein, 15 aa, Homo sapiens
  CDR3 for alpha chain variable domain of TCR clone 314051 (TRAV13-2, TRAJ53)
CAERGSRGSNYKLTF

SEQ ID NO: 628102 - protein, 14 aa, Homo sapiens
  CDR3 for beta chain variable domain of TCR clone 314051 (TRBV4-1, TRBJ2-2)
CASSQYPNTGELFF

SEQ ID NO: 628103 - protein, 15 aa, Homo sapiens
  CDR3 for alpha chain variable domain of TCR clone 314052 (TRAV8-3, TRAJ45)
CASSYSGGGADGLTF

SEQ ID NO: 628104 - protein, 13 aa, Homo sapiens
  CDR3 for beta chain variable domain of TCR clone 314052 (TRBV10-3, TRBJ2-7)
CASKLAVNYEEYF

SEQ ID NO: 628105 - protein, 10 aa, Homo sapiens
  CDR3 for alpha chain variable domain of TCR clone 314053 (TRAV1-2, TRAJ20)
CACNDYKLSF

SEQ ID NO: 628106 - protein, 14 aa, Homo sapiens
  CDR3 for beta chain variable domain of TCR clone 314053 (TRBV20-1, TRBJ2-7)
CSAPELAGVGEQYF

SEQ ID NO: 628107 - protein, 13 aa, Homo sapiens
  CDR3 for alpha chain variable domain of TCR clone 314054 (TRAV12-2, TRAJ10)
CAVPTGGGNKLTF

SEQ ID NO: 628108 - protein, 11 aa, Homo sapiens
  CDR3 for beta chain variable domain of TCR clone 314054 (TRBV6-1, TRBJ2-1)
CANISSNEQFF

SEQ ID NO: 628109 - protein, 14 aa, Homo sapiens
  CDR3 for alpha chain variable domain of TCR clone 314055 (TRAV4, TRAJ17)
CLVGDMAAGNKLAF

SEQ ID NO: 628110 - protein, 14 aa, Homo sapiens
  CDR3 for beta chain variable domain of TCR clone 314055 (TRBV7-6, TRBJ2-3)
CASSLGTVTDTQYF

SEQ ID NO: 628111 - protein, 12 aa, Homo sapiens
  CDR3 for alpha chain variable domain of TCR clone 314056 (TRAV12-1, TRAJ40)
CVVYSGTYKYIF

SEQ ID NO: 628112 - protein, 13 aa, Homo sapiens
  CDR3 for beta chain variable domain of TCR clone 314056 (TRBV11-3, TRBJ1-1)
CASSLALGTEAFF

SEQ ID NO: 628113 - protein, 11 aa, Homo sapiens
  CDR3 for alpha chain variable domain of TCR clone 314057 (TRAV3, TRAJ32)
CAVREGIMVVL

SEQ ID NO: 628114 - protein, 13 aa, Homo sapiens
  CDR3 for beta chain variable domain of TCR clone 314057 (TRBV2, TRBJ1-1)
CASSEGWNTEAFF

SEQ ID NO: 628115 - protein, 15 aa, Homo sapiens
  CDR3 for alpha chain variable domain of TCR clone 314058 (TRAV21, TRAJ38)
CAVRQDAGNNRKLIW

SEQ ID NO: 628116 - protein, 13 aa, Homo sapiens
  CDR3 for beta chain variable domain of TCR clone 314058 (TRBV19, TRBJ1-2)
CASSVPGQDGYTF

SEQ ID NO: 628117 - protein, 14 aa, Homo sapiens
  CDR3 for alpha chain variable domain of TCR clone 314059 (TRAV13-1, TRAJ10)
CAAKEPGGGNKLTF

SEQ ID NO: 628118 - protein, 14 aa, Homo sapiens
  CDR3 for beta chain variable domain of TCR clone 314059 (TRBV6-6, TRBJ2-7)
CASSDSGAGYEQYY

SEQ ID NO: 628119 - protein, 15 aa, Homo sapiens
  CDR3 for alpha chain variable domain of TCR clone 314060 (TRAV29/DV5, TRAJ53)
CAARYSGGSNYKLPF

SEQ ID NO: 628120 - protein, 15 aa, Homo sapiens
  CDR3 for beta chain variable domain of TCR clone 314060 (TRBV28, TRBJ2-1)
CASSLGTRLYNEQFF

SEQ ID NO: 628121 - protein, 12 aa, Homo sapiens
  CDR3 for alpha chain variable domain of TCR clone 314061 (TRAV3, TRAJ20)
CAVRDGDYKSSF

SEQ ID NO: 628122 - protein, 13 aa, Homo sapiens
  CDR3 for beta chain variable domain of TCR clone 314061 (TRBV28, TRBJ2-2)
CASIRESTGELFF

SEQ ID NO: 628123 - protein, 14 aa, Homo sapiens
  CDR3 for alpha chain variable domain of TCR clone 314062 (TRAV1-2, TRAJ8)
CAVREDTGFQKLVF

SEQ ID NO: 628124 - protein, 16 aa, Homo sapiens
  CDR3 for beta chain variable domain of TCR clone 314062 (TRBV5-7, TRBJ2-5)
CASTLAPAGGRETQYV

SEQ ID NO: 628125 - protein, 14 aa, Homo sapiens
  CDR3 for alpha chain variable domain of TCR clone 314063 (TRAV1-2, TRAJ16)
CAVNRFSDGQKLLF

SEQ ID NO: 628126 - protein, 14 aa, Homo sapiens
  CDR3 for beta chain variable domain of TCR clone 314063 (TRBV19, TRBJ2-1)
CASPTFVLSCEQFF

SEQ ID NO: 628127 - protein, 13 aa, Homo sapiens
  CDR3 for alpha chain variable domain of TCR clone 314064 (TRAV13-2, TRAJ13)
CTDLSGGYQKVTF

SEQ ID NO: 628128 - protein, 15 aa, Homo sapiens
  CDR3 for beta chain variable domain of TCR clone 314064 (TRBV19, TRBJ1-1)
CASSIGGGRNTEAFF

SEQ ID NO: 628129 - protein, 19 aa, Homo sapiens
  CDR3 for alpha chain variable domain of TCR clone 314065 (TRAV26-1, TRAJ52)
CIVRAHRNAGGTSYGRLTF

SEQ ID NO: 628130 - protein, 13 aa, Homo sapiens
  CDR3 for beta chain variable domain of TCR clone 314065 (TRBV20-1, TRBJ1-6)
CSAPLGVGSPLHF

SEQ ID NO: 628131 - protein, 16 aa, Homo sapiens
  CDR3 for alpha chain variable domain of TCR clone 314066 (TRAV14/DV4, TRAJ53)
CAMREGCGGSNYKLTF

SEQ ID NO: 628132 - protein, 15 aa, Homo sapiens
  CDR3 for beta chain variable domain of TCR clone 314066 (TRBV6-5, TRBJ2-1)
CASSYDAGAGNEQFF

SEQ ID NO: 628133 - protein, 12 aa, Homo sapiens
  CDR3 for alpha chain variable domain of TCR clone 314067 (TRAV25, TRAJ16)
WAGQQDGQKLLF

SEQ ID NO: 628134 - protein, 16 aa, Homo sapiens
  CDR3 for beta chain variable domain of TCR clone 314067 (TRBV19, TRBJ2-1)
CASSIQAGGSYNEQFF

SEQ ID NO: 628135 - protein, 23 aa, Homo sapiens
  CDR3 for alpha chain variable domain of TCR clone 314068 (TRAV8-3, TRAJ38)
CAVGASNAGNNHIQNPDSAVYQL

SEQ ID NO: 628136 - protein, 15 aa, Homo sapiens
  CDR3 for beta chain variable domain of TCR clone 314068 (TRBV11-3, TRBJ1-3)
CASSLFGPSGNTIYF

SEQ ID NO: 628137 - protein, 12 aa, Homo sapiens
  CDR3 for alpha chain variable domain of TCR clone 314069 (TRAV27, TRAJ34)
CAGAKNTDKPIF

SEQ ID NO: 628138 - protein, 13 aa, Homo sapiens
  CDR3 for beta chain variable domain of TCR clone 314069 (TRBV4-1, TRBJ2-1)
CASSQEVQYKQFF

SEQ ID NO: 628139 - protein, 12 aa, Homo sapiens
  CDR3 for alpha chain variable domain of TCR clone 314070 (TRAV29/DV5, TRAJ15)
CAPNQAGTALIF

SEQ ID NO: 628140 - protein, 11 aa, Homo sapiens
  CDR3 for beta chain variable domain of TCR clone 314070 (TRBV7-8, TRBJ2-7)
CASSLSLEQYF

SEQ ID NO: 628141 - protein, 17 aa, Homo sapiens
  CDR3 for alpha chain variable domain of TCR clone 314071 (TRAV3, TRAJ37)
CTVRDMRTPGNTGKLIF

SEQ ID NO: 628142 - protein, 13 aa, Homo sapiens
  CDR3 for beta chain variable domain of TCR clone 314071 (TRBV13, TRBJ2-7)
CASSQGVSYEQYF

SEQ ID NO: 628143 - protein, 14 aa, Homo sapiens
  CDR3 for alpha chain variable domain of TCR clone 314072 (TRAV12-1, TRAJ43)
CVVNGRSNNNVMRF

SEQ ID NO: 628144 - protein, 13 aa, Homo sapiens
  CDR3 for beta chain variable domain of TCR clone 314072 (TRBV2, TRBJ1-4)
CASSELGVEKLFF

SEQ ID NO: 628145 - protein, 13 aa, Homo sapiens
  CDR3 for alpha chain variable domain of TCR clone 314073 (TRAV35, TRAJ33)
CAGRHDSNYQLIW

SEQ ID NO: 628146 - protein, 13 aa, Homo sapiens
  CDR3 for beta chain variable domain of TCR clone 314073 (TRBV3-1, TRBJ1-1)
CASSQGAGTEAFF

SEQ ID NO: 628147 - protein, 11 aa, Homo sapiens
  CDR3 for alpha chain variable domain of TCR clone 314074 (TRAV1-2, TRAJ31)
CAVKNNARLMF

SEQ ID NO: 628148 - protein, 17 aa, Homo sapiens
  CDR3 for beta chain variable domain of TCR clone 314074 (TRBV4-1, TRBJ1-4)
CASSQEGPRGVEEKLFF

SEQ ID NO: 628149 - protein, 14 aa, Homo sapiens
  CDR3 for alpha chain variable domain of TCR clone 314075 (TRAV8-1, TRAJ5)
CAVRTDTGRRALTF

SEQ ID NO: 628150 - protein, 14 aa, Homo sapiens
  CDR3 for beta chain variable domain of TCR clone 314075 (TRBV7-8, TRBJ2-3)
CASSFSDGQDTQYF

SEQ ID NO: 628151 - protein, 13 aa, Homo sapiens
  CDR3 for alpha chain variable domain of TCR clone 314076 (TRAV17, TRAJ7)
CATDNSGNNRLAF

SEQ ID NO: 628152 - protein, 15 aa, Homo sapiens
  CDR3 for beta chain variable domain of TCR clone 314076 (TRBV6-6, TRBJ2-7)
CASSYSYGGSYEQYF

SEQ ID NO: 628153 - protein, 14 aa, Homo sapiens
  CDR3 for alpha chain variable domain of TCR clone 314077 (TRAV16, TRAJ37)
CSLDGPSNTGKLIF

SEQ ID NO: 628154 - protein, 17 aa, Homo sapiens
  CDR3 for beta chain variable domain of TCR clone 314077 (TRBV7-3, TRBJ2-3)
CASSLMKRMRGADTQYF

SEQ ID NO: 628155 - protein, 16 aa, Homo sapiens
  CDR3 for alpha chain variable domain of TCR clone 314078 (TRAV3, TRAJ10)
CAVRDMRAGGGNTLTF

SEQ ID NO: 628156 - protein, 15 aa, Homo sapiens
  CDR3 for beta chain variable domain of TCR clone 314078 (TRBV11-2, TRBJ1-6)
CASTGFGTAVSPLHF

SEQ ID NO: 628157 - protein, 16 aa, Homo sapiens
  CDR3 for alpha chain variable domain of TCR clone 314079 (TRAV4, TRAJ22)
CLVGDLYSGSARQLTF

SEQ ID NO: 628158 - protein, 16 aa, Homo sapiens
  CDR3 for beta chain variable domain of TCR clone 314079 (TRBV29-1, TRBJ2-6)
CSVEDITYSGANVLTF

SEQ ID NO: 628159 - protein, 17 aa, Homo sapiens
  CDR3 for alpha chain variable domain of TCR clone 314080 (TRAV36/DV7, TRAJ52)
CAVAQRAGGTSYGKLTF

SEQ ID NO: 628160 - protein, 15 aa, Homo sapiens
  CDR3 for beta chain variable domain of TCR clone 314080 (TRBV9, TRBJ1-6)
CASSVAGTGDSPLHV

SEQ ID NO: 628161 - protein, 13 aa, Homo sapiens
  CDR3 for alpha chain variable domain of TCR clone 314081 (TRAV3, TRAJ41)
CAVSSNSGYALNF

SEQ ID NO: 628162 - protein, 13 aa, Homo sapiens
  CDR3 for beta chain variable domain of TCR clone 314081 (TRBV7-3, TRBJ1-1)
CASSQDWGAEAFF

SEQ ID NO: 628163 - protein, 13 aa, Homo sapiens
  CDR3 for alpha chain variable domain of TCR clone 314082 (TRAV30, TRAJ24)
CGTVTDSWGKLQF

SEQ ID NO: 628164 - protein, 11 aa, Homo sapiens
  CDR3 for beta chain variable domain of TCR clone 314082 (TRBV7-9, TRBJ2-3)
CASSGPDTQYF

SEQ ID NO: 628165 - protein, 14 aa, Homo sapiens
  CDR3 for alpha chain variable domain of TCR clone 314083 (TRAV12-1, TRAJ17)
CVVNYKAAGNKLTF

SEQ ID NO: 628166 - protein, 13 aa, Homo sapiens
  CDR3 for beta chain variable domain of TCR clone 314083 (TRBV2, TRBJ2-7)
CASSVGGSGEQYF

SEQ ID NO: 628167 - protein, 14 aa, Homo sapiens
  CDR3 for alpha chain variable domain of TCR clone 314084 (TRAV12-1, TRAJ13)
CVVIDSGGHQKVTF

SEQ ID NO: 628168 - protein, 17 aa, Homo sapiens
  CDR3 for beta chain variable domain of TCR clone 314084 (TRBV15, TRBJ1-5)
CATSSAPPGTRNQPQHF

SEQ ID NO: 628169 - protein, 21 aa, Homo sapiens
  CDR3 for alpha chain variable domain of TCR clone 314085 (TRAV1-1, TRAJ6)
CLLLLRCERLERTGGSYIPTF

SEQ ID NO: 628170 - protein, 12 aa, Homo sapiens
  CDR3 for beta chain variable domain of TCR clone 314085 (TRBV27, TRBJ2-2)
CASKLFTGELFF

SEQ ID NO: 628171 - protein, 13 aa, Homo sapiens
  CDR3 for alpha chain variable domain of TCR clone 314086 (TRAV2, TRAJ40)
CAVVTSGAYKYIF

SEQ ID NO: 628172 - protein, 16 aa, Homo sapiens
  CDR3 for beta chain variable domain of TCR clone 314086 (TRBV29-1, TRBJ1-2)
CSVEANRDIANYGYTF

SEQ ID NO: 628173 - protein, 11 aa, Homo sapiens
  CDR3 for alpha chain variable domain of TCR clone 314087 (TRAV3, TRAJ21)
CAVGNFNEFYF

SEQ ID NO: 628174 - protein, 17 aa, Homo sapiens
  CDR3 for beta chain variable domain of TCR clone 314087 (TRBV24-1, TRBJ2-1)
CATSDVSTSGTYNEQFF

SEQ ID NO: 628175 - protein, 14 aa, Homo sapiens
  CDR3 for alpha chain variable domain of TCR clone 314088 (TRAV17, TRAJ57)
CATDPQGGSEKLVF

SEQ ID NO: 628176 - protein, 16 aa, Homo sapiens
  CDR3 for beta chain variable domain of TCR clone 314088 (TRBV29-1, TRBJ2-7)
CSVEDAEDGTAYEQYF

SEQ ID NO: 628177 - protein, 13 aa, Homo sapiens
  CDR3 for alpha chain variable domain of TCR clone 314089 (TRAV8-6, TRAJ49)
CAVITNTGNQFYF

SEQ ID NO: 628178 - protein, 17 aa, Homo sapiens
  CDR3 for beta chain variable domain of TCR clone 314089 (TRBV6-5, TRBJ2-2)
CASSYSTSGGNTGELFF

SEQ ID NO: 628179 - protein, 13 aa, Homo sapiens
  CDR3 for alpha chain variable domain of TCR clone 314090 (TRAV20, TRAJ37)
CAGCSSNTGKLIF

SEQ ID NO: 628180 - protein, 21 aa, Homo sapiens
  CDR3 for beta chain variable domain of TCR clone 314090 (TRBV4-2, TRBJ2-3)
PCSQNTRPCISVPAAPDTQYF

SEQ ID NO: 628181 - protein, 15 aa, Homo sapiens
  CDR3 for alpha chain variable domain of TCR clone 314091 (TRAV8-3, TRAJ27)
CAVGPSTTNACKSTF

SEQ ID NO: 628182 - protein, 15 aa, Homo sapiens
  CDR3 for beta chain variable domain of TCR clone 314091 (TRBV7-2, TRBJ2-1)
CASSSGLAGGNEQFF

SEQ ID NO: 628183 - protein, 18 aa, Homo sapiens
  CDR3 for alpha chain variable domain of TCR clone 314092 (TRAV12-3, TRAJ52)
CAMSVGGAGGTSYGKLTF

SEQ ID NO: 628184 - protein, 16 aa, Homo sapiens
  CDR3 for beta chain variable domain of TCR clone 314092 (TRBV7-9, TRBJ1-2)
CAGSISLDRGGYGYTF

SEQ ID NO: 628185 - protein, 14 aa, Homo sapiens
  CDR3 for alpha chain variable domain of TCR clone 314093 (TRAV12-3, TRAJ33)
CAMSEEDSNYQLIW

SEQ ID NO: 628186 - protein, 16 aa, Homo sapiens
  CDR3 for beta chain variable domain of TCR clone 314093 (TRBV12-5, TRBJ2-5)
CASGPRTSGNQETQYF

SEQ ID NO: 628187 - protein, 18 aa, Homo sapiens
  CDR3 for alpha chain variable domain of TCR clone 314094 (TRAV21, TRAJ52)
CTVRPSPAGGTSYGKLTF

SEQ ID NO: 628188 - protein, 15 aa, Homo sapiens
  CDR3 for beta chain variable domain of TCR clone 314094 (TRBV10-3, TRBJ2-3)
CAISLTSGGTDTQYF

SEQ ID NO: 628189 - protein, 15 aa, Homo sapiens
  CDR3 for alpha chain variable domain of TCR clone 314095 (TRAV39, TRAJ42)
CAVVNYGGSQGNLIF

SEQ ID NO: 628190 - protein, 15 aa, Homo sapiens
  CDR3 for beta chain variable domain of TCR clone 314095 (TRBV10-3, TRBJ1-1)
CAISDLGRAITEAFF

SEQ ID NO: 628191 - protein, 13 aa, Homo sapiens
  CDR3 for alpha chain variable domain of TCR clone 314096 (TRAV12-2, TRAJ34)
CSVRGYNTDKLIF

SEQ ID NO: 628192 - protein, 15 aa, Homo sapiens
  CDR3 for beta chain variable domain of TCR clone 314096 (TRBV28, TRBJ2-1)
CASRTGAGVIARQFF

SEQ ID NO: 628193 - protein, 16 aa, Homo sapiens
  CDR3 for alpha chain variable domain of TCR clone 314097 (TRAV12-2, TRAJ10)
CAVNRVLTGGGNKLTF

SEQ ID NO: 628194 - protein, 16 aa, Homo sapiens
  CDR3 for beta chain variable domain of TCR clone 314097 (TRBV12-5, TRBJ2-5)
CASGPRTCGNQETQYF

SEQ ID NO: 628195 - protein, 14 aa, Homo sapiens
  CDR3 for alpha chain variable domain of TCR clone 314098 (TRAV8-2, TRAJ4)
CVVSPSGGYNKLIF

SEQ ID NO: 628196 - protein, 23 aa, Homo sapiens
  CDR3 for beta chain variable domain of TCR clone 314098 (TRBV7-3, TRBJ1-6)
CASSLTSRDEASDPSSYNSPLHF

SEQ ID NO: 628197 - protein, 15 aa, Homo sapiens
  CDR3 for alpha chain variable domain of TCR clone 314099 (TRAV1-2, TRAJ28)
CAVQDSGAGSYQLTF

SEQ ID NO: 628198 - protein, 15 aa, Homo sapiens
  CDR3 for beta chain variable domain of TCR clone 314099 (TRBV10-3, TRBJ2-7)
CAISTFSGVKGEQYF

SEQ ID NO: 628199 - protein, 14 aa, Homo sapiens
  CDR3 for alpha chain variable domain of TCR clone 314100 (TRAV9-2, TRAJ39)
CALYIYNAGNMLTF

SEQ ID NO: 628200 - protein, 15 aa, Homo sapiens
  CDR3 for beta chain variable domain of TCR clone 314100 (TRBV2, TRBJ1-5)
CASSPGPTGNQPQHF

SEQ ID NO: 628201 - protein, 10 aa, Homo sapiens
  CDR3 for alpha chain variable domain of TCR clone 314101 (TRAV2, TRAJ34)
CSVVNDKLIF

SEQ ID NO: 628202 - protein, 20 aa, Homo sapiens
  CDR3 for beta chain variable domain of TCR clone 314101 (TRBV19, TRBJ2-1)
CASSISRTVTSTRLNNEQFF

SEQ ID NO: 628203 - protein, 14 aa, Homo sapiens
  CDR3 for alpha chain variable domain of TCR clone 314102 (TRAV12-1, TRAJ17)
CVVNYKAAGNKLTF

SEQ ID NO: 628204 - protein, 14 aa, Homo sapiens
  CDR3 for beta chain variable domain of TCR clone 314102 (TRBV10-3, TRBJ2-3)
CAISPTGSTDTQYF

SEQ ID NO: 628205 - protein, 22 aa, Homo sapiens
  CDR3 for alpha chain variable domain of TCR clone 314103 (TRAV8-3, TRAJ6)
CAVAYQEEATYLHLEEEPALLF

SEQ ID NO: 628206 - protein, 12 aa, Homo sapiens
  CDR3 for beta chain variable domain of TCR clone 314103 (TRBV18, TRBJ2-1)
CASSSDEDEQFF

SEQ ID NO: 628207 - protein, 13 aa, Homo sapiens
  CDR3 for alpha chain variable domain of TCR clone 314104 (TRAV2, TRAJ40)
CAMVTSGTYKYIF

SEQ ID NO: 628208 - protein, 13 aa, Homo sapiens
  CDR3 for beta chain variable domain of TCR clone 314104 (TRBV7-2, TRBJ2-2)
CASSLAVTGELFF

SEQ ID NO: 628209 - protein, 13 aa, Homo sapiens
  CDR3 for alpha chain variable domain of TCR clone 314105 (TRAV8-6, TRAJ24)
CAVSSDSWGKLQF

SEQ ID NO: 628210 - protein, 14 aa, Homo sapiens
  CDR3 for beta chain variable domain of TCR clone 314105 (TRBV19, TRBJ2-7)
CASTVQGRPYEQYF

SEQ ID NO: 628211 - protein, 14 aa, Homo sapiens
  CDR3 for alpha chain variable domain of TCR clone 314106 (TRAV12-3, TRAJ4)
CAMSATGGYNKLIF

SEQ ID NO: 628212 - protein, 15 aa, Homo sapiens
  CDR3 for beta chain variable domain of TCR clone 314106 (TRBV7-9, TRBJ1-5)
CASSQGHQPNQPQHF

SEQ ID NO: 628213 - protein, 11 aa, Homo sapiens
  CDR3 for alpha chain variable domain of TCR clone 314107 (TRAV26-1, TRAJ37)
CIVRVGRKLIF

SEQ ID NO: 628214 - protein, 13 aa, Homo sapiens
  CDR3 for beta chain variable domain of TCR clone 314107 (TRBV27, TRBJ2-7)
CASSFVSSYEQYF

SEQ ID NO: 628215 - protein, 16 aa, Homo sapiens
  CDR3 for alpha chain variable domain of TCR clone 314108 (TRAV3, TRAJ42)
CAVRDIEGGSQGNLIF

SEQ ID NO: 628216 - protein, 14 aa, Homo sapiens
  CDR3 for beta chain variable domain of TCR clone 314108 (TRBV18, TRBJ1-1)
CASSHPTGRTEAFF

SEQ ID NO: 628217 - protein, 13 aa, Homo sapiens
  CDR3 for alpha chain variable domain of TCR clone 314109 (TRAV2, TRAJ40)
CAVVTSGTYKYIF

SEQ ID NO: 628218 - protein, 16 aa, Homo sapiens
  CDR3 for beta chain variable domain of TCR clone 314109 (TRBV29-1, TRBJ1-2)
CSVEANRDIANYAYTF

SEQ ID NO: 628219 - protein, 14 aa, Homo sapiens
  CDR3 for alpha chain variable domain of TCR clone 314110 (TRAV16, TRAJ42)
CALLSGGSQGNLIF

SEQ ID NO: 628220 - protein, 13 aa, Homo sapiens
  CDR3 for beta chain variable domain of TCR clone 314110 (TRBV7-9, TRBJ1-2)
CASSLKQNYGYTF

SEQ ID NO: 628221 - protein, 13 aa, Homo sapiens
  CDR3 for alpha chain variable domain of TCR clone 314111 (TRAV38-1, TRAJ42)
CARWGGSQGNLIF

SEQ ID NO: 628222 - protein, 17 aa, Homo sapiens
  CDR3 for beta chain variable domain of TCR clone 314111 (TRBV20-1, TRBJ2-1)
CSARDPLAGVWDNAQFF

SEQ ID NO: 628223 - protein, 14 aa, Homo sapiens
  CDR3 for alpha chain variable domain of TCR clone 314112 (TRAV1-1, TRAJ9)
CAVRGGNGGFKTIF

SEQ ID NO: 628224 - protein, 15 aa, Homo sapiens
  CDR3 for beta chain variable domain of TCR clone 314112 (TRBV6-6, TRBJ1-5)
CASSSIQGTNQPQHF

SEQ ID NO: 628225 - protein, 15 aa, Homo sapiens
  CDR3 for alpha chain variable domain of TCR clone 314113 (TRAV8-3, TRAJ40)
CAAPSLRSGTYKYIF

SEQ ID NO: 628226 - protein, 16 aa, Homo sapiens
  CDR3 for beta chain variable domain of TCR clone 314113 (TRBV7-3, TRBJ2-3)
CASSLSGYRPEDTQYF

SEQ ID NO: 628227 - protein, 18 aa, Homo sapiens
  CDR3 for alpha chain variable domain of TCR clone 314114 (TRAV12-3, TRAJ52)
CAMSVGGAGGTSYGKLTF

SEQ ID NO: 628228 - protein, 14 aa, Homo sapiens
  CDR3 for beta chain variable domain of TCR clone 314114 (TRBV7-2, TRBJ1-1)
CASSFLTGTTEAFF

SEQ ID NO: 628229 - protein, 16 aa, Homo sapiens
  CDR3 for alpha chain variable domain of TCR clone 314115 (TRAV9-2, TRAJ42)
CALNLTYGGSQGNLIF

SEQ ID NO: 628230 - protein, 15 aa, Homo sapiens
  CDR3 for beta chain variable domain of TCR clone 314115 (TRBV6-5, TRBJ1-5)
CASSLTALGNQPQHF

SEQ ID NO: 628231 - protein, 16 aa, Homo sapiens
  CDR3 for alpha chain variable domain of TCR clone 314116 (TRAV35, TRAJ28)
CAGQKYSGVGSYQLTF

SEQ ID NO: 628232 - protein, 16 aa, Homo sapiens
  CDR3 for beta chain variable domain of TCR clone 314116 (TRBV7-3, TRBJ2-2)
CASSLKRGTLSGELFF

SEQ ID NO: 628233 - protein, 14 aa, Homo sapiens
  CDR3 for alpha chain variable domain of TCR clone 314117 (TRAV25, TRAJ35)
CARRMEGFGSVLHC

SEQ ID NO: 628234 - protein, 13 aa, Homo sapiens
  CDR3 for beta chain variable domain of TCR clone 314117 (TRBV7-2, TRBJ1-4)
CASSLAGLEKLFF

SEQ ID NO: 628235 - protein, 14 aa, Homo sapiens
  CDR3 for alpha chain variable domain of TCR clone 314118 (TRAV17, TRAJ56)
CATVPAGANSKLTF

SEQ ID NO: 628236 - protein, 16 aa, Homo sapiens
  CDR3 for beta chain variable domain of TCR clone 314118 (TRBV12-5, TRBJ2-5)
CASGPRTSGSQETQYF

SEQ ID NO: 628237 - protein, 11 aa, Homo sapiens
  CDR3 for alpha chain variable domain of TCR clone 314119 (TRAV2, TRAJ13)
CASGGDQKVTF

SEQ ID NO: 628238 - protein, 14 aa, Homo sapiens
  CDR3 for beta chain variable domain of TCR clone 314119 (TRBV12-5, TRBJ2-5)
CASGSRTHQETQYF

SEQ ID NO: 628239 - protein, 14 aa, Homo sapiens
  CDR3 for alpha chain variable domain of TCR clone 314120 (TRAV12-2, TRAJ5)
CVVNRSTGRRALTF

SEQ ID NO: 628240 - protein, 14 aa, Homo sapiens
  CDR3 for beta chain variable domain of TCR clone 314120 (TRBV7-3, TRBJ2-1)
CASNLTGGANEQFF

SEQ ID NO: 628241 - protein, 14 aa, Homo sapiens
  CDR3 for alpha chain variable domain of TCR clone 314121 (TRAV12-1, TRAJ12)
CVVTRMDSSYKLIF

SEQ ID NO: 628242 - protein, 14 aa, Homo sapiens
  CDR3 for beta chain variable domain of TCR clone 314121 (TRBV20-1, TRBJ2-4)
CSASGRVGENIQYF

SEQ ID NO: 628243 - protein, 14 aa, Homo sapiens
  CDR3 for alpha chain variable domain of TCR clone 314122 (TRAV2, TRAJ9)
CTVEDRSGGFKTIF

SEQ ID NO: 628244 - protein, 15 aa, Homo sapiens
  CDR3 for beta chain variable domain of TCR clone 314122 (TRBV24-1, TRBJ2-1)
CATSGSGGFYNEQFF

SEQ ID NO: 628245 - protein, 17 aa, Homo sapiens
  CDR3 for alpha chain variable domain of TCR clone 314123 (TRAV12-2, TRAJ39)
CAVNNMLTFGGGTRLMV

SEQ ID NO: 628246 - protein, 16 aa, Homo sapiens
  CDR3 for beta chain variable domain of TCR clone 314123 (TRBV5-3, TRBJ2-2)
CGRSVGTGTNTGELFF

SEQ ID NO: 628247 - protein, 13 aa, Homo sapiens
  CDR3 for alpha chain variable domain of TCR clone 314124 (TRAV12-1, TRAJ3)
CVVNPRGASKIIF

SEQ ID NO: 628248 - protein, 13 aa, Homo sapiens
  CDR3 for beta chain variable domain of TCR clone 314124 (TRBV28, TRBJ1-5)
CASSDRGNQPQHF

SEQ ID NO: 628249 - protein, 14 aa, Homo sapiens
  CDR3 for alpha chain variable domain of TCR clone 314125 (TRAV1-2, TRAJ8)
CAVREDTGFQKIVF

SEQ ID NO: 628250 - protein, 14 aa, Homo sapiens
  CDR3 for beta chain variable domain of TCR clone 314125 (TRBV7-6, TRBJ2-3)
CASSLGTVTDTQYF

SEQ ID NO: 628251 - protein, 11 aa, Homo sapiens
  CDR3 for alpha chain variable domain of TCR clone 314126 (TRAV39, TRAJ49)
CAVDISTQFYF

SEQ ID NO: 628252 - protein, 12 aa, Homo sapiens
  CDR3 for beta chain variable domain of TCR clone 314126 (TRBV19, TRBJ2-1)
CASSRQGAEQFF

SEQ ID NO: 628253 - protein, 14 aa, Homo sapiens
  CDR3 for alpha chain variable domain of TCR clone 314127 (TRAV12-3, TRAJ10)
SHLPLTGGGNKLTF

SEQ ID NO: 628254 - protein, 11 aa, Homo sapiens
  CDR3 for beta chain variable domain of TCR clone 314127 (TRBV20-1, TRBJ1-1)
CSARESTEAFF

SEQ ID NO: 628255 - protein, 14 aa, Homo sapiens
  CDR3 for alpha chain variable domain of TCR clone 314128 (TRAV8-6, TRAJ13)
CAVRYSGGYQKVTF

SEQ ID NO: 628256 - protein, 14 aa, Homo sapiens
  CDR3 for beta chain variable domain of TCR clone 314128 (TRBV7-2, TRBJ2-7)
CASSPKTSFYEQYF

SEQ ID NO: 628257 - protein, 16 aa, Homo sapiens
  CDR3 for alpha chain variable domain of TCR clone 314129 (TRAV30, TRAJ24)
CGTEIVDADSWGKFQF

SEQ ID NO: 628258 - protein, 11 aa, Homo sapiens
  CDR3 for beta chain variable domain of TCR clone 314129 (TRBV12-4, TRBJ2-3)
CGSSTTDTQYF

SEQ ID NO: 628259 - protein, 17 aa, Homo sapiens
  CDR3 for alpha chain variable domain of TCR clone 314130 (TRAV26-1, TRAJ53)
CIVRVDDSGGSNYKLTF

SEQ ID NO: 628260 - protein, 15 aa, Homo sapiens
  CDR3 for beta chain variable domain of TCR clone 314130 (TRBV20-1, TRBJ1-2)
CSASDPLRQGYGYTF

SEQ ID NO: 628261 - protein, 12 aa, Homo sapiens
  CDR3 for alpha chain variable domain of TCR clone 314131 (TRAV13-1, TRAJ3)
CAATGVQQCFQD

SEQ ID NO: 628262 - protein, 12 aa, Homo sapiens
  CDR3 for beta chain variable domain of TCR clone 314131 (TRBV19, TRBJ1-4)
CASKDWPGGLFF

SEQ ID NO: 628263 - protein, 14 aa, Homo sapiens
  CDR3 for alpha chain variable domain of TCR clone 314132 (TRAV12-2, TRAJ36)
CAVNRPTGANNPFF

SEQ ID NO: 628264 - protein, 13 aa, Homo sapiens
  CDR3 for beta chain variable domain of TCR clone 314132 (TRBV20-1, TRBJ1-6)
CSAPTGLGSPLHF

SEQ ID NO: 628265 - protein, 12 aa, Homo sapiens
  CDR3 for alpha chain variable domain of TCR clone 314133 (TRAV12-2, TRAJ36)
CAAPRGANNLFF

SEQ ID NO: 628266 - protein, 15 aa, Homo sapiens
  CDR3 for beta chain variable domain of TCR clone 314133 (TRBV11-2, TRBJ1-3)
CASSLDGKVGNTIYF

SEQ ID NO: 628267 - protein, 18 aa, Homo sapiens
  CDR3 for alpha chain variable domain of TCR clone 314134 (TRAV29/DV5, TRAJ26)
CSVLLCSKRKPEGQNFVF

SEQ ID NO: 628268 - protein, 17 aa, Homo sapiens
  CDR3 for beta chain variable domain of TCR clone 314134 (TRBV20-1, TRBJ2-2)
CSASGSGQGGLNGELFF

SEQ ID NO: 628269 - protein, 12 aa, Homo sapiens
  CDR3 for alpha chain variable domain of TCR clone 314135 (TRAV12-3, TRAJ41)
CAMSYSGYALNF

SEQ ID NO: 628270 - protein, 14 aa, Homo sapiens
  CDR3 for beta chain variable domain of TCR clone 314135 (TRBV12-5, TRBJ2-5)
CASGSRTHQETQYF

SEQ ID NO: 628271 - protein, 17 aa, Homo sapiens
  CDR3 for alpha chain variable domain of TCR clone 314136 (TRAV3, TRAJ6)
CAVRDGPRAGGSYKPTF

SEQ ID NO: 628272 - protein, 14 aa, Homo sapiens
  CDR3 for beta chain variable domain of TCR clone 314136 (TRBV7-2, TRBJ2-7)
CASSPKTSIYEQYF

SEQ ID NO: 628273 - protein, 11 aa, Homo sapiens
  CDR3 for alpha chain variable domain of TCR clone 314137 (TRAV2, TRAJ20)
SAVLNDYKLSF

SEQ ID NO: 628274 - protein, 16 aa, Homo sapiens
  CDR3 for beta chain variable domain of TCR clone 314137 (TRBV11-1, TRBJ2-2)
CASSAEGLKNTGELFF

SEQ ID NO: 628275 - protein, 17 aa, Homo sapiens
  CDR3 for alpha chain variable domain of TCR clone 314138 (TRAV8-6, TRAJ58)
CAVSSWVGETSGSRLTF

SEQ ID NO: 628276 - protein, 12 aa, Homo sapiens
  CDR3 for beta chain variable domain of TCR clone 314138 (TRBV28, TRBJ2-3)
CASSLYRDTRYF

SEQ ID NO: 628277 - protein, 14 aa, Homo sapiens
  CDR3 for alpha chain variable domain of TCR clone 314139 (TRAV21, TRAJ35)
CAVMPIGFGNVLHC

SEQ ID NO: 628278 - protein, 14 aa, Homo sapiens
  CDR3 for beta chain variable domain of TCR clone 314139 (TRBV7-9, TRBJ2-1)
CASSPRDSLYEQFF

SEQ ID NO: 628279 - protein, 14 aa, Homo sapiens
  CDR3 for alpha chain variable domain of TCR clone 314140 (TRAV9-2, TRAJ39)
CALCIYNAGNMLTF

SEQ ID NO: 628280 - protein, 13 aa, Homo sapiens
  CDR3 for beta chain variable domain of TCR clone 314140 (TRBV7-9, TRBJ2-5)
CASLSPGQETQYF

SEQ ID NO: 628281 - protein, 10 aa, Homo sapiens
  CDR3 for alpha chain variable domain of TCR clone 314141 (TRAV23/DV6, TRAJ57)
CAASATLSQV

SEQ ID NO: 628282 - protein, 14 aa, Homo sapiens
  CDR3 for beta chain variable domain of TCR clone 314141 (TRBV25-1, TRBJ1-1)
CASTHLGGNTEAFF

SEQ ID NO: 628283 - protein, 14 aa, Homo sapiens
  CDR3 for alpha chain variable domain of TCR clone 314142 (TRAV13-1, TRAJ35)
CAASRGGIGNVLHC

SEQ ID NO: 628284 - protein, 13 aa, Homo sapiens
  CDR3 for beta chain variable domain of TCR clone 314142 (TRBV7-3, TRBJ1-1)
CASSQDWGAEAFF

SEQ ID NO: 628285 - protein, 12 aa, Homo sapiens
  CDR3 for alpha chain variable domain of TCR clone 314143 (TRAV2, TRAJ9)
CAVVAGGVKTIV

SEQ ID NO: 628286 - protein, 16 aa, Homo sapiens
  CDR3 for beta chain variable domain of TCR clone 314143 (TRBV13, TRBJ2-2)
CASSPRTGEHTGELFF

SEQ ID NO: 628287 - protein, 11 aa, Homo sapiens
  CDR3 for alpha chain variable domain of TCR clone 314144 (TRAV1-1, TRAJ23)
YAVRKGGKLIF

SEQ ID NO: 628288 - protein, 20 aa, Homo sapiens
  CDR3 for beta chain variable domain of TCR clone 314144 (TRBV7-8, TRBJ2-2)
CASSHLFPGPTIHITGELFF

SEQ ID NO: 628289 - protein, 13 aa, Homo sapiens
  CDR3 for alpha chain variable domain of TCR clone 314145 (TRAV38-2/DV8, TRAJ34)
CAYRTWNTDKLIF

SEQ ID NO: 628290 - protein, 18 aa, Homo sapiens
  CDR3 for beta chain variable domain of TCR clone 314145 (TRBV6-6, TRBJ1-3)
CASSYSKWDSISGNTIDF

SEQ ID NO: 628291 - protein, 12 aa, Homo sapiens
  CDR3 for alpha chain variable domain of TCR clone 314146 (TRAV21, TRAJ39)
CAADNAGNMLTF

SEQ ID NO: 628292 - protein, 11 aa, Homo sapiens
  CDR3 for beta chain variable domain of TCR clone 314146 (TRBV12-4, TRBJ1-2)
CASSPGTRLTV

SEQ ID NO: 628293 - protein, 14 aa, Homo sapiens
  CDR3 for alpha chain variable domain of TCR clone 314147 (TRAV26-1, TRAJ38)
CIADNAGNNGKLIW

SEQ ID NO: 628294 - protein, 13 aa, Homo sapiens
  CDR3 for beta chain variable domain of TCR clone 314147 (TRBV7-9, TRBJ1-2)
CASSLKQNYGYTF

SEQ ID NO: 628295 - protein, 12 aa, Homo sapiens
  CDR3 for alpha chain variable domain of TCR clone 314148 (TRAV17, TRAJ12)
CAPLRSSYKLIF

SEQ ID NO: 628296 - protein, 16 aa, Homo sapiens
  CDR3 for beta chain variable domain of TCR clone 314148 (TRBV28, TRBJ2-7)
CASSLFFETGGPEQYF

SEQ ID NO: 628297 - protein, 14 aa, Homo sapiens
  CDR3 for alpha chain variable domain of TCR clone 314149 (TRAV8-3, TRAJ9)
CAVVYNTGGFKTIF

SEQ ID NO: 628298 - protein, 14 aa, Homo sapiens
  CDR3 for beta chain variable domain of TCR clone 314149 (TRBV4-1, TRBJ2-2)
CASSQAVNTGELFF

SEQ ID NO: 628299 - protein, 12 aa, Homo sapiens
  CDR3 for alpha chain variable domain of TCR clone 314150 (TRAV17, TRAJ20)
CATDPNDYKLSF

SEQ ID NO: 628300 - protein, 14 aa, Homo sapiens
  CDR3 for beta chain variable domain of TCR clone 314150 (TRBV6-5, TRBJ1-1)
CASSLGQGLSEAFF

SEQ ID NO: 628301 - protein, 12 aa, Homo sapiens
  CDR3 for alpha chain variable domain of TCR clone 314151 (TRAV26-1, TRAJ17)
CIVRSEGNKLTF

SEQ ID NO: 628302 - protein, 16 aa, Homo sapiens
  CDR3 for beta chain variable domain of TCR clone 314151 (TRBV6-5, TRBJ2-7)
CASSYFRVGISDEQYF

SEQ ID NO: 628303 - protein, 15 aa, Homo sapiens
  CDR3 for alpha chain variable domain of TCR clone 314152 (TRAV1-1, TRAJ23)
CAVKEGDNQGGKLIF

SEQ ID NO: 628304 - protein, 18 aa, Homo sapiens
  CDR3 for beta chain variable domain of TCR clone 314152 (TRBV7-8, TRBJ2-1)
CASSPYLGQRGSNNEQFF

SEQ ID NO: 628305 - protein, 14 aa, Homo sapiens
  CDR3 for alpha chain variable domain of TCR clone 314153 (TRAV26-1, TRAJ38)
CIADNAGNKRKLIW

SEQ ID NO: 628306 - protein, 13 aa, Homo sapiens
  CDR3 for beta chain variable domain of TCR clone 314153 (TRBV20-1, TRBJ1-1)
CNARGGGNTEAFF

SEQ ID NO: 628307 - protein, 17 aa, Homo sapiens
  CDR3 for alpha chain variable domain of TCR clone 314154 (TRAV12-3, TRAJ18)
CAMIRADRGSTLGRRYF

SEQ ID NO: 628308 - protein, 14 aa, Homo sapiens
  CDR3 for beta chain variable domain of TCR clone 314154 (TRBV5-7, TRBJ1-6)
CASTPWPADSPLHF

SEQ ID NO: 628309 - protein, 15 aa, Homo sapiens
  CDR3 for alpha chain variable domain of TCR clone 314155 (TRAV29/DV5, TRAJ53)
CAASASGGSNYKLTF

SEQ ID NO: 628310 - protein, 15 aa, Homo sapiens
  CDR3 for beta chain variable domain of TCR clone 314155 (TRBV5-1, TRBJ2-3)
CASSVTSGSTDTQYF

SEQ ID NO: 628311 - protein, 14 aa, Homo sapiens
  CDR3 for alpha chain variable domain of TCR clone 314156 (TRAV9-2, TRAJ39)
CALYIYNAGNMLTF

SEQ ID NO: 628312 - protein, 14 aa, Homo sapiens
  CDR3 for beta chain variable domain of TCR clone 314156 (TRBV7-8, TRBJ2-1)
CATERERSDNEQFF

SEQ ID NO: 628313 - protein, 21 aa, Homo sapiens
  CDR3 for alpha chain variable domain of TCR clone 314157 (TRAV12-1, TRAJ32)
SSVIQPPTSMNYGGATNKLFF

SEQ ID NO: 628314 - protein, 15 aa, Homo sapiens
  CDR3 for beta chain variable domain of TCR clone 314157 (TRBV7-9, TRBJ2-2)
CASGPLDTFPGELFF

SEQ ID NO: 628315 - protein, 14 aa, Homo sapiens
  CDR3 for alpha chain variable domain of TCR clone 314158 (TRAV12-2, TRAJ13)
CAVKKTGGYKKVTF

SEQ ID NO: 628316 - protein, 15 aa, Homo sapiens
  CDR3 for beta chain variable domain of TCR clone 314158 (TRBV12-4, TRBJ2-5)
CASSPPTGLQETQYF

SEQ ID NO: 628317 - protein, 14 aa, Homo sapiens
  CDR3 for alpha chain variable domain of TCR clone 314159 (TRAV1-2, TRAJ8)
CAVREDTGFQKLLF

SEQ ID NO: 628318 - protein, 12 aa, Homo sapiens
  CDR3 for beta chain variable domain of TCR clone 314159 (TRBV2, TRBJ2-1)
CAYGPPGNEQFF

SEQ ID NO: 628319 - protein, 15 aa, Homo sapiens
  CDR3 for alpha chain variable domain of TCR clone 314160 (TRAV2, TRAJ11)
CAVGGRNSGYSTLTF

SEQ ID NO: 628320 - protein, 13 aa, Homo sapiens
  CDR3 for beta chain variable domain of TCR clone 314160 (TRBV28, TRBJ2-5)
CASSFAGGETQYF

SEQ ID NO: 628321 - protein, 14 aa, Homo sapiens
  CDR3 for alpha chain variable domain of TCR clone 314161 (TRAV9-2, TRAJ39)
CALYIYNAGNMLIF

SEQ ID NO: 628322 - protein, 17 aa, Homo sapiens
  CDR3 for beta chain variable domain of TCR clone 314161 (TRBV13, TRBJ2-3)
CASSLSRVAGGRNTQYF

SEQ ID NO: 628323 - protein, 15 aa, Homo sapiens
  CDR3 for alpha chain variable domain of TCR clone 314162 (TRAV8-3, TRAJ45)
CASSYSGGGADGLTF

SEQ ID NO: 628324 - protein, 16 aa, Homo sapiens
  CDR3 for beta chain variable domain of TCR clone 314162 (TRBV20-1, TRBJ2-2)
CNASASGIPGAGELFF

SEQ ID NO: 628325 - protein, 15 aa, Homo sapiens
  CDR3 for alpha chain variable domain of TCR clone 314163 (TRAV3, TRAJ5)
CSVRDLDTGRRALTF

SEQ ID NO: 628326 - protein, 13 aa, Homo sapiens
  CDR3 for beta chain variable domain of TCR clone 314163 (TRBV20-1, TRBJ2-5)
CSARDSKQATQYF

SEQ ID NO: 628327 - protein, 13 aa, Homo sapiens
  CDR3 for alpha chain variable domain of TCR clone 314164 (TRAV29/DV5, TRAJ31)
CAASRKNNARLMF

SEQ ID NO: 628328 - protein, 14 aa, Homo sapiens
  CDR3 for beta chain variable domain of TCR clone 314164 (TRBV7-6, TRBJ1-6)
CASSQAGGGSPLHF

SEQ ID NO: 628329 - protein, 14 aa, Homo sapiens
  CDR3 for alpha chain variable domain of TCR clone 314165 (TRAV8-3, TRAJ4)
CAVGAAGGYNKLIF

SEQ ID NO: 628330 - protein, 15 aa, Homo sapiens
  CDR3 for beta chain variable domain of TCR clone 314165 (TRBV3-1, TRBJ2-7)
CASSQVRQGAYEQYF

SEQ ID NO: 628331 - protein, 15 aa, Homo sapiens
  CDR3 for alpha chain variable domain of TCR clone 314166 (TRAV26-2, TRAJ28)
CILVESGAGSYQLTF

SEQ ID NO: 628332 - protein, 11 aa, Homo sapiens
  CDR3 for beta chain variable domain of TCR clone 314166 (TRBV25-1, TRBJ2-7)
CASSTSYEHYF

SEQ ID NO: 628333 - protein, 16 aa, Homo sapiens
  CDR3 for alpha chain variable domain of TCR clone 314167 (TRAV3, TRAJ37)
CAGRVRGSGNTGKLIC

SEQ ID NO: 628334 - protein, 13 aa, Homo sapiens
  CDR3 for beta chain variable domain of TCR clone 314167 (TRBV7-9, TRBJ1-2)
CASSLKKNYGYTF

SEQ ID NO: 628335 - protein, 11 aa, Homo sapiens
  CDR3 for alpha chain variable domain of TCR clone 314168 (TRAV8-3, TRAJ15)
CAVGPGTALLF

SEQ ID NO: 628336 - protein, 16 aa, Homo sapiens
  CDR3 for beta chain variable domain of TCR clone 314168 (TRBV24-1, TRBJ2-3)
CATSDPGTGATDTQYF

SEQ ID NO: 628337 - protein, 16 aa, Homo sapiens
  CDR3 for alpha chain variable domain of TCR clone 314169 (TRAV30, TRAJ24)
CGTEMVDADSWGKFQF

SEQ ID NO: 628338 - protein, 15 aa, Homo sapiens
  CDR3 for beta chain variable domain of TCR clone 314169 (TRBV12-4, TRBJ2-2)
CASSTNDSGTGELFF

SEQ ID NO: 628339 - protein, 15 aa, Homo sapiens
  CDR3 for alpha chain variable domain of TCR clone 314170 (TRAV3, TRAJ3)
CAERDRDSSASKIIF

SEQ ID NO: 628340 - protein, 18 aa, Homo sapiens
  CDR3 for beta chain variable domain of TCR clone 314170 (TRBV25-1, TRBJ1-2)
CASSGLQNGQGLIFGYTF

SEQ ID NO: 628341 - protein, 16 aa, Homo sapiens
  CDR3 for alpha chain variable domain of TCR clone 314171 (TRAV30, TRAJ24)
CGTEIVDADSWGKFQF

SEQ ID NO: 628342 - protein, 16 aa, Homo sapiens
  CDR3 for beta chain variable domain of TCR clone 314171 (TRBV2, TRBJ2-7)
CASRKGSLGLVYEQYF

SEQ ID NO: 628343 - protein, 17 aa, Homo sapiens
  CDR3 for alpha chain variable domain of TCR clone 314172 (TRAV3, TRAJ12)
CAVRDGGKMDSSYKLIF

SEQ ID NO: 628344 - protein, 14 aa, Homo sapiens
  CDR3 for beta chain variable domain of TCR clone 314172 (TRBV7-9, TRBJ1-2)
CASSRQGANYGYTF

SEQ ID NO: 628345 - protein, 15 aa, Homo sapiens
  CDR3 for alpha chain variable domain of TCR clone 314173 (TRAV21, TRAJ40)
CAVRPQTSGTYKYIF

SEQ ID NO: 628346 - protein, 15 aa, Homo sapiens
  CDR3 for beta chain variable domain of TCR clone 314173 (TRBV5-1, TRBJ2-3)
CASGVTSGSTDTQYF

SEQ ID NO: 628347 - protein, 12 aa, Homo sapiens
  CDR3 for alpha chain variable domain of TCR clone 314174 (TRAV12-3, TRAJ17)
CAMTLTGNKLTF

SEQ ID NO: 628348 - protein, 13 aa, Homo sapiens
  CDR3 for beta chain variable domain of TCR clone 314174 (TRBV20-1, TRBJ2-7)
CSARTGAGYEQYF

SEQ ID NO: 628349 - protein, 15 aa, Homo sapiens
  CDR3 for alpha chain variable domain of TCR clone 314175 (TRAV25, TRAJ10)
CAGPLLTGGGNKLTF

SEQ ID NO: 628350 - protein, 18 aa, Homo sapiens
  CDR3 for beta chain variable domain of TCR clone 314175 (TRBV12-4, TRBJ2-2)
CASSLVAGTRGRTGELFF

SEQ ID NO: 628351 - protein, 13 aa, Homo sapiens
  CDR3 for alpha chain variable domain of TCR clone 314176 (TRAV1-1, TRAJ9)
CAAKNTGGFKTIF

SEQ ID NO: 628352 - protein, 17 aa, Homo sapiens
  CDR3 for beta chain variable domain of TCR clone 314176 (TRBV7-3, TRBJ2-2)
CASSLSGTSGGTGELFF

SEQ ID NO: 628353 - protein, 17 aa, Homo sapiens
  CDR3 for alpha chain variable domain of TCR clone 314177 (TRAV3, TRAJ6)
CAVRDGPREGGSYIPTF

SEQ ID NO: 628354 - protein, 15 aa, Homo sapiens
  CDR3 for beta chain variable domain of TCR clone 314177 (TRBV20-1, TRBJ1-1)
CSASWDRFLNTEAFF

SEQ ID NO: 628355 - protein, 13 aa, Homo sapiens
  CDR3 for alpha chain variable domain of TCR clone 314178 (TRAV13-1, TRAJ39)
CSKYSNAGNMLTF

SEQ ID NO: 628356 - protein, 16 aa, Homo sapiens
  CDR3 for beta chain variable domain of TCR clone 314178 (TRBV20-1, TRBJ1-4)
CSAPGQGLLTTEKLFF

SEQ ID NO: 628357 - protein, 17 aa, Homo sapiens
  CDR3 for alpha chain variable domain of TCR clone 314179 (TRAV3, TRAJ7)
CAVSDMSPLEGTTDSLL

SEQ ID NO: 628358 - protein, 17 aa, Homo sapiens
  CDR3 for beta chain variable domain of TCR clone 314179 (TRBV15, TRBJ1-2)
CATSGREIDVVNYGYTF

SEQ ID NO: 628359 - protein, 13 aa, Homo sapiens
  CDR3 for alpha chain variable domain of TCR clone 314180 (TRAV17, TRAJ41)
CATGRNSGYALNF

SEQ ID NO: 628360 - protein, 16 aa, Homo sapiens
  CDR3 for beta chain variable domain of TCR clone 314180 (TRBV7-8, TRBJ2-4)
CASSAERTLAKNIQYF

SEQ ID NO: 628361 - protein, 11 aa, Homo sapiens
  CDR3 for alpha chain variable domain of TCR clone 314181 (TRAV12-2, TRAJ42)
CAPGSQGNLIF

SEQ ID NO: 628362 - protein, 14 aa, Homo sapiens
  CDR3 for beta chain variable domain of TCR clone 314181 (TRBV7-9, TRBJ1-2)
CASSFPLREYGYTF

SEQ ID NO: 628363 - protein, 13 aa, Homo sapiens
  CDR3 for alpha chain variable domain of TCR clone 314182 (TRAV3, TRAJ41)
CAVSSNSGYALNF

SEQ ID NO: 628364 - protein, 13 aa, Homo sapiens
  CDR3 for beta chain variable domain of TCR clone 314182 (TRBV20-1, TRBJ2-2)
CSALSGGAGELFS

SEQ ID NO: 628365 - protein, 11 aa, Homo sapiens
  CDR3 for alpha chain variable domain of TCR clone 314183 (TRAV2, TRAJ13)
CASGGYQEVTF

SEQ ID NO: 628366 - protein, 13 aa, Homo sapiens
  CDR3 for beta chain variable domain of TCR clone 314183 (TRBV12-4, TRBJ1-2)
CASSLRQGKGYTF

SEQ ID NO: 628367 - protein, 13 aa, Homo sapiens
  CDR3 for alpha chain variable domain of TCR clone 314184 (TRAV8-3, TRAJ48)
CCGCNFGNEKLTF

SEQ ID NO: 628368 - protein, 12 aa, Homo sapiens
  CDR3 for beta chain variable domain of TCR clone 314184 (TRBV7-2, TRBJ2-5)
CASSQYKETQYF

SEQ ID NO: 628369 - protein, 13 aa, Homo sapiens
  CDR3 for alpha chain variable domain of TCR clone 314185 (TRAV20, TRAJ31)
CAVQAIGGARLLF

SEQ ID NO: 628370 - protein, 14 aa, Homo sapiens
  CDR3 for beta chain variable domain of TCR clone 314185 (TRBV2, TRBJ1-5)
CASSGTVSNQPQHF

SEQ ID NO: 628371 - protein, 10 aa, Homo sapiens
  CDR3 for alpha chain variable domain of TCR clone 314186 (TRAV12-3, TRAJ18)
CAMSAEAQPW

SEQ ID NO: 628372 - protein, 14 aa, Homo sapiens
  CDR3 for beta chain variable domain of TCR clone 314186 (TRBV12-4, TRBJ2-5)
CASSLWQKQETQYF

SEQ ID NO: 628373 - protein, 15 aa, Homo sapiens
  CDR3 for alpha chain variable domain of TCR clone 314187 (TRAV12-2, TRAJ42)
CAVNSHGGSQGNLNF

SEQ ID NO: 628374 - protein, 13 aa, Homo sapiens
  CDR3 for beta chain variable domain of TCR clone 314187 (TRBV27, TRBJ1-1)
CASSVSANTEAFF

SEQ ID NO: 628375 - protein, 17 aa, Homo sapiens
  CDR3 for alpha chain variable domain of TCR clone 314188 (TRAV3, TRAJ12)
CAVREIGGMDSSYKLIF

SEQ ID NO: 628376 - protein, 16 aa, Homo sapiens
  CDR3 for beta chain variable domain of TCR clone 314188 (TRBV7-7, TRBJ2-1)
CACSLASGTSYNEQFF

SEQ ID NO: 628377 - protein, 17 aa, Homo sapiens
  CDR3 for alpha chain variable domain of TCR clone 314189 (TRAV4, TRAJ42)
CLVGVLHYGGRQGNLIF

SEQ ID NO: 628378 - protein, 12 aa, Homo sapiens
  CDR3 for beta chain variable domain of TCR clone 314189 (TRBV20-1, TRBJ2-1)
CSAQYTYNEQFF

SEQ ID NO: 628379 - protein, 15 aa, Homo sapiens
  CDR3 for alpha chain variable domain of TCR clone 314190 (TRAV8-6, TRAJ6)
CAVRDASGGSYIPTF

SEQ ID NO: 628380 - protein, 13 aa, Homo sapiens
  CDR3 for beta chain variable domain of TCR clone 314190 (TRBV2, TRBJ2-2)
CASRAWRTGELFF

SEQ ID NO: 628381 - protein, 10 aa, Homo sapiens
  CDR3 for alpha chain variable domain of TCR clone 314191 (TRAV30, TRAJ48)
CGIGNEKLTF

SEQ ID NO: 628382 - protein, 14 aa, Homo sapiens
  CDR3 for beta chain variable domain of TCR clone 314191 (TRBV7-6, TRBJ2-3)
CASSVAGGTDTQYI

SEQ ID NO: 628383 - protein, 18 aa, Homo sapiens
  CDR3 for alpha chain variable domain of TCR clone 314192 (TRAV21, TRAJ52)
CAVRPSPAGGTSYGKLTF

SEQ ID NO: 628384 - protein, 14 aa, Homo sapiens
  CDR3 for beta chain variable domain of TCR clone 314192 (TRBV19, TRBJ2-2)
CATTGHANTGELFF

SEQ ID NO: 628385 - protein, 14 aa, Homo sapiens
  CDR3 for alpha chain variable domain of TCR clone 314193 (TRAV1-2, TRAJ16)
CAVNRFSDGQKLLF

SEQ ID NO: 628386 - protein, 14 aa, Homo sapiens
  CDR3 for beta chain variable domain of TCR clone 314193 (TRBV20-1, TRBJ2-4)
CSASGRVGVNMQYF

SEQ ID NO: 628387 - protein, 13 aa, Homo sapiens
  CDR3 for alpha chain variable domain of TCR clone 314194 (TRAV12-3, TRAJ33)
CAMRVNSNYQLIW

SEQ ID NO: 628388 - protein, 13 aa, Homo sapiens
  CDR3 for beta chain variable domain of TCR clone 314194 (TRBV7-2, TRBJ2-2)
CASSLAVTGELVF

SEQ ID NO: 628389 - protein, 14 aa, Homo sapiens
  CDR3 for alpha chain variable domain of TCR clone 314195 (TRAV8-6, TRAJ54)
CAVSPALGAQKLVF

SEQ ID NO: 628390 - protein, 15 aa, Homo sapiens
  CDR3 for beta chain variable domain of TCR clone 314195 (TRBV4-1, TRBJ1-6)
CASSTGQGYNSPLHF

SEQ ID NO: 628391 - protein, 14 aa, Homo sapiens
  CDR3 for alpha chain variable domain of TCR clone 314196 (TRAV12-3, TRAJ10)
SHLPLTGGGNKLTF

SEQ ID NO: 628392 - protein, 13 aa, Homo sapiens
  CDR3 for beta chain variable domain of TCR clone 314196 (TRBV28, TRBJ2-5)
CAGVSRGEETQYF

SEQ ID NO: 628393 - protein, 15 aa, Homo sapiens
  CDR3 for alpha chain variable domain of TCR clone 314197 (TRAV8-4, TRAJ12)
CAVSDRVDSSYKLIF

SEQ ID NO: 628394 - protein, 14 aa, Homo sapiens
  CDR3 for beta chain variable domain of TCR clone 314197 (TRBV7-9, TRBJ2-2)
CASSLVQDTGELFF

SEQ ID NO: 628395 - protein, 15 aa, Homo sapiens
  CDR3 for alpha chain variable domain of TCR clone 314198 (TRAV2, TRAJ15)
CAVEDREQAGTALIF

SEQ ID NO: 628396 - protein, 13 aa, Homo sapiens
  CDR3 for beta chain variable domain of TCR clone 314198 (TRBV10-2, TRBJ2-7)
CARGTSGGYEQYF

SEQ ID NO: 628397 - protein, 15 aa, Homo sapiens
  CDR3 for alpha chain variable domain of TCR clone 314199 (TRAV35, TRAJ20)
CAGQLVGSNDYKLSF

SEQ ID NO: 628398 - protein, 13 aa, Homo sapiens
  CDR3 for beta chain variable domain of TCR clone 314199 (TRBV19, TRBJ2-7)
CASSNTGTHEQYF

SEQ ID NO: 628399 - protein, 14 aa, Homo sapiens
  CDR3 for alpha chain variable domain of TCR clone 314200 (TRAV17, TRAJ58)
CATDGETSGSSLTF

SEQ ID NO: 628400 - protein, 15 aa, Homo sapiens
  CDR3 for beta chain variable domain of TCR clone 314200 (TRBV6-3, TRBJ2-7)
CASSSPGTVFYEQYF

SEQ ID NO: 628401 - protein, 12 aa, Homo sapiens
  CDR3 for alpha chain variable domain of TCR clone 314201 (TRAV12-3, TRAJ17)
CAMTLTGNKLTC

SEQ ID NO: 628402 - protein, 15 aa, Homo sapiens
  CDR3 for beta chain variable domain of TCR clone 314201 (TRBV20-1, TRBJ2-7)
CSARDRVAGMDEQYF

SEQ ID NO: 628403 - protein, 16 aa, Homo sapiens
  CDR3 for alpha chain variable domain of TCR clone 314202 (TRAV8-3, TRAJ13)
CAAGAYPSGGYQKVTF

SEQ ID NO: 628404 - protein, 15 aa, Homo sapiens
  CDR3 for beta chain variable domain of TCR clone 314202 (TRBV19, TRBJ1-5)
CASSIVWADNQPQHF

SEQ ID NO: 628405 - protein, 14 aa, Homo sapiens
  CDR3 for alpha chain variable domain of TCR clone 314203 (TRAV12-1, TRAJ30)
CVVSIENRDDKIIF

SEQ ID NO: 628406 - protein, 14 aa, Homo sapiens
  CDR3 for beta chain variable domain of TCR clone 314203 (TRBV7-9, TRBJ2-5)
CASSPRPSGETQYF

SEQ ID NO: 628407 - protein, 14 aa, Homo sapiens
  CDR3 for alpha chain variable domain of TCR clone 314204 (TRAV38-1, TRAJ45)
CASHSGGGADGLTF

SEQ ID NO: 628408 - protein, 14 aa, Homo sapiens
  CDR3 for beta chain variable domain of TCR clone 314204 (TRBV2, TRBJ2-7)
CASSLTSGGYEQYF

SEQ ID NO: 628409 - protein, 14 aa, Homo sapiens
  CDR3 for alpha chain variable domain of TCR clone 314205 (TRAV2, TRAJ37)
CAVDFTSNTGKLIF

SEQ ID NO: 628410 - protein, 16 aa, Homo sapiens
  CDR3 for beta chain variable domain of TCR clone 314205 (TRBV29-1, TRBJ2-7)
CSVEVVGTSGSYEQYF

SEQ ID NO: 628411 - protein, 17 aa, Homo sapiens
  CDR3 for alpha chain variable domain of TCR clone 314206 (TRAV8-6, TRAJ58)
CAVSSWVGETSGSRLTL

SEQ ID NO: 628412 - protein, 17 aa, Homo sapiens
  CDR3 for beta chain variable domain of TCR clone 314206 (TRBV13, TRBJ2-3)
CASSLSRVAGGRNTQYF

SEQ ID NO: 628413 - protein, 12 aa, Homo sapiens
  CDR3 for alpha chain variable domain of TCR clone 314207 (TRAV12-1, TRAJ40)
CVGSSGTYKYIF

SEQ ID NO: 628414 - protein, 14 aa, Homo sapiens
  CDR3 for beta chain variable domain of TCR clone 314207 (TRBV20-1, TRBJ2-2)
CSAPDTANTGELFF

SEQ ID NO: 628415 - protein, 13 aa, Homo sapiens
  CDR3 for alpha chain variable domain of TCR clone 314208 (TRAV13-1, TRAJ5)
CAASDTGRRALTF

SEQ ID NO: 628416 - protein, 12 aa, Homo sapiens
  CDR3 for beta chain variable domain of TCR clone 314208 (TRBV28, TRBJ2-3)
CARRLYRDTQYF

SEQ ID NO: 628417 - protein, 16 aa, Homo sapiens
  CDR3 for alpha chain variable domain of TCR clone 314209 (TRAV30, TRAJ44)
CGTEDKRTGTASKLTF

SEQ ID NO: 628418 - protein, 15 aa, Homo sapiens
  CDR3 for beta chain variable domain of TCR clone 314209 (TRBV7-9, TRBJ1-2)
CASSLDREPNYGYTF

SEQ ID NO: 628419 - protein, 18 aa, Homo sapiens
  CDR3 for alpha chain variable domain of TCR clone 314210 (TRAV21, TRAJ52)
CAVRPSPAGGTSYGKLTF

SEQ ID NO: 628420 - protein, 13 aa, Homo sapiens
  CDR3 for beta chain variable domain of TCR clone 314210 (TRBV7-3, TRBJ1-1)
CASSQYWGAAAFF

SEQ ID NO: 628421 - protein, 13 aa, Homo sapiens
  CDR3 for alpha chain variable domain of TCR clone 314211 (TRAV27, TRAJ29)
CAGAHSGNTPLVF

SEQ ID NO: 628422 - protein, 15 aa, Homo sapiens
  CDR3 for beta chain variable domain of TCR clone 314211 (TRBV7-2, TRBJ2-5)
CASSLGLGGLETQYF

SEQ ID NO: 628423 - protein, 15 aa, Homo sapiens
  CDR3 for alpha chain variable domain of TCR clone 314212 (TRAV26-1, TRAJ22)
CIVRVSFCFCKATAL

SEQ ID NO: 628424 - protein, 13 aa, Homo sapiens
  CDR3 for beta chain variable domain of TCR clone 314212 (TRBV7-9, TRBJ1-2)
CASSLKQNYGYTF

SEQ ID NO: 628425 - protein, 14 aa, Homo sapiens
  CDR3 for alpha chain variable domain of TCR clone 314213 (TRAV16, TRAJ37)
CALDISGNTGKPIF

SEQ ID NO: 628426 - protein, 14 aa, Homo sapiens
  CDR3 for beta chain variable domain of TCR clone 314213 (TRBV7-6, TRBJ2-7)
CASSFRQGADEQYF

SEQ ID NO: 628427 - protein, 11 aa, Homo sapiens
  CDR3 for alpha chain variable domain of TCR clone 314214 (TRAV13-1, TRAJ5)
CAPKGRRSLTF

SEQ ID NO: 628428 - protein, 17 aa, Homo sapiens
  CDR3 for beta chain variable domain of TCR clone 314214 (TRBV28, TRBJ2-5)
CASSTPEGDALQETQYF

SEQ ID NO: 628429 - protein, 15 aa, Homo sapiens
  CDR3 for alpha chain variable domain of TCR clone 314215 (TRAV21, TRAJ53)
CATLNSGGSNYKLTF

SEQ ID NO: 628430 - protein, 14 aa, Homo sapiens
  CDR3 for beta chain variable domain of TCR clone 314215 (TRBV7-2, TRBJ2-7)
CASSLYPGRYEQYF

SEQ ID NO: 628431 - protein, 10 aa, Homo sapiens
  CDR3 for alpha chain variable domain of TCR clone 314216 (TRAV13-2, TRAJ49)
CADTGNKFYF

SEQ ID NO: 628432 - protein, 13 aa, Homo sapiens
  CDR3 for beta chain variable domain of TCR clone 314216 (TRBV10-3, TRBJ1-2)
CAISERDSYGYTF

SEQ ID NO: 628433 - protein, 14 aa, Homo sapiens
  CDR3 for alpha chain variable domain of TCR clone 314217 (TRAV8-4, TRAJ9)
CAVRRNTGGVNTIF

SEQ ID NO: 628434 - protein, 15 aa, Homo sapiens
  CDR3 for beta chain variable domain of TCR clone 314217 (TRBV10-2, TRBJ2-6)
CASSEQGTGANVLTF

SEQ ID NO: 628435 - protein, 15 aa, Homo sapiens
  CDR3 for alpha chain variable domain of TCR clone 314218 (TRAV26-1, TRAJ29)
CIVRVEGSGKTPLVF

SEQ ID NO: 628436 - protein, 14 aa, Homo sapiens
  CDR3 for beta chain variable domain of TCR clone 314218 (TRBV18, TRBJ2-5)
CASSPGVCQETQYF

SEQ ID NO: 628437 - protein, 14 aa, Homo sapiens
  CDR3 for alpha chain variable domain of TCR clone 314219 (TRAV8-3, TRAJ4)
CAVGASGGYNKLIF

SEQ ID NO: 628438 - protein, 15 aa, Homo sapiens
  CDR3 for beta chain variable domain of TCR clone 314219 (TRBV19, TRBJ1-1)
CASTSGQIQNTEAFF

SEQ ID NO: 628439 - protein, 23 aa, Homo sapiens
  CDR3 for alpha chain variable domain of TCR clone 314220 (TRAV26-1, TRAJ38)
CIADNAGNNHIQKPDPAVYQLRD

SEQ ID NO: 628440 - protein, 13 aa, Homo sapiens
  CDR3 for beta chain variable domain of TCR clone 314220 (TRBV10-3, TRBJ2-7)
CASKLAVNYEQYF

SEQ ID NO: 628441 - protein, 14 aa, Homo sapiens
  CDR3 for alpha chain variable domain of TCR clone 314221 (TRAV17, TRAJ57)
CATDPPGGSEKLVF

SEQ ID NO: 628442 - protein, 14 aa, Homo sapiens
  CDR3 for beta chain variable domain of TCR clone 314221 (TRBV25-1, TRBJ1-1)
CASTHLGGNTEAFF

SEQ ID NO: 628443 - protein, 14 aa, Homo sapiens
  CDR3 for alpha chain variable domain of TCR clone 314222 (TRAV17, TRAJ15)
CATTTNQAGTALIF

SEQ ID NO: 628444 - protein, 17 aa, Homo sapiens
  CDR3 for beta chain variable domain of TCR clone 314222 (TRBV25-1, TRBJ2-5)
CASSRRGGRGGQETQYF

SEQ ID NO: 628445 - protein, 15 aa, Homo sapiens
  CDR3 for alpha chain variable domain of TCR clone 314223 (TRAV8-6, TRAJ6)
CAVSFTSGGSYIPTF

SEQ ID NO: 628446 - protein, 13 aa, Homo sapiens
  CDR3 for beta chain variable domain of TCR clone 314223 (TRBV19, TRBJ1-2)
CASSVPGQDGYTF

SEQ ID NO: 628447 - protein, 13 aa, Homo sapiens
  CDR3 for alpha chain variable domain of TCR clone 314224 (TRAV2, TRAJ29)
CAAGNSGNTPLVF

SEQ ID NO: 628448 - protein, 16 aa, Homo sapiens
  CDR3 for beta chain variable domain of TCR clone 314224 (TRBV7-9, TRBJ1-2)
RASSPGGGAINYGYTF

SEQ ID NO: 628449 - protein, 21 aa, Homo sapiens
  CDR3 for alpha chain variable domain of TCR clone 314225 (TRAV26-1, TRAJ28)
CCVLFIVRVPDSGAGSYQLTF

SEQ ID NO: 628450 - protein, 17 aa, Homo sapiens
  CDR3 for beta chain variable domain of TCR clone 314225 (TRBV28, TRBJ2-7)
CASSPLPAGGKSYEQYF

SEQ ID NO: 628451 - protein, 12 aa, Homo sapiens
  CDR3 for alpha chain variable domain of TCR clone 314226 (TRAV12-2, TRAJ45)
CPSGGGADGLTF

SEQ ID NO: 628452 - protein, 16 aa, Homo sapiens
  CDR3 for beta chain variable domain of TCR clone 314226 (TRBV19, TRBJ2-3)
CASSPGLLASTDTQYF

SEQ ID NO: 628453 - protein, 14 aa, Homo sapiens
  CDR3 for alpha chain variable domain of TCR clone 314227 (TRAV30, TRAJ26)
CGTEIVSYGQNFVF

SEQ ID NO: 628454 - protein, 12 aa, Homo sapiens
  CDR3 for beta chain variable domain of TCR clone 314227 (TRBV7-3, TRBJ2-5)
RASSPGKETQYF

SEQ ID NO: 628455 - protein, 16 aa, Homo sapiens
  CDR3 for alpha chain variable domain of TCR clone 314228 (TRAV13-1, TRAJ45)
CAASWESGGGADGLTF

SEQ ID NO: 628456 - protein, 16 aa, Homo sapiens
  CDR3 for beta chain variable domain of TCR clone 314228 (TRBV19, TRBJ2-1)
CASSKAGPSSYNEQFF

SEQ ID NO: 628457 - protein, 15 aa, Homo sapiens
  CDR3 for alpha chain variable domain of TCR clone 314229 (TRAV34, TRAJ38)
CGADFTPGNNRKLIW

SEQ ID NO: 628458 - protein, 13 aa, Homo sapiens
  CDR3 for beta chain variable domain of TCR clone 314229 (TRBV20-1, TRBJ2-4)
CSAPTWAGNMQYF

SEQ ID NO: 628459 - protein, 13 aa, Homo sapiens
  CDR3 for alpha chain variable domain of TCR clone 314230 (TRAV3, TRAJ41)
CVVSSNSGYALNF

SEQ ID NO: 628460 - protein, 14 aa, Homo sapiens
  CDR3 for beta chain variable domain of TCR clone 314230 (TRBV7-2, TRBJ2-7)
CASSPKTSFYEQYF

SEQ ID NO: 628461 - protein, 15 aa, Homo sapiens
  CDR3 for alpha chain variable domain of TCR clone 314231 (TRAV8-3, TRAJ41)
CAVGSNSNSGYALNF

SEQ ID NO: 628462 - protein, 17 aa, Homo sapiens
  CDR3 for beta chain variable domain of TCR clone 314231 (TRBV25-1, TRBJ2-1)
CASSAYGKGRGVYEQFF

SEQ ID NO: 628463 - protein, 14 aa, Homo sapiens
  CDR3 for alpha chain variable domain of TCR clone 314232 (TRAV21, TRAJ38)
CAVMGAGNNRKLIW

SEQ ID NO: 628464 - protein, 13 aa, Homo sapiens
  CDR3 for beta chain variable domain of TCR clone 314232 (TRBV2, TRBJ1-4)
CASSELGVEKLFF

SEQ ID NO: 628465 - protein, 14 aa, Homo sapiens
  CDR3 for alpha chain variable domain of TCR clone 314233 (TRAV17, TRAJ16)
CATADFSDGQKLLF

SEQ ID NO: 628466 - protein, 11 aa, Homo sapiens
  CDR3 for beta chain variable domain of TCR clone 314233 (TRBV12-4, TRBJ2-2)
CASSSAGELFF

SEQ ID NO: 628467 - protein, 12 aa, Homo sapiens
  CDR3 for alpha chain variable domain of TCR clone 314234 (TRAV30, TRAJ43)
CGTEERGNDMRF

SEQ ID NO: 628468 - protein, 15 aa, Homo sapiens
  CDR3 for beta chain variable domain of TCR clone 314234 (TRBV7-3, TRBJ2-1)
CASSSRSSGRNEQFF

SEQ ID NO: 628469 - protein, 14 aa, Homo sapiens
  CDR3 for alpha chain variable domain of TCR clone 314235 (TRAV2, TRAJ9)
CAAEDRSGGFKTIF

SEQ ID NO: 628470 - protein, 13 aa, Homo sapiens
  CDR3 for beta chain variable domain of TCR clone 314235 (TRBV12-4, TRBJ1-5)
CASSPDRAQPQHF

SEQ ID NO: 628471 - protein, 13 aa, Homo sapiens
  CDR3 for alpha chain variable domain of TCR clone 314236 (TRAV26-1, TRAJ30)
CIVNMNRDDKIIF

SEQ ID NO: 628472 - protein, 16 aa, Homo sapiens
  CDR3 for beta chain variable domain of TCR clone 314236 (TRBV16, TRBJ2-7)
CASSRPAGRSSYEQYF

SEQ ID NO: 628473 - protein, 13 aa, Homo sapiens
  CDR3 for alpha chain variable domain of TCR clone 314237 (TRAV2, TRAJ40)
CAVVTSGTYKYIF

SEQ ID NO: 628474 - protein, 15 aa, Homo sapiens
  CDR3 for beta chain variable domain of TCR clone 314237 (TRBV7-9, TRBJ2-7)
CASSPGGGLTYEQYF

SEQ ID NO: 628475 - protein, 16 aa, Homo sapiens
  CDR3 for alpha chain variable domain of TCR clone 314238 (TRAV17, TRAJ53)
CATDALSGVSNYKLTF

SEQ ID NO: 628476 - protein, 15 aa, Homo sapiens
  CDR3 for beta chain variable domain of TCR clone 314238 (TRBV5-1, TRBJ2-1)
CASSPPRAPYNEQFF

SEQ ID NO: 628477 - protein, 14 aa, Homo sapiens
  CDR3 for alpha chain variable domain of TCR clone 314239 (TRAV6, TRAJ40)
CALDATSGTYKYIF

SEQ ID NO: 628478 - protein, 16 aa, Homo sapiens
  CDR3 for beta chain variable domain of TCR clone 314239 (TRBV7-8, TRBJ2-5)
CDSSPAGGRNQETQYF

SEQ ID NO: 628479 - protein, 14 aa, Homo sapiens
  CDR3 for alpha chain variable domain of TCR clone 314240 (TRAV12-2, TRAJ40)
CAVQIPSGTYKYIF

SEQ ID NO: 628480 - protein, 13 aa, Homo sapiens
  CDR3 for beta chain variable domain of TCR clone 314240 (TRBV20-1, TRBJ1-3)
CSARVQGRNTIYF

SEQ ID NO: 628481 - protein, 12 aa, Homo sapiens
  CDR3 for alpha chain variable domain of TCR clone 314241 (TRAV16, TRAJ10)
FSRPGGGNKLTF

SEQ ID NO: 628482 - protein, 15 aa, Homo sapiens
  CDR3 for beta chain variable domain of TCR clone 314241 (TRBV6-3, TRBJ2-7)
CASSSPGTVFYEQYF

SEQ ID NO: 628483 - protein, 13 aa, Homo sapiens
  CDR3 for alpha chain variable domain of TCR clone 314242 (TRAV12-3, TRAJ9)
CAMRNPAGFKTIF

SEQ ID NO: 628484 - protein, 14 aa, Homo sapiens
  CDR3 for beta chain variable domain of TCR clone 314242 (TRBV11-2, TRBJ2-7)
CASSSTGEGYEQYF

SEQ ID NO: 628485 - protein, 14 aa, Homo sapiens
  CDR3 for alpha chain variable domain of TCR clone 314243 (TRAV13-2, TRAJ10)
CRESSYSGYSTLIF

SEQ ID NO: 628486 - protein, 16 aa, Homo sapiens
  CDR3 for beta chain variable domain of TCR clone 314243 (TRBV19, TRBJ1-1)
CASRFGGPVTGTEAFF

SEQ ID NO: 628487 - protein, 13 aa, Homo sapiens
  CDR3 for alpha chain variable domain of TCR clone 314244 (TRAV12-1, TRAJ40)
CVVPTSGTYKYIF

SEQ ID NO: 628488 - protein, 14 aa, Homo sapiens
  CDR3 for beta chain variable domain of TCR clone 314244 (TRBV27, TRBJ2-3)
CASSPLGTTDTQYF

SEQ ID NO: 628489 - protein, 12 aa, Homo sapiens
  CDR3 for alpha chain variable domain of TCR clone 314245 (TRAV8-4, TRAJ37)
CAVRSNTGKLIF

SEQ ID NO: 628490 - protein, 16 aa, Homo sapiens
  CDR3 for beta chain variable domain of TCR clone 314245 (TRBV7-2, TRBJ2-3)
CASSLVGDTSTDTQYF

SEQ ID NO: 628491 - protein, 13 aa, Homo sapiens
  CDR3 for alpha chain variable domain of TCR clone 314246 (TRAV13-1, TRAJ13)
CAVSKGGYQKVTF

SEQ ID NO: 628492 - protein, 16 aa, Homo sapiens
  CDR3 for beta chain variable domain of TCR clone 314246 (TRBV18, TRBJ1-2)
CASSPPERVTIYGYTF

SEQ ID NO: 628493 - protein, 12 aa, Homo sapiens
  CDR3 for alpha chain variable domain of TCR clone 314247 (TRAV16, TRAJ10)
CSRTGGGNKLTF

SEQ ID NO: 628494 - protein, 15 aa, Homo sapiens
  CDR3 for beta chain variable domain of TCR clone 314247 (TRBV4-1, TRBJ2-7)
CASSQRGQGFDEQYF

SEQ ID NO: 628495 - protein, 15 aa, Homo sapiens
  CDR3 for alpha chain variable domain of TCR clone 314248 (TRAV21, TRAJ53)
CATLNSGGSNYKLTF

SEQ ID NO: 628496 - protein, 14 aa, Homo sapiens
  CDR3 for beta chain variable domain of TCR clone 314248 (TRBV7-2, TRBJ2-7)
CASRAQGAAYEQYF

SEQ ID NO: 628497 - protein, 15 aa, Homo sapiens
  CDR3 for alpha chain variable domain of TCR clone 314249 (TRAV17, TRAJ13)
CATDAGSGGYQKVTF

SEQ ID NO: 628498 - protein, 17 aa, Homo sapiens
  CDR3 for beta chain variable domain of TCR clone 314249 (TRBV11-2, TRBJ2-5)
CASSLYPPGVEYNEQYF

SEQ ID NO: 628499 - protein, 14 aa, Homo sapiens
  CDR3 for alpha chain variable domain of TCR clone 314250 (TRAV2, TRAJ11)
CAVVPNSGYSTLTF

SEQ ID NO: 628500 - protein, 15 aa, Homo sapiens
  CDR3 for beta chain variable domain of TCR clone 314250 (TRBV4-1, TRBJ1-3)
CASSQDLRVGTTIYF

SEQ ID NO: 628501 - protein, 22 aa, Homo sapiens
  CDR3 for alpha chain variable domain of TCR clone 314251 (TRAV12-2, TRAJ53)
SPVIQPPTSVPPILSSNYKLTF

SEQ ID NO: 628502 - protein, 13 aa, Homo sapiens
  CDR3 for beta chain variable domain of TCR clone 314251 (TRBV7-7, TRBJ2-3)
CASSVSRADTQYF

SEQ ID NO: 628503 - protein, 17 aa, Homo sapiens
  CDR3 for alpha chain variable domain of TCR clone 314252 (TRAV8-1, TRAJ43)
CAVTNDMRFGAGTRLTV

SEQ ID NO: 628504 - protein, 17 aa, Homo sapiens
  CDR3 for beta chain variable domain of TCR clone 314252 (TRBV5-4, TRBJ2-1)
WASSSAGGRGPYNEQFF

SEQ ID NO: 628505 - protein, 12 aa, Homo sapiens
  CDR3 for alpha chain variable domain of TCR clone 314253 (TRAV23/DV6, TRAJ18)
CAASSSHRGSTL

SEQ ID NO: 628506 - protein, 13 aa, Homo sapiens
  CDR3 for beta chain variable domain of TCR clone 314253 (TRBV12-5, TRBJ2-3)
CASGDRQSDTQYF

SEQ ID NO: 628507 - protein, 12 aa, Homo sapiens
  CDR3 for alpha chain variable domain of TCR clone 314254 (TRAV13-1, TRAJ53)
CAAGCSNYKLTF

SEQ ID NO: 628508 - protein, 15 aa, Homo sapiens
  CDR3 for beta chain variable domain of TCR clone 314254 (TRBV7-2, TRBJ2-1)
CASSSGLAGGNEQFF

SEQ ID NO: 628509 - protein, 13 aa, Homo sapiens
  CDR3 for alpha chain variable domain of TCR clone 314255 (TRAV27, TRAJ8)
CAGGGTGFQKLVF

SEQ ID NO: 628510 - protein, 14 aa, Homo sapiens
  CDR3 for beta chain variable domain of TCR clone 314255 (TRBV20-1, TRBJ1-3)
CSASPTGAGNTIYF

SEQ ID NO: 628511 - protein, 12 aa, Homo sapiens
  CDR3 for alpha chain variable domain of TCR clone 314256 (TRAV27, TRAJ21)
CAGVRQLQQVLL

SEQ ID NO: 628512 - protein, 14 aa, Homo sapiens
  CDR3 for beta chain variable domain of TCR clone 314256 (TRBV7-9, TRBJ1-4)
CASSLEGQSEKLFF

SEQ ID NO: 628513 - protein, 11 aa, Homo sapiens
  CDR3 for alpha chain variable domain of TCR clone 314257 (TRAV17, TRAJ49)
CATDAGNQFYF

SEQ ID NO: 628514 - protein, 16 aa, Homo sapiens
  CDR3 for beta chain variable domain of TCR clone 314257 (TRBV7-2, TRBJ1-2)
CASSPTSGTSSGGYTF

SEQ ID NO: 628515 - protein, 12 aa, Homo sapiens
  CDR3 for alpha chain variable domain of TCR clone 314258 (TRAV10, TRAJ43)
CVVVRVGNDMRF

SEQ ID NO: 628516 - protein, 14 aa, Homo sapiens
  CDR3 for beta chain variable domain of TCR clone 314258 (TRBV7-2, TRBJ2-7)
CASRSQGAAYEQYF

SEQ ID NO: 628517 - protein, 22 aa, Homo sapiens
  CDR3 for alpha chain variable domain of TCR clone 314259 (TRAV8-2, TRAJ45)
HLTKPSAHMSDAAEYSADGLTF

SEQ ID NO: 628518 - protein, 12 aa, Homo sapiens
  CDR3 for beta chain variable domain of TCR clone 314259 (TRBV7-3, TRBJ2-1)
CASSFQSGPQFF

SEQ ID NO: 628519 - protein, 13 aa, Homo sapiens
  CDR3 for alpha chain variable domain of TCR clone 314260 (TRAV21, TRAJ27)
CAARSGNAGKSTF

SEQ ID NO: 628520 - protein, 15 aa, Homo sapiens
  CDR3 for beta chain variable domain of TCR clone 314260 (TRBV7-3, TRBJ2-2)
CASSETGQGTGELFF

SEQ ID NO: 628521 - protein, 14 aa, Homo sapiens
  CDR3 for alpha chain variable domain of TCR clone 314261 (TRAV1-2, TRAJ16)
CAVNRFSGGKKLLF

SEQ ID NO: 628522 - protein, 16 aa, Homo sapiens
  CDR3 for beta chain variable domain of TCR clone 314261 (TRBV9, TRBJ2-1)
CASSVGGGGNYNEQFF

SEQ ID NO: 628523 - protein, 15 aa, Homo sapiens
  CDR3 for alpha chain variable domain of TCR clone 314262 (TRAV34, TRAJ38)
CGADFTPGNNRKLIW

SEQ ID NO: 628524 - protein, 14 aa, Homo sapiens
  CDR3 for beta chain variable domain of TCR clone 314262 (TRBV11-2, TRBJ2-3)
CASCLGGGANTQYF

SEQ ID NO: 628525 - protein, 14 aa, Homo sapiens
  CDR3 for alpha chain variable domain of TCR clone 314263 (TRAV8-4, TRAJ12)
CAVSHGASSYKLIF

SEQ ID NO: 628526 - protein, 14 aa, Homo sapiens
  CDR3 for beta chain variable domain of TCR clone 314263 (TRBV25-1, TRBJ1-1)
CASTHLGGNTEAFF

SEQ ID NO: 628527 - protein, 13 aa, Homo sapiens
  CDR3 for alpha chain variable domain of TCR clone 314264 (TRAV36/DV7, TRAJ37)
CAVFSSNTGKLIF

SEQ ID NO: 628528 - protein, 14 aa, Homo sapiens
  CDR3 for beta chain variable domain of TCR clone 314264 (TRBV19, TRBJ2-1)
CASPTFVLSGEQFF

SEQ ID NO: 628529 - protein, 13 aa, Homo sapiens
  CDR3 for alpha chain variable domain of TCR clone 314265 (TRAV30, TRAJ49)
CGTEPNTGDQFYF

SEQ ID NO: 628530 - protein, 14 aa, Homo sapiens
  CDR3 for beta chain variable domain of TCR clone 314265 (TRBV29-1, TRBJ2-1)
CSVEFRGIPFEQFF

SEQ ID NO: 628531 - protein, 13 aa, Homo sapiens
  CDR3 for alpha chain variable domain of TCR clone 314266 (TRAV16, TRAJ9)
CSLRATGGFKTIF

SEQ ID NO: 628532 - protein, 16 aa, Homo sapiens
  CDR3 for beta chain variable domain of TCR clone 314266 (TRBV5-1, TRBJ1-3)
CASSRSGEGSGNTIYF

SEQ ID NO: 628533 - protein, 17 aa, Homo sapiens
  CDR3 for alpha chain variable domain of TCR clone 314267 (TRAV13-1, TRAJ28)
CAASPPYSGAGSYQLTF

SEQ ID NO: 628534 - protein, 12 aa, Homo sapiens
  CDR3 for beta chain variable domain of TCR clone 314267 (TRBV11-2, TRBJ2-2)
CASSVPTGELFF

SEQ ID NO: 628535 - protein, 14 aa, Homo sapiens
  CDR3 for alpha chain variable domain of TCR clone 314268 (TRAV8-2, TRAJ4)
CVVSPSSGYNKLIF

SEQ ID NO: 628536 - protein, 15 aa, Homo sapiens
  CDR3 for beta chain variable domain of TCR clone 314268 (TRBV2, TRBJ2-1)
CASSELAGSYNEQFF

SEQ ID NO: 628537 - protein, 17 aa, Homo sapiens
  CDR3 for alpha chain variable domain of TCR clone 314269 (TRAV8-3, TRAJ42)
CCGAGMNYGGSQGNLIF

SEQ ID NO: 628538 - protein, 11 aa, Homo sapiens
  CDR3 for beta chain variable domain of TCR clone 314269 (TRBV7-3, TRBJ2-5)
CASSLSETQYF

SEQ ID NO: 628539 - protein, 17 aa, Homo sapiens
  CDR3 for alpha chain variable domain of TCR clone 314270 (TRAV2, TRAJ36)
CAVEGRGNWGKQPLLLD

SEQ ID NO: 628540 - protein, 14 aa, Homo sapiens
  CDR3 for beta chain variable domain of TCR clone 314270 (TRBV7-9, TRBJ2-5)
CASSLDTAQETQYF

SEQ ID NO: 628541 - protein, 11 aa, Homo sapiens
  CDR3 for alpha chain variable domain of TCR clone 314271 (TRAV10, TRAJ6)
CGPGGSYIPTF

SEQ ID NO: 628542 - protein, 13 aa, Homo sapiens
  CDR3 for beta chain variable domain of TCR clone 314271 (TRBV12-4, TRBJ2-5)
CASGLAVQETQYF

SEQ ID NO: 628543 - protein, 10 aa, Homo sapiens
  CDR3 for alpha chain variable domain of TCR clone 314272 (TRAV26-1, TRAJ40)
CIAGTYKYIF

SEQ ID NO: 628544 - protein, 14 aa, Homo sapiens
  CDR3 for beta chain variable domain of TCR clone 314272 (TRBV12-4, TRBJ2-5)
CASSFGASGGTQYF

SEQ ID NO: 628545 - protein, 12 aa, Homo sapiens
  CDR3 for alpha chain variable domain of TCR clone 314273 (TRAV12-3, TRAJ39)
CAMTQAGNMLTF

SEQ ID NO: 628546 - protein, 15 aa, Homo sapiens
  CDR3 for beta chain variable domain of TCR clone 314273 (TRBV7-2, TRBJ1-2)
CASSPRAGWNYGYTF

SEQ ID NO: 628547 - protein, 12 aa, Homo sapiens
  CDR3 for alpha chain variable domain of TCR clone 314274 (TRAV27, TRAJ35)
CAGADFGNVLHC

SEQ ID NO: 628548 - protein, 14 aa, Homo sapiens
  CDR3 for beta chain variable domain of TCR clone 314274 (TRBV19, TRBJ2-5)
CASSSSGIQETQYF

SEQ ID NO: 628549 - protein, 16 aa, Homo sapiens
  CDR3 for alpha chain variable domain of TCR clone 314275 (TRAV30, TRAJ24)
CGTEIVDADGWGKFQF

SEQ ID NO: 628550 - protein, 15 aa, Homo sapiens
  CDR3 for beta chain variable domain of TCR clone 314275 (TRBV4-2, TRBJ1-1)
CASSQEDLPRTEAFF

SEQ ID NO: 628551 - protein, 17 aa, Homo sapiens
  CDR3 for alpha chain variable domain of TCR clone 314276 (TRAV13-1, TRAJ52)
CAAGRNAGGTSYGKLTF

SEQ ID NO: 628552 - protein, 14 aa, Homo sapiens
  CDR3 for beta chain variable domain of TCR clone 314276 (TRBV5-1, TRBJ2-5)
CASSLAGKQETQYF

SEQ ID NO: 628553 - protein, 14 aa, Homo sapiens
  CDR3 for alpha chain variable domain of TCR clone 314277 (TRAV13-1, TRAJ44)
CAAKATGTASKLTF

SEQ ID NO: 628554 - protein, 13 aa, Homo sapiens
  CDR3 for beta chain variable domain of TCR clone 314277 (TRBV7-9, TRBJ1-6)
CASSLASLSPLHF

SEQ ID NO: 628555 - protein, 14 aa, Homo sapiens
  CDR3 for alpha chain variable domain of TCR clone 314278 (TRAV12-1, TRAJ23)
CAVIVYNQGGKLIF

SEQ ID NO: 628556 - protein, 13 aa, Homo sapiens
  CDR3 for beta chain variable domain of TCR clone 314278 (TRBV11-2, TRBJ2-5)
CASSFISQETQYF

SEQ ID NO: 628557 - protein, 23 aa, Homo sapiens
  CDR3 for alpha chain variable domain of TCR clone 314279 (TRAV13-1, TRAJ32)
CAASIYGGLQTSPSLELALCLLS

SEQ ID NO: 628558 - protein, 14 aa, Homo sapiens
  CDR3 for beta chain variable domain of TCR clone 314279 (TRBV7-9, TRBJ2-1)
CASSLASGSNEQFF

SEQ ID NO: 628559 - protein, 15 aa, Homo sapiens
  CDR3 for alpha chain variable domain of TCR clone 314280 (TRAV12-1, TRAJ15)
CVVTLANQAGTALIF

SEQ ID NO: 628560 - protein, 14 aa, Homo sapiens
  CDR3 for beta chain variable domain of TCR clone 314280 (TRBV5-1, TRBJ1-1)
CASSLVSINTEAFF

SEQ ID NO: 628561 - protein, 13 aa, Homo sapiens
  CDR3 for alpha chain variable domain of TCR clone 314281 (TRAV26-1, TRAJ33)
CIVRVEGNYQLIW

SEQ ID NO: 628562 - protein, 16 aa, Homo sapiens
  CDR3 for beta chain variable domain of TCR clone 314281 (TRBV19, TRBJ2-1)
CASSKAGPSSYNEQFF

SEQ ID NO: 628563 - protein, 13 aa, Homo sapiens
  CDR3 for alpha chain variable domain of TCR clone 314282 (TRAV17, TRAJ9)
CATFLTGGFKTIF

SEQ ID NO: 628564 - protein, 14 aa, Homo sapiens
  CDR3 for beta chain variable domain of TCR clone 314282 (TRBV4-1, TRBJ2-2)
CASSQAVNTGELFF

SEQ ID NO: 628565 - protein, 12 aa, Homo sapiens
  CDR3 for alpha chain variable domain of TCR clone 314283 (TRAV22, TRAJ22)
CAPGGSARQLTF

SEQ ID NO: 628566 - protein, 12 aa, Homo sapiens
  CDR3 for beta chain variable domain of TCR clone 314283 (TRBV7-9, TRBJ1-1)
CASSLGDTEAFF

SEQ ID NO: 628567 - protein, 15 aa, Homo sapiens
  CDR3 for alpha chain variable domain of TCR clone 314284 (TRAV13-1, TRAJ17)
CAASIERAAGNKLTF

SEQ ID NO: 628568 - protein, 15 aa, Homo sapiens
  CDR3 for beta chain variable domain of TCR clone 314284 (TRBV6-3, TRBJ2-2)
CASSVDRANTGELFF

SEQ ID NO: 628569 - protein, 14 aa, Homo sapiens
  CDR3 for alpha chain variable domain of TCR clone 314285 (TRAV3, TRAJ33)
CAVRDMDSNYQLIW

SEQ ID NO: 628570 - protein, 19 aa, Homo sapiens
  CDR3 for beta chain variable domain of TCR clone 314285 (TRBV7-3, TRBJ1-2)
CASCFPQGNDGELWLHRRF

SEQ ID NO: 628571 - protein, 18 aa, Homo sapiens
  CDR3 for alpha chain variable domain of TCR clone 314286 (TRAV21, TRAJ52)
CAVRPSPAGGTSYGNLTF

SEQ ID NO: 628572 - protein, 17 aa, Homo sapiens
  CDR3 for beta chain variable domain of TCR clone 314286 (TRBV13, TRBJ2-3)
CASSLSRVAGGRNMQYF

SEQ ID NO: 628573 - protein, 14 aa, Homo sapiens
  CDR3 for alpha chain variable domain of TCR clone 314287 (TRAV13-2, TRAJ15)
GAENPNQAGTALIC

SEQ ID NO: 628574 - protein, 16 aa, Homo sapiens
  CDR3 for beta chain variable domain of TCR clone 314287 (TRBV12-4, TRBJ1-2)
CASSPTATGKTRGYTF

SEQ ID NO: 628575 - protein, 11 aa, Homo sapiens
  CDR3 for alpha chain variable domain of TCR clone 314288 (TRAV21, TRAJ48)
CAVDGNDKLTF

SEQ ID NO: 628576 - protein, 16 aa, Homo sapiens
  CDR3 for beta chain variable domain of TCR clone 314288 (TRBV12-4, TRBJ1-5)
CASSSGPRGSNQPQHF

SEQ ID NO: 628577 - protein, 14 aa, Homo sapiens
  CDR3 for alpha chain variable domain of TCR clone 314289 (TRAV3, TRAJ9)
CAVRGNTGGFKIIF

SEQ ID NO: 628578 - protein, 16 aa, Homo sapiens
  CDR3 for beta chain variable domain of TCR clone 314289 (TRBV7-2, TRBJ2-7)
CASSLGLAGGAYEQYF

SEQ ID NO: 628579 - protein, 16 aa, Homo sapiens
  CDR3 for alpha chain variable domain of TCR clone 314290 (TRAV1-2, TRAJ6)
CAVRDQGTGGSYIPTF

SEQ ID NO: 628580 - protein, 14 aa, Homo sapiens
  CDR3 for beta chain variable domain of TCR clone 314290 (TRBV28, TRBJ1-2)
CASRIQGANYGYTF

SEQ ID NO: 628581 - protein, 17 aa, Homo sapiens
  CDR3 for alpha chain variable domain of TCR clone 314291 (TRAV25, TRAJ52)
CAGPLDAGGTSYGKLTF

SEQ ID NO: 628582 - protein, 15 aa, Homo sapiens
  CDR3 for beta chain variable domain of TCR clone 314291 (TRBV6-1, TRBJ2-3)
CASSERGGITDTQYF

SEQ ID NO: 628583 - protein, 17 aa, Homo sapiens
  CDR3 for alpha chain variable domain of TCR clone 314292 (TRAV29/DV5, TRAJ52)
CAASARAGGTSYGKLTF

SEQ ID NO: 628584 - protein, 16 aa, Homo sapiens
  CDR3 for beta chain variable domain of TCR clone 314292 (TRBV7-8, TRBJ2-4)
CASSAERTLAKNIQYF

SEQ ID NO: 628585 - protein, 15 aa, Homo sapiens
  CDR3 for alpha chain variable domain of TCR clone 314293 (TRAV17, TRAJ57)
CATGPSQGGSEKLVF

SEQ ID NO: 628586 - protein, 18 aa, Homo sapiens
  CDR3 for beta chain variable domain of TCR clone 314293 (TRBV7-9, TRBJ2-7)
CASSLTTSGSRTLYEQYF

SEQ ID NO: 628587 - protein, 15 aa, Homo sapiens
  CDR3 for alpha chain variable domain of TCR clone 314294 (TRAV25, TRAJ52)
CAGRPGGTSYGKLTF

SEQ ID NO: 628588 - protein, 15 aa, Homo sapiens
  CDR3 for beta chain variable domain of TCR clone 314294 (TRBV9, TRBJ1-6)
CASSVAGTGGSPLHF

SEQ ID NO: 628589 - protein, 15 aa, Homo sapiens
  CDR3 for alpha chain variable domain of TCR clone 314295 (TRAV17, TRAJ57)
CATGPSQGGSEKLVF

SEQ ID NO: 628590 - protein, 14 aa, Homo sapiens
  CDR3 for beta chain variable domain of TCR clone 314295 (TRBV7-2, TRBJ2-5)
CASSLSGGGETQYF

SEQ ID NO: 628591 - protein, 15 aa, Homo sapiens
  CDR3 for alpha chain variable domain of TCR clone 314296 (TRAV4, TRAJ36)
CLVGDRQTGANNLFF

SEQ ID NO: 628592 - protein, 12 aa, Homo sapiens
  CDR3 for beta chain variable domain of TCR clone 314296 (TRBV11-2, TRBJ2-2)
CASSLGGGELFF

SEQ ID NO: 628593 - protein, 14 aa, Homo sapiens
  CDR3 for alpha chain variable domain of TCR clone 314297 (TRAV17, TRAJ45)
CATDARGGADGLTL

SEQ ID NO: 628594 - protein, 11 aa, Homo sapiens
  CDR3 for beta chain variable domain of TCR clone 314297 (TRBV28, TRBJ2-5)
CATGNQETQYF

SEQ ID NO: 628595 - protein, 14 aa, Homo sapiens
  CDR3 for alpha chain variable domain of TCR clone 314298 (TRAV8-1, TRAJ9)
CAVNDRTGGFKTIF

SEQ ID NO: 628596 - protein, 14 aa, Homo sapiens
  CDR3 for beta chain variable domain of TCR clone 314298 (TRBV4-2, TRBJ2-1)
CASGLDRAYNEQFF

SEQ ID NO: 628597 - protein, 12 aa, Homo sapiens
  CDR3 for alpha chain variable domain of TCR clone 314299 (TRAV12-2, TRAJ9)
CAVNTGGFKTIF

SEQ ID NO: 628598 - protein, 13 aa, Homo sapiens
  CDR3 for beta chain variable domain of TCR clone 314299 (TRBV10-3, TRBJ2-7)
CASNLAVNYEQYF

SEQ ID NO: 628599 - protein, 14 aa, Homo sapiens
  CDR3 for alpha chain variable domain of TCR clone 314300 (TRAV3, TRAJ22)
CCERPGGSARQLTF

SEQ ID NO: 628600 - protein, 13 aa, Homo sapiens
  CDR3 for beta chain variable domain of TCR clone 314300 (TRBV27, TRBJ2-7)
YASSFSQGYEQYF

SEQ ID NO: 628601 - protein, 12 aa, Homo sapiens
  CDR3 for alpha chain variable domain of TCR clone 314301 (TRAV8-3, TRAJ41)
CAVGALGDALNF

SEQ ID NO: 628602 - protein, 16 aa, Homo sapiens
  CDR3 for beta chain variable domain of TCR clone 314301 (TRBV7-6, TRBJ2-3)
CASSDSRGEGTDTQYF

SEQ ID NO: 628603 - protein, 15 aa, Homo sapiens
  CDR3 for alpha chain variable domain of TCR clone 314302 (TRAV8-2, TRAJ40)
CVVLGTTSGTYKYIF

SEQ ID NO: 628604 - protein, 13 aa, Homo sapiens
  CDR3 for beta chain variable domain of TCR clone 314302 (TRBV4-2, TRBJ1-1)
CASSQAGNTEAFF

SEQ ID NO: 628605 - protein, 16 aa, Homo sapiens
  CDR3 for alpha chain variable domain of TCR clone 314303 (TRAV30, TRAJ24)
CGTEIVDADSWGKFHF

SEQ ID NO: 628606 - protein, 16 aa, Homo sapiens
  CDR3 for beta chain variable domain of TCR clone 314303 (TRBV28, TRBJ2-7)
CASSLFFETGGPEQYF

SEQ ID NO: 628607 - protein, 16 aa, Homo sapiens
  CDR3 for alpha chain variable domain of TCR clone 314304 (TRAV12-3, TRAJ53)
CAMSPGSGGSNYKLTF

SEQ ID NO: 628608 - protein, 14 aa, Homo sapiens
  CDR3 for beta chain variable domain of TCR clone 314304 (TRBV7-2, TRBJ2-7)
CASSLGPGGGEQYF

SEQ ID NO: 628609 - protein, 14 aa, Homo sapiens
  CDR3 for alpha chain variable domain of TCR clone 314305 (TRAV1-2, TRAJ16)
CAVNRFSVGQKLLF

SEQ ID NO: 628610 - protein, 13 aa, Homo sapiens
  CDR3 for beta chain variable domain of TCR clone 314305 (TRBV20-1, TRBJ1-1)
CSARGGGNTEAFF

SEQ ID NO: 628611 - protein, 11 aa, Homo sapiens
  CDR3 for alpha chain variable domain of TCR clone 314306 (TRAV1-2, TRAJ20)
CAVANDYKLSF

SEQ ID NO: 628612 - protein, 15 aa, Homo sapiens
  CDR3 for beta chain variable domain of TCR clone 314306 (TRBV6-5, TRBJ1-1)
CASSYSAAMETEAFF

SEQ ID NO: 628613 - protein, 15 aa, Homo sapiens
  CDR3 for alpha chain variable domain of TCR clone 314307 (TRAV8-1, TRAJ6)
CAVNTPPGGSYIPTF

SEQ ID NO: 628614 - protein, 15 aa, Homo sapiens
  CDR3 for beta chain variable domain of TCR clone 314307 (TRBV11-2, TRBJ2-2)
CASSSDRMNAGELFF

SEQ ID NO: 628615 - protein, 12 aa, Homo sapiens
  CDR3 for alpha chain variable domain of TCR clone 314308 (TRAV2, TRAJ31)
CAVEDDNARLMF

SEQ ID NO: 628616 - protein, 16 aa, Homo sapiens
  CDR3 for beta chain variable domain of TCR clone 314308 (TRBV10-3, TRBJ2-1)
CAISGVGDGGGWEQFF

SEQ ID NO: 628617 - protein, 14 aa, Homo sapiens
  CDR3 for alpha chain variable domain of TCR clone 314309 (TRAV21, TRAJ35)
CAVMQIGFGNVLHC

SEQ ID NO: 628618 - protein, 12 aa, Homo sapiens
  CDR3 for beta chain variable domain of TCR clone 314309 (TRBV7-9, TRBJ2-7)
CDSSIKREEQYF

SEQ ID NO: 628619 - protein, 14 aa, Homo sapiens
  CDR3 for alpha chain variable domain of TCR clone 314310 (TRAV13-1, TRAJ49)
CAASPRWTGTSLTV

SEQ ID NO: 628620 - protein, 16 aa, Homo sapiens
  CDR3 for beta chain variable domain of TCR clone 314310 (TRBV12-5, TRBJ2-5)
CASGPRTSGNQETQYF

SEQ ID NO: 628621 - protein, 12 aa, Homo sapiens
  CDR3 for alpha chain variable domain of TCR clone 314311 (TRAV12-1, TRAJ34)
CVVAGATDKLIF

SEQ ID NO: 628622 - protein, 15 aa, Homo sapiens
  CDR3 for beta chain variable domain of TCR clone 314311 (TRBV7-6, TRBJ1-1)
CASSPQGGANTEAFF

SEQ ID NO: 628623 - protein, 14 aa, Homo sapiens
  CDR3 for alpha chain variable domain of TCR clone 314312 (TRAV8-2, TRAJ4)
CVVSPSGGYNKLIF

SEQ ID NO: 628624 - protein, 13 aa, Homo sapiens
  CDR3 for beta chain variable domain of TCR clone 314312 (TRBV12-4, TRBJ2-7)
CASSPTETYEQYF

SEQ ID NO: 628625 - protein, 12 aa, Homo sapiens
  CDR3 for alpha chain variable domain of TCR clone 314313 (TRAV20, TRAJ54)
CAVQEGAQKRVF

SEQ ID NO: 628626 - protein, 17 aa, Homo sapiens
  CDR3 for beta chain variable domain of TCR clone 314313 (TRBV13, TRBJ2-3)
CASSLSRVAGGRNTQYF

SEQ ID NO: 628627 - protein, 16 aa, Homo sapiens
  CDR3 for alpha chain variable domain of TCR clone 314314 (TRAV8-3, TRAJ13)
CAAGAYPSGGYQKVTF

SEQ ID NO: 628628 - protein, 15 aa, Homo sapiens
  CDR3 for beta chain variable domain of TCR clone 314314 (TRBV2, TRBJ2-3)
CASSDFEKATDTQYF

SEQ ID NO: 628629 - protein, 12 aa, Homo sapiens
  CDR3 for alpha chain variable domain of TCR clone 314315 (TRAV3, TRAJ43)
CCERGRNNDMRF

SEQ ID NO: 628630 - protein, 16 aa, Homo sapiens
  CDR3 for beta chain variable domain of TCR clone 314315 (TRBV11-2, TRBJ2-7)
CASSPTTGGVSYEQYF

SEQ ID NO: 628631 - protein, 16 aa, Homo sapiens
  CDR3 for alpha chain variable domain of TCR clone 314316 (TRAV30, TRAJ24)
CGTEIVDAASWGKFQF

SEQ ID NO: 628632 - protein, 16 aa, Homo sapiens
  CDR3 for beta chain variable domain of TCR clone 314316 (TRBV2, TRBJ1-3)
CASSGGAGRSGNTIYF

SEQ ID NO: 628633 - protein, 11 aa, Homo sapiens
  CDR3 for alpha chain variable domain of TCR clone 314317 (TRAV12-3, TRAJ41)
CAMNAREALKF

SEQ ID NO: 628634 - protein, 16 aa, Homo sapiens
  CDR3 for beta chain variable domain of TCR clone 314317 (TRBV7-8, TRBJ2-3)
CASSTEGQRETDTQYF

SEQ ID NO: 628635 - protein, 13 aa, Homo sapiens
  CDR3 for alpha chain variable domain of TCR clone 314318 (TRAV8-3, TRAJ36)
CAVGATGANNLFF

SEQ ID NO: 628636 - protein, 14 aa, Homo sapiens
  CDR3 for beta chain variable domain of TCR clone 314318 (TRBV11-2, TRBJ2-7)
CASSLELEGYEQYF

SEQ ID NO: 628637 - protein, 14 aa, Homo sapiens
  CDR3 for alpha chain variable domain of TCR clone 314319 (TRAV1-2, TRAJ16)
CAVNRFSAGQKLLF

SEQ ID NO: 628638 - protein, 16 aa, Homo sapiens
  CDR3 for beta chain variable domain of TCR clone 314319 (TRBV12-4, TRBJ1-5)
CASSRPVGGSNQPQHF

SEQ ID NO: 628639 - protein, 13 aa, Homo sapiens
  CDR3 for alpha chain variable domain of TCR clone 314320 (TRAV17, TRAJ15)
CATVNQAGTALIF

SEQ ID NO: 628640 - protein, 13 aa, Homo sapiens
  CDR3 for beta chain variable domain of TCR clone 314320 (TRBV7-3, TRBJ1-1)
CASSQDWGAEAFF

SEQ ID NO: 628641 - protein, 13 aa, Homo sapiens
  CDR3 for alpha chain variable domain of TCR clone 314321 (TRAV17, TRAJ26)
CATVDNCGQNFVS

SEQ ID NO: 628642 - protein, 16 aa, Homo sapiens
  CDR3 for beta chain variable domain of TCR clone 314321 (TRBV2, TRBJ2-1)
CASSVGGSLSYNEQFF

SEQ ID NO: 628643 - protein, 15 aa, Homo sapiens
  CDR3 for alpha chain variable domain of TCR clone 314322 (TRAV26-1, TRAJ48)
CFVRVGDFGNEKLTF

SEQ ID NO: 628644 - protein, 16 aa, Homo sapiens
  CDR3 for beta chain variable domain of TCR clone 314322 (TRBV4-1, TRBJ2-3)
CASSQRAGGLTDTQYF

SEQ ID NO: 628645 - protein, 12 aa, Homo sapiens
  CDR3 for alpha chain variable domain of TCR clone 314323 (TRAV12-2, TRAJ10)
WGVTCGGNKLTF

SEQ ID NO: 628646 - protein, 20 aa, Homo sapiens
  CDR3 for beta chain variable domain of TCR clone 314323 (TRBV28, TRBJ2-1)
CASTPIGRSPGLAGGNEQFF

SEQ ID NO: 628647 - protein, 14 aa, Homo sapiens
  CDR3 for alpha chain variable domain of TCR clone 314324 (TRAV12-2, TRAJ11)
CAVNMNSGYSTLTF

SEQ ID NO: 628648 - protein, 14 aa, Homo sapiens
  CDR3 for beta chain variable domain of TCR clone 314324 (TRBV7-2, TRBJ2-7)
CASSPKTSFYEQYF

SEQ ID NO: 628649 - protein, 14 aa, Homo sapiens
  CDR3 for alpha chain variable domain of TCR clone 314325 (TRAV13-1, TRAJ44)
CTAKATGTASKLTF

SEQ ID NO: 628650 - protein, 14 aa, Homo sapiens
  CDR3 for beta chain variable domain of TCR clone 314325 (TRBV19, TRBJ2-2)
CDSSTLHRSGELFF

SEQ ID NO: 628651 - protein, 17 aa, Homo sapiens
  CDR3 for alpha chain variable domain of TCR clone 314326 (TRAV16, TRAJ58)
CITVLSNGETSGSRLTF

SEQ ID NO: 628652 - protein, 15 aa, Homo sapiens
  CDR3 for beta chain variable domain of TCR clone 314326 (TRBV19, TRBJ1-2)
CASSVGQVLNYGYTF

SEQ ID NO: 628653 - protein, 14 aa, Homo sapiens
  CDR3 for alpha chain variable domain of TCR clone 314327 (TRAV12-2, TRAJ11)
CAVEGGSGFSTLTF

SEQ ID NO: 628654 - protein, 16 aa, Homo sapiens
  CDR3 for beta chain variable domain of TCR clone 314327 (TRBV6-1, TRBJ1-2)
CASSGAWQGRSHGYTF

SEQ ID NO: 628655 - protein, 13 aa, Homo sapiens
  CDR3 for alpha chain variable domain of TCR clone 314328 (TRAV1-2, TRAJ9)
CAVLNTGGFKTIF

SEQ ID NO: 628656 - protein, 14 aa, Homo sapiens
  CDR3 for beta chain variable domain of TCR clone 314328 (TRBV20-1, TRBJ2-3)
CSARGGTSTNTQYF

SEQ ID NO: 628657 - protein, 15 aa, Homo sapiens
  CDR3 for alpha chain variable domain of TCR clone 314329 (TRAV17, TRAJ57)
CATGPSQGGSEKLVF

SEQ ID NO: 628658 - protein, 13 aa, Homo sapiens
  CDR3 for beta chain variable domain of TCR clone 314329 (TRBV19, TRBJ1-4)
CASPTQGNEKLFF

SEQ ID NO: 628659 - protein, 14 aa, Homo sapiens
  CDR3 for alpha chain variable domain of TCR clone 314330 (TRAV13-1, TRAJ13)
CAASRVGGHQKVTF

SEQ ID NO: 628660 - protein, 17 aa, Homo sapiens
  CDR3 for beta chain variable domain of TCR clone 314330 (TRBV15, TRBJ1-5)
CATSRAPPGTRNQPQHF

SEQ ID NO: 628661 - protein, 11 aa, Homo sapiens
  CDR3 for alpha chain variable domain of TCR clone 314331 (TRAV21, TRAJ34)
CAVTNTDKLIF

SEQ ID NO: 628662 - protein, 13 aa, Homo sapiens
  CDR3 for beta chain variable domain of TCR clone 314331 (TRBV7-3, TRBJ1-1)
CASSQDWVAEAFF

SEQ ID NO: 628663 - protein, 15 aa, Homo sapiens
  CDR3 for alpha chain variable domain of TCR clone 314332 (TRAV2, TRAJ22)
CAVPSRGGSARQLTF

SEQ ID NO: 628664 - protein, 14 aa, Homo sapiens
  CDR3 for beta chain variable domain of TCR clone 314332 (TRBV7-2, TRBJ1-1)
CASSFLTGTTEAFF

SEQ ID NO: 628665 - protein, 19 aa, Homo sapiens
  CDR3 for alpha chain variable domain of TCR clone 314333 (TRAV2, TRAJ20)
ILQVREADAAVYRDCKLSV

SEQ ID NO: 628666 - protein, 17 aa, Homo sapiens
  CDR3 for beta chain variable domain of TCR clone 314333 (TRBV11-2, TRBJ2-1)
CASSLYPPGVEYNEQFF

SEQ ID NO: 628667 - protein, 13 aa, Homo sapiens
  CDR3 for alpha chain variable domain of TCR clone 314334 (TRAV2, TRAJ23)
CAVMGNQGGKLIF

SEQ ID NO: 628668 - protein, 14 aa, Homo sapiens
  CDR3 for beta chain variable domain of TCR clone 314334 (TRBV19, TRBJ2-1)
CASSRLASINEQFF

SEQ ID NO: 628669 - protein, 14 aa, Homo sapiens
  CDR3 for alpha chain variable domain of TCR clone 314335 (TRAV38-1, TRAJ45)
CASHSGGGADGLTF

SEQ ID NO: 628670 - protein, 13 aa, Homo sapiens
  CDR3 for beta chain variable domain of TCR clone 314335 (TRBV10-3, TRBJ1-2)
CAISERDSYGYTY

SEQ ID NO: 628671 - protein, 12 aa, Homo sapiens
  CDR3 for alpha chain variable domain of TCR clone 314336 (TRAV12-3, TRAJ17)
CAMTLTGNKLTF

SEQ ID NO: 628672 - protein, 13 aa, Homo sapiens
  CDR3 for beta chain variable domain of TCR clone 314336 (TRBV27, TRBJ2-1)
CASSSGSYNEQFF

SEQ ID NO: 628673 - protein, 17 aa, Homo sapiens
  CDR3 for alpha chain variable domain of TCR clone 314337 (TRAV23/DV6, TRAJ57)
CAASSALSPGGSEKLVF

SEQ ID NO: 628674 - protein, 14 aa, Homo sapiens
  CDR3 for beta chain variable domain of TCR clone 314337 (TRBV7-8, TRBJ2-5)
CASSATGGQETQYF

SEQ ID NO: 628675 - protein, 15 aa, Homo sapiens
  CDR3 for alpha chain variable domain of TCR clone 314338 (TRAV8-3, TRAJ11)
CAVGLLNSGYSTLTF

SEQ ID NO: 628676 - protein, 16 aa, Homo sapiens
  CDR3 for beta chain variable domain of TCR clone 314338 (TRBV15, TRBJ1-2)
CATSRGPRTGGGGYAF

SEQ ID NO: 628677 - protein, 17 aa, Homo sapiens
  CDR3 for alpha chain variable domain of TCR clone 314339 (TRAV8-6, TRAJ58)
CAVSSWVGETSGSRLTV

SEQ ID NO: 628678 - protein, 16 aa, Homo sapiens
  CDR3 for beta chain variable domain of TCR clone 314339 (TRBV7-8, TRBJ2-4)
CASSAERTLAKNIQYF

SEQ ID NO: 628679 - protein, 11 aa, Homo sapiens
  CDR3 for alpha chain variable domain of TCR clone 314340 (TRAV3, TRAJ21)
CAVGNFNKFYF

SEQ ID NO: 628680 - protein, 16 aa, Homo sapiens
  CDR3 for beta chain variable domain of TCR clone 314340 (TRBV20-1, TRBJ1-2)
CSASMGQCVANYGYTF

SEQ ID NO: 628681 - protein, 11 aa, Homo sapiens
  CDR3 for alpha chain variable domain of TCR clone 314341 (TRAV2, TRAJ13)
CASGGYQTVTL

SEQ ID NO: 628682 - protein, 13 aa, Homo sapiens
  CDR3 for beta chain variable domain of TCR clone 314341 (TRBV6-1, TRBJ1-1)
CASSRQGNTEAFF

SEQ ID NO: 628683 - protein, 13 aa, Homo sapiens
  CDR3 for alpha chain variable domain of TCR clone 314342 (TRAV2, TRAJ23)
CAGRGDWEESVSS

SEQ ID NO: 628684 - protein, 20 aa, Homo sapiens
  CDR3 for beta chain variable domain of TCR clone 314342 (TRBV3-1, TRBJ2-6)
CASSPRPGLEGGAGANVLTF

SEQ ID NO: 628685 - protein, 11 aa, Homo sapiens
  CDR3 for alpha chain variable domain of TCR clone 314343 (TRAV21, TRAJ41)
CAVRSGYALNF

SEQ ID NO: 628686 - protein, 13 aa, Homo sapiens
  CDR3 for beta chain variable domain of TCR clone 314343 (TRBV7-9, TRBJ1-2)
CASSLKQNYGYAV

SEQ ID NO: 628687 - protein, 17 aa, Homo sapiens
  CDR3 for alpha chain variable domain of TCR clone 314344 (TRAV2, TRAJ13)
CATPSYSGVTRKLPLEL

SEQ ID NO: 628688 - protein, 14 aa, Homo sapiens
  CDR3 for beta chain variable domain of TCR clone 314344 (TRBV4-2, TRBJ2-1)
CASGLDRAYNEQFF

SEQ ID NO: 628689 - protein, 14 aa, Homo sapiens
  CDR3 for alpha chain variable domain of TCR clone 314345 (TRAV38-1, TRAJ40)
CALRTTSGTYKYIC

SEQ ID NO: 628690 - protein, 14 aa, Homo sapiens
  CDR3 for beta chain variable domain of TCR clone 314345 (TRBV25-1, TRBJ1-1)
CASTHLGGNTEAFF

SEQ ID NO: 628691 - protein, 15 aa, Homo sapiens
  CDR3 for alpha chain variable domain of TCR clone 314346 (TRAV26-1, TRAJ29)
CIVRVEGSGTTPLVF

SEQ ID NO: 628692 - protein, 15 aa, Homo sapiens
  CDR3 for beta chain variable domain of TCR clone 314346 (TRBV7-9, TRBJ1-5)
CASRQGHQPNQPQHF

SEQ ID NO: 628693 - protein, 14 aa, Homo sapiens
  CDR3 for alpha chain variable domain of TCR clone 314347 (TRAV1-2, TRAJ24)
CAVLTTDSWGKFQF

SEQ ID NO: 628694 - protein, 21 aa, Homo sapiens
  CDR3 for beta chain variable domain of TCR clone 314347 (TRBV6-5, TRBJ1-3)
CASSYWEKIAQGMSSGNTIDF

SEQ ID NO: 628695 - protein, 12 aa, Homo sapiens
  CDR3 for alpha chain variable domain of TCR clone 314348 (TRAV12-3, TRAJ17)
CAMTLTGNKLTF

SEQ ID NO: 628696 - protein, 15 aa, Homo sapiens
  CDR3 for beta chain variable domain of TCR clone 314348 (TRBV5-5, TRBJ2-1)
CASSPEAETYNEQFF

SEQ ID NO: 628697 - protein, 16 aa, Homo sapiens
  CDR3 for alpha chain variable domain of TCR clone 314349 (TRAV3, TRAJ10)
CAVRDMRAGGGNKLTF

SEQ ID NO: 628698 - protein, 10 aa, Homo sapiens
  CDR3 for beta chain variable domain of TCR clone 314349 (TRBV11-2, TRBJ2-1)
PGVEYNEQFF

SEQ ID NO: 628699 - protein, 13 aa, Homo sapiens
  CDR3 for alpha chain variable domain of TCR clone 314350 (TRAV13-1, TRAJ10)
CAATAGGGNKLTF

SEQ ID NO: 628700 - protein, 14 aa, Homo sapiens
  CDR3 for beta chain variable domain of TCR clone 314350 (TRBV12-4, TRBJ2-7)
CDSSPAGLKYEQYF

SEQ ID NO: 628701 - protein, 12 aa, Homo sapiens
  CDR3 for alpha chain variable domain of TCR clone 314351 (TRAV17, TRAJ57)
CATDGGSEKLVF

SEQ ID NO: 628702 - protein, 11 aa, Homo sapiens
  CDR3 for beta chain variable domain of TCR clone 314351 (TRBV29-1, TRBJ2-2)
QAGKYTGELFF

SEQ ID NO: 628703 - protein, 12 aa, Homo sapiens
  CDR3 for alpha chain variable domain of TCR clone 314352 (TRAV8-3, TRAJ26)
CAGDNYGQNFVF

SEQ ID NO: 628704 - protein, 12 aa, Homo sapiens
  CDR3 for beta chain variable domain of TCR clone 314352 (TRBV19, TRBJ2-1)
CASSIQYNEQFF

SEQ ID NO: 628705 - protein, 13 aa, Homo sapiens
  CDR3 for alpha chain variable domain of TCR clone 314353 (TRAV3, TRAJ21)
CAVREPDINKFYF

SEQ ID NO: 628706 - protein, 18 aa, Homo sapiens
  CDR3 for beta chain variable domain of TCR clone 314353 (TRBV11-2, TRBJ2-3)
CASSLGGASRGAPNTQYF

SEQ ID NO: 628707 - protein, 15 aa, Homo sapiens
  CDR3 for alpha chain variable domain of TCR clone 314354 (TRAV21, TRAJ45)
CAVSYSGGGSDGLTF

SEQ ID NO: 628708 - protein, 13 aa, Homo sapiens
  CDR3 for beta chain variable domain of TCR clone 314354 (TRBV20-1, TRBJ2-5)
CSAATELQETQYF

SEQ ID NO: 628709 - protein, 11 aa, Homo sapiens
  CDR3 for alpha chain variable domain of TCR clone 314355 (TRAV2, TRAJ13)
CASGGYQKVTF

SEQ ID NO: 628710 - protein, 15 aa, Homo sapiens
  CDR3 for beta chain variable domain of TCR clone 314355 (TRBV27, TRBJ2-7)
CASSTAGTGSYEQYF

SEQ ID NO: 628711 - protein, 14 aa, Homo sapiens
  CDR3 for alpha chain variable domain of TCR clone 314356 (TRAV12-2, TRAJ13)
CAVKKTGGYQKVTF

SEQ ID NO: 628712 - protein, 14 aa, Homo sapiens
  CDR3 for beta chain variable domain of TCR clone 314356 (TRBV7-2, TRBJ2-5)
CASSTGGELKTQYF

SEQ ID NO: 628713 - protein, 11 aa, Homo sapiens
  CDR3 for alpha chain variable domain of TCR clone 314357 (TRAV12-1, TRAJ30)
CVVNGQDKIIF

SEQ ID NO: 628714 - protein, 12 aa, Homo sapiens
  CDR3 for beta chain variable domain of TCR clone 314357 (TRBV27, TRBJ2-2)
CASKLFTVELFF

SEQ ID NO: 628715 - protein, 13 aa, Homo sapiens
  CDR3 for alpha chain variable domain of TCR clone 314358 (TRAV1-1, TRAJ13)
CAVNSGGYQKVTF

SEQ ID NO: 628716 - protein, 11 aa, Homo sapiens
  CDR3 for beta chain variable domain of TCR clone 314358 (TRBV12-4, TRBJ2-3)
CASTATDTQYF

SEQ ID NO: 628717 - protein, 14 aa, Homo sapiens
  CDR3 for alpha chain variable domain of TCR clone 314359 (TRAV16, TRAJ26)
CALSSANYGQNFVF

SEQ ID NO: 628718 - protein, 16 aa, Homo sapiens
  CDR3 for beta chain variable domain of TCR clone 314359 (TRBV20-1, TRBJ1-4)
CSAPGQGLLTNERLFF

SEQ ID NO: 628719 - protein, 15 aa, Homo sapiens
  CDR3 for alpha chain variable domain of TCR clone 314360 (TRAV17, TRAJ57)
CPTGPSQGGSEKLVF

SEQ ID NO: 628720 - protein, 16 aa, Homo sapiens
  CDR3 for beta chain variable domain of TCR clone 314360 (TRBV12-4, TRBJ1-5)
CASSRPVGGSNQPQHF

SEQ ID NO: 628721 - protein, 14 aa, Homo sapiens
  CDR3 for alpha chain variable domain of TCR clone 314361 (TRAV1-2, TRAJ8)
CAVREDPGFQKLVF

SEQ ID NO: 628722 - protein, 16 aa, Homo sapiens
  CDR3 for beta chain variable domain of TCR clone 314361 (TRBV4-1, TRBJ1-4)
CASSQDLRRGGEKLFF

SEQ ID NO: 628723 - protein, 13 aa, Homo sapiens
  CDR3 for alpha chain variable domain of TCR clone 314362 (TRAV30, TRAJ24)
CGTVTDSWGKLQL

SEQ ID NO: 628724 - protein, 14 aa, Homo sapiens
  CDR3 for beta chain variable domain of TCR clone 314362 (TRBV6-3, TRBJ2-2)
CASTYTPDTRELFF

SEQ ID NO: 628725 - protein, 16 aa, Homo sapiens
  CDR3 for alpha chain variable domain of TCR clone 314363 (TRAV17, TRAJ28)
CATVSVSGAGSYQLTF

SEQ ID NO: 628726 - protein, 11 aa, Homo sapiens
  CDR3 for beta chain variable domain of TCR clone 314363 (TRBV7-9, TRBJ2-5)
CASSLGETQYF

SEQ ID NO: 628727 - protein, 15 aa, Homo sapiens
  CDR3 for alpha chain variable domain of TCR clone 314364 (TRAV12-2, TRAJ42)
CAVNYYGGSQGNLIF

SEQ ID NO: 628728 - protein, 14 aa, Homo sapiens
  CDR3 for beta chain variable domain of TCR clone 314364 (TRBV7-3, TRBJ2-1)
CASSLAGGTNEQFF

SEQ ID NO: 628729 - protein, 13 aa, Homo sapiens
  CDR3 for alpha chain variable domain of TCR clone 314365 (TRAV23/DV6, TRAJ27)
CAASKPMQSNQPL

SEQ ID NO: 628730 - protein, 14 aa, Homo sapiens
  CDR3 for beta chain variable domain of TCR clone 314365 (TRBV5-4, TRBJ1-1)
CASSLDSRRDEAFF

SEQ ID NO: 628731 - protein, 14 aa, Homo sapiens
  CDR3 for alpha chain variable domain of TCR clone 314366 (TRAV34, TRAJ22)
CGADTYGSARQLTF

SEQ ID NO: 628732 - protein, 16 aa, Homo sapiens
  CDR3 for beta chain variable domain of TCR clone 314366 (TRBV2, TRBJ2-3)
CQHRGAPRRWTDTQYF

SEQ ID NO: 628733 - protein, 15 aa, Homo sapiens
  CDR3 for alpha chain variable domain of TCR clone 314367 (TRAV3, TRAJ22)
CAVRDRGGSARQLTF

SEQ ID NO: 628734 - protein, 16 aa, Homo sapiens
  CDR3 for beta chain variable domain of TCR clone 314367 (TRBV5-4, TRBJ2-3)
CASQQQGAGGADTQYF

SEQ ID NO: 628735 - protein, 15 aa, Homo sapiens
  CDR3 for alpha chain variable domain of TCR clone 314368 (TRAV29/DV5, TRAJ40)
CAASEGTPGTYKYIF

SEQ ID NO: 628736 - protein, 15 aa, Homo sapiens
  CDR3 for beta chain variable domain of TCR clone 314368 (TRBV27, TRBJ1-5)
CASKIQGAGNQPQHF

SEQ ID NO: 628737 - protein, 13 aa, Homo sapiens
  CDR3 for alpha chain variable domain of TCR clone 314369 (TRAV5, TRAJ30)
CAEIANRDDKIIF

SEQ ID NO: 628738 - protein, 14 aa, Homo sapiens
  CDR3 for beta chain variable domain of TCR clone 314369 (TRBV4-1, TRBJ2-2)
CASSQAVNTRELFF

SEQ ID NO: 628739 - protein, 15 aa, Homo sapiens
  CDR3 for alpha chain variable domain of TCR clone 314370 (TRAV35, TRAJ52)
CAGPRGGTSYGKLTF

SEQ ID NO: 628740 - protein, 20 aa, Homo sapiens
  CDR3 for beta chain variable domain of TCR clone 314370 (TRBV23-1, TRBJ1-1)
CISAPAVPPPGLDMNTEAFF

SEQ ID NO: 628741 - protein, 12 aa, Homo sapiens
  CDR3 for alpha chain variable domain of TCR clone 314371 (TRAV27, TRAJ13)
GAGAGGYQKVTF

SEQ ID NO: 628742 - protein, 15 aa, Homo sapiens
  CDR3 for beta chain variable domain of TCR clone 314371 (TRBV20-1, TRBJ2-6)
CSARDRGPGANVLTF

SEQ ID NO: 628743 - protein, 10 aa, Homo sapiens
  CDR3 for alpha chain variable domain of TCR clone 314372 (TRAV8-4, TRAJ39)
CAVSGNMLTF

SEQ ID NO: 628744 - protein, 16 aa, Homo sapiens
  CDR3 for beta chain variable domain of TCR clone 314372 (TRBV11-2, TRBJ2-2)
CASSLKRGTLSGELFF

SEQ ID NO: 628745 - protein, 13 aa, Homo sapiens
  CDR3 for alpha chain variable domain of TCR clone 314373 (TRAV12-1, TRAJ40)
CVVPTSGTYKYIF

SEQ ID NO: 628746 - protein, 16 aa, Homo sapiens
  CDR3 for beta chain variable domain of TCR clone 314373 (TRBV7-9, TRBJ1-2)
CASSLGFASGEDGYTF

SEQ ID NO: 628747 - protein, 13 aa, Homo sapiens
  CDR3 for alpha chain variable domain of TCR clone 314374 (TRAV21, TRAJ10)
CAVPTGGGNKLTF

SEQ ID NO: 628748 - protein, 13 aa, Homo sapiens
  CDR3 for beta chain variable domain of TCR clone 314374 (TRBV29-1, TRBJ2-5)
CSVEATAQGTQYF

SEQ ID NO: 628749 - protein, 12 aa, Homo sapiens
  CDR3 for alpha chain variable domain of TCR clone 314375 (TRAV12-3, TRAJ17)
CAMTLTGNKLTF

SEQ ID NO: 628750 - protein, 14 aa, Homo sapiens
  CDR3 for beta chain variable domain of TCR clone 314375 (TRBV7-3, TRBJ2-1)
CASSLAGGTNEQYF

SEQ ID NO: 628751 - protein, 14 aa, Homo sapiens
  CDR3 for alpha chain variable domain of TCR clone 314376 (TRAV21, TRAJ45)
CAVSSGGGADGLTF

SEQ ID NO: 628752 - protein, 12 aa, Homo sapiens
  CDR3 for beta chain variable domain of TCR clone 314376 (TRBV18, TRBJ2-1)
CASSSDEDEQFF

SEQ ID NO: 628753 - protein, 20 aa, Homo sapiens
  CDR3 for alpha chain variable domain of TCR clone 314377 (TRAV27, TRAJ34)
ASTSVQGGGLGDDNTDKLIF

SEQ ID NO: 628754 - protein, 15 aa, Homo sapiens
  CDR3 for beta chain variable domain of TCR clone 314377 (TRBV9, TRBJ1-4)
CASSVGGSTNEKLFF

SEQ ID NO: 628755 - protein, 14 aa, Homo sapiens
  CDR3 for alpha chain variable domain of TCR clone 314378 (TRAV1-2, TRAJ8)
CAVREDTGFQKLVF

SEQ ID NO: 628756 - protein, 14 aa, Homo sapiens
  CDR3 for beta chain variable domain of TCR clone 314378 (TRBV20-1, TRBJ1-1)
CSAQTRIGGTESFF

SEQ ID NO: 628757 - protein, 16 aa, Homo sapiens
  CDR3 for alpha chain variable domain of TCR clone 314379 (TRAV30, TRAJ24)
CGTEIVDANSWGKFQF

SEQ ID NO: 628758 - protein, 13 aa, Homo sapiens
  CDR3 for beta chain variable domain of TCR clone 314379 (TRBV20-1, TRBJ1-1)
CSAPPGGHTEAFF

SEQ ID NO: 628759 - protein, 14 aa, Homo sapiens
  CDR3 for alpha chain variable domain of TCR clone 314380 (TRAV26-1, TRAJ38)
CIADNAGNNRKLNL

SEQ ID NO: 628760 - protein, 15 aa, Homo sapiens
  CDR3 for beta chain variable domain of TCR clone 314380 (TRBV20-1, TRBJ1-1)
CSARGGGTLKLSLDK

SEQ ID NO: 628761 - protein, 16 aa, Homo sapiens
  CDR3 for alpha chain variable domain of TCR clone 314381 (TRAV30, TRAJ24)
CGTEIVDADSWGKFHF

SEQ ID NO: 628762 - protein, 12 aa, Homo sapiens
  CDR3 for beta chain variable domain of TCR clone 314381 (TRBV11-2, TRBJ2-2)
CASSLGGGELFF

SEQ ID NO: 628763 - protein, 13 aa, Homo sapiens
  CDR3 for alpha chain variable domain of TCR clone 314382 (TRAV3, TRAJ27)
CAVRPLGAGKSTF

SEQ ID NO: 628764 - protein, 19 aa, Homo sapiens
  CDR3 for beta chain variable domain of TCR clone 314382 (TRBV2, TRBJ2-7)
CASSRGPNDQGLASYEQYF

SEQ ID NO: 628765 - protein, 16 aa, Homo sapiens
  CDR3 for alpha chain variable domain of TCR clone 314383 (TRAV29/DV5, TRAJ30)
QCTSVQQANRDDKSIF

SEQ ID NO: 628766 - protein, 13 aa, Homo sapiens
  CDR3 for beta chain variable domain of TCR clone 314383 (TRBV12-5, TRBJ2-3)
CASQNRGTDTQYF

SEQ ID NO: 628767 - protein, 18 aa, Homo sapiens
  CDR3 for alpha chain variable domain of TCR clone 314384 (TRAV26-1, TRAJ23)
CIVRVGLEVWNQGGKLIF

SEQ ID NO: 628768 - protein, 16 aa, Homo sapiens
  CDR3 for beta chain variable domain of TCR clone 314384 (TRBV19, TRBJ2-1)
CASSKAGPSSYNEQFF

SEQ ID NO: 628769 - protein, 15 aa, Homo sapiens
  CDR3 for alpha chain variable domain of TCR clone 314385 (TRAV12-1, TRAJ42)
CVVTRDGGSQGNLIF

SEQ ID NO: 628770 - protein, 14 aa, Homo sapiens
  CDR3 for beta chain variable domain of TCR clone 314385 (TRBV11-2, TRBJ2-3)
CASSLGGGPNTQYF

SEQ ID NO: 628771 - protein, 13 aa, Homo sapiens
  CDR3 for alpha chain variable domain of TCR clone 314386 (TRAV12-3, TRAJ7)
CAMTPYGNNRLPF

SEQ ID NO: 628772 - protein, 13 aa, Homo sapiens
  CDR3 for beta chain variable domain of TCR clone 314386 (TRBV10-3, TRBJ1-2)
CAINADLNYGYTF

SEQ ID NO: 628773 - protein, 15 aa, Homo sapiens
  CDR3 for alpha chain variable domain of TCR clone 314387 (TRAV17, TRAJ56)
CATDANTGANSKLTF

SEQ ID NO: 628774 - protein, 14 aa, Homo sapiens
  CDR3 for beta chain variable domain of TCR clone 314387 (TRBV19, TRBJ1-5)
FASSLGTGGQPQHF

SEQ ID NO: 628775 - protein, 13 aa, Homo sapiens
  CDR3 for alpha chain variable domain of TCR clone 314388 (TRAV27, TRAJ3)
ASLRGSSASKIIF

SEQ ID NO: 628776 - protein, 15 aa, Homo sapiens
  CDR3 for beta chain variable domain of TCR clone 314388 (TRBV28, TRBJ1-3)
CASSMGWASGNTMHF

SEQ ID NO: 628777 - protein, 15 aa, Homo sapiens
  CDR3 for alpha chain variable domain of TCR clone 314389 (TRAV29/DV5, TRAJ40)
CAASAQGSGTDKYIF

SEQ ID NO: 628778 - protein, 11 aa, Homo sapiens
  CDR3 for beta chain variable domain of TCR clone 314389 (TRBV29-1, TRBJ2-5)
CSEDRTGTQYF

SEQ ID NO: 628779 - protein, 13 aa, Homo sapiens
  CDR3 for alpha chain variable domain of TCR clone 314390 (TRAV3, TRAJ26)
CAVRPTPGQNFVF

SEQ ID NO: 628780 - protein, 15 aa, Homo sapiens
  CDR3 for beta chain variable domain of TCR clone 314390 (TRBV20-1, TRBJ2-7)
CSARDRVSGMDEQYF

SEQ ID NO: 628781 - protein, 14 aa, Homo sapiens
  CDR3 for alpha chain variable domain of TCR clone 314391 (TRAV17, TRAJ12)
CAILPMDSSYKFIF

SEQ ID NO: 628782 - protein, 11 aa, Homo sapiens
  CDR3 for beta chain variable domain of TCR clone 314391 (TRBV19, TRBJ1-1)
CASSIGSEAFF

SEQ ID NO: 628783 - protein, 18 aa, Homo sapiens
  CDR3 for alpha chain variable domain of TCR clone 314392 (TRAV26-2, TRAJ45)
CILRVDKYSGGGADGRTF

SEQ ID NO: 628784 - protein, 11 aa, Homo sapiens
  CDR3 for beta chain variable domain of TCR clone 314392 (TRBV29-1, TRBJ2-5)
CSEDRTGTQYF

SEQ ID NO: 628785 - protein, 13 aa, Homo sapiens
  CDR3 for alpha chain variable domain of TCR clone 314393 (TRAV3, TRAJ21)
CAVREPDFNKFYF

SEQ ID NO: 628786 - protein, 18 aa, Homo sapiens
  CDR3 for beta chain variable domain of TCR clone 314393 (TRBV20-1, TRBJ2-6)
CSAETTPTHGSGAKVLTF

SEQ ID NO: 628787 - protein, 12 aa, Homo sapiens
  CDR3 for alpha chain variable domain of TCR clone 314394 (TRAV29/DV5, TRAJ49)
CAATDTGNPFYV

SEQ ID NO: 628788 - protein, 12 aa, Homo sapiens
  CDR3 for beta chain variable domain of TCR clone 314394 (TRBV12-4, TRBJ2-7)
CASSLGGYEQYF

SEQ ID NO: 628789 - protein, 14 aa, Homo sapiens
  CDR3 for alpha chain variable domain of TCR clone 314395 (TRAV12-2, TRAJ4)
CAEDLSGGYNKLIF

SEQ ID NO: 628790 - protein, 13 aa, Homo sapiens
  CDR3 for beta chain variable domain of TCR clone 314395 (TRBV7-9, TRBJ1-2)
CASSVRQNYGYTF

SEQ ID NO: 628791 - protein, 13 aa, Homo sapiens
  CDR3 for alpha chain variable domain of TCR clone 314396 (TRAV17, TRAJ15)
CATDARAGTALIF

SEQ ID NO: 628792 - protein, 16 aa, Homo sapiens
  CDR3 for beta chain variable domain of TCR clone 314396 (TRBV11-1, TRBJ2-2)
CASSAEGLKNTGELFF

SEQ ID NO: 628793 - protein, 13 aa, Homo sapiens
  CDR3 for alpha chain variable domain of TCR clone 314397 (TRAV1-2, TRAJ9)
CAALNTGGFKTIF

SEQ ID NO: 628794 - protein, 20 aa, Homo sapiens
  CDR3 for beta chain variable domain of TCR clone 314397 (TRBV28, TRBJ2-1)
CASTHIGRSPGLAGGNEQFF

SEQ ID NO: 628795 - protein, 13 aa, Homo sapiens
  CDR3 for alpha chain variable domain of TCR clone 314398 (TRAV21, TRAJ57)
CAVTQGGSEQLVF

SEQ ID NO: 628796 - protein, 15 aa, Homo sapiens
  CDR3 for beta chain variable domain of TCR clone 314398 (TRBV5-1, TRBJ1-1)
CASSSTTGTNTEAFF

SEQ ID NO: 628797 - protein, 14 aa, Homo sapiens
  CDR3 for alpha chain variable domain of TCR clone 314399 (TRAV26-1, TRAJ38)
CIADNAGNNRKLIW

SEQ ID NO: 628798 - protein, 12 aa, Homo sapiens
  CDR3 for beta chain variable domain of TCR clone 314399 (TRBV5-7, TRBJ1-1)
CASSLGRGKAFF

SEQ ID NO: 628799 - protein, 16 aa, Homo sapiens
  CDR3 for alpha chain variable domain of TCR clone 314400 (TRAV30, TRAJ24)
CGTEIVDADSWGKFQF

SEQ ID NO: 628800 - protein, 18 aa, Homo sapiens
  CDR3 for beta chain variable domain of TCR clone 314400 (TRBV7-9, TRBJ2-7)
CASSLTTSGGRTWYEQYF

SEQ ID NO: 628801 - protein, 14 aa, Homo sapiens
  CDR3 for alpha chain variable domain of TCR clone 314401 (TRAV12-2, TRAJ9)
CVVRGQTGGFKTIF

SEQ ID NO: 628802 - protein, 15 aa, Homo sapiens
  CDR3 for beta chain variable domain of TCR clone 314401 (TRBV7-2, TRBJ2-7)
CASSFTGQGAQEQYF

SEQ ID NO: 628803 - protein, 13 aa, Homo sapiens
  CDR3 for alpha chain variable domain of TCR clone 314402 (TRAV12-3, TRAJ41)
CAIAPNSEYALNF

SEQ ID NO: 628804 - protein, 16 aa, Homo sapiens
  CDR3 for beta chain variable domain of TCR clone 314402 (TRBV7-2, TRBJ1-3)
CASSLGTAETPYILER

SEQ ID NO: 628805 - protein, 14 aa, Homo sapiens
  CDR3 for alpha chain variable domain of TCR clone 314403 (TRAV1-2, TRAJ16)
CAVNRFSDGQKLLF

SEQ ID NO: 628806 - protein, 19 aa, Homo sapiens
  CDR3 for beta chain variable domain of TCR clone 314403 (TRBV18, TRBJ2-1)
CASSPPMGSGRMGYNEQFF

SEQ ID NO: 628807 - protein, 18 aa, Homo sapiens
  CDR3 for alpha chain variable domain of TCR clone 314404 (TRAV21, TRAJ52)
CAVMPSPAGGTSYGKLTF

SEQ ID NO: 628808 - protein, 15 aa, Homo sapiens
  CDR3 for beta chain variable domain of TCR clone 314404 (TRBV19, TRBJ1-1)
CAGTSGQIQNTEAFF

SEQ ID NO: 628809 - protein, 12 aa, Homo sapiens
  CDR3 for alpha chain variable domain of TCR clone 314405 (TRAV27, TRAJ33)
CAGEDSNYQLIW

SEQ ID NO: 628810 - protein, 17 aa, Homo sapiens
  CDR3 for beta chain variable domain of TCR clone 314405 (TRBV7-3, TRBJ1-3)
CASSPLGRGTPGNTIYF

SEQ ID NO: 628811 - protein, 15 aa, Homo sapiens
  CDR3 for alpha chain variable domain of TCR clone 314406 (TRAV12-3, TRAJ49)
SAMAVTPNTGNQFYF

SEQ ID NO: 628812 - protein, 18 aa, Homo sapiens
  CDR3 for beta chain variable domain of TCR clone 314406 (TRBV4-1, TRBJ1-5)
CASSQDPRGQGLNQPQHF

SEQ ID NO: 628813 - protein, 14 aa, Homo sapiens
  CDR3 for alpha chain variable domain of TCR clone 314407 (TRAV1-1, TRAJ27)
CAVIYNTNAGKSTY

SEQ ID NO: 628814 - protein, 14 aa, Homo sapiens
  CDR3 for beta chain variable domain of TCR clone 314407 (TRBV25-1, TRBJ1-1)
CASTHLGGNTEAFF

SEQ ID NO: 628815 - protein, 13 aa, Homo sapiens
  CDR3 for alpha chain variable domain of TCR clone 314408 (TRAV8-1, TRAJ30)
CAVIMNRDDKIIF

SEQ ID NO: 628816 - protein, 14 aa, Homo sapiens
  CDR3 for beta chain variable domain of TCR clone 314408 (TRBV7-2, TRBJ1-6)
CASRLQGANSPLDF

SEQ ID NO: 628817 - protein, 13 aa, Homo sapiens
  CDR3 for alpha chain variable domain of TCR clone 314409 (TRAV13-1, TRAJ48)
CAVVPFGNEKLTF

SEQ ID NO: 628818 - protein, 12 aa, Homo sapiens
  CDR3 for beta chain variable domain of TCR clone 314409 (TRBV11-2, TRBJ2-2)
CASSLGGGELFF

SEQ ID NO: 628819 - protein, 14 aa, Homo sapiens
  CDR3 for alpha chain variable domain of TCR clone 314410 (TRAV16, TRAJ17)
CAPRIKAAGNKLTF

SEQ ID NO: 628820 - protein, 13 aa, Homo sapiens
  CDR3 for beta chain variable domain of TCR clone 314410 (TRBV7-3, TRBJ1-2)
CASSLKRGYGYTF

SEQ ID NO: 628821 - protein, 14 aa, Homo sapiens
  CDR3 for alpha chain variable domain of TCR clone 314411 (TRAV17, TRAJ45)
CATDGRGGADGLTF

SEQ ID NO: 628822 - protein, 13 aa, Homo sapiens
  CDR3 for beta chain variable domain of TCR clone 314411 (TRBV7-2, TRBJ2-5)
CASSLYRQETQYF

SEQ ID NO: 628823 - protein, 17 aa, Homo sapiens
  CDR3 for alpha chain variable domain of TCR clone 314412 (TRAV3, TRAJ6)
CAVRDGPRAGGSYIPTF

SEQ ID NO: 628824 - protein, 15 aa, Homo sapiens
  CDR3 for beta chain variable domain of TCR clone 314412 (TRBV7-6, TRBJ2-3)
CVSSPIIYSTDTQYF

SEQ ID NO: 628825 - protein, 15 aa, Homo sapiens
  CDR3 for alpha chain variable domain of TCR clone 314413 (TRAV3, TRAJ20)
CAVRDIKLSDYKLSF

SEQ ID NO: 628826 - protein, 14 aa, Homo sapiens
  CDR3 for beta chain variable domain of TCR clone 314413 (TRBV20-1, TRBJ2-3)
CSARGGTSTDTQYF

SEQ ID NO: 628827 - protein, 11 aa, Homo sapiens
  CDR3 for alpha chain variable domain of TCR clone 314414 (TRAV2, TRAJ13)
CASGGYQKVTF

SEQ ID NO: 628828 - protein, 12 aa, Homo sapiens
  CDR3 for beta chain variable domain of TCR clone 314414 (TRBV7-3, TRBJ2-7)
CASSLEGYEQYF

SEQ ID NO: 628829 - protein, 14 aa, Homo sapiens
  CDR3 for alpha chain variable domain of TCR clone 314415 (TRAV1-2, TRAJ16)
CAVNRFSDGQKLFF

SEQ ID NO: 628830 - protein, 15 aa, Homo sapiens
  CDR3 for beta chain variable domain of TCR clone 314415 (TRBV4-2, TRBJ1-1)
CASSQQGAGDTEAFF

SEQ ID NO: 628831 - protein, 12 aa, Homo sapiens
  CDR3 for alpha chain variable domain of TCR clone 314416 (TRAV29/DV5, TRAJ43)
CAASGVDNDMRF

SEQ ID NO: 628832 - protein, 16 aa, Homo sapiens
  CDR3 for beta chain variable domain of TCR clone 314416 (TRBV6-4, TRBJ1-2)
CASSEAVGDPNYGYTF

SEQ ID NO: 628833 - protein, 15 aa, Homo sapiens
  CDR3 for alpha chain variable domain of TCR clone 314417 (TRAV3, TRAJ5)
CAVRDLDTGSRALTF

SEQ ID NO: 628834 - protein, 14 aa, Homo sapiens
  CDR3 for beta chain variable domain of TCR clone 314417 (TRBV25-1, TRBJ1-1)
CASTHLGGNTEAFF

SEQ ID NO: 628835 - protein, 17 aa, Homo sapiens
  CDR3 for alpha chain variable domain of TCR clone 314418 (TRAV3, TRAJ6)
CAVRDGPRAGGSYIPTF

SEQ ID NO: 628836 - protein, 19 aa, Homo sapiens
  CDR3 for beta chain variable domain of TCR clone 314418 (TRBV7-2, TRBJ1-5)
CASSLGHGTRSYSNQPQHF

SEQ ID NO: 628837 - protein, 15 aa, Homo sapiens
  CDR3 for alpha chain variable domain of TCR clone 314419 (TRAV26-1, TRAJ40)
CIVRVTTSGTYKYIF

SEQ ID NO: 628838 - protein, 16 aa, Homo sapiens
  CDR3 for beta chain variable domain of TCR clone 314419 (TRBV12-4, TRBJ2-5)
CASSFFVRGRQETQYF

SEQ ID NO: 628839 - protein, 16 aa, Homo sapiens
  CDR3 for alpha chain variable domain of TCR clone 314420 (TRAV4, TRAJ8)
CLVGDSANTGFQKLVF

SEQ ID NO: 628840 - protein, 15 aa, Homo sapiens
  CDR3 for beta chain variable domain of TCR clone 314420 (TRBV15, TRBJ1-2)
CATSRVRASGSGYTF

SEQ ID NO: 628841 - protein, 15 aa, Homo sapiens
  CDR3 for alpha chain variable domain of TCR clone 314421 (TRAV17, TRAJ35)
CATAFVIDFGNVLHC

SEQ ID NO: 628842 - protein, 14 aa, Homo sapiens
  CDR3 for beta chain variable domain of TCR clone 314421 (TRBV12-4, TRBJ2-5)
CASSQSGGGETQYF

SEQ ID NO: 628843 - protein, 17 aa, Homo sapiens
  CDR3 for alpha chain variable domain of TCR clone 314422 (TRAV3, TRAJ6)
CAVRDGPRAGGSYIPTF

SEQ ID NO: 628844 - protein, 15 aa, Homo sapiens
  CDR3 for beta chain variable domain of TCR clone 314422 (TRBV11-3, TRBJ2-7)
CASSPGLASSYEQYF

SEQ ID NO: 628845 - protein, 13 aa, Homo sapiens
  CDR3 for alpha chain variable domain of TCR clone 314423 (TRAV21, TRAJ27)
CAARPGNAGKSTF

SEQ ID NO: 628846 - protein, 14 aa, Homo sapiens
  CDR3 for beta chain variable domain of TCR clone 314423 (TRBV7-6, TRBJ2-3)
CASRLWTVTDTQYF

SEQ ID NO: 628847 - protein, 12 aa, Homo sapiens
  CDR3 for alpha chain variable domain of TCR clone 314424 (TRAV12-3, TRAJ17)
CAMTLTGNKLTF

SEQ ID NO: 628848 - protein, 15 aa, Homo sapiens
  CDR3 for beta chain variable domain of TCR clone 314424 (TRBV20-1, TRBJ2-7)
CSAGERVAGMDEQYF

SEQ ID NO: 628849 - protein, 14 aa, Homo sapiens
  CDR3 for alpha chain variable domain of TCR clone 314425 (TRAV3, TRAJ9)
CAVRLNTGGSKTIF

SEQ ID NO: 628850 - protein, 16 aa, Homo sapiens
  CDR3 for beta chain variable domain of TCR clone 314425 (TRBV12-5, TRBJ2-5)
CASGPRTSGNQETQYF

SEQ ID NO: 628851 - protein, 11 aa, Homo sapiens
  CDR3 for alpha chain variable domain of TCR clone 314426 (TRAV2, TRAJ13)
CASGGYQKVTF

SEQ ID NO: 628852 - protein, 16 aa, Homo sapiens
  CDR3 for beta chain variable domain of TCR clone 314426 (TRBV2, TRBJ2-1)
CASSVGGSLSYNEHFF

SEQ ID NO: 628853 - protein, 13 aa, Homo sapiens
  CDR3 for alpha chain variable domain of TCR clone 314427 (TRAV21, TRAJ45)
CAVMGGGADGLTF

SEQ ID NO: 628854 - protein, 15 aa, Homo sapiens
  CDR3 for beta chain variable domain of TCR clone 314427 (TRBV7-6, TRBJ2-1)
CASSSLAGEGNEQFF

SEQ ID NO: 628855 - protein, 14 aa, Homo sapiens
  CDR3 for alpha chain variable domain of TCR clone 314428 (TRAV1-2, TRAJ8)
CAVREDTGLQKLVF

SEQ ID NO: 628856 - protein, 15 aa, Homo sapiens
  CDR3 for beta chain variable domain of TCR clone 314428 (TRBV6-3, TRBJ2-7)
CASRSPGTVFYEQYF

SEQ ID NO: 628857 - protein, 17 aa, Homo sapiens
  CDR3 for alpha chain variable domain of TCR clone 314429 (TRAV16, TRAJ58)
CITVLSNGETSGSRLTF

SEQ ID NO: 628858 - protein, 12 aa, Homo sapiens
  CDR3 for beta chain variable domain of TCR clone 314429 (TRBV7-8, TRBJ2-7)
CASSLGDREQYF

SEQ ID NO: 628859 - protein, 14 aa, Homo sapiens
  CDR3 for alpha chain variable domain of TCR clone 314430 (TRAV35, TRAJ22)
LAGLRPGSARQLTF

SEQ ID NO: 628860 - protein, 15 aa, Homo sapiens
  CDR3 for beta chain variable domain of TCR clone 314430 (TRBV12-4, TRBJ2-5)
CASSPPTGLQETQYF

SEQ ID NO: 628861 - protein, 15 aa, Homo sapiens
  CDR3 for alpha chain variable domain of TCR clone 314431 (TRAV3, TRAJ5)
CAVRDLDTGRIALTF

SEQ ID NO: 628862 - protein, 15 aa, Homo sapiens
  CDR3 for beta chain variable domain of TCR clone 314431 (TRBV20-1, TRBJ2-1)
CSARSPRGPGNEQFF

SEQ ID NO: 628863 - protein, 12 aa, Homo sapiens
  CDR3 for alpha chain variable domain of TCR clone 314432 (TRAV22, TRAJ22)
CAPGGSARQLTF

SEQ ID NO: 628864 - protein, 21 aa, Homo sapiens
  CDR3 for beta chain variable domain of TCR clone 314432 (TRBV15, TRBJ1-6)
AWGTQPCTCVPPRGALIHPYF

SEQ ID NO: 628865 - protein, 17 aa, Homo sapiens
  CDR3 for alpha chain variable domain of TCR clone 314433 (TRAV3, TRAJ6)
CVVREGPRAGGSYIPTF

SEQ ID NO: 628866 - protein, 14 aa, Homo sapiens
  CDR3 for beta chain variable domain of TCR clone 314433 (TRBV7-2, TRBJ2-7)
CASSPKTSFYEQYF

SEQ ID NO: 628867 - protein, 13 aa, Homo sapiens
  CDR3 for alpha chain variable domain of TCR clone 314434 (TRAV21, TRAJ57)
CAVTQGGSEKLVF

SEQ ID NO: 628868 - protein, 14 aa, Homo sapiens
  CDR3 for beta chain variable domain of TCR clone 314434 (TRBV27, TRBJ1-1)
CASSLLSGLSEAFF

SEQ ID NO: 628869 - protein, 12 aa, Homo sapiens
  CDR3 for alpha chain variable domain of TCR clone 314435 (TRAV12-1, TRAJ30)
CVVNPRDDKIIF

SEQ ID NO: 628870 - protein, 16 aa, Homo sapiens
  CDR3 for beta chain variable domain of TCR clone 314435 (TRBV4-2, TRBJ2-3)
CASSQELAGDTDTQHF

SEQ ID NO: 628871 - protein, 12 aa, Homo sapiens
  CDR3 for alpha chain variable domain of TCR clone 314436 (TRAV12-3, TRAJ17)
CAMTLTGNKLTF

SEQ ID NO: 628872 - protein, 15 aa, Homo sapiens
  CDR3 for beta chain variable domain of TCR clone 314436 (TRBV9, TRBJ1-6)
CASSGAGTGDSPLHF

SEQ ID NO: 628873 - protein, 22 aa, Homo sapiens
  CDR3 for alpha chain variable domain of TCR clone 314437 (TRAV1-1, TRAJ35)
CAVRSIGFGNVLHCGSGPPVIV

SEQ ID NO: 628874 - protein, 14 aa, Homo sapiens
  CDR3 for beta chain variable domain of TCR clone 314437 (TRBV19, TRBJ2-1)
CASPTFVLSGEQFF

SEQ ID NO: 628875 - protein, 17 aa, Homo sapiens
  CDR3 for alpha chain variable domain of TCR clone 314438 (TRAV26-1, TRAJ37)
CIVRVITVSSNTGKLIF

SEQ ID NO: 628876 - protein, 14 aa, Homo sapiens
  CDR3 for beta chain variable domain of TCR clone 314438 (TRBV11-2, TRBJ2-1)
CASTTGQGNNEQFF

SEQ ID NO: 628877 - protein, 12 aa, Homo sapiens
  CDR3 for alpha chain variable domain of TCR clone 314439 (TRAV3, TRAJ20)
CAVRDPDYKPSF

SEQ ID NO: 628878 - protein, 11 aa, Homo sapiens
  CDR3 for beta chain variable domain of TCR clone 314439 (TRBV28, TRBJ2-5)
CASSLKETQYF

SEQ ID NO: 628879 - protein, 15 aa, Homo sapiens
  CDR3 for alpha chain variable domain of TCR clone 314440 (TRAV27, TRAJ38)
CAARRNAGNNRKLIW

SEQ ID NO: 628880 - protein, 14 aa, Homo sapiens
  CDR3 for beta chain variable domain of TCR clone 314440 (TRBV9, TRBJ2-5)
CASSVDGAEETQYF

SEQ ID NO: 628881 - protein, 15 aa, Homo sapiens
  CDR3 for alpha chain variable domain of TCR clone 314441 (TRAV12-1, TRAJ45)
CVVLSGGGGAEGLTF

SEQ ID NO: 628882 - protein, 15 aa, Homo sapiens
  CDR3 for beta chain variable domain of TCR clone 314441 (TRBV20-1, TRBJ2-7)
CSARDRVSGMDEQYF

SEQ ID NO: 628883 - protein, 14 aa, Homo sapiens
  CDR3 for alpha chain variable domain of TCR clone 314442 (TRAV8-3, TRAJ4)
CAVGAAGGYNKLIF

SEQ ID NO: 628884 - protein, 15 aa, Homo sapiens
  CDR3 for beta chain variable domain of TCR clone 314442 (TRBV6-5, TRBJ1-2)
CASSYSPPRFYGYAF

SEQ ID NO: 628885 - protein, 12 aa, Homo sapiens
  CDR3 for alpha chain variable domain of TCR clone 314443 (TRAV12-1, TRAJ31)
CVVSLLRARLMF

SEQ ID NO: 628886 - protein, 15 aa, Homo sapiens
  CDR3 for beta chain variable domain of TCR clone 314443 (TRBV3-1, TRBJ1-2)
CASSHTGQGGYGDTF

SEQ ID NO: 628887 - protein, 14 aa, Homo sapiens
  CDR3 for alpha chain variable domain of TCR clone 314444 (TRAV1-2, TRAJ16)
CSVNRFSDGQKLLF

SEQ ID NO: 628888 - protein, 13 aa, Homo sapiens
  CDR3 for beta chain variable domain of TCR clone 314444 (TRBV20-1, TRBJ1-1)
CSARLGQGTEAFF

SEQ ID NO: 628889 - protein, 16 aa, Homo sapiens
  CDR3 for alpha chain variable domain of TCR clone 314445 (TRAV23/DV6, TRAJ9)
CAASIGGNTGGFKTIF

SEQ ID NO: 628890 - protein, 15 aa, Homo sapiens
  CDR3 for beta chain variable domain of TCR clone 314445 (TRBV12-4, TRBJ1-1)
CTSVPAVRTGFEAFF

SEQ ID NO: 628891 - protein, 15 aa, Homo sapiens
  CDR3 for alpha chain variable domain of TCR clone 314446 (TRAV8-3, TRAJ27)
CAVGPSKTNAGKSTF

SEQ ID NO: 628892 - protein, 16 aa, Homo sapiens
  CDR3 for beta chain variable domain of TCR clone 314446 (TRBV7-3, TRBJ2-1)
RASSLLVGELVDEQFF

SEQ ID NO: 628893 - protein, 13 aa, Homo sapiens
  CDR3 for alpha chain variable domain of TCR clone 314447 (TRAV21, TRAJ20)
CAVGLRVDYKLSF

SEQ ID NO: 628894 - protein, 13 aa, Homo sapiens
  CDR3 for beta chain variable domain of TCR clone 314447 (TRBV6-1, TRBJ1-1)
CTSSRQGNTGAFF

SEQ ID NO: 628895 - protein, 15 aa, Homo sapiens
  CDR3 for alpha chain variable domain of TCR clone 314448 (TRAV12-2, TRAJ31)
CAVNLRIPNNARLMF

SEQ ID NO: 628896 - protein, 14 aa, Homo sapiens
  CDR3 for beta chain variable domain of TCR clone 314448 (TRBV7-2, TRBJ2-7)
CASRSQGAAYEQYF

SEQ ID NO: 628897 - protein, 11 aa, Homo sapiens
  CDR3 for alpha chain variable domain of TCR clone 314449 (TRAV12-2, TRAJ29)
CAVTLRSPLVF

SEQ ID NO: 628898 - protein, 16 aa, Homo sapiens
  CDR3 for beta chain variable domain of TCR clone 314449 (TRBV4-3, TRBJ2-2)
CASSHLQGSGTGELFF

SEQ ID NO: 628899 - protein, 14 aa, Homo sapiens
  CDR3 for alpha chain variable domain of TCR clone 314450 (TRAV8-3, TRAJ12)
CAVGARDSSYKLIF

SEQ ID NO: 628900 - protein, 16 aa, Homo sapiens
  CDR3 for beta chain variable domain of TCR clone 314450 (TRBV4-3, TRBJ2-2)
CASSHLQGSGTGELFF

SEQ ID NO: 628901 - protein, 15 aa, Homo sapiens
  CDR3 for alpha chain variable domain of TCR clone 314451 (TRAV8-3, TRAJ11)
CAVGLWNSGYSTLTF

SEQ ID NO: 628902 - protein, 14 aa, Homo sapiens
  CDR3 for beta chain variable domain of TCR clone 314451 (TRBV4-1, TRBJ2-5)
CASSRSGSGETQYF

SEQ ID NO: 628903 - protein, 12 aa, Homo sapiens
  CDR3 for alpha chain variable domain of TCR clone 314452 (TRAV3, TRAJ26)
CAVRDYGQNFVF

SEQ ID NO: 628904 - protein, 15 aa, Homo sapiens
  CDR3 for beta chain variable domain of TCR clone 314452 (TRBV28, TRBJ1-2)
CASSGSEQRAFGYTF

SEQ ID NO: 628905 - protein, 14 aa, Homo sapiens
  CDR3 for alpha chain variable domain of TCR clone 314453 (TRAV38-1, TRAJ45)
CAYYSGGGADGLTF

SEQ ID NO: 628906 - protein, 11 aa, Homo sapiens
  CDR3 for beta chain variable domain of TCR clone 314453 (TRBV12-4, TRBJ2-2)
CASSSAGELFF

SEQ ID NO: 628907 - protein, 18 aa, Homo sapiens
  CDR3 for alpha chain variable domain of TCR clone 314454 (TRAV13-1, TRAJ52)
CAAKNPNAGGTSYGKLTF

SEQ ID NO: 628908 - protein, 14 aa, Homo sapiens
  CDR3 for beta chain variable domain of TCR clone 314454 (TRBV28, TRBJ1-2)
CASRIQGANYGYTF

SEQ ID NO: 628909 - protein, 14 aa, Homo sapiens
  CDR3 for alpha chain variable domain of TCR clone 314455 (TRAV1-2, TRAJ6)
CAVSLSGGSYITTF

SEQ ID NO: 628910 - protein, 15 aa, Homo sapiens
  CDR3 for beta chain variable domain of TCR clone 314455 (TRBV28, TRBJ2-7)
CASSPGGGGFYEQYF

SEQ ID NO: 628911 - protein, 16 aa, Homo sapiens
  CDR3 for alpha chain variable domain of TCR clone 314456 (TRAV3, TRAJ37)
CAVRGKGSGNTGKLIF

SEQ ID NO: 628912 - protein, 15 aa, Homo sapiens
  CDR3 for beta chain variable domain of TCR clone 314456 (TRBV6-5, TRBJ2-7)
CASSRTSGFSYEQYF

SEQ ID NO: 628913 - protein, 18 aa, Homo sapiens
  CDR3 for alpha chain variable domain of TCR clone 314457 (TRAV13-1, TRAJ52)
CAAKNPNAGGTSYGKLTF

SEQ ID NO: 628914 - protein, 16 aa, Homo sapiens
  CDR3 for beta chain variable domain of TCR clone 314457 (TRBV2, TRBJ2-3)
CASSTSVEGGNRYAVF

SEQ ID NO: 628915 - protein, 16 aa, Homo sapiens
  CDR3 for alpha chain variable domain of TCR clone 314458 (TRAV38-1, TRAJ37)
CAFKGDSSSNTGKLIF

SEQ ID NO: 628916 - protein, 13 aa, Homo sapiens
  CDR3 for beta chain variable domain of TCR clone 314458 (TRBV12-4, TRBJ2-5)
CASSLFRRETQYF

SEQ ID NO: 628917 - protein, 13 aa, Homo sapiens
  CDR3 for alpha chain variable domain of TCR clone 314459 (TRAV23/DV6, TRAJ40)
CSKPYLRNLQYIF

SEQ ID NO: 628918 - protein, 14 aa, Homo sapiens
  CDR3 for beta chain variable domain of TCR clone 314459 (TRBV5-1, TRBJ2-3)
CASSRGQGGGTQYF

SEQ ID NO: 628919 - protein, 15 aa, Homo sapiens
  CDR3 for alpha chain variable domain of TCR clone 314460 (TRAV12-3, TRAJ13)
CAMSARSGGYQKVTF

SEQ ID NO: 628920 - protein, 14 aa, Homo sapiens
  CDR3 for beta chain variable domain of TCR clone 314460 (TRBV18, TRBJ2-5)
CASSPGVSQETQYF

SEQ ID NO: 628921 - protein, 14 aa, Homo sapiens
  CDR3 for alpha chain variable domain of TCR clone 314461 (TRAV8-4, TRAJ34)
CAVSDPGDNDKLIF

SEQ ID NO: 628922 - protein, 15 aa, Homo sapiens
  CDR3 for beta chain variable domain of TCR clone 314461 (TRBV6-6, TRBJ1-1)
CASSPRGDVETEAFF

SEQ ID NO: 628923 - protein, 12 aa, Homo sapiens
  CDR3 for alpha chain variable domain of TCR clone 314462 (TRAV36/DV7, TRAJ26)
CAADNYGQNFVF

SEQ ID NO: 628924 - protein, 14 aa, Homo sapiens
  CDR3 for beta chain variable domain of TCR clone 314462 (TRBV20-1, TRBJ1-1)
CSAQTRIGGTEAFF

SEQ ID NO: 628925 - protein, 14 aa, Homo sapiens
  CDR3 for alpha chain variable domain of TCR clone 314463 (TRAV12-2, TRAJ15)
CAPHTGQAGTALIF

SEQ ID NO: 628926 - protein, 12 aa, Homo sapiens
  CDR3 for beta chain variable domain of TCR clone 314463 (TRBV12-4, TRBJ2-3)
CASSTLPDTQCF

SEQ ID NO: 628927 - protein, 11 aa, Homo sapiens
  CDR3 for alpha chain variable domain of TCR clone 314464 (TRAV21, TRAJ34)
CAVTNTDNLIF

SEQ ID NO: 628928 - protein, 15 aa, Homo sapiens
  CDR3 for beta chain variable domain of TCR clone 314464 (TRBV20-1, TRBJ2-1)
CSARSPSGGPPTMSS

SEQ ID NO: 628929 - protein, 16 aa, Homo sapiens
  CDR3 for alpha chain variable domain of TCR clone 314465 (TRAV12-3, TRAJ53)
CAMSPGSGGSNYKLTL

SEQ ID NO: 628930 - protein, 14 aa, Homo sapiens
  CDR3 for beta chain variable domain of TCR clone 314465 (TRBV15, TRBJ2-5)
CATSIGGLGETQYF

SEQ ID NO: 628931 - protein, 14 aa, Homo sapiens
  CDR3 for alpha chain variable domain of TCR clone 314466 (TRAV12-1, TRAJ23)
CVVMIYNQGGKLIF

SEQ ID NO: 628932 - protein, 23 aa, Homo sapiens
  CDR3 for beta chain variable domain of TCR clone 314466 (TRBV7-3, TRBJ1-6)
CASSLTSRDEASDPSSYNSPLHC

SEQ ID NO: 628933 - protein, 14 aa, Homo sapiens
  CDR3 for alpha chain variable domain of TCR clone 314467 (TRAV12-2, TRAJ13)
CAVKKTGGYQKGTF

SEQ ID NO: 628934 - protein, 15 aa, Homo sapiens
  CDR3 for beta chain variable domain of TCR clone 314467 (TRBV27, TRBJ2-1)
CASSYGGGSSNEQFF

SEQ ID NO: 628935 - protein, 12 aa, Homo sapiens
  CDR3 for alpha chain variable domain of TCR clone 314468 (TRAV20, TRAJ39)
CAVGNAGNMLTF

SEQ ID NO: 628936 - protein, 15 aa, Homo sapiens
  CDR3 for beta chain variable domain of TCR clone 314468 (TRBV29-1, TRBJ2-7)
CVEDAEDGTAYEQYF

SEQ ID NO: 628937 - protein, 13 aa, Homo sapiens
  CDR3 for alpha chain variable domain of TCR clone 314469 (TRAV13-1, TRAJ6)
CAARRGGSYIPKF

SEQ ID NO: 628938 - protein, 16 aa, Homo sapiens
  CDR3 for beta chain variable domain of TCR clone 314469 (TRBV20-1, TRBJ1-4)
CSAPGQGLLTNEKLFF

SEQ ID NO: 628939 - protein, 13 aa, Homo sapiens
  CDR3 for alpha chain variable domain of TCR clone 314470 (TRAV20, TRAJ37)
CAGCSSNTGKLIF

SEQ ID NO: 628940 - protein, 14 aa, Homo sapiens
  CDR3 for beta chain variable domain of TCR clone 314470 (TRBV19, TRBJ1-5)
CASSKMTGPQPQHF

SEQ ID NO: 628941 - protein, 15 aa, Homo sapiens
  CDR3 for alpha chain variable domain of TCR clone 314471 (TRAV38-2/DV8, TRAJ57)
GASARAQGGSEKLVF

SEQ ID NO: 628942 - protein, 17 aa, Homo sapiens
  CDR3 for beta chain variable domain of TCR clone 314471 (TRBV18, TRBJ1-5)
CASSPTMGQGTNQPQHF

SEQ ID NO: 628943 - protein, 13 aa, Homo sapiens
  CDR3 for alpha chain variable domain of TCR clone 314472 (TRAV1-2, TRAJ9)
CSALNTGGFKTIF

SEQ ID NO: 628944 - protein, 15 aa, Homo sapiens
  CDR3 for beta chain variable domain of TCR clone 314472 (TRBV6-3, TRBJ2-7)
CASSSPGTVFYEQYF

SEQ ID NO: 628945 - protein, 16 aa, Homo sapiens
  CDR3 for alpha chain variable domain of TCR clone 314473 (TRAV1-2, TRAJ18)
CAVGVERGSTLGRLYF

SEQ ID NO: 628946 - protein, 16 aa, Homo sapiens
  CDR3 for beta chain variable domain of TCR clone 314473 (TRBV20-1, TRBJ2-7)
CSASTSGRLSSYEQYF

SEQ ID NO: 628947 - protein, 18 aa, Homo sapiens
  CDR3 for alpha chain variable domain of TCR clone 314474 (TRAV1-1, TRAJ3)
CAVRFHSTGYSSASKIIF

SEQ ID NO: 628948 - protein, 13 aa, Homo sapiens
  CDR3 for beta chain variable domain of TCR clone 314474 (TRBV4-1, TRBJ2-2)
CASSQENTGELFF

SEQ ID NO: 628949 - protein, 11 aa, Homo sapiens
  CDR3 for alpha chain variable domain of TCR clone 314475 (TRAV16, TRAJ33)
CALHSNYQLIW

SEQ ID NO: 628950 - protein, 17 aa, Homo sapiens
  CDR3 for beta chain variable domain of TCR clone 314475 (TRBV25-1, TRBJ2-1)
CASSAYGQGRGVYEQFF

SEQ ID NO: 628951 - protein, 11 aa, Homo sapiens
  CDR3 for alpha chain variable domain of TCR clone 314476 (TRAV35, TRAJ34)
CWARNTDKLIF

SEQ ID NO: 628952 - protein, 13 aa, Homo sapiens
  CDR3 for beta chain variable domain of TCR clone 314476 (TRBV7-2, TRBJ2-2)
CASSSVRAGELFF

SEQ ID NO: 628953 - protein, 13 aa, Homo sapiens
  CDR3 for alpha chain variable domain of TCR clone 314477 (TRAV16, TRAJ15)
CSKWPPGRNSLIF

SEQ ID NO: 628954 - protein, 12 aa, Homo sapiens
  CDR3 for beta chain variable domain of TCR clone 314477 (TRBV18, TRBJ2-5)
CASSPSKETQYF

SEQ ID NO: 628955 - protein, 13 aa, Homo sapiens
  CDR3 for alpha chain variable domain of TCR clone 314478 (TRAV8-3, TRAJ28)
CAVGAVGSYQLSF

SEQ ID NO: 628956 - protein, 14 aa, Homo sapiens
  CDR3 for beta chain variable domain of TCR clone 314478 (TRBV25-1, TRBJ1-1)
CASTHLGGNTEAFF

SEQ ID NO: 628957 - protein, 15 aa, Homo sapiens
  CDR3 for alpha chain variable domain of TCR clone 314479 (TRAV21, TRAJ52)
CATRGGGTSYGKLTF

SEQ ID NO: 628958 - protein, 12 aa, Homo sapiens
  CDR3 for beta chain variable domain of TCR clone 314479 (TRBV7-8, TRBJ2-7)
CASSLGDREQYF

SEQ ID NO: 628959 - protein, 14 aa, Homo sapiens
  CDR3 for alpha chain variable domain of TCR clone 314480 (TRAV8-3, TRAJ9)
CAVVYNTGSFKTIF

SEQ ID NO: 628960 - protein, 14 aa, Homo sapiens
  CDR3 for beta chain variable domain of TCR clone 314480 (TRBV7-3, TRBJ2-2)
CASSAGGYTGELFF

SEQ ID NO: 628961 - protein, 22 aa, Homo sapiens
  CDR3 for alpha chain variable domain of TCR clone 314481 (TRAV26-2, TRAJ45)
CCVLLHPERQGRSGGGAAGLTF

SEQ ID NO: 628962 - protein, 15 aa, Homo sapiens
  CDR3 for beta chain variable domain of TCR clone 314481 (TRBV7-6, TRBJ2-5)
CASSKPTGPQETQYF

SEQ ID NO: 628963 - protein, 17 aa, Homo sapiens
  CDR3 for alpha chain variable domain of TCR clone 314482 (TRAV17, TRAJ28)
CATDPRRGGAGGYQLPF

SEQ ID NO: 628964 - protein, 16 aa, Homo sapiens
  CDR3 for beta chain variable domain of TCR clone 314482 (TRBV25-1, TRBJ1-1)
CASSGDRDRGRIEAFF

SEQ ID NO: 628965 - protein, 16 aa, Homo sapiens
  CDR3 for alpha chain variable domain of TCR clone 314483 (TRAV26-1, TRAJ23)
CIVRPRFYNQGGKLIF

SEQ ID NO: 628966 - protein, 13 aa, Homo sapiens
  CDR3 for beta chain variable domain of TCR clone 314483 (TRBV20-1, TRBJ1-1)
CSARGGGKTEAFF

SEQ ID NO: 628967 - protein, 18 aa, Homo sapiens
  CDR3 for alpha chain variable domain of TCR clone 314484 (TRAV17, TRAJ45)
CSTSLDLYSGVGADGLTF

SEQ ID NO: 628968 - protein, 13 aa, Homo sapiens
  CDR3 for beta chain variable domain of TCR clone 314484 (TRBV10-3, TRBJ2-7)
CASKLAVNYEQYF

SEQ ID NO: 628969 - protein, 11 aa, Homo sapiens
  CDR3 for alpha chain variable domain of TCR clone 314485 (TRAV13-2, TRAJ54)
RAVQGAQKLVF

SEQ ID NO: 628970 - protein, 14 aa, Homo sapiens
  CDR3 for beta chain variable domain of TCR clone 314485 (TRBV5-1, TRBJ1-5)
CASSLGQGAQPQHF

SEQ ID NO: 628971 - protein, 14 aa, Homo sapiens
  CDR3 for alpha chain variable domain of TCR clone 314486 (TRAV12-1, TRAJ3)
CGAARYSSASTLIF

SEQ ID NO: 628972 - protein, 15 aa, Homo sapiens
  CDR3 for beta chain variable domain of TCR clone 314486 (TRBV7-2, TRBJ2-6)
CASSREGSGANVLTF

SEQ ID NO: 628973 - protein, 11 aa, Homo sapiens
  CDR3 for alpha chain variable domain of TCR clone 314487 (TRAV27, TRAJ47)
SLVEYGNKLGF

SEQ ID NO: 628974 - protein, 18 aa, Homo sapiens
  CDR3 for beta chain variable domain of TCR clone 314487 (TRBV2, TRBJ2-1)
CASRGLAGGPRTYNEQFF

SEQ ID NO: 628975 - protein, 10 aa, Homo sapiens
  CDR3 for alpha chain variable domain of TCR clone 314488 (TRAV12-1, TRAJ26)
CVAYGQNFVF

SEQ ID NO: 628976 - protein, 15 aa, Homo sapiens
  CDR3 for beta chain variable domain of TCR clone 314488 (TRBV12-4, TRBJ2-5)
CASSGTGQAQETQYF

SEQ ID NO: 628977 - protein, 12 aa, Homo sapiens
  CDR3 for alpha chain variable domain of TCR clone 314489 (TRAV8-1, TRAJ42)
CAVGGSQGNLIF

SEQ ID NO: 628978 - protein, 13 aa, Homo sapiens
  CDR3 for beta chain variable domain of TCR clone 314489 (TRBV5-1, TRBJ2-3)
CASSLEDAYTQYF

SEQ ID NO: 628979 - protein, 13 aa, Homo sapiens
  CDR3 for alpha chain variable domain of TCR clone 314490 (TRAV3, TRAJ26)
CAVSRGYGQNFVF

SEQ ID NO: 628980 - protein, 14 aa, Homo sapiens
  CDR3 for beta chain variable domain of TCR clone 314490 (TRBV5-7, TRBJ2-7)
CASSFKGATGEQYF

SEQ ID NO: 628981 - protein, 18 aa, Homo sapiens
  CDR3 for alpha chain variable domain of TCR clone 314491 (TRAV13-1, TRAJ52)
CAASKRSGGGTSYGKLTF

SEQ ID NO: 628982 - protein, 13 aa, Homo sapiens
  CDR3 for beta chain variable domain of TCR clone 314491 (TRBV12-4, TRBJ1-2)
CASSLRQGKGYTF

SEQ ID NO: 628983 - protein, 14 aa, Homo sapiens
  CDR3 for alpha chain variable domain of TCR clone 314492 (TRAV12-2, TRAJ24)
CAVTPADSWGKLQF

SEQ ID NO: 628984 - protein, 15 aa, Homo sapiens
  CDR3 for beta chain variable domain of TCR clone 314492 (TRBV5-1, TRBJ2-7)
CASSLNGGPAREQYF

SEQ ID NO: 628985 - protein, 14 aa, Homo sapiens
  CDR3 for alpha chain variable domain of TCR clone 314493 (TRAV17, TRAJ32)
CATDPGGATNKLIF

SEQ ID NO: 628986 - protein, 18 aa, Homo sapiens
  CDR3 for beta chain variable domain of TCR clone 314493 (TRBV5-4, TRBJ2-3)
CASSPTAGFLPSTDTQYF

SEQ ID NO: 628987 - protein, 14 aa, Homo sapiens
  CDR3 for alpha chain variable domain of TCR clone 314494 (TRAV14/DV4, TRAJ54)
CAMREAPGAQKLVF

SEQ ID NO: 628988 - protein, 15 aa, Homo sapiens
  CDR3 for beta chain variable domain of TCR clone 314494 (TRBV7-3, TRBJ2-1)
CASSPTGGGEVEQFF

SEQ ID NO: 628989 - protein, 13 aa, Homo sapiens
  CDR3 for alpha chain variable domain of TCR clone 314495 (TRAV29/DV5, TRAJ31)
CAASRNNNARLMF

SEQ ID NO: 628990 - protein, 12 aa, Homo sapiens
  CDR3 for beta chain variable domain of TCR clone 314495 (TRBV14, TRBJ2-5)
SASSQLKETQYF

SEQ ID NO: 628991 - protein, 12 aa, Homo sapiens
  CDR3 for alpha chain variable domain of TCR clone 314496 (TRAV23/DV6, TRAJ24)
CAANDSWVKLQF

SEQ ID NO: 628992 - protein, 16 aa, Homo sapiens
  CDR3 for beta chain variable domain of TCR clone 314496 (TRBV12-4, TRBJ2-5)
CASSLSTSGGKETQYF

SEQ ID NO: 628993 - protein, 14 aa, Homo sapiens
  CDR3 for alpha chain variable domain of TCR clone 314497 (TRAV8-3, TRAJ6)
CAVSSSGGSYIPTF

SEQ ID NO: 628994 - protein, 15 aa, Homo sapiens
  CDR3 for beta chain variable domain of TCR clone 314497 (TRBV7-2, TRBJ1-2)
CASSPRAGLNYGYTF

SEQ ID NO: 628995 - protein, 14 aa, Homo sapiens
  CDR3 for alpha chain variable domain of TCR clone 314498 (TRAV3, TRAJ34)
CSVRARGTPTSSSF

SEQ ID NO: 628996 - protein, 15 aa, Homo sapiens
  CDR3 for beta chain variable domain of TCR clone 314498 (TRBV6-3, TRBJ2-7)
CASSSPGTVFYEQYF

SEQ ID NO: 628997 - protein, 11 aa, Homo sapiens
  CDR3 for alpha chain variable domain of TCR clone 314499 (TRAV2, TRAJ13)
CASGGYQKVTF

SEQ ID NO: 628998 - protein, 19 aa, Homo sapiens
  CDR3 for beta chain variable domain of TCR clone 314499 (TRBV7-2, TRBJ2-3)
CASSFLSRKWGGGTDTQYF

SEQ ID NO: 628999 - protein, 11 aa, Homo sapiens
  CDR3 for alpha chain variable domain of TCR clone 314500 (TRAV12-1, TRAJ30)
CVVNGQDKIIF

SEQ ID NO: 629000 - protein, 12 aa, Homo sapiens
  CDR3 for beta chain variable domain of TCR clone 314500 (TRBV27, TRBJ2-2)
CASKLFTGVLFF

SEQ ID NO: 629001 - protein, 11 aa, Homo sapiens
  CDR3 for alpha chain variable domain of TCR clone 314501 (TRAV2, TRAJ21)
CAVFNFNKFYF

SEQ ID NO: 629002 - protein, 18 aa, Homo sapiens
  CDR3 for beta chain variable domain of TCR clone 314501 (TRBV12-4, TRBJ2-2)
CASSLVAGTRGRTGELFF

SEQ ID NO: 629003 - protein, 14 aa, Homo sapiens
  CDR3 for alpha chain variable domain of TCR clone 314502 (TRAV8-4, TRAJ9)
CAVSANTGGFKTIF

SEQ ID NO: 629004 - protein, 14 aa, Homo sapiens
  CDR3 for beta chain variable domain of TCR clone 314502 (TRBV28, TRBJ2-7)
CASSYRTGAYEQYF

SEQ ID NO: 629005 - protein, 15 aa, Homo sapiens
  CDR3 for alpha chain variable domain of TCR clone 314503 (TRAV1-2, TRAJ17)
CAVRGYGASGNKLTF

SEQ ID NO: 629006 - protein, 23 aa, Homo sapiens
  CDR3 for beta chain variable domain of TCR clone 314503 (TRBV11-2, TRBJ2-5)
CASSSPGGEGAASRDPVLRARHA

SEQ ID NO: 629007 - protein, 15 aa, Homo sapiens
  CDR3 for alpha chain variable domain of TCR clone 314504 (TRAV21, TRAJ52)
CAVRGSGTSYGKLTF

SEQ ID NO: 629008 - protein, 15 aa, Homo sapiens
  CDR3 for beta chain variable domain of TCR clone 314504 (TRBV18, TRBJ1-5)
CASSPSDRSNQPQHF

SEQ ID NO: 629009 - protein, 14 aa, Homo sapiens
  CDR3 for alpha chain variable domain of TCR clone 314505 (TRAV14/DV4, TRAJ26)
CVMREGTYGQNFVF

SEQ ID NO: 629010 - protein, 16 aa, Homo sapiens
  CDR3 for beta chain variable domain of TCR clone 314505 (TRBV9, TRBJ1-2)
CASSVEEKVSPYGYTF

SEQ ID NO: 629011 - protein, 15 aa, Homo sapiens
  CDR3 for alpha chain variable domain of TCR clone 314506 (TRAV25, TRAJ52)
CAGRPGGTSYGKLTF

SEQ ID NO: 629012 - protein, 12 aa, Homo sapiens
  CDR3 for beta chain variable domain of TCR clone 314506 (TRBV7-2, TRBJ2-1)
CASSPQDIEQFF

SEQ ID NO: 629013 - protein, 19 aa, Homo sapiens
  CDR3 for alpha chain variable domain of TCR clone 314507 (TRAV13-1, TRAJ52)
CAASPYQNAGGTSYGKLTF

SEQ ID NO: 629014 - protein, 16 aa, Homo sapiens
  CDR3 for beta chain variable domain of TCR clone 314507 (TRBV11-2, TRBJ2-2)
CASSLRTGNLIGELFF

SEQ ID NO: 629015 - protein, 14 aa, Homo sapiens
  CDR3 for alpha chain variable domain of TCR clone 314508 (TRAV2, TRAJ11)
CAVVPNSGYSTLTF

SEQ ID NO: 629016 - protein, 15 aa, Homo sapiens
  CDR3 for beta chain variable domain of TCR clone 314508 (TRBV4-1, TRBJ1-3)
CASSQDLRVGNSIYF

SEQ ID NO: 629017 - protein, 14 aa, Homo sapiens
  CDR3 for alpha chain variable domain of TCR clone 314509 (TRAV14/DV4, TRAJ20)
CAMREILNDYKLSF

SEQ ID NO: 629018 - protein, 15 aa, Homo sapiens
  CDR3 for beta chain variable domain of TCR clone 314509 (TRBV7-9, TRBJ2-7)
CASSLALAEAYEQYF

SEQ ID NO: 629019 - protein, 13 aa, Homo sapiens
  CDR3 for alpha chain variable domain of TCR clone 314510 (TRAV12-2, TRAJ42)
CAVKRGSQGNVIF

SEQ ID NO: 629020 - protein, 13 aa, Homo sapiens
  CDR3 for beta chain variable domain of TCR clone 314510 (TRBV7-9, TRBJ2-3)
CVSSPGSTDTQYF

SEQ ID NO: 629021 - protein, 14 aa, Homo sapiens
  CDR3 for alpha chain variable domain of TCR clone 314511 (TRAV21, TRAJ35)
CAVMPIGFGNVLHC

SEQ ID NO: 629022 - protein, 13 aa, Homo sapiens
  CDR3 for beta chain variable domain of TCR clone 314511 (TRBV20-1, TRBJ1-1)
CSAGTVGNTEAFF

SEQ ID NO: 629023 - protein, 17 aa, Homo sapiens
  CDR3 for alpha chain variable domain of TCR clone 314512 (TRAV3, TRAJ6)
CSVSDVPRAGGSYIPTF

SEQ ID NO: 629024 - protein, 14 aa, Homo sapiens
  CDR3 for beta chain variable domain of TCR clone 314512 (TRBV7-2, TRBJ2-7)
CASSPKTRFYEQYF

SEQ ID NO: 629025 - protein, 15 aa, Homo sapiens
  CDR3 for alpha chain variable domain of TCR clone 314513 (TRAV4, TRAJ39)
CLVGPNNNAGNMLTF

SEQ ID NO: 629026 - protein, 19 aa, Homo sapiens
  CDR3 for beta chain variable domain of TCR clone 314513 (TRBV12-4, TRBJ2-1)
CASTLAFDPRDKEANEQFF

SEQ ID NO: 629027 - protein, 16 aa, Homo sapiens
  CDR3 for alpha chain variable domain of TCR clone 314514 (TRAV16, TRAJ52)
CALSAAGGTSYGKLTF

SEQ ID NO: 629028 - protein, 19 aa, Homo sapiens
  CDR3 for beta chain variable domain of TCR clone 314514 (TRBV19, TRBJ2-5)
CASSIGQVTDFFLGENQYF

SEQ ID NO: 629029 - protein, 13 aa, Homo sapiens
  CDR3 for alpha chain variable domain of TCR clone 314515 (TRAV12-1, TRAJ26)
SATYLYYGQNFVF

SEQ ID NO: 629030 - protein, 20 aa, Homo sapiens
  CDR3 for beta chain variable domain of TCR clone 314515 (TRBV7-8, TRBJ2-2)
CASSHLFPGPTIHITGELFF

SEQ ID NO: 629031 - protein, 14 aa, Homo sapiens
  CDR3 for alpha chain variable domain of TCR clone 314516 (TRAV9-2, TRAJ39)
CALYIYNAGNMLTF

SEQ ID NO: 629032 - protein, 15 aa, Homo sapiens
  CDR3 for beta chain variable domain of TCR clone 314516 (TRBV27, TRBJ1-6)
CASSFDRGLGSHLHF

SEQ ID NO: 629033 - protein, 15 aa, Homo sapiens
  CDR3 for alpha chain variable domain of TCR clone 314517 (TRAV25, TRAJ53)
CAATGGGGSNYKLTF

SEQ ID NO: 629034 - protein, 15 aa, Homo sapiens
  CDR3 for beta chain variable domain of TCR clone 314517 (TRBV9, TRBJ1-6)
CASSVAGTGDSPLHF

SEQ ID NO: 629035 - protein, 18 aa, Homo sapiens
  CDR3 for alpha chain variable domain of TCR clone 314518 (TRAV21, TRAJ52)
CAVRPSPAGGTSYGKLTF

SEQ ID NO: 629036 - protein, 15 aa, Homo sapiens
  CDR3 for beta chain variable domain of TCR clone 314518 (TRBV20-1, TRBJ2-7)
CSARGPLAGGGEQYF

SEQ ID NO: 629037 - protein, 14 aa, Homo sapiens
  CDR3 for alpha chain variable domain of TCR clone 314519 (TRAV1-2, TRAJ8)
CAVREDTGFQKLVF

SEQ ID NO: 629038 - protein, 14 aa, Homo sapiens
  CDR3 for beta chain variable domain of TCR clone 314519 (TRBV7-3, TRBJ2-2)
CASSSGGDTGELFF

SEQ ID NO: 629039 - protein, 15 aa, Homo sapiens
  CDR3 for alpha chain variable domain of TCR clone 314520 (TRAV30, TRAJ49)
CGTEGWAEHRQPVLF

SEQ ID NO: 629040 - protein, 15 aa, Homo sapiens
  CDR3 for beta chain variable domain of TCR clone 314520 (TRBV7-2, TRBJ2-1)
CASSSGLAGGNEQFF

SEQ ID NO: 629041 - protein, 17 aa, Homo sapiens
  CDR3 for alpha chain variable domain of TCR clone 314521 (TRAV3, TRAJ6)
CAVSDGPRAGGSYIPTF

SEQ ID NO: 629042 - protein, 16 aa, Homo sapiens
  CDR3 for beta chain variable domain of TCR clone 314521 (TRBV4-1, TRBJ2-7)
CASSLTAGQATYEQYF

SEQ ID NO: 629043 - protein, 13 aa, Homo sapiens
  CDR3 for alpha chain variable domain of TCR clone 314522 (TRAV2, TRAJ40)
CAVVTSGTYKYIF

SEQ ID NO: 629044 - protein, 16 aa, Homo sapiens
  CDR3 for beta chain variable domain of TCR clone 314522 (TRBV29-1, TRBJ1-2)
CSVEANREIANYGYTF

SEQ ID NO: 629045 - protein, 15 aa, Homo sapiens
  CDR3 for alpha chain variable domain of TCR clone 314523 (TRAV23/DV6, TRAJ32)
CAARSYGGATNKIIF

SEQ ID NO: 629046 - protein, 15 aa, Homo sapiens
  CDR3 for beta chain variable domain of TCR clone 314523 (TRBV4-3, TRBJ1-1)
CASSQDRGLNTEAFF

SEQ ID NO: 629047 - protein, 13 aa, Homo sapiens
  CDR3 for alpha chain variable domain of TCR clone 314524 (TRAV13-2, TRAJ48)
CAEMDFGNEKLTF

SEQ ID NO: 629048 - protein, 15 aa, Homo sapiens
  CDR3 for beta chain variable domain of TCR clone 314524 (TRBV6-6, TRBJ2-7)
CASSYSYGGSYEQYF

SEQ ID NO: 629049 - protein, 13 aa, Homo sapiens
  CDR3 for alpha chain variable domain of TCR clone 314525 (TRAV8-3, TRAJ48)
CAVVPFGNEKLTF

SEQ ID NO: 629050 - protein, 13 aa, Homo sapiens
  CDR3 for beta chain variable domain of TCR clone 314525 (TRBV11-2, TRBJ2-5)
CASSRGPSETQYF

SEQ ID NO: 629051 - protein, 13 aa, Homo sapiens
  CDR3 for alpha chain variable domain of TCR clone 314526 (TRAV12-1, TRAJ16)
CVVNGPDGQKLLF

SEQ ID NO: 629052 - protein, 17 aa, Homo sapiens
  CDR3 for beta chain variable domain of TCR clone 314526 (TRBV13, TRBJ2-3)
CASSLSRVAGGRNTQYF

SEQ ID NO: 629053 - protein, 12 aa, Homo sapiens
  CDR3 for alpha chain variable domain of TCR clone 314527 (TRAV1-1, TRAJ39)
CAVPVVGNMLTF

SEQ ID NO: 629054 - protein, 15 aa, Homo sapiens
  CDR3 for beta chain variable domain of TCR clone 314527 (TRBV19, TRBJ2-1)
CASSQDPGNYNEQFF

SEQ ID NO: 629055 - protein, 15 aa, Homo sapiens
  CDR3 for alpha chain variable domain of TCR clone 314528 (TRAV26-1, TRAJ17)
CIVRVVKAAGNKLTF

SEQ ID NO: 629056 - protein, 16 aa, Homo sapiens
  CDR3 for beta chain variable domain of TCR clone 314528 (TRBV7-9, TRBJ2-1)
CASSLASGPSYNEQFF

SEQ ID NO: 629057 - protein, 16 aa, Homo sapiens
  CDR3 for alpha chain variable domain of TCR clone 314529 (TRAV4, TRAJ9)
CLVGDPNRPGGFKTIF

SEQ ID NO: 629058 - protein, 14 aa, Homo sapiens
  CDR3 for beta chain variable domain of TCR clone 314529 (TRBV11-3, TRBJ1-1)
CASSADRDHAEAFF

SEQ ID NO: 629059 - protein, 12 aa, Homo sapiens
  CDR3 for alpha chain variable domain of TCR clone 314530 (TRAV13-2, TRAJ23)
CAERHRGGKLIF

SEQ ID NO: 629060 - protein, 14 aa, Homo sapiens
  CDR3 for beta chain variable domain of TCR clone 314530 (TRBV20-1, TRBJ2-1)
CSAHPGLPYNEQFF

SEQ ID NO: 629061 - protein, 12 aa, Homo sapiens
  CDR3 for alpha chain variable domain of TCR clone 314531 (TRAV20, TRAJ24)
CAVYNSWGKLQF

SEQ ID NO: 629062 - protein, 15 aa, Homo sapiens
  CDR3 for beta chain variable domain of TCR clone 314531 (TRBV20-1, TRBJ2-5)
CSARVPPSGREIQYF

SEQ ID NO: 629063 - protein, 14 aa, Homo sapiens
  CDR3 for alpha chain variable domain of TCR clone 314532 (TRAV35, TRAJ13)
CAGRSPGGYQKVTF

SEQ ID NO: 629064 - protein, 14 aa, Homo sapiens
  CDR3 for beta chain variable domain of TCR clone 314532 (TRBV19, TRBJ2-2)
CASSMVWLSGELFF

SEQ ID NO: 629065 - protein, 16 aa, Homo sapiens
  CDR3 for alpha chain variable domain of TCR clone 314533 (TRAV30, TRAJ44)
CGTEDKRTGTASKLTF

SEQ ID NO: 629066 - protein, 16 aa, Homo sapiens
  CDR3 for beta chain variable domain of TCR clone 314533 (TRBV10-2, TRBJ2-7)
CASSETPGSSGFEQYF

SEQ ID NO: 629067 - protein, 13 aa, Homo sapiens
  CDR3 for alpha chain variable domain of TCR clone 314534 (TRAV17, TRAJ5)
CATMDTGRRALTF

SEQ ID NO: 629068 - protein, 15 aa, Homo sapiens
  CDR3 for beta chain variable domain of TCR clone 314534 (TRBV20-1, TRBJ2-5)
CSATRTSGSLETQYV

SEQ ID NO: 629069 - protein, 18 aa, Homo sapiens
  CDR3 for alpha chain variable domain of TCR clone 314535 (TRAV12-3, TRAJ52)
CAMSRSNAGGTSYGKLTF

SEQ ID NO: 629070 - protein, 17 aa, Homo sapiens
  CDR3 for beta chain variable domain of TCR clone 314535 (TRBV7-3, TRBJ2-3)
CASSLMKRMRGADTQYF

SEQ ID NO: 629071 - protein, 10 aa, Homo sapiens
  CDR3 for alpha chain variable domain of TCR clone 314536 (TRAV1-2, TRAJ20)
CACNDYKLSF

SEQ ID NO: 629072 - protein, 13 aa, Homo sapiens
  CDR3 for beta chain variable domain of TCR clone 314536 (TRBV7-9, TRBJ1-2)
CASSLKQNYGYTF

SEQ ID NO: 629073 - protein, 14 aa, Homo sapiens
  CDR3 for alpha chain variable domain of TCR clone 314537 (TRAV13-1, TRAJ6)
CAAIITGGSYIPTF

SEQ ID NO: 629074 - protein, 14 aa, Homo sapiens
  CDR3 for beta chain variable domain of TCR clone 314537 (TRBV6-3, TRBJ2-1)
CASLHAAYYNEQFF

SEQ ID NO: 629075 - protein, 17 aa, Homo sapiens
  CDR3 for alpha chain variable domain of TCR clone 314538 (TRAV4, TRAJ13)
CLVGVQGSSGGYQKVTF

SEQ ID NO: 629076 - protein, 13 aa, Homo sapiens
  CDR3 for beta chain variable domain of TCR clone 314538 (TRBV10-3, TRBJ2-7)
CASTLAVNYEQYF

SEQ ID NO: 629077 - protein, 12 aa, Homo sapiens
  CDR3 for alpha chain variable domain of TCR clone 314539 (TRAV21, TRAJ22)
CAVSGSARQLTF

SEQ ID NO: 629078 - protein, 17 aa, Homo sapiens
  CDR3 for beta chain variable domain of TCR clone 314539 (TRBV11-2, TRBJ2-1)
CASSLYPPGVEYNEQFF

SEQ ID NO: 629079 - protein, 14 aa, Homo sapiens
  CDR3 for alpha chain variable domain of TCR clone 314540 (TRAV21, TRAJ15)
CAVSLNPAGTALIF

SEQ ID NO: 629080 - protein, 11 aa, Homo sapiens
  CDR3 for beta chain variable domain of TCR clone 314540 (TRBV20-1, TRBJ2-7)
CSARTSYEQYF

SEQ ID NO: 629081 - protein, 14 aa, Homo sapiens
  CDR3 for alpha chain variable domain of TCR clone 314541 (TRAV1-2, TRAJ8)
CSVREDTGFQKLVF

SEQ ID NO: 629082 - protein, 14 aa, Homo sapiens
  CDR3 for beta chain variable domain of TCR clone 314541 (TRBV28, TRBJ2-1)
CASSFDSVSDEQFF

SEQ ID NO: 629083 - protein, 14 aa, Homo sapiens
  CDR3 for alpha chain variable domain of TCR clone 314542 (TRAV1-2, TRAJ8)
CAVREDKGFQKIVF

SEQ ID NO: 629084 - protein, 15 aa, Homo sapiens
  CDR3 for beta chain variable domain of TCR clone 314542 (TRBV6-3, TRBJ2-7)
CASSSPGTVFYEQYF

SEQ ID NO: 629085 - protein, 12 aa, Homo sapiens
  CDR3 for alpha chain variable domain of TCR clone 314543 (TRAV3, TRAJ39)
CDVIEWSNMLTF

SEQ ID NO: 629086 - protein, 14 aa, Homo sapiens
  CDR3 for beta chain variable domain of TCR clone 314543 (TRBV7-8, TRBJ2-3)
CASSFPDGQDTQYF

SEQ ID NO: 629087 - protein, 13 aa, Homo sapiens
  CDR3 for alpha chain variable domain of TCR clone 314544 (TRAV13-1, TRAJ5)
CAASDTGRRALTF

SEQ ID NO: 629088 - protein, 13 aa, Homo sapiens
  CDR3 for beta chain variable domain of TCR clone 314544 (TRBV4-2, TRBJ1-1)
CASSQAGNTEAFF

SEQ ID NO: 629089 - protein, 11 aa, Homo sapiens
  CDR3 for alpha chain variable domain of TCR clone 314545 (TRAV35, TRAJ34)
CWARNTDKLIF

SEQ ID NO: 629090 - protein, 14 aa, Homo sapiens
  CDR3 for beta chain variable domain of TCR clone 314545 (TRBV5-1, TRBJ2-2)
CASSLIEGAGELFF

SEQ ID NO: 629091 - protein, 15 aa, Homo sapiens
  CDR3 for alpha chain variable domain of TCR clone 314546 (TRAV3, TRAJ22)
CAVRDRGGSARQLTF

SEQ ID NO: 629092 - protein, 15 aa, Homo sapiens
  CDR3 for beta chain variable domain of TCR clone 314546 (TRBV15, TRBJ1-5)
CATSREQGGNQPQHF

SEQ ID NO: 629093 - protein, 18 aa, Homo sapiens
  CDR3 for alpha chain variable domain of TCR clone 314547 (TRAV13-1, TRAJ52)
CAASKRSAGGTSYGKLTF

SEQ ID NO: 629094 - protein, 15 aa, Homo sapiens
  CDR3 for beta chain variable domain of TCR clone 314547 (TRBV6-5, TRBJ1-2)
CASSYSQAFNYGYTF

SEQ ID NO: 629095 - protein, 10 aa, Homo sapiens
  CDR3 for alpha chain variable domain of TCR clone 314548 (TRAV12-1, TRAJ43)
CVVHNNDMRF

SEQ ID NO: 629096 - protein, 12 aa, Homo sapiens
  CDR3 for beta chain variable domain of TCR clone 314548 (TRBV24-1, TRBJ1-1)
CATLYPDTEAFF

SEQ ID NO: 629097 - protein, 12 aa, Homo sapiens
  CDR3 for alpha chain variable domain of TCR clone 314549 (TRAV21, TRAJ39)
CAADNAGNMITF

SEQ ID NO: 629098 - protein, 13 aa, Homo sapiens
  CDR3 for beta chain variable domain of TCR clone 314549 (TRBV12-4, TRBJ1-1)
CASSPGTGFEAFF

SEQ ID NO: 629099 - protein, 17 aa, Homo sapiens
  CDR3 for alpha chain variable domain of TCR clone 314550 (TRAV3, TRAJ6)
CDVRDGPRAGGSYIPTF

SEQ ID NO: 629100 - protein, 14 aa, Homo sapiens
  CDR3 for beta chain variable domain of TCR clone 314550 (TRBV7-2, TRBJ2-7)
CASSTKTSFYEQYF

SEQ ID NO: 629101 - protein, 17 aa, Homo sapiens
  CDR3 for alpha chain variable domain of TCR clone 314551 (TRAV8-6, TRAJ58)
CAVSSWVGETSGSRLTV

SEQ ID NO: 629102 - protein, 17 aa, Homo sapiens
  CDR3 for beta chain variable domain of TCR clone 314551 (TRBV11-2, TRBJ2-1)
CASSLYPPGVEYNEQFF

SEQ ID NO: 629103 - protein, 14 aa, Homo sapiens
  CDR3 for alpha chain variable domain of TCR clone 314552 (TRAV2, TRAJ9)
CAVEDRSGGFKTIF

SEQ ID NO: 629104 - protein, 12 aa, Homo sapiens
  CDR3 for beta chain variable domain of TCR clone 314552 (TRBV7-9, TRBJ2-7)
CASRLEGYEQYF

SEQ ID NO: 629105 - protein, 13 aa, Homo sapiens
  CDR3 for alpha chain variable domain of TCR clone 314553 (TRAV8-1, TRAJ41)
CAVNPGSGYALNF

SEQ ID NO: 629106 - protein, 12 aa, Homo sapiens
  CDR3 for beta chain variable domain of TCR clone 314553 (TRBV18, TRBJ2-7)
CASSTAMGEQYF

SEQ ID NO: 629107 - protein, 13 aa, Homo sapiens
  CDR3 for alpha chain variable domain of TCR clone 314554 (TRAV27, TRAJ6)
CAGGTRESYIPTF

SEQ ID NO: 629108 - protein, 13 aa, Homo sapiens
  CDR3 for beta chain variable domain of TCR clone 314554 (TRBV29-1, TRBJ1-1)
CSVGDSRNTEAFF

SEQ ID NO: 629109 - protein, 14 aa, Homo sapiens
  CDR3 for alpha chain variable domain of TCR clone 314555 (TRAV12-3, TRAJ35)
CAMSLIGFGNVLHC

SEQ ID NO: 629110 - protein, 12 aa, Homo sapiens
  CDR3 for beta chain variable domain of TCR clone 314555 (TRBV12-4, TRBJ1-1)
CASSLAGLEASF

SEQ ID NO: 629111 - protein, 11 aa, Homo sapiens
  CDR3 for alpha chain variable domain of TCR clone 314556 (TRAV1-2, TRAJ20)
CAVANDYKLSF

SEQ ID NO: 629112 - protein, 16 aa, Homo sapiens
  CDR3 for beta chain variable domain of TCR clone 314556 (TRBV19, TRBJ2-3)
CASSPGAASRTDTQYF

SEQ ID NO: 629113 - protein, 12 aa, Homo sapiens
  CDR3 for alpha chain variable domain of TCR clone 314557 (TRAV13-2, TRAJ49)
CAETDTGNQCYF

SEQ ID NO: 629114 - protein, 13 aa, Homo sapiens
  CDR3 for beta chain variable domain of TCR clone 314557 (TRBV2, TRBJ2-1)
CASSIGTGLEQFF

SEQ ID NO: 629115 - protein, 14 aa, Homo sapiens
  CDR3 for alpha chain variable domain of TCR clone 314558 (TRAV21, TRAJ58)
RAVRRGRSGSRLTF

SEQ ID NO: 629116 - protein, 13 aa, Homo sapiens
  CDR3 for beta chain variable domain of TCR clone 314558 (TRBV7-2, TRBJ1-6)
CASSLKFDSPLHF

SEQ ID NO: 629117 - protein, 21 aa, Homo sapiens
  CDR3 for alpha chain variable domain of TCR clone 314559 (TRAV8-4, TRAJ47)
YLTKPSAHMSDAAERGNKLVF

SEQ ID NO: 629118 - protein, 14 aa, Homo sapiens
  CDR3 for beta chain variable domain of TCR clone 314559 (TRBV7-9, TRBJ2-1)
CASSPRDSLYEQFF

SEQ ID NO: 629119 - protein, 15 aa, Homo sapiens
  CDR3 for alpha chain variable domain of TCR clone 314560 (TRAV13-2, TRAJ45)
CAESDSGGGAAGLTF

SEQ ID NO: 629120 - protein, 17 aa, Homo sapiens
  CDR3 for beta chain variable domain of TCR clone 314560 (TRBV27, TRBJ1-6)
CASSLDQLSSYNSPLHF

SEQ ID NO: 629121 - protein, 13 aa, Homo sapiens
  CDR3 for alpha chain variable domain of TCR clone 314561 (TRAV1-2, TRAJ12)
CAVSMDSSYKLIF

SEQ ID NO: 629122 - protein, 14 aa, Homo sapiens
  CDR3 for beta chain variable domain of TCR clone 314561 (TRBV19, TRBJ2-1)
CDSSSGRDYNEQFF

SEQ ID NO: 629123 - protein, 12 aa, Homo sapiens
  CDR3 for alpha chain variable domain of TCR clone 314562 (TRAV12-3, TRAJ17)
CAMTLTGNKLTF

SEQ ID NO: 629124 - protein, 16 aa, Homo sapiens
  CDR3 for beta chain variable domain of TCR clone 314562 (TRBV12-5, TRBJ2-5)
CASGPRTSGNQETKYF

SEQ ID NO: 629125 - protein, 12 aa, Homo sapiens
  CDR3 for alpha chain variable domain of TCR clone 314563 (TRAV21, TRAJ13)
PGPSGGYQKVTF

SEQ ID NO: 629126 - protein, 15 aa, Homo sapiens
  CDR3 for beta chain variable domain of TCR clone 314563 (TRBV7-9, TRBJ1-6)
CSSSSPGRGNSPLHF

SEQ ID NO: 629127 - protein, 16 aa, Homo sapiens
  CDR3 for alpha chain variable domain of TCR clone 314564 (TRAV30, TRAJ24)
CGPEIVDAGSWGKFQF

SEQ ID NO: 629128 - protein, 15 aa, Homo sapiens
  CDR3 for beta chain variable domain of TCR clone 314564 (TRBV7-9, TRBJ1-4)
CASSARTGGNEKLFF

SEQ ID NO: 629129 - protein, 15 aa, Homo sapiens
  CDR3 for alpha chain variable domain of TCR clone 314565 (TRAV25, TRAJ23)
CALASNYNQGGKLIF

SEQ ID NO: 629130 - protein, 13 aa, Homo sapiens
  CDR3 for beta chain variable domain of TCR clone 314565 (TRBV11-3, TRBJ1-1)
CASSWDGNTEAFF

SEQ ID NO: 629131 - protein, 14 aa, Homo sapiens
  CDR3 for alpha chain variable domain of TCR clone 314566 (TRAV1-2, TRAJ16)
CAVRGFSDGQKLLF

SEQ ID NO: 629132 - protein, 16 aa, Homo sapiens
  CDR3 for beta chain variable domain of TCR clone 314566 (TRBV20-1, TRBJ2-1)
GSARDHLAGGRGEQFF

SEQ ID NO: 629133 - protein, 13 aa, Homo sapiens
  CDR3 for alpha chain variable domain of TCR clone 314567 (TRAV22, TRAJ58)
CAVTETSGSRLTF

SEQ ID NO: 629134 - protein, 13 aa, Homo sapiens
  CDR3 for beta chain variable domain of TCR clone 314567 (TRBV12-4, TRBJ1-5)
CASSPDRAQPQHF

SEQ ID NO: 629135 - protein, 11 aa, Homo sapiens
  CDR3 for alpha chain variable domain of TCR clone 314568 (TRAV4, TRAJ31)
CLVGDNARLMF

SEQ ID NO: 629136 - protein, 18 aa, Homo sapiens
  CDR3 for beta chain variable domain of TCR clone 314568 (TRBV7-9, TRBJ2-3)
CASSFLGWVADRGDTQYF

SEQ ID NO: 629137 - protein, 14 aa, Homo sapiens
  CDR3 for alpha chain variable domain of TCR clone 314569 (TRAV12-2, TRAJ48)
CAVNAFFGNEKLTF

SEQ ID NO: 629138 - protein, 15 aa, Homo sapiens
  CDR3 for beta chain variable domain of TCR clone 314569 (TRBV27, TRBJ2-7)
CASSTAGTGSYEQYF

SEQ ID NO: 629139 - protein, 13 aa, Homo sapiens
  CDR3 for alpha chain variable domain of TCR clone 314570 (TRAV3, TRAJ20)
CAVRSLNDYKLSF

SEQ ID NO: 629140 - protein, 13 aa, Homo sapiens
  CDR3 for beta chain variable domain of TCR clone 314570 (TRBV6-1, TRBJ2-1)
CAGMDATNNGQFF

SEQ ID NO: 629141 - protein, 14 aa, Homo sapiens
  CDR3 for alpha chain variable domain of TCR clone 314571 (TRAV8-3, TRAJ48)
CCGCGQFGNEKLTF

SEQ ID NO: 629142 - protein, 15 aa, Homo sapiens
  CDR3 for beta chain variable domain of TCR clone 314571 (TRBV28, TRBJ2-4)
CAAGSGTRLMGIQYF

SEQ ID NO: 629143 - protein, 19 aa, Homo sapiens
  CDR3 for alpha chain variable domain of TCR clone 314572 (TRAV1-2, TRAJ26)
CLLPLCFERPDNYGQNFVF

SEQ ID NO: 629144 - protein, 15 aa, Homo sapiens
  CDR3 for beta chain variable domain of TCR clone 314572 (TRBV9, TRBJ1-6)
CASSVAGTGDSPPHF

SEQ ID NO: 629145 - protein, 16 aa, Homo sapiens
  CDR3 for alpha chain variable domain of TCR clone 314573 (TRAV3, TRAJ37)
FAVRGKGSGNTGKLIF

SEQ ID NO: 629146 - protein, 13 aa, Homo sapiens
  CDR3 for beta chain variable domain of TCR clone 314573 (TRBV7-2, TRBJ2-2)
CASSSVRAGELFF

SEQ ID NO: 629147 - protein, 15 aa, Homo sapiens
  CDR3 for alpha chain variable domain of TCR clone 314574 (TRAV13-1, TRAJ6)
CAANHPSGGSYIHTF

SEQ ID NO: 629148 - protein, 14 aa, Homo sapiens
  CDR3 for beta chain variable domain of TCR clone 314574 (TRBV7-9, TRBJ2-2)
CASGLAINTGELFF

SEQ ID NO: 629149 - protein, 10 aa, Homo sapiens
  CDR3 for alpha chain variable domain of TCR clone 314575 (TRAV2, TRAJ34)
CAVVNAKLIF

SEQ ID NO: 629150 - protein, 15 aa, Homo sapiens
  CDR3 for beta chain variable domain of TCR clone 314575 (TRBV20-1, TRBJ2-3)
CSARPSGFYTDTQYF

SEQ ID NO: 629151 - protein, 14 aa, Homo sapiens
  CDR3 for alpha chain variable domain of TCR clone 314576 (TRAV16, TRAJ8)
CALLINTGFQKLVF

SEQ ID NO: 629152 - protein, 15 aa, Homo sapiens
  CDR3 for beta chain variable domain of TCR clone 314576 (TRBV20-1, TRBJ2-7)
CSARDRVSGMDEQYF

SEQ ID NO: 629153 - protein, 12 aa, Homo sapiens
  CDR3 for alpha chain variable domain of TCR clone 314577 (TRAV29/DV5, TRAJ34)
CAARHNTDKLIF

SEQ ID NO: 629154 - protein, 15 aa, Homo sapiens
  CDR3 for beta chain variable domain of TCR clone 314577 (TRBV20-1, TRBJ2-7)
CSARDRVSGMDEQYF

SEQ ID NO: 629155 - protein, 12 aa, Homo sapiens
  CDR3 for alpha chain variable domain of TCR clone 314578 (TRAV26-2, TRAJ21)
CILKGNFNKFYF

SEQ ID NO: 629156 - protein, 16 aa, Homo sapiens
  CDR3 for beta chain variable domain of TCR clone 314578 (TRBV7-9, TRBJ1-1)
CASTPLNPTLKLSLDK

SEQ ID NO: 629157 - protein, 11 aa, Homo sapiens
  CDR3 for alpha chain variable domain of TCR clone 314579 (TRAV1-1, TRAJ37)
CAVSPQGKLIF

SEQ ID NO: 629158 - protein, 16 aa, Homo sapiens
  CDR3 for beta chain variable domain of TCR clone 314579 (TRBV7-3, TRBJ2-2)
CASSLKRGTLSGELFF

SEQ ID NO: 629159 - protein, 13 aa, Homo sapiens
  CDR3 for alpha chain variable domain of TCR clone 314580 (TRAV12-2, TRAJ50)
CAVIVTSYDKVIF

SEQ ID NO: 629160 - protein, 14 aa, Homo sapiens
  CDR3 for beta chain variable domain of TCR clone 314580 (TRBV12-4, TRBJ1-1)
CASSLGTGGTEAFF

SEQ ID NO: 629161 - protein, 14 aa, Homo sapiens
  CDR3 for alpha chain variable domain of TCR clone 314581 (TRAV23/DV6, TRAJ22)
CAASVSGSARQLTF

SEQ ID NO: 629162 - protein, 16 aa, Homo sapiens
  CDR3 for beta chain variable domain of TCR clone 314581 (TRBV19, TRBJ2-2)
CASSFPGQGLTGELFF

SEQ ID NO: 629163 - protein, 12 aa, Homo sapiens
  CDR3 for alpha chain variable domain of TCR clone 314582 (TRAV20, TRAJ33)
YAVRGSNYQLIW

SEQ ID NO: 629164 - protein, 13 aa, Homo sapiens
  CDR3 for beta chain variable domain of TCR clone 314582 (TRBV4-3, TRBJ1-1)
CASSPTGNTEAFF

SEQ ID NO: 629165 - protein, 11 aa, Homo sapiens
  CDR3 for alpha chain variable domain of TCR clone 314583 (TRAV12-1, TRAJ8)
CVVTGFQKFVF

SEQ ID NO: 629166 - protein, 14 aa, Homo sapiens
  CDR3 for beta chain variable domain of TCR clone 314583 (TRBV19, TRBJ2-1)
CASGKSTQYNEQFF

SEQ ID NO: 629167 - protein, 16 aa, Homo sapiens
  CDR3 for alpha chain variable domain of TCR clone 314584 (TRAV14/DV4, TRAJ53)
CAMREGGGGSNYKLTF

SEQ ID NO: 629168 - protein, 14 aa, Homo sapiens
  CDR3 for beta chain variable domain of TCR clone 314584 (TRBV19, TRBJ2-1)
CASSRLASINEQFF

SEQ ID NO: 629169 - protein, 15 aa, Homo sapiens
  CDR3 for alpha chain variable domain of TCR clone 314585 (TRAV4, TRAJ32)
CLVGEDGGATNKLIF

SEQ ID NO: 629170 - protein, 13 aa, Homo sapiens
  CDR3 for beta chain variable domain of TCR clone 314585 (TRBV7-9, TRBJ1-2)
CASSLKQNYGYTF

SEQ ID NO: 629171 - protein, 15 aa, Homo sapiens
  CDR3 for alpha chain variable domain of TCR clone 314586 (TRAV27, TRAJ38)
CAARRNAGNNRKLIW

SEQ ID NO: 629172 - protein, 15 aa, Homo sapiens
  CDR3 for beta chain variable domain of TCR clone 314586 (TRBV9, TRBJ1-6)
CASSVAGTGDSPLYF

SEQ ID NO: 629173 - protein, 12 aa, Homo sapiens
  CDR3 for alpha chain variable domain of TCR clone 314587 (TRAV1-2, TRAJ29)
CAVPSGNTPLVF

SEQ ID NO: 629174 - protein, 12 aa, Homo sapiens
  CDR3 for beta chain variable domain of TCR clone 314587 (TRBV7-9, TRBJ2-7)
CASSFGSYERYF

SEQ ID NO: 629175 - protein, 14 aa, Homo sapiens
  CDR3 for alpha chain variable domain of TCR clone 314588 (TRAV27, TRAJ49)
CAGRPEGTGNQFYF

SEQ ID NO: 629176 - protein, 14 aa, Homo sapiens
  CDR3 for beta chain variable domain of TCR clone 314588 (TRBV7-9, TRBJ2-1)
CASSPRDSLYEQFF

SEQ ID NO: 629177 - protein, 12 aa, Homo sapiens
  CDR3 for alpha chain variable domain of TCR clone 314589 (TRAV3, TRAJ39)
CAVIEWSNMLTF

SEQ ID NO: 629178 - protein, 14 aa, Homo sapiens
  CDR3 for beta chain variable domain of TCR clone 314589 (TRBV7-8, TRBJ2-3)
CASSFTDGKDTQYF

SEQ ID NO: 629179 - protein, 18 aa, Homo sapiens
  CDR3 for alpha chain variable domain of TCR clone 314590 (TRAV21, TRAJ52)
CAMRPSPAGGTSYGKLTF

SEQ ID NO: 629180 - protein, 17 aa, Homo sapiens
  CDR3 for beta chain variable domain of TCR clone 314590 (TRBV13, TRBJ2-3)
WASSLSRVAGGRNTQYF

SEQ ID NO: 629181 - protein, 12 aa, Homo sapiens
  CDR3 for alpha chain variable domain of TCR clone 314591 (TRAV20, TRAJ33)
CAVRGSNYQLIW

SEQ ID NO: 629182 - protein, 13 aa, Homo sapiens
  CDR3 for beta chain variable domain of TCR clone 314591 (TRBV4-3, TRBJ1-1)
YASSPTGNTEAFF

SEQ ID NO: 629183 - protein, 13 aa, Homo sapiens
  CDR3 for alpha chain variable domain of TCR clone 314592 (TRAV2, TRAJ40)
FSFFTSLTYKYIF

SEQ ID NO: 629184 - protein, 14 aa, Homo sapiens
  CDR3 for beta chain variable domain of TCR clone 314592 (TRBV19, TRBJ2-1)
CASPTFVLSGEQFF

SEQ ID NO: 629185 - protein, 11 aa, Homo sapiens
  CDR3 for alpha chain variable domain of TCR clone 314593 (TRAV8-3, TRAJ49)
CAVGGVNQFYF

SEQ ID NO: 629186 - protein, 14 aa, Homo sapiens
  CDR3 for beta chain variable domain of TCR clone 314593 (TRBV18, TRBJ2-5)
CASSPGVSQETQYF

SEQ ID NO: 629187 - protein, 14 aa, Homo sapiens
  CDR3 for alpha chain variable domain of TCR clone 314594 (TRAV12-3, TRAJ41)
YAMSAGNSGYALNF

SEQ ID NO: 629188 - protein, 11 aa, Homo sapiens
  CDR3 for beta chain variable domain of TCR clone 314594 (TRBV7-2, TRBJ2-3)
CASSSSDTQYF

SEQ ID NO: 629189 - protein, 13 aa, Homo sapiens
  CDR3 for alpha chain variable domain of TCR clone 314595 (TRAV26-1, )
CIVSHRVEGFWNQ

SEQ ID NO: 629190 - protein, 14 aa, Homo sapiens
  CDR3 for beta chain variable domain of TCR clone 314595 (TRBV20-1, TRBJ2-7)
CGAWTALSSYEQYF

SEQ ID NO: 629191 - protein, 13 aa, Homo sapiens
  CDR3 for alpha chain variable domain of TCR clone 314596 (TRAV2, TRAJ40)
CAVVTSGTYKYIF

SEQ ID NO: 629192 - protein, 16 aa, Homo sapiens
  CDR3 for beta chain variable domain of TCR clone 314596 (TRBV12-5, TRBJ2-5)
CTSGPRTSGNQETQYF

SEQ ID NO: 629193 - protein, 14 aa, Homo sapiens
  CDR3 for alpha chain variable domain of TCR clone 314597 (TRAV26-1, TRAJ38)
CIIVGAGNNRKLIW

SEQ ID NO: 629194 - protein, 12 aa, Homo sapiens
  CDR3 for beta chain variable domain of TCR clone 314597 (TRBV5-1, TRBJ2-5)
CASSWDQDTQYF

SEQ ID NO: 629195 - protein, 16 aa, Homo sapiens
  CDR3 for alpha chain variable domain of TCR clone 314598 (TRAV12-3, TRAJ45)
CAMRWGSGGGADGLTF

SEQ ID NO: 629196 - protein, 13 aa, Homo sapiens
  CDR3 for beta chain variable domain of TCR clone 314598 (TRBV7-2, TRBJ1-5)
CASSFARNQAQHF

SEQ ID NO: 629197 - protein, 15 aa, Homo sapiens
  CDR3 for alpha chain variable domain of TCR clone 314599 (TRAV21, TRAJ53)
CATLNSGGSNYKLTF

SEQ ID NO: 629198 - protein, 16 aa, Homo sapiens
  CDR3 for beta chain variable domain of TCR clone 314599 (TRBV9, TRBJ2-1)
CASSVGGGGNYNAQFF

SEQ ID NO: 629199 - protein, 13 aa, Homo sapiens
  CDR3 for alpha chain variable domain of TCR clone 314600 (TRAV13-1, TRAJ12)
CAASPDSSYKLIF

SEQ ID NO: 629200 - protein, 16 aa, Homo sapiens
  CDR3 for beta chain variable domain of TCR clone 314600 (TRBV15, TRBJ2-1)
CATSRERQAGAYEQFF

SEQ ID NO: 629201 - protein, 15 aa, Homo sapiens
  CDR3 for alpha chain variable domain of TCR clone 314601 (TRAV12-2, TRAJ53)
CAVNGGGGSNYKLTF

SEQ ID NO: 629202 - protein, 15 aa, Homo sapiens
  CDR3 for beta chain variable domain of TCR clone 314601 (TRBV11-2, TRBJ2-2)
CASSSDRVNAGELFF

SEQ ID NO: 629203 - protein, 16 aa, Homo sapiens
  CDR3 for alpha chain variable domain of TCR clone 314602 (TRAV27, TRAJ48)
TAAQPGDTGLYLPLTF

SEQ ID NO: 629204 - protein, 14 aa, Homo sapiens
  CDR3 for beta chain variable domain of TCR clone 314602 (TRBV7-2, TRBJ2-7)
CASRSQGAAYEQYF

SEQ ID NO: 629205 - protein, 16 aa, Homo sapiens
  CDR3 for alpha chain variable domain of TCR clone 314603 (TRAV30, TRAJ24)
CGTEIVDADSWWNFQF

SEQ ID NO: 629206 - protein, 14 aa, Homo sapiens
  CDR3 for beta chain variable domain of TCR clone 314603 (TRBV12-5, TRBJ2-5)
CASGSRTHQETQYF

SEQ ID NO: 629207 - protein, 14 aa, Homo sapiens
  CDR3 for alpha chain variable domain of TCR clone 314604 (TRAV12-1, TRAJ17)
CVVNYKAAGNKLTF

SEQ ID NO: 629208 - protein, 16 aa, Homo sapiens
  CDR3 for beta chain variable domain of TCR clone 314604 (TRBV4-2, TRBJ2-1)
CASSQAGTFAAGEQFF

SEQ ID NO: 629209 - protein, 12 aa, Homo sapiens
  CDR3 for alpha chain variable domain of TCR clone 314605 (TRAV12-3, TRAJ17)
CAMTLTGDKLTF

SEQ ID NO: 629210 - protein, 17 aa, Homo sapiens
  CDR3 for beta chain variable domain of TCR clone 314605 (TRBV20-1, TRBJ2-7)
CSARDRVSGMDEQYLGR

SEQ ID NO: 629211 - protein, 17 aa, Homo sapiens
  CDR3 for alpha chain variable domain of TCR clone 314606 (TRAV3, TRAJ6)
CAVRYGPRAGGSYIHTF

SEQ ID NO: 629212 - protein, 14 aa, Homo sapiens
  CDR3 for beta chain variable domain of TCR clone 314606 (TRBV7-2, TRBJ2-7)
CASSPKTSFYEQYF

SEQ ID NO: 629213 - protein, 19 aa, Homo sapiens
  CDR3 for alpha chain variable domain of TCR clone 314607 (TRAV38-1, TRAJ53)
CAFMKHGLESGGSNYKLTF

SEQ ID NO: 629214 - protein, 15 aa, Homo sapiens
  CDR3 for beta chain variable domain of TCR clone 314607 (TRBV4-1, TRBJ1-4)
CASSDTGGTNEKLFF

SEQ ID NO: 629215 - protein, 10 aa, Homo sapiens
  CDR3 for alpha chain variable domain of TCR clone 314608 (TRAV2, TRAJ40)
CAGYLRNLQI

SEQ ID NO: 629216 - protein, 15 aa, Homo sapiens
  CDR3 for beta chain variable domain of TCR clone 314608 (TRBV11-3, TRBJ2-3)
CASLKDGREGDTQYF

SEQ ID NO: 629217 - protein, 11 aa, Homo sapiens
  CDR3 for alpha chain variable domain of TCR clone 314609 (TRAV27, TRAJ43)
CVRYNNNDMRF

SEQ ID NO: 629218 - protein, 14 aa, Homo sapiens
  CDR3 for beta chain variable domain of TCR clone 314609 (TRBV5-4, TRBJ1-1)
CASSLDSRRDEAFF

SEQ ID NO: 629219 - protein, 12 aa, Homo sapiens
  CDR3 for alpha chain variable domain of TCR clone 314610 (TRAV13-1, TRAJ21)
CAAKEGFNKFYF

SEQ ID NO: 629220 - protein, 14 aa, Homo sapiens
  CDR3 for beta chain variable domain of TCR clone 314610 (TRBV28, TRBJ1-2)
CASSFGTEAYGYTF

SEQ ID NO: 629221 - protein, 11 aa, Homo sapiens
  CDR3 for alpha chain variable domain of TCR clone 314611 (TRAV2, TRAJ13)
CASGGYQKVTF

SEQ ID NO: 629222 - protein, 13 aa, Homo sapiens
  CDR3 for beta chain variable domain of TCR clone 314611 (TRBV9, TRBJ2-3)
CASSVGGRDTQYL

SEQ ID NO: 629223 - protein, 16 aa, Homo sapiens
  CDR3 for alpha chain variable domain of TCR clone 314612 (TRAV13-2, TRAJ54)
CAESGSGSPEAGILPR

SEQ ID NO: 629224 - protein, 16 aa, Homo sapiens
  CDR3 for beta chain variable domain of TCR clone 314612 (TRBV7-3, TRBJ2-2)
CASSLKRGTLSGELFF

SEQ ID NO: 629225 - protein, 14 aa, Homo sapiens
  CDR3 for alpha chain variable domain of TCR clone 314613 (TRAV1-2, TRAJ16)
CAVNRFSDGQKLLF

SEQ ID NO: 629226 - protein, 14 aa, Homo sapiens
  CDR3 for beta chain variable domain of TCR clone 314613 (TRBV7-8, TRBJ2-2)
CASRGQGAAGELFF

SEQ ID NO: 629227 - protein, 16 aa, Homo sapiens
  CDR3 for alpha chain variable domain of TCR clone 314614 (TRAV8-3, TRAJ13)
CAVGAYPSGGYQKVTF

SEQ ID NO: 629228 - protein, 14 aa, Homo sapiens
  CDR3 for beta chain variable domain of TCR clone 314614 (TRBV19, TRBJ2-1)
CASPTFFLSGEQFF

SEQ ID NO: 629229 - protein, 15 aa, Homo sapiens
  CDR3 for alpha chain variable domain of TCR clone 314615 (TRAV13-1, TRAJ18)
CAASGGGSTLGRLYF

SEQ ID NO: 629230 - protein, 13 aa, Homo sapiens
  CDR3 for beta chain variable domain of TCR clone 314615 (TRBV18, TRBJ2-1)
CASGLAYNNEQFF

SEQ ID NO: 629231 - protein, 10 aa, Homo sapiens
  CDR3 for alpha chain variable domain of TCR clone 314616 (TRAV12-1, TRAJ43)
CVVHNNDMRY

SEQ ID NO: 629232 - protein, 13 aa, Homo sapiens
  CDR3 for beta chain variable domain of TCR clone 314616 (TRBV12-4, TRBJ1-2)
CASSSGLTVISTF

SEQ ID NO: 629233 - protein, 14 aa, Homo sapiens
  CDR3 for alpha chain variable domain of TCR clone 314617 (TRAV29/DV5, TRAJ36)
CAARRKTGAKNLFF

SEQ ID NO: 629234 - protein, 15 aa, Homo sapiens
  CDR3 for beta chain variable domain of TCR clone 314617 (TRBV11-3, TRBJ2-3)
CASLKDGREGDTQYF

SEQ ID NO: 629235 - protein, 13 aa, Homo sapiens
  CDR3 for alpha chain variable domain of TCR clone 314618 (TRAV29/DV5, TRAJ47)
CAASAEYGNKLVF

SEQ ID NO: 629236 - protein, 15 aa, Homo sapiens
  CDR3 for beta chain variable domain of TCR clone 314618 (TRBV7-9, TRBJ1-4)
CASSARTGGNETLFF

SEQ ID NO: 629237 - protein, 14 aa, Homo sapiens
  CDR3 for alpha chain variable domain of TCR clone 314619 (TRAV17, TRAJ53)
CATDAGGSNYKLTF

SEQ ID NO: 629238 - protein, 16 aa, Homo sapiens
  CDR3 for beta chain variable domain of TCR clone 314619 (TRBV4-1, TRBJ1-1)
CASSQDAGMGNTEAFC

SEQ ID NO: 629239 - protein, 15 aa, Homo sapiens
  CDR3 for alpha chain variable domain of TCR clone 314620 (TRAV26-1, TRAJ56)
CIVGVATGANSKLTF

SEQ ID NO: 629240 - protein, 17 aa, Homo sapiens
  CDR3 for beta chain variable domain of TCR clone 314620 (TRBV11-2, TRBJ2-1)
CASSLYPPGVEYNEQFF

SEQ ID NO: 629241 - protein, 13 aa, Homo sapiens
  CDR3 for alpha chain variable domain of TCR clone 314621 (TRAV26-2, TRAJ43)
CILRAVNNNDMRF

SEQ ID NO: 629242 - protein, 15 aa, Homo sapiens
  CDR3 for beta chain variable domain of TCR clone 314621 (TRBV7-2, TRBJ2-1)
CASTHGAGIYNEEFF

SEQ ID NO: 629243 - protein, 13 aa, Homo sapiens
  CDR3 for alpha chain variable domain of TCR clone 314622 (TRAV20, TRAJ50)
CAVQQTSYDKVIF

SEQ ID NO: 629244 - protein, 16 aa, Homo sapiens
  CDR3 for beta chain variable domain of TCR clone 314622 (TRBV27, TRBJ2-1)
CASSSLTSGSGNELFF

SEQ ID NO: 629245 - protein, 16 aa, Homo sapiens
  CDR3 for alpha chain variable domain of TCR clone 314623 (TRAV23/DV6, )
CADIQNPDPAVYQLRD

SEQ ID NO: 629246 - protein, 15 aa, Homo sapiens
  CDR3 for beta chain variable domain of TCR clone 314623 (TRBV27, TRBJ2-2)
CASSLSGFWVTGELF

SEQ ID NO: 629247 - protein, 14 aa, Homo sapiens
  CDR3 for alpha chain variable domain of TCR clone 314624 (TRAV13-1, TRAJ20)
CAALPGSNDYKLSF

SEQ ID NO: 629248 - protein, 12 aa, Homo sapiens
  CDR3 for beta chain variable domain of TCR clone 314624 (TRBV7-8, TRBJ2-7)
CASSLGDREQYF

SEQ ID NO: 629249 - protein, 14 aa, Homo sapiens
  CDR3 for alpha chain variable domain of TCR clone 314625 (TRAV12-3, TRAJ6)
CAMSATGGSYIPTF

SEQ ID NO: 629250 - protein, 15 aa, Homo sapiens
  CDR3 for beta chain variable domain of TCR clone 314625 (TRBV4-2, TRBJ2-1)
CRQPPAGQGANEQFF

SEQ ID NO: 629251 - protein, 15 aa, Homo sapiens
  CDR3 for alpha chain variable domain of TCR clone 314626 (TRAV1-1, TRAJ5)
CLLLLRCDLGEHLPF

SEQ ID NO: 629252 - protein, 15 aa, Homo sapiens
  CDR3 for beta chain variable domain of TCR clone 314626 (TRBV4-1, TRBJ1-4)
CASSDTGGTNEKLFF

SEQ ID NO: 629253 - protein, 13 aa, Homo sapiens
  CDR3 for alpha chain variable domain of TCR clone 314627 (TRAV8-4, TRAJ30)
CAVSVTRDDKIIF

SEQ ID NO: 629254 - protein, 13 aa, Homo sapiens
  CDR3 for beta chain variable domain of TCR clone 314627 (TRBV3-1, TRBJ2-2)
CASLARGSGELFF

SEQ ID NO: 629255 - protein, 17 aa, Homo sapiens
  CDR3 for alpha chain variable domain of TCR clone 314628 (TRAV8-6, TRAJ22)
CAVSLYPSSGSARQLTF

SEQ ID NO: 629256 - protein, 16 aa, Homo sapiens
  CDR3 for beta chain variable domain of TCR clone 314628 (TRBV19, TRBJ2-7)
CASTPAGSGSLNEQYF

SEQ ID NO: 629257 - protein, 12 aa, Homo sapiens
  CDR3 for alpha chain variable domain of TCR clone 314629 (TRAV21, TRAJ33)
CAKMDSNYQLIW

SEQ ID NO: 629258 - protein, 15 aa, Homo sapiens
  CDR3 for beta chain variable domain of TCR clone 314629 (TRBV9, TRBJ1-6)
CASSVAGTGDSPLLF

SEQ ID NO: 629259 - protein, 14 aa, Homo sapiens
  CDR3 for alpha chain variable domain of TCR clone 314630 (TRAV8-6, TRAJ13)
CAVRYSGGYQKVTF

SEQ ID NO: 629260 - protein, 20 aa, Homo sapiens
  CDR3 for beta chain variable domain of TCR clone 314630 (TRBV19, TRBJ2-1)
CASSISRTVTSTRLNNEQFF

SEQ ID NO: 629261 - protein, 16 aa, Homo sapiens
  CDR3 for alpha chain variable domain of TCR clone 314631 (TRAV12-3, TRAJ53)
CAMSPGSGGSNYKLTF

SEQ ID NO: 629262 - protein, 15 aa, Homo sapiens
  CDR3 for beta chain variable domain of TCR clone 314631 (TRBV11-2, TRBJ2-1)
CASSSPSTRYNEQFF

SEQ ID NO: 629263 - protein, 10 aa, Homo sapiens
  CDR3 for alpha chain variable domain of TCR clone 314632 (TRAV8-2, TRAJ29)
CTGGNTSLVF

SEQ ID NO: 629264 - protein, 17 aa, Homo sapiens
  CDR3 for beta chain variable domain of TCR clone 314632 (TRBV2, TRBJ2-7)
CASSQALTGWDSYEQYF

SEQ ID NO: 629265 - protein, 10 aa, Homo sapiens
  CDR3 for alpha chain variable domain of TCR clone 314633 (TRAV13-1, TRAJ21)
CAASLNKFYF

SEQ ID NO: 629266 - protein, 13 aa, Homo sapiens
  CDR3 for beta chain variable domain of TCR clone 314633 (TRBV7-9, TRBJ2-7)
CDSSFYGSHEQYF

SEQ ID NO: 629267 - protein, 11 aa, Homo sapiens
  CDR3 for alpha chain variable domain of TCR clone 314634 (TRAV2, TRAJ13)
CASGGYQKVTF

SEQ ID NO: 629268 - protein, 13 aa, Homo sapiens
  CDR3 for beta chain variable domain of TCR clone 314634 (TRBV7-9, TRBJ2-5)
CASTPVGQETQYF

SEQ ID NO: 629269 - protein, 11 aa, Homo sapiens
  CDR3 for alpha chain variable domain of TCR clone 314635 (TRAV3, TRAJ21)
SAVGNFNKFYF

SEQ ID NO: 629270 - protein, 16 aa, Homo sapiens
  CDR3 for beta chain variable domain of TCR clone 314635 (TRBV19, TRBJ2-1)
CASSKAGPSSYNERFF

SEQ ID NO: 629271 - protein, 16 aa, Homo sapiens
  CDR3 for alpha chain variable domain of TCR clone 314636 (TRAV13-1, TRAJ48)
CAASIFGNFGNEKLTF

SEQ ID NO: 629272 - protein, 15 aa, Homo sapiens
  CDR3 for beta chain variable domain of TCR clone 314636 (TRBV27, TRBJ2-1)
CASSNGGGSSNEQFF

SEQ ID NO: 629273 - protein, 13 aa, Homo sapiens
  CDR3 for alpha chain variable domain of TCR clone 314637 (TRAV21, TRAJ20)
CAVGLRFDYKLSF

SEQ ID NO: 629274 - protein, 15 aa, Homo sapiens
  CDR3 for beta chain variable domain of TCR clone 314637 (TRBV29-1, TRBJ2-1)
CSVPTGLALYNEQFF

SEQ ID NO: 629275 - protein, 14 aa, Homo sapiens
  CDR3 for alpha chain variable domain of TCR clone 314638 (TRAV13-2, TRAJ15)
CAENPNQAGTALSF

SEQ ID NO: 629276 - protein, 16 aa, Homo sapiens
  CDR3 for beta chain variable domain of TCR clone 314638 (TRBV12-4, TRBJ1-2)
CASSPTATGKTRGYTF

SEQ ID NO: 629277 - protein, 13 aa, Homo sapiens
  CDR3 for alpha chain variable domain of TCR clone 314639 (TRAV3, TRAJ27)
CAMRPLGAGKSTF

SEQ ID NO: 629278 - protein, 13 aa, Homo sapiens
  CDR3 for beta chain variable domain of TCR clone 314639 (TRBV7-9, TRBJ2-3)
CASSPGSTETQYF

SEQ ID NO: 629279 - protein, 13 aa, Homo sapiens
  CDR3 for alpha chain variable domain of TCR clone 314640 (TRAV38-2/DV8, TRAJ45)
CAYVGGGADGIPF

SEQ ID NO: 629280 - protein, 13 aa, Homo sapiens
  CDR3 for beta chain variable domain of TCR clone 314640 (TRBV29-1, TRBJ2-1)
CSVEGGRVNEQFF

SEQ ID NO: 629281 - protein, 13 aa, Homo sapiens
  CDR3 for alpha chain variable domain of TCR clone 314641 (TRAV27, TRAJ18)
CAGRGSTLGRLYF

SEQ ID NO: 629282 - protein, 14 aa, Homo sapiens
  CDR3 for beta chain variable domain of TCR clone 314641 (TRBV7-2, TRBJ2-5)
CASSFTQGQETQYF

SEQ ID NO: 629283 - protein, 13 aa, Homo sapiens
  CDR3 for alpha chain variable domain of TCR clone 314642 (TRAV3, TRAJ20)
CAVRSLNDYKISF

SEQ ID NO: 629284 - protein, 14 aa, Homo sapiens
  CDR3 for beta chain variable domain of TCR clone 314642 (TRBV4-2, TRBJ2-1)
CASGLDRAYNEQFF

SEQ ID NO: 629285 - protein, 12 aa, Homo sapiens
  CDR3 for alpha chain variable domain of TCR clone 314643 (TRAV13-1, TRAJ27)
CAAHTNAGKSTV

SEQ ID NO: 629286 - protein, 15 aa, Homo sapiens
  CDR3 for beta chain variable domain of TCR clone 314643 (TRBV7-9, TRBJ1-6)
CASSSPGRGNSPLHF

SEQ ID NO: 629287 - protein, 13 aa, Homo sapiens
  CDR3 for alpha chain variable domain of TCR clone 314644 (TRAV26-2, TRAJ43)
WILRAVNNNDMRF

SEQ ID NO: 629288 - protein, 15 aa, Homo sapiens
  CDR3 for beta chain variable domain of TCR clone 314644 (TRBV7-2, TRBJ2-1)
CASTHGTGIYNEQFF

SEQ ID NO: 629289 - protein, 13 aa, Homo sapiens
  CDR3 for alpha chain variable domain of TCR clone 314645 (TRAV8-3, TRAJ28)
CAVCSVGSYQLTF

SEQ ID NO: 629290 - protein, 15 aa, Homo sapiens
  CDR3 for beta chain variable domain of TCR clone 314645 (TRBV7-9, TRBJ1-5)
CASSQGHQPNQPQHF

SEQ ID NO: 629291 - protein, 15 aa, Homo sapiens
  CDR3 for alpha chain variable domain of TCR clone 314646 (TRAV8-3, TRAJ21)
CAVGAVPPRGYKFYF

SEQ ID NO: 629292 - protein, 15 aa, Homo sapiens
  CDR3 for beta chain variable domain of TCR clone 314646 (TRBV7-8, TRBJ1-5)
CASSLERRGLEPQHF

SEQ ID NO: 629293 - protein, 18 aa, Homo sapiens
  CDR3 for alpha chain variable domain of TCR clone 314647 (TRAV26-2, TRAJ45)
CILRVDKYSGGGADGLTF

SEQ ID NO: 629294 - protein, 16 aa, Homo sapiens
  CDR3 for beta chain variable domain of TCR clone 314647 (TRBV5-1, TRBJ1-5)
CASSYGAGGSNQPQHF

SEQ ID NO: 629295 - protein, 14 aa, Homo sapiens
  CDR3 for alpha chain variable domain of TCR clone 314648 (TRAV2, TRAJ9)
CAVEDRSGGFKTIF

SEQ ID NO: 629296 - protein, 18 aa, Homo sapiens
  CDR3 for beta chain variable domain of TCR clone 314648 (TRBV11-2, TRBJ2-6)
CASILNPFLGTGANVLTF

SEQ ID NO: 629297 - protein, 13 aa, Homo sapiens
  CDR3 for alpha chain variable domain of TCR clone 314649 (TRAV23/DV6, TRAJ16)
CAASISDGQKLLF

SEQ ID NO: 629298 - protein, 15 aa, Homo sapiens
  CDR3 for beta chain variable domain of TCR clone 314649 (TRBV4-1, TRBJ1-3)
CASSHPGTSGNTIDF

SEQ ID NO: 629299 - protein, 13 aa, Homo sapiens
  CDR3 for alpha chain variable domain of TCR clone 314650 (TRAV8-3, TRAJ20)
CAVGRPNDYKLSF

SEQ ID NO: 629300 - protein, 14 aa, Homo sapiens
  CDR3 for beta chain variable domain of TCR clone 314650 (TRBV12-5, TRBJ2-5)
CASGARTHQETQYF

SEQ ID NO: 629301 - protein, 12 aa, Homo sapiens
  CDR3 for alpha chain variable domain of TCR clone 314651 (TRAV12-3, TRAJ4)
CAMTGSGTRLAV

SEQ ID NO: 629302 - protein, 14 aa, Homo sapiens
  CDR3 for beta chain variable domain of TCR clone 314651 (TRBV10-3, TRBJ1-1)
CAISDTDRGVEAFF

SEQ ID NO: 629303 - protein, 11 aa, Homo sapiens
  CDR3 for alpha chain variable domain of TCR clone 314652 (TRAV29/DV5, TRAJ49)
CAAVPGNQFYF

SEQ ID NO: 629304 - protein, 15 aa, Homo sapiens
  CDR3 for beta chain variable domain of TCR clone 314652 (TRBV11-3, TRBJ2-7)
CASSPGPASSYEQYF

SEQ ID NO: 629305 - protein, 10 aa, Homo sapiens
  CDR3 for alpha chain variable domain of TCR clone 314653 (TRAV12-2, TRAJ43)
CAVKVLSMRF

SEQ ID NO: 629306 - protein, 16 aa, Homo sapiens
  CDR3 for beta chain variable domain of TCR clone 314653 (TRBV12-4, TRBJ2-5)
CASSFFVRGRQETQYF

SEQ ID NO: 629307 - protein, 13 aa, Homo sapiens
  CDR3 for alpha chain variable domain of TCR clone 314654 (TRAV13-1, TRAJ20)
CAARVSTDYKLRF

SEQ ID NO: 629308 - protein, 12 aa, Homo sapiens
  CDR3 for beta chain variable domain of TCR clone 314654 (TRBV20-1, TRBJ2-1)
CSARLGTDEQFF

SEQ ID NO: 629309 - protein, 15 aa, Homo sapiens
  CDR3 for alpha chain variable domain of TCR clone 314655 (TRAV17, TRAJ10)
CDTVLLTGGGNKLTF

SEQ ID NO: 629310 - protein, 16 aa, Homo sapiens
  CDR3 for beta chain variable domain of TCR clone 314655 (TRBV7-9, TRBJ2-3)
CASSPWREVGTDTQYF

SEQ ID NO: 629311 - protein, 14 aa, Homo sapiens
  CDR3 for alpha chain variable domain of TCR clone 314656 (TRAV12-3, TRAJ9)
CAMSPNTGGFETIF

SEQ ID NO: 629312 - protein, 12 aa, Homo sapiens
  CDR3 for beta chain variable domain of TCR clone 314656 (TRBV11-2, TRBJ2-2)
CASSLGGGELFF

SEQ ID NO: 629313 - protein, 14 aa, Homo sapiens
  CDR3 for alpha chain variable domain of TCR clone 314657 (TRAV27, TRAJ40)
CAGSLLRGTYKYIF

SEQ ID NO: 629314 - protein, 12 aa, Homo sapiens
  CDR3 for beta chain variable domain of TCR clone 314657 (TRBV11-2, TRBJ2-2)
CASSLGGGELFF

SEQ ID NO: 629315 - protein, 16 aa, Homo sapiens
  CDR3 for alpha chain variable domain of TCR clone 314658 (TRAV4, TRAJ18)
CCVLLIGGSTLGRLYF

SEQ ID NO: 629316 - protein, 15 aa, Homo sapiens
  CDR3 for beta chain variable domain of TCR clone 314658 (TRBV28, TRBJ2-1)
CASSIIAGGRSEQFF

SEQ ID NO: 629317 - protein, 13 aa, Homo sapiens
  CDR3 for alpha chain variable domain of TCR clone 314659 (TRAV17, TRAJ54)
CATVIQGAQKLVF

SEQ ID NO: 629318 - protein, 15 aa, Homo sapiens
  CDR3 for beta chain variable domain of TCR clone 314659 (TRBV13, TRBJ2-1)
CANSLLSGLNNEQFF

SEQ ID NO: 629319 - protein, 14 aa, Homo sapiens
  CDR3 for alpha chain variable domain of TCR clone 314660 (TRAV35, TRAJ22)
CAGLRPGSARQLTF

SEQ ID NO: 629320 - protein, 14 aa, Homo sapiens
  CDR3 for beta chain variable domain of TCR clone 314660 (TRBV11-3, TRBJ2-3)
CASSSGQGPDTQYC

SEQ ID NO: 629321 - protein, 17 aa, Homo sapiens
  CDR3 for alpha chain variable domain of TCR clone 314661 (TRAV12-2, TRAJ48)
CASNEKLTIGTGTRLTI

SEQ ID NO: 629322 - protein, 18 aa, Homo sapiens
  CDR3 for beta chain variable domain of TCR clone 314661 (TRBV4-3, TRBJ1-2)
CASSQDGQSAPSDYGYTF

SEQ ID NO: 629323 - protein, 19 aa, Homo sapiens
  CDR3 for alpha chain variable domain of TCR clone 314662 (TRAV2, TRAJ20)
ILQVREADAAVYQDCKLSF

SEQ ID NO: 629324 - protein, 15 aa, Homo sapiens
  CDR3 for beta chain variable domain of TCR clone 314662 (TRBV20-1, TRBJ2-5)
CSAEGTGGLQETQYF

SEQ ID NO: 629325 - protein, 13 aa, Homo sapiens
  CDR3 for alpha chain variable domain of TCR clone 314663 (TRAV25, TRAJ40)
CAGSAPGTYKYIF

SEQ ID NO: 629326 - protein, 14 aa, Homo sapiens
  CDR3 for beta chain variable domain of TCR clone 314663 (TRBV7-2, TRBJ2-7)
CASRSQGAAYEQYF

SEQ ID NO: 629327 - protein, 13 aa, Homo sapiens
  CDR3 for alpha chain variable domain of TCR clone 314664 (TRAV8-3, TRAJ36)
CAVGATGANNLFF

SEQ ID NO: 629328 - protein, 13 aa, Homo sapiens
  CDR3 for beta chain variable domain of TCR clone 314664 (TRBV6-1, TRBJ1-1)
CASSRQGSTEAFF

SEQ ID NO: 629329 - protein, 14 aa, Homo sapiens
  CDR3 for alpha chain variable domain of TCR clone 314665 (TRAV2, TRAJ9)
CAVEDRRGGFKTIF

SEQ ID NO: 629330 - protein, 15 aa, Homo sapiens
  CDR3 for beta chain variable domain of TCR clone 314665 (TRBV20-1, TRBJ2-7)
CSAESGTSGAYEQYF

SEQ ID NO: 629331 - protein, 11 aa, Homo sapiens
  CDR3 for alpha chain variable domain of TCR clone 314666 (TRAV27, TRAJ20)
CAGADDYKLIF

SEQ ID NO: 629332 - protein, 13 aa, Homo sapiens
  CDR3 for beta chain variable domain of TCR clone 314666 (TRBV11-3, TRBJ1-2)
CASSQRTSRGYTF

SEQ ID NO: 629333 - protein, 11 aa, Homo sapiens
  CDR3 for alpha chain variable domain of TCR clone 314667 (TRAV2, TRAJ13)
CASGGYQKVTL

SEQ ID NO: 629334 - protein, 16 aa, Homo sapiens
  CDR3 for beta chain variable domain of TCR clone 314667 (TRBV6-1, TRBJ2-5)
CASSETLDRGAETHYF

SEQ ID NO: 629335 - protein, 13 aa, Homo sapiens
  CDR3 for alpha chain variable domain of TCR clone 314668 (TRAV1-1, TRAJ9)
CAAKITGGFKAIF

SEQ ID NO: 629336 - protein, 12 aa, Homo sapiens
  CDR3 for beta chain variable domain of TCR clone 314668 (TRBV11-2, TRBJ2-2)
CASSLGGGELFF

SEQ ID NO: 629337 - protein, 12 aa, Homo sapiens
  CDR3 for alpha chain variable domain of TCR clone 314669 (TRAV16, TRAJ10)
CSRTGGGNTLTF

SEQ ID NO: 629338 - protein, 14 aa, Homo sapiens
  CDR3 for beta chain variable domain of TCR clone 314669 (TRBV19, TRBJ2-1)
CASPTFVLSGEQFF

SEQ ID NO: 629339 - protein, 11 aa, Homo sapiens
  CDR3 for alpha chain variable domain of TCR clone 314670 (TRAV16, TRAJ31)
CALFNNARLMF

SEQ ID NO: 629340 - protein, 20 aa, Homo sapiens
  CDR3 for beta chain variable domain of TCR clone 314670 (TRBV7-8, TRBJ2-2)
CASSHLFPGPTIHITGELFF

SEQ ID NO: 629341 - protein, 14 aa, Homo sapiens
  CDR3 for alpha chain variable domain of TCR clone 314671 (TRAV12-2, TRAJ17)
CAALFKAEGNKLTF

SEQ ID NO: 629342 - protein, 16 aa, Homo sapiens
  CDR3 for beta chain variable domain of TCR clone 314671 (TRBV20-1, TRBJ2-2)
CSASASGIPGAGELFF

SEQ ID NO: 629343 - protein, 17 aa, Homo sapiens
  CDR3 for alpha chain variable domain of TCR clone 314672 (TRAV13-1, TRAJ31)
CAPRDRLMFGDGTQLVV

SEQ ID NO: 629344 - protein, 15 aa, Homo sapiens
  CDR3 for beta chain variable domain of TCR clone 314672 (TRBV4-3, TRBJ2-7)
CASSQGGRGIYEQYF

SEQ ID NO: 629345 - protein, 14 aa, Homo sapiens
  CDR3 for alpha chain variable domain of TCR clone 314673 (TRAV27, TRAJ37)
CAGERSSNNGKLIF

SEQ ID NO: 629346 - protein, 15 aa, Homo sapiens
  CDR3 for beta chain variable domain of TCR clone 314673 (TRBV11-3, TRBJ1-6)
CASSLDWGANSPLHF

SEQ ID NO: 629347 - protein, 13 aa, Homo sapiens
  CDR3 for alpha chain variable domain of TCR clone 314674 (TRAV29/DV5, TRAJ31)
CAASRNNNARLMF

SEQ ID NO: 629348 - protein, 16 aa, Homo sapiens
  CDR3 for beta chain variable domain of TCR clone 314674 (TRBV20-1, TRBJ1-4)
CSAPGQGLLTNEELFF

SEQ ID NO: 629349 - protein, 14 aa, Homo sapiens
  CDR3 for alpha chain variable domain of TCR clone 314675 (TRAV13-1, TRAJ35)
CAASKGGCGNVLHC

SEQ ID NO: 629350 - protein, 13 aa, Homo sapiens
  CDR3 for beta chain variable domain of TCR clone 314675 (TRBV11-2, TRBJ2-5)
CASSSTGEETQYF

SEQ ID NO: 629351 - protein, 14 aa, Homo sapiens
  CDR3 for alpha chain variable domain of TCR clone 314676 (TRAV16, TRAJ15)
CALSFNQAGTALIS

SEQ ID NO: 629352 - protein, 16 aa, Homo sapiens
  CDR3 for beta chain variable domain of TCR clone 314676 (TRBV9, TRBJ2-7)
CASSAGPDRSPYEQYF

SEQ ID NO: 629353 - protein, 14 aa, Homo sapiens
  CDR3 for alpha chain variable domain of TCR clone 314677 (TRAV8-4, TRAJ54)
CAVSEVLGAQKRVL

SEQ ID NO: 629354 - protein, 15 aa, Homo sapiens
  CDR3 for beta chain variable domain of TCR clone 314677 (TRBV6-1, TRBJ2-6)
CASSSRPSGANVLTF

SEQ ID NO: 629355 - protein, 14 aa, Homo sapiens
  CDR3 for alpha chain variable domain of TCR clone 314678 (TRAV29/DV5, TRAJ36)
CAARRKTGANNLFF

SEQ ID NO: 629356 - protein, 14 aa, Homo sapiens
  CDR3 for beta chain variable domain of TCR clone 314678 (TRBV7-3, TRBJ1-1)
CASSLKGGNTEAFF

SEQ ID NO: 629357 - protein, 13 aa, Homo sapiens
  CDR3 for alpha chain variable domain of TCR clone 314679 (TRAV21, TRAJ57)
CAVTQGGSEKLVF

SEQ ID NO: 629358 - protein, 19 aa, Homo sapiens
  CDR3 for beta chain variable domain of TCR clone 314679 (TRBV7-2, TRBJ2-5)
CASSLSGGGGDPVLRARHA

SEQ ID NO: 629359 - protein, 10 aa, Homo sapiens
  CDR3 for alpha chain variable domain of TCR clone 314680 (TRAV23/DV6, TRAJ57)
CAASSTLSQG

SEQ ID NO: 629360 - protein, 17 aa, Homo sapiens
  CDR3 for beta chain variable domain of TCR clone 314680 (TRBV3-1, TRBJ2-7)
CASSQVAGGSGSYEQYF

SEQ ID NO: 629361 - protein, 10 aa, Homo sapiens
  CDR3 for alpha chain variable domain of TCR clone 314681 (TRAV1-2, TRAJ20)
CACNDYKLSF

SEQ ID NO: 629362 - protein, 16 aa, Homo sapiens
  CDR3 for beta chain variable domain of TCR clone 314681 (TRBV20-1, TRBJ2-1)
CSASDLKQGMNNEQFF

SEQ ID NO: 629363 - protein, 12 aa, Homo sapiens
  CDR3 for alpha chain variable domain of TCR clone 314682 (TRAV17, TRAJ57)
GATDGGAEKLVF

SEQ ID NO: 629364 - protein, 13 aa, Homo sapiens
  CDR3 for beta chain variable domain of TCR clone 314682 (TRBV7-9, TRBJ2-7)
CASSFAGAYEQYF

SEQ ID NO: 629365 - protein, 14 aa, Homo sapiens
  CDR3 for alpha chain variable domain of TCR clone 314683 (TRAV12-2, TRAJ40)
CAVKIPSGTYKYIF

SEQ ID NO: 629366 - protein, 18 aa, Homo sapiens
  CDR3 for beta chain variable domain of TCR clone 314683 (TRBV11-2, TRBJ1-6)
CASSLAVQGLSLNSPLHF

SEQ ID NO: 629367 - protein, 11 aa, Homo sapiens
  CDR3 for alpha chain variable domain of TCR clone 314684 (TRAV2, TRAJ33)
CAVESNYKLIW

SEQ ID NO: 629368 - protein, 13 aa, Homo sapiens
  CDR3 for beta chain variable domain of TCR clone 314684 (TRBV20-1, TRBJ1-6)
CSAPLGVGSPLHF

SEQ ID NO: 629369 - protein, 15 aa, Homo sapiens
  CDR3 for alpha chain variable domain of TCR clone 314685 (TRAV12-3, TRAJ6)
CAMSATTGGSYIPTF

SEQ ID NO: 629370 - protein, 16 aa, Homo sapiens
  CDR3 for beta chain variable domain of TCR clone 314685 (TRBV20-1, TRBJ1-2)
CSASMGQGVDNYGDTF

SEQ ID NO: 629371 - protein, 13 aa, Homo sapiens
  CDR3 for alpha chain variable domain of TCR clone 314686 (TRAV36/DV7, TRAJ53)
CALSGGSNYKLTF

SEQ ID NO: 629372 - protein, 15 aa, Homo sapiens
  CDR3 for beta chain variable domain of TCR clone 314686 (TRBV2, TRBJ2-1)
CASSEEREGDNEQFF

SEQ ID NO: 629373 - protein, 16 aa, Homo sapiens
  CDR3 for alpha chain variable domain of TCR clone 314687 (TRAV30, TRAJ24)
CSTEIVDADSWGKFKF

SEQ ID NO: 629374 - protein, 12 aa, Homo sapiens
  CDR3 for beta chain variable domain of TCR clone 314687 (TRBV11-2, TRBJ2-2)
CASSLGGGELFF

SEQ ID NO: 629375 - protein, 14 aa, Homo sapiens
  CDR3 for alpha chain variable domain of TCR clone 314688 (TRAV12-2, TRAJ17)
CAVNIKAAGNKLTF

SEQ ID NO: 629376 - protein, 14 aa, Homo sapiens
  CDR3 for beta chain variable domain of TCR clone 314688 (TRBV18, TRBJ2-3)
CASSPRTSTDTQYF

SEQ ID NO: 629377 - protein, 16 aa, Homo sapiens
  CDR3 for alpha chain variable domain of TCR clone 314689 (TRAV30, TRAJ24)
CGTEIVDADSWGKFQF

SEQ ID NO: 629378 - protein, 13 aa, Homo sapiens
  CDR3 for beta chain variable domain of TCR clone 314689 (TRBV7-3, TRBJ1-1)
CASSHDWGDEAFF

SEQ ID NO: 629379 - protein, 15 aa, Homo sapiens
  CDR3 for alpha chain variable domain of TCR clone 314690 (TRAV12-3, TRAJ27)
CAMRAYNTNAGKSTF

SEQ ID NO: 629380 - protein, 13 aa, Homo sapiens
  CDR3 for beta chain variable domain of TCR clone 314690 (TRBV11-2, TRBJ2-5)
CASSRGPSETQYI

SEQ ID NO: 629381 - protein, 12 aa, Homo sapiens
  CDR3 for alpha chain variable domain of TCR clone 314691 (TRAV17, TRAJ4)
CATDGGYNKLIF

SEQ ID NO: 629382 - protein, 13 aa, Homo sapiens
  CDR3 for beta chain variable domain of TCR clone 314691 (TRBV29-1, TRBJ2-2)
CSTTGVYTGELFF

SEQ ID NO: 629383 - protein, 11 aa, Homo sapiens
  CDR3 for alpha chain variable domain of TCR clone 314692 (TRAV27, TRAJ40)
SLTSGTYKYIF

SEQ ID NO: 629384 - protein, 15 aa, Homo sapiens
  CDR3 for beta chain variable domain of TCR clone 314692 (TRBV18, TRBJ2-3)
CASSIRTQIRSILAQ

SEQ ID NO: 629385 - protein, 16 aa, Homo sapiens
  CDR3 for alpha chain variable domain of TCR clone 314693 (TRAV8-6, TRAJ58)
CAVSDHTETSGPRLTF

SEQ ID NO: 629386 - protein, 22 aa, Homo sapiens
  CDR3 for beta chain variable domain of TCR clone 314693 (TRBV7-2, TRBJ1-5)
RRTRPCISVPAARGGGPQPQHF

SEQ ID NO: 629387 - protein, 14 aa, Homo sapiens
  CDR3 for alpha chain variable domain of TCR clone 314694 (TRAV1-2, TRAJ16)
CAVNRFSDGQKLLF

SEQ ID NO: 629388 - protein, 14 aa, Homo sapiens
  CDR3 for beta chain variable domain of TCR clone 314694 (TRBV7-8, TRBJ1-2)
CASSPDSLSYGYPF

SEQ ID NO: 629389 - protein, 12 aa, Homo sapiens
  CDR3 for alpha chain variable domain of TCR clone 314695 (TRAV13-1, TRAJ53)
CAETGGNYKITF

SEQ ID NO: 629390 - protein, 15 aa, Homo sapiens
  CDR3 for beta chain variable domain of TCR clone 314695 (TRBV7-2, TRBJ2-7)
CASSSVAGQTYEQYF

SEQ ID NO: 629391 - protein, 12 aa, Homo sapiens
  CDR3 for alpha chain variable domain of TCR clone 314696 (TRAV1-1, TRAJ9)
CAVDTGGFKTIF

SEQ ID NO: 629392 - protein, 14 aa, Homo sapiens
  CDR3 for beta chain variable domain of TCR clone 314696 (TRBV4-1, TRBJ2-2)
CASSQAVNTGELFF

SEQ ID NO: 629393 - protein, 16 aa, Homo sapiens
  CDR3 for alpha chain variable domain of TCR clone 314697 (TRAV20, TRAJ10)
CAVLRGLTGGGNKLTF

SEQ ID NO: 629394 - protein, 14 aa, Homo sapiens
  CDR3 for beta chain variable domain of TCR clone 314697 (TRBV19, TRBJ1-5)
CASKAPDSFLSQHF

SEQ ID NO: 629395 - protein, 18 aa, Homo sapiens
  CDR3 for alpha chain variable domain of TCR clone 314698 (TRAV12-3, TRAJ52)
CAMSALNAGGTSYGKLTF

SEQ ID NO: 629396 - protein, 14 aa, Homo sapiens
  CDR3 for beta chain variable domain of TCR clone 314698 (TRBV2, TRBJ1-5)
CASSGTVSNQPQHF

SEQ ID NO: 629397 - protein, 13 aa, Homo sapiens
  CDR3 for alpha chain variable domain of TCR clone 314699 (TRAV30, TRAJ24)
CGTVTDSWGKLQF

SEQ ID NO: 629398 - protein, 13 aa, Homo sapiens
  CDR3 for beta chain variable domain of TCR clone 314699 (TRBV10-3, TRBJ1-2)
CAISERDSYGYTF

SEQ ID NO: 629399 - protein, 15 aa, Homo sapiens
  CDR3 for alpha chain variable domain of TCR clone 314700 (TRAV29/DV5, TRAJ29)
CAASERSSGNTPLVF

SEQ ID NO: 629400 - protein, 17 aa, Homo sapiens
  CDR3 for beta chain variable domain of TCR clone 314700 (TRBV4-1, TRBJ1-4)
CPSSQEGPRGVEEKLFF

SEQ ID NO: 629401 - protein, 14 aa, Homo sapiens
  CDR3 for alpha chain variable domain of TCR clone 314701 (TRAV21, TRAJ58)
CAVRRGRSGSRWTF

SEQ ID NO: 629402 - protein, 13 aa, Homo sapiens
  CDR3 for beta chain variable domain of TCR clone 314701 (TRBV7-2, TRBJ1-6)
CASSLKFDSPLHF

SEQ ID NO: 629403 - protein, 12 aa, Homo sapiens
  CDR3 for alpha chain variable domain of TCR clone 314702 (TRAV29/DV5, TRAJ15)
CASNQAGTALIF

SEQ ID NO: 629404 - protein, 15 aa, Homo sapiens
  CDR3 for beta chain variable domain of TCR clone 314702 (TRBV11-2, TRBJ2-2)
CASSSDRVNAGKLFF

SEQ ID NO: 629405 - protein, 16 aa, Homo sapiens
  CDR3 for alpha chain variable domain of TCR clone 314703 (TRAV3, TRAJ10)
CAVRDMRAGGGNKLTF

SEQ ID NO: 629406 - protein, 15 aa, Homo sapiens
  CDR3 for beta chain variable domain of TCR clone 314703 (TRBV7-8, TRBJ1-1)
CASSLGDSRNTEAFF

SEQ ID NO: 629407 - protein, 12 aa, Homo sapiens
  CDR3 for alpha chain variable domain of TCR clone 314704 (TRAV27, TRAJ41)
CAGRNSGYSLNF

SEQ ID NO: 629408 - protein, 15 aa, Homo sapiens
  CDR3 for beta chain variable domain of TCR clone 314704 (TRBV20-1, TRBJ1-5)
CSATSDRGLGQPQHF

SEQ ID NO: 629409 - protein, 12 aa, Homo sapiens
  CDR3 for alpha chain variable domain of TCR clone 314705 (TRAV30, TRAJ43)
CGTEERGNDMRF

SEQ ID NO: 629410 - protein, 16 aa, Homo sapiens
  CDR3 for beta chain variable domain of TCR clone 314705 (TRBV20-1, TRBJ1-1)
CSARALTQGMNTEAFF

SEQ ID NO: 629411 - protein, 15 aa, Homo sapiens
  CDR3 for alpha chain variable domain of TCR clone 314706 (TRAV38-1, TRAJ37)
CAFIFGSGNSGKLIF

SEQ ID NO: 629412 - protein, 13 aa, Homo sapiens
  CDR3 for beta chain variable domain of TCR clone 314706 (TRBV19, TRBJ1-2)
CASSVPGQDGYTF

SEQ ID NO: 629413 - protein, 14 aa, Homo sapiens
  CDR3 for alpha chain variable domain of TCR clone 314707 (TRAV30, TRAJ33)
CGTVAPRSNYQLIW

SEQ ID NO: 629414 - protein, 16 aa, Homo sapiens
  CDR3 for beta chain variable domain of TCR clone 314707 (TRBV3-1, TRBJ2-5)
CASSPGQSNGFGTQYF

SEQ ID NO: 629415 - protein, 15 aa, Homo sapiens
  CDR3 for alpha chain variable domain of TCR clone 314708 (TRAV8-1, TRAJ6)
CAVNAGAGGSYRPTF

SEQ ID NO: 629416 - protein, 14 aa, Homo sapiens
  CDR3 for beta chain variable domain of TCR clone 314708 (TRBV25-1, TRBJ1-6)
CASSLSADISPLHF

SEQ ID NO: 629417 - protein, 12 aa, Homo sapiens
  CDR3 for alpha chain variable domain of TCR clone 314709 (TRAV12-1, TRAJ32)
YVVKGATNKLIF

SEQ ID NO: 629418 - protein, 18 aa, Homo sapiens
  CDR3 for beta chain variable domain of TCR clone 314709 (TRBV10-3, TRBJ2-3)
CAISESRVGPMRGDTQYF

SEQ ID NO: 629419 - protein, 14 aa, Homo sapiens
  CDR3 for alpha chain variable domain of TCR clone 314710 (TRAV2, TRAJ37)
CAVEGSSNTGKIIF

SEQ ID NO: 629420 - protein, 15 aa, Homo sapiens
  CDR3 for beta chain variable domain of TCR clone 314710 (TRBV24-1, TRBJ2-4)
CATSDPRDRANIQYF

SEQ ID NO: 629421 - protein, 17 aa, Homo sapiens
  CDR3 for alpha chain variable domain of TCR clone 314711 (TRAV4, TRAJ13)
CLVGVQGSSGGYQKVTF

SEQ ID NO: 629422 - protein, 18 aa, Homo sapiens
  CDR3 for beta chain variable domain of TCR clone 314711 (TRBV15, TRBJ2-3)
CATSRDGARSWDTDTQYL

SEQ ID NO: 629423 - protein, 15 aa, Homo sapiens
  CDR3 for alpha chain variable domain of TCR clone 314712 (TRAV26-1, TRAJ44)
CIARVPFGTASKLTF

SEQ ID NO: 629424 - protein, 13 aa, Homo sapiens
  CDR3 for beta chain variable domain of TCR clone 314712 (TRBV12-5, TRBJ2-3)
CASGDRQSDTQYF

SEQ ID NO: 629425 - protein, 14 aa, Homo sapiens
  CDR3 for alpha chain variable domain of TCR clone 314713 (TRAV1-2, TRAJ16)
CAVNRFSDGQKLLF

SEQ ID NO: 629426 - protein, 13 aa, Homo sapiens
  CDR3 for beta chain variable domain of TCR clone 314713 (TRBV12-4, TRBJ2-1)
CASRQPSNNEQFF

SEQ ID NO: 629427 - protein, 11 aa, Homo sapiens
  CDR3 for alpha chain variable domain of TCR clone 314714 (TRAV2, TRAJ13)
CASAGYQKVTF

SEQ ID NO: 629428 - protein, 14 aa, Homo sapiens
  CDR3 for beta chain variable domain of TCR clone 314714 (TRBV19, TRBJ2-1)
CASSKDRGQDEQFF

SEQ ID NO: 629429 - protein, 11 aa, Homo sapiens
  CDR3 for alpha chain variable domain of TCR clone 314715 (TRAV13-2, TRAJ54)
RAVQGAQKLVF

SEQ ID NO: 629430 - protein, 14 aa, Homo sapiens
  CDR3 for beta chain variable domain of TCR clone 314715 (TRBV7-2, TRBJ2-5)
CASSFTQGQETQYF

SEQ ID NO: 629431 - protein, 12 aa, Homo sapiens
  CDR3 for alpha chain variable domain of TCR clone 314716 (TRAV12-3, TRAJ17)
CAMTLTGNKLTF

SEQ ID NO: 629432 - protein, 13 aa, Homo sapiens
  CDR3 for beta chain variable domain of TCR clone 314716 (TRBV10-3, TRBJ2-7)
CASTLAVNYEQYF

SEQ ID NO: 629433 - protein, 11 aa, Homo sapiens
  CDR3 for alpha chain variable domain of TCR clone 314717 (TRAV21, TRAJ41)
CAVRFGYALNF

SEQ ID NO: 629434 - protein, 13 aa, Homo sapiens
  CDR3 for beta chain variable domain of TCR clone 314717 (TRBV7-9, TRBJ1-2)
CASSFKQNYGYTF

SEQ ID NO: 629435 - protein, 13 aa, Homo sapiens
  CDR3 for alpha chain variable domain of TCR clone 314718 (TRAV12-2, TRAJ44)
CREQSGTASKLTF

SEQ ID NO: 629436 - protein, 12 aa, Homo sapiens
  CDR3 for beta chain variable domain of TCR clone 314718 (TRBV19, TRBJ1-4)
CASKDWPGGLFF

SEQ ID NO: 629437 - protein, 11 aa, Homo sapiens
  CDR3 for alpha chain variable domain of TCR clone 314719 (TRAV13-2, TRAJ45)
VTGGGADGLTF

SEQ ID NO: 629438 - protein, 17 aa, Homo sapiens
  CDR3 for beta chain variable domain of TCR clone 314719 (TRBV19, TRBJ1-1)
CASSIAGRGLKNTEAFF

SEQ ID NO: 629439 - protein, 12 aa, Homo sapiens
  CDR3 for alpha chain variable domain of TCR clone 314720 (TRAV17, TRAJ57)
CATDGASEKLVF

SEQ ID NO: 629440 - protein, 13 aa, Homo sapiens
  CDR3 for beta chain variable domain of TCR clone 314720 (TRBV7-9, TRBJ2-7)
CASSFAGAYEQYF

SEQ ID NO: 629441 - protein, 14 aa, Homo sapiens
  CDR3 for alpha chain variable domain of TCR clone 314721 (TRAV29/DV5, TRAJ36)
CAARRKTGANNLFF

SEQ ID NO: 629442 - protein, 14 aa, Homo sapiens
  CDR3 for beta chain variable domain of TCR clone 314721 (TRBV12-4, TRBJ1-1)
CASTWTGHDTEAFF

SEQ ID NO: 629443 - protein, 11 aa, Homo sapiens
  CDR3 for alpha chain variable domain of TCR clone 314722 (TRAV1-1, TRAJ23)
CAVRQGGKLIF

SEQ ID NO: 629444 - protein, 20 aa, Homo sapiens
  CDR3 for beta chain variable domain of TCR clone 314722 (TRBV11-2, TRBJ1-6)
RASSLVFATGGSVHPSTLGT

SEQ ID NO: 629445 - protein, 17 aa, Homo sapiens
  CDR3 for alpha chain variable domain of TCR clone 314723 (TRAV23/DV6, TRAJ57)
CAASSTLSQGGSEKLVF

SEQ ID NO: 629446 - protein, 19 aa, Homo sapiens
  CDR3 for beta chain variable domain of TCR clone 314723 (TRBV10-3, TRBJ2-6)
CTSVPSVSLQLPLANVLTF

SEQ ID NO: 629447 - protein, 16 aa, Homo sapiens
  CDR3 for alpha chain variable domain of TCR clone 314724 (TRAV23/DV6, TRAJ9)
CAASIGENTGGFKTIF

SEQ ID NO: 629448 - protein, 16 aa, Homo sapiens
  CDR3 for beta chain variable domain of TCR clone 314724 (TRBV15, TRBJ2-3)
CATRLSGGRAPDTQYF

SEQ ID NO: 629449 - protein, 15 aa, Homo sapiens
  CDR3 for alpha chain variable domain of TCR clone 314725 (TRAV35, TRAJ50)
CAGQLRKTSYDKVTF

SEQ ID NO: 629450 - protein, 12 aa, Homo sapiens
  CDR3 for beta chain variable domain of TCR clone 314725 (TRBV5-1, TRBJ2-5)
RASSLGLETQYF

SEQ ID NO: 629451 - protein, 15 aa, Homo sapiens
  CDR3 for alpha chain variable domain of TCR clone 314726 (TRAV26-1, TRAJ37)
RIVKTGSSDTGKLIF

SEQ ID NO: 629452 - protein, 12 aa, Homo sapiens
  CDR3 for beta chain variable domain of TCR clone 314726 (TRBV7-8, TRBJ2-7)
CASSLGDREQYF

SEQ ID NO: 629453 - protein, 13 aa, Homo sapiens
  CDR3 for alpha chain variable domain of TCR clone 314727 (TRAV27, TRAJ40)
CAGPPSGTYKSIF

SEQ ID NO: 629454 - protein, 13 aa, Homo sapiens
  CDR3 for beta chain variable domain of TCR clone 314727 (TRBV28, TRBJ1-2)
CAGRDRGNYGYTF

SEQ ID NO: 629455 - protein, 14 aa, Homo sapiens
  CDR3 for alpha chain variable domain of TCR clone 314728 (TRAV16, TRAJ39)
FALSKNNAGNMLTF

SEQ ID NO: 629456 - protein, 17 aa, Homo sapiens
  CDR3 for beta chain variable domain of TCR clone 314728 (TRBV23-1, TRBJ1-2)
CASSNTGGGLLWLHLRF

SEQ ID NO: 629457 - protein, 16 aa, Homo sapiens
  CDR3 for alpha chain variable domain of TCR clone 314729 (TRAV3, TRAJ37)
CAVRGKGSGNTGKLIL

SEQ ID NO: 629458 - protein, 16 aa, Homo sapiens
  CDR3 for beta chain variable domain of TCR clone 314729 (TRBV12-5, TRBJ2-5)
CASGPRTSGSQGTQYF

SEQ ID NO: 629459 - protein, 15 aa, Homo sapiens
  CDR3 for alpha chain variable domain of TCR clone 314730 (TRAV4, TRAJ10)
CLVGDEEGGGNKLTF

SEQ ID NO: 629460 - protein, 15 aa, Homo sapiens
  CDR3 for beta chain variable domain of TCR clone 314730 (TRBV7-2, TRBJ2-7)
CASSVTGQGTYEQYF

SEQ ID NO: 629461 - protein, 12 aa, Homo sapiens
  CDR3 for alpha chain variable domain of TCR clone 314731 (TRAV8-6, TRAJ33)
CAVTDSNYQLIW

SEQ ID NO: 629462 - protein, 17 aa, Homo sapiens
  CDR3 for beta chain variable domain of TCR clone 314731 (TRBV7-6, TRBJ2-5)
CASSSPQAGDPSETQYF

SEQ ID NO: 629463 - protein, 15 aa, Homo sapiens
  CDR3 for alpha chain variable domain of TCR clone 314732 (TRAV8-3, TRAJ45)
CASSYSGGGADGLTF

SEQ ID NO: 629464 - protein, 13 aa, Homo sapiens
  CDR3 for beta chain variable domain of TCR clone 314732 (TRBV7-8, TRBJ1-2)
CASSAQSYYGYTF

SEQ ID NO: 629465 - protein, 16 aa, Homo sapiens
  CDR3 for alpha chain variable domain of TCR clone 314733 (TRAV23/DV6, TRAJ13)
CAASFSFSGGYQKVTF

SEQ ID NO: 629466 - protein, 12 aa, Homo sapiens
  CDR3 for beta chain variable domain of TCR clone 314733 (TRBV5-1, TRBJ2-7)
CASSFRGYEQYF

SEQ ID NO: 629467 - protein, 14 aa, Homo sapiens
  CDR3 for alpha chain variable domain of TCR clone 314734 (TRAV8-4, TRAJ34)
CAVSDSGDTDKLIF

SEQ ID NO: 629468 - protein, 13 aa, Homo sapiens
  CDR3 for beta chain variable domain of TCR clone 314734 (TRBV7-9, TRBJ2-5)
CASLSPGQETQYF

SEQ ID NO: 629469 - protein, 14 aa, Homo sapiens
  CDR3 for alpha chain variable domain of TCR clone 314735 (TRAV30, TRAJ26)
CGTEIISYGQNFVF

SEQ ID NO: 629470 - protein, 13 aa, Homo sapiens
  CDR3 for beta chain variable domain of TCR clone 314735 (TRBV19, TRBJ1-3)
CASRLSLGNTIYF

SEQ ID NO: 629471 - protein, 16 aa, Homo sapiens
  CDR3 for alpha chain variable domain of TCR clone 314736 (TRAV3, TRAJ37)
CAVRGKGSGNTGKLIF

SEQ ID NO: 629472 - protein, 15 aa, Homo sapiens
  CDR3 for beta chain variable domain of TCR clone 314736 (TRBV7-9, TRBJ1-6)
CASSSPGRGNSPLRF

SEQ ID NO: 629473 - protein, 15 aa, Homo sapiens
  CDR3 for alpha chain variable domain of TCR clone 314737 (TRAV27, TRAJ38)
CAGRLNAGNNRKLIW

SEQ ID NO: 629474 - protein, 13 aa, Homo sapiens
  CDR3 for beta chain variable domain of TCR clone 314737 (TRBV12-5, TRBJ2-3)
CASQSRGTDTQYF

SEQ ID NO: 629475 - protein, 10 aa, Homo sapiens
  CDR3 for alpha chain variable domain of TCR clone 314738 (TRAV12-3, TRAJ49)
CAMNDDQFYF

SEQ ID NO: 629476 - protein, 15 aa, Homo sapiens
  CDR3 for beta chain variable domain of TCR clone 314738 (TRBV27, TRBJ2-1)
CASSNGGGSSNEQFF

SEQ ID NO: 629477 - protein, 11 aa, Homo sapiens
  CDR3 for alpha chain variable domain of TCR clone 314739 (TRAV16, TRAJ20)
CALSEGFKAAL

SEQ ID NO: 629478 - protein, 16 aa, Homo sapiens
  CDR3 for beta chain variable domain of TCR clone 314739 (TRBV7-2, TRBJ2-2)
CASSVTGGGRAGELFF

SEQ ID NO: 629479 - protein, 13 aa, Homo sapiens
  CDR3 for alpha chain variable domain of TCR clone 314740 (TRAV21, TRAJ27)
CAARPGNAGKSTF

SEQ ID NO: 629480 - protein, 15 aa, Homo sapiens
  CDR3 for beta chain variable domain of TCR clone 314740 (TRBV20-1, TRBJ2-7)
CSARDRVSGMDEQYS

SEQ ID NO: 629481 - protein, 16 aa, Homo sapiens
  CDR3 for alpha chain variable domain of TCR clone 314741 (TRAV35, TRAJ28)
CAGQRYSGAGSYQLTF

SEQ ID NO: 629482 - protein, 15 aa, Homo sapiens
  CDR3 for beta chain variable domain of TCR clone 314741 (TRBV5-1, TRBJ2-7)
CASSLNGGPAREQYF

SEQ ID NO: 629483 - protein, 17 aa, Homo sapiens
  CDR3 for alpha chain variable domain of TCR clone 314742 (TRAV3, TRAJ6)
CAVRDGPRAGGGYIPTF

SEQ ID NO: 629484 - protein, 14 aa, Homo sapiens
  CDR3 for beta chain variable domain of TCR clone 314742 (TRBV7-2, TRBJ2-7)
CASSHKTSFYEQYF

SEQ ID NO: 629485 - protein, 15 aa, Homo sapiens
  CDR3 for alpha chain variable domain of TCR clone 314743 (TRAV25, TRAJ52)
CAGTSGGTTYGKLTF

SEQ ID NO: 629486 - protein, 13 aa, Homo sapiens
  CDR3 for beta chain variable domain of TCR clone 314743 (TRBV6-5, TRBJ2-5)
CASSPQGGETQYF

SEQ ID NO: 629487 - protein, 13 aa, Homo sapiens
  CDR3 for alpha chain variable domain of TCR clone 314744 (TRAV36/DV7, TRAJ37)
CAVFSSNTGKLIF

SEQ ID NO: 629488 - protein, 15 aa, Homo sapiens
  CDR3 for beta chain variable domain of TCR clone 314744 (TRBV12-4, TRBJ2-5)
CQQFFVRGRQETQCF

SEQ ID NO: 629489 - protein, 11 aa, Homo sapiens
  CDR3 for alpha chain variable domain of TCR clone 314745 (TRAV1-2, TRAJ20)
CAVANDYKLSF

SEQ ID NO: 629490 - protein, 13 aa, Homo sapiens
  CDR3 for beta chain variable domain of TCR clone 314745 (TRBV3-1, TRBJ2-5)
CASSPVLSETQYF

SEQ ID NO: 629491 - protein, 15 aa, Homo sapiens
  CDR3 for alpha chain variable domain of TCR clone 314746 (TRAV8-3, TRAJ11)
CAVGLLNSGYSTLTF

SEQ ID NO: 629492 - protein, 16 aa, Homo sapiens
  CDR3 for beta chain variable domain of TCR clone 314746 (TRBV7-2, TRBJ1-2)
CASSSNQDRRGHGYTF

SEQ ID NO: 629493 - protein, 15 aa, Homo sapiens
  CDR3 for alpha chain variable domain of TCR clone 314747 (TRAV12-1, TRAJ44)
CVVVTPQGTASKLTF

SEQ ID NO: 629494 - protein, 13 aa, Homo sapiens
  CDR3 for beta chain variable domain of TCR clone 314747 (TRBV27, TRBJ2-1)
CASSSGSYNEQFF

SEQ ID NO: 629495 - protein, 12 aa, Homo sapiens
  CDR3 for alpha chain variable domain of TCR clone 314748 (TRAV12-3, TRAJ17)
CAMTLTGNKLTF

SEQ ID NO: 629496 - protein, 11 aa, Homo sapiens
  CDR3 for beta chain variable domain of TCR clone 314748 (TRBV20-1, TRBJ1-2)
CSARDRGGYTF

SEQ ID NO: 629497 - protein, 12 aa, Homo sapiens
  CDR3 for alpha chain variable domain of TCR clone 314749 (TRAV20, TRAJ39)
CAVGNAGNKLTF

SEQ ID NO: 629498 - protein, 16 aa, Homo sapiens
  CDR3 for beta chain variable domain of TCR clone 314749 (TRBV15, TRBJ1-2)
CATSRGPRTGGGGYTF

SEQ ID NO: 629499 - protein, 12 aa, Homo sapiens
  CDR3 for alpha chain variable domain of TCR clone 314750 (TRAV12-3, TRAJ17)
CAMTLTGNKLTF

SEQ ID NO: 629500 - protein, 15 aa, Homo sapiens
  CDR3 for beta chain variable domain of TCR clone 314750 (TRBV5-7, TRBJ2-7)
CASSPYFEGSYEQFF

SEQ ID NO: 629501 - protein, 14 aa, Homo sapiens
  CDR3 for alpha chain variable domain of TCR clone 314751 (TRAV1-2, TRAJ16)
CAVNRFSDGQKLLF

SEQ ID NO: 629502 - protein, 14 aa, Homo sapiens
  CDR3 for beta chain variable domain of TCR clone 314751 (TRBV7-3, TRBJ2-1)
CASSLAGGTNEQYF

SEQ ID NO: 629503 - protein, 12 aa, Homo sapiens
  CDR3 for alpha chain variable domain of TCR clone 314752 (TRAV1-1, TRAJ8)
CAGGTGFQKLVF

SEQ ID NO: 629504 - protein, 16 aa, Homo sapiens
  CDR3 for beta chain variable domain of TCR clone 314752 (TRBV12-4, TRBJ2-7)
CASSLIGGTGTYEQYF

SEQ ID NO: 629505 - protein, 15 aa, Homo sapiens
  CDR3 for alpha chain variable domain of TCR clone 314753 (TRAV4, TRAJ39)
CLVGPNNNAGNVLTF

SEQ ID NO: 629506 - protein, 16 aa, Homo sapiens
  CDR3 for beta chain variable domain of TCR clone 314753 (TRBV13, TRBJ2-2)
CASSPRTGEHTGELFF

SEQ ID NO: 629507 - protein, 15 aa, Homo sapiens
  CDR3 for alpha chain variable domain of TCR clone 314754 (TRAV12-1, TRAJ44)
CVADLPTGTASKLTL

SEQ ID NO: 629508 - protein, 13 aa, Homo sapiens
  CDR3 for beta chain variable domain of TCR clone 314754 (TRBV20-1, TRBJ2-5)
CSARGDYQETQYF

SEQ ID NO: 629509 - protein, 15 aa, Homo sapiens
  CDR3 for alpha chain variable domain of TCR clone 314755 (TRAV8-3, TRAJ27)
CAVGPSKTNAGKSTL

SEQ ID NO: 629510 - protein, 15 aa, Homo sapiens
  CDR3 for beta chain variable domain of TCR clone 314755 (TRBV7-2, TRBJ2-1)
CASSSGLAGGNGQFF

SEQ ID NO: 629511 - protein, 13 aa, Homo sapiens
  CDR3 for alpha chain variable domain of TCR clone 314756 (TRAV2, TRAJ40)
CAVVTSGTYKFIF

SEQ ID NO: 629512 - protein, 18 aa, Homo sapiens
  CDR3 for beta chain variable domain of TCR clone 314756 (TRBV5-1, TRBJ1-6)
CASSPGQTRIPYNSPLHF

SEQ ID NO: 629513 - protein, 13 aa, Homo sapiens
  CDR3 for alpha chain variable domain of TCR clone 314757 (TRAV20, TRAJ31)
CAVQAIGGARPMF

SEQ ID NO: 629514 - protein, 14 aa, Homo sapiens
  CDR3 for beta chain variable domain of TCR clone 314757 (TRBV2, TRBJ1-5)
CASSGTVSNQPQHF

SEQ ID NO: 629515 - protein, 13 aa, Homo sapiens
  CDR3 for alpha chain variable domain of TCR clone 314758 (TRAV1-2, TRAJ9)
CAALNTGGFKTIF

SEQ ID NO: 629516 - protein, 16 aa, Homo sapiens
  CDR3 for beta chain variable domain of TCR clone 314758 (TRBV5-5, TRBJ2-3)
CASSLEKRGAADTQYF

SEQ ID NO: 629517 - protein, 18 aa, Homo sapiens
  CDR3 for alpha chain variable domain of TCR clone 314759 (TRAV2, TRAJ39)
CCLLLCWEGDNAGNMLTF

SEQ ID NO: 629518 - protein, 14 aa, Homo sapiens
  CDR3 for beta chain variable domain of TCR clone 314759 (TRBV28, TRBJ2-7)
CASSLRARGNEQYF

SEQ ID NO: 629519 - protein, 13 aa, Homo sapiens
  CDR3 for alpha chain variable domain of TCR clone 314760 (TRAV2, TRAJ15)
CAVASQAGTALIV

SEQ ID NO: 629520 - protein, 16 aa, Homo sapiens
  CDR3 for beta chain variable domain of TCR clone 314760 (TRBV5-1, TRBJ1-1)
CASSSGGNSLNTEAFF

SEQ ID NO: 629521 - protein, 14 aa, Homo sapiens
  CDR3 for alpha chain variable domain of TCR clone 314761 (TRAV13-1, TRAJ9)
CAASALTGGFKTIF

SEQ ID NO: 629522 - protein, 11 aa, Homo sapiens
  CDR3 for beta chain variable domain of TCR clone 314761 (TRBV28, TRBJ2-5)
CATGNQETQYF

SEQ ID NO: 629523 - protein, 11 aa, Homo sapiens
  CDR3 for alpha chain variable domain of TCR clone 314762 (TRAV2, TRAJ33)
CAVESNYQLIW

SEQ ID NO: 629524 - protein, 17 aa, Homo sapiens
  CDR3 for beta chain variable domain of TCR clone 314762 (TRBV7-9, TRBJ2-6)
CASSFGAGYSGANVLTF

SEQ ID NO: 629525 - protein, 16 aa, Homo sapiens
  CDR3 for alpha chain variable domain of TCR clone 314763 (TRAV12-1, TRAJ43)
CVVNPHRFGSGTRLTV

SEQ ID NO: 629526 - protein, 16 aa, Homo sapiens
  CDR3 for beta chain variable domain of TCR clone 314763 (TRBV27, TRBJ2-2)
CASSSTGGGDTGELFF

SEQ ID NO: 629527 - protein, 13 aa, Homo sapiens
  CDR3 for alpha chain variable domain of TCR clone 314764 (TRAV36/DV7, TRAJ37)
CAVFSSNTGKLIF

SEQ ID NO: 629528 - protein, 10 aa, Homo sapiens
  CDR3 for beta chain variable domain of TCR clone 314764 (TRBV10-3, TRBJ2-7)
CAATSNEQYF

SEQ ID NO: 629529 - protein, 15 aa, Homo sapiens
  CDR3 for alpha chain variable domain of TCR clone 314765 (TRAV3, TRAJ37)
CCERKGSGNTGKLIF

SEQ ID NO: 629530 - protein, 13 aa, Homo sapiens
  CDR3 for beta chain variable domain of TCR clone 314765 (TRBV4-2, TRBJ1-1)
CASSQAGNTEAFF

SEQ ID NO: 629531 - protein, 18 aa, Homo sapiens
  CDR3 for alpha chain variable domain of TCR clone 314766 (TRAV13-1, TRAJ52)
CAASKTSAGGTSYGKLTF

SEQ ID NO: 629532 - protein, 13 aa, Homo sapiens
  CDR3 for beta chain variable domain of TCR clone 314766 (TRBV12-4, TRBJ1-2)
CASSLRQRKGYTF

SEQ ID NO: 629533 - protein, 14 aa, Homo sapiens
  CDR3 for alpha chain variable domain of TCR clone 314767 (TRAV3, TRAJ20)
CAVPPAPNDYKLSF

SEQ ID NO: 629534 - protein, 19 aa, Homo sapiens
  CDR3 for beta chain variable domain of TCR clone 314767 (TRBV19, TRBJ2-5)
CASSIGQVTDFFLGETQYF

SEQ ID NO: 629535 - protein, 11 aa, Homo sapiens
  CDR3 for alpha chain variable domain of TCR clone 314768 (TRAV8-4, TRAJ20)
CAVTNVLTTTS

SEQ ID NO: 629536 - protein, 13 aa, Homo sapiens
  CDR3 for beta chain variable domain of TCR clone 314768 (TRBV19, TRBJ2-3)
CATWDKITDTQYV

SEQ ID NO: 629537 - protein, 13 aa, Homo sapiens
  CDR3 for alpha chain variable domain of TCR clone 314769 (TRAV12-1, TRAJ6)
CVVFPGGSYIPTF

SEQ ID NO: 629538 - protein, 17 aa, Homo sapiens
  CDR3 for beta chain variable domain of TCR clone 314769 (TRBV7-2, TRBJ2-3)
CASSARSSGSPTDTQYF

SEQ ID NO: 629539 - protein, 14 aa, Homo sapiens
  CDR3 for alpha chain variable domain of TCR clone 314770 (TRAV12-2, TRAJ17)
CAVNIKAAGHKLTF

SEQ ID NO: 629540 - protein, 16 aa, Homo sapiens
  CDR3 for beta chain variable domain of TCR clone 314770 (TRBV12-5, TRBJ2-5)
CASGPRTSGNQETQYF

SEQ ID NO: 629541 - protein, 13 aa, Homo sapiens
  CDR3 for alpha chain variable domain of TCR clone 314771 (TRAV12-1, TRAJ22)
CVASGGSARQLTF

SEQ ID NO: 629542 - protein, 12 aa, Homo sapiens
  CDR3 for beta chain variable domain of TCR clone 314771 (TRBV29-1, TRBJ2-3)
CSVTWGADTQYF

SEQ ID NO: 629543 - protein, 16 aa, Homo sapiens
  CDR3 for alpha chain variable domain of TCR clone 314772 (TRAV3, TRAJ23)
CAVKIGIYNQGGKLIF

SEQ ID NO: 629544 - protein, 17 aa, Homo sapiens
  CDR3 for beta chain variable domain of TCR clone 314772 (TRBV10-3, TRBJ2-6)
CAISESTAPPGANVLTF

SEQ ID NO: 629545 - protein, 15 aa, Homo sapiens
  CDR3 for alpha chain variable domain of TCR clone 314773 (TRAV38-1, TRAJ37)
CAFIHGSGNKGKLIF

SEQ ID NO: 629546 - protein, 16 aa, Homo sapiens
  CDR3 for beta chain variable domain of TCR clone 314773 (TRBV12-5, TRBJ2-5)
CASGPRTSGNQETQYF

SEQ ID NO: 629547 - protein, 14 aa, Homo sapiens
  CDR3 for alpha chain variable domain of TCR clone 314774 (TRAV8-3, TRAJ23)
CAVIIYNQGGKLIF

SEQ ID NO: 629548 - protein, 17 aa, Homo sapiens
  CDR3 for beta chain variable domain of TCR clone 314774 (TRBV2, TRBJ2-6)
CASSLQGRSSGANVLTF

SEQ ID NO: 629549 - protein, 17 aa, Homo sapiens
  CDR3 for alpha chain variable domain of TCR clone 314775 (TRAV23/DV6, TRAJ58)
CAARLLRGETSGSRLTF

SEQ ID NO: 629550 - protein, 15 aa, Homo sapiens
  CDR3 for beta chain variable domain of TCR clone 314775 (TRBV9, TRBJ1-6)
CASSVAGTGDSHLHF

SEQ ID NO: 629551 - protein, 14 aa, Homo sapiens
  CDR3 for alpha chain variable domain of TCR clone 314776 (TRAV8-1, TRAJ13)
CAVKRSGGYQKVTF

SEQ ID NO: 629552 - protein, 14 aa, Homo sapiens
  CDR3 for beta chain variable domain of TCR clone 314776 (TRBV19, TRBJ2-1)
CASPTFVLSGEQFF

SEQ ID NO: 629553 - protein, 16 aa, Homo sapiens
  CDR3 for alpha chain variable domain of TCR clone 314777 (TRAV30, TRAJ24)
CGTEIVDADSWGKCQF

SEQ ID NO: 629554 - protein, 14 aa, Homo sapiens
  CDR3 for beta chain variable domain of TCR clone 314777 (TRBV12-5, TRBJ2-5)
CASGSPTHQETQYF

SEQ ID NO: 629555 - protein, 12 aa, Homo sapiens
  CDR3 for alpha chain variable domain of TCR clone 314778 (TRAV2, TRAJ9)
CAVGAGGFKTIF

SEQ ID NO: 629556 - protein, 16 aa, Homo sapiens
  CDR3 for beta chain variable domain of TCR clone 314778 (TRBV13, TRBJ2-2)
CASSPRTGEHTGEVFF

SEQ ID NO: 629557 - protein, 18 aa, Homo sapiens
  CDR3 for alpha chain variable domain of TCR clone 314779 (TRAV13-1, TRAJ52)
CAAKNPNAGGTSYGKLTF

SEQ ID NO: 629558 - protein, 12 aa, Homo sapiens
  CDR3 for beta chain variable domain of TCR clone 314779 (TRBV12-4, TRBJ1-3)
CASSFSGNTIYF

SEQ ID NO: 629559 - protein, 14 aa, Homo sapiens
  CDR3 for alpha chain variable domain of TCR clone 314780 (TRAV23/DV6, TRAJ24)
CAASLSDSGGKLQF

SEQ ID NO: 629560 - protein, 15 aa, Homo sapiens
  CDR3 for beta chain variable domain of TCR clone 314780 (TRBV9, TRBJ1-6)
CASSVAGTGDSPLHF

SEQ ID NO: 629561 - protein, 14 aa, Homo sapiens
  CDR3 for alpha chain variable domain of TCR clone 314781 (TRAV26-1, TRAJ38)
CIADNAGNNRKLIW

SEQ ID NO: 629562 - protein, 15 aa, Homo sapiens
  CDR3 for beta chain variable domain of TCR clone 314781 (TRBV11-2, TRBJ2-1)
CASSSPSTRYNEQFF

SEQ ID NO: 629563 - protein, 13 aa, Homo sapiens
  CDR3 for alpha chain variable domain of TCR clone 314782 (TRAV2, TRAJ40)
CAVVTSGTYKYIF

SEQ ID NO: 629564 - protein, 18 aa, Homo sapiens
  CDR3 for beta chain variable domain of TCR clone 314782 (TRBV19, TRBJ2-6)
CASSADRAGSSGANVLTF

SEQ ID NO: 629565 - protein, 14 aa, Homo sapiens
  CDR3 for alpha chain variable domain of TCR clone 314783 (TRAV8-3, TRAJ4)
CAVGASGGYNKLIF

SEQ ID NO: 629566 - protein, 17 aa, Homo sapiens
  CDR3 for beta chain variable domain of TCR clone 314783 (TRBV11-2, TRBJ2-1)
CASSLYHPGVEYNEQFF

SEQ ID NO: 629567 - protein, 20 aa, Homo sapiens
  CDR3 for alpha chain variable domain of TCR clone 314784 (TRAV26-1, TRAJ42)
CCVLLHRQTYYGGSKGNLIF

SEQ ID NO: 629568 - protein, 14 aa, Homo sapiens
  CDR3 for beta chain variable domain of TCR clone 314784 (TRBV19, TRBJ2-2)
CASSGQGIAGELFF

SEQ ID NO: 629569 - protein, 11 aa, Homo sapiens
  CDR3 for alpha chain variable domain of TCR clone 314785 (TRAV35, TRAJ12)
RRMDSSYKLIF

SEQ ID NO: 629570 - protein, 14 aa, Homo sapiens
  CDR3 for beta chain variable domain of TCR clone 314785 (TRBV19, TRBJ1-1)
CASSPNRGDTDAFF

SEQ ID NO: 629571 - protein, 14 aa, Homo sapiens
  CDR3 for alpha chain variable domain of TCR clone 314786 (TRAV9-2, TRAJ39)
CALYIYNAGNMLTS

SEQ ID NO: 629572 - protein, 12 aa, Homo sapiens
  CDR3 for beta chain variable domain of TCR clone 314786 (TRBV11-2, TRBJ2-2)
CASSLGGGELLF

SEQ ID NO: 629573 - protein, 17 aa, Homo sapiens
  CDR3 for alpha chain variable domain of TCR clone 314787 (TRAV38-2/DV8, TRAJ56)
FAYRSEVGTGTNSKLTF

SEQ ID NO: 629574 - protein, 14 aa, Homo sapiens
  CDR3 for beta chain variable domain of TCR clone 314787 (TRBV11-1, TRBJ1-1)
CASSLEHPNTEAFF

SEQ ID NO: 629575 - protein, 13 aa, Homo sapiens
  CDR3 for alpha chain variable domain of TCR clone 314788 (TRAV17, TRAJ5)
CALRGTGRRALTF

SEQ ID NO: 629576 - protein, 14 aa, Homo sapiens
  CDR3 for beta chain variable domain of TCR clone 314788 (TRBV5-5, TRBJ1-5)
CASSGQGVDQPQHF

SEQ ID NO: 629577 - protein, 13 aa, Homo sapiens
  CDR3 for alpha chain variable domain of TCR clone 314789 (TRAV20, TRAJ34)
CAGGSYNTDKLIF

SEQ ID NO: 629578 - protein, 15 aa, Homo sapiens
  CDR3 for beta chain variable domain of TCR clone 314789 (TRBV7-9, TRBJ1-4)
CASSLAGAHGEKLFF

SEQ ID NO: 629579 - protein, 13 aa, Homo sapiens
  CDR3 for alpha chain variable domain of TCR clone 314790 (TRAV8-1, TRAJ39)
CAVANNAGNMLTF

SEQ ID NO: 629580 - protein, 13 aa, Homo sapiens
  CDR3 for beta chain variable domain of TCR clone 314790 (TRBV7-3, TRBJ1-1)
CASSQDWGAEAFF

SEQ ID NO: 629581 - protein, 13 aa, Homo sapiens
  CDR3 for alpha chain variable domain of TCR clone 314791 (TRAV3, TRAJ15)
CAVRDQAGTALIF

SEQ ID NO: 629582 - protein, 15 aa, Homo sapiens
  CDR3 for beta chain variable domain of TCR clone 314791 (TRBV28, TRBJ2-7)
CASSPGGRGFYEQYF

SEQ ID NO: 629583 - protein, 18 aa, Homo sapiens
  CDR3 for alpha chain variable domain of TCR clone 314792 (TRAV26-1, TRAJ52)
CIVRVEGAGGTSYGKLTF

SEQ ID NO: 629584 - protein, 16 aa, Homo sapiens
  CDR3 for beta chain variable domain of TCR clone 314792 (TRBV7-3, TRBJ2-2)
CASSLKRGTLSGELFF

SEQ ID NO: 629585 - protein, 14 aa, Homo sapiens
  CDR3 for alpha chain variable domain of TCR clone 314793 (TRAV12-3, TRAJ9)
CATSVETGGFNTIF

SEQ ID NO: 629586 - protein, 14 aa, Homo sapiens
  CDR3 for beta chain variable domain of TCR clone 314793 (TRBV7-2, TRBJ2-7)
CASRSQGAAYEQYF

SEQ ID NO: 629587 - protein, 14 aa, Homo sapiens
  CDR3 for alpha chain variable domain of TCR clone 314794 (TRAV9-2, TRAJ39)
CALYIYNAGNMLTF

SEQ ID NO: 629588 - protein, 14 aa, Homo sapiens
  CDR3 for beta chain variable domain of TCR clone 314794 (TRBV12-5, TRBJ2-5)
CASCSRTHQETQYF

SEQ ID NO: 629589 - protein, 12 aa, Homo sapiens
  CDR3 for alpha chain variable domain of TCR clone 314795 (TRAV29/DV5, TRAJ39)
CAVPVVGNMLTF

SEQ ID NO: 629590 - protein, 15 aa, Homo sapiens
  CDR3 for beta chain variable domain of TCR clone 314795 (TRBV19, TRBJ1-6)
CASSTQGAVGSPLHF

SEQ ID NO: 629591 - protein, 14 aa, Homo sapiens
  CDR3 for alpha chain variable domain of TCR clone 314796 (TRAV2, TRAJ9)
CAVEDRSGGFKTTF

SEQ ID NO: 629592 - protein, 14 aa, Homo sapiens
  CDR3 for beta chain variable domain of TCR clone 314796 (TRBV5-1, TRBJ2-3)
CASRVDGVSDTQYF

SEQ ID NO: 629593 - protein, 14 aa, Homo sapiens
  CDR3 for alpha chain variable domain of TCR clone 314797 (TRAV26-1, TRAJ15)
CIVRADQAGTALIL

SEQ ID NO: 629594 - protein, 16 aa, Homo sapiens
  CDR3 for beta chain variable domain of TCR clone 314797 (TRBV20-1, TRBJ1-4)
CSAIGGPRGANEKLFF

SEQ ID NO: 629595 - protein, 20 aa, Homo sapiens
  CDR3 for alpha chain variable domain of TCR clone 314798 (TRAV12-1, TRAJ42)
SSVIQPPSSVKGGSQGNLIF

SEQ ID NO: 629596 - protein, 18 aa, Homo sapiens
  CDR3 for beta chain variable domain of TCR clone 314798 (TRBV11-2, TRBJ2-3)
CASSLGGASRGAPNTQYF

SEQ ID NO: 629597 - protein, 13 aa, Homo sapiens
  CDR3 for alpha chain variable domain of TCR clone 314799 (TRAV8-3, TRAJ44)
CDVVPGTASKLTF

SEQ ID NO: 629598 - protein, 12 aa, Homo sapiens
  CDR3 for beta chain variable domain of TCR clone 314799 (TRBV7-8, TRBJ2-7)
CASSLGDREQYF

SEQ ID NO: 629599 - protein, 12 aa, Homo sapiens
  CDR3 for alpha chain variable domain of TCR clone 314800 (TRAV12-3, TRAJ21)
CAMFNNFNKFYF

SEQ ID NO: 629600 - protein, 14 aa, Homo sapiens
  CDR3 for beta chain variable domain of TCR clone 314800 (TRBV28, TRBJ2-1)
CAGSIQGTVGEQFF

SEQ ID NO: 629601 - protein, 15 aa, Homo sapiens
  CDR3 for alpha chain variable domain of TCR clone 314801 (TRAV29/DV5, TRAJ40)
CAASAQGSGTYNYIF

SEQ ID NO: 629602 - protein, 15 aa, Homo sapiens
  CDR3 for beta chain variable domain of TCR clone 314801 (TRBV7-2, TRBJ2-3)
CASSLAGAFIDTQYF

SEQ ID NO: 629603 - protein, 15 aa, Homo sapiens
  CDR3 for alpha chain variable domain of TCR clone 314802 (TRAV10, TRAJ34)
PTSVWWAVNTDKLIF

SEQ ID NO: 629604 - protein, 14 aa, Homo sapiens
  CDR3 for beta chain variable domain of TCR clone 314802 (TRBV19, TRBJ2-1)
CASPTFVLSGEQFF

SEQ ID NO: 629605 - protein, 13 aa, Homo sapiens
  CDR3 for alpha chain variable domain of TCR clone 314803 (TRAV8-6, TRAJ8)
CAFMNTGFQKPVF

SEQ ID NO: 629606 - protein, 15 aa, Homo sapiens
  CDR3 for beta chain variable domain of TCR clone 314803 (TRBV28, TRBJ2-5)
CASSSGRVIQETQYF

SEQ ID NO: 629607 - protein, 13 aa, Homo sapiens
  CDR3 for alpha chain variable domain of TCR clone 314804 (TRAV13-1, TRAJ41)
CADAPNSGYALNF

SEQ ID NO: 629608 - protein, 13 aa, Homo sapiens
  CDR3 for beta chain variable domain of TCR clone 314804 (TRBV19, TRBJ2-7)
CASVGTTTYEQYF

SEQ ID NO: 629609 - protein, 14 aa, Homo sapiens
  CDR3 for alpha chain variable domain of TCR clone 314805 (TRAV8-4, TRAJ13)
CAVTLSGGYQKVTF

SEQ ID NO: 629610 - protein, 16 aa, Homo sapiens
  CDR3 for beta chain variable domain of TCR clone 314805 (TRBV11-3, TRBJ2-6)
CASSQGAGAGANVLTF

SEQ ID NO: 629611 - protein, 14 aa, Homo sapiens
  CDR3 for alpha chain variable domain of TCR clone 314806 (TRAV21, TRAJ57)
CAVSRGGGSEKLVF

SEQ ID NO: 629612 - protein, 13 aa, Homo sapiens
  CDR3 for beta chain variable domain of TCR clone 314806 (TRBV4-2, TRBJ1-1)
CASSQAGNTEAFF

SEQ ID NO: 629613 - protein, 14 aa, Homo sapiens
  CDR3 for alpha chain variable domain of TCR clone 314807 (TRAV1-2, TRAJ16)
CAVNRFSAGHKLLF

SEQ ID NO: 629614 - protein, 15 aa, Homo sapiens
  CDR3 for beta chain variable domain of TCR clone 314807 (TRBV7-9, TRBJ1-6)
CASSSPGRGNSPLHF

SEQ ID NO: 629615 - protein, 12 aa, Homo sapiens
  CDR3 for alpha chain variable domain of TCR clone 314808 (TRAV21, TRAJ3)
CCFYSSASKIIF

SEQ ID NO: 629616 - protein, 15 aa, Homo sapiens
  CDR3 for beta chain variable domain of TCR clone 314808 (TRBV24-1, TRBJ2-1)
CATSGSGGFYNEQFF

SEQ ID NO: 629617 - protein, 13 aa, Homo sapiens
  CDR3 for alpha chain variable domain of TCR clone 314809 (TRAV13-1, TRAJ6)
CAASKEGSYIPTF

SEQ ID NO: 629618 - protein, 14 aa, Homo sapiens
  CDR3 for beta chain variable domain of TCR clone 314809 (TRBV7-2, TRBJ2-1)
CASSLGVGYNEQFF

SEQ ID NO: 629619 - protein, 14 aa, Homo sapiens
  CDR3 for alpha chain variable domain of TCR clone 314810 (TRAV1-2, TRAJ8)
CAVREDTGFQKLVF

SEQ ID NO: 629620 - protein, 16 aa, Homo sapiens
  CDR3 for beta chain variable domain of TCR clone 314810 (TRBV7-9, TRBJ2-1)
CASSDVAGGYYNEQFF

SEQ ID NO: 629621 - protein, 14 aa, Homo sapiens
  CDR3 for alpha chain variable domain of TCR clone 314811 (TRAV1-2, TRAJ33)
CAVRAPDSNYQLIW

SEQ ID NO: 629622 - protein, 14 aa, Homo sapiens
  CDR3 for beta chain variable domain of TCR clone 314811 (TRBV11-3, TRBJ1-6)
CASSCSGGDSPLHF

SEQ ID NO: 629623 - protein, 13 aa, Homo sapiens
  CDR3 for alpha chain variable domain of TCR clone 314812 (TRAV13-1, TRAJ9)
CAARGTGGFKTIF

SEQ ID NO: 629624 - protein, 20 aa, Homo sapiens
  CDR3 for beta chain variable domain of TCR clone 314812 (TRBV7-8, TRBJ2-2)
CASSHLFPGPTIHITGELFF

SEQ ID NO: 629625 - protein, 15 aa, Homo sapiens
  CDR3 for alpha chain variable domain of TCR clone 314813 (TRAV12-2, TRAJ53)
CAVNGGGGSNYKLTL

SEQ ID NO: 629626 - protein, 13 aa, Homo sapiens
  CDR3 for beta chain variable domain of TCR clone 314813 (TRBV7-9, TRBJ1-2)
CASSLKQNYGYTF

SEQ ID NO: 629627 - protein, 10 aa, Homo sapiens
  CDR3 for alpha chain variable domain of TCR clone 314814 (TRAV26-1, TRAJ40)
CIAGTYKYIF

SEQ ID NO: 629628 - protein, 15 aa, Homo sapiens
  CDR3 for beta chain variable domain of TCR clone 314814 (TRBV19, TRBJ2-1)
CASSSRECPLMSSSS

SEQ ID NO: 629629 - protein, 14 aa, Homo sapiens
  CDR3 for alpha chain variable domain of TCR clone 314815 (TRAV29/DV5, TRAJ54)
CAASRSPGAQELVF

SEQ ID NO: 629630 - protein, 13 aa, Homo sapiens
  CDR3 for beta chain variable domain of TCR clone 314815 (TRBV7-2, TRBJ2-5)
CASSQTSVETQYF

SEQ ID NO: 629631 - protein, 13 aa, Homo sapiens
  CDR3 for alpha chain variable domain of TCR clone 314816 (TRAV26-1, TRAJ34)
CIFRPWITDKLIF

SEQ ID NO: 629632 - protein, 13 aa, Homo sapiens
  CDR3 for beta chain variable domain of TCR clone 314816 (TRBV5-1, TRBJ2-1)
CASSLGSYNEQFF

SEQ ID NO: 629633 - protein, 14 aa, Homo sapiens
  CDR3 for alpha chain variable domain of TCR clone 314817 (TRAV35, TRAJ41)
CAGQASVRRNALNF

SEQ ID NO: 629634 - protein, 14 aa, Homo sapiens
  CDR3 for beta chain variable domain of TCR clone 314817 (TRBV20-1, TRBJ1-2)
CSASEQGAVYGYNF

SEQ ID NO: 629635 - protein, 14 aa, Homo sapiens
  CDR3 for alpha chain variable domain of TCR clone 314818 (TRAV12-1, TRAJ23)
CVVMIYNQGGKLIF

SEQ ID NO: 629636 - protein, 23 aa, Homo sapiens
  CDR3 for beta chain variable domain of TCR clone 314818 (TRBV7-3, TRBJ1-6)
CASRLTSRDEASDPSSYNSPLHF

SEQ ID NO: 629637 - protein, 14 aa, Homo sapiens
  CDR3 for alpha chain variable domain of TCR clone 314819 (TRAV13-2, TRAJ17)
CAENSKAAGNKLTF

SEQ ID NO: 629638 - protein, 14 aa, Homo sapiens
  CDR3 for beta chain variable domain of TCR clone 314819 (TRBV7-2, TRBJ2-5)
CASSPGGNQETRYF

SEQ ID NO: 629639 - protein, 14 aa, Homo sapiens
  CDR3 for alpha chain variable domain of TCR clone 314820 (TRAV12-1, TRAJ23)
CVVMIYNQGGKLIF

SEQ ID NO: 629640 - protein, 23 aa, Homo sapiens
  CDR3 for beta chain variable domain of TCR clone 314820 (TRBV7-3, TRBJ1-6)
CASSLTSRDEAYDPSSYNSPLHF

SEQ ID NO: 629641 - protein, 11 aa, Homo sapiens
  CDR3 for alpha chain variable domain of TCR clone 314821 (TRAV1-2, TRAJ31)
CAVKNNARLMF

SEQ ID NO: 629642 - protein, 12 aa, Homo sapiens
  CDR3 for beta chain variable domain of TCR clone 314821 (TRBV20-1, TRBJ2-5)
CSAPRSQETQYV

SEQ ID NO: 629643 - protein, 16 aa, Homo sapiens
  CDR3 for alpha chain variable domain of TCR clone 314822 (TRAV14/DV4, TRAJ12)
CAMREVLMDSSYKLIF

SEQ ID NO: 629644 - protein, 14 aa, Homo sapiens
  CDR3 for beta chain variable domain of TCR clone 314822 (TRBV7-2, TRBJ2-5)
CASSFTQGHETQYF

SEQ ID NO: 629645 - protein, 13 aa, Homo sapiens
  CDR3 for alpha chain variable domain of TCR clone 314823 (TRAV17, TRAJ20)
CAPLGVDAYKLSF

SEQ ID NO: 629646 - protein, 12 aa, Homo sapiens
  CDR3 for beta chain variable domain of TCR clone 314823 (TRBV29-1, TRBJ2-3)
CSVTGGADTQYF

SEQ ID NO: 629647 - protein, 15 aa, Homo sapiens
  CDR3 for alpha chain variable domain of TCR clone 314824 (TRAV6, TRAJ52)
CALTAGCTSYGKLTF

SEQ ID NO: 629648 - protein, 14 aa, Homo sapiens
  CDR3 for beta chain variable domain of TCR clone 314824 (TRBV11-2, TRBJ2-1)
CASTTGQGNNEQFF

SEQ ID NO: 629649 - protein, 14 aa, Homo sapiens
  CDR3 for alpha chain variable domain of TCR clone 314825 (TRAV12-2, TRAJ13)
CAVKKTGGYQKVTF

SEQ ID NO: 629650 - protein, 14 aa, Homo sapiens
  CDR3 for beta chain variable domain of TCR clone 314825 (TRBV10-3, TRBJ2-1)
CAISDRGGVTEQFF

SEQ ID NO: 629651 - protein, 15 aa, Homo sapiens
  CDR3 for alpha chain variable domain of TCR clone 314826 (TRAV12-3, TRAJ6)
CAMSAASGGSYIPTF

SEQ ID NO: 629652 - protein, 15 aa, Homo sapiens
  CDR3 for beta chain variable domain of TCR clone 314826 (TRBV20-1, TRBJ2-7)
CSARDRVSGMDEQYF

SEQ ID NO: 629653 - protein, 12 aa, Homo sapiens
  CDR3 for alpha chain variable domain of TCR clone 314827 (TRAV1-2, TRAJ9)
CAGYTGGFKTIF

SEQ ID NO: 629654 - protein, 15 aa, Homo sapiens
  CDR3 for beta chain variable domain of TCR clone 314827 (TRBV11-2, TRBJ2-1)
CDSSPAGQSLNEQFF

SEQ ID NO: 629655 - protein, 11 aa, Homo sapiens
  CDR3 for alpha chain variable domain of TCR clone 314828 (TRAV21, TRAJ34)
CAHYNTDKLIF

SEQ ID NO: 629656 - protein, 15 aa, Homo sapiens
  CDR3 for beta chain variable domain of TCR clone 314828 (TRBV2, TRBJ2-5)
CASSSSVAGGETQYF

SEQ ID NO: 629657 - protein, 15 aa, Homo sapiens
  CDR3 for alpha chain variable domain of TCR clone 314829 (TRAV21, TRAJ22)
CAVRLFFWFCQATDL

SEQ ID NO: 629658 - protein, 14 aa, Homo sapiens
  CDR3 for beta chain variable domain of TCR clone 314829 (TRBV19, TRBJ1-5)
CASRAPDSFLSQHF

SEQ ID NO: 629659 - protein, 12 aa, Homo sapiens
  CDR3 for alpha chain variable domain of TCR clone 314830 (TRAV12-1, TRAJ9)
CVVNTGGFKTIF

SEQ ID NO: 629660 - protein, 14 aa, Homo sapiens
  CDR3 for beta chain variable domain of TCR clone 314830 (TRBV25-1, TRBJ1-1)
CASTHLGGNTEAFF

SEQ ID NO: 629661 - protein, 12 aa, Homo sapiens
  CDR3 for alpha chain variable domain of TCR clone 314831 (TRAV12-1, TRAJ40)
CVVYSVTYKYIF

SEQ ID NO: 629662 - protein, 18 aa, Homo sapiens
  CDR3 for beta chain variable domain of TCR clone 314831 (TRBV11-2, TRBJ2-3)
CASSFGGASRGAPNTQYF

SEQ ID NO: 629663 - protein, 12 aa, Homo sapiens
  CDR3 for alpha chain variable domain of TCR clone 314832 (TRAV12-3, TRAJ17)
CAMTLTGNKLTS

SEQ ID NO: 629664 - protein, 15 aa, Homo sapiens
  CDR3 for beta chain variable domain of TCR clone 314832 (TRBV19, TRBJ2-1)
CASSMLGEGRNEQFF

SEQ ID NO: 629665 - protein, 16 aa, Homo sapiens
  CDR3 for alpha chain variable domain of TCR clone 314833 (TRAV1-2, TRAJ10)
CAVRGVLTGGGNKRTF

SEQ ID NO: 629666 - protein, 15 aa, Homo sapiens
  CDR3 for beta chain variable domain of TCR clone 314833 (TRBV29-1, TRBJ2-1)
CSVGRHALFYNEQFF

SEQ ID NO: 629667 - protein, 11 aa, Homo sapiens
  CDR3 for alpha chain variable domain of TCR clone 314834 (TRAV12-3, TRAJ20)
CAMSYDYKLSF

SEQ ID NO: 629668 - protein, 15 aa, Homo sapiens
  CDR3 for beta chain variable domain of TCR clone 314834 (TRBV7-9, TRBJ1-6)
CASSSPGRGNSPLHF

SEQ ID NO: 629669 - protein, 12 aa, Homo sapiens
  CDR3 for alpha chain variable domain of TCR clone 314835 (TRAV27, TRAJ35)
CAGADFGNVLHC

SEQ ID NO: 629670 - protein, 15 aa, Homo sapiens
  CDR3 for beta chain variable domain of TCR clone 314835 (TRBV11-2, TRBJ2-1)
CASSLGTSGLNEQFF

SEQ ID NO: 629671 - protein, 13 aa, Homo sapiens
  CDR3 for alpha chain variable domain of TCR clone 314836 (TRAV27, TRAJ6)
CAGGTRGSYIPTF

SEQ ID NO: 629672 - protein, 14 aa, Homo sapiens
  CDR3 for beta chain variable domain of TCR clone 314836 (TRBV6-1, TRBJ1-3)
CASVQGGGGNTIYV

SEQ ID NO: 629673 - protein, 14 aa, Homo sapiens
  CDR3 for alpha chain variable domain of TCR clone 314837 (TRAV1-1, TRAJ27)
CAVIYNTNAGKYTF

SEQ ID NO: 629674 - protein, 15 aa, Homo sapiens
  CDR3 for beta chain variable domain of TCR clone 314837 (TRBV9, TRBJ1-6)
CASSVAGTGDSPLHF

SEQ ID NO: 629675 - protein, 18 aa, Homo sapiens
  CDR3 for alpha chain variable domain of TCR clone 314838 (TRAV21, TRAJ52)
CAVRPSPAGGTSYGKLTF

SEQ ID NO: 629676 - protein, 17 aa, Homo sapiens
  CDR3 for beta chain variable domain of TCR clone 314838 (TRBV7-6, TRBJ2-5)
CASSPGLADPWGETQYF

SEQ ID NO: 629677 - protein, 13 aa, Homo sapiens
  CDR3 for alpha chain variable domain of TCR clone 314839 (TRAV29/DV5, TRAJ52)
CAAGFRGAGVTSY

SEQ ID NO: 629678 - protein, 16 aa, Homo sapiens
  CDR3 for beta chain variable domain of TCR clone 314839 (TRBV7-3, TRBJ2-2)
CASSLKRGTLSGELFF

SEQ ID NO: 629679 - protein, 15 aa, Homo sapiens
  CDR3 for alpha chain variable domain of TCR clone 314840 (TRAV3, TRAJ20)
CAVRDIKLSDHKPSF

SEQ ID NO: 629680 - protein, 15 aa, Homo sapiens
  CDR3 for beta chain variable domain of TCR clone 314840 (TRBV7-9, TRBJ1-6)
CASSSPGRGNSPLHF

SEQ ID NO: 629681 - protein, 11 aa, Homo sapiens
  CDR3 for alpha chain variable domain of TCR clone 314841 (TRAV2, TRAJ32)
CAFNPPESGWF

SEQ ID NO: 629682 - protein, 12 aa, Homo sapiens
  CDR3 for beta chain variable domain of TCR clone 314841 (TRBV20-1, TRBJ2-7)
CSAITPTKEQYF

SEQ ID NO: 629683 - protein, 16 aa, Homo sapiens
  CDR3 for alpha chain variable domain of TCR clone 314842 (TRAV3, TRAJ10)
CALRDMRAGGGNKLTF

SEQ ID NO: 629684 - protein, 14 aa, Homo sapiens
  CDR3 for beta chain variable domain of TCR clone 314842 (TRBV6-1, TRBJ1-3)
CASVQGGGGNTIYF

SEQ ID NO: 629685 - protein, 14 aa, Homo sapiens
  CDR3 for alpha chain variable domain of TCR clone 314843 (TRAV26-1, TRAJ34)
CIVRVAYNTDKLIF

SEQ ID NO: 629686 - protein, 15 aa, Homo sapiens
  CDR3 for beta chain variable domain of TCR clone 314843 (TRBV20-1, TRBJ2-7)
CSARVPAAYYYEQFL

SEQ ID NO: 629687 - protein, 11 aa, Homo sapiens
  CDR3 for alpha chain variable domain of TCR clone 314844 (TRAV2, TRAJ33)
CAVESNYQLIW

SEQ ID NO: 629688 - protein, 13 aa, Homo sapiens
  CDR3 for beta chain variable domain of TCR clone 314844 (TRBV15, TRBJ1-6)
CATSGGLNSPLHF

SEQ ID NO: 629689 - protein, 18 aa, Homo sapiens
  CDR3 for alpha chain variable domain of TCR clone 314845 (TRAV21, TRAJ52)
CAVGPSPAGGTSYGKLTF

SEQ ID NO: 629690 - protein, 19 aa, Homo sapiens
  CDR3 for beta chain variable domain of TCR clone 314845 (TRBV7-2, TRBJ2-3)
CASSFLSRNWGGGTDTQYF

SEQ ID NO: 629691 - protein, 12 aa, Homo sapiens
  CDR3 for alpha chain variable domain of TCR clone 314846 (TRAV17, TRAJ12)
CATLRSSYKLIF

SEQ ID NO: 629692 - protein, 14 aa, Homo sapiens
  CDR3 for beta chain variable domain of TCR clone 314846 (TRBV12-4, TRBJ1-1)
CASSLGTGGTEAFF

SEQ ID NO: 629693 - protein, 14 aa, Homo sapiens
  CDR3 for alpha chain variable domain of TCR clone 314847 (TRAV9-2, TRAJ38)
CALSNAGNNRRLIW

SEQ ID NO: 629694 - protein, 17 aa, Homo sapiens
  CDR3 for beta chain variable domain of TCR clone 314847 (TRBV20-1, TRBJ2-1)
CSARDPLAGVWDNEQFF

SEQ ID NO: 629695 - protein, 15 aa, Homo sapiens
  CDR3 for alpha chain variable domain of TCR clone 314848 (TRAV13-1, TRAJ17)
CGASIERAAGNKLTF

SEQ ID NO: 629696 - protein, 14 aa, Homo sapiens
  CDR3 for beta chain variable domain of TCR clone 314848 (TRBV7-9, TRBJ2-1)
CASSPRDSLYEQFF

SEQ ID NO: 629697 - protein, 13 aa, Homo sapiens
  CDR3 for alpha chain variable domain of TCR clone 314849 (TRAV13-1, TRAJ6)
CAASKGGSYIPTF

SEQ ID NO: 629698 - protein, 13 aa, Homo sapiens
  CDR3 for beta chain variable domain of TCR clone 314849 (TRBV7-9, TRBJ2-5)
CASLPSGRGTQYF

SEQ ID NO: 629699 - protein, 18 aa, Homo sapiens
  CDR3 for alpha chain variable domain of TCR clone 314850 (TRAV26-2, TRAJ54)
CILRDAEGGIQGAQKLVF

SEQ ID NO: 629700 - protein, 17 aa, Homo sapiens
  CDR3 for beta chain variable domain of TCR clone 314850 (TRBV20-1, TRBJ1-5)
CSASLSPGQGGNQPQHF

SEQ ID NO: 629701 - protein, 14 aa, Homo sapiens
  CDR3 for alpha chain variable domain of TCR clone 314851 (TRAV12-3, TRAJ10)
SLLPLTGGGNKLTF

SEQ ID NO: 629702 - protein, 15 aa, Homo sapiens
  CDR3 for beta chain variable domain of TCR clone 314851 (TRBV29-1, TRBJ2-7)
CSVEFFDRGSYEQYF

SEQ ID NO: 629703 - protein, 14 aa, Homo sapiens
  CDR3 for alpha chain variable domain of TCR clone 314852 (TRAV1-2, TRAJ16)
CAVNRFSDGQKLLF

SEQ ID NO: 629704 - protein, 14 aa, Homo sapiens
  CDR3 for beta chain variable domain of TCR clone 314852 (TRBV7-9, TRBJ2-2)
CASSLGHGTGELFF

SEQ ID NO: 629705 - protein, 16 aa, Homo sapiens
  CDR3 for alpha chain variable domain of TCR clone 314853 (TRAV21, TRAJ52)
CAVTNAGGTSYGKLTF

SEQ ID NO: 629706 - protein, 15 aa, Homo sapiens
  CDR3 for beta chain variable domain of TCR clone 314853 (TRBV5-1, TRBJ2-7)
CASSLNGGPAREQYF

SEQ ID NO: 629707 - protein, 15 aa, Homo sapiens
  CDR3 for alpha chain variable domain of TCR clone 314854 (TRAV12-1, TRAJ42)
CVVTRDGGSQGNLIF

SEQ ID NO: 629708 - protein, 13 aa, Homo sapiens
  CDR3 for beta chain variable domain of TCR clone 314854 (TRBV27, TRBJ2-7)
CASSLTTRYEQYF

SEQ ID NO: 629709 - protein, 12 aa, Homo sapiens
  CDR3 for alpha chain variable domain of TCR clone 314855 (TRAV1-1, TRAJ8)
CAGGTGFQKLVF

SEQ ID NO: 629710 - protein, 13 aa, Homo sapiens
  CDR3 for beta chain variable domain of TCR clone 314855 (TRBV20-1, TRBJ1-1)
CSAPLGGGTEAFF

SEQ ID NO: 629711 - protein, 13 aa, Homo sapiens
  CDR3 for alpha chain variable domain of TCR clone 314856 (TRAV13-1, TRAJ13)
FAASKGGYQKVTF

SEQ ID NO: 629712 - protein, 16 aa, Homo sapiens
  CDR3 for beta chain variable domain of TCR clone 314856 (TRBV18, TRBJ1-2)
CASSPPERVTIYGYTF

SEQ ID NO: 629713 - protein, 13 aa, Homo sapiens
  CDR3 for alpha chain variable domain of TCR clone 314857 (TRAV1-2, TRAJ12)
CAVSMESSYKLIF

SEQ ID NO: 629714 - protein, 15 aa, Homo sapiens
  CDR3 for beta chain variable domain of TCR clone 314857 (TRBV27, TRBJ2-5)
CASSLLPSGGETQYF

SEQ ID NO: 629715 - protein, 17 aa, Homo sapiens
  CDR3 for alpha chain variable domain of TCR clone 314858 (TRAV4, TRAJ20)
CTTASWVKGNNDYKLSF

SEQ ID NO: 629716 - protein, 17 aa, Homo sapiens
  CDR3 for beta chain variable domain of TCR clone 314858 (TRBV11-2, TRBJ2-1)
CASSLYPPGVEYNEHFF

SEQ ID NO: 629717 - protein, 14 aa, Homo sapiens
  CDR3 for alpha chain variable domain of TCR clone 314859 (TRAV12-2, TRAJ40)
CAVKIPSGTYKYIF

SEQ ID NO: 629718 - protein, 18 aa, Homo sapiens
  CDR3 for beta chain variable domain of TCR clone 314859 (TRBV20-1, TRBJ2-6)
CSSETTPTHGSGANVLTF

SEQ ID NO: 629719 - protein, 11 aa, Homo sapiens
  CDR3 for alpha chain variable domain of TCR clone 314860 (TRAV39, TRAJ49)
CAVDISTQFYF

SEQ ID NO: 629720 - protein, 16 aa, Homo sapiens
  CDR3 for beta chain variable domain of TCR clone 314860 (TRBV2, TRBJ2-1)
CASRPRSGGPYGEQFF

SEQ ID NO: 629721 - protein, 11 aa, Homo sapiens
  CDR3 for alpha chain variable domain of TCR clone 314861 (TRAV35, TRAJ30)
CAPGGDDKIIL

SEQ ID NO: 629722 - protein, 15 aa, Homo sapiens
  CDR3 for beta chain variable domain of TCR clone 314861 (TRBV9, TRBJ1-6)
CASRVAGTGDSPLHF

SEQ ID NO: 629723 - protein, 13 aa, Homo sapiens
  CDR3 for alpha chain variable domain of TCR clone 314862 (TRAV8-3, TRAJ36)
CAVGATGANNLFF

SEQ ID NO: 629724 - protein, 13 aa, Homo sapiens
  CDR3 for beta chain variable domain of TCR clone 314862 (TRBV9, TRBJ2-1)
CASSVGQGGEQFF

SEQ ID NO: 629725 - protein, 14 aa, Homo sapiens
  CDR3 for alpha chain variable domain of TCR clone 314863 (TRAV12-2, TRAJ40)
CAVKIPSGTYKYIF

SEQ ID NO: 629726 - protein, 13 aa, Homo sapiens
  CDR3 for beta chain variable domain of TCR clone 314863 (TRBV24-1, TRBJ2-1)
CATSAGPYNEQFF

SEQ ID NO: 629727 - protein, 14 aa, Homo sapiens
  CDR3 for alpha chain variable domain of TCR clone 314864 (TRAV21, TRAJ45)
CAVSSGGGADGLTS

SEQ ID NO: 629728 - protein, 14 aa, Homo sapiens
  CDR3 for beta chain variable domain of TCR clone 314864 (TRBV25-1, TRBJ1-1)
CASTHLGGNTEAFF

SEQ ID NO: 629729 - protein, 11 aa, Homo sapiens
  CDR3 for alpha chain variable domain of TCR clone 314865 (TRAV12-1, TRAJ30)
CVVNGEDKIIF

SEQ ID NO: 629730 - protein, 12 aa, Homo sapiens
  CDR3 for beta chain variable domain of TCR clone 314865 (TRBV27, TRBJ2-2)
CASKLFTGELFF

SEQ ID NO: 629731 - protein, 14 aa, Homo sapiens
  CDR3 for alpha chain variable domain of TCR clone 314866 (TRAV1-1, TRAJ11)
CDRIMNSVYSTLTF

SEQ ID NO: 629732 - protein, 16 aa, Homo sapiens
  CDR3 for beta chain variable domain of TCR clone 314866 (TRBV6-5, TRBJ1-6)
CASSYSGESYHSPLHF

SEQ ID NO: 629733 - protein, 13 aa, Homo sapiens
  CDR3 for alpha chain variable domain of TCR clone 314867 (TRAV27, TRAJ45)
CRSSGGGADGLTF

SEQ ID NO: 629734 - protein, 16 aa, Homo sapiens
  CDR3 for beta chain variable domain of TCR clone 314867 (TRBV6-1, TRBJ2-5)
CASSETLDRGAETQYF

SEQ ID NO: 629735 - protein, 12 aa, Homo sapiens
  CDR3 for alpha chain variable domain of TCR clone 314868 (TRAV2, TRAJ9)
CAVGAGGFKTIF

SEQ ID NO: 629736 - protein, 15 aa, Homo sapiens
  CDR3 for beta chain variable domain of TCR clone 314868 (TRBV6-1, TRBJ1-2)
CASVQGGAINYGYTF

SEQ ID NO: 629737 - protein, 16 aa, Homo sapiens
  CDR3 for alpha chain variable domain of TCR clone 314869 (TRAV2, TRAJ22)
LQVREADAAEQRQLTF

SEQ ID NO: 629738 - protein, 16 aa, Homo sapiens
  CDR3 for beta chain variable domain of TCR clone 314869 (TRBV2, TRBJ2-5)
CASSETQGIGEETHYF

SEQ ID NO: 629739 - protein, 13 aa, Homo sapiens
  CDR3 for alpha chain variable domain of TCR clone 314870 (TRAV21, TRAJ20)
CAVGLRVDYKLSF

SEQ ID NO: 629740 - protein, 12 aa, Homo sapiens
  CDR3 for beta chain variable domain of TCR clone 314870 (TRBV24-1, TRBJ1-1)
CATSDSDRGAFF

SEQ ID NO: 629741 - protein, 17 aa, Homo sapiens
  CDR3 for alpha chain variable domain of TCR clone 314871 (TRAV3, TRAJ6)
CAVRDGPRAGGSYIPTF

SEQ ID NO: 629742 - protein, 18 aa, Homo sapiens
  CDR3 for beta chain variable domain of TCR clone 314871 (TRBV7-2, TRBJ2-3)
CASSLKREGSGITDTQYF

SEQ ID NO: 629743 - protein, 12 aa, Homo sapiens
  CDR3 for alpha chain variable domain of TCR clone 314872 (TRAV17, TRAJ30)
CVPERRDAKIIF

SEQ ID NO: 629744 - protein, 14 aa, Homo sapiens
  CDR3 for beta chain variable domain of TCR clone 314872 (TRBV7-7, TRBJ2-2)
CASSRDRSTGELFF

SEQ ID NO: 629745 - protein, 11 aa, Homo sapiens
  CDR3 for alpha chain variable domain of TCR clone 314873 (TRAV26-1, TRAJ37)
CIVRGGRKLIF

SEQ ID NO: 629746 - protein, 16 aa, Homo sapiens
  CDR3 for beta chain variable domain of TCR clone 314873 (TRBV7-3, TRBJ2-6)
CASSLTLAGGANVLTF

SEQ ID NO: 629747 - protein, 14 aa, Homo sapiens
  CDR3 for alpha chain variable domain of TCR clone 314874 (TRAV26-1, TRAJ38)
CIADNAGNNRRLIW

SEQ ID NO: 629748 - protein, 12 aa, Homo sapiens
  CDR3 for beta chain variable domain of TCR clone 314874 (TRBV5-1, TRBJ2-7)
CASSFRGYEQYF

SEQ ID NO: 629749 - protein, 12 aa, Homo sapiens
  CDR3 for alpha chain variable domain of TCR clone 314875 (TRAV3, TRAJ20)
CAVRDHDYKLGF

SEQ ID NO: 629750 - protein, 12 aa, Homo sapiens
  CDR3 for beta chain variable domain of TCR clone 314875 (TRBV11-2, TRBJ2-2)
CASSLGGGELFF

SEQ ID NO: 629751 - protein, 12 aa, Homo sapiens
  CDR3 for alpha chain variable domain of TCR clone 314876 (TRAV36/DV7, TRAJ54)
CAVVRGAQKLVF

SEQ ID NO: 629752 - protein, 15 aa, Homo sapiens
  CDR3 for beta chain variable domain of TCR clone 314876 (TRBV28, TRBJ2-5)
CASSSGRTIQETQYF

SEQ ID NO: 629753 - protein, 11 aa, Homo sapiens
  CDR3 for alpha chain variable domain of TCR clone 314877 (TRAV3, TRAJ21)
CAVGNFNKFYF

SEQ ID NO: 629754 - protein, 14 aa, Homo sapiens
  CDR3 for beta chain variable domain of TCR clone 314877 (TRBV19, TRBJ2-1)
CASPAFVLSGEQFF

SEQ ID NO: 629755 - protein, 13 aa, Homo sapiens
  CDR3 for alpha chain variable domain of TCR clone 314878 (TRAV13-1, TRAJ39)
CAASIWAGNMLTF

SEQ ID NO: 629756 - protein, 19 aa, Homo sapiens
  CDR3 for beta chain variable domain of TCR clone 314878 (TRBV19, TRBJ2-5)
CASSIGQVTDFFLGETQYF

SEQ ID NO: 629757 - protein, 14 aa, Homo sapiens
  CDR3 for alpha chain variable domain of TCR clone 314879 (TRAV1-2, TRAJ8)
YAVREDTGFQKLVF

SEQ ID NO: 629758 - protein, 15 aa, Homo sapiens
  CDR3 for beta chain variable domain of TCR clone 314879 (TRBV7-2, TRBJ2-3)
CASSLVVRGPDTQYF

SEQ ID NO: 629759 - protein, 12 aa, Homo sapiens
  CDR3 for alpha chain variable domain of TCR clone 314880 (TRAV25, TRAJ30)
CAGENRDDKIIF

SEQ ID NO: 629760 - protein, 11 aa, Homo sapiens
  CDR3 for beta chain variable domain of TCR clone 314880 (TRBV12-4, TRBJ2-7)
CATPEKGEQYF

SEQ ID NO: 629761 - protein, 18 aa, Homo sapiens
  CDR3 for alpha chain variable domain of TCR clone 314881 (TRAV29/DV5, TRAJ52)
CAAGFRGAGGTSYGKLTF

SEQ ID NO: 629762 - protein, 13 aa, Homo sapiens
  CDR3 for beta chain variable domain of TCR clone 314881 (TRBV14, TRBJ2-7)
CASSQDRRYEQYF

SEQ ID NO: 629763 - protein, 13 aa, Homo sapiens
  CDR3 for alpha chain variable domain of TCR clone 314882 (TRAV8-1, TRAJ47)
CAVVMEYGNKLVF

SEQ ID NO: 629764 - protein, 13 aa, Homo sapiens
  CDR3 for beta chain variable domain of TCR clone 314882 (TRBV20-1, TRBJ2-2)
CSARVANTGELFF

SEQ ID NO: 629765 - protein, 12 aa, Homo sapiens
  CDR3 for alpha chain variable domain of TCR clone 314883 (TRAV13-1, TRAJ21)
CAAKEGLNKFYF

SEQ ID NO: 629766 - protein, 14 aa, Homo sapiens
  CDR3 for beta chain variable domain of TCR clone 314883 (TRBV5-4, TRBJ1-1)
CARSLDSRRDEAFF

SEQ ID NO: 629767 - protein, 12 aa, Homo sapiens
  CDR3 for alpha chain variable domain of TCR clone 314884 (TRAV1-1, TRAJ9)
CAVDTGGFKTIF

SEQ ID NO: 629768 - protein, 11 aa, Homo sapiens
  CDR3 for beta chain variable domain of TCR clone 314884 (TRBV20-1, TRBJ2-7)
CSARTSYEQYF

SEQ ID NO: 629769 - protein, 14 aa, Homo sapiens
  CDR3 for alpha chain variable domain of TCR clone 314885 (TRAV12-1, TRAJ34)
CVVNLDYNTDKPIF

SEQ ID NO: 629770 - protein, 13 aa, Homo sapiens
  CDR3 for beta chain variable domain of TCR clone 314885 (TRBV20-1, TRBJ2-5)
CSARGDYQETQYF

SEQ ID NO: 629771 - protein, 16 aa, Homo sapiens
  CDR3 for alpha chain variable domain of TCR clone 314886 (TRAV1-2, TRAJ10)
CAVRDQGGGGGNKLTF

SEQ ID NO: 629772 - protein, 13 aa, Homo sapiens
  CDR3 for beta chain variable domain of TCR clone 314886 (TRBV29-1, TRBJ1-1)
RSVGDSRNTEAFF

SEQ ID NO: 629773 - protein, 13 aa, Homo sapiens
  CDR3 for alpha chain variable domain of TCR clone 314887 (TRAV17, TRAJ5)
CAPMDTGRRALTF

SEQ ID NO: 629774 - protein, 17 aa, Homo sapiens
  CDR3 for beta chain variable domain of TCR clone 314887 (TRBV28, TRBJ2-7)
CASSPLHRASGVYEQYF

SEQ ID NO: 629775 - protein, 16 aa, Homo sapiens
  CDR3 for alpha chain variable domain of TCR clone 314888 (TRAV3, TRAJ21)
CAVRDIERGNFNKFYF

SEQ ID NO: 629776 - protein, 14 aa, Homo sapiens
  CDR3 for beta chain variable domain of TCR clone 314888 (TRBV28, TRBJ2-2)
CASRIRSGTGELFF

SEQ ID NO: 629777 - protein, 16 aa, Homo sapiens
  CDR3 for alpha chain variable domain of TCR clone 314889 (TRAV30, TRAJ24)
CGTEIVDADSWGKFQF

SEQ ID NO: 629778 - protein, 13 aa, Homo sapiens
  CDR3 for beta chain variable domain of TCR clone 314889 (TRBV18, TRBJ1-2)
CASSASATEGYPF

SEQ ID NO: 629779 - protein, 14 aa, Homo sapiens
  CDR3 for alpha chain variable domain of TCR clone 314890 (TRAV12-2, TRAJ53)
CAVKGGGSNYKLTF

SEQ ID NO: 629780 - protein, 17 aa, Homo sapiens
  CDR3 for beta chain variable domain of TCR clone 314890 (TRBV20-1, TRBJ2-2)
CSASGSGQGGLTGELFF

SEQ ID NO: 629781 - protein, 13 aa, Homo sapiens
  CDR3 for alpha chain variable domain of TCR clone 314891 (TRAV26-1, TRAJ48)
CIVRVVGDEKLTF

SEQ ID NO: 629782 - protein, 13 aa, Homo sapiens
  CDR3 for beta chain variable domain of TCR clone 314891 (TRBV7-3, TRBJ2-2)
CASSLNVLGELFF

SEQ ID NO: 629783 - protein, 14 aa, Homo sapiens
  CDR3 for alpha chain variable domain of TCR clone 314892 (TRAV29/DV5, TRAJ20)
CAASAPIEDYKLSF

SEQ ID NO: 629784 - protein, 15 aa, Homo sapiens
  CDR3 for beta chain variable domain of TCR clone 314892 (TRBV7-2, TRBJ1-2)
CASSLVSGGDYGYTF

SEQ ID NO: 629785 - protein, 14 aa, Homo sapiens
  CDR3 for alpha chain variable domain of TCR clone 314893 (TRAV13-1, TRAJ39)
CAASEGNAGNMLTF

SEQ ID NO: 629786 - protein, 15 aa, Homo sapiens
  CDR3 for beta chain variable domain of TCR clone 314893 (TRBV7-3, TRBJ2-2)
CASSETGQGTGELFF

SEQ ID NO: 629787 - protein, 14 aa, Homo sapiens
  CDR3 for alpha chain variable domain of TCR clone 314894 (TRAV12-3, TRAJ10)
SHLPLSGGGNKLTF

SEQ ID NO: 629788 - protein, 16 aa, Homo sapiens
  CDR3 for beta chain variable domain of TCR clone 314894 (TRBV4-3, TRBJ2-1)
CASSPALDRGVNEQFF

SEQ ID NO: 629789 - protein, 14 aa, Homo sapiens
  CDR3 for alpha chain variable domain of TCR clone 314895 (TRAV8-4, TRAJ13)
CAVTLSGGYQKVTF

SEQ ID NO: 629790 - protein, 16 aa, Homo sapiens
  CDR3 for beta chain variable domain of TCR clone 314895 (TRBV7-2, TRBJ2-5)
CASSSKWLSGQETQYF

SEQ ID NO: 629791 - protein, 14 aa, Homo sapiens
  CDR3 for alpha chain variable domain of TCR clone 314896 (TRAV2, TRAJ37)
CAVDFTTNTGKLIF

SEQ ID NO: 629792 - protein, 15 aa, Homo sapiens
  CDR3 for beta chain variable domain of TCR clone 314896 (TRBV20-1, TRBJ1-1)
CSASRGVTGNTEAFF

SEQ ID NO: 629793 - protein, 14 aa, Homo sapiens
  CDR3 for alpha chain variable domain of TCR clone 314897 (TRAV35, TRAJ41)
CAWQASVRRNALNF

SEQ ID NO: 629794 - protein, 14 aa, Homo sapiens
  CDR3 for beta chain variable domain of TCR clone 314897 (TRBV20-1, TRBJ1-2)
CSASEQGAVYGYTF

SEQ ID NO: 629795 - protein, 15 aa, Homo sapiens
  CDR3 for alpha chain variable domain of TCR clone 314898 (TRAV26-1, TRAJ44)
CIVRANTGTASKLTY

SEQ ID NO: 629796 - protein, 16 aa, Homo sapiens
  CDR3 for beta chain variable domain of TCR clone 314898 (TRBV7-7, TRBJ2-1)
CASSLASGTSYNEQFF

SEQ ID NO: 629797 - protein, 14 aa, Homo sapiens
  CDR3 for alpha chain variable domain of TCR clone 314899 (TRAV1-2, TRAJ16)
CAVNRFSDGQKLLF

SEQ ID NO: 629798 - protein, 13 aa, Homo sapiens
  CDR3 for beta chain variable domain of TCR clone 314899 (TRBV11-2, TRBJ2-1)
CTSSLGLAGGRFF

SEQ ID NO: 629799 - protein, 13 aa, Homo sapiens
  CDR3 for alpha chain variable domain of TCR clone 314900 (TRAV12-2, TRAJ20)
CAVYPSNDYKLSF

SEQ ID NO: 629800 - protein, 13 aa, Homo sapiens
  CDR3 for beta chain variable domain of TCR clone 314900 (TRBV28, TRBJ2-7)
CASTPGLAGEQYF

SEQ ID NO: 629801 - protein, 10 aa, Homo sapiens
  CDR3 for alpha chain variable domain of TCR clone 314901 (TRAV1-2, TRAJ20)
CALNDFKLSF

SEQ ID NO: 629802 - protein, 16 aa, Homo sapiens
  CDR3 for beta chain variable domain of TCR clone 314901 (TRBV20-1, TRBJ1-1)
CSARALTQGMNTEAFF

SEQ ID NO: 629803 - protein, 13 aa, Homo sapiens
  CDR3 for alpha chain variable domain of TCR clone 314902 (TRAV13-2, TRAJ48)
CPEMDFGNEKLTF

SEQ ID NO: 629804 - protein, 15 aa, Homo sapiens
  CDR3 for beta chain variable domain of TCR clone 314902 (TRBV20-1, TRBJ2-7)
CSARDRVSGMDEQYF

SEQ ID NO: 629805 - protein, 15 aa, Homo sapiens
  CDR3 for alpha chain variable domain of TCR clone 314903 (TRAV30, TRAJ57)
CGTAIPQGGSEKLVF

SEQ ID NO: 629806 - protein, 14 aa, Homo sapiens
  CDR3 for beta chain variable domain of TCR clone 314903 (TRBV19, TRBJ2-1)
CASTTARTGNEQFF

SEQ ID NO: 629807 - protein, 18 aa, Homo sapiens
  CDR3 for alpha chain variable domain of TCR clone 314904 (TRAV12-3, TRAJ52)
CAMSRTSAGGTSYGKLTF

SEQ ID NO: 629808 - protein, 17 aa, Homo sapiens
  CDR3 for beta chain variable domain of TCR clone 314904 (TRBV7-3, TRBJ2-3)
CASSLMKRMRGADTQYF

SEQ ID NO: 629809 - protein, 14 aa, Homo sapiens
  CDR3 for alpha chain variable domain of TCR clone 314905 (TRAV8-6, TRAJ30)
CAVSEQNRDDKIIF

SEQ ID NO: 629810 - protein, 16 aa, Homo sapiens
  CDR3 for beta chain variable domain of TCR clone 314905 (TRBV12-5, TRBJ2-5)
CASGPRTSGNQETQYF

SEQ ID NO: 629811 - protein, 17 aa, Homo sapiens
  CDR3 for alpha chain variable domain of TCR clone 314906 (TRAV23/DV6, TRAJ57)
CAASSTLSQGGSEKLVF

SEQ ID NO: 629812 - protein, 15 aa, Homo sapiens
  CDR3 for beta chain variable domain of TCR clone 314906 (TRBV7-9, TRBJ1-4)
CASSATGGNNEKLFF

SEQ ID NO: 629813 - protein, 11 aa, Homo sapiens
  CDR3 for alpha chain variable domain of TCR clone 314907 (TRAV2, TRAJ13)
CASGGYQKVTF

SEQ ID NO: 629814 - protein, 15 aa, Homo sapiens
  CDR3 for beta chain variable domain of TCR clone 314907 (TRBV4-3, TRBJ1-1)
CASSQELGRGTEAFS

SEQ ID NO: 629815 - protein, 13 aa, Homo sapiens
  CDR3 for alpha chain variable domain of TCR clone 314908 (TRAV12-1, TRAJ22)
CVVYSGSARQLTF

SEQ ID NO: 629816 - protein, 15 aa, Homo sapiens
  CDR3 for beta chain variable domain of TCR clone 314908 (TRBV10-3, TRBJ2-1)
CAIRNGTSGHNEQFF

SEQ ID NO: 629817 - protein, 13 aa, Homo sapiens
  CDR3 for alpha chain variable domain of TCR clone 314909 (TRAV27, TRAJ29)
CAGAHSGNTPLVF

SEQ ID NO: 629818 - protein, 16 aa, Homo sapiens
  CDR3 for beta chain variable domain of TCR clone 314909 (TRBV19, TRBJ2-1)
CASSKAGPSSYNEQFF

SEQ ID NO: 629819 - protein, 12 aa, Homo sapiens
  CDR3 for alpha chain variable domain of TCR clone 314910 (TRAV4, TRAJ26)
CLVGDYGQNFVF

SEQ ID NO: 629820 - protein, 13 aa, Homo sapiens
  CDR3 for beta chain variable domain of TCR clone 314910 (TRBV24-1, TRBJ2-2)
CATSDWSTGELFF

SEQ ID NO: 629821 - protein, 13 aa, Homo sapiens
  CDR3 for alpha chain variable domain of TCR clone 314911 (TRAV27, TRAJ16)
CAGACSDGQKLLF

SEQ ID NO: 629822 - protein, 14 aa, Homo sapiens
  CDR3 for beta chain variable domain of TCR clone 314911 (TRBV12-5, TRBJ2-5)
CASGSRTHQETQYF

SEQ ID NO: 629823 - protein, 11 aa, Homo sapiens
  CDR3 for alpha chain variable domain of TCR clone 314912 (TRAV12-2, TRAJ49)
CALQGGNQFYF

SEQ ID NO: 629824 - protein, 14 aa, Homo sapiens
  CDR3 for beta chain variable domain of TCR clone 314912 (TRBV19, TRBJ2-1)
CASPTFVLSGVQFF

SEQ ID NO: 629825 - protein, 16 aa, Homo sapiens
  CDR3 for alpha chain variable domain of TCR clone 314913 (TRAV27, TRAJ13)
CAGAKSDSGGYQKVTF

SEQ ID NO: 629826 - protein, 15 aa, Homo sapiens
  CDR3 for beta chain variable domain of TCR clone 314913 (TRBV9, TRBJ1-6)
CASSVAGTGDSPLLF

SEQ ID NO: 629827 - protein, 17 aa, Homo sapiens
  CDR3 for alpha chain variable domain of TCR clone 314914 (TRAV26-1, TRAJ37)
CIVRVITVSSNTGKLIF

SEQ ID NO: 629828 - protein, 11 aa, Homo sapiens
  CDR3 for beta chain variable domain of TCR clone 314914 (TRBV12-4, TRBJ2-3)
CASTATDTQYF

SEQ ID NO: 629829 - protein, 12 aa, Homo sapiens
  CDR3 for alpha chain variable domain of TCR clone 314915 (TRAV13-1, TRAJ21)
CAAKEGFNKFYF

SEQ ID NO: 629830 - protein, 14 aa, Homo sapiens
  CDR3 for beta chain variable domain of TCR clone 314915 (TRBV12-4, TRBJ1-1)
CASSLDGLNTEAFF

SEQ ID NO: 629831 - protein, 17 aa, Homo sapiens
  CDR3 for alpha chain variable domain of TCR clone 314916 (TRAV38-2/DV8, TRAJ28)
CAFLTLYSGAGSYQLTF

SEQ ID NO: 629832 - protein, 14 aa, Homo sapiens
  CDR3 for beta chain variable domain of TCR clone 314916 (TRBV7-2, TRBJ2-7)
CASRSQGAAYEQYF

SEQ ID NO: 629833 - protein, 15 aa, Homo sapiens
  CDR3 for alpha chain variable domain of TCR clone 314917 (TRAV12-2, TRAJ50)
CAVNGLETSYDKVIF

SEQ ID NO: 629834 - protein, 13 aa, Homo sapiens
  CDR3 for beta chain variable domain of TCR clone 314917 (TRBV10-3, TRBJ2-7)
CASKLAVNYEQYF

SEQ ID NO: 629835 - protein, 14 aa, Homo sapiens
  CDR3 for alpha chain variable domain of TCR clone 314918 (TRAV21, TRAJ57)
CAVSRGGGSEKLVF

SEQ ID NO: 629836 - protein, 13 aa, Homo sapiens
  CDR3 for beta chain variable domain of TCR clone 314918 (TRBV10-3, TRBJ2-7)
CASKLAVNYEQYF

SEQ ID NO: 629837 - protein, 13 aa, Homo sapiens
  CDR3 for alpha chain variable domain of TCR clone 314919 (TRAV36/DV7, TRAJ49)
CAVEANTGNQFYF

SEQ ID NO: 629838 - protein, 13 aa, Homo sapiens
  CDR3 for beta chain variable domain of TCR clone 314919 (TRBV10-3, TRBJ2-7)
CGSKLAVNYEQYF

SEQ ID NO: 629839 - protein, 13 aa, Homo sapiens
  CDR3 for alpha chain variable domain of TCR clone 314920 (TRAV13-1, TRAJ6)
CAASRGGSYIPKF

SEQ ID NO: 629840 - protein, 14 aa, Homo sapiens
  CDR3 for beta chain variable domain of TCR clone 314920 (TRBV7-2, TRBJ2-5)
CASSFGGAQETQYF

SEQ ID NO: 629841 - protein, 13 aa, Homo sapiens
  CDR3 for alpha chain variable domain of TCR clone 314921 (TRAV8-6, TRAJ32)
CAVSDRSTNKLIF

SEQ ID NO: 629842 - protein, 15 aa, Homo sapiens
  CDR3 for beta chain variable domain of TCR clone 314921 (TRBV4-3, TRBJ2-7)
CASSQGDWGDYEQYF

SEQ ID NO: 629843 - protein, 12 aa, Homo sapiens
  CDR3 for alpha chain variable domain of TCR clone 314922 (TRAV1-1, TRAJ8)
CAGGTGFQKLVF

SEQ ID NO: 629844 - protein, 13 aa, Homo sapiens
  CDR3 for beta chain variable domain of TCR clone 314922 (TRBV4-2, TRBJ1-1)
CAGSQAGNTEAFF

SEQ ID NO: 629845 - protein, 15 aa, Homo sapiens
  CDR3 for alpha chain variable domain of TCR clone 314923 (TRAV21, TRAJ10)
CAVPLLTGGGNKLTF

SEQ ID NO: 629846 - protein, 14 aa, Homo sapiens
  CDR3 for beta chain variable domain of TCR clone 314923 (TRBV7-2, TRBJ2-7)
CASSPKTSFYEQYF

SEQ ID NO: 629847 - protein, 14 aa, Homo sapiens
  CDR3 for alpha chain variable domain of TCR clone 314924 (TRAV13-1, TRAJ35)
CAASKGGFRNVLHC

SEQ ID NO: 629848 - protein, 13 aa, Homo sapiens
  CDR3 for beta chain variable domain of TCR clone 314924 (TRBV7-3, TRBJ1-1)
CASSQDWGAEAFL

SEQ ID NO: 629849 - protein, 11 aa, Homo sapiens
  CDR3 for alpha chain variable domain of TCR clone 314925 (TRAV35, TRAJ30)
CAGERDDKIIF

SEQ ID NO: 629850 - protein, 14 aa, Homo sapiens
  CDR3 for beta chain variable domain of TCR clone 314925 (TRBV15, TRBJ2-5)
CATSGDRGQETQYI

SEQ ID NO: 629851 - protein, 14 aa, Homo sapiens
  CDR3 for alpha chain variable domain of TCR clone 314926 (TRAV8-2, TRAJ23)
CVVSDDNKGGKLIF

SEQ ID NO: 629852 - protein, 14 aa, Homo sapiens
  CDR3 for beta chain variable domain of TCR clone 314926 (TRBV2, TRBJ2-3)
CASSEGQNTDTQYF

SEQ ID NO: 629853 - protein, 14 aa, Homo sapiens
  CDR3 for alpha chain variable domain of TCR clone 314927 (TRAV1-2, TRAJ16)
CAVNRFSDGQKRLF

SEQ ID NO: 629854 - protein, 14 aa, Homo sapiens
  CDR3 for beta chain variable domain of TCR clone 314927 (TRBV12-5, TRBJ2-5)
CASGSRTHQETQYF

SEQ ID NO: 629855 - protein, 10 aa, Homo sapiens
  CDR3 for alpha chain variable domain of TCR clone 314928 (TRAV8-4, TRAJ43)
CAVSADDMHF

SEQ ID NO: 629856 - protein, 11 aa, Homo sapiens
  CDR3 for beta chain variable domain of TCR clone 314928 (TRBV12-4, TRBJ2-3)
CASTATDTQYF

SEQ ID NO: 629857 - protein, 14 aa, Homo sapiens
  CDR3 for alpha chain variable domain of TCR clone 314929 (TRAV16, TRAJ32)
CALKSGGATNKLIF

SEQ ID NO: 629858 - protein, 14 aa, Homo sapiens
  CDR3 for beta chain variable domain of TCR clone 314929 (TRBV2, TRBJ2-1)
CASSEALIYNEQFF

SEQ ID NO: 629859 - protein, 11 aa, Homo sapiens
  CDR3 for alpha chain variable domain of TCR clone 314930 (TRAV1-1, TRAJ23)
CAVRPGGKLIF

SEQ ID NO: 629860 - protein, 20 aa, Homo sapiens
  CDR3 for beta chain variable domain of TCR clone 314930 (TRBV7-8, TRBJ2-2)
CASCHLFPGPTIHITGELFF

SEQ ID NO: 629861 - protein, 21 aa, Homo sapiens
  CDR3 for alpha chain variable domain of TCR clone 314931 (TRAV25, TRAJ7)
TATQTTDVGTYFCPENNRLAF

SEQ ID NO: 629862 - protein, 14 aa, Homo sapiens
  CDR3 for beta chain variable domain of TCR clone 314931 (TRBV11-2, TRBJ2-2)
CASSLGLRVRELFF

SEQ ID NO: 629863 - protein, 11 aa, Homo sapiens
  CDR3 for alpha chain variable domain of TCR clone 314932 (TRAV2, TRAJ33)
CAVESNYQLIW

SEQ ID NO: 629864 - protein, 16 aa, Homo sapiens
  CDR3 for beta chain variable domain of TCR clone 314932 (TRBV19, TRBJ1-2)
CASSIGLFRDAYGYTF

SEQ ID NO: 629865 - protein, 13 aa, Homo sapiens
  CDR3 for alpha chain variable domain of TCR clone 314933 (TRAV25, TRAJ26)
CAGMDNYGQNFGF

SEQ ID NO: 629866 - protein, 15 aa, Homo sapiens
  CDR3 for beta chain variable domain of TCR clone 314933 (TRBV10-3, TRBJ2-1)
CAIRNGTSGHNEQFF

SEQ ID NO: 629867 - protein, 12 aa, Homo sapiens
  CDR3 for alpha chain variable domain of TCR clone 314934 (TRAV13-2, TRAJ23)
CAERHRGGKLIF

SEQ ID NO: 629868 - protein, 16 aa, Homo sapiens
  CDR3 for beta chain variable domain of TCR clone 314934 (TRBV20-1, TRBJ1-4)
CSAPGQGLLTNERLFS

SEQ ID NO: 629869 - protein, 14 aa, Homo sapiens
  CDR3 for alpha chain variable domain of TCR clone 314935 (TRAV12-3, TRAJ10)
SHLPLTGGGNKLTF

SEQ ID NO: 629870 - protein, 14 aa, Homo sapiens
  CDR3 for beta chain variable domain of TCR clone 314935 (TRBV20-1, TRBJ2-3)
CSARGGQGEDTQYF

SEQ ID NO: 629871 - protein, 14 aa, Homo sapiens
  CDR3 for alpha chain variable domain of TCR clone 314936 (TRAV8-4, TRAJ9)
CAVRINTGGFKTIF

SEQ ID NO: 629872 - protein, 15 aa, Homo sapiens
  CDR3 for beta chain variable domain of TCR clone 314936 (TRBV5-1, TRBJ2-1)
CASSPPRAPYNEQFF

SEQ ID NO: 629873 - protein, 14 aa, Homo sapiens
  CDR3 for alpha chain variable domain of TCR clone 314937 (TRAV1-2, TRAJ8)
CAVREDTGFQKLVF

SEQ ID NO: 629874 - protein, 16 aa, Homo sapiens
  CDR3 for beta chain variable domain of TCR clone 314937 (TRBV6-1, TRBJ2-5)
CASSETLDRGAENQYF

SEQ ID NO: 629875 - protein, 13 aa, Homo sapiens
  CDR3 for alpha chain variable domain of TCR clone 314938 (TRAV13-2, TRAJ48)
CAVMDFGNEKLTF

SEQ ID NO: 629876 - protein, 15 aa, Homo sapiens
  CDR3 for beta chain variable domain of TCR clone 314938 (TRBV20-1, TRBJ2-7)
CSARDRVSGMDEQYF

SEQ ID NO: 629877 - protein, 11 aa, Homo sapiens
  CDR3 for alpha chain variable domain of TCR clone 314939 (TRAV17, TRAJ9)
CATTGGFKTIF

SEQ ID NO: 629878 - protein, 13 aa, Homo sapiens
  CDR3 for beta chain variable domain of TCR clone 314939 (TRBV19, TRBJ1-2)
CASSVPGQDGYTF

SEQ ID NO: 629879 - protein, 14 aa, Homo sapiens
  CDR3 for alpha chain variable domain of TCR clone 314940 (TRAV4, TRAJ43)
CLVGPMYNNNEMRF

SEQ ID NO: 629880 - protein, 21 aa, Homo sapiens
  CDR3 for beta chain variable domain of TCR clone 314940 (TRBV11-1, TRBJ2-1)
CASSARERLRPEGPSYNEQFF

SEQ ID NO: 629881 - protein, 17 aa, Homo sapiens
  CDR3 for alpha chain variable domain of TCR clone 314941 (TRAV3, TRAJ6)
CAVRDGPRAGGSYIPTF

SEQ ID NO: 629882 - protein, 14 aa, Homo sapiens
  CDR3 for beta chain variable domain of TCR clone 314941 (TRBV6-1, TRBJ1-1)
CASSGTGLNTEAFF

SEQ ID NO: 629883 - protein, 14 aa, Homo sapiens
  CDR3 for alpha chain variable domain of TCR clone 314942 (TRAV23/DV6, TRAJ40)
CAASLTSGTCKYIF

SEQ ID NO: 629884 - protein, 14 aa, Homo sapiens
  CDR3 for beta chain variable domain of TCR clone 314942 (TRBV5-1, TRBJ2-3)
CASSRGRGGGTQYF

SEQ ID NO: 629885 - protein, 15 aa, Homo sapiens
  CDR3 for alpha chain variable domain of TCR clone 314943 (TRAV13-1, TRAJ27)
CAASGGNTNAGKSTF

SEQ ID NO: 629886 - protein, 15 aa, Homo sapiens
  CDR3 for beta chain variable domain of TCR clone 314943 (TRBV12-4, TRBJ1-5)
CASTRQGSGNQAQHF

SEQ ID NO: 629887 - protein, 18 aa, Homo sapiens
  CDR3 for alpha chain variable domain of TCR clone 314944 (TRAV17, TRAJ45)
CATSLDLYSGGGADGLTF

SEQ ID NO: 629888 - protein, 14 aa, Homo sapiens
  CDR3 for beta chain variable domain of TCR clone 314944 (TRBV11-2, TRBJ2-1)
CASKNRGLIYEQFF

SEQ ID NO: 629889 - protein, 17 aa, Homo sapiens
  CDR3 for alpha chain variable domain of TCR clone 314945 (TRAV3, TRAJ6)
CAVSRRTDTVGSYIPTF

SEQ ID NO: 629890 - protein, 18 aa, Homo sapiens
  CDR3 for beta chain variable domain of TCR clone 314945 (TRBV7-2, TRBJ2-3)
CASSLETSRGRKADTQYF

SEQ ID NO: 629891 - protein, 14 aa, Homo sapiens
  CDR3 for alpha chain variable domain of TCR clone 314946 (TRAV13-1, TRAJ44)
CAAKATGTASKLAF

SEQ ID NO: 629892 - protein, 14 aa, Homo sapiens
  CDR3 for beta chain variable domain of TCR clone 314946 (TRBV19, TRBJ2-2)
FASSTLHRSGELFF

SEQ ID NO: 629893 - protein, 11 aa, Homo sapiens
  CDR3 for alpha chain variable domain of TCR clone 314947 (TRAV3, TRAJ13)
CAVTSYQKVTF

SEQ ID NO: 629894 - protein, 13 aa, Homo sapiens
  CDR3 for beta chain variable domain of TCR clone 314947 (TRBV7-2, TRBJ2-2)
CASSVAVTGELFF

SEQ ID NO: 629895 - protein, 14 aa, Homo sapiens
  CDR3 for alpha chain variable domain of TCR clone 314948 (TRAV17, TRAJ16)
CATADFSDGQKLLF

SEQ ID NO: 629896 - protein, 20 aa, Homo sapiens
  CDR3 for beta chain variable domain of TCR clone 314948 (TRBV7-3, TRBJ2-3)
CISVPAAPPLGTRVTDTQYF

SEQ ID NO: 629897 - protein, 14 aa, Homo sapiens
  CDR3 for alpha chain variable domain of TCR clone 314949 (TRAV12-3, TRAJ57)
CAMSAWGGSEKLVF

SEQ ID NO: 629898 - protein, 13 aa, Homo sapiens
  CDR3 for beta chain variable domain of TCR clone 314949 (TRBV19, TRBJ1-2)
CASSQGQVYGYTF

SEQ ID NO: 629899 - protein, 13 aa, Homo sapiens
  CDR3 for alpha chain variable domain of TCR clone 314950 (TRAV21, TRAJ57)
CAVTQGGSEKLVF

SEQ ID NO: 629900 - protein, 16 aa, Homo sapiens
  CDR3 for beta chain variable domain of TCR clone 314950 (TRBV20-1, TRBJ2-3)
CSAVRDRGPIADTQYF

SEQ ID NO: 629901 - protein, 14 aa, Homo sapiens
  CDR3 for alpha chain variable domain of TCR clone 314951 (TRAV20, TRAJ56)
CAVQFGGASSKLTF

SEQ ID NO: 629902 - protein, 11 aa, Homo sapiens
  CDR3 for beta chain variable domain of TCR clone 314951 (TRBV27, TRBJ2-3)
CASSLGDTQYF

SEQ ID NO: 629903 - protein, 12 aa, Homo sapiens
  CDR3 for alpha chain variable domain of TCR clone 314952 (TRAV38-1, TRAJ34)
CAFMKETDKLIF

SEQ ID NO: 629904 - protein, 17 aa, Homo sapiens
  CDR3 for beta chain variable domain of TCR clone 314952 (TRBV7-8, TRBJ2-6)
CASSAPCPGAGANVLTF

SEQ ID NO: 629905 - protein, 16 aa, Homo sapiens
  CDR3 for alpha chain variable domain of TCR clone 314953 (TRAV1-2, TRAJ10)
CAVRGVLTGGGNKLTF

SEQ ID NO: 629906 - protein, 14 aa, Homo sapiens
  CDR3 for beta chain variable domain of TCR clone 314953 (TRBV7-6, TRBJ1-6)
CASSQAGGGSPLHF

SEQ ID NO: 629907 - protein, 12 aa, Homo sapiens
  CDR3 for alpha chain variable domain of TCR clone 314954 (TRAV35, TRAJ38)
SPDAGNNRKLIW

SEQ ID NO: 629908 - protein, 15 aa, Homo sapiens
  CDR3 for beta chain variable domain of TCR clone 314954 (TRBV5-1, TRBJ2-7)
CASSLNGGPAREQYF

SEQ ID NO: 629909 - protein, 15 aa, Homo sapiens
  CDR3 for alpha chain variable domain of TCR clone 314955 (TRAV26-1, TRAJ29)
CIVRVQGSGNTPIVF

SEQ ID NO: 629910 - protein, 14 aa, Homo sapiens
  CDR3 for beta chain variable domain of TCR clone 314955 (TRBV18, TRBJ2-5)
CASSPGVSQETQYF

SEQ ID NO: 629911 - protein, 16 aa, Homo sapiens
  CDR3 for alpha chain variable domain of TCR clone 314956 (TRAV35, TRAJ45)
CAGQKNSGGGADGLTF

SEQ ID NO: 629912 - protein, 15 aa, Homo sapiens
  CDR3 for beta chain variable domain of TCR clone 314956 (TRBV20-1, TRBJ2-7)
CSARDRVSGMDEQYF

SEQ ID NO: 629913 - protein, 14 aa, Homo sapiens
  CDR3 for alpha chain variable domain of TCR clone 314957 (TRAV16, TRAJ37)
CALDISGNTGKLIF

SEQ ID NO: 629914 - protein, 13 aa, Homo sapiens
  CDR3 for beta chain variable domain of TCR clone 314957 (TRBV4-2, TRBJ1-1)
CASSQAGNTEAFF

SEQ ID NO: 629915 - protein, 10 aa, Homo sapiens
  CDR3 for alpha chain variable domain of TCR clone 314958 (TRAV23/DV6, TRAJ57)
CAASSTLSQS

SEQ ID NO: 629916 - protein, 14 aa, Homo sapiens
  CDR3 for beta chain variable domain of TCR clone 314958 (TRBV13, TRBJ2-5)
CASSLGQGKETQYF

SEQ ID NO: 629917 - protein, 12 aa, Homo sapiens
  CDR3 for alpha chain variable domain of TCR clone 314959 (TRAV8-3, TRAJ26)
CAGDNYGQNFVF

SEQ ID NO: 629918 - protein, 14 aa, Homo sapiens
  CDR3 for beta chain variable domain of TCR clone 314959 (TRBV6-3, TRBJ2-5)
CASSYSLREKTQYF

SEQ ID NO: 629919 - protein, 12 aa, Homo sapiens
  CDR3 for alpha chain variable domain of TCR clone 314960 (TRAV25, TRAJ31)
CAGHLNNARLMF

SEQ ID NO: 629920 - protein, 15 aa, Homo sapiens
  CDR3 for beta chain variable domain of TCR clone 314960 (TRBV7-8, TRBJ2-1)
CASSLAGGLYNEQFF

SEQ ID NO: 629921 - protein, 14 aa, Homo sapiens
  CDR3 for alpha chain variable domain of TCR clone 314961 (TRAV13-1, TRAJ44)
SAAKATGTASKLTF

SEQ ID NO: 629922 - protein, 17 aa, Homo sapiens
  CDR3 for beta chain variable domain of TCR clone 314961 (TRBV7-3, TRBJ2-3)
CASSLMKRMRGADTQYF

SEQ ID NO: 629923 - protein, 12 aa, Homo sapiens
  CDR3 for alpha chain variable domain of TCR clone 314962 (TRAV8-3, TRAJ20)
CAVDFNDYKLSF

SEQ ID NO: 629924 - protein, 14 aa, Homo sapiens
  CDR3 for beta chain variable domain of TCR clone 314962 (TRBV5-1, TRBJ2-7)
CASSLFTGTHEQYF

SEQ ID NO: 629925 - protein, 14 aa, Homo sapiens
  CDR3 for alpha chain variable domain of TCR clone 314963 (TRAV16, TRAJ33)
SALSAMDSNYQLIW

SEQ ID NO: 629926 - protein, 15 aa, Homo sapiens
  CDR3 for beta chain variable domain of TCR clone 314963 (TRBV20-1, TRBJ2-7)
CSARDRVSGMDEQYF

SEQ ID NO: 629927 - protein, 13 aa, Homo sapiens
  CDR3 for alpha chain variable domain of TCR clone 314964 (TRAV27, TRAJ41)
CAGEGNSGYALNF

SEQ ID NO: 629928 - protein, 15 aa, Homo sapiens
  CDR3 for beta chain variable domain of TCR clone 314964 (TRBV19, TRBJ1-2)
CASSVGQVLNYGYTF

SEQ ID NO: 629929 - protein, 14 aa, Homo sapiens
  CDR3 for alpha chain variable domain of TCR clone 314965 (TRAV17, TRAJ6)
CATYSSGGSYIPTF

SEQ ID NO: 629930 - protein, 19 aa, Homo sapiens
  CDR3 for beta chain variable domain of TCR clone 314965 (TRBV4-3, TRBJ2-7)
CASSQEFIGWQVTPYEQYF

SEQ ID NO: 629931 - protein, 15 aa, Homo sapiens
  CDR3 for alpha chain variable domain of TCR clone 314966 (TRAV21, TRAJ37)
CAVRPTLTNTGKLIF

SEQ ID NO: 629932 - protein, 16 aa, Homo sapiens
  CDR3 for beta chain variable domain of TCR clone 314966 (TRBV24-1, TRBJ2-3)
CATSDRRQDLTDTQYF

SEQ ID NO: 629933 - protein, 16 aa, Homo sapiens
  CDR3 for alpha chain variable domain of TCR clone 314967 (TRAV30, TRAJ24)
CGTEIVDADSWGKFQF

SEQ ID NO: 629934 - protein, 11 aa, Homo sapiens
  CDR3 for beta chain variable domain of TCR clone 314967 (TRBV27, TRBJ2-7)
CASSLGYEQYF

SEQ ID NO: 629935 - protein, 17 aa, Homo sapiens
  CDR3 for alpha chain variable domain of TCR clone 314968 (TRAV26-1, TRAJ53)
CIVRVDDSGGSSYKLTF

SEQ ID NO: 629936 - protein, 19 aa, Homo sapiens
  CDR3 for beta chain variable domain of TCR clone 314968 (TRBV25-1, TRBJ2-2)
CAILVYRVDRGRKTGELFF

SEQ ID NO: 629937 - protein, 15 aa, Homo sapiens
  CDR3 for alpha chain variable domain of TCR clone 314969 (TRAV13-1, TRAJ15)
CAASIERQAGTALIF

SEQ ID NO: 629938 - protein, 15 aa, Homo sapiens
  CDR3 for beta chain variable domain of TCR clone 314969 (TRBV11-3, TRBJ2-3)
CASLKDGREGDTQYF

SEQ ID NO: 629939 - protein, 14 aa, Homo sapiens
  CDR3 for alpha chain variable domain of TCR clone 314970 (TRAV12-1, TRAJ30)
CVVNIGGRDDKIIF

SEQ ID NO: 629940 - protein, 14 aa, Homo sapiens
  CDR3 for beta chain variable domain of TCR clone 314970 (TRBV18, TRBJ1-2)
CQLTSNTPNYGYTF

SEQ ID NO: 629941 - protein, 14 aa, Homo sapiens
  CDR3 for alpha chain variable domain of TCR clone 314971 (TRAV29/DV5, TRAJ4)
CAATVLGGYNKLIF

SEQ ID NO: 629942 - protein, 13 aa, Homo sapiens
  CDR3 for beta chain variable domain of TCR clone 314971 (TRBV11-2, TRBJ2-2)
CASGRDREEELFF

SEQ ID NO: 629943 - protein, 17 aa, Homo sapiens
  CDR3 for alpha chain variable domain of TCR clone 314972 (TRAV3, TRAJ13)
CAVRDMRRTGGDQKVTF

SEQ ID NO: 629944 - protein, 14 aa, Homo sapiens
  CDR3 for beta chain variable domain of TCR clone 314972 (TRBV5-1, TRBJ2-7)
CASSLTGSGYEQYF

SEQ ID NO: 629945 - protein, 18 aa, Homo sapiens
  CDR3 for alpha chain variable domain of TCR clone 314973 (TRAV12-3, TRAJ52)
CAMSVGGAGGTSLGKLTF

SEQ ID NO: 629946 - protein, 15 aa, Homo sapiens
  CDR3 for beta chain variable domain of TCR clone 314973 (TRBV27, TRBJ1-6)
CASSFDRGLGSPLHF

SEQ ID NO: 629947 - protein, 13 aa, Homo sapiens
  CDR3 for alpha chain variable domain of TCR clone 314974 (TRAV12-3, TRAJ29)
CAMTLSGNTPLVF

SEQ ID NO: 629948 - protein, 17 aa, Homo sapiens
  CDR3 for beta chain variable domain of TCR clone 314974 (TRBV10-3, TRBJ2-4)
CTSVPSVNKGSKNIQYF

SEQ ID NO: 629949 - protein, 16 aa, Homo sapiens
  CDR3 for alpha chain variable domain of TCR clone 314975 (TRAV20, TRAJ53)
CAVQGNSGGSNYKLTF

SEQ ID NO: 629950 - protein, 13 aa, Homo sapiens
  CDR3 for beta chain variable domain of TCR clone 314975 (TRBV11-2, TRBJ1-3)
CASSPTGGNTIYF

SEQ ID NO: 629951 - protein, 16 aa, Homo sapiens
  CDR3 for alpha chain variable domain of TCR clone 314976 (TRAV21, TRAJ37)
CAVRPRGSSNTGKLIF

SEQ ID NO: 629952 - protein, 13 aa, Homo sapiens
  CDR3 for beta chain variable domain of TCR clone 314976 (TRBV7-9, TRBJ2-5)
CAILSPGQETQYF

SEQ ID NO: 629953 - protein, 15 aa, Homo sapiens
  CDR3 for alpha chain variable domain of TCR clone 314977 (TRAV3, TRAJ5)
CAVRDLDIGRRALTF

SEQ ID NO: 629954 - protein, 13 aa, Homo sapiens
  CDR3 for beta chain variable domain of TCR clone 314977 (TRBV12-4, TRBJ2-7)
CASSPTETYEQYF

SEQ ID NO: 629955 - protein, 13 aa, Homo sapiens
  CDR3 for alpha chain variable domain of TCR clone 314978 (TRAV13-1, TRAJ3)
CRSKSSSASKIIF

SEQ ID NO: 629956 - protein, 13 aa, Homo sapiens
  CDR3 for beta chain variable domain of TCR clone 314978 (TRBV25-1, TRBJ2-5)
CASSESGRETQYF

SEQ ID NO: 629957 - protein, 15 aa, Homo sapiens
  CDR3 for alpha chain variable domain of TCR clone 314979 (TRAV3, TRAJ29)
CAVRDLYSGNTPLVF

SEQ ID NO: 629958 - protein, 17 aa, Homo sapiens
  CDR3 for beta chain variable domain of TCR clone 314979 (TRBV20-1, TRBJ2-1)
CSARDPLAGVLDNEQFF

SEQ ID NO: 629959 - protein, 13 aa, Homo sapiens
  CDR3 for alpha chain variable domain of TCR clone 314980 (TRAV8-3, TRAJ34)
CAVGGGNTDKLIF

SEQ ID NO: 629960 - protein, 16 aa, Homo sapiens
  CDR3 for beta chain variable domain of TCR clone 314980 (TRBV7-8, TRBJ1-4)
CASSLGVGTSNENLFF

SEQ ID NO: 629961 - protein, 13 aa, Homo sapiens
  CDR3 for alpha chain variable domain of TCR clone 314981 (TRAV13-1, TRAJ53)
CAASRQWRSQLQT

SEQ ID NO: 629962 - protein, 11 aa, Homo sapiens
  CDR3 for beta chain variable domain of TCR clone 314981 (TRBV12-4, TRBJ2-2)
CASSSAGELFF

SEQ ID NO: 629963 - protein, 16 aa, Homo sapiens
  CDR3 for alpha chain variable domain of TCR clone 314982 (TRAV8-3, TRAJ13)
CAVGAYPSGGYQKVTF

SEQ ID NO: 629964 - protein, 14 aa, Homo sapiens
  CDR3 for beta chain variable domain of TCR clone 314982 (TRBV18, TRBJ2-5)
CASSPRASSETHYF

SEQ ID NO: 629965 - protein, 17 aa, Homo sapiens
  CDR3 for alpha chain variable domain of TCR clone 314983 (TRAV3, TRAJ6)
CAVRDGPRAGGSYIPTF

SEQ ID NO: 629966 - protein, 18 aa, Homo sapiens
  CDR3 for beta chain variable domain of TCR clone 314983 (TRBV6-5, TRBJ1-1)
CTSVPALFDGLLNTEAFF

SEQ ID NO: 629967 - protein, 11 aa, Homo sapiens
  CDR3 for alpha chain variable domain of TCR clone 314984 (TRAV1-1, TRAJ23)
CAVRQGGKLIF

SEQ ID NO: 629968 - protein, 20 aa, Homo sapiens
  CDR3 for beta chain variable domain of TCR clone 314984 (TRBV7-8, TRBJ2-2)
CSSSHLFPGPTIHISGELFF

SEQ ID NO: 629969 - protein, 13 aa, Homo sapiens
  CDR3 for alpha chain variable domain of TCR clone 314985 (TRAV3, TRAJ36)
CAVKRTGANNLFF

SEQ ID NO: 629970 - protein, 22 aa, Homo sapiens
  CDR3 for beta chain variable domain of TCR clone 314985 (TRBV7-3, TRBJ2-5)
CASARDRVILRPRDPVLRARHA

SEQ ID NO: 629971 - protein, 14 aa, Homo sapiens
  CDR3 for alpha chain variable domain of TCR clone 314986 (TRAV16, TRAJ37)
CALDISGNTGKLIF

SEQ ID NO: 629972 - protein, 14 aa, Homo sapiens
  CDR3 for beta chain variable domain of TCR clone 314986 (TRBV7-6, TRBJ2-7)
CASSFRQGAEEQYF

SEQ ID NO: 629973 - protein, 14 aa, Homo sapiens
  CDR3 for alpha chain variable domain of TCR clone 314987 (TRAV35, TRAJ22)
CAGLRPGSARQLTF

SEQ ID NO: 629974 - protein, 16 aa, Homo sapiens
  CDR3 for beta chain variable domain of TCR clone 314987 (TRBV4-1, TRBJ2-7)
CASSPVAGGTSSTSGL

SEQ ID NO: 629975 - protein, 14 aa, Homo sapiens
  CDR3 for alpha chain variable domain of TCR clone 314988 (TRAV30, TRAJ33)
CGTERRFSNYQLIW

SEQ ID NO: 629976 - protein, 12 aa, Homo sapiens
  CDR3 for beta chain variable domain of TCR clone 314988 (TRBV11-2, TRBJ2-2)
CASSLGGGELFF

SEQ ID NO: 629977 - protein, 17 aa, Homo sapiens
  CDR3 for alpha chain variable domain of TCR clone 314989 (TRAV38-2/DV8, TRAJ23)
CSLSRKLIFGQGAELSV

SEQ ID NO: 629978 - protein, 17 aa, Homo sapiens
  CDR3 for beta chain variable domain of TCR clone 314989 (TRBV5-4, TRBJ2-1)
CASSSAGGRGPYNEQFF

SEQ ID NO: 629979 - protein, 15 aa, Homo sapiens
  CDR3 for alpha chain variable domain of TCR clone 314990 (TRAV38-2/DV8, TRAJ48)
YAYRSGGFGNEKLTS

SEQ ID NO: 629980 - protein, 16 aa, Homo sapiens
  CDR3 for beta chain variable domain of TCR clone 314990 (TRBV28, TRBJ2-7)
CASSPWVATGDLSQYF

SEQ ID NO: 629981 - protein, 19 aa, Homo sapiens
  CDR3 for alpha chain variable domain of TCR clone 314991 (TRAV3, TRAJ32)
CAVREGIMVVLQTSSSLEL

SEQ ID NO: 629982 - protein, 13 aa, Homo sapiens
  CDR3 for beta chain variable domain of TCR clone 314991 (TRBV2, TRBJ1-1)
CASSEGGNTEAFF

SEQ ID NO: 629983 - protein, 14 aa, Homo sapiens
  CDR3 for alpha chain variable domain of TCR clone 314992 (TRAV17, TRAJ54)
CATDANQGAQKLVF

SEQ ID NO: 629984 - protein, 15 aa, Homo sapiens
  CDR3 for beta chain variable domain of TCR clone 314992 (TRBV9, TRBJ1-6)
CASSVAGTGDSTLHF

SEQ ID NO: 629985 - protein, 12 aa, Homo sapiens
  CDR3 for alpha chain variable domain of TCR clone 314993 (TRAV13-1, TRAJ48)
CAANFGNEKLTF

SEQ ID NO: 629986 - protein, 14 aa, Homo sapiens
  CDR3 for beta chain variable domain of TCR clone 314993 (TRBV19, TRBJ2-7)
CASTVQGRPYEQYF

SEQ ID NO: 629987 - protein, 12 aa, Homo sapiens
  CDR3 for alpha chain variable domain of TCR clone 314994 (TRAV13-1, TRAJ48)
CAANFGNEKLNF

SEQ ID NO: 629988 - protein, 11 aa, Homo sapiens
  CDR3 for beta chain variable domain of TCR clone 314994 (TRBV12-4, TRBJ2-3)
CASTATDTQYF

SEQ ID NO: 629989 - protein, 12 aa, Homo sapiens
  CDR3 for alpha chain variable domain of TCR clone 314995 (TRAV2, TRAJ36)
CAELTGANNLFF

SEQ ID NO: 629990 - protein, 18 aa, Homo sapiens
  CDR3 for beta chain variable domain of TCR clone 314995 (TRBV19, TRBJ1-1)
CASSIDGGDYTGYTEAFF

SEQ ID NO: 629991 - protein, 13 aa, Homo sapiens
  CDR3 for alpha chain variable domain of TCR clone 314996 (TRAV3, TRAJ27)
CAVRPLGAGKSTF

SEQ ID NO: 629992 - protein, 17 aa, Homo sapiens
  CDR3 for beta chain variable domain of TCR clone 314996 (TRBV28, TRBJ2-5)
CASSTPEGDALQETQYF

SEQ ID NO: 629993 - protein, 14 aa, Homo sapiens
  CDR3 for alpha chain variable domain of TCR clone 314997 (TRAV17, TRAJ54)
CATEVVQGAQKLVF

SEQ ID NO: 629994 - protein, 13 aa, Homo sapiens
  CDR3 for beta chain variable domain of TCR clone 314997 (TRBV7-2, TRBJ2-2)
CASSSVRAGELFF

SEQ ID NO: 629995 - protein, 14 aa, Homo sapiens
  CDR3 for alpha chain variable domain of TCR clone 314998 (TRAV1-2, TRAJ8)
CAVREDTGFQKLVF

SEQ ID NO: 629996 - protein, 13 aa, Homo sapiens
  CDR3 for beta chain variable domain of TCR clone 314998 (TRBV7-3, TRBJ1-1)
CASSHDWGAEAFF

SEQ ID NO: 629997 - protein, 14 aa, Homo sapiens
  CDR3 for alpha chain variable domain of TCR clone 314999 (TRAV1-2, TRAJ16)
CAVNRFSDGQKLLF

SEQ ID NO: 629998 - protein, 13 aa, Homo sapiens
  CDR3 for beta chain variable domain of TCR clone 314999 (TRBV5-5, TRBJ1-2)
CASSLWRGEDYTF

SEQ ID NO: 629999 - protein, 14 aa, Homo sapiens
  CDR3 for alpha chain variable domain of TCR clone 315000 (TRAV27, TRAJ22)
CAGLPSGSARQLTF

SEQ ID NO: 630000 - protein, 17 aa, Homo sapiens
  CDR3 for beta chain variable domain of TCR clone 315000 (TRBV12-4, TRBJ1-1)
CASSLSGFRTMNTEAFF

SEQ ID NO: 630001 - protein, 13 aa, Homo sapiens
  CDR3 for alpha chain variable domain of TCR clone 315001 (TRAV13-1, TRAJ11)
CAAVLAGYSTLTF

SEQ ID NO: 630002 - protein, 17 aa, Homo sapiens
  CDR3 for beta chain variable domain of TCR clone 315001 (TRBV25-1, TRBJ2-7)
CASSDARVVFSSYEQYC

SEQ ID NO: 630003 - protein, 15 aa, Homo sapiens
  CDR3 for alpha chain variable domain of TCR clone 315002 (TRAV2, TRAJ22)
CDVPSRGGSARQLTF

SEQ ID NO: 630004 - protein, 11 aa, Homo sapiens
  CDR3 for beta chain variable domain of TCR clone 315002 (TRBV27, TRBJ2-3)
CASRLGDTQYF

SEQ ID NO: 630005 - protein, 17 aa, Homo sapiens
  CDR3 for alpha chain variable domain of TCR clone 315003 (TRAV27, TRAJ42)
CAERVIYYGGSQGTLIF

SEQ ID NO: 630006 - protein, 14 aa, Homo sapiens
  CDR3 for beta chain variable domain of TCR clone 315003 (TRBV6-6, TRBJ2-3)
CASRLQREADTQYF

SEQ ID NO: 630007 - protein, 14 aa, Homo sapiens
  CDR3 for alpha chain variable domain of TCR clone 315004 (TRAV13-1, TRAJ44)
CASKATGTASKLAF

SEQ ID NO: 630008 - protein, 17 aa, Homo sapiens
  CDR3 for beta chain variable domain of TCR clone 315004 (TRBV7-3, TRBJ2-3)
CASSLMKRMRGADTQYF

SEQ ID NO: 630009 - protein, 15 aa, Homo sapiens
  CDR3 for alpha chain variable domain of TCR clone 315005 (TRAV3, TRAJ20)
CAVRDSRSKDYKLSF

SEQ ID NO: 630010 - protein, 14 aa, Homo sapiens
  CDR3 for beta chain variable domain of TCR clone 315005 (TRBV20-1, TRBJ2-7)
CSARRGNGIYEQYF

SEQ ID NO: 630011 - protein, 13 aa, Homo sapiens
  CDR3 for alpha chain variable domain of TCR clone 315006 (TRAV21, TRAJ57)
CAVAQGGSGKLVF

SEQ ID NO: 630012 - protein, 14 aa, Homo sapiens
  CDR3 for beta chain variable domain of TCR clone 315006 (TRBV5-1, TRBJ2-1)
CASSALWAGNEQFF

SEQ ID NO: 630013 - protein, 14 aa, Homo sapiens
  CDR3 for alpha chain variable domain of TCR clone 315007 (TRAV17, TRAJ57)
CATDPQGGSEKLVF

SEQ ID NO: 630014 - protein, 13 aa, Homo sapiens
  CDR3 for beta chain variable domain of TCR clone 315007 (TRBV19, TRBJ1-2)
CACSQGQVYGYTF

SEQ ID NO: 630015 - protein, 14 aa, Homo sapiens
  CDR3 for alpha chain variable domain of TCR clone 315008 (TRAV26-1, TRAJ44)
CIVRPTGTASKIIF

SEQ ID NO: 630016 - protein, 12 aa, Homo sapiens
  CDR3 for beta chain variable domain of TCR clone 315008 (TRBV11-3, TRBJ1-1)
CASSLRDSEAFF

SEQ ID NO: 630017 - protein, 13 aa, Homo sapiens
  CDR3 for alpha chain variable domain of TCR clone 315009 (TRAV8-6, TRAJ21)
CAVSPSSLNNFYF

SEQ ID NO: 630018 - protein, 18 aa, Homo sapiens
  CDR3 for beta chain variable domain of TCR clone 315009 (TRBV11-2, TRBJ2-3)
CASSLGGASRGAPNTQYF

SEQ ID NO: 630019 - protein, 14 aa, Homo sapiens
  CDR3 for alpha chain variable domain of TCR clone 315010 (TRAV9-2, TRAJ39)
CALYIYNAGNMLNF

SEQ ID NO: 630020 - protein, 17 aa, Homo sapiens
  CDR3 for beta chain variable domain of TCR clone 315010 (TRBV9, TRBJ2-3)
CASRSTAGGPSTDTQYF

SEQ ID NO: 630021 - protein, 13 aa, Homo sapiens
  CDR3 for alpha chain variable domain of TCR clone 315011 (TRAV12-3, TRAJ13)
CAMSSGGYQKVTF

SEQ ID NO: 630022 - protein, 14 aa, Homo sapiens
  CDR3 for beta chain variable domain of TCR clone 315011 (TRBV10-3, TRBJ1-6)
CAISVDGDESPLHF

SEQ ID NO: 630023 - protein, 13 aa, Homo sapiens
  CDR3 for alpha chain variable domain of TCR clone 315012 (TRAV20, TRAJ42)
CAVQGVSQGNLIF

SEQ ID NO: 630024 - protein, 15 aa, Homo sapiens
  CDR3 for beta chain variable domain of TCR clone 315012 (TRBV10-1, TRBJ2-1)
CASSEWRGTYNEQFF

SEQ ID NO: 630025 - protein, 12 aa, Homo sapiens
  CDR3 for alpha chain variable domain of TCR clone 315013 (TRAV17, TRAJ28)
CDSGAGSYQLTF

SEQ ID NO: 630026 - protein, 13 aa, Homo sapiens
  CDR3 for beta chain variable domain of TCR clone 315013 (TRBV11-3, TRBJ1-1)
CASSRQPNTEAFF

SEQ ID NO: 630027 - protein, 13 aa, Homo sapiens
  CDR3 for alpha chain variable domain of TCR clone 315014 (TRAV16, TRAJ52)
CALRGTSYGKLTF

SEQ ID NO: 630028 - protein, 14 aa, Homo sapiens
  CDR3 for beta chain variable domain of TCR clone 315014 (TRBV2, TRBJ2-3)
CASSEGQNTDTQYF

SEQ ID NO: 630029 - protein, 14 aa, Homo sapiens
  CDR3 for alpha chain variable domain of TCR clone 315015 (TRAV3, TRAJ9)
CAVRLNTGGFKTIF

SEQ ID NO: 630030 - protein, 15 aa, Homo sapiens
  CDR3 for beta chain variable domain of TCR clone 315015 (TRBV10-2, TRBJ2-6)
CASSEQGTGANVLTF

SEQ ID NO: 630031 - protein, 12 aa, Homo sapiens
  CDR3 for alpha chain variable domain of TCR clone 315016 (TRAV12-1, TRAJ40)
CVVYSETYKYIF

SEQ ID NO: 630032 - protein, 14 aa, Homo sapiens
  CDR3 for beta chain variable domain of TCR clone 315016 (TRBV7-9, TRBJ2-5)
CASSLDTAQETQYF

SEQ ID NO: 630033 - protein, 11 aa, Homo sapiens
  CDR3 for alpha chain variable domain of TCR clone 315017 (TRAV27, TRAJ47)
SIVEYGNKLVF

SEQ ID NO: 630034 - protein, 13 aa, Homo sapiens
  CDR3 for beta chain variable domain of TCR clone 315017 (TRBV19, TRBJ2-7)
CASSTKQGYEQYF

SEQ ID NO: 630035 - protein, 14 aa, Homo sapiens
  CDR3 for alpha chain variable domain of TCR clone 315018 (TRAV3, TRAJ21)
CAVRDAYNFNKFYF

SEQ ID NO: 630036 - protein, 17 aa, Homo sapiens
  CDR3 for beta chain variable domain of TCR clone 315018 (TRBV6-5, TRBJ2-1)
CASRKSPRTGGHNEQFF

SEQ ID NO: 630037 - protein, 14 aa, Homo sapiens
  CDR3 for alpha chain variable domain of TCR clone 315019 (TRAV26-1, TRAJ38)
CIADNAGNNRKLIW

SEQ ID NO: 630038 - protein, 13 aa, Homo sapiens
  CDR3 for beta chain variable domain of TCR clone 315019 (TRBV19, TRBJ1-2)
CASSVHGQDGYTF

SEQ ID NO: 630039 - protein, 14 aa, Homo sapiens
  CDR3 for alpha chain variable domain of TCR clone 315020 (TRAV8-3, TRAJ9)
CAVVYNTGGFKPIF

SEQ ID NO: 630040 - protein, 13 aa, Homo sapiens
  CDR3 for beta chain variable domain of TCR clone 315020 (TRBV10-2, TRBJ2-1)
CASGASGDAKQFF

SEQ ID NO: 630041 - protein, 16 aa, Homo sapiens
  CDR3 for alpha chain variable domain of TCR clone 315021 (TRAV30, TRAJ24)
CGTEIVDADSWGKFQF

SEQ ID NO: 630042 - protein, 13 aa, Homo sapiens
  CDR3 for beta chain variable domain of TCR clone 315021 (TRBV4-2, TRBJ2-1)
CASSPGTYNEQFF

SEQ ID NO: 630043 - protein, 12 aa, Homo sapiens
  CDR3 for alpha chain variable domain of TCR clone 315022 (TRAV17, TRAJ30)
CATDARDDKIIF

SEQ ID NO: 630044 - protein, 16 aa, Homo sapiens
  CDR3 for beta chain variable domain of TCR clone 315022 (TRBV19, TRBJ2-1)
CASSKAGPSSYNEQFF

SEQ ID NO: 630045 - protein, 13 aa, Homo sapiens
  CDR3 for alpha chain variable domain of TCR clone 315023 (TRAV8-3, TRAJ48)
CAVVPFGNEKLTF

SEQ ID NO: 630046 - protein, 12 aa, Homo sapiens
  CDR3 for beta chain variable domain of TCR clone 315023 (TRBV11-2, TRBJ2-2)
RASSLGGGELFF

SEQ ID NO: 630047 - protein, 14 aa, Homo sapiens
  CDR3 for alpha chain variable domain of TCR clone 315024 (TRAV3, TRAJ21)
CAVVPLYNFNKFYF

SEQ ID NO: 630048 - protein, 14 aa, Homo sapiens
  CDR3 for beta chain variable domain of TCR clone 315024 (TRBV12-5, TRBJ2-5)
CASGSRTHQETQYF

SEQ ID NO: 630049 - protein, 13 aa, Homo sapiens
  CDR3 for alpha chain variable domain of TCR clone 315025 (TRAV29/DV5, TRAJ42)
CAAPGGSQGTLIF

SEQ ID NO: 630050 - protein, 14 aa, Homo sapiens
  CDR3 for beta chain variable domain of TCR clone 315025 (TRBV11-2, TRBJ2-7)
CASSSTGEGYEQYF

SEQ ID NO: 630051 - protein, 13 aa, Homo sapiens
  CDR3 for alpha chain variable domain of TCR clone 315026 (TRAV1-1, TRAJ38)
CASNAGNNRKLIW

SEQ ID NO: 630052 - protein, 18 aa, Homo sapiens
  CDR3 for beta chain variable domain of TCR clone 315026 (TRBV10-2, TRBJ2-2)
CISAPAVHRQADAGELFF

SEQ ID NO: 630053 - protein, 18 aa, Homo sapiens
  CDR3 for alpha chain variable domain of TCR clone 315027 (TRAV13-1, TRAJ52)
CAASKRSAGGTSYGKLTF

SEQ ID NO: 630054 - protein, 15 aa, Homo sapiens
  CDR3 for beta chain variable domain of TCR clone 315027 (TRBV5-1, TRBJ2-1)
CASSLVANSYNEQFF

SEQ ID NO: 630055 - protein, 14 aa, Homo sapiens
  CDR3 for alpha chain variable domain of TCR clone 315028 (TRAV21, TRAJ45)
RAVVSGGGADGLTF

SEQ ID NO: 630056 - protein, 14 aa, Homo sapiens
  CDR3 for beta chain variable domain of TCR clone 315028 (TRBV20-1, TRBJ2-3)
CSALGLEGADTQYF

SEQ ID NO: 630057 - protein, 16 aa, Homo sapiens
  CDR3 for alpha chain variable domain of TCR clone 315029 (TRAV17, TRAJ22)
CATGPISSGSARQLTF

SEQ ID NO: 630058 - protein, 12 aa, Homo sapiens
  CDR3 for beta chain variable domain of TCR clone 315029 (TRBV11-2, TRBJ2-2)
CASSLGGGELFF

SEQ ID NO: 630059 - protein, 11 aa, Homo sapiens
  CDR3 for alpha chain variable domain of TCR clone 315030 (TRAV8-6, TRAJ23)
CAVISGGKLIF

SEQ ID NO: 630060 - protein, 12 aa, Homo sapiens
  CDR3 for beta chain variable domain of TCR clone 315030 (TRBV2, TRBJ2-1)
CAYGPPGNEQFF

SEQ ID NO: 630061 - protein, 13 aa, Homo sapiens
  CDR3 for alpha chain variable domain of TCR clone 315031 (TRAV1-1, TRAJ9)
CAAKNTGGFKTIF

SEQ ID NO: 630062 - protein, 12 aa, Homo sapiens
  CDR3 for beta chain variable domain of TCR clone 315031 (TRBV19, TRBJ2-1)
CASSRQGAEQFF

SEQ ID NO: 630063 - protein, 14 aa, Homo sapiens
  CDR3 for alpha chain variable domain of TCR clone 315032 (TRAV3, TRAJ9)
CAVVYNTGGFKTIF

SEQ ID NO: 630064 - protein, 14 aa, Homo sapiens
  CDR3 for beta chain variable domain of TCR clone 315032 (TRBV7-3, TRBJ2-2)
CASSSGGYTGELFF

SEQ ID NO: 630065 - protein, 12 aa, Homo sapiens
  CDR3 for alpha chain variable domain of TCR clone 315033 (TRAV13-1, TRAJ3)
CAATVVQQCFQD

SEQ ID NO: 630066 - protein, 16 aa, Homo sapiens
  CDR3 for beta chain variable domain of TCR clone 315033 (TRBV7-3, TRBJ2-2)
CASSLKRGTLSGELFF

SEQ ID NO: 630067 - protein, 13 aa, Homo sapiens
  CDR3 for alpha chain variable domain of TCR clone 315034 (TRAV21, TRAJ27)
CAARPGNAGKPTF

SEQ ID NO: 630068 - protein, 16 aa, Homo sapiens
  CDR3 for beta chain variable domain of TCR clone 315034 (TRBV20-1, TRBJ1-2)
CSASMGQGVANYGYTF

SEQ ID NO: 630069 - protein, 14 aa, Homo sapiens
  CDR3 for alpha chain variable domain of TCR clone 315035 (TRAV8-4, TRAJ48)
CAVSETFGNEKLTF

SEQ ID NO: 630070 - protein, 13 aa, Homo sapiens
  CDR3 for beta chain variable domain of TCR clone 315035 (TRBV28, TRBJ2-7)
CASSPSGTYEQYF

SEQ ID NO: 630071 - protein, 14 aa, Homo sapiens
  CDR3 for alpha chain variable domain of TCR clone 315036 (TRAV23/DV6, TRAJ11)
CAALIGGGYSTLTF

SEQ ID NO: 630072 - protein, 12 aa, Homo sapiens
  CDR3 for beta chain variable domain of TCR clone 315036 (TRBV7-8, TRBJ2-1)
CASSLGHNEQFF

SEQ ID NO: 630073 - protein, 13 aa, Homo sapiens
  CDR3 for alpha chain variable domain of TCR clone 315037 (TRAV12-1, TRAJ7)
CVVNMRGNNRLAF

SEQ ID NO: 630074 - protein, 15 aa, Homo sapiens
  CDR3 for beta chain variable domain of TCR clone 315037 (TRBV27, TRBJ2-3)
CASSLGLAATVTQYF

SEQ ID NO: 630075 - protein, 13 aa, Homo sapiens
  CDR3 for alpha chain variable domain of TCR clone 315038 (TRAV27, TRAJ49)
CAPPPYTGNQFYF

SEQ ID NO: 630076 - protein, 16 aa, Homo sapiens
  CDR3 for beta chain variable domain of TCR clone 315038 (TRBV4-1, TRBJ1-2)
CASSQDAGQVLYGYTF

SEQ ID NO: 630077 - protein, 14 aa, Homo sapiens
  CDR3 for alpha chain variable domain of TCR clone 315039 (TRAV36/DV7, TRAJ16)
CAVEADSDGQKPLF

SEQ ID NO: 630078 - protein, 15 aa, Homo sapiens
  CDR3 for beta chain variable domain of TCR clone 315039 (TRBV5-4, TRBJ2-3)
CATKSSGGALDTQYF

SEQ ID NO: 630079 - protein, 16 aa, Homo sapiens
  CDR3 for alpha chain variable domain of TCR clone 315040 (TRAV3, TRAJ5)
CAVRNLMDTGRRALTF

SEQ ID NO: 630080 - protein, 14 aa, Homo sapiens
  CDR3 for beta chain variable domain of TCR clone 315040 (TRBV6-1, TRBJ1-3)
CASVQGGGGNTIYF

SEQ ID NO: 630081 - protein, 16 aa, Homo sapiens
  CDR3 for alpha chain variable domain of TCR clone 315041 (TRAV2, TRAJ13)
CAARILGVTRKLPLEL

SEQ ID NO: 630082 - protein, 14 aa, Homo sapiens
  CDR3 for beta chain variable domain of TCR clone 315041 (TRBV19, TRBJ2-1)
CASEVTGPRNEQFF

SEQ ID NO: 630083 - protein, 18 aa, Homo sapiens
  CDR3 for alpha chain variable domain of TCR clone 315042 (TRAV13-1, TRAJ52)
CAAKNPNAGGTSYGKLTF

SEQ ID NO: 630084 - protein, 12 aa, Homo sapiens
  CDR3 for beta chain variable domain of TCR clone 315042 (TRBV28, TRBJ1-6)
CASLSVPGPLHF

SEQ ID NO: 630085 - protein, 14 aa, Homo sapiens
  CDR3 for alpha chain variable domain of TCR clone 315043 (TRAV9-2, TRAJ35)
CALRSIGFGNVLHC

SEQ ID NO: 630086 - protein, 12 aa, Homo sapiens
  CDR3 for beta chain variable domain of TCR clone 315043 (TRBV5-4, TRBJ2-5)
CASSSTRETQYC

SEQ ID NO: 630087 - protein, 18 aa, Homo sapiens
  CDR3 for alpha chain variable domain of TCR clone 315044 (TRAV21, TRAJ52)
CAVRPSPAGGTSYGRLTF

SEQ ID NO: 630088 - protein, 17 aa, Homo sapiens
  CDR3 for beta chain variable domain of TCR clone 315044 (TRBV13, TRBJ2-3)
CASSLSRVAGGRNTQYC

SEQ ID NO: 630089 - protein, 14 aa, Homo sapiens
  CDR3 for alpha chain variable domain of TCR clone 315045 (TRAV26-1, TRAJ21)
CIVRPPYNFNKFYF

SEQ ID NO: 630090 - protein, 15 aa, Homo sapiens
  CDR3 for beta chain variable domain of TCR clone 315045 (TRBV20-1, TRBJ2-5)
CSAEGTGGLQETQYF

SEQ ID NO: 630091 - protein, 14 aa, Homo sapiens
  CDR3 for alpha chain variable domain of TCR clone 315046 (TRAV1-2, TRAJ8)
CAVREDTGFQKLVF

SEQ ID NO: 630092 - protein, 15 aa, Homo sapiens
  CDR3 for beta chain variable domain of TCR clone 315046 (TRBV11-2, TRBJ1-6)
CASTGFGTAVSPLHF

SEQ ID NO: 630093 - protein, 11 aa, Homo sapiens
  CDR3 for alpha chain variable domain of TCR clone 315047 (TRAV1-2, TRAJ20)
CAVSNDYKLSF

SEQ ID NO: 630094 - protein, 16 aa, Homo sapiens
  CDR3 for beta chain variable domain of TCR clone 315047 (TRBV29-1, TRBJ2-6)
CSVEDITYAGANDLTF

SEQ ID NO: 630095 - protein, 16 aa, Homo sapiens
  CDR3 for alpha chain variable domain of TCR clone 315048 (TRAV13-1, TRAJ10)
CAASRKRREEETNSPL

SEQ ID NO: 630096 - protein, 14 aa, Homo sapiens
  CDR3 for beta chain variable domain of TCR clone 315048 (TRBV11-2, TRBJ2-3)
CASSRLARTDTQYF

SEQ ID NO: 630097 - protein, 16 aa, Homo sapiens
  CDR3 for alpha chain variable domain of TCR clone 315049 (TRAV30, TRAJ24)
CGTEIVDADSWGKFSL

SEQ ID NO: 630098 - protein, 13 aa, Homo sapiens
  CDR3 for beta chain variable domain of TCR clone 315049 (TRBV7-2, TRBJ1-4)
CASSLAGLEKLFF

SEQ ID NO: 630099 - protein, 12 aa, Homo sapiens
  CDR3 for alpha chain variable domain of TCR clone 315050 (TRAV3, TRAJ20)
CAVRDPDYQLSF

SEQ ID NO: 630100 - protein, 13 aa, Homo sapiens
  CDR3 for beta chain variable domain of TCR clone 315050 (TRBV18, TRBJ1-1)
CASSPETKPEAFF

SEQ ID NO: 630101 - protein, 15 aa, Homo sapiens
  CDR3 for alpha chain variable domain of TCR clone 315051 (TRAV26-1, TRAJ29)
CVVRVEGSGNTPLVF

SEQ ID NO: 630102 - protein, 14 aa, Homo sapiens
  CDR3 for beta chain variable domain of TCR clone 315051 (TRBV7-9, TRBJ1-5)
CQQPRSQPNQPQHF

SEQ ID NO: 630103 - protein, 13 aa, Homo sapiens
  CDR3 for alpha chain variable domain of TCR clone 315052 (TRAV12-1, TRAJ39)
CVVPQRAGNMLTF

SEQ ID NO: 630104 - protein, 16 aa, Homo sapiens
  CDR3 for beta chain variable domain of TCR clone 315052 (TRBV20-1, TRBJ2-1)
CSARDLKQGMNNEQFF

SEQ ID NO: 630105 - protein, 14 aa, Homo sapiens
  CDR3 for alpha chain variable domain of TCR clone 315053 (TRAV16, TRAJ3)
CALSQYSSASKIIF

SEQ ID NO: 630106 - protein, 15 aa, Homo sapiens
  CDR3 for beta chain variable domain of TCR clone 315053 (TRBV20-1, TRBJ2-7)
CSARDRVSGMDEQYF

SEQ ID NO: 630107 - protein, 18 aa, Homo sapiens
  CDR3 for alpha chain variable domain of TCR clone 315054 (TRAV21, TRAJ52)
CAVRPSPAGGTSYGKLTF

SEQ ID NO: 630108 - protein, 14 aa, Homo sapiens
  CDR3 for beta chain variable domain of TCR clone 315054 (TRBV13, TRBJ2-3)
CASSLGTVTDTQYF

SEQ ID NO: 630109 - protein, 16 aa, Homo sapiens
  CDR3 for alpha chain variable domain of TCR clone 315055 (TRAV12-1, TRAJ13)
CVVNLEVSGGYQKVTF

SEQ ID NO: 630110 - protein, 16 aa, Homo sapiens
  CDR3 for beta chain variable domain of TCR clone 315055 (TRBV24-1, TRBJ2-6)
CATSGRRASGANDLTF

SEQ ID NO: 630111 - protein, 16 aa, Homo sapiens
  CDR3 for alpha chain variable domain of TCR clone 315056 (TRAV1-1, TRAJ22)
CAVNDALSGSARQLTF

SEQ ID NO: 630112 - protein, 13 aa, Homo sapiens
  CDR3 for beta chain variable domain of TCR clone 315056 (TRBV7-9, TRBJ1-2)
CASSLKQNYGYTF

SEQ ID NO: 630113 - protein, 11 aa, Homo sapiens
  CDR3 for alpha chain variable domain of TCR clone 315057 (TRAV2, TRAJ33)
CAVDSNYQLIW

SEQ ID NO: 630114 - protein, 12 aa, Homo sapiens
  CDR3 for beta chain variable domain of TCR clone 315057 (TRBV12-4, TRBJ1-2)
CASSFIWLHLRF

SEQ ID NO: 630115 - protein, 12 aa, Homo sapiens
  CDR3 for alpha chain variable domain of TCR clone 315058 (TRAV30, TRAJ43)
CGTEERGNDMRF

SEQ ID NO: 630116 - protein, 13 aa, Homo sapiens
  CDR3 for beta chain variable domain of TCR clone 315058 (TRBV27, TRBJ2-7)
CASRVSQGYEQYF

SEQ ID NO: 630117 - protein, 14 aa, Homo sapiens
  CDR3 for alpha chain variable domain of TCR clone 315059 (TRAV1-2, TRAJ16)
CAVNRFSDGQKLLF

SEQ ID NO: 630118 - protein, 16 aa, Homo sapiens
  CDR3 for beta chain variable domain of TCR clone 315059 (TRBV20-1, TRBJ2-3)
CSAVRDRGPIADTQYF

SEQ ID NO: 630119 - protein, 14 aa, Homo sapiens
  CDR3 for alpha chain variable domain of TCR clone 315060 (TRAV1-2, TRAJ29)
CAVRTDSGNTPLVF

SEQ ID NO: 630120 - protein, 15 aa, Homo sapiens
  CDR3 for beta chain variable domain of TCR clone 315060 (TRBV27, TRBJ2-2)
CASSLEGPNTGELFF

SEQ ID NO: 630121 - protein, 13 aa, Homo sapiens
  CDR3 for alpha chain variable domain of TCR clone 315061 (TRAV13-1, TRAJ6)
CAASSGGRYIPTF

SEQ ID NO: 630122 - protein, 15 aa, Homo sapiens
  CDR3 for beta chain variable domain of TCR clone 315061 (TRBV12-4, TRBJ2-5)
CASSPPTGLQETQYF

SEQ ID NO: 630123 - protein, 12 aa, Homo sapiens
  CDR3 for alpha chain variable domain of TCR clone 315062 (TRAV26-1, TRAJ39)
CIVGYAGNMLTF

SEQ ID NO: 630124 - protein, 15 aa, Homo sapiens
  CDR3 for beta chain variable domain of TCR clone 315062 (TRBV2, TRBJ2-1)
CASSEEREGDNEQFF

SEQ ID NO: 630125 - protein, 16 aa, Homo sapiens
  CDR3 for alpha chain variable domain of TCR clone 315063 (TRAV3, TRAJ37)
CAVRGRGSGNKGKLIF

SEQ ID NO: 630126 - protein, 13 aa, Homo sapiens
  CDR3 for beta chain variable domain of TCR clone 315063 (TRBV14, TRBJ2-7)
CASSQDRRGEQYF

SEQ ID NO: 630127 - protein, 11 aa, Homo sapiens
  CDR3 for alpha chain variable domain of TCR clone 315064 (TRAV12-3, TRAJ11)
CNATGYSTLTF

SEQ ID NO: 630128 - protein, 18 aa, Homo sapiens
  CDR3 for beta chain variable domain of TCR clone 315064 (TRBV7-2, TRBJ2-3)
CASSLKWEGSGITDTQYF

SEQ ID NO: 630129 - protein, 14 aa, Homo sapiens
  CDR3 for alpha chain variable domain of TCR clone 315065 (TRAV13-1, TRAJ44)
CAAKATGTASKLTF

SEQ ID NO: 630130 - protein, 14 aa, Homo sapiens
  CDR3 for beta chain variable domain of TCR clone 315065 (TRBV20-1, TRBJ1-3)
CSASPTGAGNTIYF

SEQ ID NO: 630131 - protein, 16 aa, Homo sapiens
  CDR3 for alpha chain variable domain of TCR clone 315066 (TRAV3, TRAJ37)
CAVRPHGSGNTGKLIF

SEQ ID NO: 630132 - protein, 13 aa, Homo sapiens
  CDR3 for beta chain variable domain of TCR clone 315066 (TRBV29-1, TRBJ2-1)
CSVEGGRVNEQCF

SEQ ID NO: 630133 - protein, 13 aa, Homo sapiens
  CDR3 for alpha chain variable domain of TCR clone 315067 (TRAV13-1, TRAJ12)
CAASPDSSYKLIF

SEQ ID NO: 630134 - protein, 13 aa, Homo sapiens
  CDR3 for beta chain variable domain of TCR clone 315067 (TRBV12-5, TRBJ2-3)
CASGDRQSDTQYF

SEQ ID NO: 630135 - protein, 15 aa, Homo sapiens
  CDR3 for alpha chain variable domain of TCR clone 315068 (TRAV17, TRAJ28)
CATDPSGAGSYQLTF

SEQ ID NO: 630136 - protein, 15 aa, Homo sapiens
  CDR3 for beta chain variable domain of TCR clone 315068 (TRBV28, TRBJ2-6)
CASSLAGSGANVLTF

SEQ ID NO: 630137 - protein, 13 aa, Homo sapiens
  CDR3 for alpha chain variable domain of TCR clone 315069 (TRAV8-3, TRAJ48)
CAVVRFGNEKLTF

SEQ ID NO: 630138 - protein, 16 aa, Homo sapiens
  CDR3 for beta chain variable domain of TCR clone 315069 (TRBV20-1, TRBJ2-5)
CSASDFASGIQETQYF

SEQ ID NO: 630139 - protein, 15 aa, Homo sapiens
  CDR3 for alpha chain variable domain of TCR clone 315070 (TRAV26-1, TRAJ3)
CIVRSGYSSASKIIF

SEQ ID NO: 630140 - protein, 14 aa, Homo sapiens
  CDR3 for beta chain variable domain of TCR clone 315070 (TRBV18, TRBJ2-5)
CASSPGVSQETQYF

SEQ ID NO: 630141 - protein, 13 aa, Homo sapiens
  CDR3 for alpha chain variable domain of TCR clone 315071 (TRAV8-3, TRAJ6)
CAARRGGSYIPTF

SEQ ID NO: 630142 - protein, 15 aa, Homo sapiens
  CDR3 for beta chain variable domain of TCR clone 315071 (TRBV4-1, TRBJ2-3)
CASSNLAGGRDTQYV

SEQ ID NO: 630143 - protein, 15 aa, Homo sapiens
  CDR3 for alpha chain variable domain of TCR clone 315072 (TRAV4, TRAJ26)
CLVGDMNNYGQNFVF

SEQ ID NO: 630144 - protein, 16 aa, Homo sapiens
  CDR3 for beta chain variable domain of TCR clone 315072 (TRBV28, TRAJ31)
CASSSRTGAANEKLFF

SEQ ID NO: 630145 - protein, 12 aa, Homo sapiens
  CDR3 for alpha chain variable domain of TCR clone 315073 (TRAV4, TRAJ26)
CLVGDYVRILSL

SEQ ID NO: 630146 - protein, 15 aa, Homo sapiens
  CDR3 for beta chain variable domain of TCR clone 315073 (TRBV7-3, TRBJ2-1)
CASSPTGGGEVEQFF

SEQ ID NO: 630147 - protein, 12 aa, Homo sapiens
  CDR3 for alpha chain variable domain of TCR clone 315074 (TRAV16, TRAJ10)
CSRTGGGNKLTF

SEQ ID NO: 630148 - protein, 13 aa, Homo sapiens
  CDR3 for beta chain variable domain of TCR clone 315074 (TRBV4-2, TRBJ2-2)
CASEDRGTGELFF

SEQ ID NO: 630149 - protein, 14 aa, Homo sapiens
  CDR3 for alpha chain variable domain of TCR clone 315075 (TRAV16, TRAJ17)
CALSGRAAGNKLTF

SEQ ID NO: 630150 - protein, 15 aa, Homo sapiens
  CDR3 for beta chain variable domain of TCR clone 315075 (TRBV6-5, TRBJ2-1)
CASSYDAGAGNEQFF

SEQ ID NO: 630151 - protein, 14 aa, Homo sapiens
  CDR3 for alpha chain variable domain of TCR clone 315076 (TRAV1-1, TRAJ27)
CAVIYNTNAGKSTF

SEQ ID NO: 630152 - protein, 16 aa, Homo sapiens
  CDR3 for beta chain variable domain of TCR clone 315076 (TRBV7-3, TRBJ2-1)
CASSLTLASGRAMVSS

SEQ ID NO: 630153 - protein, 14 aa, Homo sapiens
  CDR3 for alpha chain variable domain of TCR clone 315077 (TRAV2, TRAJ9)
CAVEYRSGGFKTIF

SEQ ID NO: 630154 - protein, 12 aa, Homo sapiens
  CDR3 for beta chain variable domain of TCR clone 315077 (TRBV11-2, TRBJ2-1)
CASSPGNNEQFF

SEQ ID NO: 630155 - protein, 12 aa, Homo sapiens
  CDR3 for alpha chain variable domain of TCR clone 315078 (TRAV21, TRAJ11)
CAETSGYSTLTF

SEQ ID NO: 630156 - protein, 14 aa, Homo sapiens
  CDR3 for beta chain variable domain of TCR clone 315078 (TRBV20-1, TRBJ2-7)
CSAPELAGVGEQFF

SEQ ID NO: 630157 - protein, 15 aa, Homo sapiens
  CDR3 for alpha chain variable domain of TCR clone 315079 (TRAV3, TRAJ13)
CAVRVYSGGYKKVTF

SEQ ID NO: 630158 - protein, 15 aa, Homo sapiens
  CDR3 for beta chain variable domain of TCR clone 315079 (TRBV7-2, TRBJ2-1)
CASSSGLAGGNEQFF

SEQ ID NO: 630159 - protein, 15 aa, Homo sapiens
  CDR3 for alpha chain variable domain of TCR clone 315080 (TRAV26-1, TRAJ22)
CIVRVSFWFCKATDL

SEQ ID NO: 630160 - protein, 15 aa, Homo sapiens
  CDR3 for beta chain variable domain of TCR clone 315080 (TRBV20-1, TRBJ2-7)
CSARDRVSGMDGQYF

SEQ ID NO: 630161 - protein, 15 aa, Homo sapiens
  CDR3 for alpha chain variable domain of TCR clone 315081 (TRAV21, TRAJ53)
CATLNSGGSNYKLTF

SEQ ID NO: 630162 - protein, 16 aa, Homo sapiens
  CDR3 for beta chain variable domain of TCR clone 315081 (TRBV7-2, TRBJ1-3)
CASSSGRVLSGNTIYF

SEQ ID NO: 630163 - protein, 14 aa, Homo sapiens
  CDR3 for alpha chain variable domain of TCR clone 315082 (TRAV27, TRAJ13)
CRSSNSGGYQKVTF

SEQ ID NO: 630164 - protein, 20 aa, Homo sapiens
  CDR3 for beta chain variable domain of TCR clone 315082 (TRBV7-8, TRBJ2-2)
CASSHLFPGPTIHITGELFF

SEQ ID NO: 630165 - protein, 14 aa, Homo sapiens
  CDR3 for alpha chain variable domain of TCR clone 315083 (TRAV20, TRAJ47)
CAVTFGEYGNKLVF

SEQ ID NO: 630166 - protein, 15 aa, Homo sapiens
  CDR3 for beta chain variable domain of TCR clone 315083 (TRBV10-3, TRBJ2-3)
CAISLTSGGTDTQYF

SEQ ID NO: 630167 - protein, 14 aa, Homo sapiens
  CDR3 for alpha chain variable domain of TCR clone 315084 (TRAV26-1, TRAJ29)
CIVRVEGSGNTPCL

SEQ ID NO: 630168 - protein, 15 aa, Homo sapiens
  CDR3 for beta chain variable domain of TCR clone 315084 (TRBV7-9, TRBJ1-5)
CASSQGHQPNQPQHF

SEQ ID NO: 630169 - protein, 19 aa, Homo sapiens
  CDR3 for alpha chain variable domain of TCR clone 315085 (TRAV2, TRAJ20)
ILQVWEADAAVYRDCKLSF

SEQ ID NO: 630170 - protein, 16 aa, Homo sapiens
  CDR3 for beta chain variable domain of TCR clone 315085 (TRBV19, TRBJ2-1)
FASSKAGPSSYNEQFF

SEQ ID NO: 630171 - protein, 12 aa, Homo sapiens
  CDR3 for alpha chain variable domain of TCR clone 315086 (TRAV2, TRAJ33)
RAVPDSNYKLIW

SEQ ID NO: 630172 - protein, 14 aa, Homo sapiens
  CDR3 for beta chain variable domain of TCR clone 315086 (TRBV20-1, TRBJ2-2)
CSAPDTANTGELFF

SEQ ID NO: 630173 - protein, 11 aa, Homo sapiens
  CDR3 for alpha chain variable domain of TCR clone 315087 (TRAV3, TRAJ17)
PRGAAGNKLTF

SEQ ID NO: 630174 - protein, 16 aa, Homo sapiens
  CDR3 for beta chain variable domain of TCR clone 315087 (TRBV7-2, TRBJ2-1)
CASSLVAGAGYNEQFF

SEQ ID NO: 630175 - protein, 17 aa, Homo sapiens
  CDR3 for alpha chain variable domain of TCR clone 315088 (TRAV3, TRAJ6)
CAVRDGPRAGGGYIPTF

SEQ ID NO: 630176 - protein, 14 aa, Homo sapiens
  CDR3 for beta chain variable domain of TCR clone 315088 (TRBV7-2, TRBJ2-7)
CASSPKTSLYEQYF

SEQ ID NO: 630177 - protein, 15 aa, Homo sapiens
  CDR3 for alpha chain variable domain of TCR clone 315089 (TRAV3, TRAJ20)
CAVRDLKLSDYKLSF

SEQ ID NO: 630178 - protein, 15 aa, Homo sapiens
  CDR3 for beta chain variable domain of TCR clone 315089 (TRBV7-9, TRBJ1-6)
CASSSPGRGNSPHHF

SEQ ID NO: 630179 - protein, 15 aa, Homo sapiens
  CDR3 for alpha chain variable domain of TCR clone 315090 (TRAV12-1, TRAJ44)
CVADLPTGTASKLTF

SEQ ID NO: 630180 - protein, 13 aa, Homo sapiens
  CDR3 for beta chain variable domain of TCR clone 315090 (TRBV10-3, TRBJ2-7)
CASKLAVNYEQYF

SEQ ID NO: 630181 - protein, 15 aa, Homo sapiens
  CDR3 for alpha chain variable domain of TCR clone 315091 (TRAV12-1, TRAJ9)
CVVSFGDTGCFKTFF

SEQ ID NO: 630182 - protein, 13 aa, Homo sapiens
  CDR3 for beta chain variable domain of TCR clone 315091 (TRBV2, TRBJ1-4)
CASSERAGEKLFF

SEQ ID NO: 630183 - protein, 14 aa, Homo sapiens
  CDR3 for alpha chain variable domain of TCR clone 315092 (TRAV21, TRAJ35)
CAVMPIGFGKVLHW

SEQ ID NO: 630184 - protein, 12 aa, Homo sapiens
  CDR3 for beta chain variable domain of TCR clone 315092 (TRBV7-9, TRBJ2-7)
CASSIKREEQYF

SEQ ID NO: 630185 - protein, 14 aa, Homo sapiens
  CDR3 for alpha chain variable domain of TCR clone 315093 (TRAV12-1, TRAJ6)
CVVPTSGGSYIATF

SEQ ID NO: 630186 - protein, 17 aa, Homo sapiens
  CDR3 for beta chain variable domain of TCR clone 315093 (TRBV14, TRBJ2-3)
CASSQEPSGLSTDTQYF

SEQ ID NO: 630187 - protein, 14 aa, Homo sapiens
  CDR3 for alpha chain variable domain of TCR clone 315094 (TRAV12-2, TRAJ40)
CAVKIPSGPYKYIF

SEQ ID NO: 630188 - protein, 13 aa, Homo sapiens
  CDR3 for beta chain variable domain of TCR clone 315094 (TRBV7-9, TRBJ1-2)
CASSLKQNYGYTF

SEQ ID NO: 630189 - protein, 14 aa, Homo sapiens
  CDR3 for alpha chain variable domain of TCR clone 315095 (TRAV16, TRAJ15)
CALSFNQARTALIF

SEQ ID NO: 630190 - protein, 16 aa, Homo sapiens
  CDR3 for beta chain variable domain of TCR clone 315095 (TRBV9, TRBJ2-7)
CASSAGPDRSPYEQYF

SEQ ID NO: 630191 - protein, 13 aa, Homo sapiens
  CDR3 for alpha chain variable domain of TCR clone 315096 (TRAV12-3, TRAJ40)
CAMSDSGTYKYIF

SEQ ID NO: 630192 - protein, 14 aa, Homo sapiens
  CDR3 for beta chain variable domain of TCR clone 315096 (TRBV7-2, TRBJ1-5)
CASSTQGAGPPQHF

SEQ ID NO: 630193 - protein, 20 aa, Homo sapiens
  CDR3 for alpha chain variable domain of TCR clone 315097 (TRAV26-1, TRAJ42)
CCVLLHRQTYYGGSQGNLIF

SEQ ID NO: 630194 - protein, 16 aa, Homo sapiens
  CDR3 for beta chain variable domain of TCR clone 315097 (TRBV27, TRBJ2-2)
CASSFRGLVRTGELFF

SEQ ID NO: 630195 - protein, 15 aa, Homo sapiens
  CDR3 for alpha chain variable domain of TCR clone 315098 (TRAV27, TRAJ38)
CAARRNAGNNRKLIW

SEQ ID NO: 630196 - protein, 10 aa, Homo sapiens
  CDR3 for beta chain variable domain of TCR clone 315098 (TRBV12-4, TRBJ2-3)
CQTATDTQYF

SEQ ID NO: 630197 - protein, 11 aa, Homo sapiens
  CDR3 for alpha chain variable domain of TCR clone 315099 (TRAV3, TRAJ21)
CAVGNFNKFYF

SEQ ID NO: 630198 - protein, 16 aa, Homo sapiens
  CDR3 for beta chain variable domain of TCR clone 315099 (TRBV13, TRBJ2-1)
CASSLAIAGGPGEQFF

SEQ ID NO: 630199 - protein, 14 aa, Homo sapiens
  CDR3 for alpha chain variable domain of TCR clone 315100 (TRAV2, TRAJ9)
CAVEDRSGGFKPIF

SEQ ID NO: 630200 - protein, 12 aa, Homo sapiens
  CDR3 for beta chain variable domain of TCR clone 315100 (TRBV11-2, TRBJ2-1)
CASSPGNNEQFF

SEQ ID NO: 630201 - protein, 14 aa, Homo sapiens
  CDR3 for alpha chain variable domain of TCR clone 315101 (TRAV12-2, TRAJ40)
CAVKFPSGTYKYIF

SEQ ID NO: 630202 - protein, 14 aa, Homo sapiens
  CDR3 for beta chain variable domain of TCR clone 315101 (TRBV20-1, TRBJ1-1)
CSAQTRIGGTEAFF

SEQ ID NO: 630203 - protein, 15 aa, Homo sapiens
  CDR3 for alpha chain variable domain of TCR clone 315102 (TRAV13-1, TRAJ8)
CAASIPNTGFQKLLF

SEQ ID NO: 630204 - protein, 13 aa, Homo sapiens
  CDR3 for beta chain variable domain of TCR clone 315102 (TRBV5-4, TRBJ1-1)
CASSFQVNTEAFF

SEQ ID NO: 630205 - protein, 15 aa, Homo sapiens
  CDR3 for alpha chain variable domain of TCR clone 315103 (TRAV21, TRAJ24)
CAARSSTDSWGKLQF

SEQ ID NO: 630206 - protein, 22 aa, Homo sapiens
  CDR3 for beta chain variable domain of TCR clone 315103 (TRBV11-2, TRBJ1-4)
CASSLDITRRGIPRKDNEKLFF

SEQ ID NO: 630207 - protein, 15 aa, Homo sapiens
  CDR3 for alpha chain variable domain of TCR clone 315104 (TRAV3, TRAJ20)
CAVRDIKLSDYKLSF

SEQ ID NO: 630208 - protein, 16 aa, Homo sapiens
  CDR3 for beta chain variable domain of TCR clone 315104 (TRBV13, TRBJ2-3)
CHSLSRVAGGRNTQYF

SEQ ID NO: 630209 - protein, 12 aa, Homo sapiens
  CDR3 for alpha chain variable domain of TCR clone 315105 (TRAV1-2, TRAJ9)
CAGYTGGFKTIW

SEQ ID NO: 630210 - protein, 15 aa, Homo sapiens
  CDR3 for beta chain variable domain of TCR clone 315105 (TRBV11-2, TRBJ2-1)
CASSPAGQSLNEQFF

SEQ ID NO: 630211 - protein, 11 aa, Homo sapiens
  CDR3 for alpha chain variable domain of TCR clone 315106 (TRAV21, TRAJ34)
CAVTNTDKLIF

SEQ ID NO: 630212 - protein, 20 aa, Homo sapiens
  CDR3 for beta chain variable domain of TCR clone 315106 (TRBV7-8, TRBJ2-2)
CASSHFFPGPTIHITGELFF

SEQ ID NO: 630213 - protein, 13 aa, Homo sapiens
  CDR3 for alpha chain variable domain of TCR clone 315107 (TRAV27, TRAJ37)
CAGGPSNTGKLIF

SEQ ID NO: 630214 - protein, 14 aa, Homo sapiens
  CDR3 for beta chain variable domain of TCR clone 315107 (TRBV7-8, TRBJ1-5)
CASSLGAFNQHQHF

SEQ ID NO: 630215 - protein, 18 aa, Homo sapiens
  CDR3 for alpha chain variable domain of TCR clone 315108 (TRAV8-4, TRAJ3)
CAVTGENLVQQCFDNLWI

SEQ ID NO: 630216 - protein, 16 aa, Homo sapiens
  CDR3 for beta chain variable domain of TCR clone 315108 (TRBV4-2, TRBJ1-1)
CASSQAGFGMNTEAFF

SEQ ID NO: 630217 - protein, 13 aa, Homo sapiens
  CDR3 for alpha chain variable domain of TCR clone 315109 (TRAV2, TRAJ40)
CAVVISGTYKYIF

SEQ ID NO: 630218 - protein, 16 aa, Homo sapiens
  CDR3 for beta chain variable domain of TCR clone 315109 (TRBV19, TRBJ2-1)
CASSKAGPSSYNEQFF

SEQ ID NO: 630219 - protein, 13 aa, Homo sapiens
  CDR3 for alpha chain variable domain of TCR clone 315110 (TRAV8-3, TRAJ28)
CAVGAVGSYQLTF

SEQ ID NO: 630220 - protein, 17 aa, Homo sapiens
  CDR3 for beta chain variable domain of TCR clone 315110 (TRBV3-1, TRBJ2-5)
CASSNWGGTSGQETQYF

SEQ ID NO: 630221 - protein, 11 aa, Homo sapiens
  CDR3 for alpha chain variable domain of TCR clone 315111 (TRAV12-1, TRAJ8)
CVLTGIQKLVF

SEQ ID NO: 630222 - protein, 14 aa, Homo sapiens
  CDR3 for beta chain variable domain of TCR clone 315111 (TRBV19, TRBJ2-1)
CASGKSTQYNEQFF

SEQ ID NO: 630223 - protein, 11 aa, Homo sapiens
  CDR3 for alpha chain variable domain of TCR clone 315112 (TRAV12-3, TRAJ17)
CNDATGNKLTF

SEQ ID NO: 630224 - protein, 15 aa, Homo sapiens
  CDR3 for beta chain variable domain of TCR clone 315112 (TRBV9, TRBJ1-6)
CASSVAGTGDSPLHF

SEQ ID NO: 630225 - protein, 14 aa, Homo sapiens
  CDR3 for alpha chain variable domain of TCR clone 315113 (TRAV12-3, TRAJ30)
CAMSLLNRDDKIIF

SEQ ID NO: 630226 - protein, 12 aa, Homo sapiens
  CDR3 for beta chain variable domain of TCR clone 315113 (TRBV11-2, TRBJ2-2)
CGSSLGGGELFF

SEQ ID NO: 630227 - protein, 13 aa, Homo sapiens
  CDR3 for alpha chain variable domain of TCR clone 315114 (TRAV3, TRAJ41)
CAVSSNSGYALNF

SEQ ID NO: 630228 - protein, 13 aa, Homo sapiens
  CDR3 for beta chain variable domain of TCR clone 315114 (TRBV3-1, TRBJ1-1)
CASSPGVITEAFF

SEQ ID NO: 630229 - protein, 14 aa, Homo sapiens
  CDR3 for alpha chain variable domain of TCR clone 315115 (TRAV23/DV6, TRAJ4)
CAANLSGGYHKLIF

SEQ ID NO: 630230 - protein, 11 aa, Homo sapiens
  CDR3 for beta chain variable domain of TCR clone 315115 (TRBV7-9, TRBJ2-3)
CAGSPTDTQYF

SEQ ID NO: 630231 - protein, 14 aa, Homo sapiens
  CDR3 for alpha chain variable domain of TCR clone 315116 (TRAV35, TRAJ13)
CAGSPSGGYQKVTF

SEQ ID NO: 630232 - protein, 17 aa, Homo sapiens
  CDR3 for beta chain variable domain of TCR clone 315116 (TRBV18, TRBJ1-5)
CQLTICRVRQNNQPQHF

SEQ ID NO: 630233 - protein, 13 aa, Homo sapiens
  CDR3 for alpha chain variable domain of TCR clone 315117 (TRAV12-1, TRAJ31)
CVVNMNNNARLMF

SEQ ID NO: 630234 - protein, 15 aa, Homo sapiens
  CDR3 for beta chain variable domain of TCR clone 315117 (TRBV4-1, TRBJ1-2)
CASSQGQGAAYGCTF

SEQ ID NO: 630235 - protein, 13 aa, Homo sapiens
  CDR3 for alpha chain variable domain of TCR clone 315118 (TRAV8-6, TRAJ20)
CAVRTADDYKLSF

SEQ ID NO: 630236 - protein, 16 aa, Homo sapiens
  CDR3 for beta chain variable domain of TCR clone 315118 (TRBV13, TRBJ2-2)
CASSPRTGEHTGELFF

SEQ ID NO: 630237 - protein, 14 aa, Homo sapiens
  CDR3 for alpha chain variable domain of TCR clone 315119 (TRAV12-1, TRAJ23)
CVVIVYNQGRKLIF

SEQ ID NO: 630238 - protein, 15 aa, Homo sapiens
  CDR3 for beta chain variable domain of TCR clone 315119 (TRBV14, TRBJ2-7)
CQQPRQQGWVYEQYF

SEQ ID NO: 630239 - protein, 11 aa, Homo sapiens
  CDR3 for alpha chain variable domain of TCR clone 315120 (TRAV12-2, TRAJ49)
CAVNTGNQFYF

SEQ ID NO: 630240 - protein, 15 aa, Homo sapiens
  CDR3 for beta chain variable domain of TCR clone 315120 (TRBV6-3, TRBJ2-7)
CASSSPGTVFYEQYF

SEQ ID NO: 630241 - protein, 14 aa, Homo sapiens
  CDR3 for alpha chain variable domain of TCR clone 315121 (TRAV2, TRAJ9)
CAVEDRSGGFKTIF

SEQ ID NO: 630242 - protein, 14 aa, Homo sapiens
  CDR3 for beta chain variable domain of TCR clone 315121 (TRBV19, TRBJ2-7)
CASSMGQGAIEQYF

SEQ ID NO: 630243 - protein, 13 aa, Homo sapiens
  CDR3 for alpha chain variable domain of TCR clone 315122 (TRAV12-3, TRAJ33)
CAMSVNSNYQLIW

SEQ ID NO: 630244 - protein, 14 aa, Homo sapiens
  CDR3 for beta chain variable domain of TCR clone 315122 (TRBV7-9, TRBJ2-1)
CARSDNSGYNEQFF

SEQ ID NO: 630245 - protein, 11 aa, Homo sapiens
  CDR3 for alpha chain variable domain of TCR clone 315123 (TRAV13-1, TRAJ33)
CAVDSNYQLIW

SEQ ID NO: 630246 - protein, 13 aa, Homo sapiens
  CDR3 for beta chain variable domain of TCR clone 315123 (TRBV7-2, TRBJ2-7)
CASSSPSGSEQYV

SEQ ID NO: 630247 - protein, 12 aa, Homo sapiens
  CDR3 for alpha chain variable domain of TCR clone 315124 (TRAV12-3, TRAJ17)
CAMTLTGNKLTF

SEQ ID NO: 630248 - protein, 14 aa, Homo sapiens
  CDR3 for beta chain variable domain of TCR clone 315124 (TRBV20-1, TRBJ2-7)
CSAPELAGVGEQYF

SEQ ID NO: 630249 - protein, 15 aa, Homo sapiens
  CDR3 for alpha chain variable domain of TCR clone 315125 (TRAV17, TRAJ16)
CATALRFSDGQKLLF

SEQ ID NO: 630250 - protein, 14 aa, Homo sapiens
  CDR3 for beta chain variable domain of TCR clone 315125 (TRBV19, TRBJ1-4)
CASSMGRHNEKLFF

SEQ ID NO: 630251 - protein, 16 aa, Homo sapiens
  CDR3 for alpha chain variable domain of TCR clone 315126 (TRAV8-6, TRAJ58)
CCELLGRRNQLLRLTF

SEQ ID NO: 630252 - protein, 14 aa, Homo sapiens
  CDR3 for beta chain variable domain of TCR clone 315126 (TRBV4-2, TRBJ2-1)
CASGLDRAYNEQFF

SEQ ID NO: 630253 - protein, 12 aa, Homo sapiens
  CDR3 for alpha chain variable domain of TCR clone 315127 (TRAV16, TRAJ13)
CIALRGYQKVTF

SEQ ID NO: 630254 - protein, 17 aa, Homo sapiens
  CDR3 for beta chain variable domain of TCR clone 315127 (TRBV28, TRBJ2-5)
CASSRQGGLAGAETQYF

SEQ ID NO: 630255 - protein, 15 aa, Homo sapiens
  CDR3 for alpha chain variable domain of TCR clone 315128 (TRAV3, TRAJ3)
CAVRDRDSSSSKIIF

SEQ ID NO: 630256 - protein, 14 aa, Homo sapiens
  CDR3 for beta chain variable domain of TCR clone 315128 (TRBV7-2, TRBJ2-7)
CASSPKTSFYEQYF

SEQ ID NO: 630257 - protein, 14 aa, Homo sapiens
  CDR3 for alpha chain variable domain of TCR clone 315129 (TRAV12-2, TRAJ17)
CPVLFKAAGNKLTF

SEQ ID NO: 630258 - protein, 14 aa, Homo sapiens
  CDR3 for beta chain variable domain of TCR clone 315129 (TRBV7-3, TRBJ1-1)
CASSLKGGNTEAFF

SEQ ID NO: 630259 - protein, 13 aa, Homo sapiens
  CDR3 for alpha chain variable domain of TCR clone 315130 (TRAV29/DV5, TRAJ31)
CAASRNNNARLKF

SEQ ID NO: 630260 - protein, 17 aa, Homo sapiens
  CDR3 for beta chain variable domain of TCR clone 315130 (TRBV28, TRBJ2-5)
CASSTPEGDALQETQYF

SEQ ID NO: 630261 - protein, 17 aa, Homo sapiens
  CDR3 for alpha chain variable domain of TCR clone 315131 (TRAV2, TRAJ22)
ILQVREADASEQRQLTF

SEQ ID NO: 630262 - protein, 16 aa, Homo sapiens
  CDR3 for beta chain variable domain of TCR clone 315131 (TRBV2, TRBJ2-5)
CASSETQGVGEETQYF

SEQ ID NO: 630263 - protein, 12 aa, Homo sapiens
  CDR3 for alpha chain variable domain of TCR clone 315132 (TRAV13-1, TRAJ21)
CAAKEGFNKFYF

SEQ ID NO: 630264 - protein, 17 aa, Homo sapiens
  CDR3 for beta chain variable domain of TCR clone 315132 (TRBV24-1, TRBJ2-1)
SATSDVSTSGTYNEQFF

SEQ ID NO: 630265 - protein, 15 aa, Homo sapiens
  CDR3 for alpha chain variable domain of TCR clone 315133 (TRAV26-1, TRAJ40)
CIVRVTTSGTYKYIF

SEQ ID NO: 630266 - protein, 12 aa, Homo sapiens
  CDR3 for beta chain variable domain of TCR clone 315133 (TRBV7-9, TRBJ1-4)
CASSTDREKLCF

SEQ ID NO: 630267 - protein, 18 aa, Homo sapiens
  CDR3 for alpha chain variable domain of TCR clone 315134 (TRAV13-2, TRAJ52)
CAETPLNACGTSYGKLTF

SEQ ID NO: 630268 - protein, 15 aa, Homo sapiens
  CDR3 for beta chain variable domain of TCR clone 315134 (TRBV7-2, TRBJ2-7)
CASSLKGALTYEQYF

SEQ ID NO: 630269 - protein, 13 aa, Homo sapiens
  CDR3 for alpha chain variable domain of TCR clone 315135 (TRAV12-1, TRAJ16)
CVVNTRNGQKLLF

SEQ ID NO: 630270 - protein, 13 aa, Homo sapiens
  CDR3 for beta chain variable domain of TCR clone 315135 (TRBV4-2, TRBJ1-1)
CASSQAGNTEAFF

SEQ ID NO: 630271 - protein, 14 aa, Homo sapiens
  CDR3 for alpha chain variable domain of TCR clone 315136 (TRAV12-2, TRAJ13)
CAVKKTGGNQKVTF

SEQ ID NO: 630272 - protein, 15 aa, Homo sapiens
  CDR3 for beta chain variable domain of TCR clone 315136 (TRBV9, TRBJ1-6)
CASSVAGTGDSPLHF

SEQ ID NO: 630273 - protein, 13 aa, Homo sapiens
  CDR3 for alpha chain variable domain of TCR clone 315137 (TRAV34, TRAJ22)
CGAGAGSARQLTF

SEQ ID NO: 630274 - protein, 16 aa, Homo sapiens
  CDR3 for beta chain variable domain of TCR clone 315137 (TRBV7-3, TRBJ2-1)
CASSTPLAGGYNEQFF

SEQ ID NO: 630275 - protein, 14 aa, Homo sapiens
  CDR3 for alpha chain variable domain of TCR clone 315138 (TRAV16, TRAJ32)
CALKSGGATNKLIF

SEQ ID NO: 630276 - protein, 12 aa, Homo sapiens
  CDR3 for beta chain variable domain of TCR clone 315138 (TRBV6-6, TRBJ2-3)
CQQSRGRDTQYF

SEQ ID NO: 630277 - protein, 11 aa, Homo sapiens
  CDR3 for alpha chain variable domain of TCR clone 315139 (TRAV10, TRAJ6)
CGPGGSYIPTF

SEQ ID NO: 630278 - protein, 13 aa, Homo sapiens
  CDR3 for beta chain variable domain of TCR clone 315139 (TRBV12-4, TRBJ2-5)
CASRLAVQETKYF

SEQ ID NO: 630279 - protein, 14 aa, Homo sapiens
  CDR3 for alpha chain variable domain of TCR clone 315140 (TRAV13-2, TRAJ40)
CAENGRSGTYKYIF

SEQ ID NO: 630280 - protein, 12 aa, Homo sapiens
  CDR3 for beta chain variable domain of TCR clone 315140 (TRBV11-2, TRBJ2-1)
CASSPGNNEQFF

SEQ ID NO: 630281 - protein, 14 aa, Homo sapiens
  CDR3 for alpha chain variable domain of TCR clone 315141 (TRAV1-2, TRAJ8)
CAVREDTGFQKLVF

SEQ ID NO: 630282 - protein, 13 aa, Homo sapiens
  CDR3 for beta chain variable domain of TCR clone 315141 (TRBV7-2, TRBJ2-7)
CASSSPSGSVQYF

SEQ ID NO: 630283 - protein, 17 aa, Homo sapiens
  CDR3 for alpha chain variable domain of TCR clone 315142 (TRAV26-2, TRAJ42)
CILRSVGYGGSQGNLIF

SEQ ID NO: 630284 - protein, 16 aa, Homo sapiens
  CDR3 for beta chain variable domain of TCR clone 315142 (TRBV12-4, TRBJ2-7)
CASSLIGGTGTYEQYF

SEQ ID NO: 630285 - protein, 12 aa, Homo sapiens
  CDR3 for alpha chain variable domain of TCR clone 315143 (TRAV12-2, TRAJ10)
WGVTGGGKKLTF

SEQ ID NO: 630286 - protein, 16 aa, Homo sapiens
  CDR3 for beta chain variable domain of TCR clone 315143 (TRBV6-4, TRBJ1-2)
CASSESVGDPNYGYTF

SEQ ID NO: 630287 - protein, 13 aa, Homo sapiens
  CDR3 for alpha chain variable domain of TCR clone 315144 (TRAV12-3, TRAJ7)
CAMTPYGNNRLAF

SEQ ID NO: 630288 - protein, 13 aa, Homo sapiens
  CDR3 for beta chain variable domain of TCR clone 315144 (TRBV10-3, TRBJ1-2)
CASNADLNYGYTF

SEQ ID NO: 630289 - protein, 13 aa, Homo sapiens
  CDR3 for alpha chain variable domain of TCR clone 315145 (TRAV20, TRAJ37)
CAGCSINTGKLIF

SEQ ID NO: 630290 - protein, 14 aa, Homo sapiens
  CDR3 for beta chain variable domain of TCR clone 315145 (TRBV2, TRBJ2-1)
CASRTGSSYNEQFF

SEQ ID NO: 630291 - protein, 16 aa, Homo sapiens
  CDR3 for alpha chain variable domain of TCR clone 315146 (TRAV30, TRAJ24)
CGTEIVDADSWGKFQF

SEQ ID NO: 630292 - protein, 17 aa, Homo sapiens
  CDR3 for beta chain variable domain of TCR clone 315146 (TRBV20-1, TRBJ2-1)
CSARDRRRASSYNEQLF

SEQ ID NO: 630293 - protein, 14 aa, Homo sapiens
  CDR3 for alpha chain variable domain of TCR clone 315147 (TRAV12-2, TRAJ17)
CAVLFKAAGNKLTF

SEQ ID NO: 630294 - protein, 14 aa, Homo sapiens
  CDR3 for beta chain variable domain of TCR clone 315147 (TRBV15, TRBJ1-2)
CATSREFDRVGYTF

SEQ ID NO: 630295 - protein, 14 aa, Homo sapiens
  CDR3 for alpha chain variable domain of TCR clone 315148 (TRAV16, TRAJ33)
CALSAMDSNYQLIW

SEQ ID NO: 630296 - protein, 12 aa, Homo sapiens
  CDR3 for beta chain variable domain of TCR clone 315148 (TRBV5-7, TRBJ2-7)
RASSVQGGEQYF

SEQ ID NO: 630297 - protein, 15 aa, Homo sapiens
  CDR3 for alpha chain variable domain of TCR clone 315149 (TRAV1-2, TRAJ15)
CALDVMGSAGTALIF

SEQ ID NO: 630298 - protein, 13 aa, Homo sapiens
  CDR3 for beta chain variable domain of TCR clone 315149 (TRBV20-1, TRBJ1-1)
CSAFDRENTEAFF

SEQ ID NO: 630299 - protein, 10 aa, Homo sapiens
  CDR3 for alpha chain variable domain of TCR clone 315150 (TRAV13-2, TRAJ40)
CAKGKYIFGT

SEQ ID NO: 630300 - protein, 15 aa, Homo sapiens
  CDR3 for beta chain variable domain of TCR clone 315150 (TRBV7-3, TRBJ2-2)
CASSETGQGTGELFF

SEQ ID NO: 630301 - protein, 18 aa, Homo sapiens
  CDR3 for alpha chain variable domain of TCR clone 315151 (TRAV21, TRAJ52)
CAVRPSPAGGTSYGKLTF

SEQ ID NO: 630302 - protein, 16 aa, Homo sapiens
  CDR3 for beta chain variable domain of TCR clone 315151 (TRBV24-1, TRBJ2-1)
CATSGVTGANYNEQFF

SEQ ID NO: 630303 - protein, 12 aa, Homo sapiens
  CDR3 for alpha chain variable domain of TCR clone 315152 (TRAV21, TRAJ34)
CAAPYNTDKLIF

SEQ ID NO: 630304 - protein, 13 aa, Homo sapiens
  CDR3 for beta chain variable domain of TCR clone 315152 (TRBV19, TRBJ2-7)
CASRKAGGSEQYF

SEQ ID NO: 630305 - protein, 12 aa, Homo sapiens
  CDR3 for alpha chain variable domain of TCR clone 315153 (TRAV12-2, TRAJ42)
CAVGGSQGNLIF

SEQ ID NO: 630306 - protein, 13 aa, Homo sapiens
  CDR3 for beta chain variable domain of TCR clone 315153 (TRBV7-7, TRBJ2-2)
CASSLTSAGELFF

SEQ ID NO: 630307 - protein, 23 aa, Homo sapiens
  CDR3 for alpha chain variable domain of TCR clone 315154 (TRAV8-3, TRAJ38)
CAMGASNAGNNHIQNPDPAVYQL

SEQ ID NO: 630308 - protein, 15 aa, Homo sapiens
  CDR3 for beta chain variable domain of TCR clone 315154 (TRBV11-3, TRBJ1-3)
CASSLFGPSGNTIYF

SEQ ID NO: 630309 - protein, 11 aa, Homo sapiens
  CDR3 for alpha chain variable domain of TCR clone 315155 (TRAV21, TRAJ49)
CAVSFGNQFYF

SEQ ID NO: 630310 - protein, 13 aa, Homo sapiens
  CDR3 for beta chain variable domain of TCR clone 315155 (TRBV12-4, TRBJ1-2)
CASSSGPNYGYTF

SEQ ID NO: 630311 - protein, 14 aa, Homo sapiens
  CDR3 for alpha chain variable domain of TCR clone 315156 (TRAV12-1, TRAJ36)
CVVNYWGKQPLLWD

SEQ ID NO: 630312 - protein, 16 aa, Homo sapiens
  CDR3 for beta chain variable domain of TCR clone 315156 (TRBV12-5, TRBJ2-5)
CASGPRTSGNQETQYF

SEQ ID NO: 630313 - protein, 14 aa, Homo sapiens
  CDR3 for alpha chain variable domain of TCR clone 315157 (TRAV9-2, TRAJ39)
CALYIYNSGNMLTF

SEQ ID NO: 630314 - protein, 11 aa, Homo sapiens
  CDR3 for beta chain variable domain of TCR clone 315157 (TRBV29-1, TRBJ2-5)
CSEDRTGTQYF

SEQ ID NO: 630315 - protein, 16 aa, Homo sapiens
  CDR3 for alpha chain variable domain of TCR clone 315158 (TRAV3, TRAJ37)
CAVRGKGSGNTGKLIF

SEQ ID NO: 630316 - protein, 15 aa, Homo sapiens
  CDR3 for beta chain variable domain of TCR clone 315158 (TRBV19, TRBJ2-7)
CASSPAGASSYEQYF

SEQ ID NO: 630317 - protein, 13 aa, Homo sapiens
  CDR3 for alpha chain variable domain of TCR clone 315159 (TRAV3, TRAJ29)
CAVRDIIDTALVF

SEQ ID NO: 630318 - protein, 14 aa, Homo sapiens
  CDR3 for beta chain variable domain of TCR clone 315159 (TRBV27, TRBJ2-1)
CASSATGGYNEQFF

SEQ ID NO: 630319 - protein, 14 aa, Homo sapiens
  CDR3 for alpha chain variable domain of TCR clone 315160 (TRAV13-1, TRAJ35)
CAASKGGFGNVLHC

SEQ ID NO: 630320 - protein, 15 aa, Homo sapiens
  CDR3 for beta chain variable domain of TCR clone 315160 (TRBV20-1, TRBJ2-7)
CSARNRVSGMDEQYF

SEQ ID NO: 630321 - protein, 15 aa, Homo sapiens
  CDR3 for alpha chain variable domain of TCR clone 315161 (TRAV23/DV6, TRAJ27)
CAESKPMQANQPLGM

SEQ ID NO: 630322 - protein, 14 aa, Homo sapiens
  CDR3 for beta chain variable domain of TCR clone 315161 (TRBV5-4, TRBJ1-1)
CASSLDSRRDEAFF

SEQ ID NO: 630323 - protein, 15 aa, Homo sapiens
  CDR3 for alpha chain variable domain of TCR clone 315162 (TRAV12-1, TRAJ44)
CVADLPTGTASKLTF

SEQ ID NO: 630324 - protein, 14 aa, Homo sapiens
  CDR3 for beta chain variable domain of TCR clone 315162 (TRBV20-1, TRBJ2-7)
CSAKRGRSSYEQYF

SEQ ID NO: 630325 - protein, 18 aa, Homo sapiens
  CDR3 for alpha chain variable domain of TCR clone 315163 (TRAV29/DV5, TRAJ52)
CAAGFRGAGGTSYGKLTF

SEQ ID NO: 630326 - protein, 14 aa, Homo sapiens
  CDR3 for beta chain variable domain of TCR clone 315163 (TRBV27, TRBJ2-1)
CASRHLGGGKEQFF

SEQ ID NO: 630327 - protein, 14 aa, Homo sapiens
  CDR3 for alpha chain variable domain of TCR clone 315164 (TRAV26-1, TRAJ48)
CIVRVPFGNEKLTF

SEQ ID NO: 630328 - protein, 16 aa, Homo sapiens
  CDR3 for beta chain variable domain of TCR clone 315164 (TRBV18, TRBJ2-1)
CDSSPYLSIRGDEQFF

SEQ ID NO: 630329 - protein, 14 aa, Homo sapiens
  CDR3 for alpha chain variable domain of TCR clone 315165 (TRAV12-3, TRAJ13)
CAIRNSGGYQKVTF

SEQ ID NO: 630330 - protein, 14 aa, Homo sapiens
  CDR3 for beta chain variable domain of TCR clone 315165 (TRBV4-1, TRBJ1-6)
CASSPGSDSSPLYF

SEQ ID NO: 630331 - protein, 12 aa, Homo sapiens
  CDR3 for alpha chain variable domain of TCR clone 315166 (TRAV12-2, TRAJ10)
WGVTGGGNKLTF

SEQ ID NO: 630332 - protein, 15 aa, Homo sapiens
  CDR3 for beta chain variable domain of TCR clone 315166 (TRBV6-1, TRBJ2-2)
CASSERQGLTGELFF

SEQ ID NO: 630333 - protein, 21 aa, Homo sapiens
  CDR3 for alpha chain variable domain of TCR clone 315167 (TRAV25, TRAJ47)
TATQTTDVVTYFWEYGNKLVF

SEQ ID NO: 630334 - protein, 16 aa, Homo sapiens
  CDR3 for beta chain variable domain of TCR clone 315167 (TRBV6-6, TRBJ2-1)
CASSWGGQGPYNEQFY

SEQ ID NO: 630335 - protein, 14 aa, Homo sapiens
  CDR3 for alpha chain variable domain of TCR clone 315168 (TRAV12-2, TRAJ24)
CAVTPADSWGKLQF

SEQ ID NO: 630336 - protein, 12 aa, Homo sapiens
  CDR3 for beta chain variable domain of TCR clone 315168 (TRBV3-1, TRBJ2-1)
CACSQGSSGQFF

SEQ ID NO: 630337 - protein, 14 aa, Homo sapiens
  CDR3 for alpha chain variable domain of TCR clone 315169 (TRAV2, TRAJ9)
CAVEDRSGGFKTIF

SEQ ID NO: 630338 - protein, 13 aa, Homo sapiens
  CDR3 for beta chain variable domain of TCR clone 315169 (TRBV7-3, TRBJ1-1)
CASSQDWWAEAFF

SEQ ID NO: 630339 - protein, 13 aa, Homo sapiens
  CDR3 for alpha chain variable domain of TCR clone 315170 (TRAV3, TRAJ15)
CAVRDQAGTALIF

SEQ ID NO: 630340 - protein, 14 aa, Homo sapiens
  CDR3 for beta chain variable domain of TCR clone 315170 (TRBV6-1, TRBJ1-3)
CASVQGGGGNTIYF

SEQ ID NO: 630341 - protein, 13 aa, Homo sapiens
  CDR3 for alpha chain variable domain of TCR clone 315171 (TRAV2, TRAJ15)
CAVASQARTALIF

SEQ ID NO: 630342 - protein, 16 aa, Homo sapiens
  CDR3 for beta chain variable domain of TCR clone 315171 (TRBV7-3, TRBJ2-2)
CASSLKRGTLSGELFF

SEQ ID NO: 630343 - protein, 17 aa, Homo sapiens
  CDR3 for alpha chain variable domain of TCR clone 315172 (TRAV3, TRAJ12)
CAVRDGGRMDSSYKWIF

SEQ ID NO: 630344 - protein, 13 aa, Homo sapiens
  CDR3 for beta chain variable domain of TCR clone 315172 (TRBV4-2, TRBJ1-1)
CASSQAGNTEAFF

SEQ ID NO: 630345 - protein, 14 aa, Homo sapiens
  CDR3 for alpha chain variable domain of TCR clone 315173 (TRAV23/DV6, TRAJ57)
CAASNQGGPEKRVF

SEQ ID NO: 630346 - protein, 13 aa, Homo sapiens
  CDR3 for beta chain variable domain of TCR clone 315173 (TRBV11-2, TRBJ2-7)
CASSSYPSYEQYF

SEQ ID NO: 630347 - protein, 16 aa, Homo sapiens
  CDR3 for alpha chain variable domain of TCR clone 315174 (TRAV30, TRAJ24)
CGTEIVDADSWGKFQF

SEQ ID NO: 630348 - protein, 18 aa, Homo sapiens
  CDR3 for beta chain variable domain of TCR clone 315174 (TRBV7-9, TRBJ2-7)
CASSLTTSGSRTWYEQYL

SEQ ID NO: 630349 - protein, 14 aa, Homo sapiens
  CDR3 for alpha chain variable domain of TCR clone 315175 (TRAV12-3, TRAJ13)
GAMKNSGGYQKVTF

SEQ ID NO: 630350 - protein, 13 aa, Homo sapiens
  CDR3 for beta chain variable domain of TCR clone 315175 (TRBV29-1, TRBJ2-5)
CSARDRVEETQYF

SEQ ID NO: 630351 - protein, 14 aa, Homo sapiens
  CDR3 for alpha chain variable domain of TCR clone 315176 (TRAV38-1, TRAJ45)
CAYYSGGGADGLTF

SEQ ID NO: 630352 - protein, 13 aa, Homo sapiens
  CDR3 for beta chain variable domain of TCR clone 315176 (TRBV19, TRBJ1-3)
CASRLSPGNTIYF

SEQ ID NO: 630353 - protein, 16 aa, Homo sapiens
  CDR3 for alpha chain variable domain of TCR clone 315177 (TRAV23/DV6, TRAJ21)
CAASSGGGTTSTNFTL

SEQ ID NO: 630354 - protein, 11 aa, Homo sapiens
  CDR3 for beta chain variable domain of TCR clone 315177 (TRBV7-8, TRBJ2-7)
CASSRSLEQYF

SEQ ID NO: 630355 - protein, 12 aa, Homo sapiens
  CDR3 for alpha chain variable domain of TCR clone 315178 (TRAV13-1, TRAJ21)
CAAKEGLNKFYF

SEQ ID NO: 630356 - protein, 14 aa, Homo sapiens
  CDR3 for beta chain variable domain of TCR clone 315178 (TRBV5-4, TRBJ1-1)
CASSVDSRRDEAFF

SEQ ID NO: 630357 - protein, 14 aa, Homo sapiens
  CDR3 for alpha chain variable domain of TCR clone 315179 (TRAV12-1, TRAJ6)
CVVARIRRKLHTYI

SEQ ID NO: 630358 - protein, 15 aa, Homo sapiens
  CDR3 for beta chain variable domain of TCR clone 315179 (TRBV7-3, TRBJ2-1)
CASSLKASEYNERFL

SEQ ID NO: 630359 - protein, 13 aa, Homo sapiens
  CDR3 for alpha chain variable domain of TCR clone 315180 (TRAV29/DV5, TRAJ31)
CAASRNNNARLMF

SEQ ID NO: 630360 - protein, 14 aa, Homo sapiens
  CDR3 for beta chain variable domain of TCR clone 315180 (TRBV11-2, TRBJ2-3)
CASSLGGGANTQYF

SEQ ID NO: 630361 - protein, 14 aa, Homo sapiens
  CDR3 for alpha chain variable domain of TCR clone 315181 (TRAV13-1, TRAJ35)
CSASKGGLRNVLHC

SEQ ID NO: 630362 - protein, 13 aa, Homo sapiens
  CDR3 for beta chain variable domain of TCR clone 315181 (TRBV7-3, TRBJ1-1)
CASSQDWGAEAFF

SEQ ID NO: 630363 - protein, 12 aa, Homo sapiens
  CDR3 for alpha chain variable domain of TCR clone 315182 (TRAV27, TRAJ58)
CAGARDTYRLTF

SEQ ID NO: 630364 - protein, 15 aa, Homo sapiens
  CDR3 for beta chain variable domain of TCR clone 315182 (TRBV3-1, TRBJ2-7)
CASSQVAGAQYEQYF

SEQ ID NO: 630365 - protein, 17 aa, Homo sapiens
  CDR3 for alpha chain variable domain of TCR clone 315183 (TRAV3, TRAJ38)
CAVRDCLNAGNNRKLIW

SEQ ID NO: 630366 - protein, 15 aa, Homo sapiens
  CDR3 for beta chain variable domain of TCR clone 315183 (TRBV7-2, TRBJ1-2)
CASSLAPDRGLGYTF

SEQ ID NO: 630367 - protein, 14 aa, Homo sapiens
  CDR3 for alpha chain variable domain of TCR clone 315184 (TRAV16, TRAJ48)
CALTPGFGNEKLTF

SEQ ID NO: 630368 - protein, 14 aa, Homo sapiens
  CDR3 for beta chain variable domain of TCR clone 315184 (TRBV7-2, TRBJ2-7)
CASISISGFSEQYF

SEQ ID NO: 630369 - protein, 11 aa, Homo sapiens
  CDR3 for alpha chain variable domain of TCR clone 315185 (TRAV1-1, TRAJ23)
CAVRQGGKLIF

SEQ ID NO: 630370 - protein, 12 aa, Homo sapiens
  CDR3 for beta chain variable domain of TCR clone 315185 (TRBV19, TRBJ1-5)
CASSIAQQPQQF

SEQ ID NO: 630371 - protein, 20 aa, Homo sapiens
  CDR3 for alpha chain variable domain of TCR clone 315186 (TRAV21, TRAJ4)
AASQPGDSATLAGGYNKLIF

SEQ ID NO: 630372 - protein, 19 aa, Homo sapiens
  CDR3 for beta chain variable domain of TCR clone 315186 (TRBV18, TRBJ1-3)
CASSPLSRTGMSSGKTIYF

SEQ ID NO: 630373 - protein, 11 aa, Homo sapiens
  CDR3 for alpha chain variable domain of TCR clone 315187 (TRAV12-2, TRAJ31)
CAVTRWARLMF

SEQ ID NO: 630374 - protein, 15 aa, Homo sapiens
  CDR3 for beta chain variable domain of TCR clone 315187 (TRBV19, TRBJ2-7)
CAISIGGGLVNEQYF

SEQ ID NO: 630375 - protein, 17 aa, Homo sapiens
  CDR3 for alpha chain variable domain of TCR clone 315188 (TRAV3, TRAJ12)
CAVRDGGRMGSSYKLIF

SEQ ID NO: 630376 - protein, 13 aa, Homo sapiens
  CDR3 for beta chain variable domain of TCR clone 315188 (TRBV20-1, TRBJ1-1)
CSAPLGGGTEAFF

SEQ ID NO: 630377 - protein, 14 aa, Homo sapiens
  CDR3 for alpha chain variable domain of TCR clone 315189 (TRAV12-3, TRAJ10)
SHLPLTGGGNKLTF

SEQ ID NO: 630378 - protein, 14 aa, Homo sapiens
  CDR3 for beta chain variable domain of TCR clone 315189 (TRBV2, TRBJ2-5)
CASSEGSYQETQYF

SEQ ID NO: 630379 - protein, 16 aa, Homo sapiens
  CDR3 for alpha chain variable domain of TCR clone 315190 (TRAV26-1, TRAJ37)
CIVRGDGSGNTGKLIF

SEQ ID NO: 630380 - protein, 15 aa, Homo sapiens
  CDR3 for beta chain variable domain of TCR clone 315190 (TRBV18, TRBJ2-1)
CASSPPSASYNEQFF

SEQ ID NO: 630381 - protein, 14 aa, Homo sapiens
  CDR3 for alpha chain variable domain of TCR clone 315191 (TRAV38-1, TRAJ54)
CAFMSPSGAQQLVF

SEQ ID NO: 630382 - protein, 16 aa, Homo sapiens
  CDR3 for beta chain variable domain of TCR clone 315191 (TRBV28, TRBJ2-1)
CASSLGGSGSCNEQFF

SEQ ID NO: 630383 - protein, 14 aa, Homo sapiens
  CDR3 for alpha chain variable domain of TCR clone 315192 (TRAV2, TRAJ9)
CAVEDRSGGFKTIF

SEQ ID NO: 630384 - protein, 14 aa, Homo sapiens
  CDR3 for beta chain variable domain of TCR clone 315192 (TRBV18, TRBJ1-2)
CASSPDRVVYGYTF

SEQ ID NO: 630385 - protein, 15 aa, Homo sapiens
  CDR3 for alpha chain variable domain of TCR clone 315193 (TRAV26-1, TRAJ29)
CIVRVEGSGNTPLVF

SEQ ID NO: 630386 - protein, 16 aa, Homo sapiens
  CDR3 for beta chain variable domain of TCR clone 315193 (TRBV15, TRBJ1-2)
CAASRGPRTGGGGYTF

SEQ ID NO: 630387 - protein, 15 aa, Homo sapiens
  CDR3 for alpha chain variable domain of TCR clone 315194 (TRAV8-4, TRAJ45)
GVRMYSGGGADGLTF

SEQ ID NO: 630388 - protein, 14 aa, Homo sapiens
  CDR3 for beta chain variable domain of TCR clone 315194 (TRBV27, TRBJ2-2)
CASSLGAATGELFF

SEQ ID NO: 630389 - protein, 14 aa, Homo sapiens
  CDR3 for alpha chain variable domain of TCR clone 315195 (TRAV4, TRAJ9)
CLVGSGTGGFKTIF

SEQ ID NO: 630390 - protein, 15 aa, Homo sapiens
  CDR3 for beta chain variable domain of TCR clone 315195 (TRBV7-9, TRBJ1-6)
CASSSATADNSPLHF

SEQ ID NO: 630391 - protein, 16 aa, Homo sapiens
  CDR3 for alpha chain variable domain of TCR clone 315196 (TRAV8-3, TRAJ10)
CAVGPGVTGGGNKLTF

SEQ ID NO: 630392 - protein, 13 aa, Homo sapiens
  CDR3 for beta chain variable domain of TCR clone 315196 (TRBV18, TRBJ1-1)
CASSLGPSGEAFF

SEQ ID NO: 630393 - protein, 12 aa, Homo sapiens
  CDR3 for alpha chain variable domain of TCR clone 315197 (TRAV1-1, TRAJ8)
CAGGTGFQKLVF

SEQ ID NO: 630394 - protein, 16 aa, Homo sapiens
  CDR3 for beta chain variable domain of TCR clone 315197 (TRBV7-8, TRBJ2-4)
CASSAERTLAKNIQYF

SEQ ID NO: 630395 - protein, 13 aa, Homo sapiens
  CDR3 for alpha chain variable domain of TCR clone 315198 (TRAV29/DV5, TRAJ31)
YAASRNNNARLMF

SEQ ID NO: 630396 - protein, 12 aa, Homo sapiens
  CDR3 for beta chain variable domain of TCR clone 315198 (TRBV3-1, TRBJ2-1)
CASGGLGNEQFF

SEQ ID NO: 630397 - protein, 20 aa, Homo sapiens
  CDR3 for alpha chain variable domain of TCR clone 315199 (TRAV2, TRAJ20)
LILQVREADAAVYRDCKLSF

SEQ ID NO: 630398 - protein, 12 aa, Homo sapiens
  CDR3 for beta chain variable domain of TCR clone 315199 (TRBV11-2, TRBJ2-2)
CASSLPTGELFF

SEQ ID NO: 630399 - protein, 14 aa, Homo sapiens
  CDR3 for alpha chain variable domain of TCR clone 315200 (TRAV26-1, TRAJ52)
CIPAGGTSYGKLTF

SEQ ID NO: 630400 - protein, 20 aa, Homo sapiens
  CDR3 for beta chain variable domain of TCR clone 315200 (TRBV7-8, TRBJ2-2)
CASSHLFPGPTIHITGELFF

SEQ ID NO: 630401 - protein, 14 aa, Homo sapiens
  CDR3 for alpha chain variable domain of TCR clone 315201 (TRAV8-6, TRAJ8)
CAVNENTGFQKLVF

SEQ ID NO: 630402 - protein, 15 aa, Homo sapiens
  CDR3 for beta chain variable domain of TCR clone 315201 (TRBV27, TRBJ2-3)
CASSALAGVIDTQYF

SEQ ID NO: 630403 - protein, 13 aa, Homo sapiens
  CDR3 for alpha chain variable domain of TCR clone 315202 (TRAV25, TRAJ26)
CAGMDNYGQNFVF

SEQ ID NO: 630404 - protein, 15 aa, Homo sapiens
  CDR3 for beta chain variable domain of TCR clone 315202 (TRBV10-3, TRBJ2-1)
CAIRNRTSGHNEQFF

SEQ ID NO: 630405 - protein, 14 aa, Homo sapiens
  CDR3 for alpha chain variable domain of TCR clone 315203 (TRAV13-1, TRAJ12)
CAASYMDSSYKLIF

SEQ ID NO: 630406 - protein, 13 aa, Homo sapiens
  CDR3 for beta chain variable domain of TCR clone 315203 (TRBV2, TRBJ2-5)
CASSDGIQETQDF

SEQ ID NO: 630407 - protein, 10 aa, Homo sapiens
  CDR3 for alpha chain variable domain of TCR clone 315204 (TRAV23/DV6, TRAJ57)
CAASSPLSQG

SEQ ID NO: 630408 - protein, 15 aa, Homo sapiens
  CDR3 for beta chain variable domain of TCR clone 315204 (TRBV27, TRBJ1-4)
CASSAQQDLNEKLFF

SEQ ID NO: 630409 - protein, 15 aa, Homo sapiens
  CDR3 for alpha chain variable domain of TCR clone 315205 (TRAV26-1, TRAJ29)
CIVRVEGSGNTPLVF

SEQ ID NO: 630410 - protein, 13 aa, Homo sapiens
  CDR3 for beta chain variable domain of TCR clone 315205 (TRBV2, TRBJ2-3)
CASILAGGQGQYF

SEQ ID NO: 630411 - protein, 11 aa, Homo sapiens
  CDR3 for alpha chain variable domain of TCR clone 315206 (TRAV8-3, TRAJ42)
CAVWQGGIMEE

SEQ ID NO: 630412 - protein, 11 aa, Homo sapiens
  CDR3 for beta chain variable domain of TCR clone 315206 (TRBV7-2, TRBJ2-3)
CASSSSDTQYF

SEQ ID NO: 630413 - protein, 14 aa, Homo sapiens
  CDR3 for alpha chain variable domain of TCR clone 315207 (TRAV17, TRAJ57)
CATDPQGGSEKLVF

SEQ ID NO: 630414 - protein, 13 aa, Homo sapiens
  CDR3 for beta chain variable domain of TCR clone 315207 (TRBV29-1, TRBJ2-1)
CSVEGGRVNQQFF

SEQ ID NO: 630415 - protein, 16 aa, Homo sapiens
  CDR3 for alpha chain variable domain of TCR clone 315208 (TRAV3, TRAJ37)
CALRGKGSGNTGKLIF

SEQ ID NO: 630416 - protein, 16 aa, Homo sapiens
  CDR3 for beta chain variable domain of TCR clone 315208 (TRBV12-5, TRBJ2-5)
CASGPRTSGSQETQYF

SEQ ID NO: 630417 - protein, 14 aa, Homo sapiens
  CDR3 for alpha chain variable domain of TCR clone 315209 (TRAV2, TRAJ39)
CAVEGDNAGNMLTF

SEQ ID NO: 630418 - protein, 14 aa, Homo sapiens
  CDR3 for beta chain variable domain of TCR clone 315209 (TRBV28, TRBJ2-7)
CASSLRSRGNEQYF

SEQ ID NO: 630419 - protein, 14 aa, Homo sapiens
  CDR3 for alpha chain variable domain of TCR clone 315210 (TRAV12-2, TRAJ17)
CAVLFKAAGNKLTF

SEQ ID NO: 630420 - protein, 14 aa, Homo sapiens
  CDR3 for beta chain variable domain of TCR clone 315210 (TRBV19, TRBJ2-7)
CASTVQGRPYEQYF

SEQ ID NO: 630421 - protein, 14 aa, Homo sapiens
  CDR3 for alpha chain variable domain of TCR clone 315211 (TRAV12-2, TRAJ44)
CAVNPAGTASKLTF

SEQ ID NO: 630422 - protein, 16 aa, Homo sapiens
  CDR3 for beta chain variable domain of TCR clone 315211 (TRBV7-3, TRBJ2-1)
CASSKPLAGGYNEQFF

SEQ ID NO: 630423 - protein, 15 aa, Homo sapiens
  CDR3 for alpha chain variable domain of TCR clone 315212 (TRAV2, TRAJ22)
CAVPSRGGSARQLTF

SEQ ID NO: 630424 - protein, 15 aa, Homo sapiens
  CDR3 for beta chain variable domain of TCR clone 315212 (TRBV13, TRBJ2-5)
CASSRGDRDQETQYF

SEQ ID NO: 630425 - protein, 14 aa, Homo sapiens
  CDR3 for alpha chain variable domain of TCR clone 315213 (TRAV16, TRAJ3)
CALSQYSSASKIIF

SEQ ID NO: 630426 - protein, 16 aa, Homo sapiens
  CDR3 for beta chain variable domain of TCR clone 315213 (TRBV19, TRBJ2-1)
CASSKAGPSSYNEQFF

SEQ ID NO: 630427 - protein, 14 aa, Homo sapiens
  CDR3 for alpha chain variable domain of TCR clone 315214 (TRAV1-2, TRAJ16)
CAVNRFSDGQKLLF

SEQ ID NO: 630428 - protein, 15 aa, Homo sapiens
  CDR3 for beta chain variable domain of TCR clone 315214 (TRBV9, TRBJ1-6)
CASSVAGTGDSPLNL

SEQ ID NO: 630429 - protein, 11 aa, Homo sapiens
  CDR3 for alpha chain variable domain of TCR clone 315215 (TRAV4, TRAJ23)
CLVAPGGKLIF

SEQ ID NO: 630430 - protein, 15 aa, Homo sapiens
  CDR3 for beta chain variable domain of TCR clone 315215 (TRBV7-2, TRBJ2-1)
CASSFQGDEYNEQFF

SEQ ID NO: 630431 - protein, 12 aa, Homo sapiens
  CDR3 for alpha chain variable domain of TCR clone 315216 (TRAV2, TRAJ9)
CAVGAGGFKTIF

SEQ ID NO: 630432 - protein, 13 aa, Homo sapiens
  CDR3 for beta chain variable domain of TCR clone 315216 (TRBV7-2, TRBJ2-2)
CASSSRPTGELFF

SEQ ID NO: 630433 - protein, 11 aa, Homo sapiens
  CDR3 for alpha chain variable domain of TCR clone 315217 (TRAV21, TRAJ11)
CAVNGYSTLTF

SEQ ID NO: 630434 - protein, 17 aa, Homo sapiens
  CDR3 for beta chain variable domain of TCR clone 315217 (TRBV7-9, TRBJ2-1)
CASSLGSPGLAGGEQFF

SEQ ID NO: 630435 - protein, 12 aa, Homo sapiens
  CDR3 for alpha chain variable domain of TCR clone 315218 (TRAV1-1, TRAJ8)
CAGGTGFQKLVF

SEQ ID NO: 630436 - protein, 15 aa, Homo sapiens
  CDR3 for beta chain variable domain of TCR clone 315218 (TRBV7-9, TRBJ1-4)
CASSRTGSFNEKLFF

SEQ ID NO: 630437 - protein, 15 aa, Homo sapiens
  CDR3 for alpha chain variable domain of TCR clone 315219 (TRAV25, TRAJ53)
YPTSNSGGSNYKLTF

SEQ ID NO: 630438 - protein, 14 aa, Homo sapiens
  CDR3 for beta chain variable domain of TCR clone 315219 (TRBV11-2, TRBJ2-3)
CASSRLARTDTQYF

SEQ ID NO: 630439 - protein, 14 aa, Homo sapiens
  CDR3 for alpha chain variable domain of TCR clone 315220 (TRAV1-2, TRAJ8)
CAVREDTGFQKLVS

SEQ ID NO: 630440 - protein, 15 aa, Homo sapiens
  CDR3 for beta chain variable domain of TCR clone 315220 (TRBV7-9, TRBJ1-4)
CASSARTGGNEKLFF

SEQ ID NO: 630441 - protein, 13 aa, Homo sapiens
  CDR3 for alpha chain variable domain of TCR clone 315221 (TRAV8-6, TRAJ40)
CAVSVTRTYKYIF

SEQ ID NO: 630442 - protein, 15 aa, Homo sapiens
  CDR3 for beta chain variable domain of TCR clone 315221 (TRBV4-1, TRBJ2-3)
CASGRGQGIPDTQYF

SEQ ID NO: 630443 - protein, 13 aa, Homo sapiens
  CDR3 for alpha chain variable domain of TCR clone 315222 (TRAV23/DV6, TRAJ58)
CAASEIGGSRLTF

SEQ ID NO: 630444 - protein, 14 aa, Homo sapiens
  CDR3 for beta chain variable domain of TCR clone 315222 (TRBV28, TRBJ2-1)
CASSRPGLRDEQFF

SEQ ID NO: 630445 - protein, 16 aa, Homo sapiens
  CDR3 for alpha chain variable domain of TCR clone 315223 (TRAV4, TRAJ18)
CCVLLIGGSTLGRLYF

SEQ ID NO: 630446 - protein, 12 aa, Homo sapiens
  CDR3 for beta chain variable domain of TCR clone 315223 (TRBV11-2, TRBJ2-2)
CASSLGGGELFF

SEQ ID NO: 630447 - protein, 18 aa, Homo sapiens
  CDR3 for alpha chain variable domain of TCR clone 315224 (TRAV13-1, TRAJ52)
CAASKRRAGGTSYGKLTF

SEQ ID NO: 630448 - protein, 13 aa, Homo sapiens
  CDR3 for beta chain variable domain of TCR clone 315224 (TRBV12-4, TRBJ1-2)
RASSLRQGKGYTF

SEQ ID NO: 630449 - protein, 15 aa, Homo sapiens
  CDR3 for alpha chain variable domain of TCR clone 315225 (TRAV12-3, TRAJ49)
CAMAVTPNTGNQFYF

SEQ ID NO: 630450 - protein, 18 aa, Homo sapiens
  CDR3 for beta chain variable domain of TCR clone 315225 (TRBV4-1, TRBJ1-5)
CASSQDRQGQGLNQPQHC

SEQ ID NO: 630451 - protein, 13 aa, Homo sapiens
  CDR3 for alpha chain variable domain of TCR clone 315226 (TRAV14/DV4, TRAJ22)
CAMRDLSARQLTF

SEQ ID NO: 630452 - protein, 18 aa, Homo sapiens
  CDR3 for beta chain variable domain of TCR clone 315226 (TRBV19, TRBJ1-5)
CARSKGQVSIHSNQPQHF

SEQ ID NO: 630453 - protein, 15 aa, Homo sapiens
  CDR3 for alpha chain variable domain of TCR clone 315227 (TRAV20, TRAJ52)
CAVQANGTSYGKLTF

SEQ ID NO: 630454 - protein, 15 aa, Homo sapiens
  CDR3 for beta chain variable domain of TCR clone 315227 (TRBV7-2, TRBJ1-5)
CASSSGQGHAQPQHF

SEQ ID NO: 630455 - protein, 13 aa, Homo sapiens
  CDR3 for alpha chain variable domain of TCR clone 315228 (TRAV12-2, TRAJ37)
CAGGSGNTGKLIF

SEQ ID NO: 630456 - protein, 15 aa, Homo sapiens
  CDR3 for beta chain variable domain of TCR clone 315228 (TRBV6-5, TRBJ2-1)
FASSYDAGAGNEQFF

SEQ ID NO: 630457 - protein, 19 aa, Homo sapiens
  CDR3 for alpha chain variable domain of TCR clone 315229 (TRAV2, TRAJ20)
ILQVREADAAVYRDFKLSF

SEQ ID NO: 630458 - protein, 15 aa, Homo sapiens
  CDR3 for beta chain variable domain of TCR clone 315229 (TRBV20-1, TRBJ2-5)
CSAEGTGGLQETQYF

SEQ ID NO: 630459 - protein, 15 aa, Homo sapiens
  CDR3 for alpha chain variable domain of TCR clone 315230 (TRAV26-1, TRAJ22)
CIVRVSFWFCKATDL

SEQ ID NO: 630460 - protein, 13 aa, Homo sapiens
  CDR3 for beta chain variable domain of TCR clone 315230 (TRBV7-9, TRBJ1-1)
CASSLAGVTEAFF

SEQ ID NO: 630461 - protein, 16 aa, Homo sapiens
  CDR3 for alpha chain variable domain of TCR clone 315231 (TRAV8-3, TRAJ13)
CAVGAYPSGGYQKVTF

SEQ ID NO: 630462 - protein, 13 aa, Homo sapiens
  CDR3 for beta chain variable domain of TCR clone 315231 (TRBV27, TRBJ2-7)
CASSLTTGYEQYF

SEQ ID NO: 630463 - protein, 15 aa, Homo sapiens
  CDR3 for alpha chain variable domain of TCR clone 315232 (TRAV12-3, TRAJ49)
CAMAVTPNTGNQFYF

SEQ ID NO: 630464 - protein, 12 aa, Homo sapiens
  CDR3 for beta chain variable domain of TCR clone 315232 (TRBV4-1, TRBJ2-3)
CASSLIGETQYF

SEQ ID NO: 630465 - protein, 16 aa, Homo sapiens
  CDR3 for alpha chain variable domain of TCR clone 315233 (TRAV26-1, TRAJ13)
CIVSLKDSGGYQKVTF

SEQ ID NO: 630466 - protein, 16 aa, Homo sapiens
  CDR3 for beta chain variable domain of TCR clone 315233 (TRBV5-7, TRBJ2-5)
CASIRGQTGYQETQYF

SEQ ID NO: 630467 - protein, 13 aa, Homo sapiens
  CDR3 for alpha chain variable domain of TCR clone 315234 (TRAV12-2, TRAJ15)
CAVFNQAGTALIF

SEQ ID NO: 630468 - protein, 15 aa, Homo sapiens
  CDR3 for beta chain variable domain of TCR clone 315234 (TRBV7-8, TRBJ1-5)
YASSRGGGADQPQHF

SEQ ID NO: 630469 - protein, 13 aa, Homo sapiens
  CDR3 for alpha chain variable domain of TCR clone 315235 (TRAV21, TRAJ57)
CAVTQGGSEKLVF

SEQ ID NO: 630470 - protein, 17 aa, Homo sapiens
  CDR3 for beta chain variable domain of TCR clone 315235 (TRBV7-3, TRBJ2-3)
RASSLMKRMRGADTQYF

SEQ ID NO: 630471 - protein, 16 aa, Homo sapiens
  CDR3 for alpha chain variable domain of TCR clone 315236 (TRAV8-1, TRAJ42)
CAVTSRYGGSQGNLIF

SEQ ID NO: 630472 - protein, 13 aa, Homo sapiens
  CDR3 for beta chain variable domain of TCR clone 315236 (TRBV27, TRBJ1-1)
CASSLSIGAEAFF

SEQ ID NO: 630473 - protein, 12 aa, Homo sapiens
  CDR3 for alpha chain variable domain of TCR clone 315237 (TRAV12-1, TRAJ40)
CVVYSGTYKYIF

SEQ ID NO: 630474 - protein, 18 aa, Homo sapiens
  CDR3 for beta chain variable domain of TCR clone 315237 (TRBV7-9, TRBJ2-1)
CASSLAVSGTSGRNEQFS

SEQ ID NO: 630475 - protein, 12 aa, Homo sapiens
  CDR3 for alpha chain variable domain of TCR clone 315238 (TRAV12-3, TRAJ17)
CAMTLTGNKLTF

SEQ ID NO: 630476 - protein, 13 aa, Homo sapiens
  CDR3 for beta chain variable domain of TCR clone 315238 (TRBV20-1, TRBJ1-1)
CSARVGGDTEAFF

SEQ ID NO: 630477 - protein, 16 aa, Homo sapiens
  CDR3 for alpha chain variable domain of TCR clone 315239 (TRAV35, TRAJ28)
CAGQKYSGAGSYQLTF

SEQ ID NO: 630478 - protein, 16 aa, Homo sapiens
  CDR3 for beta chain variable domain of TCR clone 315239 (TRBV28, TRBJ1-5)
CASSFRGGYSNQPQHF

SEQ ID NO: 630479 - protein, 13 aa, Homo sapiens
  CDR3 for alpha chain variable domain of TCR clone 315240 (TRAV35, TRAJ13)
CAGRAGGYQKVTF

SEQ ID NO: 630480 - protein, 12 aa, Homo sapiens
  CDR3 for beta chain variable domain of TCR clone 315240 (TRBV7-8, TRBJ2-7)
CASSLGDWEQYF

SEQ ID NO: 630481 - protein, 14 aa, Homo sapiens
  CDR3 for alpha chain variable domain of TCR clone 315241 (TRAV35, TRAJ13)
CAGSPSGGYQQVTF

SEQ ID NO: 630482 - protein, 17 aa, Homo sapiens
  CDR3 for beta chain variable domain of TCR clone 315241 (TRBV7-6, TRBJ2-5)
CASSPGLADPWGETQYF

SEQ ID NO: 630483 - protein, 16 aa, Homo sapiens
  CDR3 for alpha chain variable domain of TCR clone 315242 (TRAV13-1, TRAJ42)
CADLLNYGGSQGNLIF

SEQ ID NO: 630484 - protein, 17 aa, Homo sapiens
  CDR3 for beta chain variable domain of TCR clone 315242 (TRBV11-2, TRBJ2-1)
CASSLYPPGVEYNEQFF

SEQ ID NO: 630485 - protein, 12 aa, Homo sapiens
  CDR3 for alpha chain variable domain of TCR clone 315243 (TRAV12-2, TRAJ42)
CAVGGSQGNLIF

SEQ ID NO: 630486 - protein, 16 aa, Homo sapiens
  CDR3 for beta chain variable domain of TCR clone 315243 (TRBV7-3, TRBJ2-2)
CASSLKRGTLSGELFL

SEQ ID NO: 630487 - protein, 18 aa, Homo sapiens
  CDR3 for alpha chain variable domain of TCR clone 315244 (TRAV13-1, TRAJ52)
CAASKRSAGGTSYGKLTF

SEQ ID NO: 630488 - protein, 15 aa, Homo sapiens
  CDR3 for beta chain variable domain of TCR clone 315244 (TRBV6-1, TRBJ2-3)
CASSERGGITDTQYF

SEQ ID NO: 630489 - protein, 14 aa, Homo sapiens
  CDR3 for alpha chain variable domain of TCR clone 315245 (TRAV9-2, TRAJ39)
CALYIYNAGNMLTF

SEQ ID NO: 630490 - protein, 15 aa, Homo sapiens
  CDR3 for beta chain variable domain of TCR clone 315245 (TRBV20-1, TRBJ2-3)
CSARRGEAITDTQYF

SEQ ID NO: 630491 - protein, 16 aa, Homo sapiens
  CDR3 for alpha chain variable domain of TCR clone 315246 (TRAV26-1, TRAJ45)
CIVEKYSGGGADGLTF

SEQ ID NO: 630492 - protein, 16 aa, Homo sapiens
  CDR3 for beta chain variable domain of TCR clone 315246 (TRBV10-3, TRBJ1-6)
CAISERRGQGNSTLHF

SEQ ID NO: 630493 - protein, 11 aa, Homo sapiens
  CDR3 for alpha chain variable domain of TCR clone 315247 (TRAV23/DV6, TRAJ48)
FAPRWGEKLTF

SEQ ID NO: 630494 - protein, 13 aa, Homo sapiens
  CDR3 for beta chain variable domain of TCR clone 315247 (TRBV12-4, TRBJ2-5)
YASSPGTEETQYF

SEQ ID NO: 630495 - protein, 16 aa, Homo sapiens
  CDR3 for alpha chain variable domain of TCR clone 315248 (TRAV3, TRAJ6)
CAVRDGQGRRKLHTYI

SEQ ID NO: 630496 - protein, 20 aa, Homo sapiens
  CDR3 for beta chain variable domain of TCR clone 315248 (TRBV28, TRBJ2-1)
CASTPIGRSPGLAGGNEQFF

SEQ ID NO: 630497 - protein, 18 aa, Homo sapiens
  CDR3 for alpha chain variable domain of TCR clone 315249 (TRAV21, TRAJ52)
CAVRPSPAGGTSYGKLTS

SEQ ID NO: 630498 - protein, 13 aa, Homo sapiens
  CDR3 for beta chain variable domain of TCR clone 315249 (TRBV10-3, TRBJ2-1)
CAISEFSGREQFF

SEQ ID NO: 630499 - protein, 14 aa, Homo sapiens
  CDR3 for alpha chain variable domain of TCR clone 315250 (TRAV1-2, TRAJ16)
CAVNRFSDGQKLLL

SEQ ID NO: 630500 - protein, 15 aa, Homo sapiens
  CDR3 for beta chain variable domain of TCR clone 315250 (TRBV7-2, TRBJ1-2)
CASSPRAGWNYGYTF

SEQ ID NO: 630501 - protein, 14 aa, Homo sapiens
  CDR3 for alpha chain variable domain of TCR clone 315251 (TRAV35, TRAJ56)
CAGQLTGANSKLTF

SEQ ID NO: 630502 - protein, 16 aa, Homo sapiens
  CDR3 for beta chain variable domain of TCR clone 315251 (TRBV20-1, TRBJ1-4)
CSAPVQGLLTNEKLFF

SEQ ID NO: 630503 - protein, 14 aa, Homo sapiens
  CDR3 for alpha chain variable domain of TCR clone 315252 (TRAV12-3, TRAJ56)
CAMSVTGANSKLTF

SEQ ID NO: 630504 - protein, 17 aa, Homo sapiens
  CDR3 for beta chain variable domain of TCR clone 315252 (TRBV20-1, TRBJ2-3)
CSASLLVRGGSADTQYF

SEQ ID NO: 630505 - protein, 13 aa, Homo sapiens
  CDR3 for alpha chain variable domain of TCR clone 315253 (TRAV2, TRAJ12)
YAVGADSSYKLIF

SEQ ID NO: 630506 - protein, 13 aa, Homo sapiens
  CDR3 for beta chain variable domain of TCR clone 315253 (TRBV20-1, TRBJ2-1)
CSARSSPRDEQFF

SEQ ID NO: 630507 - protein, 11 aa, Homo sapiens
  CDR3 for alpha chain variable domain of TCR clone 315254 (TRAV35, TRAJ57)
GPQGGSEKLVF

SEQ ID NO: 630508 - protein, 16 aa, Homo sapiens
  CDR3 for beta chain variable domain of TCR clone 315254 (TRBV7-2, TRBJ2-3)
CASSLVALYSTDTQYF

SEQ ID NO: 630509 - protein, 13 aa, Homo sapiens
  CDR3 for alpha chain variable domain of TCR clone 315255 (TRAV27, TRAJ16)
CAGACSDGQKLLF

SEQ ID NO: 630510 - protein, 15 aa, Homo sapiens
  CDR3 for beta chain variable domain of TCR clone 315255 (TRBV20-1, TRBJ2-7)
CSARDRVSGMDEQYF

SEQ ID NO: 630511 - protein, 14 aa, Homo sapiens
  CDR3 for alpha chain variable domain of TCR clone 315256 (TRAV12-2, TRAJ32)
CAHPASGATNKLIF

SEQ ID NO: 630512 - protein, 14 aa, Homo sapiens
  CDR3 for beta chain variable domain of TCR clone 315256 (TRBV19, TRBJ2-1)
CASPTFVLSGEQFF

SEQ ID NO: 630513 - protein, 15 aa, Homo sapiens
  CDR3 for alpha chain variable domain of TCR clone 315257 (TRAV8-4, TRAJ30)
CAVSLKKNRDDKIIF

SEQ ID NO: 630514 - protein, 13 aa, Homo sapiens
  CDR3 for beta chain variable domain of TCR clone 315257 (TRBV10-1, TRBJ2-1)
CASSAGPDNEQFF

SEQ ID NO: 630515 - protein, 15 aa, Homo sapiens
  CDR3 for alpha chain variable domain of TCR clone 315258 (TRAV29/DV5, TRAJ40)
CAASAQGSGTYKYIF

SEQ ID NO: 630516 - protein, 14 aa, Homo sapiens
  CDR3 for beta chain variable domain of TCR clone 315258 (TRBV19, TRBJ2-2)
CASSMVGLSGELFF

SEQ ID NO: 630517 - protein, 12 aa, Homo sapiens
  CDR3 for alpha chain variable domain of TCR clone 315259 (TRAV38-1, TRAJ36)
YAFETGANNLFF

SEQ ID NO: 630518 - protein, 16 aa, Homo sapiens
  CDR3 for beta chain variable domain of TCR clone 315259 (TRBV19, TRBJ2-2)
CASRSPGTGATGELFF

SEQ ID NO: 630519 - protein, 14 aa, Homo sapiens
  CDR3 for alpha chain variable domain of TCR clone 315260 (TRAV12-2, TRAJ15)
CAPHTGQAGTALIF

SEQ ID NO: 630520 - protein, 14 aa, Homo sapiens
  CDR3 for beta chain variable domain of TCR clone 315260 (TRBV7-2, TRBJ2-7)
YASSPKTSFYEQYF

SEQ ID NO: 630521 - protein, 11 aa, Homo sapiens
  CDR3 for alpha chain variable domain of TCR clone 315261 (TRAV3, TRAJ21)
CAVGNFNKFYF

SEQ ID NO: 630522 - protein, 16 aa, Homo sapiens
  CDR3 for beta chain variable domain of TCR clone 315261 (TRBV7-6, TRBJ2-1)
CAGSAPGPSSYNEQFF

SEQ ID NO: 630523 - protein, 15 aa, Homo sapiens
  CDR3 for alpha chain variable domain of TCR clone 315262 (TRAV38-1, TRAJ37)
CAFIFGSGNTGKLIF

SEQ ID NO: 630524 - protein, 14 aa, Homo sapiens
  CDR3 for beta chain variable domain of TCR clone 315262 (TRBV7-9, TRBJ2-7)
CASSPKTSFYEQYF

SEQ ID NO: 630525 - protein, 13 aa, Homo sapiens
  CDR3 for alpha chain variable domain of TCR clone 315263 (TRAV27, TRAJ41)
CAGEGNSGYALNF

SEQ ID NO: 630526 - protein, 14 aa, Homo sapiens
  CDR3 for beta chain variable domain of TCR clone 315263 (TRBV7-2, TRBJ1-1)
CARSSLTGTTEAFF

SEQ ID NO: 630527 - protein, 12 aa, Homo sapiens
  CDR3 for alpha chain variable domain of TCR clone 315264 (TRAV13-1, TRAJ45)
CAATRGADGLTF

SEQ ID NO: 630528 - protein, 13 aa, Homo sapiens
  CDR3 for beta chain variable domain of TCR clone 315264 (TRBV7-2, TRBJ1-1)
CASNLKGAKVAFF

SEQ ID NO: 630529 - protein, 12 aa, Homo sapiens
  CDR3 for alpha chain variable domain of TCR clone 315265 (TRAV2, TRAJ33)
CAVPDSNYQLIW

SEQ ID NO: 630530 - protein, 17 aa, Homo sapiens
  CDR3 for beta chain variable domain of TCR clone 315265 (TRBV6-5, TRBJ2-3)
CASRYGTSLYKSDTQYF

SEQ ID NO: 630531 - protein, 18 aa, Homo sapiens
  CDR3 for alpha chain variable domain of TCR clone 315266 (TRAV29/DV5, TRAJ52)
CAAGFRGAGGTSYGKLTF

SEQ ID NO: 630532 - protein, 14 aa, Homo sapiens
  CDR3 for beta chain variable domain of TCR clone 315266 (TRBV19, TRBJ2-7)
CASNFRDTFTGMYF

SEQ ID NO: 630533 - protein, 12 aa, Homo sapiens
  CDR3 for alpha chain variable domain of TCR clone 315267 (TRAV2, TRAJ33)
CAFMDSIYQLIW

SEQ ID NO: 630534 - protein, 16 aa, Homo sapiens
  CDR3 for beta chain variable domain of TCR clone 315267 (TRBV2, TRBJ2-7)
CASSEPWTGPSYEQYF

SEQ ID NO: 630535 - protein, 13 aa, Homo sapiens
  CDR3 for alpha chain variable domain of TCR clone 315268 (TRAV8-3, TRAJ44)
CAVGPGTASKLIF

SEQ ID NO: 630536 - protein, 14 aa, Homo sapiens
  CDR3 for beta chain variable domain of TCR clone 315268 (TRBV11-2, TRBJ2-3)
CASSRLARTDTQYF

SEQ ID NO: 630537 - protein, 15 aa, Homo sapiens
  CDR3 for alpha chain variable domain of TCR clone 315269 (TRAV27, TRAJ42)
CAGDGYGGSQGNLIF

SEQ ID NO: 630538 - protein, 16 aa, Homo sapiens
  CDR3 for beta chain variable domain of TCR clone 315269 (TRBV2, TRBJ2-1)
CASSVGGSLSYNEQFF

SEQ ID NO: 630539 - protein, 12 aa, Homo sapiens
  CDR3 for alpha chain variable domain of TCR clone 315270 (TRAV13-1, TRAJ21)
CAAKEGFNKFYF

SEQ ID NO: 630540 - protein, 13 aa, Homo sapiens
  CDR3 for beta chain variable domain of TCR clone 315270 (TRBV4-1, TRBJ2-1)
CASSQTPGTPEFF

SEQ ID NO: 630541 - protein, 14 aa, Homo sapiens
  CDR3 for alpha chain variable domain of TCR clone 315271 (TRAV8-6, TRAJ12)
CAVKAANSSYKLIF

SEQ ID NO: 630542 - protein, 15 aa, Homo sapiens
  CDR3 for beta chain variable domain of TCR clone 315271 (TRBV5-1, TRBJ2-5)
CASSLGLAEQETQYF

SEQ ID NO: 630543 - protein, 14 aa, Homo sapiens
  CDR3 for alpha chain variable domain of TCR clone 315272 (TRAV13-2, TRAJ10)
CAETFTGGGNKLTF

SEQ ID NO: 630544 - protein, 16 aa, Homo sapiens
  CDR3 for beta chain variable domain of TCR clone 315272 (TRBV18, TRBJ2-7)
CASSPRSQGMSYEQYF

SEQ ID NO: 630545 - protein, 13 aa, Homo sapiens
  CDR3 for alpha chain variable domain of TCR clone 315273 (TRAV12-2, TRAJ42)
CAVNRGSQGNLIF

SEQ ID NO: 630546 - protein, 16 aa, Homo sapiens
  CDR3 for beta chain variable domain of TCR clone 315273 (TRBV9, TRBJ2-2)
CASSAMGKGNTGELFF

SEQ ID NO: 630547 - protein, 15 aa, Homo sapiens
  CDR3 for alpha chain variable domain of TCR clone 315274 (TRAV3, TRAJ5)
CAVRDLDTGRRALTF

SEQ ID NO: 630548 - protein, 14 aa, Homo sapiens
  CDR3 for beta chain variable domain of TCR clone 315274 (TRBV20-1, TRBJ2-7)
CSAPELAGVGEQYF

SEQ ID NO: 630549 - protein, 15 aa, Homo sapiens
  CDR3 for alpha chain variable domain of TCR clone 315275 (TRAV8-3, TRAJ11)
CAVGLLNSGYSTLTL

SEQ ID NO: 630550 - protein, 16 aa, Homo sapiens
  CDR3 for beta chain variable domain of TCR clone 315275 (TRBV28, TRBJ2-1)
CASSLWGRTSGTLQFF

SEQ ID NO: 630551 - protein, 16 aa, Homo sapiens
  CDR3 for alpha chain variable domain of TCR clone 315276 (TRAV8-3, TRAJ44)
CAVGASNTGTASKLTF

SEQ ID NO: 630552 - protein, 15 aa, Homo sapiens
  CDR3 for beta chain variable domain of TCR clone 315276 (TRBV27, TRBJ1-5)
CASTCNRGSNQHQHF

SEQ ID NO: 630553 - protein, 14 aa, Homo sapiens
  CDR3 for alpha chain variable domain of TCR clone 315277 (TRAV1-2, TRAJ16)
CAVNRFSDGQKLLF

SEQ ID NO: 630554 - protein, 12 aa, Homo sapiens
  CDR3 for beta chain variable domain of TCR clone 315277 (TRBV28, TRBJ2-6)
CSIQAGANVLTF

SEQ ID NO: 630555 - protein, 16 aa, Homo sapiens
  CDR3 for alpha chain variable domain of TCR clone 315278 (TRAV13-1, TRAJ13)
CTAFFLGVTRKLPLEL

SEQ ID NO: 630556 - protein, 17 aa, Homo sapiens
  CDR3 for beta chain variable domain of TCR clone 315278 (TRBV20-1, TRBJ2-2)
CSASGSGQGGLTGELFF

SEQ ID NO: 630557 - protein, 13 aa, Homo sapiens
  CDR3 for alpha chain variable domain of TCR clone 315279 (TRAV8-3, TRAJ36)
CAVGATGANNLFF

SEQ ID NO: 630558 - protein, 15 aa, Homo sapiens
  CDR3 for beta chain variable domain of TCR clone 315279 (TRBV7-2, TRBJ1-2)
CDSSARAGWNYGDTF

SEQ ID NO: 630559 - protein, 12 aa, Homo sapiens
  CDR3 for alpha chain variable domain of TCR clone 315280 (TRAV3, TRAJ31)
CAAQRANARLMF

SEQ ID NO: 630560 - protein, 15 aa, Homo sapiens
  CDR3 for beta chain variable domain of TCR clone 315280 (TRBV7-9, TRBJ1-5)
CASSQGHQPNQPQHF

SEQ ID NO: 630561 - protein, 15 aa, Homo sapiens
  CDR3 for alpha chain variable domain of TCR clone 315281 (TRAV10, TRAJ42)
SLLHLWGGSQGNLIF

SEQ ID NO: 630562 - protein, 12 aa, Homo sapiens
  CDR3 for beta chain variable domain of TCR clone 315281 (TRBV29-1, TRBJ2-3)
CSVTGGADTQYF

SEQ ID NO: 630563 - protein, 14 aa, Homo sapiens
  CDR3 for alpha chain variable domain of TCR clone 315282 (TRAV12-1, TRAJ22)
CVVNVGGSARQLTF

SEQ ID NO: 630564 - protein, 16 aa, Homo sapiens
  CDR3 for beta chain variable domain of TCR clone 315282 (TRBV2, TRBJ2-1)
CASRSPAGGKYNEQFF

SEQ ID NO: 630565 - protein, 17 aa, Homo sapiens
  CDR3 for alpha chain variable domain of TCR clone 315283 (TRAV26-1, TRAJ28)
CIVRFPDSGAGSYQLTF

SEQ ID NO: 630566 - protein, 17 aa, Homo sapiens
  CDR3 for beta chain variable domain of TCR clone 315283 (TRBV28, TRBJ2-7)
CASSPLPAGGKSYEQYF

SEQ ID NO: 630567 - protein, 14 aa, Homo sapiens
  CDR3 for alpha chain variable domain of TCR clone 315284 (TRAV12-3, TRAJ10)
SHLPLTGGGNKLTF

SEQ ID NO: 630568 - protein, 14 aa, Homo sapiens
  CDR3 for beta chain variable domain of TCR clone 315284 (TRBV11-2, TRBJ1-2)
CASSLYRGNYGYTF

SEQ ID NO: 630569 - protein, 18 aa, Homo sapiens
  CDR3 for alpha chain variable domain of TCR clone 315285 (TRAV13-1, TRAJ52)
CAAKNPNAGGTSYGKLTF

SEQ ID NO: 630570 - protein, 17 aa, Homo sapiens
  CDR3 for beta chain variable domain of TCR clone 315285 (TRBV7-2, TRBJ1-4)
CASSFKAGPTTNEKLFF

SEQ ID NO: 630571 - protein, 14 aa, Homo sapiens
  CDR3 for alpha chain variable domain of TCR clone 315286 (TRAV3, TRAJ17)
CAVRDAAAGNKLTF

SEQ ID NO: 630572 - protein, 13 aa, Homo sapiens
  CDR3 for beta chain variable domain of TCR clone 315286 (TRBV2, TRBJ1-1)
CASSVRRYTEAFF

SEQ ID NO: 630573 - protein, 16 aa, Homo sapiens
  CDR3 for alpha chain variable domain of TCR clone 315287 (TRAV8-3, TRAJ42)
CSVGEGNGGSQGNLIF

SEQ ID NO: 630574 - protein, 14 aa, Homo sapiens
  CDR3 for beta chain variable domain of TCR clone 315287 (TRBV7-2, TRBJ2-1)
CASSRGGARNEQFF

SEQ ID NO: 630575 - protein, 13 aa, Homo sapiens
  CDR3 for alpha chain variable domain of TCR clone 315288 (TRAV3, TRAJ21)
CAVREQDFNKFYF

SEQ ID NO: 630576 - protein, 13 aa, Homo sapiens
  CDR3 for beta chain variable domain of TCR clone 315288 (TRBV7-9, TRBJ1-2)
CASSLKQNYGYTF

SEQ ID NO: 630577 - protein, 11 aa, Homo sapiens
  CDR3 for alpha chain variable domain of TCR clone 315289 (TRAV3, TRAJ21)
RAVGNFNKFYF

SEQ ID NO: 630578 - protein, 16 aa, Homo sapiens
  CDR3 for beta chain variable domain of TCR clone 315289 (TRBV19, TRBJ2-1)
CASSKAVPSSYNEQFF

SEQ ID NO: 630579 - protein, 12 aa, Homo sapiens
  CDR3 for alpha chain variable domain of TCR clone 315290 (TRAV27, TRAJ54)
CAGDEGAQKLVF

SEQ ID NO: 630580 - protein, 12 aa, Homo sapiens
  CDR3 for beta chain variable domain of TCR clone 315290 (TRBV11-2, TRBJ2-2)
CASSLGGGELFF

SEQ ID NO: 630581 - protein, 16 aa, Homo sapiens
  CDR3 for alpha chain variable domain of TCR clone 315291 (TRAV1-2, TRAJ10)
CAVRDQGGGGGNKLTF

SEQ ID NO: 630582 - protein, 12 aa, Homo sapiens
  CDR3 for beta chain variable domain of TCR clone 315291 (TRBV7-9, TRBJ1-1)
CASSLVRGEAFF

SEQ ID NO: 630583 - protein, 15 aa, Homo sapiens
  CDR3 for alpha chain variable domain of TCR clone 315292 (TRAV3, TRAJ3)
CAVRDRDSSASKIIF

SEQ ID NO: 630584 - protein, 15 aa, Homo sapiens
  CDR3 for beta chain variable domain of TCR clone 315292 (TRBV29-1, TRBJ2-7)
CSGEFFDRGSYEQYF

SEQ ID NO: 630585 - protein, 12 aa, Homo sapiens
  CDR3 for alpha chain variable domain of TCR clone 315293 (TRAV21, TRAJ23)
CAVGPQGGKLIF

SEQ ID NO: 630586 - protein, 13 aa, Homo sapiens
  CDR3 for beta chain variable domain of TCR clone 315293 (TRBV20-1, TRBJ2-7)
CSARTGAGYDQYF

SEQ ID NO: 630587 - protein, 14 aa, Homo sapiens
  CDR3 for alpha chain variable domain of TCR clone 315294 (TRAV12-2, TRAJ13)
CAVKKAGGYQKVTF

SEQ ID NO: 630588 - protein, 17 aa, Homo sapiens
  CDR3 for beta chain variable domain of TCR clone 315294 (TRBV13, TRBJ2-3)
CASGLSRVAGGRNTQYF

SEQ ID NO: 630589 - protein, 17 aa, Homo sapiens
  CDR3 for alpha chain variable domain of TCR clone 315295 (TRAV17, TRAJ28)
CATYPRRGGAGSYQLTF

SEQ ID NO: 630590 - protein, 20 aa, Homo sapiens
  CDR3 for beta chain variable domain of TCR clone 315295 (TRBV28, TRBJ2-1)
CASTPIGRSPGLAGGNEQFF

SEQ ID NO: 630591 - protein, 13 aa, Homo sapiens
  CDR3 for alpha chain variable domain of TCR clone 315296 (TRAV12-2, TRAJ10)
CAVPTGGGKKLIF

SEQ ID NO: 630592 - protein, 11 aa, Homo sapiens
  CDR3 for beta chain variable domain of TCR clone 315296 (TRBV6-1, TRBJ2-1)
CASISSNEQFF

SEQ ID NO: 630593 - protein, 10 aa, Homo sapiens
  CDR3 for alpha chain variable domain of TCR clone 315297 (TRAV26-1, TRAJ22)
RSGSARQLTF

SEQ ID NO: 630594 - protein, 13 aa, Homo sapiens
  CDR3 for beta chain variable domain of TCR clone 315297 (TRBV7-9, TRBJ1-2)
CGSSLKQSYGYTF

SEQ ID NO: 630595 - protein, 14 aa, Homo sapiens
  CDR3 for alpha chain variable domain of TCR clone 315298 (TRAV29/DV5, TRAJ57)
CAARSQGGSEKLVF

SEQ ID NO: 630596 - protein, 15 aa, Homo sapiens
  CDR3 for beta chain variable domain of TCR clone 315298 (TRBV28, TRBJ2-4)
CVAGSGTLLMGIQYF

SEQ ID NO: 630597 - protein, 14 aa, Homo sapiens
  CDR3 for alpha chain variable domain of TCR clone 315299 (TRAV12-2, TRAJ45)
CAVNIGGGAAGLTF

SEQ ID NO: 630598 - protein, 17 aa, Homo sapiens
  CDR3 for beta chain variable domain of TCR clone 315299 (TRBV18, TRBJ2-1)
CASSKGLSGGADNEQFF

SEQ ID NO: 630599 - protein, 13 aa, Homo sapiens
  CDR3 for alpha chain variable domain of TCR clone 315300 (TRAV13-1, TRAJ6)
CAASSGGSYIPTF

SEQ ID NO: 630600 - protein, 16 aa, Homo sapiens
  CDR3 for beta chain variable domain of TCR clone 315300 (TRBV2, TRBJ2-3)
CASSTSVEGVTDTQYF

SEQ ID NO: 630601 - protein, 16 aa, Homo sapiens
  CDR3 for alpha chain variable domain of TCR clone 315301 (TRAV13-1, TRAJ18)
CAASRVRGSTLGRLYF

SEQ ID NO: 630602 - protein, 16 aa, Homo sapiens
  CDR3 for beta chain variable domain of TCR clone 315301 (TRBV27, TRBJ1-1)
CASSSRGRTGYTEAFF

SEQ ID NO: 630603 - protein, 21 aa, Homo sapiens
  CDR3 for alpha chain variable domain of TCR clone 315302 (TRAV5, TRAJ29)
CAESKKETHLLSLERAQDFLL

SEQ ID NO: 630604 - protein, 15 aa, Homo sapiens
  CDR3 for beta chain variable domain of TCR clone 315302 (TRBV10-1, TRBJ2-3)
CASSATSGGFDTQYF

SEQ ID NO: 630605 - protein, 13 aa, Homo sapiens
  CDR3 for alpha chain variable domain of TCR clone 315303 (TRAV13-1, TRAJ39)
CAASIVIQATCSP

SEQ ID NO: 630606 - protein, 16 aa, Homo sapiens
  CDR3 for beta chain variable domain of TCR clone 315303 (TRBV20-1, TRBJ1-4)
CSAPGQGLLTNEKLFF

SEQ ID NO: 630607 - protein, 12 aa, Homo sapiens
  CDR3 for alpha chain variable domain of TCR clone 315304 (TRAV1-2, TRAJ24)
CAVGGSWGKFQF

SEQ ID NO: 630608 - protein, 11 aa, Homo sapiens
  CDR3 for beta chain variable domain of TCR clone 315304 (TRBV11-2, TRBJ2-2)
CASSLPGELFF

SEQ ID NO: 630609 - protein, 11 aa, Homo sapiens
  CDR3 for alpha chain variable domain of TCR clone 315305 (TRAV21, TRAJ31)
CAVKNNARLMF

SEQ ID NO: 630610 - protein, 17 aa, Homo sapiens
  CDR3 for beta chain variable domain of TCR clone 315305 (TRBV28, TRBJ1-5)
CASSLSWLVSSNQPLHF

SEQ ID NO: 630611 - protein, 14 aa, Homo sapiens
  CDR3 for alpha chain variable domain of TCR clone 315306 (TRAV17, TRAJ6)
CATDASGGSYIPTF

SEQ ID NO: 630612 - protein, 19 aa, Homo sapiens
  CDR3 for beta chain variable domain of TCR clone 315306 (TRBV4-3, TRBJ2-7)
CASSQDFIGWQVNPYEQYF

SEQ ID NO: 630613 - protein, 22 aa, Homo sapiens
  CDR3 for alpha chain variable domain of TCR clone 315307 (TRAV8-4, TRAJ38)
CARLNAGNNHIQNPDPAVYQLR

SEQ ID NO: 630614 - protein, 14 aa, Homo sapiens
  CDR3 for beta chain variable domain of TCR clone 315307 (TRBV7-8, TRBJ2-3)
CASSLEAGTDTQYF

SEQ ID NO: 630615 - protein, 12 aa, Homo sapiens
  CDR3 for alpha chain variable domain of TCR clone 315308 (TRAV12-3, TRAJ17)
CAMTLTDNKLTF

SEQ ID NO: 630616 - protein, 14 aa, Homo sapiens
  CDR3 for beta chain variable domain of TCR clone 315308 (TRBV20-1, TRBJ1-3)
CSASPTGAGNTIYF

SEQ ID NO: 630617 - protein, 13 aa, Homo sapiens
  CDR3 for alpha chain variable domain of TCR clone 315309 (TRAV13-1, TRAJ8)
CAASIRGFQELVF

SEQ ID NO: 630618 - protein, 14 aa, Homo sapiens
  CDR3 for beta chain variable domain of TCR clone 315309 (TRBV7-2, TRBJ2-1)
CASSLVQGRNEQFF

SEQ ID NO: 630619 - protein, 12 aa, Homo sapiens
  CDR3 for alpha chain variable domain of TCR clone 315310 (TRAV12-1, TRAJ40)
CVVYSGTYKNIF

SEQ ID NO: 630620 - protein, 15 aa, Homo sapiens
  CDR3 for beta chain variable domain of TCR clone 315310 (TRBV7-9, TRBJ1-6)
CASSSPGRGNSPLHF

SEQ ID NO: 630621 - protein, 23 aa, Homo sapiens
  CDR3 for alpha chain variable domain of TCR clone 315311 (TRAV26-1, )
CIADSAGNNHIQNPDPAVSQLRD

SEQ ID NO: 630622 - protein, 13 aa, Homo sapiens
  CDR3 for beta chain variable domain of TCR clone 315311 (TRBV20-1, TRBJ1-1)
CSARGGGNTEAFF

SEQ ID NO: 630623 - protein, 15 aa, Homo sapiens
  CDR3 for alpha chain variable domain of TCR clone 315312 (TRAV8-3, TRAJ44)
CAVGAGAGTASKLTF

SEQ ID NO: 630624 - protein, 12 aa, Homo sapiens
  CDR3 for beta chain variable domain of TCR clone 315312 (TRBV7-8, TRBJ2-4)
CACSLGGNIQYF

SEQ ID NO: 630625 - protein, 11 aa, Homo sapiens
  CDR3 for alpha chain variable domain of TCR clone 315313 (TRAV17, TRAJ9)
CGFTGGFKTIF

SEQ ID NO: 630626 - protein, 14 aa, Homo sapiens
  CDR3 for beta chain variable domain of TCR clone 315313 (TRBV11-3, TRBJ2-3)
CASSLDPATDTQYF

SEQ ID NO: 630627 - protein, 18 aa, Homo sapiens
  CDR3 for alpha chain variable domain of TCR clone 315314 (TRAV13-1, TRAJ52)
CVAKNPNAGGTSYGKLTF

SEQ ID NO: 630628 - protein, 18 aa, Homo sapiens
  CDR3 for beta chain variable domain of TCR clone 315314 (TRBV12-4, TRBJ2-4)
CASSRTGAVDVAKNMQYF

SEQ ID NO: 630629 - protein, 15 aa, Homo sapiens
  CDR3 for alpha chain variable domain of TCR clone 315315 (TRAV12-3, TRAJ52)
CNGGAGGTSYGKLTF

SEQ ID NO: 630630 - protein, 13 aa, Homo sapiens
  CDR3 for beta chain variable domain of TCR clone 315315 (TRBV20-1, TRBJ2-5)
CSARGEYQETQYF

SEQ ID NO: 630631 - protein, 11 aa, Homo sapiens
  CDR3 for alpha chain variable domain of TCR clone 315316 (TRAV35, TRAJ30)
CAGERDDKIIL

SEQ ID NO: 630632 - protein, 14 aa, Homo sapiens
  CDR3 for beta chain variable domain of TCR clone 315316 (TRBV15, TRBJ2-5)
CATSGDRGQETQYF

SEQ ID NO: 630633 - protein, 13 aa, Homo sapiens
  CDR3 for alpha chain variable domain of TCR clone 315317 (TRAV21, TRAJ27)
CVARPGNAGKSTF

SEQ ID NO: 630634 - protein, 14 aa, Homo sapiens
  CDR3 for beta chain variable domain of TCR clone 315317 (TRBV7-2, TRBJ2-5)
CASSFGGAQETQYF

SEQ ID NO: 630635 - protein, 11 aa, Homo sapiens
  CDR3 for alpha chain variable domain of TCR clone 315318 (TRAV12-3, TRAJ27)
CAMANAGKSTF

SEQ ID NO: 630636 - protein, 14 aa, Homo sapiens
  CDR3 for beta chain variable domain of TCR clone 315318 (TRBV12-5, TRBJ2-5)
CASGSRTLQETQYF

SEQ ID NO: 630637 - protein, 13 aa, Homo sapiens
  CDR3 for alpha chain variable domain of TCR clone 315319 (TRAV2, TRAJ40)
CAVVTSGTYKYIF

SEQ ID NO: 630638 - protein, 12 aa, Homo sapiens
  CDR3 for beta chain variable domain of TCR clone 315319 (TRBV28, TRBJ2-7)
CASSRSGYEQYF

SEQ ID NO: 630639 - protein, 16 aa, Homo sapiens
  CDR3 for alpha chain variable domain of TCR clone 315320 (TRAV30, TRAJ24)
CGTEIVDADSWWEFQF

SEQ ID NO: 630640 - protein, 14 aa, Homo sapiens
  CDR3 for beta chain variable domain of TCR clone 315320 (TRBV12-5, TRBJ2-5)
CASGSRTHQETQYF

SEQ ID NO: 630641 - protein, 13 aa, Homo sapiens
  CDR3 for alpha chain variable domain of TCR clone 315321 (TRAV36/DV7, TRAJ7)
CAGTRYGNNRLAF

SEQ ID NO: 630642 - protein, 14 aa, Homo sapiens
  CDR3 for beta chain variable domain of TCR clone 315321 (TRBV20-1, TRBJ2-5)
CSAHRQGLWETQYF

SEQ ID NO: 630643 - protein, 13 aa, Homo sapiens
  CDR3 for alpha chain variable domain of TCR clone 315322 (TRAV12-1, TRAJ11)
CVVTRGGYSTLTF

SEQ ID NO: 630644 - protein, 13 aa, Homo sapiens
  CDR3 for beta chain variable domain of TCR clone 315322 (TRBV20-1, TRBJ1-2)
WSARDQGAYGYTF

SEQ ID NO: 630645 - protein, 14 aa, Homo sapiens
  CDR3 for alpha chain variable domain of TCR clone 315323 (TRAV3, TRAJ9)
CAVRLSTGGFKTIF

SEQ ID NO: 630646 - protein, 16 aa, Homo sapiens
  CDR3 for beta chain variable domain of TCR clone 315323 (TRBV12-5, TRBJ2-5)
CASGPRTSGNQETQYF

SEQ ID NO: 630647 - protein, 16 aa, Homo sapiens
  CDR3 for alpha chain variable domain of TCR clone 315324 (TRAV38-1, TRAJ32)
CAFMKGGGGATNKLIF

SEQ ID NO: 630648 - protein, 16 aa, Homo sapiens
  CDR3 for beta chain variable domain of TCR clone 315324 (TRBV27, TRBJ2-1)
SMNVEPGTSGDNEQFF

SEQ ID NO: 630649 - protein, 14 aa, Homo sapiens
  CDR3 for alpha chain variable domain of TCR clone 315325 (TRAV3, TRAJ21)
CAVRDAYNFNKFYF

SEQ ID NO: 630650 - protein, 15 aa, Homo sapiens
  CDR3 for beta chain variable domain of TCR clone 315325 (TRBV5-1, TRBJ2-1)
CASSPPRAPYNEQFF

SEQ ID NO: 630651 - protein, 15 aa, Homo sapiens
  CDR3 for alpha chain variable domain of TCR clone 315326 (TRAV17, TRAJ28)
CATVDSGAGSYQLTF

SEQ ID NO: 630652 - protein, 13 aa, Homo sapiens
  CDR3 for beta chain variable domain of TCR clone 315326 (TRBV5-4, TRBJ2-5)
RASSRQEGETQYF

SEQ ID NO: 630653 - protein, 15 aa, Homo sapiens
  CDR3 for alpha chain variable domain of TCR clone 315327 (TRAV12-3, TRAJ11)
CAMSEENSGYSTLTF

SEQ ID NO: 630654 - protein, 16 aa, Homo sapiens
  CDR3 for beta chain variable domain of TCR clone 315327 (TRBV5-1, TRBJ2-7)
CASSLQGLAGLYEQYF

SEQ ID NO: 630655 - protein, 18 aa, Homo sapiens
  CDR3 for alpha chain variable domain of TCR clone 315328 (TRAV35, TRAJ28)
CAGHNYPLSGAGSYQLTF

SEQ ID NO: 630656 - protein, 12 aa, Homo sapiens
  CDR3 for beta chain variable domain of TCR clone 315328 (TRBV7-9, TRBJ1-1)
CASSLDGTEAFF

SEQ ID NO: 630657 - protein, 16 aa, Homo sapiens
  CDR3 for alpha chain variable domain of TCR clone 315329 (TRAV8-4, TRAJ4)
CAVSDGSPGGYNKLIF

SEQ ID NO: 630658 - protein, 15 aa, Homo sapiens
  CDR3 for beta chain variable domain of TCR clone 315329 (TRBV20-1, TRBJ2-7)
CSAESGTSGAYEQYF

SEQ ID NO: 630659 - protein, 15 aa, Homo sapiens
  CDR3 for alpha chain variable domain of TCR clone 315330 (TRAV8-6, TRAJ10)
CAVSDQAGGGNKLTF

SEQ ID NO: 630660 - protein, 15 aa, Homo sapiens
  CDR3 for beta chain variable domain of TCR clone 315330 (TRBV7-9, TRBJ1-4)
CASSARTGGNEKLFF

SEQ ID NO: 630661 - protein, 15 aa, Homo sapiens
  CDR3 for alpha chain variable domain of TCR clone 315331 (TRAV17, TRAJ52)
CATEAGGTSYGKLTF

SEQ ID NO: 630662 - protein, 13 aa, Homo sapiens
  CDR3 for beta chain variable domain of TCR clone 315331 (TRBV28, TRBJ1-5)
CSSLGVLVKPQHF

SEQ ID NO: 630663 - protein, 11 aa, Homo sapiens
  CDR3 for alpha chain variable domain of TCR clone 315332 (TRAV2, TRAJ13)
CASGGYQKVTF

SEQ ID NO: 630664 - protein, 15 aa, Homo sapiens
  CDR3 for beta chain variable domain of TCR clone 315332 (TRBV7-2, TRBJ2-3)
CASSLAGAFIDTQYF

SEQ ID NO: 630665 - protein, 12 aa, Homo sapiens
  CDR3 for alpha chain variable domain of TCR clone 315333 (TRAV2, TRAJ9)
CAVVAGGFKTIF

SEQ ID NO: 630666 - protein, 11 aa, Homo sapiens
  CDR3 for beta chain variable domain of TCR clone 315333 (TRBV13, TRBJ2-2)
CASSPRAGEHT

SEQ ID NO: 630667 - protein, 18 aa, Homo sapiens
  CDR3 for alpha chain variable domain of TCR clone 315334 (TRAV21, TRAJ52)
CAVRPSPAGGTSYGKLAF

SEQ ID NO: 630668 - protein, 14 aa, Homo sapiens
  CDR3 for beta chain variable domain of TCR clone 315334 (TRBV4-1, TRBJ2-2)
CASSQAVNTGELSF

SEQ ID NO: 630669 - protein, 14 aa, Homo sapiens
  CDR3 for alpha chain variable domain of TCR clone 315335 (TRAV12-3, TRAJ13)
CAMRNSGGYQKVTF

SEQ ID NO: 630670 - protein, 12 aa, Homo sapiens
  CDR3 for beta chain variable domain of TCR clone 315335 (TRBV12-4, TRBJ1-2)
CASSFIWLHLRF

SEQ ID NO: 630671 - protein, 14 aa, Homo sapiens
  CDR3 for alpha chain variable domain of TCR clone 315336 (TRAV38-1, TRAJ43)
CAFMKHNNNHDMRF

SEQ ID NO: 630672 - protein, 17 aa, Homo sapiens
  CDR3 for beta chain variable domain of TCR clone 315336 (TRBV7-7, TRBJ1-4)
CASSLVGQGASNEKLFF

SEQ ID NO: 630673 - protein, 13 aa, Homo sapiens
  CDR3 for alpha chain variable domain of TCR clone 315337 (TRAV1-1, TRAJ9)
CAAKNTGGFKTIF

SEQ ID NO: 630674 - protein, 11 aa, Homo sapiens
  CDR3 for beta chain variable domain of TCR clone 315337 (TRBV4-1, TRBJ2-2)
CASEHTGELFF

SEQ ID NO: 630675 - protein, 16 aa, Homo sapiens
  CDR3 for alpha chain variable domain of TCR clone 315338 (TRAV14/DV4, TRAJ15)
CAMREGPAQAGTALIF

SEQ ID NO: 630676 - protein, 12 aa, Homo sapiens
  CDR3 for beta chain variable domain of TCR clone 315338 (TRBV28, TRBJ2-6)
CAIQAGANVLTL

SEQ ID NO: 630677 - protein, 14 aa, Homo sapiens
  CDR3 for alpha chain variable domain of TCR clone 315339 (TRAV17, TRAJ23)
CATALGGQGGKLIF

SEQ ID NO: 630678 - protein, 17 aa, Homo sapiens
  CDR3 for beta chain variable domain of TCR clone 315339 (TRBV4-2, TRBJ1-1)
CASTQFGGGSGNTEAFF

SEQ ID NO: 630679 - protein, 13 aa, Homo sapiens
  CDR3 for alpha chain variable domain of TCR clone 315340 (TRAV13-1, TRAJ10)
CAALEGGGNKLTF

SEQ ID NO: 630680 - protein, 11 aa, Homo sapiens
  CDR3 for beta chain variable domain of TCR clone 315340 (TRBV6-3, TRBJ2-7)
CASTFSYEQYF

SEQ ID NO: 630681 - protein, 13 aa, Homo sapiens
  CDR3 for alpha chain variable domain of TCR clone 315341 (TRAV8-6, TRAJ9)
CAVWDNGGFKTIF

SEQ ID NO: 630682 - protein, 14 aa, Homo sapiens
  CDR3 for beta chain variable domain of TCR clone 315341 (TRBV19, TRBJ2-7)
CASTVQGRPYEQYF

SEQ ID NO: 630683 - protein, 14 aa, Homo sapiens
  CDR3 for alpha chain variable domain of TCR clone 315342 (TRAV12-1, TRAJ37)
CVVGGVENTGKLIF

SEQ ID NO: 630684 - protein, 14 aa, Homo sapiens
  CDR3 for beta chain variable domain of TCR clone 315342 (TRBV19, TRBJ2-1)
CASPTFVLSGEQFF

SEQ ID NO: 630685 - protein, 16 aa, Homo sapiens
  CDR3 for alpha chain variable domain of TCR clone 315343 (TRAV26-1, TRAJ23)
CIVRVRPYNQGGKLIF

SEQ ID NO: 630686 - protein, 13 aa, Homo sapiens
  CDR3 for beta chain variable domain of TCR clone 315343 (TRBV20-1, TRBJ2-5)
CSARGDYQETQYF

SEQ ID NO: 630687 - protein, 15 aa, Homo sapiens
  CDR3 for alpha chain variable domain of TCR clone 315344 (TRAV34, TRAJ38)
CGADFTPGNNRKLIW

SEQ ID NO: 630688 - protein, 15 aa, Homo sapiens
  CDR3 for beta chain variable domain of TCR clone 315344 (TRBV19, TRBJ2-1)
CASSRPGQNYNEQFF

SEQ ID NO: 630689 - protein, 13 aa, Homo sapiens
  CDR3 for alpha chain variable domain of TCR clone 315345 (TRAV8-6, TRAJ50)
FAVIKTSYDKVIF

SEQ ID NO: 630690 - protein, 15 aa, Homo sapiens
  CDR3 for beta chain variable domain of TCR clone 315345 (TRBV7-2, TRBJ2-2)
CASRRPGQNTGELFF

SEQ ID NO: 630691 - protein, 14 aa, Homo sapiens
  CDR3 for alpha chain variable domain of TCR clone 315346 (TRAV13-1, TRAJ5)
CAAHPDTGRRALTF

SEQ ID NO: 630692 - protein, 13 aa, Homo sapiens
  CDR3 for beta chain variable domain of TCR clone 315346 (TRBV4-2, TRBJ1-1)
CASSQAGNTEAFF

SEQ ID NO: 630693 - protein, 14 aa, Homo sapiens
  CDR3 for alpha chain variable domain of TCR clone 315347 (TRAV35, TRAJ22)
CAGLRRGSARQLTF

SEQ ID NO: 630694 - protein, 14 aa, Homo sapiens
  CDR3 for beta chain variable domain of TCR clone 315347 (TRBV11-3, TRBJ2-3)
CASSSGQGPDTHYF

SEQ ID NO: 630695 - protein, 15 aa, Homo sapiens
  CDR3 for alpha chain variable domain of TCR clone 315348 (TRAV12-3, TRAJ22)
CAMRSSSGSARQLTF

SEQ ID NO: 630696 - protein, 16 aa, Homo sapiens
  CDR3 for beta chain variable domain of TCR clone 315348 (TRBV12-5, TRBJ2-5)
CASGPRTSGNQETQYF

SEQ ID NO: 630697 - protein, 14 aa, Homo sapiens
  CDR3 for alpha chain variable domain of TCR clone 315349 (TRAV12-3, TRAJ56)
CAMSVTGANSKLTF

SEQ ID NO: 630698 - protein, 17 aa, Homo sapiens
  CDR3 for beta chain variable domain of TCR clone 315349 (TRBV20-1, TRBJ2-3)
CSASPLGRGGSADTQYF

SEQ ID NO: 630699 - protein, 11 aa, Homo sapiens
  CDR3 for alpha chain variable domain of TCR clone 315350 (TRAV2, TRAJ21)
CAVFNFNKFYF

SEQ ID NO: 630700 - protein, 17 aa, Homo sapiens
  CDR3 for beta chain variable domain of TCR clone 315350 (TRBV7-3, TRBJ2-3)
CASSLMKRMRGADTQYF

SEQ ID NO: 630701 - protein, 12 aa, Homo sapiens
  CDR3 for alpha chain variable domain of TCR clone 315351 (TRAV29/DV5, TRAJ15)
CASNQAGTALIF

SEQ ID NO: 630702 - protein, 12 aa, Homo sapiens
  CDR3 for beta chain variable domain of TCR clone 315351 (TRBV24-1, TRBJ1-1)
CATLYPDTEAFF

SEQ ID NO: 630703 - protein, 12 aa, Homo sapiens
  CDR3 for alpha chain variable domain of TCR clone 315352 (TRAV13-1, TRAJ11)
CAADSGYSTLTF

SEQ ID NO: 630704 - protein, 17 aa, Homo sapiens
  CDR3 for beta chain variable domain of TCR clone 315352 (TRBV13, TRBJ2-3)
CASSLSRVAGGRNTQYF

SEQ ID NO: 630705 - protein, 14 aa, Homo sapiens
  CDR3 for alpha chain variable domain of TCR clone 315353 (TRAV8-6, TRAJ13)
CVGGPSGGYKKVTF

SEQ ID NO: 630706 - protein, 15 aa, Homo sapiens
  CDR3 for beta chain variable domain of TCR clone 315353 (TRBV7-2, TRBJ2-7)
CASSLSGALTYEQYF

SEQ ID NO: 630707 - protein, 14 aa, Homo sapiens
  CDR3 for alpha chain variable domain of TCR clone 315354 (TRAV26-1, TRAJ34)
CIVRVAYNTDKLIF

SEQ ID NO: 630708 - protein, 15 aa, Homo sapiens
  CDR3 for beta chain variable domain of TCR clone 315354 (TRBV20-1, TRBJ2-7)
CSARVPAAYFYEQCL

SEQ ID NO: 630709 - protein, 14 aa, Homo sapiens
  CDR3 for alpha chain variable domain of TCR clone 315355 (TRAV38-1, TRAJ29)
CAFITPSGNTPLVF

SEQ ID NO: 630710 - protein, 15 aa, Homo sapiens
  CDR3 for beta chain variable domain of TCR clone 315355 (TRBV6-1, TRBJ2-1)
CASSELRGQYNEQFF

SEQ ID NO: 630711 - protein, 18 aa, Homo sapiens
  CDR3 for alpha chain variable domain of TCR clone 315356 (TRAV21, TRAJ52)
CAVRPSPAGGTSYGKRTF

SEQ ID NO: 630712 - protein, 14 aa, Homo sapiens
  CDR3 for beta chain variable domain of TCR clone 315356 (TRBV2, TRBJ2-7)
CASSLTSGGYEQYF

SEQ ID NO: 630713 - protein, 11 aa, Homo sapiens
  CDR3 for alpha chain variable domain of TCR clone 315357 (TRAV35, TRAJ34)
CWARNTDKLIF

SEQ ID NO: 630714 - protein, 15 aa, Homo sapiens
  CDR3 for beta chain variable domain of TCR clone 315357 (TRBV7-9, TRBJ2-1)
CASSLAIGEYNEQFF

SEQ ID NO: 630715 - protein, 15 aa, Homo sapiens
  CDR3 for alpha chain variable domain of TCR clone 315358 (TRAV27, TRAJ38)
CAARRNAGNNRKLIW

SEQ ID NO: 630716 - protein, 14 aa, Homo sapiens
  CDR3 for beta chain variable domain of TCR clone 315358 (TRBV5-5, TRBJ1-2)
CASSLDPYNYGYTF

SEQ ID NO: 630717 - protein, 14 aa, Homo sapiens
  CDR3 for alpha chain variable domain of TCR clone 315359 (TRAV35, TRAJ13)
CAGRSPGGYQKVTF

SEQ ID NO: 630718 - protein, 16 aa, Homo sapiens
  CDR3 for beta chain variable domain of TCR clone 315359 (TRBV12-5, TRBJ2-5)
CASGPRTSGNQETQYF

SEQ ID NO: 630719 - protein, 14 aa, Homo sapiens
  CDR3 for alpha chain variable domain of TCR clone 315360 (TRAV12-1, TRAJ12)
CVVIAMDSSYKLIF

SEQ ID NO: 630720 - protein, 17 aa, Homo sapiens
  CDR3 for beta chain variable domain of TCR clone 315360 (TRBV7-8, TRBJ2-6)
CASSAGTGGAGANVLTF

SEQ ID NO: 630721 - protein, 14 aa, Homo sapiens
  CDR3 for alpha chain variable domain of TCR clone 315361 (TRAV12-1, TRAJ38)
CGELKAGNNRKLVW

SEQ ID NO: 630722 - protein, 13 aa, Homo sapiens
  CDR3 for beta chain variable domain of TCR clone 315361 (TRBV4-2, TRBJ1-1)
CASSQAGNTEAFF

SEQ ID NO: 630723 - protein, 15 aa, Homo sapiens
  CDR3 for alpha chain variable domain of TCR clone 315362 (TRAV2, TRAJ9)
CAVEDRGTGGFKTIF

SEQ ID NO: 630724 - protein, 13 aa, Homo sapiens
  CDR3 for beta chain variable domain of TCR clone 315362 (TRBV20-1, TRBJ1-2)
CSAPRSGRYGYTF

SEQ ID NO: 630725 - protein, 12 aa, Homo sapiens
  CDR3 for alpha chain variable domain of TCR clone 315363 (TRAV12-1, TRAJ40)
CVFYSGTYKYIF

SEQ ID NO: 630726 - protein, 18 aa, Homo sapiens
  CDR3 for beta chain variable domain of TCR clone 315363 (TRBV12-4, TRBJ2-2)
CASSLVTGTRGRTGELFF

SEQ ID NO: 630727 - protein, 14 aa, Homo sapiens
  CDR3 for alpha chain variable domain of TCR clone 315364 (TRAV38-2/DV8, TRAJ23)
CAYRSQNQGGKLIF

SEQ ID NO: 630728 - protein, 13 aa, Homo sapiens
  CDR3 for beta chain variable domain of TCR clone 315364 (TRBV24-1, TRBJ2-1)
CATSAGPYNERFF

SEQ ID NO: 630729 - protein, 14 aa, Homo sapiens
  CDR3 for alpha chain variable domain of TCR clone 315365 (TRAV27, TRAJ21)
CAGVRQLQQILLWL

SEQ ID NO: 630730 - protein, 14 aa, Homo sapiens
  CDR3 for beta chain variable domain of TCR clone 315365 (TRBV7-9, TRBJ1-4)
CASSLEGQSEKLFF

SEQ ID NO: 630731 - protein, 11 aa, Homo sapiens
  CDR3 for alpha chain variable domain of TCR clone 315366 (TRAV1-2, TRAJ20)
CAVSNDYKLSF

SEQ ID NO: 630732 - protein, 15 aa, Homo sapiens
  CDR3 for beta chain variable domain of TCR clone 315366 (TRBV11-3, TRBJ2-1)
CASSLAGQTYNEQFF

SEQ ID NO: 630733 - protein, 14 aa, Homo sapiens
  CDR3 for alpha chain variable domain of TCR clone 315367 (TRAV4, TRAJ13)
CLALQSGGYQKVTF

SEQ ID NO: 630734 - protein, 16 aa, Homo sapiens
  CDR3 for beta chain variable domain of TCR clone 315367 (TRBV29-1, TRBJ2-7)
CSVEVVGTSGSYEQYF

SEQ ID NO: 630735 - protein, 18 aa, Homo sapiens
  CDR3 for alpha chain variable domain of TCR clone 315368 (TRAV26-1, TRAJ22)
CIVRVALISSGSARQLTF

SEQ ID NO: 630736 - protein, 13 aa, Homo sapiens
  CDR3 for beta chain variable domain of TCR clone 315368 (TRBV13, TRBJ2-5)
CASSPEVGETEYS

SEQ ID NO: 630737 - protein, 16 aa, Homo sapiens
  CDR3 for alpha chain variable domain of TCR clone 315369 (TRAV35, TRAJ37)
CWAFLRGSSDTGKLIF

SEQ ID NO: 630738 - protein, 13 aa, Homo sapiens
  CDR3 for beta chain variable domain of TCR clone 315369 (TRBV2, TRBJ1-2)
CASSVRGNYGYTV

SEQ ID NO: 630739 - protein, 12 aa, Homo sapiens
  CDR3 for alpha chain variable domain of TCR clone 315370 (TRAV13-2, TRAJ23)
CAERHRGGKLIF

SEQ ID NO: 630740 - protein, 15 aa, Homo sapiens
  CDR3 for beta chain variable domain of TCR clone 315370 (TRBV4-1, TRBJ1-4)
CASSDTGGTNEKQFF

SEQ ID NO: 630741 - protein, 15 aa, Homo sapiens
  CDR3 for alpha chain variable domain of TCR clone 315371 (TRAV8-6, TRAJ45)
CAVSEQGGGDDGLTF

SEQ ID NO: 630742 - protein, 14 aa, Homo sapiens
  CDR3 for beta chain variable domain of TCR clone 315371 (TRBV28, TRBJ2-5)
CASRGSSFWETQYF

SEQ ID NO: 630743 - protein, 15 aa, Homo sapiens
  CDR3 for alpha chain variable domain of TCR clone 315372 (TRAV26-1, TRAJ44)
CIVRANTGTASKLTF

SEQ ID NO: 630744 - protein, 15 aa, Homo sapiens
  CDR3 for beta chain variable domain of TCR clone 315372 (TRBV19, TRBJ2-2)
CASSPRTGWTGELFF

SEQ ID NO: 630745 - protein, 16 aa, Homo sapiens
  CDR3 for alpha chain variable domain of TCR clone 315373 (TRAV3, TRAJ10)
CAVRDMRAGGGNKLTF

SEQ ID NO: 630746 - protein, 20 aa, Homo sapiens
  CDR3 for beta chain variable domain of TCR clone 315373 (TRBV6-6, TRBJ2-5)
CASSPGGGLRGDPVLRARHA

SEQ ID NO: 630747 - protein, 14 aa, Homo sapiens
  CDR3 for alpha chain variable domain of TCR clone 315374 (TRAV17, TRAJ54)
CATDANQGAQKLGF

SEQ ID NO: 630748 - protein, 12 aa, Homo sapiens
  CDR3 for beta chain variable domain of TCR clone 315374 (TRBV6-3, TRBJ2-1)
CASSVSYNEQFF

SEQ ID NO: 630749 - protein, 15 aa, Homo sapiens
  CDR3 for alpha chain variable domain of TCR clone 315375 (TRAV2, TRAJ15)
CAVEDREQAGTALFF

SEQ ID NO: 630750 - protein, 13 aa, Homo sapiens
  CDR3 for beta chain variable domain of TCR clone 315375 (TRBV10-2, TRBJ2-7)
CASGTSGGYEQYF

SEQ ID NO: 630751 - protein, 14 aa, Homo sapiens
  CDR3 for alpha chain variable domain of TCR clone 315376 (TRAV20, TRAJ29)
CAVQASVGNTPLVF

SEQ ID NO: 630752 - protein, 14 aa, Homo sapiens
  CDR3 for beta chain variable domain of TCR clone 315376 (TRBV11-2, TRBJ2-3)
CASSRLARTDTQYF

SEQ ID NO: 630753 - protein, 14 aa, Homo sapiens
  CDR3 for alpha chain variable domain of TCR clone 315377 (TRAV35, TRAJ33)
CAGSSQDSNYQLIW

SEQ ID NO: 630754 - protein, 15 aa, Homo sapiens
  CDR3 for beta chain variable domain of TCR clone 315377 (TRBV29-1, TRBJ2-7)
CSVEFFGRGSYEQYF

SEQ ID NO: 630755 - protein, 14 aa, Homo sapiens
  CDR3 for alpha chain variable domain of TCR clone 315378 (TRAV25, TRAJ44)
CAVFPTGPASKLTF

SEQ ID NO: 630756 - protein, 14 aa, Homo sapiens
  CDR3 for beta chain variable domain of TCR clone 315378 (TRBV19, TRBJ1-1)
CASTGHRLNTEAFF

SEQ ID NO: 630757 - protein, 14 aa, Homo sapiens
  CDR3 for alpha chain variable domain of TCR clone 315379 (TRAV1-2, TRAJ16)
CAVNRFSDGQKLLF

SEQ ID NO: 630758 - protein, 13 aa, Homo sapiens
  CDR3 for beta chain variable domain of TCR clone 315379 (TRBV10-3, TRBJ1-1)
CATWTGGFAEAFF

SEQ ID NO: 630759 - protein, 14 aa, Homo sapiens
  CDR3 for alpha chain variable domain of TCR clone 315380 (TRAV12-2, TRAJ17)
CAVLFKAAGNKLTF

SEQ ID NO: 630760 - protein, 12 aa, Homo sapiens
  CDR3 for beta chain variable domain of TCR clone 315380 (TRBV7-9, TRBJ2-7)
CASSFGSYEQYF

SEQ ID NO: 630761 - protein, 14 aa, Homo sapiens
  CDR3 for alpha chain variable domain of TCR clone 315381 (TRAV13-1, TRAJ35)
CAASKGGFGNGLHC

SEQ ID NO: 630762 - protein, 15 aa, Homo sapiens
  CDR3 for beta chain variable domain of TCR clone 315381 (TRBV4-1, TRBJ2-1)
CASSQVGLGSDEQFF

SEQ ID NO: 630763 - protein, 14 aa, Homo sapiens
  CDR3 for alpha chain variable domain of TCR clone 315382 (TRAV1-1, TRAJ35)
CAVRSIGFGNVLHC

SEQ ID NO: 630764 - protein, 15 aa, Homo sapiens
  CDR3 for beta chain variable domain of TCR clone 315382 (TRBV28, TRBJ2-1)
CASSIIAGGRSEQFF

SEQ ID NO: 630765 - protein, 14 aa, Homo sapiens
  CDR3 for alpha chain variable domain of TCR clone 315383 (TRAV1-2, TRAJ16)
CAVNRFSDGQKLLF

SEQ ID NO: 630766 - protein, 15 aa, Homo sapiens
  CDR3 for beta chain variable domain of TCR clone 315383 (TRBV3-1, TRBJ2-5)
CASSATLGGPETQYF

SEQ ID NO: 630767 - protein, 16 aa, Homo sapiens
  CDR3 for alpha chain variable domain of TCR clone 315384 (TRAV12-3, TRAJ53)
CAMSPGRGGSNYKLTF

SEQ ID NO: 630768 - protein, 13 aa, Homo sapiens
  CDR3 for beta chain variable domain of TCR clone 315384 (TRBV24-1, TRBJ2-2)
CATTATRTGELFF

SEQ ID NO: 630769 - protein, 15 aa, Homo sapiens
  CDR3 for alpha chain variable domain of TCR clone 315385 (TRAV3, TRAJ5)
CAVRDRKTGRRALTF

SEQ ID NO: 630770 - protein, 12 aa, Homo sapiens
  CDR3 for beta chain variable domain of TCR clone 315385 (TRBV7-8, TRBJ2-7)
CASSIKREEQYF

SEQ ID NO: 630771 - protein, 15 aa, Homo sapiens
  CDR3 for alpha chain variable domain of TCR clone 315386 (TRAV4, TRAJ17)
CLVGDIGAAGNKLTV

SEQ ID NO: 630772 - protein, 14 aa, Homo sapiens
  CDR3 for beta chain variable domain of TCR clone 315386 (TRBV6-3, TRBJ2-7)
CASSYSVRVYEQYF

SEQ ID NO: 630773 - protein, 14 aa, Homo sapiens
  CDR3 for alpha chain variable domain of TCR clone 315387 (TRAV8-3, TRAJ9)
CAVVYNPGGFKHIF

SEQ ID NO: 630774 - protein, 14 aa, Homo sapiens
  CDR3 for beta chain variable domain of TCR clone 315387 (TRBV7-3, TRBJ2-2)
CASSSGGYTGELFF

SEQ ID NO: 630775 - protein, 14 aa, Homo sapiens
  CDR3 for alpha chain variable domain of TCR clone 315388 (TRAV12-1, TRAJ17)
CVMNYKAAGNKLTF

SEQ ID NO: 630776 - protein, 13 aa, Homo sapiens
  CDR3 for beta chain variable domain of TCR clone 315388 (TRBV20-1, TRBJ1-1)
CSARGGGNTEAFF

SEQ ID NO: 630777 - protein, 10 aa, Homo sapiens
  CDR3 for alpha chain variable domain of TCR clone 315389 (TRAV1-2, TRAJ31)
CVSEDARLMF

SEQ ID NO: 630778 - protein, 16 aa, Homo sapiens
  CDR3 for beta chain variable domain of TCR clone 315389 (TRBV28, TRBJ2-7)
CASSPWVATGDLSQCF

SEQ ID NO: 630779 - protein, 15 aa, Homo sapiens
  CDR3 for alpha chain variable domain of TCR clone 315390 (TRAV23/DV6, TRAJ9)
CSKHRGNTGGFKTIF

SEQ ID NO: 630780 - protein, 17 aa, Homo sapiens
  CDR3 for beta chain variable domain of TCR clone 315390 (TRBV13, TRBJ2-3)
CASSLSRVAGGRNTQYF

SEQ ID NO: 630781 - protein, 15 aa, Homo sapiens
  CDR3 for alpha chain variable domain of TCR clone 315391 (TRAV8-1, TRAJ37)
CAVKKGSGNTGKIIF

SEQ ID NO: 630782 - protein, 17 aa, Homo sapiens
  CDR3 for beta chain variable domain of TCR clone 315391 (TRBV12-4, TRBJ1-1)
CASSLSGFRTMNTEAFF

SEQ ID NO: 630783 - protein, 11 aa, Homo sapiens
  CDR3 for alpha chain variable domain of TCR clone 315392 (TRAV17, TRAJ9)
CATTGGFKTIF

SEQ ID NO: 630784 - protein, 16 aa, Homo sapiens
  CDR3 for beta chain variable domain of TCR clone 315392 (TRBV28, TRBJ2-1)
CASSSPEYPRDNEQFF

SEQ ID NO: 630785 - protein, 14 aa, Homo sapiens
  CDR3 for alpha chain variable domain of TCR clone 315393 (TRAV12-3, TRAJ42)
CAMNYGGSQGNLIF

SEQ ID NO: 630786 - protein, 15 aa, Homo sapiens
  CDR3 for beta chain variable domain of TCR clone 315393 (TRBV5-7, TRBJ1-5)
CASCYGKLWDQPQHF

SEQ ID NO: 630787 - protein, 14 aa, Homo sapiens
  CDR3 for alpha chain variable domain of TCR clone 315394 (TRAV16, TRAJ33)
CALSAMDGNYQLIW

SEQ ID NO: 630788 - protein, 12 aa, Homo sapiens
  CDR3 for beta chain variable domain of TCR clone 315394 (TRBV5-1, TRBJ1-2)
CASSQDTYGYTF

SEQ ID NO: 630789 - protein, 15 aa, Homo sapiens
  CDR3 for alpha chain variable domain of TCR clone 315395 (TRAV13-1, TRAJ11)
CAASNRNSGYSTLTF

SEQ ID NO: 630790 - protein, 11 aa, Homo sapiens
  CDR3 for beta chain variable domain of TCR clone 315395 (TRBV20-1, TRBJ2-7)
CSARHSYEQYF

SEQ ID NO: 630791 - protein, 12 aa, Homo sapiens
  CDR3 for alpha chain variable domain of TCR clone 315396 (TRAV8-4, TRAJ31)
CAVSDSNARLMF

SEQ ID NO: 630792 - protein, 17 aa, Homo sapiens
  CDR3 for beta chain variable domain of TCR clone 315396 (TRBV7-9, TRBJ2-7)
CASSWQGRWREAYEQYF

SEQ ID NO: 630793 - protein, 14 aa, Homo sapiens
  CDR3 for alpha chain variable domain of TCR clone 315397 (TRAV2, TRAJ29)
CAGPFQYGNTPLVF

SEQ ID NO: 630794 - protein, 14 aa, Homo sapiens
  CDR3 for beta chain variable domain of TCR clone 315397 (TRBV20-1, TRBJ1-1)
CSAQTRIGGTEAFF

SEQ ID NO: 630795 - protein, 16 aa, Homo sapiens
  CDR3 for alpha chain variable domain of TCR clone 315398 (TRAV26-1, TRAJ32)
CIVRTNSGGATNKPIF

SEQ ID NO: 630796 - protein, 14 aa, Homo sapiens
  CDR3 for beta chain variable domain of TCR clone 315398 (TRBV27, TRBJ1-1)
CASSLLSGLSEAFF

SEQ ID NO: 630797 - protein, 15 aa, Homo sapiens
  CDR3 for alpha chain variable domain of TCR clone 315399 (TRAV29/DV5, TRAJ24)
CAASGATGSWGKFQF

SEQ ID NO: 630798 - protein, 12 aa, Homo sapiens
  CDR3 for beta chain variable domain of TCR clone 315399 (TRBV11-2, TRBJ2-2)
CASSLPTGELFF

SEQ ID NO: 630799 - protein, 12 aa, Homo sapiens
  CDR3 for alpha chain variable domain of TCR clone 315400 (TRAV3, TRAJ20)
CAVRDGDYKLSF

SEQ ID NO: 630800 - protein, 14 aa, Homo sapiens
  CDR3 for beta chain variable domain of TCR clone 315400 (TRBV28, TRBJ1-2)
CASSFGTEAYGYTF

SEQ ID NO: 630801 - protein, 11 aa, Homo sapiens
  CDR3 for alpha chain variable domain of TCR clone 315401 (TRAV38-1, TRAJ43)
CACMKHNSGRH

SEQ ID NO: 630802 - protein, 11 aa, Homo sapiens
  CDR3 for beta chain variable domain of TCR clone 315401 (TRBV7-9, TRBJ2-3)
CASSYTDTQYF

SEQ ID NO: 630803 - protein, 15 aa, Homo sapiens
  CDR3 for alpha chain variable domain of TCR clone 315402 (TRAV17, TRAJ6)
CATDLPSGGSYIPTF

SEQ ID NO: 630804 - protein, 16 aa, Homo sapiens
  CDR3 for beta chain variable domain of TCR clone 315402 (TRBV4-1, TRBJ2-7)
CASSQDPTGYSCEQYF

SEQ ID NO: 630805 - protein, 17 aa, Homo sapiens
  CDR3 for alpha chain variable domain of TCR clone 315403 (TRAV3, TRAJ28)
CAVREAYSGAGSYQLTF

SEQ ID NO: 630806 - protein, 16 aa, Homo sapiens
  CDR3 for beta chain variable domain of TCR clone 315403 (TRBV18, TRBJ2-7)
CASAPGRAGGAYEQYF

SEQ ID NO: 630807 - protein, 12 aa, Homo sapiens
  CDR3 for alpha chain variable domain of TCR clone 315404 (TRAV13-1, TRAJ15)
CAANQAGTALIF

SEQ ID NO: 630808 - protein, 14 aa, Homo sapiens
  CDR3 for beta chain variable domain of TCR clone 315404 (TRBV20-1, TRBJ2-5)
CSARYRGLQETQYF

SEQ ID NO: 630809 - protein, 16 aa, Homo sapiens
  CDR3 for alpha chain variable domain of TCR clone 315405 (TRAV30, TRAJ24)
CGTEIVDADSWGKFQF

SEQ ID NO: 630810 - protein, 15 aa, Homo sapiens
  CDR3 for beta chain variable domain of TCR clone 315405 (TRBV7-9, TRBJ2-5)
CASSRRTGGGETQYF

SEQ ID NO: 630811 - protein, 16 aa, Homo sapiens
  CDR3 for alpha chain variable domain of TCR clone 315406 (TRAV30, TRAJ24)
CGTEIVDADSWGKFQF

SEQ ID NO: 630812 - protein, 15 aa, Homo sapiens
  CDR3 for beta chain variable domain of TCR clone 315406 (TRBV11-2, TRBJ2-7)
CASSLAGGVATEQYF

SEQ ID NO: 630813 - protein, 14 aa, Homo sapiens
  CDR3 for alpha chain variable domain of TCR clone 315407 (TRAV8-4, TRAJ13)
CAVTLSGGYQKVTF

SEQ ID NO: 630814 - protein, 20 aa, Homo sapiens
  CDR3 for beta chain variable domain of TCR clone 315407 (TRBV28, TRBJ2-1)
CASTPIGRSPGLAGGNEQFF

SEQ ID NO: 630815 - protein, 15 aa, Homo sapiens
  CDR3 for alpha chain variable domain of TCR clone 315408 (TRAV23/DV6, TRAJ18)
CAASFRGPTRGRLYF

SEQ ID NO: 630816 - protein, 13 aa, Homo sapiens
  CDR3 for beta chain variable domain of TCR clone 315408 (TRBV28, TRBJ2-7)
CAILDRAGGEQYF

SEQ ID NO: 630817 - protein, 14 aa, Homo sapiens
  CDR3 for alpha chain variable domain of TCR clone 315409 (TRAV16, TRAJ42)
CALLAGGSQGNLIF

SEQ ID NO: 630818 - protein, 15 aa, Homo sapiens
  CDR3 for beta chain variable domain of TCR clone 315409 (TRBV2, TRBJ2-7)
CASGEGLARSYEQYF

SEQ ID NO: 630819 - protein, 10 aa, Homo sapiens
  CDR3 for alpha chain variable domain of TCR clone 315410 (TRAV23/DV6, TRAJ57)
CAASSTLSQG

SEQ ID NO: 630820 - protein, 12 aa, Homo sapiens
  CDR3 for beta chain variable domain of TCR clone 315410 (TRBV14, TRBJ2-7)
CASSSLKGEQYF

SEQ ID NO: 630821 - protein, 13 aa, Homo sapiens
  CDR3 for alpha chain variable domain of TCR clone 315411 (TRAV3, TRAJ21)
CAVREPDFNKFYF

SEQ ID NO: 630822 - protein, 16 aa, Homo sapiens
  CDR3 for beta chain variable domain of TCR clone 315411 (TRBV20-1, TRBJ2-4)
CSARAILAGQGDIQYF

SEQ ID NO: 630823 - protein, 14 aa, Homo sapiens
  CDR3 for alpha chain variable domain of TCR clone 315412 (TRAV35, TRAJ50)
CAGHRKTSYDKVIF

SEQ ID NO: 630824 - protein, 15 aa, Homo sapiens
  CDR3 for beta chain variable domain of TCR clone 315412 (TRBV10-3, TRBJ2-1)
CAISESASGRKEQFF

SEQ ID NO: 630825 - protein, 14 aa, Homo sapiens
  CDR3 for alpha chain variable domain of TCR clone 315413 (TRAV23/DV6, TRAJ49)
CAASTPNTGNQFYF

SEQ ID NO: 630826 - protein, 14 aa, Homo sapiens
  CDR3 for beta chain variable domain of TCR clone 315413 (TRBV18, TRBJ2-3)
RASSETSASDTQYF

SEQ ID NO: 630827 - protein, 14 aa, Homo sapiens
  CDR3 for alpha chain variable domain of TCR clone 315414 (TRAV1-2, TRAJ16)
CAVRSASDGQKLLF

SEQ ID NO: 630828 - protein, 16 aa, Homo sapiens
  CDR3 for beta chain variable domain of TCR clone 315414 (TRBV7-9, TRBJ1-2)
CASSLGFSSGEDGYTF

SEQ ID NO: 630829 - protein, 12 aa, Homo sapiens
  CDR3 for alpha chain variable domain of TCR clone 315415 (TRAV17, TRAJ39)
CATGAAGNMLTF

SEQ ID NO: 630830 - protein, 16 aa, Homo sapiens
  CDR3 for beta chain variable domain of TCR clone 315415 (TRBV2, TRBJ1-2)
CASTRGDSGFNYGYTF

SEQ ID NO: 630831 - protein, 14 aa, Homo sapiens
  CDR3 for alpha chain variable domain of TCR clone 315416 (TRAV2, TRAJ37)
CAVDFTSNTGKLIF

SEQ ID NO: 630832 - protein, 16 aa, Homo sapiens
  CDR3 for beta chain variable domain of TCR clone 315416 (TRBV7-3, TRBJ2-3)
CASSSGVAGGTDTQYF

SEQ ID NO: 630833 - protein, 13 aa, Homo sapiens
  CDR3 for alpha chain variable domain of TCR clone 315417 (TRAV12-1, TRAJ49)
CLVILNTGNQFYF

SEQ ID NO: 630834 - protein, 13 aa, Homo sapiens
  CDR3 for beta chain variable domain of TCR clone 315417 (TRBV10-3, TRBJ2-7)
CASKLAVNYEQYF

SEQ ID NO: 630835 - protein, 17 aa, Homo sapiens
  CDR3 for alpha chain variable domain of TCR clone 315418 (TRAV4, TRAJ18)
CLVGERSVGSTLGRLYF

SEQ ID NO: 630836 - protein, 14 aa, Homo sapiens
  CDR3 for beta chain variable domain of TCR clone 315418 (TRBV4-1, TRBJ2-5)
CASSQGALEETQYF

SEQ ID NO: 630837 - protein, 14 aa, Homo sapiens
  CDR3 for alpha chain variable domain of TCR clone 315419 (TRAV13-1, TRAJ44)
CAAKATGTASKLTF

SEQ ID NO: 630838 - protein, 16 aa, Homo sapiens
  CDR3 for beta chain variable domain of TCR clone 315419 (TRBV7-9, TRBJ1-2)
CASSPGGGAINYGYTF

SEQ ID NO: 630839 - protein, 14 aa, Homo sapiens
  CDR3 for alpha chain variable domain of TCR clone 315420 (TRAV38-1, TRAJ29)
CAFITPSGNTPLVF

SEQ ID NO: 630840 - protein, 15 aa, Homo sapiens
  CDR3 for beta chain variable domain of TCR clone 315420 (TRBV7-2, TRBJ2-1)
CASTHGTGIYNEQFF

SEQ ID NO: 630841 - protein, 15 aa, Homo sapiens
  CDR3 for alpha chain variable domain of TCR clone 315421 (TRAV12-3, TRAJ6)
CAMSATTGGSYILTF

SEQ ID NO: 630842 - protein, 15 aa, Homo sapiens
  CDR3 for beta chain variable domain of TCR clone 315421 (TRBV20-1, TRBJ2-7)
CSARDRVSGMDEQYF

SEQ ID NO: 630843 - protein, 14 aa, Homo sapiens
  CDR3 for alpha chain variable domain of TCR clone 315422 (TRAV12-2, TRAJ13)
CAVNPSGGYQKVTF

SEQ ID NO: 630844 - protein, 13 aa, Homo sapiens
  CDR3 for beta chain variable domain of TCR clone 315422 (TRBV20-1, TRBJ1-1)
CSAPLGGGTEAFF

SEQ ID NO: 630845 - protein, 15 aa, Homo sapiens
  CDR3 for alpha chain variable domain of TCR clone 315423 (TRAV12-3, TRAJ6)
RAMSATTGGSYIPTF

SEQ ID NO: 630846 - protein, 13 aa, Homo sapiens
  CDR3 for beta chain variable domain of TCR clone 315423 (TRBV12-5, TRBJ2-3)
CASGDRQSDTQYF

SEQ ID NO: 630847 - protein, 12 aa, Homo sapiens
  CDR3 for alpha chain variable domain of TCR clone 315424 (TRAV23/DV6, TRAJ16)
CAATGTGQKLLF

SEQ ID NO: 630848 - protein, 17 aa, Homo sapiens
  CDR3 for beta chain variable domain of TCR clone 315424 (TRBV7-3, TRBJ2-3)
RASSLMKRMRGADTQYF

SEQ ID NO: 630849 - protein, 15 aa, Homo sapiens
  CDR3 for alpha chain variable domain of TCR clone 315425 (TRAV8-1, TRAJ6)
CAVNANPGGSYIPTF

SEQ ID NO: 630850 - protein, 10 aa, Homo sapiens
  CDR3 for beta chain variable domain of TCR clone 315425 (TRBV5-6, TRBJ2-7)
ASVQGGEQYF

SEQ ID NO: 630851 - protein, 16 aa, Homo sapiens
  CDR3 for alpha chain variable domain of TCR clone 315426 (TRAV30, TRAJ24)
CGTEIVDADSWGKSQF

SEQ ID NO: 630852 - protein, 15 aa, Homo sapiens
  CDR3 for beta chain variable domain of TCR clone 315426 (TRBV11-2, TRBJ1-6)
CASSLDPWAVSPLHF

SEQ ID NO: 630853 - protein, 12 aa, Homo sapiens
  CDR3 for alpha chain variable domain of TCR clone 315427 (TRAV12-3, TRAJ17)
CAMTLTGNKLTF

SEQ ID NO: 630854 - protein, 12 aa, Homo sapiens
  CDR3 for beta chain variable domain of TCR clone 315427 (TRBV24-1, TRBJ2-1)
CATRDGNNEQFF

SEQ ID NO: 630855 - protein, 18 aa, Homo sapiens
  CDR3 for alpha chain variable domain of TCR clone 315428 (TRAV13-1, TRAJ52)
CAAKNPNAGGTSYGKLTF

SEQ ID NO: 630856 - protein, 14 aa, Homo sapiens
  CDR3 for beta chain variable domain of TCR clone 315428 (TRBV7-3, TRBJ2-1)
RASSLAAGTNEQFF

SEQ ID NO: 630857 - protein, 13 aa, Homo sapiens
  CDR3 for alpha chain variable domain of TCR clone 315429 (TRAV13-1, TRAJ6)
CAASKGGSYIPTF

SEQ ID NO: 630858 - protein, 14 aa, Homo sapiens
  CDR3 for beta chain variable domain of TCR clone 315429 (TRBV7-2, TRBJ2-1)
CARSLGVGYNEQFF

SEQ ID NO: 630859 - protein, 23 aa, Homo sapiens
  CDR3 for alpha chain variable domain of TCR clone 315430 (TRAV26-1, TRAJ38)
CIADNAGNNHIQNPDPAVYQLRD

SEQ ID NO: 630860 - protein, 13 aa, Homo sapiens
  CDR3 for beta chain variable domain of TCR clone 315430 (TRBV7-2, TRBJ2-1)
CASSLGVYNEQFF

SEQ ID NO: 630861 - protein, 16 aa, Homo sapiens
  CDR3 for alpha chain variable domain of TCR clone 315431 (TRAV3, TRAJ10)
CAVRDMNAGGGNKLTF

SEQ ID NO: 630862 - protein, 15 aa, Homo sapiens
  CDR3 for beta chain variable domain of TCR clone 315431 (TRBV5-1, TRBJ1-2)
CASSLGSVTSYGYTV

SEQ ID NO: 630863 - protein, 14 aa, Homo sapiens
  CDR3 for alpha chain variable domain of TCR clone 315432 (TRAV2, TRAJ9)
CAVGDRSGGFKTIF

SEQ ID NO: 630864 - protein, 14 aa, Homo sapiens
  CDR3 for beta chain variable domain of TCR clone 315432 (TRBV25-1, TRBJ1-1)
CASTHLGGNTEAFF

SEQ ID NO: 630865 - protein, 13 aa, Homo sapiens
  CDR3 for alpha chain variable domain of TCR clone 315433 (TRAV21, TRAJ57)
CAVTQGGSEKLVF

SEQ ID NO: 630866 - protein, 15 aa, Homo sapiens
  CDR3 for beta chain variable domain of TCR clone 315433 (TRBV4-1, TRBJ2-7)
CASSQDRNRDYEQYF

SEQ ID NO: 630867 - protein, 12 aa, Homo sapiens
  CDR3 for alpha chain variable domain of TCR clone 315434 (TRAV27, TRAJ35)
CAGADFGNVLHC

SEQ ID NO: 630868 - protein, 15 aa, Homo sapiens
  CDR3 for beta chain variable domain of TCR clone 315434 (TRBV20-1, TRBJ2-7)
CSARDRVSGMDEHYF

SEQ ID NO: 630869 - protein, 14 aa, Homo sapiens
  CDR3 for alpha chain variable domain of TCR clone 315435 (TRAV1-2, TRAJ8)
CVVREDTGFQKLVF

SEQ ID NO: 630870 - protein, 15 aa, Homo sapiens
  CDR3 for beta chain variable domain of TCR clone 315435 (TRBV20-1, TRBJ2-7)
CSARDRVSGMDEQYF

SEQ ID NO: 630871 - protein, 13 aa, Homo sapiens
  CDR3 for alpha chain variable domain of TCR clone 315436 (TRAV8-3, TRAJ47)
CAVSMEYGNNLVF

SEQ ID NO: 630872 - protein, 14 aa, Homo sapiens
  CDR3 for beta chain variable domain of TCR clone 315436 (TRBV2, TRBJ1-5)
CASSGTGFNQPQHF

SEQ ID NO: 630873 - protein, 14 aa, Homo sapiens
  CDR3 for alpha chain variable domain of TCR clone 315437 (TRAV12-3, TRAJ47)
CAMSVREYGNKLVF

SEQ ID NO: 630874 - protein, 13 aa, Homo sapiens
  CDR3 for beta chain variable domain of TCR clone 315437 (TRBV20-1, TRBJ2-7)
CSASPFSSYEQYF

SEQ ID NO: 630875 - protein, 13 aa, Homo sapiens
  CDR3 for alpha chain variable domain of TCR clone 315438 (TRAV36/DV7, TRAJ38)
CVANAGNNRKLNW

SEQ ID NO: 630876 - protein, 14 aa, Homo sapiens
  CDR3 for beta chain variable domain of TCR clone 315438 (TRBV19, TRBJ2-1)
CASPTFVLSGEQFF

SEQ ID NO: 630877 - protein, 15 aa, Homo sapiens
  CDR3 for alpha chain variable domain of TCR clone 315439 (TRAV23/DV6, TRAJ18)
CASSFRGSTLGRLYF

SEQ ID NO: 630878 - protein, 13 aa, Homo sapiens
  CDR3 for beta chain variable domain of TCR clone 315439 (TRBV28, TRBJ2-7)
CAILDRAGGEQYF

SEQ ID NO: 630879 - protein, 13 aa, Homo sapiens
  CDR3 for alpha chain variable domain of TCR clone 315440 (TRAV12-1, TRAJ6)
CVLYPGGSYIPTF

SEQ ID NO: 630880 - protein, 13 aa, Homo sapiens
  CDR3 for beta chain variable domain of TCR clone 315440 (TRBV4-2, TRBJ1-1)
CASSQAGNTEAFF

SEQ ID NO: 630881 - protein, 16 aa, Homo sapiens
  CDR3 for alpha chain variable domain of TCR clone 315441 (TRAV3, TRAJ37)
CAVGGKGSGNTGKLIF

SEQ ID NO: 630882 - protein, 13 aa, Homo sapiens
  CDR3 for beta chain variable domain of TCR clone 315441 (TRBV10-3, TRBJ1-2)
CAISERDSYGYTF

SEQ ID NO: 630883 - protein, 18 aa, Homo sapiens
  CDR3 for alpha chain variable domain of TCR clone 315442 (TRAV12-2, )
CAVEDIQNPDPAVYQLRD

SEQ ID NO: 630884 - protein, 18 aa, Homo sapiens
  CDR3 for beta chain variable domain of TCR clone 315442 (TRBV11-2, TRBJ2-3)
CSSSLGGAARGAPNTQYF

SEQ ID NO: 630885 - protein, 14 aa, Homo sapiens
  CDR3 for alpha chain variable domain of TCR clone 315443 (TRAV12-2, TRAJ40)
CAVKIPSGTYTYIF

SEQ ID NO: 630886 - protein, 12 aa, Homo sapiens
  CDR3 for beta chain variable domain of TCR clone 315443 (TRBV11-2, TRBJ2-1)
CASSPGNNEQFF

SEQ ID NO: 630887 - protein, 15 aa, Homo sapiens
  CDR3 for alpha chain variable domain of TCR clone 315444 (TRAV26-1, TRAJ56)
CIVRGDNGANSKLTF

SEQ ID NO: 630888 - protein, 14 aa, Homo sapiens
  CDR3 for beta chain variable domain of TCR clone 315444 (TRBV5-1, TRBJ2-7)
CASSRGESLYEQYF

SEQ ID NO: 630889 - protein, 14 aa, Homo sapiens
  CDR3 for alpha chain variable domain of TCR clone 315445 (TRAV2, TRAJ39)
LTTVHNNAGNMLTF

SEQ ID NO: 630890 - protein, 16 aa, Homo sapiens
  CDR3 for beta chain variable domain of TCR clone 315445 (TRBV24-1, TRBJ2-3)
CATSGYRDRDTDTQYF

SEQ ID NO: 630891 - protein, 13 aa, Homo sapiens
  CDR3 for alpha chain variable domain of TCR clone 315446 (TRAV8-6, TRAJ49)
CAVITNTGNQFYF

SEQ ID NO: 630892 - protein, 14 aa, Homo sapiens
  CDR3 for beta chain variable domain of TCR clone 315446 (TRBV19, TRBJ2-1)
CASPTVVLSGEQFF

SEQ ID NO: 630893 - protein, 15 aa, Homo sapiens
  CDR3 for alpha chain variable domain of TCR clone 315447 (TRAV3, TRAJ40)
CAVRDGPGGTYNYIF

SEQ ID NO: 630894 - protein, 16 aa, Homo sapiens
  CDR3 for beta chain variable domain of TCR clone 315447 (TRBV5-1, TRBJ1-1)
CASSSGGNSLNTEAFF

SEQ ID NO: 630895 - protein, 13 aa, Homo sapiens
  CDR3 for alpha chain variable domain of TCR clone 315448 (TRAV27, TRAJ41)
CAGEGNSGYALNF

SEQ ID NO: 630896 - protein, 14 aa, Homo sapiens
  CDR3 for beta chain variable domain of TCR clone 315448 (TRBV7-2, TRBJ1-1)
CSSSVLTGTTEAFF

SEQ ID NO: 630897 - protein, 10 aa, Homo sapiens
  CDR3 for alpha chain variable domain of TCR clone 315449 (TRAV12-3, TRAJ50)
CAMSAMGNLL

SEQ ID NO: 630898 - protein, 15 aa, Homo sapiens
  CDR3 for beta chain variable domain of TCR clone 315449 (TRBV5-1, TRBJ2-3)
CASSVTSGSTDTQYF

SEQ ID NO: 630899 - protein, 13 aa, Homo sapiens
  CDR3 for alpha chain variable domain of TCR clone 315450 (TRAV21, TRAJ27)
CAARPGNAGKSPF

SEQ ID NO: 630900 - protein, 14 aa, Homo sapiens
  CDR3 for beta chain variable domain of TCR clone 315450 (TRBV7-6, TRBJ2-3)
CASGLGTVTDTQYF

SEQ ID NO: 630901 - protein, 15 aa, Homo sapiens
  CDR3 for alpha chain variable domain of TCR clone 315451 (TRAV21, TRAJ53)
CAVRQSGGSNYKMTF

SEQ ID NO: 630902 - protein, 14 aa, Homo sapiens
  CDR3 for beta chain variable domain of TCR clone 315451 (TRBV18, TRBJ2-5)
CASSPGVSQETQYF

SEQ ID NO: 630903 - protein, 12 aa, Homo sapiens
  CDR3 for alpha chain variable domain of TCR clone 315452 (TRAV8-3, TRAJ36)
CAVEAGANNLFF

SEQ ID NO: 630904 - protein, 12 aa, Homo sapiens
  CDR3 for beta chain variable domain of TCR clone 315452 (TRBV11-2, TRBJ2-2)
CASSLGGGELFF

SEQ ID NO: 630905 - protein, 12 aa, Homo sapiens
  CDR3 for alpha chain variable domain of TCR clone 315453 (TRAV17, TRAJ36)
CATLTGAINLFF

SEQ ID NO: 630906 - protein, 15 aa, Homo sapiens
  CDR3 for beta chain variable domain of TCR clone 315453 (TRBV19, TRBJ1-2)
CASSTKTDTNYGYTF

SEQ ID NO: 630907 - protein, 12 aa, Homo sapiens
  CDR3 for alpha chain variable domain of TCR clone 315454 (TRAV8-3, TRAJ26)
CAGDNYGQNFVF

SEQ ID NO: 630908 - protein, 15 aa, Homo sapiens
  CDR3 for beta chain variable domain of TCR clone 315454 (TRBV28, TRBJ2-1)
CASRKRGALRNEQFF

SEQ ID NO: 630909 - protein, 12 aa, Homo sapiens
  CDR3 for alpha chain variable domain of TCR clone 315455 (TRAV13-2, TRAJ23)
CAESHGGGKLIF

SEQ ID NO: 630910 - protein, 16 aa, Homo sapiens
  CDR3 for beta chain variable domain of TCR clone 315455 (TRBV20-1, TRBJ1-4)
CSAPGQGLLTNEKLFF

SEQ ID NO: 630911 - protein, 14 aa, Homo sapiens
  CDR3 for alpha chain variable domain of TCR clone 315456 (TRAV13-1, TRAJ24)
CAASRTDSWGTLQF

SEQ ID NO: 630912 - protein, 15 aa, Homo sapiens
  CDR3 for beta chain variable domain of TCR clone 315456 (TRBV7-9, TRBJ1-5)
CASSQGHQPNQPQHF

SEQ ID NO: 630913 - protein, 19 aa, Homo sapiens
  CDR3 for alpha chain variable domain of TCR clone 315457 (TRAV26-1, TRAJ52)
CIVRAHRNAGGTSYGRLTF

SEQ ID NO: 630914 - protein, 14 aa, Homo sapiens
  CDR3 for beta chain variable domain of TCR clone 315457 (TRBV4-1, TRBJ2-2)
CASSQAVNTGELFF

SEQ ID NO: 630915 - protein, 23 aa, Homo sapiens
  CDR3 for alpha chain variable domain of TCR clone 315458 (TRAV26-1, TRAJ38)
CVADNAGNNHIQNPDPAVYQLRD

SEQ ID NO: 630916 - protein, 16 aa, Homo sapiens
  CDR3 for beta chain variable domain of TCR clone 315458 (TRBV7-9, TRBJ1-2)
CASSLGFSSGEDGYTF

SEQ ID NO: 630917 - protein, 10 aa, Homo sapiens
  CDR3 for alpha chain variable domain of TCR clone 315459 (TRAV4, TRAJ15)
CLPFWTALIF

SEQ ID NO: 630918 - protein, 15 aa, Homo sapiens
  CDR3 for beta chain variable domain of TCR clone 315459 (TRBV5-1, TRBJ2-1)
CASRFSGTGYNEQFF

SEQ ID NO: 630919 - protein, 12 aa, Homo sapiens
  CDR3 for alpha chain variable domain of TCR clone 315460 (TRAV35, TRAJ39)
LAPNNAGNMLTF

SEQ ID NO: 630920 - protein, 13 aa, Homo sapiens
  CDR3 for beta chain variable domain of TCR clone 315460 (TRBV7-9, TRBJ1-2)
CASSLKQNYGYTF

SEQ ID NO: 630921 - protein, 12 aa, Homo sapiens
  CDR3 for alpha chain variable domain of TCR clone 315461 (TRAV8-3, TRAJ20)
CAVDAKDYKLSF

SEQ ID NO: 630922 - protein, 16 aa, Homo sapiens
  CDR3 for beta chain variable domain of TCR clone 315461 (TRBV19, TRBJ2-2)
CASRSPGTGATGELFF

SEQ ID NO: 630923 - protein, 12 aa, Homo sapiens
  CDR3 for alpha chain variable domain of TCR clone 315462 (TRAV1-1, TRAJ39)
CAVPVVGNMLTL

SEQ ID NO: 630924 - protein, 15 aa, Homo sapiens
  CDR3 for beta chain variable domain of TCR clone 315462 (TRBV19, TRBJ1-6)
GASSTQGAVGSPLHF

SEQ ID NO: 630925 - protein, 14 aa, Homo sapiens
  CDR3 for alpha chain variable domain of TCR clone 315463 (TRAV12-2, TRAJ9)
RAVNMEGGGFKTIF

SEQ ID NO: 630926 - protein, 14 aa, Homo sapiens
  CDR3 for beta chain variable domain of TCR clone 315463 (TRBV2, TRBJ2-5)
CASSEVLAQETQYF

SEQ ID NO: 630927 - protein, 13 aa, Homo sapiens
  CDR3 for alpha chain variable domain of TCR clone 315464 (TRAV21, TRAJ27)
CAARPGNAGKSTS

SEQ ID NO: 630928 - protein, 13 aa, Homo sapiens
  CDR3 for beta chain variable domain of TCR clone 315464 (TRBV18, TRBJ2-7)
CASQSGGGYEQYF

SEQ ID NO: 630929 - protein, 22 aa, Homo sapiens
  CDR3 for alpha chain variable domain of TCR clone 315465 (TRAV8-2, TRAJ45)
HLTKPSAHMSDAAEYSSDGLTF

SEQ ID NO: 630930 - protein, 13 aa, Homo sapiens
  CDR3 for beta chain variable domain of TCR clone 315465 (TRBV7-3, TRBJ2-1)
CASSPVAYNEQFF

SEQ ID NO: 630931 - protein, 15 aa, Homo sapiens
  CDR3 for alpha chain variable domain of TCR clone 315466 (TRAV3, TRAJ22)
CAVRDRGGSGRQLAF

SEQ ID NO: 630932 - protein, 12 aa, Homo sapiens
  CDR3 for beta chain variable domain of TCR clone 315466 (TRBV12-4, TRBJ1-2)
CASSFIWLHLRF

SEQ ID NO: 630933 - protein, 14 aa, Homo sapiens
  CDR3 for alpha chain variable domain of TCR clone 315467 (TRAV12-2, TRAJ5)
CAVNRSTGRRALTF

SEQ ID NO: 630934 - protein, 12 aa, Homo sapiens
  CDR3 for beta chain variable domain of TCR clone 315467 (TRBV19, TRBJ1-5)
CASTIAQQPQHF

SEQ ID NO: 630935 - protein, 12 aa, Homo sapiens
  CDR3 for alpha chain variable domain of TCR clone 315468 (TRAV35, TRAJ28)
GVEGAGSYQLTF

SEQ ID NO: 630936 - protein, 15 aa, Homo sapiens
  CDR3 for beta chain variable domain of TCR clone 315468 (TRBV5-1, TRBJ2-1)
GASSPPRAPYNEQFF

SEQ ID NO: 630937 - protein, 14 aa, Homo sapiens
  CDR3 for alpha chain variable domain of TCR clone 315469 (TRAV8-6, TRAJ48)
CAVRTNFGNEKLTF

SEQ ID NO: 630938 - protein, 15 aa, Homo sapiens
  CDR3 for beta chain variable domain of TCR clone 315469 (TRBV11-2, TRBJ1-6)
CASSLDPWAVSPLHF

SEQ ID NO: 630939 - protein, 14 aa, Homo sapiens
  CDR3 for alpha chain variable domain of TCR clone 315470 (TRAV16, TRAJ33)
FPLSAMDSNYQLIW

SEQ ID NO: 630940 - protein, 12 aa, Homo sapiens
  CDR3 for beta chain variable domain of TCR clone 315470 (TRBV5-1, TRBJ1-2)
CASSQDTYGYTF

SEQ ID NO: 630941 - protein, 14 aa, Homo sapiens
  CDR3 for alpha chain variable domain of TCR clone 315471 (TRAV13-1, TRAJ35)
CAASKVGFGNVLHC

SEQ ID NO: 630942 - protein, 13 aa, Homo sapiens
  CDR3 for beta chain variable domain of TCR clone 315471 (TRBV7-3, TRBJ1-1)
CASSQDWRAEAFF

SEQ ID NO: 630943 - protein, 10 aa, Homo sapiens
  CDR3 for alpha chain variable domain of TCR clone 315472 (TRAV23/DV6, TRAJ57)
CAASSTLSQG

SEQ ID NO: 630944 - protein, 14 aa, Homo sapiens
  CDR3 for beta chain variable domain of TCR clone 315472 (TRBV5-1, TRBJ2-1)
CASSALWAGNEQFF

SEQ ID NO: 630945 - protein, 14 aa, Homo sapiens
  CDR3 for alpha chain variable domain of TCR clone 315473 (TRAV12-1, TRAJ17)
CVVNYKAAGNKLTF

SEQ ID NO: 630946 - protein, 15 aa, Homo sapiens
  CDR3 for beta chain variable domain of TCR clone 315473 (TRBV28, TRBJ2-1)
CASSIIAGGRSEQFF

SEQ ID NO: 630947 - protein, 13 aa, Homo sapiens
  CDR3 for alpha chain variable domain of TCR clone 315474 (TRAV2, TRAJ15)
CAVASQAGTALIF

SEQ ID NO: 630948 - protein, 16 aa, Homo sapiens
  CDR3 for beta chain variable domain of TCR clone 315474 (TRBV20-1, TRBJ1-4)
CSAPGQCLLTNEKLFC

SEQ ID NO: 630949 - protein, 14 aa, Homo sapiens
  CDR3 for alpha chain variable domain of TCR clone 315475 (TRAV27, TRAJ37)
CAGERSSNTGKLIY

SEQ ID NO: 630950 - protein, 15 aa, Homo sapiens
  CDR3 for beta chain variable domain of TCR clone 315475 (TRBV11-3, TRBJ1-6)
CASSLDWGANSPLHF

SEQ ID NO: 630951 - protein, 13 aa, Homo sapiens
  CDR3 for alpha chain variable domain of TCR clone 315476 (TRAV29/DV5, TRAJ31)
CAASRNNNARLML

SEQ ID NO: 630952 - protein, 15 aa, Homo sapiens
  CDR3 for beta chain variable domain of TCR clone 315476 (TRBV7-2, TRBJ2-1)
CASSSGLAGGNEQFF

SEQ ID NO: 630953 - protein, 13 aa, Homo sapiens
  CDR3 for alpha chain variable domain of TCR clone 315477 (TRAV1-1, TRAJ33)
CASHMDSNYQLIC

SEQ ID NO: 630954 - protein, 18 aa, Homo sapiens
  CDR3 for beta chain variable domain of TCR clone 315477 (TRBV20-1, TRBJ2-2)
CSARVQTAHPSGTGELFF

SEQ ID NO: 630955 - protein, 14 aa, Homo sapiens
  CDR3 for alpha chain variable domain of TCR clone 315478 (TRAV29/DV5, TRAJ4)
CAATVLGGYNKLLF

SEQ ID NO: 630956 - protein, 17 aa, Homo sapiens
  CDR3 for beta chain variable domain of TCR clone 315478 (TRBV11-2, TRBJ2-1)
CASSLYPPGVEYNEQFF

SEQ ID NO: 630957 - protein, 14 aa, Homo sapiens
  CDR3 for alpha chain variable domain of TCR clone 315479 (TRAV29/DV5, TRAJ49)
CAASLSNTGNQFFF

SEQ ID NO: 630958 - protein, 15 aa, Homo sapiens
  CDR3 for beta chain variable domain of TCR clone 315479 (TRBV20-1, TRBJ2-1)
CSARGIGGTYNEQFF

SEQ ID NO: 630959 - protein, 14 aa, Homo sapiens
  CDR3 for alpha chain variable domain of TCR clone 315480 (TRAV23/DV6, TRAJ22)
CAASVSGSARQLTF

SEQ ID NO: 630960 - protein, 16 aa, Homo sapiens
  CDR3 for beta chain variable domain of TCR clone 315480 (TRBV12-5, TRBJ2-5)
CASGPRTSGNQETQYF

SEQ ID NO: 630961 - protein, 14 aa, Homo sapiens
  CDR3 for alpha chain variable domain of TCR clone 315481 (TRAV1-2, TRAJ6)
CAVSLSGGSYIPTF

SEQ ID NO: 630962 - protein, 14 aa, Homo sapiens
  CDR3 for beta chain variable domain of TCR clone 315481 (TRBV7-2, TRBJ1-2)
CASSQTGSTYGYTF

SEQ ID NO: 630963 - protein, 11 aa, Homo sapiens
  CDR3 for alpha chain variable domain of TCR clone 315482 (TRAV26-1, TRAJ27)
CIDPNSGKSTF

SEQ ID NO: 630964 - protein, 18 aa, Homo sapiens
  CDR3 for beta chain variable domain of TCR clone 315482 (TRBV7-9, TRBJ2-6)
CASSFPGAGISGANVLTF

SEQ ID NO: 630965 - protein, 13 aa, Homo sapiens
  CDR3 for alpha chain variable domain of TCR clone 315483 (TRAV3, TRAJ13)
CAVRDGGYQKVTF

SEQ ID NO: 630966 - protein, 13 aa, Homo sapiens
  CDR3 for beta chain variable domain of TCR clone 315483 (TRBV15, TRBJ2-2)
CHQQWVEHRGAVF

SEQ ID NO: 630967 - protein, 16 aa, Homo sapiens
  CDR3 for alpha chain variable domain of TCR clone 315484 (TRAV3, TRAJ5)
CAVRNLMDTGRRALPF

SEQ ID NO: 630968 - protein, 16 aa, Homo sapiens
  CDR3 for beta chain variable domain of TCR clone 315484 (TRBV4-2, TRBJ2-7)
CASSQEGLANSYEQYF

SEQ ID NO: 630969 - protein, 14 aa, Homo sapiens
  CDR3 for alpha chain variable domain of TCR clone 315485 (TRAV14/DV4, TRAJ7)
CAMREAYGNNRLAF

SEQ ID NO: 630970 - protein, 15 aa, Homo sapiens
  CDR3 for beta chain variable domain of TCR clone 315485 (TRBV19, TRBJ2-1)
CASSINRGPSHEQFF

SEQ ID NO: 630971 - protein, 18 aa, Homo sapiens
  CDR3 for alpha chain variable domain of TCR clone 315486 (TRAV21, TRAJ52)
CAVRPSPAGGTSYGELTF

SEQ ID NO: 630972 - protein, 17 aa, Homo sapiens
  CDR3 for beta chain variable domain of TCR clone 315486 (TRBV25-1, TRBJ2-1)
CASSAYGQGRGVYEQFF

SEQ ID NO: 630973 - protein, 18 aa, Homo sapiens
  CDR3 for alpha chain variable domain of TCR clone 315487 (TRAV21, TRAJ52)
CAVRPSPAGGTSYGNLTL

SEQ ID NO: 630974 - protein, 15 aa, Homo sapiens
  CDR3 for beta chain variable domain of TCR clone 315487 (TRBV7-3, TRBJ2-2)
CASSLTGQGTGELFF

SEQ ID NO: 630975 - protein, 14 aa, Homo sapiens
  CDR3 for alpha chain variable domain of TCR clone 315488 (TRAV1-2, TRAJ16)
CAVNRFSDGQKLLL

SEQ ID NO: 630976 - protein, 11 aa, Homo sapiens
  CDR3 for beta chain variable domain of TCR clone 315488 (TRBV7-8, TRBJ2-7)
CASSLSREQYF

SEQ ID NO: 630977 - protein, 14 aa, Homo sapiens
  CDR3 for alpha chain variable domain of TCR clone 315489 (TRAV1-1, TRAJ27)
CAGIYNTNAGKSTF

SEQ ID NO: 630978 - protein, 14 aa, Homo sapiens
  CDR3 for beta chain variable domain of TCR clone 315489 (TRBV25-1, TRBJ1-1)
CASTHLGGNTEAFF

SEQ ID NO: 630979 - protein, 13 aa, Homo sapiens
  CDR3 for alpha chain variable domain of TCR clone 315490 (TRAV12-2, TRAJ13)
CAVTAGGYQKVTF

SEQ ID NO: 630980 - protein, 11 aa, Homo sapiens
  CDR3 for beta chain variable domain of TCR clone 315490 (TRBV10-3, TRBJ2-7)
CAISEGLEQYF

SEQ ID NO: 630981 - protein, 17 aa, Homo sapiens
  CDR3 for alpha chain variable domain of TCR clone 315491 (TRAV13-1, )
CAANIQNPDPAVYQLRD

SEQ ID NO: 630982 - protein, 14 aa, Homo sapiens
  CDR3 for beta chain variable domain of TCR clone 315491 (TRBV15, TRBJ2-2)
CATSSAWNTGELFF

SEQ ID NO: 630983 - protein, 14 aa, Homo sapiens
  CDR3 for alpha chain variable domain of TCR clone 315492 (TRAV3, TRAJ33)
CAVRDMGSNYQLIW

SEQ ID NO: 630984 - protein, 13 aa, Homo sapiens
  CDR3 for beta chain variable domain of TCR clone 315492 (TRBV18, TRBJ2-2)
CASSPTRGGELFF

SEQ ID NO: 630985 - protein, 12 aa, Homo sapiens
  CDR3 for alpha chain variable domain of TCR clone 315493 (TRAV3, TRAJ43)
CAVRDPNNDMRF

SEQ ID NO: 630986 - protein, 15 aa, Homo sapiens
  CDR3 for beta chain variable domain of TCR clone 315493 (TRBV4-3, TRBJ2-7)
CASGQGDWGDYEQYF

SEQ ID NO: 630987 - protein, 13 aa, Homo sapiens
  CDR3 for alpha chain variable domain of TCR clone 315494 (TRAV13-1, TRAJ5)
CAASNTGRRALTF

SEQ ID NO: 630988 - protein, 12 aa, Homo sapiens
  CDR3 for beta chain variable domain of TCR clone 315494 (TRBV28, TRBJ2-3)
CASRLYRDTQYF

SEQ ID NO: 630989 - protein, 14 aa, Homo sapiens
  CDR3 for alpha chain variable domain of TCR clone 315495 (TRAV12-2, TRAJ22)
CAVRFSGSARQLNF

SEQ ID NO: 630990 - protein, 13 aa, Homo sapiens
  CDR3 for beta chain variable domain of TCR clone 315495 (TRBV6-1, TRBJ2-1)
CASTGTGLNEQFF

SEQ ID NO: 630991 - protein, 16 aa, Homo sapiens
  CDR3 for alpha chain variable domain of TCR clone 315496 (TRAV30, TRAJ24)
CGTEIVDADSWGNFQF

SEQ ID NO: 630992 - protein, 14 aa, Homo sapiens
  CDR3 for beta chain variable domain of TCR clone 315496 (TRBV13, TRBJ2-1)
CASSPRPRYNEQFF

SEQ ID NO: 630993 - protein, 13 aa, Homo sapiens
  CDR3 for alpha chain variable domain of TCR clone 315497 (TRAV13-1, TRAJ37)
CAARSGNTGKLIF

SEQ ID NO: 630994 - protein, 14 aa, Homo sapiens
  CDR3 for beta chain variable domain of TCR clone 315497 (TRBV7-2, TRBJ2-3)
CASRRGLAADTQYF

SEQ ID NO: 630995 - protein, 17 aa, Homo sapiens
  CDR3 for alpha chain variable domain of TCR clone 315498 (TRAV4, TRAJ13)
CLVGVQGSSGGYQKVTF

SEQ ID NO: 630996 - protein, 13 aa, Homo sapiens
  CDR3 for beta chain variable domain of TCR clone 315498 (TRBV7-3, TRBJ1-1)
CASSLTQGTEAFF

SEQ ID NO: 630997 - protein, 15 aa, Homo sapiens
  CDR3 for alpha chain variable domain of TCR clone 315499 (TRAV2, TRAJ9)
CAVEDRGTGGFKTIF

SEQ ID NO: 630998 - protein, 16 aa, Homo sapiens
  CDR3 for beta chain variable domain of TCR clone 315499 (TRBV3-1, TRBJ2-3)
CASSQGTGYGTDTQYF

SEQ ID NO: 630999 - protein, 12 aa, Homo sapiens
  CDR3 for alpha chain variable domain of TCR clone 315500 (TRAV21, TRAJ39)
CAADNAGNMLTF

SEQ ID NO: 631000 - protein, 13 aa, Homo sapiens
  CDR3 for beta chain variable domain of TCR clone 315500 (TRBV7-3, TRBJ2-1)
CASSLDSYNEQFF

SEQ ID NO: 631001 - protein, 14 aa, Homo sapiens
  CDR3 for alpha chain variable domain of TCR clone 315501 (TRAV12-2, TRAJ17)
CAVLFKAAGNKLTF

SEQ ID NO: 631002 - protein, 13 aa, Homo sapiens
  CDR3 for beta chain variable domain of TCR clone 315501 (TRBV19, TRBJ1-2)
CASSQGQVYGYIF

SEQ ID NO: 631003 - protein, 14 aa, Homo sapiens
  CDR3 for alpha chain variable domain of TCR clone 315502 (TRAV9-2, TRAJ15)
GALSESQAGTALIF

SEQ ID NO: 631004 - protein, 15 aa, Homo sapiens
  CDR3 for beta chain variable domain of TCR clone 315502 (TRBV10-1, TRBJ2-3)
CASSATSGGFDTQYF

SEQ ID NO: 631005 - protein, 13 aa, Homo sapiens
  CDR3 for alpha chain variable domain of TCR clone 315503 (TRAV21, TRAJ27)
CAARPGNAGKSTF

SEQ ID NO: 631006 - protein, 14 aa, Homo sapiens
  CDR3 for beta chain variable domain of TCR clone 315503 (TRBV11-2, TRBJ2-5)
CASRRTGGIETQYF

SEQ ID NO: 631007 - protein, 15 aa, Homo sapiens
  CDR3 for alpha chain variable domain of TCR clone 315504 (TRAV26-1, TRAJ42)
FIVRVKGGSQGNLIF

SEQ ID NO: 631008 - protein, 14 aa, Homo sapiens
  CDR3 for beta chain variable domain of TCR clone 315504 (TRBV19, TRBJ2-2)
CATTGHANAGELFF

SEQ ID NO: 631009 - protein, 13 aa, Homo sapiens
  CDR3 for alpha chain variable domain of TCR clone 315505 (TRAV21, TRAJ26)
RAVLDNYSQNFVF

SEQ ID NO: 631010 - protein, 16 aa, Homo sapiens
  CDR3 for beta chain variable domain of TCR clone 315505 (TRBV29-1, TRBJ2-2)
CSVETRASGNTGELFF

SEQ ID NO: 631011 - protein, 14 aa, Homo sapiens
  CDR3 for alpha chain variable domain of TCR clone 315506 (TRAV12-3, TRAJ30)
CAMSLLNRDDKIIF

SEQ ID NO: 631012 - protein, 16 aa, Homo sapiens
  CDR3 for beta chain variable domain of TCR clone 315506 (TRBV9, TRBJ2-2)
CASSAMGKGNTGELFF

SEQ ID NO: 631013 - protein, 14 aa, Homo sapiens
  CDR3 for alpha chain variable domain of TCR clone 315507 (TRAV1-2, TRAJ16)
CTVRSASDGQKLLF

SEQ ID NO: 631014 - protein, 17 aa, Homo sapiens
  CDR3 for beta chain variable domain of TCR clone 315507 (TRBV7-3, TRBJ2-3)
CASSLMKRMRGADTQYF

SEQ ID NO: 631015 - protein, 12 aa, Homo sapiens
  CDR3 for alpha chain variable domain of TCR clone 315508 (TRAV21, TRAJ23)
CAVMRQGGKLIF

SEQ ID NO: 631016 - protein, 14 aa, Homo sapiens
  CDR3 for beta chain variable domain of TCR clone 315508 (TRBV20-1, TRBJ1-1)
CSAQTRIGGTEAFF

SEQ ID NO: 631017 - protein, 15 aa, Homo sapiens
  CDR3 for alpha chain variable domain of TCR clone 315509 (TRAV10, TRAJ38)
CVVRINAGNNRKLIW

SEQ ID NO: 631018 - protein, 15 aa, Homo sapiens
  CDR3 for beta chain variable domain of TCR clone 315509 (TRBV7-9, TRBJ1-4)
CASSARTGGNEKLFF

SEQ ID NO: 631019 - protein, 16 aa, Homo sapiens
  CDR3 for alpha chain variable domain of TCR clone 315510 (TRAV30, TRAJ24)
CGTEIVDADSWGKFQF

SEQ ID NO: 631020 - protein, 14 aa, Homo sapiens
  CDR3 for beta chain variable domain of TCR clone 315510 (TRBV7-9, TRBJ1-6)
CASKPGTVNSPLHF

SEQ ID NO: 631021 - protein, 13 aa, Homo sapiens
  CDR3 for alpha chain variable domain of TCR clone 315511 (TRAV2, TRAJ40)
FAVVTSGAYKYIF

SEQ ID NO: 631022 - protein, 14 aa, Homo sapiens
  CDR3 for beta chain variable domain of TCR clone 315511 (TRBV19, TRBJ2-1)
CASPTFVLSGEQFF

SEQ ID NO: 631023 - protein, 14 aa, Homo sapiens
  CDR3 for alpha chain variable domain of TCR clone 315512 (TRAV13-1, TRAJ26)
CAAPKGPDGQNFVF

SEQ ID NO: 631024 - protein, 14 aa, Homo sapiens
  CDR3 for beta chain variable domain of TCR clone 315512 (TRBV12-4, TRBJ1-1)
CASSLGTGGTEAFF

SEQ ID NO: 631025 - protein, 13 aa, Homo sapiens
  CDR3 for alpha chain variable domain of TCR clone 315513 (TRAV35, TRAJ57)
CAGSQGGSEKLVF

SEQ ID NO: 631026 - protein, 14 aa, Homo sapiens
  CDR3 for beta chain variable domain of TCR clone 315513 (TRBV25-1, TRBJ1-1)
RASTHLGGNTEAFF

SEQ ID NO: 631027 - protein, 15 aa, Homo sapiens
  CDR3 for alpha chain variable domain of TCR clone 315514 (TRAV8-3, TRAJ27)
CAVGPSKTNAGKSTF

SEQ ID NO: 631028 - protein, 14 aa, Homo sapiens
  CDR3 for beta chain variable domain of TCR clone 315514 (TRBV7-2, TRBJ2-3)
CASSLEQGTNTQYF

SEQ ID NO: 631029 - protein, 15 aa, Homo sapiens
  CDR3 for alpha chain variable domain of TCR clone 315515 (TRAV26-1, TRAJ29)
CIVRAEGSGNTTLVF

SEQ ID NO: 631030 - protein, 15 aa, Homo sapiens
  CDR3 for beta chain variable domain of TCR clone 315515 (TRBV7-9, TRBJ1-5)
CASSQGHQPNQPQHF

SEQ ID NO: 631031 - protein, 13 aa, Homo sapiens
  CDR3 for alpha chain variable domain of TCR clone 315516 (TRAV13-1, TRAJ39)
CAASIWAGNMLTF

SEQ ID NO: 631032 - protein, 15 aa, Homo sapiens
  CDR3 for beta chain variable domain of TCR clone 315516 (TRBV7-9, TRBJ1-1)
CASSLLGQGGTEAFL

SEQ ID NO: 631033 - protein, 13 aa, Homo sapiens
  CDR3 for alpha chain variable domain of TCR clone 315517 (TRAV35, TRAJ48)
CAGHEFENEKLTF

SEQ ID NO: 631034 - protein, 14 aa, Homo sapiens
  CDR3 for beta chain variable domain of TCR clone 315517 (TRBV19, TRBJ2-7)
CASPTFVLSGEQYF

SEQ ID NO: 631035 - protein, 13 aa, Homo sapiens
  CDR3 for alpha chain variable domain of TCR clone 315518 (TRAV3, TRAJ21)
CAVREPDFNKFSF

SEQ ID NO: 631036 - protein, 15 aa, Homo sapiens
  CDR3 for beta chain variable domain of TCR clone 315518 (TRBV9, TRBJ1-6)
CASSVAGTGDSPLHF

SEQ ID NO: 631037 - protein, 16 aa, Homo sapiens
  CDR3 for alpha chain variable domain of TCR clone 315519 (TRAV3, TRAJ18)
CAVRHGRGSTLGRLYF

SEQ ID NO: 631038 - protein, 15 aa, Homo sapiens
  CDR3 for beta chain variable domain of TCR clone 315519 (TRBV7-9, TRBJ1-6)
CASSSPGRGNSPLHF

SEQ ID NO: 631039 - protein, 15 aa, Homo sapiens
  CDR3 for alpha chain variable domain of TCR clone 315520 (TRAV14/DV4, TRAJ26)
CAMREGQNYGQNFSF

SEQ ID NO: 631040 - protein, 13 aa, Homo sapiens
  CDR3 for beta chain variable domain of TCR clone 315520 (TRBV24-1, TRBJ2-2)
CATSDWSTGELFF

SEQ ID NO: 631041 - protein, 14 aa, Homo sapiens
  CDR3 for alpha chain variable domain of TCR clone 315521 (TRAV38-2/DV8, TRAJ32)
CAYRSGRATNKRIF

SEQ ID NO: 631042 - protein, 18 aa, Homo sapiens
  CDR3 for beta chain variable domain of TCR clone 315521 (TRBV23-1, TRBJ2-3)
CASSHTSGTRRSTDTQYF

SEQ ID NO: 631043 - protein, 13 aa, Homo sapiens
  CDR3 for alpha chain variable domain of TCR clone 315522 (TRAV23/DV6, TRAJ29)
CAARNTGNTPLVF

SEQ ID NO: 631044 - protein, 15 aa, Homo sapiens
  CDR3 for beta chain variable domain of TCR clone 315522 (TRBV5-1, TRBJ1-1)
CASSSRTGRNTEAFF

SEQ ID NO: 631045 - protein, 13 aa, Homo sapiens
  CDR3 for alpha chain variable domain of TCR clone 315523 (TRAV13-1, TRAJ6)
CAASKGGSYIPTF

SEQ ID NO: 631046 - protein, 22 aa, Homo sapiens
  CDR3 for beta chain variable domain of TCR clone 315523 (TRBV11-2, TRBJ1-4)
CASSLDITRRGIPRKDNEKLFF

SEQ ID NO: 631047 - protein, 14 aa, Homo sapiens
  CDR3 for alpha chain variable domain of TCR clone 315524 (TRAV1-2, TRAJ37)
CAVRSTSNTGKLIF

SEQ ID NO: 631048 - protein, 14 aa, Homo sapiens
  CDR3 for beta chain variable domain of TCR clone 315524 (TRBV6-3, TRBJ1-2)
CASSEGGGSYGYTF

SEQ ID NO: 631049 - protein, 17 aa, Homo sapiens
  CDR3 for alpha chain variable domain of TCR clone 315525 (TRAV19, TRAJ53)
CALSEADSGGSNYKLTF

SEQ ID NO: 631050 - protein, 13 aa, Homo sapiens
  CDR3 for beta chain variable domain of TCR clone 315525 (TRBV29-1, TRBJ1-1)
CSVGDSRNTDAFF

SEQ ID NO: 631051 - protein, 14 aa, Homo sapiens
  CDR3 for alpha chain variable domain of TCR clone 315526 (TRAV8-4, TRAJ17)
CAVSDKAAGNKLTF

SEQ ID NO: 631052 - protein, 15 aa, Homo sapiens
  CDR3 for beta chain variable domain of TCR clone 315526 (TRBV7-2, TRBJ1-2)
CASSLAPDRGLGYTF

SEQ ID NO: 631053 - protein, 18 aa, Homo sapiens
  CDR3 for alpha chain variable domain of TCR clone 315527 (TRAV26-1, TRAJ52)
CIVSVEGAGGTSYGKLTF

SEQ ID NO: 631054 - protein, 13 aa, Homo sapiens
  CDR3 for beta chain variable domain of TCR clone 315527 (TRBV7-3, TRBJ1-2)
CASSLKRGYGYTV

SEQ ID NO: 631055 - protein, 12 aa, Homo sapiens
  CDR3 for alpha chain variable domain of TCR clone 315528 (TRAV12-1, TRAJ40)
CVVYSGTYKYIF

SEQ ID NO: 631056 - protein, 16 aa, Homo sapiens
  CDR3 for beta chain variable domain of TCR clone 315528 (TRBV11-2, TRBJ2-1)
CASSLERDGVDNEQFF

SEQ ID NO: 631057 - protein, 15 aa, Homo sapiens
  CDR3 for alpha chain variable domain of TCR clone 315529 (TRAV17, TRAJ35)
RATAFVIGFGNVLHC

SEQ ID NO: 631058 - protein, 15 aa, Homo sapiens
  CDR3 for beta chain variable domain of TCR clone 315529 (TRBV7-9, TRBJ2-7)
CASSLALVEAYEQYF

SEQ ID NO: 631059 - protein, 11 aa, Homo sapiens
  CDR3 for alpha chain variable domain of TCR clone 315530 (TRAV1-1, TRAJ23)
RAVRQGGKLIF

SEQ ID NO: 631060 - protein, 15 aa, Homo sapiens
  CDR3 for beta chain variable domain of TCR clone 315530 (TRBV11-3, TRBJ2-3)
CASLKDGREGDTQYF

SEQ ID NO: 631061 - protein, 14 aa, Homo sapiens
  CDR3 for alpha chain variable domain of TCR clone 315531 (TRAV12-2, TRAJ13)
CDVKKTGGYQKVTF

SEQ ID NO: 631062 - protein, 16 aa, Homo sapiens
  CDR3 for beta chain variable domain of TCR clone 315531 (TRBV12-4, TRBJ2-5)
CASSFFVRGRQETQYF

SEQ ID NO: 631063 - protein, 20 aa, Homo sapiens
  CDR3 for alpha chain variable domain of TCR clone 315532 (TRAV3, TRAJ7)
CAVREEEREQQTRFWEVEPS

SEQ ID NO: 631064 - protein, 14 aa, Homo sapiens
  CDR3 for beta chain variable domain of TCR clone 315532 (TRBV7-7, TRBJ2-2)
CASSTRASGGELFF

SEQ ID NO: 631065 - protein, 16 aa, Homo sapiens
  CDR3 for alpha chain variable domain of TCR clone 315533 (TRAV26-1, TRAJ46)
CIVRVGKEKQRRQAEF

SEQ ID NO: 631066 - protein, 13 aa, Homo sapiens
  CDR3 for beta chain variable domain of TCR clone 315533 (TRBV12-5, TRBJ2-3)
CASGDRQSDTQYF

SEQ ID NO: 631067 - protein, 11 aa, Homo sapiens
  CDR3 for alpha chain variable domain of TCR clone 315534 (TRAV1-1, TRAJ37)
CAVSPQDKLIF

SEQ ID NO: 631068 - protein, 13 aa, Homo sapiens
  CDR3 for beta chain variable domain of TCR clone 315534 (TRBV10-3, TRBJ2-7)
CASKLAVNYEQYF

SEQ ID NO: 631069 - protein, 15 aa, Homo sapiens
  CDR3 for alpha chain variable domain of TCR clone 315535 (TRAV34, TRAJ38)
CGADFTTGNNRKLIW

SEQ ID NO: 631070 - protein, 16 aa, Homo sapiens
  CDR3 for beta chain variable domain of TCR clone 315535 (TRBV12-5, TRBJ2-5)
CASGPRTSGNQEPQYF

SEQ ID NO: 631071 - protein, 12 aa, Homo sapiens
  CDR3 for alpha chain variable domain of TCR clone 315536 (TRAV16, TRAJ10)
CSRTGGGSKLTL

SEQ ID NO: 631072 - protein, 15 aa, Homo sapiens
  CDR3 for beta chain variable domain of TCR clone 315536 (TRBV6-3, TRBJ2-7)
CASSSPGTVFYEQYF

SEQ ID NO: 631073 - protein, 15 aa, Homo sapiens
  CDR3 for alpha chain variable domain of TCR clone 315537 (TRAV17, TRAJ23)
CATDAEDNEGGKLIF

SEQ ID NO: 631074 - protein, 12 aa, Homo sapiens
  CDR3 for beta chain variable domain of TCR clone 315537 (TRBV2, TRBJ2-1)
CAKGEGYNEQFF

SEQ ID NO: 631075 - protein, 14 aa, Homo sapiens
  CDR3 for alpha chain variable domain of TCR clone 315538 (TRAV12-3, TRAJ15)
CAMIPPQAGTDLIF

SEQ ID NO: 631076 - protein, 12 aa, Homo sapiens
  CDR3 for beta chain variable domain of TCR clone 315538 (TRBV11-2, TRBJ2-2)
CASSFGGGELFF

SEQ ID NO: 631077 - protein, 15 aa, Homo sapiens
  CDR3 for alpha chain variable domain of TCR clone 315539 (TRAV25, TRAJ52)
CAGRPGGIRYGKLTF

SEQ ID NO: 631078 - protein, 15 aa, Homo sapiens
  CDR3 for beta chain variable domain of TCR clone 315539 (TRBV19, TRBJ2-5)
CASHGLAGAQETQYF

SEQ ID NO: 631079 - protein, 17 aa, Homo sapiens
  CDR3 for alpha chain variable domain of TCR clone 315540 (TRAV26-1, TRAJ22)
CIVRVPSHSGSARQLTF

SEQ ID NO: 631080 - protein, 16 aa, Homo sapiens
  CDR3 for beta chain variable domain of TCR clone 315540 (TRBV28, TRBJ2-1)
CAGRRSGRVVGNEQFF

SEQ ID NO: 631081 - protein, 11 aa, Homo sapiens
  CDR3 for alpha chain variable domain of TCR clone 315541 (TRAV23/DV6, TRAJ49)
CAVAPVTSSLL

SEQ ID NO: 631082 - protein, 13 aa, Homo sapiens
  CDR3 for beta chain variable domain of TCR clone 315541 (TRBV6-1, TRBJ1-1)
CASSRQGNTEAFF

SEQ ID NO: 631083 - protein, 16 aa, Homo sapiens
  CDR3 for alpha chain variable domain of TCR clone 315542 (TRAV12-2, TRAJ40)
CAVIRGGTSGTYKYIF

SEQ ID NO: 631084 - protein, 14 aa, Homo sapiens
  CDR3 for beta chain variable domain of TCR clone 315542 (TRBV20-1, TRBJ2-5)
CSAGDGRAGETQYF

SEQ ID NO: 631085 - protein, 17 aa, Homo sapiens
  CDR3 for alpha chain variable domain of TCR clone 315543 (TRAV26-2, TRAJ42)
CIMRDVGYGGSEGNLIF

SEQ ID NO: 631086 - protein, 16 aa, Homo sapiens
  CDR3 for beta chain variable domain of TCR clone 315543 (TRBV12-4, TRBJ2-7)
CASSLIGGTGTYEQYF

SEQ ID NO: 631087 - protein, 18 aa, Homo sapiens
  CDR3 for alpha chain variable domain of TCR clone 315544 (TRAV8-3, TRAJ13)
CAVGAYPSGGYQKVPLEL

SEQ ID NO: 631088 - protein, 15 aa, Homo sapiens
  CDR3 for beta chain variable domain of TCR clone 315544 (TRBV19, TRBJ1-5)
CASSIVWADNQPQHF

SEQ ID NO: 631089 - protein, 12 aa, Homo sapiens
  CDR3 for alpha chain variable domain of TCR clone 315545 (TRAV12-3, TRAJ20)
CAMVRGDYKLSF

SEQ ID NO: 631090 - protein, 13 aa, Homo sapiens
  CDR3 for beta chain variable domain of TCR clone 315545 (TRBV7-9, TRBJ1-2)
CTSSLKQNYGYTF

SEQ ID NO: 631091 - protein, 13 aa, Homo sapiens
  CDR3 for alpha chain variable domain of TCR clone 315546 (TRAV12-3, TRAJ5)
CAMKPTGRRALTF

SEQ ID NO: 631092 - protein, 13 aa, Homo sapiens
  CDR3 for beta chain variable domain of TCR clone 315546 (TRBV2, TRBJ2-7)
CASSVVEAYEQYF

SEQ ID NO: 631093 - protein, 23 aa, Homo sapiens
  CDR3 for alpha chain variable domain of TCR clone 315547 (TRAV26-1, TRAJ38)
CIADNAGNNHIQNPDPAVYHLRD

SEQ ID NO: 631094 - protein, 13 aa, Homo sapiens
  CDR3 for beta chain variable domain of TCR clone 315547 (TRBV10-3, TRBJ2-7)
CASKLAVNYEQYF

SEQ ID NO: 631095 - protein, 13 aa, Homo sapiens
  CDR3 for alpha chain variable domain of TCR clone 315548 (TRAV8-3, TRAJ48)
CCVCNFGNEKLTF

SEQ ID NO: 631096 - protein, 12 aa, Homo sapiens
  CDR3 for beta chain variable domain of TCR clone 315548 (TRBV7-2, TRBJ2-5)
CASSQYQETQYF

SEQ ID NO: 631097 - protein, 14 aa, Homo sapiens
  CDR3 for alpha chain variable domain of TCR clone 315549 (TRAV13-1, TRAJ28)
CAASPGAGSYQLTF

SEQ ID NO: 631098 - protein, 14 aa, Homo sapiens
  CDR3 for beta chain variable domain of TCR clone 315549 (TRBV7-2, TRBJ2-7)
CASSPKTSFYEQYF

SEQ ID NO: 631099 - protein, 12 aa, Homo sapiens
  CDR3 for alpha chain variable domain of TCR clone 315550 (TRAV21, TRAJ11)
CAATSGYSTLTF

SEQ ID NO: 631100 - protein, 14 aa, Homo sapiens
  CDR3 for beta chain variable domain of TCR clone 315550 (TRBV20-1, TRBJ2-7)
CIAPELAGVGEQYF

SEQ ID NO: 631101 - protein, 17 aa, Homo sapiens
  CDR3 for alpha chain variable domain of TCR clone 315551 (TRAV17, TRAJ52)
CATDRNAGGTSYGKLTF

SEQ ID NO: 631102 - protein, 13 aa, Homo sapiens
  CDR3 for beta chain variable domain of TCR clone 315551 (TRBV4-2, TRBJ1-1)
YASSQAGNTEAFF

SEQ ID NO: 631103 - protein, 10 aa, Homo sapiens
  CDR3 for alpha chain variable domain of TCR clone 315552 (TRAV12-3, TRAJ18)
CAMSAEAQPW

SEQ ID NO: 631104 - protein, 13 aa, Homo sapiens
  CDR3 for beta chain variable domain of TCR clone 315552 (TRBV15, TRBJ1-6)
CATSGGLNSPLNF

SEQ ID NO: 631105 - protein, 12 aa, Homo sapiens
  CDR3 for alpha chain variable domain of TCR clone 315553 (TRAV25, TRAJ11)
CAGDSGYSTLTF

SEQ ID NO: 631106 - protein, 13 aa, Homo sapiens
  CDR3 for beta chain variable domain of TCR clone 315553 (TRBV7-9, TRBJ1-2)
CASSLKQNYGYTF

SEQ ID NO: 631107 - protein, 10 aa, Homo sapiens
  CDR3 for alpha chain variable domain of TCR clone 315554 (TRAV12-1, TRAJ22)
HSGSARQLTF

SEQ ID NO: 631108 - protein, 12 aa, Homo sapiens
  CDR3 for beta chain variable domain of TCR clone 315554 (TRBV11-2, TRBJ2-2)
CASSLPTGELFF

SEQ ID NO: 631109 - protein, 17 aa, Homo sapiens
  CDR3 for alpha chain variable domain of TCR clone 315555 (TRAV3, TRAJ42)
CAVRDRDSGGSQGNLIF

SEQ ID NO: 631110 - protein, 13 aa, Homo sapiens
  CDR3 for beta chain variable domain of TCR clone 315555 (TRBV10-3, TRBJ2-7)
CASKLAVNYEQYF

SEQ ID NO: 631111 - protein, 13 aa, Homo sapiens
  CDR3 for alpha chain variable domain of TCR clone 315556 (TRAV2, TRAJ40)
CAVVTSGTYKYIF

SEQ ID NO: 631112 - protein, 11 aa, Homo sapiens
  CDR3 for beta chain variable domain of TCR clone 315556 (TRBV19, TRBJ2-7)
CASGNSYEQYF

SEQ ID NO: 631113 - protein, 16 aa, Homo sapiens
  CDR3 for alpha chain variable domain of TCR clone 315557 (TRAV3, TRAJ37)
CAVRGKGSGNTGKLIF

SEQ ID NO: 631114 - protein, 11 aa, Homo sapiens
  CDR3 for beta chain variable domain of TCR clone 315557 (TRBV7-2, TRBJ2-3)
CASSLGDTQYF

SEQ ID NO: 631115 - protein, 11 aa, Homo sapiens
  CDR3 for alpha chain variable domain of TCR clone 315558 (TRAV12-2, TRAJ23)
RAYNQGGKLIF

SEQ ID NO: 631116 - protein, 13 aa, Homo sapiens
  CDR3 for beta chain variable domain of TCR clone 315558 (TRBV20-1, TRBJ2-2)
CSASAAGTGELFF

SEQ ID NO: 631117 - protein, 17 aa, Homo sapiens
  CDR3 for alpha chain variable domain of TCR clone 315559 (TRAV13-1, TRAJ28)
CAASPPYSGAGSYQLTF

SEQ ID NO: 631118 - protein, 15 aa, Homo sapiens
  CDR3 for beta chain variable domain of TCR clone 315559 (TRBV6-3, TRBJ2-2)
CASSFLATQTGELFF

SEQ ID NO: 631119 - protein, 15 aa, Homo sapiens
  CDR3 for alpha chain variable domain of TCR clone 315560 (TRAV3, TRAJ4)
CAVRDGIGGYNQLIF

SEQ ID NO: 631120 - protein, 16 aa, Homo sapiens
  CDR3 for beta chain variable domain of TCR clone 315560 (TRBV27, TRBJ2-2)
CASSSSGVSNTGELFF

SEQ ID NO: 631121 - protein, 14 aa, Homo sapiens
  CDR3 for alpha chain variable domain of TCR clone 315561 (TRAV13-1, TRAJ44)
CAAKATGTTSKLTF

SEQ ID NO: 631122 - protein, 13 aa, Homo sapiens
  CDR3 for beta chain variable domain of TCR clone 315561 (TRBV7-9, TRBJ2-2)
CASSLDPTGELFF

SEQ ID NO: 631123 - protein, 14 aa, Homo sapiens
  CDR3 for alpha chain variable domain of TCR clone 315562 (TRAV12-3, TRAJ10)
SHLPLTGGGNKLTF

SEQ ID NO: 631124 - protein, 12 aa, Homo sapiens
  CDR3 for beta chain variable domain of TCR clone 315562 (TRBV7-9, TRBJ2-7)
CASSMKREEQYF

SEQ ID NO: 631125 - protein, 15 aa, Homo sapiens
  CDR3 for alpha chain variable domain of TCR clone 315563 (TRAV8-3, TRAJ45)
CASSYSRGGADGLTF

SEQ ID NO: 631126 - protein, 18 aa, Homo sapiens
  CDR3 for beta chain variable domain of TCR clone 315563 (TRBV18, TRBJ1-3)
CASSPRGGAGPSGNTIYF

SEQ ID NO: 631127 - protein, 20 aa, Homo sapiens
  CDR3 for alpha chain variable domain of TCR clone 315564 (TRAV12-3, TRAJ53)
SPVIQPPTSVRGGSNYKLTF

SEQ ID NO: 631128 - protein, 11 aa, Homo sapiens
  CDR3 for beta chain variable domain of TCR clone 315564 (TRBV29-1, TRBJ2-5)
CSEDRTGTQYF

SEQ ID NO: 631129 - protein, 10 aa, Homo sapiens
  CDR3 for alpha chain variable domain of TCR clone 315565 (TRAV20, TRAJ22)
CAAPARQLTF

SEQ ID NO: 631130 - protein, 14 aa, Homo sapiens
  CDR3 for beta chain variable domain of TCR clone 315565 (TRBV19, TRBJ2-1)
CASSTGSGATEQFF

SEQ ID NO: 631131 - protein, 14 aa, Homo sapiens
  CDR3 for alpha chain variable domain of TCR clone 315566 (TRAV27, TRAJ44)
CAASFTGTASKLTF

SEQ ID NO: 631132 - protein, 15 aa, Homo sapiens
  CDR3 for beta chain variable domain of TCR clone 315566 (TRBV6-3, TRBJ2-7)
CAGSSPGTVFYEQYF

SEQ ID NO: 631133 - protein, 11 aa, Homo sapiens
  CDR3 for alpha chain variable domain of TCR clone 315567 (TRAV27, TRAJ43)
CVRYNNNDMRF

SEQ ID NO: 631134 - protein, 17 aa, Homo sapiens
  CDR3 for beta chain variable domain of TCR clone 315567 (TRBV7-8, TRBJ1-5)
CASSRRDRAPLGQAQHF

SEQ ID NO: 631135 - protein, 13 aa, Homo sapiens
  CDR3 for alpha chain variable domain of TCR clone 315568 (TRAV12-2, TRAJ42)
CAVKRGSHGNLIF

SEQ ID NO: 631136 - protein, 12 aa, Homo sapiens
  CDR3 for beta chain variable domain of TCR clone 315568 (TRBV5-7, TRBJ1-2)
CASSLVQNGYTF

SEQ ID NO: 631137 - protein, 14 aa, Homo sapiens
  CDR3 for alpha chain variable domain of TCR clone 315569 (TRAV1-2, TRAJ16)
CAVNRFSDGQKLLF

SEQ ID NO: 631138 - protein, 15 aa, Homo sapiens
  CDR3 for beta chain variable domain of TCR clone 315569 (TRBV28, TRBJ2-2)
CANKTGTTGAGELFF

SEQ ID NO: 631139 - protein, 10 aa, Homo sapiens
  CDR3 for alpha chain variable domain of TCR clone 315570 (TRAV23/DV6, TRAJ43)
CAAAVAALEQ

SEQ ID NO: 631140 - protein, 14 aa, Homo sapiens
  CDR3 for beta chain variable domain of TCR clone 315570 (TRBV19, TRBJ2-3)
CASSAGTGPDTQYF

SEQ ID NO: 631141 - protein, 14 aa, Homo sapiens
  CDR3 for alpha chain variable domain of TCR clone 315571 (TRAV23/DV6, TRAJ4)
CAAPSSGGYNKLIF

SEQ ID NO: 631142 - protein, 14 aa, Homo sapiens
  CDR3 for beta chain variable domain of TCR clone 315571 (TRBV7-9, TRBJ2-5)
CASSLVGGEETQYF

SEQ ID NO: 631143 - protein, 13 aa, Homo sapiens
  CDR3 for alpha chain variable domain of TCR clone 315572 (TRAV13-2, TRAJ48)
CAEMDFVNEKLTF

SEQ ID NO: 631144 - protein, 13 aa, Homo sapiens
  CDR3 for beta chain variable domain of TCR clone 315572 (TRBV7-9, TRBJ1-2)
CASSLKQNYGYTF

SEQ ID NO: 631145 - protein, 15 aa, Homo sapiens
  CDR3 for alpha chain variable domain of TCR clone 315573 (TRAV13-1, TRAJ44)
CAASRNTGTASKLTF

SEQ ID NO: 631146 - protein, 10 aa, Homo sapiens
  CDR3 for beta chain variable domain of TCR clone 315573 (TRBV20-1, TRBJ2-7)
CSEGYYEQYF

SEQ ID NO: 631147 - protein, 13 aa, Homo sapiens
  CDR3 for alpha chain variable domain of TCR clone 315574 (TRAV13-1, TRAJ9)
CAASGTAGFKTIF

SEQ ID NO: 631148 - protein, 13 aa, Homo sapiens
  CDR3 for beta chain variable domain of TCR clone 315574 (TRBV12-4, TRBJ2-7)
CASSLERVREQYF

SEQ ID NO: 631149 - protein, 15 aa, Homo sapiens
  CDR3 for alpha chain variable domain of TCR clone 315575 (TRAV26-1, TRAJ29)
CIVRVEGSVNTPLVF

SEQ ID NO: 631150 - protein, 15 aa, Homo sapiens
  CDR3 for beta chain variable domain of TCR clone 315575 (TRBV7-9, TRBJ1-5)
SASSQGHQPNQPQHF

SEQ ID NO: 631151 - protein, 14 aa, Homo sapiens
  CDR3 for alpha chain variable domain of TCR clone 315576 (TRAV12-2, TRAJ40)
CAVKIPSGTYKYIF

SEQ ID NO: 631152 - protein, 13 aa, Homo sapiens
  CDR3 for beta chain variable domain of TCR clone 315576 (TRBV27, TRBJ2-1)
CASRTLGVGEQFF

SEQ ID NO: 631153 - protein, 12 aa, Homo sapiens
  CDR3 for alpha chain variable domain of TCR clone 315577 (TRAV21, TRAJ24)
CAVEPGWGKFQF

SEQ ID NO: 631154 - protein, 19 aa, Homo sapiens
  CDR3 for beta chain variable domain of TCR clone 315577 (TRBV7-2, TRBJ1-5)
CASSLGHGTRSYSNQPQHF

SEQ ID NO: 631155 - protein, 13 aa, Homo sapiens
  CDR3 for alpha chain variable domain of TCR clone 315578 (TRAV36/DV7, TRAJ33)
CAVFSSYTGKLII

SEQ ID NO: 631156 - protein, 14 aa, Homo sapiens
  CDR3 for beta chain variable domain of TCR clone 315578 (TRBV2, TRBJ2-7)
CASSLASGGYEQYF

SEQ ID NO: 631157 - protein, 17 aa, Homo sapiens
  CDR3 for alpha chain variable domain of TCR clone 315579 (TRAV3, TRAJ42)
CAVRDRDYGGGKGNLIF

SEQ ID NO: 631158 - protein, 13 aa, Homo sapiens
  CDR3 for beta chain variable domain of TCR clone 315579 (TRBV10-3, TRBJ2-7)
CASKLAVNYEQYF

SEQ ID NO: 631159 - protein, 12 aa, Homo sapiens
  CDR3 for alpha chain variable domain of TCR clone 315580 (TRAV27, TRAJ9)
CAGESGGFKTIF

SEQ ID NO: 631160 - protein, 18 aa, Homo sapiens
  CDR3 for beta chain variable domain of TCR clone 315580 (TRBV10-2, TRBJ2-2)
CISAPAVHRQADARELFF

SEQ ID NO: 631161 - protein, 15 aa, Homo sapiens
  CDR3 for alpha chain variable domain of TCR clone 315581 (TRAV3, TRAJ11)
CAVRDRGSGYSTLTF

SEQ ID NO: 631162 - protein, 13 aa, Homo sapiens
  CDR3 for beta chain variable domain of TCR clone 315581 (TRBV7-9, TRBJ1-2)
CASSLKQSYGYTF

SEQ ID NO: 631163 - protein, 12 aa, Homo sapiens
  CDR3 for alpha chain variable domain of TCR clone 315582 (TRAV27, )
CAASRNAGTTIS

SEQ ID NO: 631164 - protein, 15 aa, Homo sapiens
  CDR3 for beta chain variable domain of TCR clone 315582 (TRBV5-1, TRBJ2-1)
CASSPPRAPYNEQFF

SEQ ID NO: 631165 - protein, 11 aa, Homo sapiens
  CDR3 for alpha chain variable domain of TCR clone 315583 (TRAV1-2, TRAJ31)
CAVNNNARLMF

SEQ ID NO: 631166 - protein, 18 aa, Homo sapiens
  CDR3 for beta chain variable domain of TCR clone 315583 (TRBV4-1, TRBJ1-5)
CASSQDPRGQGLNQPQHF

SEQ ID NO: 631167 - protein, 18 aa, Homo sapiens
  CDR3 for alpha chain variable domain of TCR clone 315584 (TRAV9-2, TRAJ52)
CALSRHNAGGTSYGKLTF

SEQ ID NO: 631168 - protein, 12 aa, Homo sapiens
  CDR3 for beta chain variable domain of TCR clone 315584 (TRBV6-6, TRBJ2-3)
CASSSRGDTQYF

SEQ ID NO: 631169 - protein, 11 aa, Homo sapiens
  CDR3 for alpha chain variable domain of TCR clone 315585 (TRAV12-3, TRAJ27)
CAMANAGKSTF

SEQ ID NO: 631170 - protein, 14 aa, Homo sapiens
  CDR3 for beta chain variable domain of TCR clone 315585 (TRBV7-3, TRBJ2-1)
CQQPDGGGEVEQFF

SEQ ID NO: 631171 - protein, 13 aa, Homo sapiens
  CDR3 for alpha chain variable domain of TCR clone 315586 (TRAV8-2, TRAJ11)
CVVSEVRIQHPHL

SEQ ID NO: 631172 - protein, 16 aa, Homo sapiens
  CDR3 for beta chain variable domain of TCR clone 315586 (TRBV28, TRBJ2-1)
CASSSPEYPRDNEQFF

SEQ ID NO: 631173 - protein, 13 aa, Homo sapiens
  CDR3 for alpha chain variable domain of TCR clone 315587 (TRAV8-3, TRAJ43)
CAVGPDNNNDMRF

SEQ ID NO: 631174 - protein, 14 aa, Homo sapiens
  CDR3 for beta chain variable domain of TCR clone 315587 (TRBV2, TRBJ1-5)
CASSGTGCNQPQHF

SEQ ID NO: 631175 - protein, 16 aa, Homo sapiens
  CDR3 for alpha chain variable domain of TCR clone 315588 (TRAV16, TRAJ4)
CALSRMFSGGYNKLIF

SEQ ID NO: 631176 - protein, 14 aa, Homo sapiens
  CDR3 for beta chain variable domain of TCR clone 315588 (TRBV11-2, TRBJ1-2)
CASSLGTANYGYTF

SEQ ID NO: 631177 - protein, 11 aa, Homo sapiens
  CDR3 for alpha chain variable domain of TCR clone 315589 (TRAV12-3, TRAJ6)
CAMSGSYIPTF

SEQ ID NO: 631178 - protein, 13 aa, Homo sapiens
  CDR3 for beta chain variable domain of TCR clone 315589 (TRBV12-4, TRBJ2-1)
CASSLQIVNEQFF

SEQ ID NO: 631179 - protein, 15 aa, Homo sapiens
  CDR3 for alpha chain variable domain of TCR clone 315590 (TRAV12-2, TRAJ43)
CAFDKRFGAGTRLTV

SEQ ID NO: 631180 - protein, 18 aa, Homo sapiens
  CDR3 for beta chain variable domain of TCR clone 315590 (TRBV20-1, TRBJ2-3)
CSASGLAGGPGTTDTQYF

SEQ ID NO: 631181 - protein, 13 aa, Homo sapiens
  CDR3 for alpha chain variable domain of TCR clone 315591 (TRAV3, TRAJ20)
CCEAFCNDYKLSF

SEQ ID NO: 631182 - protein, 16 aa, Homo sapiens
  CDR3 for beta chain variable domain of TCR clone 315591 (TRBV28, TRBJ1-4)
CASSPPYRGRSEKLFF

SEQ ID NO: 631183 - protein, 16 aa, Homo sapiens
  CDR3 for alpha chain variable domain of TCR clone 315592 (TRAV8-3, TRAJ10)
CAVGPILTGGGNKLTF

SEQ ID NO: 631184 - protein, 15 aa, Homo sapiens
  CDR3 for beta chain variable domain of TCR clone 315592 (TRBV7-2, TRBJ2-5)
CQQLKMVERQETQYF

SEQ ID NO: 631185 - protein, 14 aa, Homo sapiens
  CDR3 for alpha chain variable domain of TCR clone 315593 (TRAV12-2, TRAJ40)
CAVKIPSGTYKYIF

SEQ ID NO: 631186 - protein, 15 aa, Homo sapiens
  CDR3 for beta chain variable domain of TCR clone 315593 (TRBV20-1, TRBJ1-4)
CNARREWGVNEKLFF

SEQ ID NO: 631187 - protein, 12 aa, Homo sapiens
  CDR3 for alpha chain variable domain of TCR clone 315594 (TRAV17, TRAJ43)
CAPDAFPADMRF

SEQ ID NO: 631188 - protein, 14 aa, Homo sapiens
  CDR3 for beta chain variable domain of TCR clone 315594 (TRBV20-1, TRBJ2-3)
CSARDGGSTDTQYF

SEQ ID NO: 631189 - protein, 18 aa, Homo sapiens
  CDR3 for alpha chain variable domain of TCR clone 315595 (TRAV12-3, TRAJ52)
CAMSVGGAGGTSYGKLKS

SEQ ID NO: 631190 - protein, 15 aa, Homo sapiens
  CDR3 for beta chain variable domain of TCR clone 315595 (TRBV27, TRBJ1-6)
CASSFDRGLGSPLHF

SEQ ID NO: 631191 - protein, 14 aa, Homo sapiens
  CDR3 for alpha chain variable domain of TCR clone 315596 (TRAV12-3, TRAJ22)
CAASVSGSARQLTF

SEQ ID NO: 631192 - protein, 12 aa, Homo sapiens
  CDR3 for beta chain variable domain of TCR clone 315596 (TRBV11-2, TRBJ2-5)
CQQPRPSETQYF

SEQ ID NO: 631193 - protein, 16 aa, Homo sapiens
  CDR3 for alpha chain variable domain of TCR clone 315597 (TRAV19, TRAJ17)
CAPCGQIKAAGNKLTF

SEQ ID NO: 631194 - protein, 16 aa, Homo sapiens
  CDR3 for beta chain variable domain of TCR clone 315597 (TRBV7-3, TRBJ2-1)
CASSLSSGGGAKEQFF

SEQ ID NO: 631195 - protein, 14 aa, Homo sapiens
  CDR3 for alpha chain variable domain of TCR clone 315598 (TRAV12-2, TRAJ44)
CAVKKAGTASKLTF

SEQ ID NO: 631196 - protein, 16 aa, Homo sapiens
  CDR3 for beta chain variable domain of TCR clone 315598 (TRBV6-1, TRBJ1-3)
CASSEGGVTSGNTIYF

SEQ ID NO: 631197 - protein, 18 aa, Homo sapiens
  CDR3 for alpha chain variable domain of TCR clone 315599 (TRAV13-1, TRAJ28)
CAASPVPILWGWELPTHF

SEQ ID NO: 631198 - protein, 15 aa, Homo sapiens
  CDR3 for beta chain variable domain of TCR clone 315599 (TRBV11-2, TRBJ2-2)
CASSLDTGNTGELFF

SEQ ID NO: 631199 - protein, 14 aa, Homo sapiens
  CDR3 for alpha chain variable domain of TCR clone 315600 (TRAV1-2, TRAJ29)
CAVRELTSATPLVF

SEQ ID NO: 631200 - protein, 17 aa, Homo sapiens
  CDR3 for beta chain variable domain of TCR clone 315600 (TRBV20-1, TRBJ2-1)
CSARDPLAGVWDNEQFF

SEQ ID NO: 631201 - protein, 14 aa, Homo sapiens
  CDR3 for alpha chain variable domain of TCR clone 315601 (TRAV12-2, TRAJ40)
CAVKIPSGTYKYIF

SEQ ID NO: 631202 - protein, 14 aa, Homo sapiens
  CDR3 for beta chain variable domain of TCR clone 315601 (TRBV5-6, TRBJ2-4)
CASTLSGVKNIQYF

SEQ ID NO: 631203 - protein, 14 aa, Homo sapiens
  CDR3 for alpha chain variable domain of TCR clone 315602 (TRAV8-3, TRAJ4)
CAVGAAGGYNKLIF

SEQ ID NO: 631204 - protein, 15 aa, Homo sapiens
  CDR3 for beta chain variable domain of TCR clone 315602 (TRBV5-1, TRBJ2-1)
CASSPPGAPYNEQFF

SEQ ID NO: 631205 - protein, 12 aa, Homo sapiens
  CDR3 for alpha chain variable domain of TCR clone 315603 (TRAV2, TRAJ10)
CASTGGGNKLTF

SEQ ID NO: 631206 - protein, 14 aa, Homo sapiens
  CDR3 for beta chain variable domain of TCR clone 315603 (TRBV7-3, TRBJ2-1)
CASSLSGSYNEQFF

SEQ ID NO: 631207 - protein, 16 aa, Homo sapiens
  CDR3 for alpha chain variable domain of TCR clone 315604 (TRAV30, TRAJ24)
CGTEIVDADSWGKFQF

SEQ ID NO: 631208 - protein, 16 aa, Homo sapiens
  CDR3 for beta chain variable domain of TCR clone 315604 (TRBV19, TRBJ2-2)
CASSAAGTGGTGELFF

SEQ ID NO: 631209 - protein, 13 aa, Homo sapiens
  CDR3 for alpha chain variable domain of TCR clone 315605 (TRAV21, TRAJ56)
CAVRLGANSKLTF

SEQ ID NO: 631210 - protein, 16 aa, Homo sapiens
  CDR3 for beta chain variable domain of TCR clone 315605 (TRBV13, TRBJ2-2)
CASSPRTGEHTGELFF

SEQ ID NO: 631211 - protein, 12 aa, Homo sapiens
  CDR3 for alpha chain variable domain of TCR clone 315606 (TRAV1-2, TRAJ24)
CAVGGSWVKFQF

SEQ ID NO: 631212 - protein, 13 aa, Homo sapiens
  CDR3 for beta chain variable domain of TCR clone 315606 (TRBV20-1, TRBJ1-1)
CSASKRGLTEAFF

SEQ ID NO: 631213 - protein, 12 aa, Homo sapiens
  CDR3 for alpha chain variable domain of TCR clone 315607 (TRAV1-2, TRAJ29)
CAVPSGNTPLVF

SEQ ID NO: 631214 - protein, 12 aa, Homo sapiens
  CDR3 for beta chain variable domain of TCR clone 315607 (TRBV7-9, TRBJ2-7)
CASSLGSYEQYF

SEQ ID NO: 631215 - protein, 14 aa, Homo sapiens
  CDR3 for alpha chain variable domain of TCR clone 315608 (TRAV12-2, TRAJ13)
CAVKETGGYQKVTF

SEQ ID NO: 631216 - protein, 13 aa, Homo sapiens
  CDR3 for beta chain variable domain of TCR clone 315608 (TRBV12-4, TRBJ1-2)
CASSFIWLHLRFG

SEQ ID NO: 631217 - protein, 14 aa, Homo sapiens
  CDR3 for alpha chain variable domain of TCR clone 315609 (TRAV1-2, TRAJ8)
CAVRADAGFQKLVF

SEQ ID NO: 631218 - protein, 16 aa, Homo sapiens
  CDR3 for beta chain variable domain of TCR clone 315609 (TRBV12-4, TRBJ1-5)
CASSRPVGGSNQPQHF

SEQ ID NO: 631219 - protein, 14 aa, Homo sapiens
  CDR3 for alpha chain variable domain of TCR clone 315610 (TRAV12-2, TRAJ13)
CAVKKTGGYQKVTF

SEQ ID NO: 631220 - protein, 16 aa, Homo sapiens
  CDR3 for beta chain variable domain of TCR clone 315610 (TRBV7-2, TRBJ2-6)
CAILSGVSSGANVLTF

SEQ ID NO: 631221 - protein, 13 aa, Homo sapiens
  CDR3 for alpha chain variable domain of TCR clone 315611 (TRAV13-1, TRAJ6)
CAASSGGSYTPTF

SEQ ID NO: 631222 - protein, 13 aa, Homo sapiens
  CDR3 for beta chain variable domain of TCR clone 315611 (TRBV7-8, TRBJ2-7)
CASSLTGGREQYF

SEQ ID NO: 631223 - protein, 12 aa, Homo sapiens
  CDR3 for alpha chain variable domain of TCR clone 315612 (TRAV36/DV7, TRAJ54)
CAVVRGAQKLVF

SEQ ID NO: 631224 - protein, 16 aa, Homo sapiens
  CDR3 for beta chain variable domain of TCR clone 315612 (TRBV7-3, TRBJ2-1)
CASSKPLAGGYNEQFF

SEQ ID NO: 631225 - protein, 11 aa, Homo sapiens
  CDR3 for alpha chain variable domain of TCR clone 315613 (TRAV1-2, TRAJ20)
CAVANDYKLSF

SEQ ID NO: 631226 - protein, 14 aa, Homo sapiens
  CDR3 for beta chain variable domain of TCR clone 315613 (TRBV5-1, TRBJ2-3)
CASSLFGQTDTQYF

SEQ ID NO: 631227 - protein, 13 aa, Homo sapiens
  CDR3 for alpha chain variable domain of TCR clone 315614 (TRAV12-3, TRAJ54)
CAMFAQGAQKLVF

SEQ ID NO: 631228 - protein, 15 aa, Homo sapiens
  CDR3 for beta chain variable domain of TCR clone 315614 (TRBV7-6, TRBJ2-3)
CQQPRRGGLGDTQYF

SEQ ID NO: 631229 - protein, 16 aa, Homo sapiens
  CDR3 for alpha chain variable domain of TCR clone 315615 (TRAV1-2, TRAJ16)
CAPPGFQMARSCSLQG

SEQ ID NO: 631230 - protein, 16 aa, Homo sapiens
  CDR3 for beta chain variable domain of TCR clone 315615 (TRBV12-5, TRBJ2-5)
CASGPRTSGNQETQYF

SEQ ID NO: 631231 - protein, 11 aa, Homo sapiens
  CDR3 for alpha chain variable domain of TCR clone 315616 (TRAV21, TRAJ20)
CAVDGDYKLSF

SEQ ID NO: 631232 - protein, 15 aa, Homo sapiens
  CDR3 for beta chain variable domain of TCR clone 315616 (TRBV7-2, TRBJ2-1)
CASTHGTGIYNEQFF

SEQ ID NO: 631233 - protein, 13 aa, Homo sapiens
  CDR3 for alpha chain variable domain of TCR clone 315617 (TRAV35, TRAJ42)
CAGFPGSQGNLIF

SEQ ID NO: 631234 - protein, 13 aa, Homo sapiens
  CDR3 for beta chain variable domain of TCR clone 315617 (TRBV29-1, TRBJ2-1)
CSVEGGRVNELFF

SEQ ID NO: 631235 - protein, 17 aa, Homo sapiens
  CDR3 for alpha chain variable domain of TCR clone 315618 (TRAV3, TRAJ6)
CAVRDGPRAGGSCIPTF

SEQ ID NO: 631236 - protein, 14 aa, Homo sapiens
  CDR3 for beta chain variable domain of TCR clone 315618 (TRBV7-2, TRBJ2-7)
CASGPKTSFYEQYF

SEQ ID NO: 631237 - protein, 10 aa, Homo sapiens
  CDR3 for alpha chain variable domain of TCR clone 315619 (TRAV1-2, TRAJ31)
CVSEDARLMF

SEQ ID NO: 631238 - protein, 17 aa, Homo sapiens
  CDR3 for beta chain variable domain of TCR clone 315619 (TRBV7-8, TRBJ2-6)
CASSAGTGGAGANVLTF

SEQ ID NO: 631239 - protein, 14 aa, Homo sapiens
  CDR3 for alpha chain variable domain of TCR clone 315620 (TRAV12-2, TRAJ6)
CAVNVSRKLHNYIL

SEQ ID NO: 631240 - protein, 12 aa, Homo sapiens
  CDR3 for beta chain variable domain of TCR clone 315620 (TRBV29-1, TRBJ2-3)
CSVTGGADTQYF

SEQ ID NO: 631241 - protein, 11 aa, Homo sapiens
  CDR3 for alpha chain variable domain of TCR clone 315621 (TRAV25, TRAJ5)
CRGGGRRALTF

SEQ ID NO: 631242 - protein, 15 aa, Homo sapiens
  CDR3 for beta chain variable domain of TCR clone 315621 (TRBV9, TRBJ1-2)
CASSVVGQANYGDTF

SEQ ID NO: 631243 - protein, 13 aa, Homo sapiens
  CDR3 for alpha chain variable domain of TCR clone 315622 (TRAV21, TRAJ45)
CAVMGGGADGLTF

SEQ ID NO: 631244 - protein, 16 aa, Homo sapiens
  CDR3 for beta chain variable domain of TCR clone 315622 (TRBV20-1, TRBJ2-1)
CSARAHLAGGRGEQFF

SEQ ID NO: 631245 - protein, 16 aa, Homo sapiens
  CDR3 for alpha chain variable domain of TCR clone 315623 (TRAV16, TRAJ52)
CALSAAGGTSYGKLTF

SEQ ID NO: 631246 - protein, 13 aa, Homo sapiens
  CDR3 for beta chain variable domain of TCR clone 315623 (TRBV3-1, TRBJ1-5)
CASSQFGDQTQHF

SEQ ID NO: 631247 - protein, 14 aa, Homo sapiens
  CDR3 for alpha chain variable domain of TCR clone 315624 (TRAV8-3, TRAJ9)
CAVVYNTVGFKTIF

SEQ ID NO: 631248 - protein, 15 aa, Homo sapiens
  CDR3 for beta chain variable domain of TCR clone 315624 (TRBV13, TRBJ1-5)
CASSFGQGGVQPQHF

SEQ ID NO: 631249 - protein, 14 aa, Homo sapiens
  CDR3 for alpha chain variable domain of TCR clone 315625 (TRAV13-2, TRAJ15)
CAENPNQAGTALIS

SEQ ID NO: 631250 - protein, 16 aa, Homo sapiens
  CDR3 for beta chain variable domain of TCR clone 315625 (TRBV12-4, TRBJ1-2)
CASSPTATGKTRGDTF

SEQ ID NO: 631251 - protein, 15 aa, Homo sapiens
  CDR3 for alpha chain variable domain of TCR clone 315626 (TRAV35, TRAJ40)
CAGQLGTSGTYKYIF

SEQ ID NO: 631252 - protein, 15 aa, Homo sapiens
  CDR3 for beta chain variable domain of TCR clone 315626 (TRBV6-1, TRBJ2-3)
CASSERGGITDTQYF

SEQ ID NO: 631253 - protein, 15 aa, Homo sapiens
  CDR3 for alpha chain variable domain of TCR clone 315627 (TRAV12-2, TRAJ8)
CAVREENTGFQKLVF

SEQ ID NO: 631254 - protein, 15 aa, Homo sapiens
  CDR3 for beta chain variable domain of TCR clone 315627 (TRBV25-1, TRBJ1-4)
CASSPGDSTNEKLFF

SEQ ID NO: 631255 - protein, 16 aa, Homo sapiens
  CDR3 for alpha chain variable domain of TCR clone 315628 (TRAV30, TRAJ24)
CGTEIVDADSWGKFQF

SEQ ID NO: 631256 - protein, 16 aa, Homo sapiens
  CDR3 for beta chain variable domain of TCR clone 315628 (TRBV28, TRBJ1-6)
CASSPLGGEDNSPLHF

SEQ ID NO: 631257 - protein, 14 aa, Homo sapiens
  CDR3 for alpha chain variable domain of TCR clone 315629 (TRAV17, TRAJ35)
CATDRPGFGNVLHC

SEQ ID NO: 631258 - protein, 17 aa, Homo sapiens
  CDR3 for beta chain variable domain of TCR clone 315629 (TRBV11-2, TRBJ2-1)
CASSLYPPGVEYNEQFF

SEQ ID NO: 631259 - protein, 14 aa, Homo sapiens
  CDR3 for alpha chain variable domain of TCR clone 315630 (TRAV3, TRAJ15)
CTVRDNQAGTALIF

SEQ ID NO: 631260 - protein, 12 aa, Homo sapiens
  CDR3 for beta chain variable domain of TCR clone 315630 (TRBV7-2, TRBJ1-6)
CASSLSSSPLHF

SEQ ID NO: 631261 - protein, 13 aa, Homo sapiens
  CDR3 for alpha chain variable domain of TCR clone 315631 (TRAV2, TRAJ40)
CAVVTSGTYKYIF

SEQ ID NO: 631262 - protein, 14 aa, Homo sapiens
  CDR3 for beta chain variable domain of TCR clone 315631 (TRBV7-2, TRBJ2-1)
CASSLGVGYNEQFF

SEQ ID NO: 631263 - protein, 13 aa, Homo sapiens
  CDR3 for alpha chain variable domain of TCR clone 315632 (TRAV1-1, TRAJ9)
CAAKNNGGFETIF

SEQ ID NO: 631264 - protein, 14 aa, Homo sapiens
  CDR3 for beta chain variable domain of TCR clone 315632 (TRBV20-1, TRBJ2-1)
CSAQIGGSANEQFF

SEQ ID NO: 631265 - protein, 12 aa, Homo sapiens
  CDR3 for alpha chain variable domain of TCR clone 315633 (TRAV1-1, TRAJ9)
CALNTGGFKTVF

SEQ ID NO: 631266 - protein, 13 aa, Homo sapiens
  CDR3 for beta chain variable domain of TCR clone 315633 (TRBV29-1, TRBJ2-5)
CSAGLAGEETQYF

SEQ ID NO: 631267 - protein, 12 aa, Homo sapiens
  CDR3 for alpha chain variable domain of TCR clone 315634 (TRAV21, TRAJ49)
GAVNDGGNQFYF

SEQ ID NO: 631268 - protein, 14 aa, Homo sapiens
  CDR3 for beta chain variable domain of TCR clone 315634 (TRBV18, TRBJ2-7)
CASSPRGGSYEQYF

SEQ ID NO: 631269 - protein, 17 aa, Homo sapiens
  CDR3 for alpha chain variable domain of TCR clone 315635 (TRAV14/DV4, TRAJ28)
CAMREGYSGAGSYQLTF

SEQ ID NO: 631270 - protein, 15 aa, Homo sapiens
  CDR3 for beta chain variable domain of TCR clone 315635 (TRBV3-1, TRBJ1-2)
CASSHPGTPGYGYTF

SEQ ID NO: 631271 - protein, 17 aa, Homo sapiens
  CDR3 for alpha chain variable domain of TCR clone 315636 (TRAV26-1, TRAJ53)
CIVRVDDSGGSNYKLTF

SEQ ID NO: 631272 - protein, 14 aa, Homo sapiens
  CDR3 for beta chain variable domain of TCR clone 315636 (TRBV5-5, TRBJ1-5)
CASSGQGVDQPQHF

SEQ ID NO: 631273 - protein, 15 aa, Homo sapiens
  CDR3 for alpha chain variable domain of TCR clone 315637 (TRAV2, TRAJ24)
CAVVRLKNSWGKLQF

SEQ ID NO: 631274 - protein, 15 aa, Homo sapiens
  CDR3 for beta chain variable domain of TCR clone 315637 (TRBV5-4, TRBJ2-3)
CASSLDQRATDTQYF

SEQ ID NO: 631275 - protein, 14 aa, Homo sapiens
  CDR3 for alpha chain variable domain of TCR clone 315638 (TRAV16, TRAJ32)
CALKLGGATNKLIF

SEQ ID NO: 631276 - protein, 12 aa, Homo sapiens
  CDR3 for beta chain variable domain of TCR clone 315638 (TRBV19, TRBJ1-4)
CASKDWPGGLFF

SEQ ID NO: 631277 - protein, 13 aa, Homo sapiens
  CDR3 for alpha chain variable domain of TCR clone 315639 (TRAV27, TRAJ6)
CAGGTRGSYIPTF

SEQ ID NO: 631278 - protein, 14 aa, Homo sapiens
  CDR3 for beta chain variable domain of TCR clone 315639 (TRBV11-2, TRBJ2-5)
CASRPLAGRETQYF

SEQ ID NO: 631279 - protein, 10 aa, Homo sapiens
  CDR3 for alpha chain variable domain of TCR clone 315640 (TRAV26-1, TRAJ40)
CIAGTYKYIF

SEQ ID NO: 631280 - protein, 13 aa, Homo sapiens
  CDR3 for beta chain variable domain of TCR clone 315640 (TRBV7-7, TRBJ2-3)
CASSLSRADTQYF

SEQ ID NO: 631281 - protein, 16 aa, Homo sapiens
  CDR3 for alpha chain variable domain of TCR clone 315641 (TRAV12-2, TRAJ45)
CAVIFLSGGGADGLTL

SEQ ID NO: 631282 - protein, 19 aa, Homo sapiens
  CDR3 for beta chain variable domain of TCR clone 315641 (TRBV28, TRBJ2-4)
CASSLQPGGPAHSKNIQYF

SEQ ID NO: 631283 - protein, 14 aa, Homo sapiens
  CDR3 for alpha chain variable domain of TCR clone 315642 (TRAV27, TRAJ22)
SAGLPSGSARQLTF

SEQ ID NO: 631284 - protein, 16 aa, Homo sapiens
  CDR3 for beta chain variable domain of TCR clone 315642 (TRBV7-3, TRBJ2-2)
CASSLKRGTLSGELFF

SEQ ID NO: 631285 - protein, 13 aa, Homo sapiens
  CDR3 for alpha chain variable domain of TCR clone 315643 (TRAV12-3, TRAJ13)
CAMSSGGYQKVTF

SEQ ID NO: 631286 - protein, 13 aa, Homo sapiens
  CDR3 for beta chain variable domain of TCR clone 315643 (TRBV7-3, TRBJ2-2)
CASSLNVLGELFF

SEQ ID NO: 631287 - protein, 14 aa, Homo sapiens
  CDR3 for alpha chain variable domain of TCR clone 315644 (TRAV17, TRAJ54)
CAKDANQGAQKLVF

SEQ ID NO: 631288 - protein, 12 aa, Homo sapiens
  CDR3 for beta chain variable domain of TCR clone 315644 (TRBV6-3, TRBJ2-1)
CASSGSYNEQFF

SEQ ID NO: 631289 - protein, 14 aa, Homo sapiens
  CDR3 for alpha chain variable domain of TCR clone 315645 (TRAV2, TRAJ9)
CAVEDRSGGFKTIF

SEQ ID NO: 631290 - protein, 15 aa, Homo sapiens
  CDR3 for beta chain variable domain of TCR clone 315645 (TRBV6-3, TRBJ2-7)
CASSSPGTVLYEQYF

SEQ ID NO: 631291 - protein, 13 aa, Homo sapiens
  CDR3 for alpha chain variable domain of TCR clone 315646 (TRAV17, TRAJ5)
CALRGTGRRALTF

SEQ ID NO: 631292 - protein, 18 aa, Homo sapiens
  CDR3 for beta chain variable domain of TCR clone 315646 (TRBV25-1, TRBJ1-2)
CASSGLQNGQGLIFGYTF

SEQ ID NO: 631293 - protein, 16 aa, Homo sapiens
  CDR3 for alpha chain variable domain of TCR clone 315647 (TRAV13-1, TRAJ52)
CAAIMRGGTSYGKLTF

SEQ ID NO: 631294 - protein, 14 aa, Homo sapiens
  CDR3 for beta chain variable domain of TCR clone 315647 (TRBV7-6, TRBJ2-4)
CASSPAPGSFLWYF

SEQ ID NO: 631295 - protein, 12 aa, Homo sapiens
  CDR3 for alpha chain variable domain of TCR clone 315648 (TRAV29/DV5, TRAJ49)
CAATDTGNQFYF

SEQ ID NO: 631296 - protein, 16 aa, Homo sapiens
  CDR3 for beta chain variable domain of TCR clone 315648 (TRBV12-5, TRBJ2-5)
CASGPRTSGNQETQYF

SEQ ID NO: 631297 - protein, 14 aa, Homo sapiens
  CDR3 for alpha chain variable domain of TCR clone 315649 (TRAV17, TRAJ16)
CATADFSDGQKLLF

SEQ ID NO: 631298 - protein, 12 aa, Homo sapiens
  CDR3 for beta chain variable domain of TCR clone 315649 (TRBV11-2, TRBJ2-1)
CASRPGNNEQFF

SEQ ID NO: 631299 - protein, 16 aa, Homo sapiens
  CDR3 for alpha chain variable domain of TCR clone 315650 (TRAV12-2, TRAJ5)
CAVTRGSGTGRRALTF

SEQ ID NO: 631300 - protein, 15 aa, Homo sapiens
  CDR3 for beta chain variable domain of TCR clone 315650 (TRBV9, TRBJ2-1)
CASSGGTGELNEQFF

SEQ ID NO: 631301 - protein, 13 aa, Homo sapiens
  CDR3 for alpha chain variable domain of TCR clone 315651 (TRAV8-1, TRAJ5)
CAVRTDTGRALTF

SEQ ID NO: 631302 - protein, 12 aa, Homo sapiens
  CDR3 for beta chain variable domain of TCR clone 315651 (TRBV11-2, TRBJ2-1)
CASSPGNNEQFF

SEQ ID NO: 631303 - protein, 15 aa, Homo sapiens
  CDR3 for alpha chain variable domain of TCR clone 315652 (TRAV17, TRAJ57)
CATGPSQGGSEKLVF

SEQ ID NO: 631304 - protein, 16 aa, Homo sapiens
  CDR3 for beta chain variable domain of TCR clone 315652 (TRBV7-2, TRBJ2-7)
CASSLGLAGGAYEQYF

SEQ ID NO: 631305 - protein, 16 aa, Homo sapiens
  CDR3 for alpha chain variable domain of TCR clone 315653 (TRAV3, TRAJ10)
CAVGDMNAGGGNKLTF

SEQ ID NO: 631306 - protein, 16 aa, Homo sapiens
  CDR3 for beta chain variable domain of TCR clone 315653 (TRBV6-3, TRBJ1-2)
CASSYSRRASNYGYTF

SEQ ID NO: 631307 - protein, 13 aa, Homo sapiens
  CDR3 for alpha chain variable domain of TCR clone 315654 (TRAV36/DV7, TRAJ7)
CAGTRYGNNRVAF

SEQ ID NO: 631308 - protein, 15 aa, Homo sapiens
  CDR3 for beta chain variable domain of TCR clone 315654 (TRBV11-3, TRBJ2-7)
CASSPGPASSYEQYF

SEQ ID NO: 631309 - protein, 13 aa, Homo sapiens
  CDR3 for alpha chain variable domain of TCR clone 315655 (TRAV21, TRAJ11)
CAVPNSGNSTLTF

SEQ ID NO: 631310 - protein, 13 aa, Homo sapiens
  CDR3 for beta chain variable domain of TCR clone 315655 (TRBV3-1, TRBJ2-7)
CASSLRDGYEQYF

SEQ ID NO: 631311 - protein, 14 aa, Homo sapiens
  CDR3 for alpha chain variable domain of TCR clone 315656 (TRAV12-2, TRAJ40)
CAVKIPQEPTNTSF

SEQ ID NO: 631312 - protein, 15 aa, Homo sapiens
  CDR3 for beta chain variable domain of TCR clone 315656 (TRBV20-1, TRBJ1-4)
CSARREWGVNEKLFF

SEQ ID NO: 631313 - protein, 13 aa, Homo sapiens
  CDR3 for alpha chain variable domain of TCR clone 315657 (TRAV27, TRAJ6)
CAGGTRGSHIPTF

SEQ ID NO: 631314 - protein, 13 aa, Homo sapiens
  CDR3 for beta chain variable domain of TCR clone 315657 (TRBV4-1, TRBJ2-2)
CASSQENTGELFF

SEQ ID NO: 631315 - protein, 14 aa, Homo sapiens
  CDR3 for alpha chain variable domain of TCR clone 315658 (TRAV8-2, TRAJ4)
CVVSPSGGYNKLIF

SEQ ID NO: 631316 - protein, 11 aa, Homo sapiens
  CDR3 for beta chain variable domain of TCR clone 315658 (TRBV7-8, TRBJ2-7)
CASSLSLEQYF

SEQ ID NO: 631317 - protein, 15 aa, Homo sapiens
  CDR3 for alpha chain variable domain of TCR clone 315659 (TRAV25, TRAJ52)
CAGRPGGTSYGKLTF

SEQ ID NO: 631318 - protein, 13 aa, Homo sapiens
  CDR3 for beta chain variable domain of TCR clone 315659 (TRBV10-2, TRBJ2-5)
CASSEGGKETQYF

SEQ ID NO: 631319 - protein, 15 aa, Homo sapiens
  CDR3 for alpha chain variable domain of TCR clone 315660 (TRAV3, TRAJ24)
CAAGMTTDSWGKFRF

SEQ ID NO: 631320 - protein, 14 aa, Homo sapiens
  CDR3 for beta chain variable domain of TCR clone 315660 (TRBV4-1, TRBJ2-2)
CASRRGRASGELFF

SEQ ID NO: 631321 - protein, 16 aa, Homo sapiens
  CDR3 for alpha chain variable domain of TCR clone 315661 (TRAV16, TRAJ4)
CALSRMFSGGYTKLIF

SEQ ID NO: 631322 - protein, 16 aa, Homo sapiens
  CDR3 for beta chain variable domain of TCR clone 315661 (TRBV12-4, TRBJ1-5)
CASSRPVGGSNQPQHF

SEQ ID NO: 631323 - protein, 15 aa, Homo sapiens
  CDR3 for alpha chain variable domain of TCR clone 315662 (TRAV23/DV6, TRAJ45)
CAASARGGGADGLHF

SEQ ID NO: 631324 - protein, 15 aa, Homo sapiens
  CDR3 for beta chain variable domain of TCR clone 315662 (TRBV3-1, TRBJ2-5)
CASSRGQASWKTQYF

SEQ ID NO: 631325 - protein, 15 aa, Homo sapiens
  CDR3 for alpha chain variable domain of TCR clone 315663 (TRAV8-4, TRAJ7)
CAVSGGNYGNNRLAF

SEQ ID NO: 631326 - protein, 11 aa, Homo sapiens
  CDR3 for beta chain variable domain of TCR clone 315663 (TRBV20-1, TRBJ2-1)
YSLSSGSEQFF

SEQ ID NO: 631327 - protein, 13 aa, Homo sapiens
  CDR3 for alpha chain variable domain of TCR clone 315664 (TRAV8-6, TRAJ48)
CAGVNFGNEKLTF

SEQ ID NO: 631328 - protein, 12 aa, Homo sapiens
  CDR3 for beta chain variable domain of TCR clone 315664 (TRBV11-2, TRBJ2-2)
CASSLPTGELFF

SEQ ID NO: 631329 - protein, 16 aa, Homo sapiens
  CDR3 for alpha chain variable domain of TCR clone 315665 (TRAV12-3, TRAJ53)
CAMSPGSGGSNYKLTF

SEQ ID NO: 631330 - protein, 10 aa, Homo sapiens
  CDR3 for beta chain variable domain of TCR clone 315665 (TRBV6-3, TRBJ2-2)
CASRDGELFF

SEQ ID NO: 631331 - protein, 12 aa, Homo sapiens
  CDR3 for alpha chain variable domain of TCR clone 315666 (TRAV20, TRAJ56)
CAVTGSNSKLTF

SEQ ID NO: 631332 - protein, 14 aa, Homo sapiens
  CDR3 for beta chain variable domain of TCR clone 315666 (TRBV20-1, TRBJ2-5)
CSALVPGYQETQYS

SEQ ID NO: 631333 - protein, 11 aa, Homo sapiens
  CDR3 for alpha chain variable domain of TCR clone 315667 (TRAV14/DV4, TRAJ3)
RLGSSASKIIF

SEQ ID NO: 631334 - protein, 15 aa, Homo sapiens
  CDR3 for beta chain variable domain of TCR clone 315667 (TRBV20-1, TRBJ2-7)
CSAESGTSGAYEQYF

SEQ ID NO: 631335 - protein, 23 aa, Homo sapiens
  CDR3 for alpha chain variable domain of TCR clone 315668 (TRAV12-2, TRAJ22)
CAVSFRVHPGPPIVPGSARQLTF

SEQ ID NO: 631336 - protein, 13 aa, Homo sapiens
  CDR3 for beta chain variable domain of TCR clone 315668 (TRBV12-4, TRBJ1-2)
CASSFDSNYGYTF

SEQ ID NO: 631337 - protein, 14 aa, Homo sapiens
  CDR3 for alpha chain variable domain of TCR clone 315669 (TRAV26-1, TRAJ38)
CIAANAGNNRKLIW

SEQ ID NO: 631338 - protein, 13 aa, Homo sapiens
  CDR3 for beta chain variable domain of TCR clone 315669 (TRBV19, TRBJ1-2)
CASSVPGQDGYTF

SEQ ID NO: 631339 - protein, 15 aa, Homo sapiens
  CDR3 for alpha chain variable domain of TCR clone 315670 (TRAV12-1, TRAJ23)
CVVPRGPGRKAYLRT

SEQ ID NO: 631340 - protein, 15 aa, Homo sapiens
  CDR3 for beta chain variable domain of TCR clone 315670 (TRBV27, TRBJ2-5)
CASSLYPRGGETQYF

SEQ ID NO: 631341 - protein, 14 aa, Homo sapiens
  CDR3 for alpha chain variable domain of TCR clone 315671 (TRAV1-2, TRAJ8)
CAVREDTGFQKIVF

SEQ ID NO: 631342 - protein, 15 aa, Homo sapiens
  CDR3 for beta chain variable domain of TCR clone 315671 (TRBV6-3, TRBJ2-7)
CASSPPGTVFYEQYF

SEQ ID NO: 631343 - protein, 14 aa, Homo sapiens
  CDR3 for alpha chain variable domain of TCR clone 315672 (TRAV12-1, TRAJ17)
CVVNYKAAGNKLTF

SEQ ID NO: 631344 - protein, 13 aa, Homo sapiens
  CDR3 for beta chain variable domain of TCR clone 315672 (TRBV14, TRBJ1-1)
CASSREFGTEAFF

SEQ ID NO: 631345 - protein, 12 aa, Homo sapiens
  CDR3 for alpha chain variable domain of TCR clone 315673 (TRAV21, TRAJ3)
CCFYSSASKIIF

SEQ ID NO: 631346 - protein, 11 aa, Homo sapiens
  CDR3 for beta chain variable domain of TCR clone 315673 (TRBV12-4, TRBJ2-3)
CASTATDTQYF

SEQ ID NO: 631347 - protein, 12 aa, Homo sapiens
  CDR3 for alpha chain variable domain of TCR clone 315674 (TRAV12-2, TRAJ8)
CAVNTGFQKLIF

SEQ ID NO: 631348 - protein, 15 aa, Homo sapiens
  CDR3 for beta chain variable domain of TCR clone 315674 (TRBV7-8, TRBJ1-5)
CASSLERRGLEPQHF

SEQ ID NO: 631349 - protein, 14 aa, Homo sapiens
  CDR3 for alpha chain variable domain of TCR clone 315675 (TRAV8-3, TRAJ39)
CAVGANNAGKMLTF

SEQ ID NO: 631350 - protein, 16 aa, Homo sapiens
  CDR3 for beta chain variable domain of TCR clone 315675 (TRBV6-1, TRBJ2-5)
CASSETLDRGAETQYF

SEQ ID NO: 631351 - protein, 16 aa, Homo sapiens
  CDR3 for alpha chain variable domain of TCR clone 315676 (TRAV3, TRAJ21)
CAVRDIERGNFNKFYF

SEQ ID NO: 631352 - protein, 11 aa, Homo sapiens
  CDR3 for beta chain variable domain of TCR clone 315676 (TRBV7-9, TRBJ2-3)
CASSYTDTQYF

SEQ ID NO: 631353 - protein, 14 aa, Homo sapiens
  CDR3 for alpha chain variable domain of TCR clone 315677 (TRAV1-2, TRAJ8)
CAVSEDTGFQKLVF

SEQ ID NO: 631354 - protein, 15 aa, Homo sapiens
  CDR3 for beta chain variable domain of TCR clone 315677 (TRBV28, TRBJ2-3)
CAPTFRDWSTDTQYF

SEQ ID NO: 631355 - protein, 12 aa, Homo sapiens
  CDR3 for alpha chain variable domain of TCR clone 315678 (TRAV29/DV5, TRAJ34)
CAASGNTDKLIF

SEQ ID NO: 631356 - protein, 14 aa, Homo sapiens
  CDR3 for beta chain variable domain of TCR clone 315678 (TRBV18, TRBJ2-7)
CASSPRGGAYEQYF

SEQ ID NO: 631357 - protein, 13 aa, Homo sapiens
  CDR3 for alpha chain variable domain of TCR clone 315679 (TRAV3, TRAJ9)
CAFWNTGGFKTIF

SEQ ID NO: 631358 - protein, 14 aa, Homo sapiens
  CDR3 for beta chain variable domain of TCR clone 315679 (TRBV11-3, TRBJ2-1)
CASSATTSGSIQFF

SEQ ID NO: 631359 - protein, 14 aa, Homo sapiens
  CDR3 for alpha chain variable domain of TCR clone 315680 (TRAV9-2, TRAJ38)
CALSRAGNNRKLIW

SEQ ID NO: 631360 - protein, 19 aa, Homo sapiens
  CDR3 for beta chain variable domain of TCR clone 315680 (TRBV6-3, TRBJ1-2)
CASSYSKGRTGPPNYGYTF

SEQ ID NO: 631361 - protein, 13 aa, Homo sapiens
  CDR3 for alpha chain variable domain of TCR clone 315681 (TRAV39, TRAJ7)
CAVDTNGNNRLAF

SEQ ID NO: 631362 - protein, 16 aa, Homo sapiens
  CDR3 for beta chain variable domain of TCR clone 315681 (TRBV30, TRBJ2-5)
CAWSQLAGGPMETQYF

SEQ ID NO: 631363 - protein, 10 aa, Homo sapiens
  CDR3 for alpha chain variable domain of TCR clone 315682 (TRAV5, TRAJ34)
CAEDTDKLIF

SEQ ID NO: 631364 - protein, 12 aa, Homo sapiens
  CDR3 for beta chain variable domain of TCR clone 315682 (TRBV11-2, TRBJ2-2)
CASTLGGGELFF

SEQ ID NO: 631365 - protein, 11 aa, Homo sapiens
  CDR3 for alpha chain variable domain of TCR clone 315683 (TRAV12-2, )
CAVASLAATIS

SEQ ID NO: 631366 - protein, 16 aa, Homo sapiens
  CDR3 for beta chain variable domain of TCR clone 315683 (TRBV5-1, TRBJ2-2)
CASSSRTGGRTGELFF

SEQ ID NO: 631367 - protein, 17 aa, Homo sapiens
  CDR3 for alpha chain variable domain of TCR clone 315684 (TRAV3, TRAJ6)
CAVRDGPRAGGSYIPNF

SEQ ID NO: 631368 - protein, 15 aa, Homo sapiens
  CDR3 for beta chain variable domain of TCR clone 315684 (TRBV20-1, TRBJ1-1)
CSASWDRFLNTEAFF

SEQ ID NO: 631369 - protein, 13 aa, Homo sapiens
  CDR3 for alpha chain variable domain of TCR clone 315685 (TRAV2, TRAJ11)
CAVEEIGYSTLTF

SEQ ID NO: 631370 - protein, 16 aa, Homo sapiens
  CDR3 for beta chain variable domain of TCR clone 315685 (TRBV20-1, TRBJ1-4)
CSAPGQGLLTNEKLFF

SEQ ID NO: 631371 - protein, 17 aa, Homo sapiens
  CDR3 for alpha chain variable domain of TCR clone 315686 (TRAV12-2, TRAJ42)
CAVNILNYGVSQGNLIF

SEQ ID NO: 631372 - protein, 13 aa, Homo sapiens
  CDR3 for beta chain variable domain of TCR clone 315686 (TRBV3-1, TRBJ1-5)
CASSQALDPPQHF

SEQ ID NO: 631373 - protein, 11 aa, Homo sapiens
  CDR3 for alpha chain variable domain of TCR clone 315687 (TRAV21, TRAJ27)
CAVRIQANQPL

SEQ ID NO: 631374 - protein, 16 aa, Homo sapiens
  CDR3 for beta chain variable domain of TCR clone 315687 (TRBV3-1, TRBJ2-7)
CASSQGATGVAYEQYF

SEQ ID NO: 631375 - protein, 17 aa, Homo sapiens
  CDR3 for alpha chain variable domain of TCR clone 315688 (TRAV4, TRAJ18)
CLVGERSVGATLGRLYF

SEQ ID NO: 631376 - protein, 11 aa, Homo sapiens
  CDR3 for beta chain variable domain of TCR clone 315688 (TRBV20-1, TRBJ2-7)
CSGRQGHEQYF

SEQ ID NO: 631377 - protein, 14 aa, Homo sapiens
  CDR3 for alpha chain variable domain of TCR clone 315689 (TRAV12-3, TRAJ15)
CAMIPPQARTALIL

SEQ ID NO: 631378 - protein, 12 aa, Homo sapiens
  CDR3 for beta chain variable domain of TCR clone 315689 (TRBV11-2, TRBJ2-2)
CASSFGGGELFF

SEQ ID NO: 631379 - protein, 16 aa, Homo sapiens
  CDR3 for alpha chain variable domain of TCR clone 315690 (TRAV16, TRAJ57)
CAPYLITQGGTEKLVF

SEQ ID NO: 631380 - protein, 17 aa, Homo sapiens
  CDR3 for beta chain variable domain of TCR clone 315690 (TRBV24-1, TRBJ2-4)
CATSDAEARGVRNVQYF

SEQ ID NO: 631381 - protein, 16 aa, Homo sapiens
  CDR3 for alpha chain variable domain of TCR clone 315691 (TRAV8-3, TRAJ44)
CAVGTLMTVTASKLIF

SEQ ID NO: 631382 - protein, 15 aa, Homo sapiens
  CDR3 for beta chain variable domain of TCR clone 315691 (TRBV10-2, TRBJ2-6)
CASSEQGTGANDLSF

SEQ ID NO: 631383 - protein, 13 aa, Homo sapiens
  CDR3 for alpha chain variable domain of TCR clone 315692 (TRAV35, TRAJ44)
CAGLSGTARKLTF

SEQ ID NO: 631384 - protein, 17 aa, Homo sapiens
  CDR3 for beta chain variable domain of TCR clone 315692 (TRBV7-8, TRBJ1-2)
CASSLRPLQGHLYGYTF

SEQ ID NO: 631385 - protein, 13 aa, Homo sapiens
  CDR3 for alpha chain variable domain of TCR clone 315693 (TRAV12-3, TRAJ9)
CAMRNTGGFKTIL

SEQ ID NO: 631386 - protein, 14 aa, Homo sapiens
  CDR3 for beta chain variable domain of TCR clone 315693 (TRBV11-2, TRBJ2-7)
CASSATGEGYEQYF

SEQ ID NO: 631387 - protein, 14 aa, Homo sapiens
  CDR3 for alpha chain variable domain of TCR clone 315694 (TRAV23/DV6, TRAJ22)
CAASVYGSARQLTF

SEQ ID NO: 631388 - protein, 16 aa, Homo sapiens
  CDR3 for beta chain variable domain of TCR clone 315694 (TRBV19, TRBJ2-2)
CASSFPGQGLAGELFF

SEQ ID NO: 631389 - protein, 20 aa, Homo sapiens
  CDR3 for alpha chain variable domain of TCR clone 315695 (TRAV27, TRAJ10)
ASTSVPSRGILTGGGKKLTF

SEQ ID NO: 631390 - protein, 15 aa, Homo sapiens
  CDR3 for beta chain variable domain of TCR clone 315695 (TRBV9, TRBJ2-3)
CASSLEGGLTDTQYF

SEQ ID NO: 631391 - protein, 18 aa, Homo sapiens
  CDR3 for alpha chain variable domain of TCR clone 315696 (TRAV21, TRAJ52)
CAVRPSPAGGTSYGKLTF

SEQ ID NO: 631392 - protein, 18 aa, Homo sapiens
  CDR3 for beta chain variable domain of TCR clone 315696 (TRBV4-1, TRBJ1-5)
CASSQDPRGQGLHPPQHF

SEQ ID NO: 631393 - protein, 11 aa, Homo sapiens
  CDR3 for alpha chain variable domain of TCR clone 315697 (TRAV12-2, TRAJ29)
FAVTLRSPPVF

SEQ ID NO: 631394 - protein, 16 aa, Homo sapiens
  CDR3 for beta chain variable domain of TCR clone 315697 (TRBV19, TRBJ1-5)
CASSIDRGGPRQPQHL

SEQ ID NO: 631395 - protein, 14 aa, Homo sapiens
  CDR3 for alpha chain variable domain of TCR clone 315698 (TRAV12-2, TRAJ13)
CAVKKTGGYQKVTF

SEQ ID NO: 631396 - protein, 14 aa, Homo sapiens
  CDR3 for beta chain variable domain of TCR clone 315698 (TRBV5-7, TRBJ2-3)
CASSYFGQVHTQYF

SEQ ID NO: 631397 - protein, 14 aa, Homo sapiens
  CDR3 for alpha chain variable domain of TCR clone 315699 (TRAV12-2, TRAJ13)
CAVKKTGGYQKVTF

SEQ ID NO: 631398 - protein, 16 aa, Homo sapiens
  CDR3 for beta chain variable domain of TCR clone 315699 (TRBV7-2, TRBJ2-5)
CASSYKTGISLETQYF

SEQ ID NO: 631399 - protein, 12 aa, Homo sapiens
  CDR3 for alpha chain variable domain of TCR clone 315700 (TRAV12-3, TRAJ17)
CAMTFTGNKLTF

SEQ ID NO: 631400 - protein, 15 aa, Homo sapiens
  CDR3 for beta chain variable domain of TCR clone 315700 (TRBV20-1, TRBJ2-7)
CSARDRVSGMDEQFF

SEQ ID NO: 631401 - protein, 14 aa, Homo sapiens
  CDR3 for alpha chain variable domain of TCR clone 315701 (TRAV12-3, TRAJ9)
CAMSPNTGGFKTIF

SEQ ID NO: 631402 - protein, 14 aa, Homo sapiens
  CDR3 for beta chain variable domain of TCR clone 315701 (TRBV7-2, TRBJ1-1)
CASSFVTGTTEAFF

SEQ ID NO: 631403 - protein, 14 aa, Homo sapiens
  CDR3 for alpha chain variable domain of TCR clone 315702 (TRAV26-1, TRAJ38)
CIADNAGHNRKLIW

SEQ ID NO: 631404 - protein, 13 aa, Homo sapiens
  CDR3 for beta chain variable domain of TCR clone 315702 (TRBV20-1, TRBJ1-1)
CSARGGGNTEAFL

SEQ ID NO: 631405 - protein, 14 aa, Homo sapiens
  CDR3 for alpha chain variable domain of TCR clone 315703 (TRAV12-1, TRAJ41)
RVVLNSNSGYALNF

SEQ ID NO: 631406 - protein, 14 aa, Homo sapiens
  CDR3 for beta chain variable domain of TCR clone 315703 (TRBV5-1, TRBJ2-7)
CASSRGESLYEQYF

SEQ ID NO: 631407 - protein, 16 aa, Homo sapiens
  CDR3 for alpha chain variable domain of TCR clone 315704 (TRAV3, TRAJ23)
CAVQIGIYNQGGKLIF

SEQ ID NO: 631408 - protein, 17 aa, Homo sapiens
  CDR3 for beta chain variable domain of TCR clone 315704 (TRBV10-3, TRBJ2-6)
CAISESTAPSGANVLTF

SEQ ID NO: 631409 - protein, 11 aa, Homo sapiens
  CDR3 for alpha chain variable domain of TCR clone 315705 (TRAV1-1, TRAJ23)
CAVRQGGKLIF

SEQ ID NO: 631410 - protein, 20 aa, Homo sapiens
  CDR3 for beta chain variable domain of TCR clone 315705 (TRBV7-8, TRBJ2-2)
CASSHLFPGPTVHSTGGLFF

SEQ ID NO: 631411 - protein, 16 aa, Homo sapiens
  CDR3 for alpha chain variable domain of TCR clone 315706 (TRAV14/DV4, TRAJ53)
CAMREGGGGSNYKLTF

SEQ ID NO: 631412 - protein, 15 aa, Homo sapiens
  CDR3 for beta chain variable domain of TCR clone 315706 (TRBV13, TRBJ2-1)
CASSLLSGLNNEQFF

SEQ ID NO: 631413 - protein, 17 aa, Homo sapiens
  CDR3 for alpha chain variable domain of TCR clone 315707 (TRAV36/DV7, TRAJ52)
CAVAQRAGGTSYGKLKF

SEQ ID NO: 631414 - protein, 15 aa, Homo sapiens
  CDR3 for beta chain variable domain of TCR clone 315707 (TRBV6-5, TRBJ1-2)
CASSYSQAFNYGYTF

SEQ ID NO: 631415 - protein, 14 aa, Homo sapiens
  CDR3 for alpha chain variable domain of TCR clone 315708 (TRAV12-2, TRAJ13)
CAVKKTGGYQKVTF

SEQ ID NO: 631416 - protein, 14 aa, Homo sapiens
  CDR3 for beta chain variable domain of TCR clone 315708 (TRBV10-3, TRBJ2-1)
CAISSDLVYNEQFF

SEQ ID NO: 631417 - protein, 12 aa, Homo sapiens
  CDR3 for alpha chain variable domain of TCR clone 315709 (TRAV29/DV5, TRAJ49)
CAATAAGNQFYF

SEQ ID NO: 631418 - protein, 12 aa, Homo sapiens
  CDR3 for beta chain variable domain of TCR clone 315709 (TRBV12-4, TRBJ2-7)
CASSLGGYEQYF

SEQ ID NO: 631419 - protein, 17 aa, Homo sapiens
  CDR3 for alpha chain variable domain of TCR clone 315710 (TRAV3, TRAJ6)
CAVRDGPRAGGSYIPTF

SEQ ID NO: 631420 - protein, 13 aa, Homo sapiens
  CDR3 for beta chain variable domain of TCR clone 315710 (TRBV7-7, TRBJ2-2)
CASSLTSAGELFF

SEQ ID NO: 631421 - protein, 12 aa, Homo sapiens
  CDR3 for alpha chain variable domain of TCR clone 315711 (TRAV13-2, TRAJ8)
CAPWLGFQKLVF

SEQ ID NO: 631422 - protein, 19 aa, Homo sapiens
  CDR3 for beta chain variable domain of TCR clone 315711 (TRBV4-3, TRBJ2-7)
CASSQEFIGWQVTPYEQYF

SEQ ID NO: 631423 - protein, 12 aa, Homo sapiens
  CDR3 for alpha chain variable domain of TCR clone 315712 (TRAV12-1, TRAJ40)
CVFYSGTYKYIF

SEQ ID NO: 631424 - protein, 14 aa, Homo sapiens
  CDR3 for beta chain variable domain of TCR clone 315712 (TRBV6-1, TRBJ1-3)
CASVQGGGGNTIYF

SEQ ID NO: 631425 - protein, 14 aa, Homo sapiens
  CDR3 for alpha chain variable domain of TCR clone 315713 (TRAV13-1, TRAJ9)
CAASALTGGFKTIF

SEQ ID NO: 631426 - protein, 12 aa, Homo sapiens
  CDR3 for beta chain variable domain of TCR clone 315713 (TRBV6-3, TRBJ2-7)
CASSLTPYEQYF

SEQ ID NO: 631427 - protein, 16 aa, Homo sapiens
  CDR3 for alpha chain variable domain of TCR clone 315714 (TRAV1-1, TRAJ28)
CAVRDDSGAGSYQLTF

SEQ ID NO: 631428 - protein, 12 aa, Homo sapiens
  CDR3 for beta chain variable domain of TCR clone 315714 (TRBV11-2, TRBJ2-5)
CAGSLDTQTQYF

SEQ ID NO: 631429 - protein, 16 aa, Homo sapiens
  CDR3 for alpha chain variable domain of TCR clone 315715 (TRAV26-1, TRAJ36)
CIVRVPDQTGANNLFF

SEQ ID NO: 631430 - protein, 12 aa, Homo sapiens
  CDR3 for beta chain variable domain of TCR clone 315715 (TRBV29-1, TRBJ2-3)
CSVTGRADTQYF

SEQ ID NO: 631431 - protein, 18 aa, Homo sapiens
  CDR3 for alpha chain variable domain of TCR clone 315716 (TRAV13-1, TRAJ52)
CAATNPNAGGTSYGTLTF

SEQ ID NO: 631432 - protein, 15 aa, Homo sapiens
  CDR3 for beta chain variable domain of TCR clone 315716 (TRBV6-1, TRBJ2-3)
CASSARGGITDTQYF

SEQ ID NO: 631433 - protein, 10 aa, Homo sapiens
  CDR3 for alpha chain variable domain of TCR clone 315717 (TRAV21, TRAJ31)
CAVDNARLMF

SEQ ID NO: 631434 - protein, 13 aa, Homo sapiens
  CDR3 for beta chain variable domain of TCR clone 315717 (TRBV7-3, TRBJ1-1)
CASSQDWGAEAFL

SEQ ID NO: 631435 - protein, 15 aa, Homo sapiens
  CDR3 for alpha chain variable domain of TCR clone 315718 (TRAV16, TRAJ20)
CALKGGLRADYKLSY

SEQ ID NO: 631436 - protein, 16 aa, Homo sapiens
  CDR3 for beta chain variable domain of TCR clone 315718 (TRBV11-3, TRBJ2-2)
CASSSRTSPGTGELFF

SEQ ID NO: 631437 - protein, 12 aa, Homo sapiens
  CDR3 for alpha chain variable domain of TCR clone 315719 (TRAV12-2, TRAJ6)
CAVKVGSYIPTF

SEQ ID NO: 631438 - protein, 16 aa, Homo sapiens
  CDR3 for beta chain variable domain of TCR clone 315719 (TRBV7-3, TRBJ2-2)
CASSLKRGTLSGELFF

SEQ ID NO: 631439 - protein, 13 aa, Homo sapiens
  CDR3 for alpha chain variable domain of TCR clone 315720 (TRAV13-1, TRAJ13)
CAASKGRYQKVTF

SEQ ID NO: 631440 - protein, 16 aa, Homo sapiens
  CDR3 for beta chain variable domain of TCR clone 315720 (TRBV18, TRBJ1-2)
CASSPPERVTIYGYTF

SEQ ID NO: 631441 - protein, 14 aa, Homo sapiens
  CDR3 for alpha chain variable domain of TCR clone 315721 (TRAV29/DV5, TRAJ36)
CAARRKTGANNLFF

SEQ ID NO: 631442 - protein, 16 aa, Homo sapiens
  CDR3 for beta chain variable domain of TCR clone 315721 (TRBV15, TRBJ2-3)
CATSRDLGIVTDTQYF

SEQ ID NO: 631443 - protein, 17 aa, Homo sapiens
  CDR3 for alpha chain variable domain of TCR clone 315722 (TRAV3, TRAJ28)
CAVREAYSGAGSYQLTF

SEQ ID NO: 631444 - protein, 19 aa, Homo sapiens
  CDR3 for beta chain variable domain of TCR clone 315722 (TRBV28, TRBJ2-1)
CASSFSIRGSGRTRYEQFF

SEQ ID NO: 631445 - protein, 15 aa, Homo sapiens
  CDR3 for alpha chain variable domain of TCR clone 315723 (TRAV3, TRAJ47)
CAVRDIGEYGNKLVF

SEQ ID NO: 631446 - protein, 13 aa, Homo sapiens
  CDR3 for beta chain variable domain of TCR clone 315723 (TRBV4-1, TRBJ2-1)
CASSQAGGDEQFF

SEQ ID NO: 631447 - protein, 13 aa, Homo sapiens
  CDR3 for alpha chain variable domain of TCR clone 315724 (TRAV2, TRAJ40)
CAVVTSGTYKYIF

SEQ ID NO: 631448 - protein, 13 aa, Homo sapiens
  CDR3 for beta chain variable domain of TCR clone 315724 (TRBV2, TRBJ1-6)
CASGRGGISPLHF

SEQ ID NO: 631449 - protein, 17 aa, Homo sapiens
  CDR3 for alpha chain variable domain of TCR clone 315725 (TRAV21, TRAJ52)
CAVGVNAGGTSYGKLTF

SEQ ID NO: 631450 - protein, 13 aa, Homo sapiens
  CDR3 for beta chain variable domain of TCR clone 315725 (TRBV5-1, TRBJ1-2)
CASSFQGNYVYTF

SEQ ID NO: 631451 - protein, 13 aa, Homo sapiens
  CDR3 for alpha chain variable domain of TCR clone 315726 (TRAV36/DV7, TRAJ37)
CAAPFRNTSKLIF

SEQ ID NO: 631452 - protein, 14 aa, Homo sapiens
  CDR3 for beta chain variable domain of TCR clone 315726 (TRBV5-7, TRBJ1-3)
CASSLVGRGNTIYF

SEQ ID NO: 631453 - protein, 11 aa, Homo sapiens
  CDR3 for alpha chain variable domain of TCR clone 315727 (TRAV1-1, TRAJ23)
CAVRQGGMLIF

SEQ ID NO: 631454 - protein, 14 aa, Homo sapiens
  CDR3 for beta chain variable domain of TCR clone 315727 (TRBV19, TRBJ2-1)
CASPTFVLSGEQFF

SEQ ID NO: 631455 - protein, 10 aa, Homo sapiens
  CDR3 for alpha chain variable domain of TCR clone 315728 (TRAV30, TRAJ48)
CGIGYEKLTF

SEQ ID NO: 631456 - protein, 14 aa, Homo sapiens
  CDR3 for beta chain variable domain of TCR clone 315728 (TRBV7-6, TRBJ2-3)
CASSVAGGTDTQYF

SEQ ID NO: 631457 - protein, 13 aa, Homo sapiens
  CDR3 for alpha chain variable domain of TCR clone 315729 (TRAV21, TRAJ37)
CAVSSGNTGALIF

SEQ ID NO: 631458 - protein, 13 aa, Homo sapiens
  CDR3 for beta chain variable domain of TCR clone 315729 (TRBV7-6, TRBJ2-3)
CASSLRSDNTQYF

SEQ ID NO: 631459 - protein, 13 aa, Homo sapiens
  CDR3 for alpha chain variable domain of TCR clone 315730 (TRAV9-2, TRAJ49)
CALIQIGGNQFDF

SEQ ID NO: 631460 - protein, 15 aa, Homo sapiens
  CDR3 for beta chain variable domain of TCR clone 315730 (TRBV9, TRBJ1-6)
CASSVAGTGDSPLHF

SEQ ID NO: 631461 - protein, 14 aa, Homo sapiens
  CDR3 for alpha chain variable domain of TCR clone 315731 (TRAV8-6, TRAJ29)
CAVSGWAVNTPLVF

SEQ ID NO: 631462 - protein, 15 aa, Homo sapiens
  CDR3 for beta chain variable domain of TCR clone 315731 (TRBV6-3, TRBJ2-2)
CASRGMTVDTGELFF

SEQ ID NO: 631463 - protein, 15 aa, Homo sapiens
  CDR3 for alpha chain variable domain of TCR clone 315732 (TRAV12-1, TRAJ44)
CVVFVNTGTASKLTF

SEQ ID NO: 631464 - protein, 15 aa, Homo sapiens
  CDR3 for beta chain variable domain of TCR clone 315732 (TRBV5-1, TRBJ2-1)
CASSPPRAPYNEQFF

SEQ ID NO: 631465 - protein, 16 aa, Homo sapiens
  CDR3 for alpha chain variable domain of TCR clone 315733 (TRAV30, TRAJ24)
CGTEIVDAASWGKFQF

SEQ ID NO: 631466 - protein, 18 aa, Homo sapiens
  CDR3 for beta chain variable domain of TCR clone 315733 (TRBV7-9, TRBJ2-7)
CASSLTTSGSRTWYEQYF

SEQ ID NO: 631467 - protein, 22 aa, Homo sapiens
  CDR3 for alpha chain variable domain of TCR clone 315734 (TRAV13-1, TRAJ35)
CAASKGGFGNVRHCWSGIQVIV

SEQ ID NO: 631468 - protein, 13 aa, Homo sapiens
  CDR3 for beta chain variable domain of TCR clone 315734 (TRBV7-3, TRBJ1-1)
CASSQDWGAEAFF

SEQ ID NO: 631469 - protein, 16 aa, Homo sapiens
  CDR3 for alpha chain variable domain of TCR clone 315735 (TRAV8-6, TRAJ4)
CAGTKILSGGYNKLIF

SEQ ID NO: 631470 - protein, 17 aa, Homo sapiens
  CDR3 for beta chain variable domain of TCR clone 315735 (TRBV20-1, TRBJ2-1)
CSASSSGLAGSYNEQFF

SEQ ID NO: 631471 - protein, 15 aa, Homo sapiens
  CDR3 for alpha chain variable domain of TCR clone 315736 (TRAV21, TRAJ53)
CATLNSGGSNYKLPF

SEQ ID NO: 631472 - protein, 13 aa, Homo sapiens
  CDR3 for beta chain variable domain of TCR clone 315736 (TRBV4-1, TRBJ2-2)
CASSQENTGELFF

SEQ ID NO: 631473 - protein, 13 aa, Homo sapiens
  CDR3 for alpha chain variable domain of TCR clone 315737 (TRAV26-1, TRAJ40)
CIVKVEGTYKYIF

SEQ ID NO: 631474 - protein, 15 aa, Homo sapiens
  CDR3 for beta chain variable domain of TCR clone 315737 (TRBV12-4, TRBJ1-2)
CASSLAHRDGQAYTF

SEQ ID NO: 631475 - protein, 14 aa, Homo sapiens
  CDR3 for alpha chain variable domain of TCR clone 315738 (TRAV4, TRAJ9)
CLVGSGAGGFKTIF

SEQ ID NO: 631476 - protein, 15 aa, Homo sapiens
  CDR3 for beta chain variable domain of TCR clone 315738 (TRBV7-2, TRBJ2-1)
CASSLASGRANEQFF

SEQ ID NO: 631477 - protein, 16 aa, Homo sapiens
  CDR3 for alpha chain variable domain of TCR clone 315739 (TRAV12-1, TRAJ22)
CVVNTISSGSARQLPF

SEQ ID NO: 631478 - protein, 13 aa, Homo sapiens
  CDR3 for beta chain variable domain of TCR clone 315739 (TRBV19, TRBJ2-1)
CASNGGVFSEQFF

SEQ ID NO: 631479 - protein, 13 aa, Homo sapiens
  CDR3 for alpha chain variable domain of TCR clone 315740 (TRAV3, TRAJ21)
CAVRAPDFNKFYF

SEQ ID NO: 631480 - protein, 13 aa, Homo sapiens
  CDR3 for beta chain variable domain of TCR clone 315740 (TRBV9, TRBJ2-1)
CAISPSGGNEQFF

SEQ ID NO: 631481 - protein, 17 aa, Homo sapiens
  CDR3 for alpha chain variable domain of TCR clone 315741 (TRAV3, TRAJ6)
CAVRDGPRAGGSYRPTF

SEQ ID NO: 631482 - protein, 14 aa, Homo sapiens
  CDR3 for beta chain variable domain of TCR clone 315741 (TRBV20-1, TRBJ2-1)
CSPNDEASYNEQFF

SEQ ID NO: 631483 - protein, 15 aa, Homo sapiens
  CDR3 for alpha chain variable domain of TCR clone 315742 (TRAV21, TRAJ53)
CATLNSGGSNYKLTF

SEQ ID NO: 631484 - protein, 15 aa, Homo sapiens
  CDR3 for beta chain variable domain of TCR clone 315742 (TRBV4-1, TRBJ2-5)
CASSQWDLYQETQYF

SEQ ID NO: 631485 - protein, 12 aa, Homo sapiens
  CDR3 for alpha chain variable domain of TCR clone 315743 (TRAV12-3, TRAJ17)
CAMTLTCNKLTF

SEQ ID NO: 631486 - protein, 14 aa, Homo sapiens
  CDR3 for beta chain variable domain of TCR clone 315743 (TRBV12-5, TRBJ2-5)
CASGSRTHQETQYF

SEQ ID NO: 631487 - protein, 18 aa, Homo sapiens
  CDR3 for alpha chain variable domain of TCR clone 315744 (TRAV21, TRAJ52)
CAVKPSPAGGTSYGKLTF

SEQ ID NO: 631488 - protein, 12 aa, Homo sapiens
  CDR3 for beta chain variable domain of TCR clone 315744 (TRBV11-2, TRBJ2-2)
CASSLGGGELFF

SEQ ID NO: 631489 - protein, 14 aa, Homo sapiens
  CDR3 for alpha chain variable domain of TCR clone 315745 (TRAV12-2, TRAJ13)
CAVKKTGGYHKVTF

SEQ ID NO: 631490 - protein, 14 aa, Homo sapiens
  CDR3 for beta chain variable domain of TCR clone 315745 (TRBV2, TRBJ1-6)
CALSPSDPRSPLHF

SEQ ID NO: 631491 - protein, 13 aa, Homo sapiens
  CDR3 for alpha chain variable domain of TCR clone 315746 (TRAV35, TRAJ57)
CWSPQGGSEKLVF

SEQ ID NO: 631492 - protein, 13 aa, Homo sapiens
  CDR3 for beta chain variable domain of TCR clone 315746 (TRBV11-3, TRBJ2-7)
CASSLDKLYEQYF

SEQ ID NO: 631493 - protein, 16 aa, Homo sapiens
  CDR3 for alpha chain variable domain of TCR clone 315747 (TRAV8-3, TRAJ42)
CAVGEGNGGSQGNLIF

SEQ ID NO: 631494 - protein, 13 aa, Homo sapiens
  CDR3 for beta chain variable domain of TCR clone 315747 (TRBV24-1, TRBJ2-1)
CATSAGPYNEQFF

SEQ ID NO: 631495 - protein, 16 aa, Homo sapiens
  CDR3 for alpha chain variable domain of TCR clone 315748 (TRAV2, TRAJ4)
CAVEDRFSGGYNKLIF

SEQ ID NO: 631496 - protein, 13 aa, Homo sapiens
  CDR3 for beta chain variable domain of TCR clone 315748 (TRBV7-7, TRBJ2-5)
CASSRSGQQTQYF

SEQ ID NO: 631497 - protein, 13 aa, Homo sapiens
  CDR3 for alpha chain variable domain of TCR clone 315749 (TRAV26-1, TRAJ38)
CIVRGGNNRKLIW

SEQ ID NO: 631498 - protein, 15 aa, Homo sapiens
  CDR3 for beta chain variable domain of TCR clone 315749 (TRBV19, TRBJ2-1)
CASSSPGVPLDEQFF

SEQ ID NO: 631499 - protein, 15 aa, Homo sapiens
  CDR3 for alpha chain variable domain of TCR clone 315750 (TRAV8-1, TRAJ23)
CAVNSHYNREESLSS

SEQ ID NO: 631500 - protein, 14 aa, Homo sapiens
  CDR3 for beta chain variable domain of TCR clone 315750 (TRBV4-2, TRBJ2-1)
CASGLDRAYNEQFF

SEQ ID NO: 631501 - protein, 16 aa, Homo sapiens
  CDR3 for alpha chain variable domain of TCR clone 315751 (TRAV23/DV6, TRAJ9)
CAASIGGNTGGFKTIF

SEQ ID NO: 631502 - protein, 15 aa, Homo sapiens
  CDR3 for beta chain variable domain of TCR clone 315751 (TRBV29-1, TRBJ2-7)
CSVEFFDRGSYEQYF

SEQ ID NO: 631503 - protein, 11 aa, Homo sapiens
  CDR3 for alpha chain variable domain of TCR clone 315752 (TRAV12-3, TRAJ27)
CAMANAGKSTF

SEQ ID NO: 631504 - protein, 14 aa, Homo sapiens
  CDR3 for beta chain variable domain of TCR clone 315752 (TRBV15, TRBJ2-3)
CATRSGTSTDTQYF

SEQ ID NO: 631505 - protein, 13 aa, Homo sapiens
  CDR3 for alpha chain variable domain of TCR clone 315753 (TRAV8-2, TRAJ45)
CVVTTLQEEELTD

SEQ ID NO: 631506 - protein, 14 aa, Homo sapiens
  CDR3 for beta chain variable domain of TCR clone 315753 (TRBV7-2, TRBJ1-1)
CASSFLTGTTEAFF

SEQ ID NO: 631507 - protein, 14 aa, Homo sapiens
  CDR3 for alpha chain variable domain of TCR clone 315754 (TRAV1-2, TRAJ16)
CAVNRFSDGQKLLF

SEQ ID NO: 631508 - protein, 15 aa, Homo sapiens
  CDR3 for beta chain variable domain of TCR clone 315754 (TRBV28, TRBJ2-5)
CASSSGRVIQETQYF

SEQ ID NO: 631509 - protein, 14 aa, Homo sapiens
  CDR3 for alpha chain variable domain of TCR clone 315755 (TRAV1-2, TRAJ16)
CAVNRFSDGQKLLF

SEQ ID NO: 631510 - protein, 14 aa, Homo sapiens
  CDR3 for beta chain variable domain of TCR clone 315755 (TRBV18, TRBJ2-7)
CASSPGGGAYEQYF

SEQ ID NO: 631511 - protein, 14 aa, Homo sapiens
  CDR3 for alpha chain variable domain of TCR clone 315756 (TRAV1-2, TRAJ8)
CAAREDTGFQKLVF

SEQ ID NO: 631512 - protein, 12 aa, Homo sapiens
  CDR3 for beta chain variable domain of TCR clone 315756 (TRBV7-2, TRBJ2-5)
CASSQYQETQYF

SEQ ID NO: 631513 - protein, 12 aa, Homo sapiens
  CDR3 for alpha chain variable domain of TCR clone 315757 (TRAV27, TRAJ13)
CAGVRGYQKVTF

SEQ ID NO: 631514 - protein, 13 aa, Homo sapiens
  CDR3 for beta chain variable domain of TCR clone 315757 (TRBV12-4, TRBJ1-1)
CASSPGTGFEAFF

SEQ ID NO: 631515 - protein, 14 aa, Homo sapiens
  CDR3 for alpha chain variable domain of TCR clone 315758 (TRAV12-2, TRAJ5)
CAVNRSTGRRALTF

SEQ ID NO: 631516 - protein, 16 aa, Homo sapiens
  CDR3 for beta chain variable domain of TCR clone 315758 (TRBV7-9, TRBJ2-6)
CASSLKGPLRANVLTF

SEQ ID NO: 631517 - protein, 14 aa, Homo sapiens
  CDR3 for alpha chain variable domain of TCR clone 315759 (TRAV35, TRAJ50)
CAGHRKTSYDKVIF

SEQ ID NO: 631518 - protein, 14 aa, Homo sapiens
  CDR3 for beta chain variable domain of TCR clone 315759 (TRBV11-2, TRBJ2-5)
CASSRTGGIETQYF

SEQ ID NO: 631519 - protein, 16 aa, Homo sapiens
  CDR3 for alpha chain variable domain of TCR clone 315760 (TRAV3, TRAJ42)
CAVRDIEGGSQGNLIF

SEQ ID NO: 631520 - protein, 16 aa, Homo sapiens
  CDR3 for beta chain variable domain of TCR clone 315760 (TRBV12-5, TRBJ2-5)
CASGPRTSGNQETQYF

SEQ ID NO: 631521 - protein, 13 aa, Homo sapiens
  CDR3 for alpha chain variable domain of TCR clone 315761 (TRAV29/DV5, TRAJ31)
CAASRNNNAKLMF

SEQ ID NO: 631522 - protein, 14 aa, Homo sapiens
  CDR3 for beta chain variable domain of TCR clone 315761 (TRBV19, TRBJ2-1)
CASPTFVLSGEQFF

SEQ ID NO: 631523 - protein, 15 aa, Homo sapiens
  CDR3 for alpha chain variable domain of TCR clone 315762 (TRAV12-3, TRAJ49)
CAMAVTPNIGNQFYF

SEQ ID NO: 631524 - protein, 18 aa, Homo sapiens
  CDR3 for beta chain variable domain of TCR clone 315762 (TRBV4-1, TRBJ1-5)
CASSQDPRGQGLNQPQHF

SEQ ID NO: 631525 - protein, 15 aa, Homo sapiens
  CDR3 for alpha chain variable domain of TCR clone 315763 (TRAV8-4, TRAJ7)
CAVSGGNYGNSRLAF

SEQ ID NO: 631526 - protein, 11 aa, Homo sapiens
  CDR3 for beta chain variable domain of TCR clone 315763 (TRBV20-1, TRBJ2-1)
CSLSSGSEQFF

SEQ ID NO: 631527 - protein, 15 aa, Homo sapiens
  CDR3 for alpha chain variable domain of TCR clone 315764 (TRAV26-1, TRAJ22)
CIVIVSFWFCKATDL

SEQ ID NO: 631528 - protein, 13 aa, Homo sapiens
  CDR3 for beta chain variable domain of TCR clone 315764 (TRBV7-9, TRBJ1-2)
CASSLKQNYGYAF

SEQ ID NO: 631529 - protein, 15 aa, Homo sapiens
  CDR3 for alpha chain variable domain of TCR clone 315765 (TRAV17, TRAJ57)
CATGPSQGGSEKLVF

SEQ ID NO: 631530 - protein, 16 aa, Homo sapiens
  CDR3 for beta chain variable domain of TCR clone 315765 (TRBV12-4, TRBJ1-5)
CASSRPVGGSNQDQHF

SEQ ID NO: 631531 - protein, 12 aa, Homo sapiens
  CDR3 for alpha chain variable domain of TCR clone 315766 (TRAV3, TRAJ41)
CAVSSNSVCTQL

SEQ ID NO: 631532 - protein, 13 aa, Homo sapiens
  CDR3 for beta chain variable domain of TCR clone 315766 (TRBV20-1, TRBJ2-2)
CSALSGGAGELFF

SEQ ID NO: 631533 - protein, 13 aa, Homo sapiens
  CDR3 for alpha chain variable domain of TCR clone 315767 (TRAV3, TRAJ29)
CAVRDIIDTPLVF

SEQ ID NO: 631534 - protein, 12 aa, Homo sapiens
  CDR3 for beta chain variable domain of TCR clone 315767 (TRBV6-5, TRBJ2-7)
CASSDRQNEQYF

SEQ ID NO: 631535 - protein, 16 aa, Homo sapiens
  CDR3 for alpha chain variable domain of TCR clone 315768 (TRAV16, TRAJ4)
CALSRMFSGGYNKLFF

SEQ ID NO: 631536 - protein, 16 aa, Homo sapiens
  CDR3 for beta chain variable domain of TCR clone 315768 (TRBV24-1, TRBJ2-3)
CATSDPGTGATDTQYI

SEQ ID NO: 631537 - protein, 21 aa, Homo sapiens
  CDR3 for alpha chain variable domain of TCR clone 315769 (TRAV13-1, TRAJ37)
CAATPKEIKHRQTNLWARHNF

SEQ ID NO: 631538 - protein, 13 aa, Homo sapiens
  CDR3 for beta chain variable domain of TCR clone 315769 (TRBV20-1, TRBJ2-7)
CSATSEDSYEQYF

SEQ ID NO: 631539 - protein, 12 aa, Homo sapiens
  CDR3 for alpha chain variable domain of TCR clone 315770 (TRAV12-1, TRAJ40)
CVVYSGTYKYIF

SEQ ID NO: 631540 - protein, 16 aa, Homo sapiens
  CDR3 for beta chain variable domain of TCR clone 315770 (TRBV27, TRBJ2-2)
CASSLRPGGAPGELFF

SEQ ID NO: 631541 - protein, 16 aa, Homo sapiens
  CDR3 for alpha chain variable domain of TCR clone 315771 (TRAV12-3, TRAJ53)
CAVSPGSGGSNYKLTF

SEQ ID NO: 631542 - protein, 17 aa, Homo sapiens
  CDR3 for beta chain variable domain of TCR clone 315771 (TRBV28, TRBJ2-5)
CAGSTPEGDALQETQYF

SEQ ID NO: 631543 - protein, 10 aa, Homo sapiens
  CDR3 for alpha chain variable domain of TCR clone 315772 (TRAV1-2, TRAJ20)
CALNDYKLSF

SEQ ID NO: 631544 - protein, 14 aa, Homo sapiens
  CDR3 for beta chain variable domain of TCR clone 315772 (TRBV19, TRBJ2-1)
CASPTYVLSGEQFF

SEQ ID NO: 631545 - protein, 13 aa, Homo sapiens
  CDR3 for alpha chain variable domain of TCR clone 315773 (TRAV8-1, TRAJ32)
CAADGGATNKLIF

SEQ ID NO: 631546 - protein, 18 aa, Homo sapiens
  CDR3 for beta chain variable domain of TCR clone 315773 (TRBV18, TRBJ2-3)
CANSYTSGAAGGTDTQYF

SEQ ID NO: 631547 - protein, 15 aa, Homo sapiens
  CDR3 for alpha chain variable domain of TCR clone 315774 (TRAV3, TRAJ29)
CAVRDINSGNTPLVF

SEQ ID NO: 631548 - protein, 16 aa, Homo sapiens
  CDR3 for beta chain variable domain of TCR clone 315774 (TRBV4-1, TRBJ2-5)
CASSQTFYGDQETQYL

SEQ ID NO: 631549 - protein, 13 aa, Homo sapiens
  CDR3 for alpha chain variable domain of TCR clone 315775 (TRAV26-2, TRAJ43)
CILRAVNNNDMSF

SEQ ID NO: 631550 - protein, 16 aa, Homo sapiens
  CDR3 for beta chain variable domain of TCR clone 315775 (TRBV5-1, TRBJ2-5)
CASSPSSGARTEAQYF

SEQ ID NO: 631551 - protein, 14 aa, Homo sapiens
  CDR3 for alpha chain variable domain of TCR clone 315776 (TRAV12-3, TRAJ13)
CAVKKTEGYQKVTF

SEQ ID NO: 631552 - protein, 15 aa, Homo sapiens
  CDR3 for beta chain variable domain of TCR clone 315776 (TRBV12-4, TRBJ2-5)
CASSPPTGLQETQYF

SEQ ID NO: 631553 - protein, 12 aa, Homo sapiens
  CDR3 for alpha chain variable domain of TCR clone 315777 (TRAV2, TRAJ32)
CAVGGATNKLIF

SEQ ID NO: 631554 - protein, 15 aa, Homo sapiens
  CDR3 for beta chain variable domain of TCR clone 315777 (TRBV7-2, TRBJ2-1)
CTSSSRTSREDEQFF

SEQ ID NO: 631555 - protein, 12 aa, Homo sapiens
  CDR3 for alpha chain variable domain of TCR clone 315778 (TRAV12-1, TRAJ40)
CVVYSGTYKYIF

SEQ ID NO: 631556 - protein, 15 aa, Homo sapiens
  CDR3 for beta chain variable domain of TCR clone 315778 (TRBV20-1, TRBJ2-7)
CSARDRVAGMDEQYF

SEQ ID NO: 631557 - protein, 14 aa, Homo sapiens
  CDR3 for alpha chain variable domain of TCR clone 315779 (TRAV12-3, TRAJ58)
CAMSTETSGSRLTF

SEQ ID NO: 631558 - protein, 15 aa, Homo sapiens
  CDR3 for beta chain variable domain of TCR clone 315779 (TRBV4-1, TRBJ1-4)
CASSDTGGTNGKLFF

SEQ ID NO: 631559 - protein, 13 aa, Homo sapiens
  CDR3 for alpha chain variable domain of TCR clone 315780 (TRAV8-3, TRAJ36)
FAVGATGANNLFF

SEQ ID NO: 631560 - protein, 16 aa, Homo sapiens
  CDR3 for beta chain variable domain of TCR clone 315780 (TRBV20-1, TRBJ1-4)
CSAPGQGLLTNEKLFF

SEQ ID NO: 631561 - protein, 13 aa, Homo sapiens
  CDR3 for alpha chain variable domain of TCR clone 315781 (TRAV2, TRAJ27)
CAVEAPMQANQPL

SEQ ID NO: 631562 - protein, 12 aa, Homo sapiens
  CDR3 for beta chain variable domain of TCR clone 315781 (TRBV11-2, TRBJ2-2)
CASSLGGGELFL

SEQ ID NO: 631563 - protein, 13 aa, Homo sapiens
  CDR3 for alpha chain variable domain of TCR clone 315782 (TRAV8-4, TRAJ13)
CAVTLSGGYQSYL

SEQ ID NO: 631564 - protein, 14 aa, Homo sapiens
  CDR3 for beta chain variable domain of TCR clone 315782 (TRBV7-2, TRBJ1-2)
CASSQTGSTYGYTF

SEQ ID NO: 631565 - protein, 17 aa, Homo sapiens
  CDR3 for alpha chain variable domain of TCR clone 315783 (TRAV3, TRAJ6)
CAVRDGPRAGGSYIPTF

SEQ ID NO: 631566 - protein, 13 aa, Homo sapiens
  CDR3 for beta chain variable domain of TCR clone 315783 (TRBV5-1, TRBJ1-2)
CASSIDRPEGYTF

SEQ ID NO: 631567 - protein, 12 aa, Homo sapiens
  CDR3 for alpha chain variable domain of TCR clone 315784 (TRAV3, TRAJ43)
CAVRDPNNDIRF

SEQ ID NO: 631568 - protein, 15 aa, Homo sapiens
  CDR3 for beta chain variable domain of TCR clone 315784 (TRBV27, TRBJ1-5)
CASSLGTGCDQPQHF

SEQ ID NO: 631569 - protein, 11 aa, Homo sapiens
  CDR3 for alpha chain variable domain of TCR clone 315785 (TRAV2, TRAJ13)
CASGGYQKVTF

SEQ ID NO: 631570 - protein, 13 aa, Homo sapiens
  CDR3 for beta chain variable domain of TCR clone 315785 (TRBV6-3, TRBJ2-1)
CASRTARQGEKFF

SEQ ID NO: 631571 - protein, 11 aa, Homo sapiens
  CDR3 for alpha chain variable domain of TCR clone 315786 (TRAV17, TRAJ9)
CATTGGLKTIF

SEQ ID NO: 631572 - protein, 16 aa, Homo sapiens
  CDR3 for beta chain variable domain of TCR clone 315786 (TRBV24-1, TRBJ2-1)
CATSGVAGANYNEQFF

SEQ ID NO: 631573 - protein, 13 aa, Homo sapiens
  CDR3 for alpha chain variable domain of TCR clone 315787 (TRAV26-1, TRAJ48)
CIVRVVGYEKLTF

SEQ ID NO: 631574 - protein, 16 aa, Homo sapiens
  CDR3 for beta chain variable domain of TCR clone 315787 (TRBV12-5, TRBJ2-5)
CASGPRTSGNQETQYF

SEQ ID NO: 631575 - protein, 15 aa, Homo sapiens
  CDR3 for alpha chain variable domain of TCR clone 315788 (TRAV29/DV5, TRAJ29)
CAASERSSGNTPLVF

SEQ ID NO: 631576 - protein, 16 aa, Homo sapiens
  CDR3 for beta chain variable domain of TCR clone 315788 (TRBV28, TRBJ2-7)
CASSSGTSGRGYEQYF

SEQ ID NO: 631577 - protein, 15 aa, Homo sapiens
  CDR3 for alpha chain variable domain of TCR clone 315789 (TRAV20, TRAJ53)
CAVMGSGGSNYKLTF

SEQ ID NO: 631578 - protein, 14 aa, Homo sapiens
  CDR3 for beta chain variable domain of TCR clone 315789 (TRBV12-5, TRBJ2-5)
CASGSRTHQETQYF

SEQ ID NO: 631579 - protein, 10 aa, Homo sapiens
  CDR3 for alpha chain variable domain of TCR clone 315790 (TRAV30, TRAJ48)
CGIGNEKLTF

SEQ ID NO: 631580 - protein, 15 aa, Homo sapiens
  CDR3 for beta chain variable domain of TCR clone 315790 (TRBV28, TRBJ2-1)
CASRKTGTAYNEQCF

SEQ ID NO: 631581 - protein, 14 aa, Homo sapiens
  CDR3 for alpha chain variable domain of TCR clone 315791 (TRAV26-1, TRAJ39)
CIVRGSRAGNILTF

SEQ ID NO: 631582 - protein, 15 aa, Homo sapiens
  CDR3 for beta chain variable domain of TCR clone 315791 (TRBV28, TRBJ2-5)
CASSPGQGSIETQYF

SEQ ID NO: 631583 - protein, 12 aa, Homo sapiens
  CDR3 for alpha chain variable domain of TCR clone 315792 (TRAV12-1, TRAJ40)
CVVYLGTYKYIF

SEQ ID NO: 631584 - protein, 15 aa, Homo sapiens
  CDR3 for beta chain variable domain of TCR clone 315792 (TRBV7-9, TRBJ1-6)
CASSSPGRGNSPLLF

SEQ ID NO: 631585 - protein, 13 aa, Homo sapiens
  CDR3 for alpha chain variable domain of TCR clone 315793 (TRAV2, TRAJ13)
CAVESVGYQKVTF

SEQ ID NO: 631586 - protein, 14 aa, Homo sapiens
  CDR3 for beta chain variable domain of TCR clone 315793 (TRBV25-1, TRBJ1-1)
CASTHLGGNTEAFF

SEQ ID NO: 631587 - protein, 18 aa, Homo sapiens
  CDR3 for alpha chain variable domain of TCR clone 315794 (TRAV26-1, TRAJ23)
CIVRVGLEEGNQGGKLIF

SEQ ID NO: 631588 - protein, 16 aa, Homo sapiens
  CDR3 for beta chain variable domain of TCR clone 315794 (TRBV12-4, TRBJ2-5)
CASSFFVRGRQETQYF

SEQ ID NO: 631589 - protein, 15 aa, Homo sapiens
  CDR3 for alpha chain variable domain of TCR clone 315795 (TRAV14/DV4, TRAJ48)
CAMREGNAGNEKLTF

SEQ ID NO: 631590 - protein, 14 aa, Homo sapiens
  CDR3 for beta chain variable domain of TCR clone 315795 (TRBV28, TRBJ1-5)
CASSGQALYQHQHF

SEQ ID NO: 631591 - protein, 12 aa, Homo sapiens
  CDR3 for alpha chain variable domain of TCR clone 315796 (TRAV4, TRAJ26)
CLVGDYGQNFVF

SEQ ID NO: 631592 - protein, 13 aa, Homo sapiens
  CDR3 for beta chain variable domain of TCR clone 315796 (TRBV7-3, TRBJ1-2)
CASSLKRGYGYTF

SEQ ID NO: 631593 - protein, 13 aa, Homo sapiens
  CDR3 for alpha chain variable domain of TCR clone 315797 (TRAV21, TRAJ27)
CAARPGNAGKSTF

SEQ ID NO: 631594 - protein, 14 aa, Homo sapiens
  CDR3 for beta chain variable domain of TCR clone 315797 (TRBV4-1, TRBJ2-2)
CASSLTENTGELFF

SEQ ID NO: 631595 - protein, 15 aa, Homo sapiens
  CDR3 for alpha chain variable domain of TCR clone 315798 (TRAV4, TRAJ39)
CLVGPSNNAGNMLTF

SEQ ID NO: 631596 - protein, 14 aa, Homo sapiens
  CDR3 for beta chain variable domain of TCR clone 315798 (TRBV11-2, TRBJ2-5)
CASSRTGGIETQYF

SEQ ID NO: 631597 - protein, 11 aa, Homo sapiens
  CDR3 for alpha chain variable domain of TCR clone 315799 (TRAV12-3, TRAJ16)
LTGGDGQKLLF

SEQ ID NO: 631598 - protein, 13 aa, Homo sapiens
  CDR3 for beta chain variable domain of TCR clone 315799 (TRBV12-4, TRBJ1-4)
CASAMGHNEELFF

SEQ ID NO: 631599 - protein, 14 aa, Homo sapiens
  CDR3 for alpha chain variable domain of TCR clone 315800 (TRAV6, TRAJ37)
CALGSQGNTGQLIL

SEQ ID NO: 631600 - protein, 15 aa, Homo sapiens
  CDR3 for beta chain variable domain of TCR clone 315800 (TRBV2, TRBJ2-1)
CASSEEREGDNEQFF

SEQ ID NO: 631601 - protein, 11 aa, Homo sapiens
  CDR3 for alpha chain variable domain of TCR clone 315801 (TRAV2, TRAJ13)
CASGGYQKVTF

SEQ ID NO: 631602 - protein, 17 aa, Homo sapiens
  CDR3 for beta chain variable domain of TCR clone 315801 (TRBV5-1, TRBJ2-5)
CASSPVALGQNQETQYF

SEQ ID NO: 631603 - protein, 16 aa, Homo sapiens
  CDR3 for alpha chain variable domain of TCR clone 315802 (TRAV14/DV4, TRAJ53)
CAMREGGGGSNYKLTF

SEQ ID NO: 631604 - protein, 11 aa, Homo sapiens
  CDR3 for beta chain variable domain of TCR clone 315802 (TRBV7-8, TRBJ2-7)
CASSLSLEQYF

SEQ ID NO: 631605 - protein, 14 aa, Homo sapiens
  CDR3 for alpha chain variable domain of TCR clone 315803 (TRAV10, TRAJ50)
CVVSGRGSYDKVIF

SEQ ID NO: 631606 - protein, 11 aa, Homo sapiens
  CDR3 for beta chain variable domain of TCR clone 315803 (TRBV7-2, TRBJ2-5)
CASSFQETQYF

SEQ ID NO: 631607 - protein, 14 aa, Homo sapiens
  CDR3 for alpha chain variable domain of TCR clone 315804 (TRAV1-2, TRAJ16)
CAVNRFSDGQKLLF

SEQ ID NO: 631608 - protein, 16 aa, Homo sapiens
  CDR3 for beta chain variable domain of TCR clone 315804 (TRBV7-2, TRBJ2-7)
CASSLDLCGGAYEQYF

SEQ ID NO: 631609 - protein, 15 aa, Homo sapiens
  CDR3 for alpha chain variable domain of TCR clone 315805 (TRAV21, TRAJ37)
CAVRPTLSNTGKLNF

SEQ ID NO: 631610 - protein, 15 aa, Homo sapiens
  CDR3 for beta chain variable domain of TCR clone 315805 (TRBV7-9, TRBJ1-4)
CASSRTGGFNEKLFF

SEQ ID NO: 631611 - protein, 14 aa, Homo sapiens
  CDR3 for alpha chain variable domain of TCR clone 315806 (TRAV13-1, TRAJ9)
CAASALTGGFKTIF

SEQ ID NO: 631612 - protein, 13 aa, Homo sapiens
  CDR3 for beta chain variable domain of TCR clone 315806 (TRBV12-4, TRBJ2-7)
CASSPTETYEQYF

SEQ ID NO: 631613 - protein, 18 aa, Homo sapiens
  CDR3 for alpha chain variable domain of TCR clone 315807 (TRAV12-3, TRAJ52)
CAMSVGGAGGTSYGKLTF

SEQ ID NO: 631614 - protein, 14 aa, Homo sapiens
  CDR3 for beta chain variable domain of TCR clone 315807 (TRBV28, TRBJ1-5)
CASSRTGLNQPQHF

SEQ ID NO: 631615 - protein, 13 aa, Homo sapiens
  CDR3 for alpha chain variable domain of TCR clone 315808 (TRAV3, TRAJ40)
CAVRGSGAYKYIF

SEQ ID NO: 631616 - protein, 14 aa, Homo sapiens
  CDR3 for beta chain variable domain of TCR clone 315808 (TRBV23-1, TRBJ2-5)
CASSFLRSQETQYF

SEQ ID NO: 631617 - protein, 11 aa, Homo sapiens
  CDR3 for alpha chain variable domain of TCR clone 315809 (TRAV2, TRAJ33)
CAVDSNYQLIW

SEQ ID NO: 631618 - protein, 13 aa, Homo sapiens
  CDR3 for beta chain variable domain of TCR clone 315809 (TRBV20-1, TRBJ1-1)
CSARGGGNTEAFF

SEQ ID NO: 631619 - protein, 13 aa, Homo sapiens
  CDR3 for alpha chain variable domain of TCR clone 315810 (TRAV1-2, TRAJ9)
CAALTTGGFKTIF

SEQ ID NO: 631620 - protein, 12 aa, Homo sapiens
  CDR3 for beta chain variable domain of TCR clone 315810 (TRBV11-3, TRBJ1-1)
CASSHRQGEAFF

SEQ ID NO: 631621 - protein, 15 aa, Homo sapiens
  CDR3 for alpha chain variable domain of TCR clone 315811 (TRAV4, TRAJ48)
CLVGDIDFGNEKLTF

SEQ ID NO: 631622 - protein, 13 aa, Homo sapiens
  CDR3 for beta chain variable domain of TCR clone 315811 (TRBV6-1, TRBJ2-5)
CASSNLVGETQYF

SEQ ID NO: 631623 - protein, 18 aa, Homo sapiens
  CDR3 for alpha chain variable domain of TCR clone 315812 (TRAV29/DV5, TRAJ52)
CAAGFRGAGGTSYGKLTF

SEQ ID NO: 631624 - protein, 15 aa, Homo sapiens
  CDR3 for beta chain variable domain of TCR clone 315812 (TRBV7-3, TRBJ2-1)
CASSPTGGGEVEQFF

SEQ ID NO: 631625 - protein, 12 aa, Homo sapiens
  CDR3 for alpha chain variable domain of TCR clone 315813 (TRAV12-3, TRAJ17)
CAMTLTGNNLTF

SEQ ID NO: 631626 - protein, 17 aa, Homo sapiens
  CDR3 for beta chain variable domain of TCR clone 315813 (TRBV25-1, TRBJ2-1)
CASSAYGQGRGVYEQFF

SEQ ID NO: 631627 - protein, 13 aa, Homo sapiens
  CDR3 for alpha chain variable domain of TCR clone 315814 (TRAV8-3, TRAJ44)
CAVVPGTASKLTF

SEQ ID NO: 631628 - protein, 14 aa, Homo sapiens
  CDR3 for beta chain variable domain of TCR clone 315814 (TRBV11-2, TRBJ2-3)
CASSRLARTDTQCF

SEQ ID NO: 631629 - protein, 15 aa, Homo sapiens
  CDR3 for alpha chain variable domain of TCR clone 315815 (TRAV12-3, TRAJ49)
CAMAVTPNTGNQVYF

SEQ ID NO: 631630 - protein, 13 aa, Homo sapiens
  CDR3 for beta chain variable domain of TCR clone 315815 (TRBV10-2, TRBJ2-7)
CASGASGGYEQYF

SEQ ID NO: 631631 - protein, 12 aa, Homo sapiens
  CDR3 for alpha chain variable domain of TCR clone 315816 (TRAV8-4, TRAJ43)
CAVSVNNNDMRF

SEQ ID NO: 631632 - protein, 15 aa, Homo sapiens
  CDR3 for beta chain variable domain of TCR clone 315816 (TRBV7-2, TRBJ2-3)
CASSSTGLETDTQYF

SEQ ID NO: 631633 - protein, 16 aa, Homo sapiens
  CDR3 for alpha chain variable domain of TCR clone 315817 (TRAV3, TRAJ10)
CAVRDMRAGGGNKLAF

SEQ ID NO: 631634 - protein, 13 aa, Homo sapiens
  CDR3 for beta chain variable domain of TCR clone 315817 (TRBV25-1, TRBJ2-7)
CASSEYGSYEQYF

SEQ ID NO: 631635 - protein, 15 aa, Homo sapiens
  CDR3 for alpha chain variable domain of TCR clone 315818 (TRAV3, TRAJ22)
CAVRDRGGSARQLTF

SEQ ID NO: 631636 - protein, 15 aa, Homo sapiens
  CDR3 for beta chain variable domain of TCR clone 315818 (TRBV24-1, TRBJ2-4)
CATSDPRDRANIQYF

SEQ ID NO: 631637 - protein, 14 aa, Homo sapiens
  CDR3 for alpha chain variable domain of TCR clone 315819 (TRAV12-3, TRAJ10)
SHLPLTGGGNKLTF

SEQ ID NO: 631638 - protein, 15 aa, Homo sapiens
  CDR3 for beta chain variable domain of TCR clone 315819 (TRBV5-1, TRBJ2-1)
GASSPPRAPYNEQFF

SEQ ID NO: 631639 - protein, 16 aa, Homo sapiens
  CDR3 for alpha chain variable domain of TCR clone 315820 (TRAV4, TRAJ18)
CCVLLIGGSTLGRLYF

SEQ ID NO: 631640 - protein, 17 aa, Homo sapiens
  CDR3 for beta chain variable domain of TCR clone 315820 (TRBV7-3, TRBJ2-3)
CASSLMKRMRGADTRYF

SEQ ID NO: 631641 - protein, 15 aa, Homo sapiens
  CDR3 for alpha chain variable domain of TCR clone 315821 (TRAV12-1, TRAJ44)
CVADLPTGTASKLTF

SEQ ID NO: 631642 - protein, 13 aa, Homo sapiens
  CDR3 for beta chain variable domain of TCR clone 315821 (TRBV6-5, TRBJ2-5)
YASSPEGGETQYF

SEQ ID NO: 631643 - protein, 12 aa, Homo sapiens
  CDR3 for alpha chain variable domain of TCR clone 315822 (TRAV30, TRAJ52)
CGTETSYGKLTF

SEQ ID NO: 631644 - protein, 14 aa, Homo sapiens
  CDR3 for beta chain variable domain of TCR clone 315822 (TRBV7-2, TRBJ2-7)
CASRSQGAAYEHYF

SEQ ID NO: 631645 - protein, 15 aa, Homo sapiens
  CDR3 for alpha chain variable domain of TCR clone 315823 (TRAV8-3, TRAJ27)
RAVGPSKTNAGKSTF

SEQ ID NO: 631646 - protein, 14 aa, Homo sapiens
  CDR3 for beta chain variable domain of TCR clone 315823 (TRBV11-2, TRBJ2-3)
CASSRLARTDTQYF

SEQ ID NO: 631647 - protein, 13 aa, Homo sapiens
  CDR3 for alpha chain variable domain of TCR clone 315824 (TRAV21, TRAJ20)
CAVGLRVDYKLSF

SEQ ID NO: 631648 - protein, 14 aa, Homo sapiens
  CDR3 for beta chain variable domain of TCR clone 315824 (TRBV7-2, TRBJ1-2)
CASSQTGSTYGYTF

SEQ ID NO: 631649 - protein, 11 aa, Homo sapiens
  CDR3 for alpha chain variable domain of TCR clone 315825 (TRAV23/DV6, TRAJ48)
CAPRWGEKLTF

SEQ ID NO: 631650 - protein, 13 aa, Homo sapiens
  CDR3 for beta chain variable domain of TCR clone 315825 (TRBV12-4, TRBJ2-5)
CASSPGREETQYF

SEQ ID NO: 631651 - protein, 11 aa, Homo sapiens
  CDR3 for alpha chain variable domain of TCR clone 315826 (TRAV3, TRAJ21)
CAVSNFNKFYF

SEQ ID NO: 631652 - protein, 16 aa, Homo sapiens
  CDR3 for beta chain variable domain of TCR clone 315826 (TRBV19, TRBJ2-1)
CASSKAGPSSYNEQFF

SEQ ID NO: 631653 - protein, 10 aa, Homo sapiens
  CDR3 for alpha chain variable domain of TCR clone 315827 (TRAV16, TRAJ22)
SAMYLRQLTF

SEQ ID NO: 631654 - protein, 13 aa, Homo sapiens
  CDR3 for beta chain variable domain of TCR clone 315827 (TRBV7-2, TRBJ2-4)
CASSREHANIQYF

SEQ ID NO: 631655 - protein, 14 aa, Homo sapiens
  CDR3 for alpha chain variable domain of TCR clone 315828 (TRAV20, TRAJ20)
CAVRRGYNDYKPRF

SEQ ID NO: 631656 - protein, 13 aa, Homo sapiens
  CDR3 for beta chain variable domain of TCR clone 315828 (TRBV19, TRBJ2-5)
CASSETAPETQYF

SEQ ID NO: 631657 - protein, 11 aa, Homo sapiens
  CDR3 for alpha chain variable domain of TCR clone 315829 (TRAV27, TRAJ47)
CRSNQGNKLVF

SEQ ID NO: 631658 - protein, 13 aa, Homo sapiens
  CDR3 for beta chain variable domain of TCR clone 315829 (TRBV12-4, TRBJ1-2)
CASSLRQGKGYTF

SEQ ID NO: 631659 - protein, 13 aa, Homo sapiens
  CDR3 for alpha chain variable domain of TCR clone 315830 (TRAV12-1, TRAJ34)
CGEPLRNTDKLIF

SEQ ID NO: 631660 - protein, 13 aa, Homo sapiens
  CDR3 for beta chain variable domain of TCR clone 315830 (TRBV7-9, TRBJ1-2)
CASSLKQNYGYTF

SEQ ID NO: 631661 - protein, 12 aa, Homo sapiens
  CDR3 for alpha chain variable domain of TCR clone 315831 (TRAV12-3, TRAJ5)
CAMDTGSRALTF

SEQ ID NO: 631662 - protein, 13 aa, Homo sapiens
  CDR3 for beta chain variable domain of TCR clone 315831 (TRBV7-7, TRBJ2-2)
CASSLTSAGELFF

SEQ ID NO: 631663 - protein, 14 aa, Homo sapiens
  CDR3 for alpha chain variable domain of TCR clone 315832 (TRAV26-1, TRAJ34)
CIVRESYNTDKLTF

SEQ ID NO: 631664 - protein, 16 aa, Homo sapiens
  CDR3 for beta chain variable domain of TCR clone 315832 (TRBV10-3, TRBJ2-1)
CAISGVGDGGGGEQFF

SEQ ID NO: 631665 - protein, 14 aa, Homo sapiens
  CDR3 for alpha chain variable domain of TCR clone 315833 (TRAV13-2, TRAJ43)
CAEIPTDNNNDRRF

SEQ ID NO: 631666 - protein, 15 aa, Homo sapiens
  CDR3 for beta chain variable domain of TCR clone 315833 (TRBV7-9, TRBJ2-2)
CASGPLDTFPGELFF

SEQ ID NO: 631667 - protein, 13 aa, Homo sapiens
  CDR3 for alpha chain variable domain of TCR clone 315834 (TRAV13-1, TRAJ6)
CAASKGGSYIPTF

SEQ ID NO: 631668 - protein, 14 aa, Homo sapiens
  CDR3 for beta chain variable domain of TCR clone 315834 (TRBV7-2, TRBJ2-1)
CASSLGVGYYEQFF

SEQ ID NO: 631669 - protein, 15 aa, Homo sapiens
  CDR3 for alpha chain variable domain of TCR clone 315835 (TRAV26-1, TRAJ39)
CIVRGFNNAGNMLTF

SEQ ID NO: 631670 - protein, 16 aa, Homo sapiens
  CDR3 for beta chain variable domain of TCR clone 315835 (TRBV11-3, TRBJ2-3)
CASSPGGLLGTDTQYF

SEQ ID NO: 631671 - protein, 13 aa, Homo sapiens
  CDR3 for alpha chain variable domain of TCR clone 315836 (TRAV13-2, TRAJ48)
CAEMDFGNEKLTF

SEQ ID NO: 631672 - protein, 14 aa, Homo sapiens
  CDR3 for beta chain variable domain of TCR clone 315836 (TRBV7-9, TRBJ1-6)
CASSPGRGNSPLHF

SEQ ID NO: 631673 - protein, 13 aa, Homo sapiens
  CDR3 for alpha chain variable domain of TCR clone 315837 (TRAV3, TRAJ16)
CAVRDRNGQKLLF

SEQ ID NO: 631674 - protein, 13 aa, Homo sapiens
  CDR3 for beta chain variable domain of TCR clone 315837 (TRBV6-4, TRBJ1-5)
CASSADLNQPQHF

SEQ ID NO: 631675 - protein, 14 aa, Homo sapiens
  CDR3 for alpha chain variable domain of TCR clone 315838 (TRAV29/DV5, TRAJ32)
CAAAYGGATNNRIF

SEQ ID NO: 631676 - protein, 15 aa, Homo sapiens
  CDR3 for beta chain variable domain of TCR clone 315838 (TRBV27, TRBJ2-7)
CASSTAGTGSYEQYF

SEQ ID NO: 631677 - protein, 13 aa, Homo sapiens
  CDR3 for alpha chain variable domain of TCR clone 315839 (TRAV27, TRAJ6)
CAGGTRGSYIATF

SEQ ID NO: 631678 - protein, 14 aa, Homo sapiens
  CDR3 for beta chain variable domain of TCR clone 315839 (TRBV6-1, TRBJ1-3)
CASVQGGGGNTIYF

SEQ ID NO: 631679 - protein, 13 aa, Homo sapiens
  CDR3 for alpha chain variable domain of TCR clone 315840 (TRAV8-3, TRAJ44)
CAVVTGTASKLTF

SEQ ID NO: 631680 - protein, 13 aa, Homo sapiens
  CDR3 for beta chain variable domain of TCR clone 315840 (TRBV10-3, TRBJ2-7)
CASKLAVNYEQYF

SEQ ID NO: 631681 - protein, 12 aa, Homo sapiens
  CDR3 for alpha chain variable domain of TCR clone 315841 (TRAV3, TRAJ7)
CADLLWEQQTRF

SEQ ID NO: 631682 - protein, 13 aa, Homo sapiens
  CDR3 for beta chain variable domain of TCR clone 315841 (TRBV7-3, TRBJ2-5)
CASSLRGGETQYF

SEQ ID NO: 631683 - protein, 13 aa, Homo sapiens
  CDR3 for alpha chain variable domain of TCR clone 315842 (TRAV2, TRAJ29)
CAAGNSANTPLVF

SEQ ID NO: 631684 - protein, 16 aa, Homo sapiens
  CDR3 for beta chain variable domain of TCR clone 315842 (TRBV7-9, TRBJ1-2)
CASSPGGGAINYGYTF

SEQ ID NO: 631685 - protein, 11 aa, Homo sapiens
  CDR3 for alpha chain variable domain of TCR clone 315843 (TRAV30, TRAJ23)
CRTEIAGKLIF

SEQ ID NO: 631686 - protein, 16 aa, Homo sapiens
  CDR3 for beta chain variable domain of TCR clone 315843 (TRBV7-2, TRBJ2-7)
CASTSQAASGGYEQYF

SEQ ID NO: 631687 - protein, 12 aa, Homo sapiens
  CDR3 for alpha chain variable domain of TCR clone 315844 (TRAV12-2, TRAJ9)
CAVYNGGFKTIF

SEQ ID NO: 631688 - protein, 14 aa, Homo sapiens
  CDR3 for beta chain variable domain of TCR clone 315844 (TRBV6-1, TRBJ1-5)
CASSETGMEQPRHF

SEQ ID NO: 631689 - protein, 14 aa, Homo sapiens
  CDR3 for alpha chain variable domain of TCR clone 315845 (TRAV13-1, TRAJ40)
CAASMTSGTYKYIF

SEQ ID NO: 631690 - protein, 15 aa, Homo sapiens
  CDR3 for beta chain variable domain of TCR clone 315845 (TRBV7-3, TRBJ2-1)
CACSPTGGGEVEQFF

SEQ ID NO: 631691 - protein, 12 aa, Homo sapiens
  CDR3 for alpha chain variable domain of TCR clone 315846 (TRAV8-3, TRAJ20)
CAVGANDYELRF

SEQ ID NO: 631692 - protein, 16 aa, Homo sapiens
  CDR3 for beta chain variable domain of TCR clone 315846 (TRBV19, TRBJ2-2)
CASRSPGTGATGELFF

SEQ ID NO: 631693 - protein, 17 aa, Homo sapiens
  CDR3 for alpha chain variable domain of TCR clone 315847 (TRAV26-1, TRAJ53)
CIVRVDASGGSNYKLTF

SEQ ID NO: 631694 - protein, 15 aa, Homo sapiens
  CDR3 for beta chain variable domain of TCR clone 315847 (TRBV20-1, TRBJ2-7)
CSARVPAAYFHEQYF

SEQ ID NO: 631695 - protein, 12 aa, Homo sapiens
  CDR3 for alpha chain variable domain of TCR clone 315848 (TRAV8-3, TRAJ26)
CAGDNYGQNFVF

SEQ ID NO: 631696 - protein, 15 aa, Homo sapiens
  CDR3 for beta chain variable domain of TCR clone 315848 (TRBV5-1, TRBJ2-3)
CASGVTSGSTDTQYF

SEQ ID NO: 631697 - protein, 14 aa, Homo sapiens
  CDR3 for alpha chain variable domain of TCR clone 315849 (TRAV38-2/DV8, TRAJ30)
CAYRSADRDYKIIF

SEQ ID NO: 631698 - protein, 16 aa, Homo sapiens
  CDR3 for beta chain variable domain of TCR clone 315849 (TRBV15, TRBJ1-3)
CATSSPIGFSGNTIYF

SEQ ID NO: 631699 - protein, 12 aa, Homo sapiens
  CDR3 for alpha chain variable domain of TCR clone 315850 (TRAV12-3, TRAJ17)
CAMTITGNKLTF

SEQ ID NO: 631700 - protein, 11 aa, Homo sapiens
  CDR3 for beta chain variable domain of TCR clone 315850 (TRBV11-2, TRBJ2-2)
CASSLPGELFF

SEQ ID NO: 631701 - protein, 16 aa, Homo sapiens
  CDR3 for alpha chain variable domain of TCR clone 315851 (TRAV30, TRAJ24)
CGTEIVDADSWGKFQF

SEQ ID NO: 631702 - protein, 13 aa, Homo sapiens
  CDR3 for beta chain variable domain of TCR clone 315851 (TRBV7-2, TRBJ1-4)
CASSLAGLEKLFF

SEQ ID NO: 631703 - protein, 12 aa, Homo sapiens
  CDR3 for alpha chain variable domain of TCR clone 315852 (TRAV12-3, TRAJ32)
CAGGGATNKLIF

SEQ ID NO: 631704 - protein, 18 aa, Homo sapiens
  CDR3 for beta chain variable domain of TCR clone 315852 (TRBV7-3, TRBJ2-3)
CASSSTGTYPGSTDTQYF

SEQ ID NO: 631705 - protein, 14 aa, Homo sapiens
  CDR3 for alpha chain variable domain of TCR clone 315853 (TRAV12-3, TRAJ10)
SHLPLPGGGNKLTF

SEQ ID NO: 631706 - protein, 14 aa, Homo sapiens
  CDR3 for beta chain variable domain of TCR clone 315853 (TRBV20-1, TRBJ2-5)
CSALVPGYQETQYF

SEQ ID NO: 631707 - protein, 12 aa, Homo sapiens
  CDR3 for alpha chain variable domain of TCR clone 315854 (TRAV21, TRAJ11)
CAATSGYSTLTF

SEQ ID NO: 631708 - protein, 16 aa, Homo sapiens
  CDR3 for beta chain variable domain of TCR clone 315854 (TRBV28, TRBJ2-2)
CASSLEGCSNTGELFF

SEQ ID NO: 631709 - protein, 15 aa, Homo sapiens
  CDR3 for alpha chain variable domain of TCR clone 315855 (TRAV23/DV6, TRAJ30)
CAASSQERRDDKLIF

SEQ ID NO: 631710 - protein, 17 aa, Homo sapiens
  CDR3 for beta chain variable domain of TCR clone 315855 (TRBV4-3, TRBJ2-1)
CASSQFSSGRASGEQFF

SEQ ID NO: 631711 - protein, 14 aa, Homo sapiens
  CDR3 for alpha chain variable domain of TCR clone 315856 (TRAV17, TRAJ54)
CATDANQGAQKLVF

SEQ ID NO: 631712 - protein, 12 aa, Homo sapiens
  CDR3 for beta chain variable domain of TCR clone 315856 (TRBV6-3, TRBJ2-1)
CACSGSYNEQFF

SEQ ID NO: 631713 - protein, 14 aa, Homo sapiens
  CDR3 for alpha chain variable domain of TCR clone 315857 (TRAV1-2, TRAJ16)
CAVNRVSVGQKLLF

SEQ ID NO: 631714 - protein, 16 aa, Homo sapiens
  CDR3 for beta chain variable domain of TCR clone 315857 (TRBV11-2, TRBJ1-2)
CASSLDTGGADYGYTF

SEQ ID NO: 631715 - protein, 13 aa, Homo sapiens
  CDR3 for alpha chain variable domain of TCR clone 315858 (TRAV35, TRAJ37)
CAGSSGNTGILIF

SEQ ID NO: 631716 - protein, 16 aa, Homo sapiens
  CDR3 for beta chain variable domain of TCR clone 315858 (TRBV10-3, TRBJ2-1)
CAISLTSGNSYNEQFF

SEQ ID NO: 631717 - protein, 13 aa, Homo sapiens
  CDR3 for alpha chain variable domain of TCR clone 315859 (TRAV21, TRAJ27)
CAARPGNAGKSTF

SEQ ID NO: 631718 - protein, 15 aa, Homo sapiens
  CDR3 for beta chain variable domain of TCR clone 315859 (TRBV12-4, TRBJ2-5)
CASSPPTGLKETQYF

SEQ ID NO: 631719 - protein, 17 aa, Homo sapiens
  CDR3 for alpha chain variable domain of TCR clone 315860 (TRAV3, TRAJ6)
CAVRDGARAVGSYIPTF

SEQ ID NO: 631720 - protein, 14 aa, Homo sapiens
  CDR3 for beta chain variable domain of TCR clone 315860 (TRBV7-2, TRBJ2-7)
CASSPKTSFYEQYF

SEQ ID NO: 631721 - protein, 12 aa, Homo sapiens
  CDR3 for alpha chain variable domain of TCR clone 315861 (TRAV12-3, TRAJ20)
CAMVRGDYKLSF

SEQ ID NO: 631722 - protein, 16 aa, Homo sapiens
  CDR3 for beta chain variable domain of TCR clone 315861 (TRBV5-1, TRBJ2-3)
CASSLQGRVGADTQYF

SEQ ID NO: 631723 - protein, 18 aa, Homo sapiens
  CDR3 for alpha chain variable domain of TCR clone 315862 (TRAV12-3, TRAJ52)
CAMNRTNAGGTSYGKLTF

SEQ ID NO: 631724 - protein, 17 aa, Homo sapiens
  CDR3 for beta chain variable domain of TCR clone 315862 (TRBV13, TRBJ2-3)
CASSLSGAAGGRNTQYF

SEQ ID NO: 631725 - protein, 15 aa, Homo sapiens
  CDR3 for alpha chain variable domain of TCR clone 315863 (TRAV2, TRAJ13)
CATPSYSGGYQKVTF

SEQ ID NO: 631726 - protein, 13 aa, Homo sapiens
  CDR3 for beta chain variable domain of TCR clone 315863 (TRBV11-2, TRBJ2-1)
CASSLDLVNEQFF

SEQ ID NO: 631727 - protein, 11 aa, Homo sapiens
  CDR3 for alpha chain variable domain of TCR clone 315864 (TRAV1-1, TRAJ23)
CAVRQGGKLIF

SEQ ID NO: 631728 - protein, 20 aa, Homo sapiens
  CDR3 for beta chain variable domain of TCR clone 315864 (TRBV7-8, TRBJ2-2)
CASSHLFPGPTVHITGELFL

SEQ ID NO: 631729 - protein, 13 aa, Homo sapiens
  CDR3 for alpha chain variable domain of TCR clone 315865 (TRAV13-2, TRAJ54)
CAESGSGSPKAGI

SEQ ID NO: 631730 - protein, 15 aa, Homo sapiens
  CDR3 for beta chain variable domain of TCR clone 315865 (TRBV20-1, TRBJ2-7)
CSAESGTSGAYEQCF

SEQ ID NO: 631731 - protein, 15 aa, Homo sapiens
  CDR3 for alpha chain variable domain of TCR clone 315866 (TRAV3, TRAJ5)
CAVRDLDTGGRALTF

SEQ ID NO: 631732 - protein, 13 aa, Homo sapiens
  CDR3 for beta chain variable domain of TCR clone 315866 (TRBV12-4, TRBJ2-7)
CASSPTGTYEQYF

SEQ ID NO: 631733 - protein, 14 aa, Homo sapiens
  CDR3 for alpha chain variable domain of TCR clone 315867 (TRAV13-1, TRAJ17)
LSSRSKAAGNKLTF

SEQ ID NO: 631734 - protein, 14 aa, Homo sapiens
  CDR3 for beta chain variable domain of TCR clone 315867 (TRBV19, TRBJ2-1)
CASPTFVLSGEQFF

SEQ ID NO: 631735 - protein, 17 aa, Homo sapiens
  CDR3 for alpha chain variable domain of TCR clone 315868 (TRAV26-1, TRAJ28)
CIVRVPDSGAGSYQRTF

SEQ ID NO: 631736 - protein, 17 aa, Homo sapiens
  CDR3 for beta chain variable domain of TCR clone 315868 (TRBV28, TRBJ2-7)
CASSPLPAGGKSYEQYF

SEQ ID NO: 631737 - protein, 15 aa, Homo sapiens
  CDR3 for alpha chain variable domain of TCR clone 315869 (TRAV3, TRAJ20)
CSVIDSRSNDYKLSF

SEQ ID NO: 631738 - protein, 14 aa, Homo sapiens
  CDR3 for beta chain variable domain of TCR clone 315869 (TRBV20-1, TRBJ2-7)
CSARRGNGIYEQYF

SEQ ID NO: 631739 - protein, 13 aa, Homo sapiens
  CDR3 for alpha chain variable domain of TCR clone 315870 (TRAV17, TRAJ29)
CATDAFRKHTSCL

SEQ ID NO: 631740 - protein, 13 aa, Homo sapiens
  CDR3 for beta chain variable domain of TCR clone 315870 (TRBV11-2, TRBJ2-1)
CASSLRLTHEQFF

SEQ ID NO: 631741 - protein, 14 aa, Homo sapiens
  CDR3 for alpha chain variable domain of TCR clone 315871 (TRAV1-2, TRAJ8)
CAVREDTGFQKLVF

SEQ ID NO: 631742 - protein, 13 aa, Homo sapiens
  CDR3 for beta chain variable domain of TCR clone 315871 (TRBV4-2, TRBJ2-2)
CASEDRGTGELLL

SEQ ID NO: 631743 - protein, 18 aa, Homo sapiens
  CDR3 for alpha chain variable domain of TCR clone 315872 (TRAV26-2, TRAJ45)
CILRVDKYSGGGADGLTF

SEQ ID NO: 631744 - protein, 14 aa, Homo sapiens
  CDR3 for beta chain variable domain of TCR clone 315872 (TRBV7-2, TRBJ2-7)
CASRSQGAAYKQYF

SEQ ID NO: 631745 - protein, 12 aa, Homo sapiens
  CDR3 for alpha chain variable domain of TCR clone 315873 (TRAV13-2, TRAJ23)
CAERHRGGKLIF

SEQ ID NO: 631746 - protein, 16 aa, Homo sapiens
  CDR3 for beta chain variable domain of TCR clone 315873 (TRBV12-5, TRBJ2-5)
CASGPRTSGNQGTQYF

SEQ ID NO: 631747 - protein, 14 aa, Homo sapiens
  CDR3 for alpha chain variable domain of TCR clone 315874 (TRAV2, TRAJ9)
CAVEDRSGGFKTNF

SEQ ID NO: 631748 - protein, 15 aa, Homo sapiens
  CDR3 for beta chain variable domain of TCR clone 315874 (TRBV11-3, TRBJ2-3)
CASLKDGREGDTQYF

SEQ ID NO: 631749 - protein, 16 aa, Homo sapiens
  CDR3 for alpha chain variable domain of TCR clone 315875 (TRAV12-1, TRAJ43)
CVVNPHRFGAGTRLTV

SEQ ID NO: 631750 - protein, 16 aa, Homo sapiens
  CDR3 for beta chain variable domain of TCR clone 315875 (TRBV9, TRBJ2-1)
CASSVGGGGNYNEQFF

SEQ ID NO: 631751 - protein, 10 aa, Homo sapiens
  CDR3 for alpha chain variable domain of TCR clone 315876 (TRAV2, TRAJ34)
CAVVNDKLIF

SEQ ID NO: 631752 - protein, 14 aa, Homo sapiens
  CDR3 for beta chain variable domain of TCR clone 315876 (TRBV7-3, TRBJ2-1)
CASSLAGGTNEQFF

SEQ ID NO: 631753 - protein, 14 aa, Homo sapiens
  CDR3 for alpha chain variable domain of TCR clone 315877 (TRAV1-2, TRAJ16)
CAVNRFSDGQKLLF

SEQ ID NO: 631754 - protein, 14 aa, Homo sapiens
  CDR3 for beta chain variable domain of TCR clone 315877 (TRBV7-2, TRBJ2-7)
CASSLYPGRYVQYF

SEQ ID NO: 631755 - protein, 11 aa, Homo sapiens
  CDR3 for alpha chain variable domain of TCR clone 315878 (TRAV8-3, TRAJ15)
CAVDPGTALIF

SEQ ID NO: 631756 - protein, 18 aa, Homo sapiens
  CDR3 for beta chain variable domain of TCR clone 315878 (TRBV18, TRBJ2-3)
CASSYTSGAAGGTDTQYF

SEQ ID NO: 631757 - protein, 14 aa, Homo sapiens
  CDR3 for alpha chain variable domain of TCR clone 315879 (TRAV9-2, TRAJ39)
CALYIYNAGNMITF

SEQ ID NO: 631758 - protein, 14 aa, Homo sapiens
  CDR3 for beta chain variable domain of TCR clone 315879 (TRBV25-1, TRBJ1-1)
CASTHLGGNTEAFF

SEQ ID NO: 631759 - protein, 14 aa, Homo sapiens
  CDR3 for alpha chain variable domain of TCR clone 315880 (TRAV13-2, TRAJ17)
CAENSKAAGNKLTF

SEQ ID NO: 631760 - protein, 19 aa, Homo sapiens
  CDR3 for beta chain variable domain of TCR clone 315880 (TRBV7-8, TRBJ2-1)
CQQLRRRGLAGVWYNEQFF

SEQ ID NO: 631761 - protein, 11 aa, Homo sapiens
  CDR3 for alpha chain variable domain of TCR clone 315881 (TRAV12-2, TRAJ31)
CAILTNARLMF

SEQ ID NO: 631762 - protein, 13 aa, Homo sapiens
  CDR3 for beta chain variable domain of TCR clone 315881 (TRBV20-1, TRBJ1-1)
CSARLGQGTEAFF

SEQ ID NO: 631763 - protein, 13 aa, Homo sapiens
  CDR3 for alpha chain variable domain of TCR clone 315882 (TRAV21, TRAJ26)
CSVLDNYGQNFVF

SEQ ID NO: 631764 - protein, 16 aa, Homo sapiens
  CDR3 for beta chain variable domain of TCR clone 315882 (TRBV29-1, TRBJ2-2)
CSVETRASGNTGELFF

SEQ ID NO: 631765 - protein, 15 aa, Homo sapiens
  CDR3 for alpha chain variable domain of TCR clone 315883 (TRAV1-2, TRAJ28)
CAVQYSGAGSYQLTF

SEQ ID NO: 631766 - protein, 15 aa, Homo sapiens
  CDR3 for beta chain variable domain of TCR clone 315883 (TRBV27, TRBJ1-6)
CASSFDRGLGSPLHF

SEQ ID NO: 631767 - protein, 15 aa, Homo sapiens
  CDR3 for alpha chain variable domain of TCR clone 315884 (TRAV8-2, TRAJ40)
CVVLGTTSGTYKYIF

SEQ ID NO: 631768 - protein, 19 aa, Homo sapiens
  CDR3 for beta chain variable domain of TCR clone 315884 (TRBV7-2, TRBJ2-3)
CASSLVLSAYISRPDTQYF

SEQ ID NO: 631769 - protein, 12 aa, Homo sapiens
  CDR3 for alpha chain variable domain of TCR clone 315885 (TRAV12-3, TRAJ17)
CSMTLTGNKLTF

SEQ ID NO: 631770 - protein, 14 aa, Homo sapiens
  CDR3 for beta chain variable domain of TCR clone 315885 (TRBV4-1, TRBJ2-7)
CASSQDREHVEQYF

SEQ ID NO: 631771 - protein, 13 aa, Homo sapiens
  CDR3 for alpha chain variable domain of TCR clone 315886 (TRAV1-2, TRAJ9)
CAALNTGGFKTIF

SEQ ID NO: 631772 - protein, 16 aa, Homo sapiens
  CDR3 for beta chain variable domain of TCR clone 315886 (TRBV7-2, TRBJ2-1)
CASSLVGGPELNEQFF

SEQ ID NO: 631773 - protein, 12 aa, Homo sapiens
  CDR3 for alpha chain variable domain of TCR clone 315887 (TRAV27, TRAJ35)
CAGADFGNVLHC

SEQ ID NO: 631774 - protein, 16 aa, Homo sapiens
  CDR3 for beta chain variable domain of TCR clone 315887 (TRBV6-1, TRBJ2-1)
CASILRQVSSYNEQFF

SEQ ID NO: 631775 - protein, 14 aa, Homo sapiens
  CDR3 for alpha chain variable domain of TCR clone 315888 (TRAV13-2, TRAJ17)
CAENSKPTGNKLTF

SEQ ID NO: 631776 - protein, 11 aa, Homo sapiens
  CDR3 for beta chain variable domain of TCR clone 315888 (TRBV6-3, TRBJ2-3)
CATGQADTQYF

SEQ ID NO: 631777 - protein, 18 aa, Homo sapiens
  CDR3 for alpha chain variable domain of TCR clone 315889 (TRAV38-2/DV8, TRAJ42)
CAYRSADLTGGSQGNLIF

SEQ ID NO: 631778 - protein, 12 aa, Homo sapiens
  CDR3 for beta chain variable domain of TCR clone 315889 (TRBV11-2, TRBJ2-2)
CASSLGGGELSF

SEQ ID NO: 631779 - protein, 16 aa, Homo sapiens
  CDR3 for alpha chain variable domain of TCR clone 315890 (TRAV30, TRAJ24)
CGTEIVYAHSWGKFQF

SEQ ID NO: 631780 - protein, 14 aa, Homo sapiens
  CDR3 for beta chain variable domain of TCR clone 315890 (TRBV12-5, TRBJ2-5)
CASGSRTHQETQYF

SEQ ID NO: 631781 - protein, 18 aa, Homo sapiens
  CDR3 for alpha chain variable domain of TCR clone 315891 (TRAV21, TRAJ8)
CAVNTGFQKLVLELAPDF

SEQ ID NO: 631782 - protein, 13 aa, Homo sapiens
  CDR3 for beta chain variable domain of TCR clone 315891 (TRBV6-3, TRBJ2-1)
CASSYDNYNEQFF

SEQ ID NO: 631783 - protein, 15 aa, Homo sapiens
  CDR3 for alpha chain variable domain of TCR clone 315892 (TRAV21, TRAJ53)
CATLNSGGSNYKLTF

SEQ ID NO: 631784 - protein, 14 aa, Homo sapiens
  CDR3 for beta chain variable domain of TCR clone 315892 (TRBV9, TRBJ1-2)
CASSVSTRSDGYTF

SEQ ID NO: 631785 - protein, 14 aa, Homo sapiens
  CDR3 for alpha chain variable domain of TCR clone 315893 (TRAV1-2, TRAJ16)
CAANRFSDGQKLLF

SEQ ID NO: 631786 - protein, 16 aa, Homo sapiens
  CDR3 for beta chain variable domain of TCR clone 315893 (TRBV11-2, TRBJ2-7)
CASSPLAGGPRYEQYF

SEQ ID NO: 631787 - protein, 12 aa, Homo sapiens
  CDR3 for alpha chain variable domain of TCR clone 315894 (TRAV12-1, TRAJ40)
CVVYSVTYKYIF

SEQ ID NO: 631788 - protein, 14 aa, Homo sapiens
  CDR3 for beta chain variable domain of TCR clone 315894 (TRBV20-1, TRBJ2-3)
CSARGGTSTDTQYF

SEQ ID NO: 631789 - protein, 13 aa, Homo sapiens
  CDR3 for alpha chain variable domain of TCR clone 315895 (TRAV21, TRAJ36)
CAVIKTGANNLFF

SEQ ID NO: 631790 - protein, 14 aa, Homo sapiens
  CDR3 for beta chain variable domain of TCR clone 315895 (TRBV12-5, TRBJ2-5)
CASGSRTHQETQYF

SEQ ID NO: 631791 - protein, 13 aa, Homo sapiens
  CDR3 for alpha chain variable domain of TCR clone 315896 (TRAV17, TRAJ5)
CAPMDTGRRALTF

SEQ ID NO: 631792 - protein, 15 aa, Homo sapiens
  CDR3 for beta chain variable domain of TCR clone 315896 (TRBV7-9, TRBJ1-4)
CASSARTGGNEKLFF

SEQ ID NO: 631793 - protein, 12 aa, Homo sapiens
  CDR3 for alpha chain variable domain of TCR clone 315897 (TRAV12-3, TRAJ17)
IAMTLTGNKLTF

SEQ ID NO: 631794 - protein, 15 aa, Homo sapiens
  CDR3 for beta chain variable domain of TCR clone 315897 (TRBV20-1, TRBJ2-7)
CSARDRVSGMDEQYF

SEQ ID NO: 631795 - protein, 12 aa, Homo sapiens
  CDR3 for alpha chain variable domain of TCR clone 315898 (TRAV25, TRAJ17)
CAGEAAGNKLTF

SEQ ID NO: 631796 - protein, 14 aa, Homo sapiens
  CDR3 for beta chain variable domain of TCR clone 315898 (TRBV7-2, TRBJ2-7)
CASSPKTSFYEQYF

SEQ ID NO: 631797 - protein, 12 aa, Homo sapiens
  CDR3 for alpha chain variable domain of TCR clone 315899 (TRAV3, TRAJ20)
CSVRDPDYKLSF

SEQ ID NO: 631798 - protein, 15 aa, Homo sapiens
  CDR3 for beta chain variable domain of TCR clone 315899 (TRBV4-1, TRBJ2-5)
CASSQWDLHQETQYF

SEQ ID NO: 631799 - protein, 12 aa, Homo sapiens
  CDR3 for alpha chain variable domain of TCR clone 315900 (TRAV8-3, TRAJ20)
CAVDFNDCKLSF

SEQ ID NO: 631800 - protein, 12 aa, Homo sapiens
  CDR3 for beta chain variable domain of TCR clone 315900 (TRBV29-1, TRBJ2-3)
CSVTGGADTQYF

SEQ ID NO: 631801 - protein, 15 aa, Homo sapiens
  CDR3 for alpha chain variable domain of TCR clone 315901 (TRAV12-3, TRAJ27)
CAMGAYNTNAGKPTF

SEQ ID NO: 631802 - protein, 13 aa, Homo sapiens
  CDR3 for beta chain variable domain of TCR clone 315901 (TRBV11-2, TRBJ2-5)
CASSRGPSETQYF

SEQ ID NO: 631803 - protein, 13 aa, Homo sapiens
  CDR3 for alpha chain variable domain of TCR clone 315902 (TRAV13-2, TRAJ53)
CAENMGSNYKLTF

SEQ ID NO: 631804 - protein, 13 aa, Homo sapiens
  CDR3 for beta chain variable domain of TCR clone 315902 (TRBV4-1, TRBJ2-2)
CASSHENTGELFF

SEQ ID NO: 631805 - protein, 12 aa, Homo sapiens
  CDR3 for alpha chain variable domain of TCR clone 315903 (TRAV16, TRAJ10)
CSRTGGGTKLTF

SEQ ID NO: 631806 - protein, 14 aa, Homo sapiens
  CDR3 for beta chain variable domain of TCR clone 315903 (TRBV4-2, TRBJ2-1)
CASGLDRAYNEQFF

SEQ ID NO: 631807 - protein, 13 aa, Homo sapiens
  CDR3 for alpha chain variable domain of TCR clone 315904 (TRAV36/DV7, TRAJ37)
CAVFYSNKGKLIF

SEQ ID NO: 631808 - protein, 12 aa, Homo sapiens
  CDR3 for beta chain variable domain of TCR clone 315904 (TRBV11-2, TRBJ2-2)
CASSLGGGELFF

SEQ ID NO: 631809 - protein, 13 aa, Homo sapiens
  CDR3 for alpha chain variable domain of TCR clone 315905 (TRAV12-2, TRAJ20)
CAVYPSNDYKLSF

SEQ ID NO: 631810 - protein, 12 aa, Homo sapiens
  CDR3 for beta chain variable domain of TCR clone 315905 (TRBV7-2, TRBJ2-5)
CASSQYQETQYF

SEQ ID NO: 631811 - protein, 15 aa, Homo sapiens
  CDR3 for alpha chain variable domain of TCR clone 315906 (TRAV8-6, TRAJ6)
CAVSGESGGSYRPTF

SEQ ID NO: 631812 - protein, 14 aa, Homo sapiens
  CDR3 for beta chain variable domain of TCR clone 315906 (TRBV9, TRBJ2-4)
CASSPSGTSGFQYF

SEQ ID NO: 631813 - protein, 17 aa, Homo sapiens
  CDR3 for alpha chain variable domain of TCR clone 315907 (TRAV26-1, TRAJ53)
CIVRVDDSGGSNYKLTF

SEQ ID NO: 631814 - protein, 15 aa, Homo sapiens
  CDR3 for beta chain variable domain of TCR clone 315907 (TRBV20-1, TRBJ2-7)
CSGRVPAAYFYEQYF

SEQ ID NO: 631815 - protein, 16 aa, Homo sapiens
  CDR3 for alpha chain variable domain of TCR clone 315908 (TRAV30, TRAJ24)
CGTEIVDADSWGKFQF

SEQ ID NO: 631816 - protein, 13 aa, Homo sapiens
  CDR3 for beta chain variable domain of TCR clone 315908 (TRBV12-4, TRBJ1-1)
CASSLIGDTEAFF

SEQ ID NO: 631817 - protein, 13 aa, Homo sapiens
  CDR3 for alpha chain variable domain of TCR clone 315909 (TRAV20, TRAJ48)
CAVQGVGNEKLTF

SEQ ID NO: 631818 - protein, 14 aa, Homo sapiens
  CDR3 for beta chain variable domain of TCR clone 315909 (TRBV6-1, TRBJ1-3)
CASVQGGGGNTIYF

SEQ ID NO: 631819 - protein, 11 aa, Homo sapiens
  CDR3 for alpha chain variable domain of TCR clone 315910 (TRAV12-2, TRAJ31)
CAILINARLMF

SEQ ID NO: 631820 - protein, 13 aa, Homo sapiens
  CDR3 for beta chain variable domain of TCR clone 315910 (TRBV20-1, TRBJ1-1)
CSARLGQGTEAFF

SEQ ID NO: 631821 - protein, 11 aa, Homo sapiens
  CDR3 for alpha chain variable domain of TCR clone 315911 (TRAV13-1, TRAJ15)
CRSQAGTALIF

SEQ ID NO: 631822 - protein, 14 aa, Homo sapiens
  CDR3 for beta chain variable domain of TCR clone 315911 (TRBV19, TRBJ2-2)
CASSTLHRSGELFF

SEQ ID NO: 631823 - protein, 14 aa, Homo sapiens
  CDR3 for alpha chain variable domain of TCR clone 315912 (TRAV8-1, TRAJ22)
CAAPSSGYARQLTF

SEQ ID NO: 631824 - protein, 14 aa, Homo sapiens
  CDR3 for beta chain variable domain of TCR clone 315912 (TRBV9, TRBJ2-2)
CASSVRQGAGELFF

SEQ ID NO: 631825 - protein, 10 aa, Homo sapiens
  CDR3 for alpha chain variable domain of TCR clone 315913 (TRAV26-1, TRAJ40)
CIAGTYKYIF

SEQ ID NO: 631826 - protein, 16 aa, Homo sapiens
  CDR3 for beta chain variable domain of TCR clone 315913 (TRBV4-1, TRBJ2-1)
GASSQEAGQGSDEQFF

SEQ ID NO: 631827 - protein, 13 aa, Homo sapiens
  CDR3 for alpha chain variable domain of TCR clone 315914 (TRAV12-2, TRAJ9)
CAGGNTGGFKTIF

SEQ ID NO: 631828 - protein, 12 aa, Homo sapiens
  CDR3 for beta chain variable domain of TCR clone 315914 (TRBV4-1, TRBJ2-1)
CASSQGRGGAYT

SEQ ID NO: 631829 - protein, 13 aa, Homo sapiens
  CDR3 for alpha chain variable domain of TCR clone 315915 (TRAV29/DV5, TRAJ33)
CAASVESNYQLIC

SEQ ID NO: 631830 - protein, 15 aa, Homo sapiens
  CDR3 for beta chain variable domain of TCR clone 315915 (TRBV18, TRBJ1-1)
CASSDRGTGDTEAFF

SEQ ID NO: 631831 - protein, 10 aa, Homo sapiens
  CDR3 for alpha chain variable domain of TCR clone 315916 (TRAV3, TRAJ18)
CAVRLTEAQP

SEQ ID NO: 631832 - protein, 13 aa, Homo sapiens
  CDR3 for beta chain variable domain of TCR clone 315916 (TRBV7-3, TRBJ1-1)
CASSQDWGAEAFF

SEQ ID NO: 631833 - protein, 13 aa, Homo sapiens
  CDR3 for alpha chain variable domain of TCR clone 315917 (TRAV8-3, TRAJ31)
CAVSARNNARLMF

SEQ ID NO: 631834 - protein, 14 aa, Homo sapiens
  CDR3 for beta chain variable domain of TCR clone 315917 (TRBV12-5, TRBJ2-5)
CASGSRTHQETQYF

SEQ ID NO: 631835 - protein, 13 aa, Homo sapiens
  CDR3 for alpha chain variable domain of TCR clone 315918 (TRAV12-3, TRAJ33)
CAMSVNRNYQLIW

SEQ ID NO: 631836 - protein, 16 aa, Homo sapiens
  CDR3 for beta chain variable domain of TCR clone 315918 (TRBV13, TRBJ2-5)
CASSLRTGGSWETQYF

SEQ ID NO: 631837 - protein, 12 aa, Homo sapiens
  CDR3 for alpha chain variable domain of TCR clone 315919 (TRAV1-2, TRAJ26)
CAVSPYGQNFVF

SEQ ID NO: 631838 - protein, 14 aa, Homo sapiens
  CDR3 for beta chain variable domain of TCR clone 315919 (TRBV5-1, TRBJ2-7)
CASSVASGVNEQYF

SEQ ID NO: 631839 - protein, 12 aa, Homo sapiens
  CDR3 for alpha chain variable domain of TCR clone 315920 (TRAV23/DV6, TRAJ30)
CAASKGDDKIIF

SEQ ID NO: 631840 - protein, 12 aa, Homo sapiens
  CDR3 for beta chain variable domain of TCR clone 315920 (TRBV11-2, TRBJ2-2)
CASSLGGGELFF

SEQ ID NO: 631841 - protein, 12 aa, Homo sapiens
  CDR3 for alpha chain variable domain of TCR clone 315921 (TRAV13-1, TRAJ49)
CAASPMGNQFYF

SEQ ID NO: 631842 - protein, 13 aa, Homo sapiens
  CDR3 for beta chain variable domain of TCR clone 315921 (TRBV20-1, TRBJ2-2)
CSASAAGTGELFC

SEQ ID NO: 631843 - protein, 12 aa, Homo sapiens
  CDR3 for alpha chain variable domain of TCR clone 315922 (TRAV26-2, TRAJ48)
CVLRKGNEKLTF

SEQ ID NO: 631844 - protein, 14 aa, Homo sapiens
  CDR3 for beta chain variable domain of TCR clone 315922 (TRBV28, TRBJ2-7)
CASSTLRGRFEQYF

SEQ ID NO: 631845 - protein, 14 aa, Homo sapiens
  CDR3 for alpha chain variable domain of TCR clone 315923 (TRAV12-2, TRAJ24)
CAVPPADSWGKLQF

SEQ ID NO: 631846 - protein, 22 aa, Homo sapiens
  CDR3 for beta chain variable domain of TCR clone 315923 (TRBV6-4, TRBJ2-3)
CTSVPAAPAEGGRAWGTDTQYF

SEQ ID NO: 631847 - protein, 14 aa, Homo sapiens
  CDR3 for alpha chain variable domain of TCR clone 315924 (TRAV8-3, TRAJ4)
CAVGAAGGYSKLIF

SEQ ID NO: 631848 - protein, 15 aa, Homo sapiens
  CDR3 for beta chain variable domain of TCR clone 315924 (TRBV6-5, TRBJ2-1)
CASSYDEGAGNEQFF

SEQ ID NO: 631849 - protein, 14 aa, Homo sapiens
  CDR3 for alpha chain variable domain of TCR clone 315925 (TRAV27, TRAJ37)
CAGVGSSNTGKLIF

SEQ ID NO: 631850 - protein, 11 aa, Homo sapiens
  CDR3 for beta chain variable domain of TCR clone 315925 (TRBV25-1, TRBJ2-7)
CASSKTGEQYF

SEQ ID NO: 631851 - protein, 15 aa, Homo sapiens
  CDR3 for alpha chain variable domain of TCR clone 315926 (TRAV27, TRAJ38)
CAARRNAGNNRKLLW

SEQ ID NO: 631852 - protein, 17 aa, Homo sapiens
  CDR3 for beta chain variable domain of TCR clone 315926 (TRBV13, TRBJ2-3)
CASSLSRVAGGRNTQYF

SEQ ID NO: 631853 - protein, 18 aa, Homo sapiens
  CDR3 for alpha chain variable domain of TCR clone 315927 (TRAV13-1, TRAJ52)
CAAKNPNAGGTSYGKLTF

SEQ ID NO: 631854 - protein, 15 aa, Homo sapiens
  CDR3 for beta chain variable domain of TCR clone 315927 (TRBV7-9, TRBJ1-6)
CASSSPGRGNSPLHL

SEQ ID NO: 631855 - protein, 12 aa, Homo sapiens
  CDR3 for alpha chain variable domain of TCR clone 315928 (TRAV35, TRAJ39)
LAPNNAGNMLTF

SEQ ID NO: 631856 - protein, 16 aa, Homo sapiens
  CDR3 for beta chain variable domain of TCR clone 315928 (TRBV2, TRBJ2-3)
CASSTSVVGVTDTQYF

SEQ ID NO: 631857 - protein, 14 aa, Homo sapiens
  CDR3 for alpha chain variable domain of TCR clone 315929 (TRAV21, TRAJ35)
RAVMPIGFGNVLHC

SEQ ID NO: 631858 - protein, 15 aa, Homo sapiens
  CDR3 for beta chain variable domain of TCR clone 315929 (TRBV7-2, TRBJ1-1)
CASSFAGDRDTEAFF

SEQ ID NO: 631859 - protein, 16 aa, Homo sapiens
  CDR3 for alpha chain variable domain of TCR clone 315930 (TRAV14/DV4, TRAJ53)
CAMREGGGGSNYKLTF

SEQ ID NO: 631860 - protein, 14 aa, Homo sapiens
  CDR3 for beta chain variable domain of TCR clone 315930 (TRBV20-1, TRBJ2-7)
CSAKTETGGYEQYF

SEQ ID NO: 631861 - protein, 14 aa, Homo sapiens
  CDR3 for alpha chain variable domain of TCR clone 315931 (TRAV1-2, TRAJ16)
CAVNRFSDGQKLLF

SEQ ID NO: 631862 - protein, 13 aa, Homo sapiens
  CDR3 for beta chain variable domain of TCR clone 315931 (TRBV2, TRBJ2-7)
CASTGGSSYEQYF

SEQ ID NO: 631863 - protein, 12 aa, Homo sapiens
  CDR3 for alpha chain variable domain of TCR clone 315932 (TRAV8-3, TRAJ13)
CAVGAGYQKVTF

SEQ ID NO: 631864 - protein, 13 aa, Homo sapiens
  CDR3 for beta chain variable domain of TCR clone 315932 (TRBV7-7, TRBJ2-2)
CASSLTSAGELFF

SEQ ID NO: 631865 - protein, 14 aa, Homo sapiens
  CDR3 for alpha chain variable domain of TCR clone 315933 (TRAV8-3, TRAJ3)
CAVVPRSSASKIVF

SEQ ID NO: 631866 - protein, 16 aa, Homo sapiens
  CDR3 for beta chain variable domain of TCR clone 315933 (TRBV4-1, TRBJ2-3)
RASSQLTSGGGDTQYF

SEQ ID NO: 631867 - protein, 14 aa, Homo sapiens
  CDR3 for alpha chain variable domain of TCR clone 315934 (TRAV12-2, TRAJ24)
CAVTPADSWGKLQV

SEQ ID NO: 631868 - protein, 16 aa, Homo sapiens
  CDR3 for beta chain variable domain of TCR clone 315934 (TRBV7-3, TRBJ2-2)
CASSLKRGTLSGELFF

SEQ ID NO: 631869 - protein, 13 aa, Homo sapiens
  CDR3 for alpha chain variable domain of TCR clone 315935 (TRAV8-3, TRAJ44)
CAVVPGTASKLTF

SEQ ID NO: 631870 - protein, 15 aa, Homo sapiens
  CDR3 for beta chain variable domain of TCR clone 315935 (TRBV28, TRBJ2-3)
CASSPDRQGANTQYF

SEQ ID NO: 631871 - protein, 13 aa, Homo sapiens
  CDR3 for alpha chain variable domain of TCR clone 315936 (TRAV29/DV5, TRAJ48)
CAASLLGNEKLTF

SEQ ID NO: 631872 - protein, 15 aa, Homo sapiens
  CDR3 for beta chain variable domain of TCR clone 315936 (TRBV20-1, TRBJ1-1)
CSAKPGQKMNTEAFF

SEQ ID NO: 631873 - protein, 14 aa, Homo sapiens
  CDR3 for alpha chain variable domain of TCR clone 315937 (TRAV12-3, TRAJ10)
SNLPLTGGGNKLTF

SEQ ID NO: 631874 - protein, 14 aa, Homo sapiens
  CDR3 for beta chain variable domain of TCR clone 315937 (TRBV6-1, TRBJ1-3)
CASVQGGGGNTIYF

SEQ ID NO: 631875 - protein, 11 aa, Homo sapiens
  CDR3 for alpha chain variable domain of TCR clone 315938 (TRAV1-2, TRAJ20)
CAVANDYKLSF

SEQ ID NO: 631876 - protein, 18 aa, Homo sapiens
  CDR3 for beta chain variable domain of TCR clone 315938 (TRBV20-1, TRBJ2-6)
CSAETTPARGSGANVLTF

SEQ ID NO: 631877 - protein, 14 aa, Homo sapiens
  CDR3 for alpha chain variable domain of TCR clone 315939 (TRAV1-2, TRAJ6)
CAVSLSGGSYIPTF

SEQ ID NO: 631878 - protein, 17 aa, Homo sapiens
  CDR3 for beta chain variable domain of TCR clone 315939 (TRBV28, TRBJ2-7)
CASSPGAGVFTSSTSGR

SEQ ID NO: 631879 - protein, 15 aa, Homo sapiens
  CDR3 for alpha chain variable domain of TCR clone 315940 (TRAV25, TRAJ52)
CAGRPGGTSYGKLKF

SEQ ID NO: 631880 - protein, 16 aa, Homo sapiens
  CDR3 for beta chain variable domain of TCR clone 315940 (TRBV12-4, TRBJ1-5)
CASSSGPRGSNQPQHF

SEQ ID NO: 631881 - protein, 15 aa, Homo sapiens
  CDR3 for alpha chain variable domain of TCR clone 315941 (TRAV8-3, TRAJ45)
CASSYSGGGADGLTF

SEQ ID NO: 631882 - protein, 19 aa, Homo sapiens
  CDR3 for beta chain variable domain of TCR clone 315941 (TRBV7-2, TRBJ2-3)
CASSFLSRNWGGGTDTQYF

SEQ ID NO: 631883 - protein, 15 aa, Homo sapiens
  CDR3 for alpha chain variable domain of TCR clone 315942 (TRAV23/DV6, TRAJ18)
CAARYRGSTLGRLYF

SEQ ID NO: 631884 - protein, 13 aa, Homo sapiens
  CDR3 for beta chain variable domain of TCR clone 315942 (TRBV7-2, TRBJ2-7)
CASSSAGGSEQYF

SEQ ID NO: 631885 - protein, 17 aa, Homo sapiens
  CDR3 for alpha chain variable domain of TCR clone 315943 (TRAV3, TRAJ6)
CAVRDGPRAVGSYIPTF

SEQ ID NO: 631886 - protein, 13 aa, Homo sapiens
  CDR3 for beta chain variable domain of TCR clone 315943 (TRBV20-1, TRBJ1-1)
CSARGGGNTEAFF

SEQ ID NO: 631887 - protein, 15 aa, Homo sapiens
  CDR3 for alpha chain variable domain of TCR clone 315944 (TRAV9-2, TRAJ49)
CALSPPDHTGNQFYC

SEQ ID NO: 631888 - protein, 14 aa, Homo sapiens
  CDR3 for beta chain variable domain of TCR clone 315944 (TRBV12-3, TRBJ1-1)
CASSLGTGGTEAFF

SEQ ID NO: 631889 - protein, 15 aa, Homo sapiens
  CDR3 for alpha chain variable domain of TCR clone 315945 (TRAV16, TRAJ26)
CITVIQRNYGQNFVF

SEQ ID NO: 631890 - protein, 15 aa, Homo sapiens
  CDR3 for beta chain variable domain of TCR clone 315945 (TRBV7-2, TRBJ2-3)
CASSLTGTGTDTQYF

SEQ ID NO: 631891 - protein, 13 aa, Homo sapiens
  CDR3 for alpha chain variable domain of TCR clone 315946 (TRAV8-3, TRAJ43)
CAVGPDNDNDMRF

SEQ ID NO: 631892 - protein, 19 aa, Homo sapiens
  CDR3 for beta chain variable domain of TCR clone 315946 (TRBV7-2, TRBJ2-3)
CASSSQGGPRLAGADTQYF

SEQ ID NO: 631893 - protein, 18 aa, Homo sapiens
  CDR3 for alpha chain variable domain of TCR clone 315947 (TRAV9-2, TRAJ52)
CALSRHNAGGTSYGKLTF

SEQ ID NO: 631894 - protein, 13 aa, Homo sapiens
  CDR3 for beta chain variable domain of TCR clone 315947 (TRBV7-9, TRBJ1-2)
CASSLKQNYAYTF

SEQ ID NO: 631895 - protein, 14 aa, Homo sapiens
  CDR3 for alpha chain variable domain of TCR clone 315948 (TRAV8-1, TRAJ15)
CAVNGQQAGTALIF

SEQ ID NO: 631896 - protein, 15 aa, Homo sapiens
  CDR3 for beta chain variable domain of TCR clone 315948 (TRBV7-9, TRBJ1-5)
CASSQGHQPNQPQHF

SEQ ID NO: 631897 - protein, 14 aa, Homo sapiens
  CDR3 for alpha chain variable domain of TCR clone 315949 (TRAV12-2, TRAJ13)
CAVKKAGGYQKVTF

SEQ ID NO: 631898 - protein, 17 aa, Homo sapiens
  CDR3 for beta chain variable domain of TCR clone 315949 (TRBV20-1, TRBJ2-2)
CSASGSGQGGLTGELFF

SEQ ID NO: 631899 - protein, 15 aa, Homo sapiens
  CDR3 for alpha chain variable domain of TCR clone 315950 (TRAV13-2, TRAJ53)
CAERGSRGSNYKLTF

SEQ ID NO: 631900 - protein, 13 aa, Homo sapiens
  CDR3 for beta chain variable domain of TCR clone 315950 (TRBV9, TRBJ2-7)
CASSVGTAYEQYF

SEQ ID NO: 631901 - protein, 12 aa, Homo sapiens
  CDR3 for alpha chain variable domain of TCR clone 315951 (TRAV1-1, TRAJ8)
CAGGTGFQKLVF

SEQ ID NO: 631902 - protein, 15 aa, Homo sapiens
  CDR3 for beta chain variable domain of TCR clone 315951 (TRBV7-9, TRBJ1-4)
CASSREGGFNEKLFF

SEQ ID NO: 631903 - protein, 11 aa, Homo sapiens
  CDR3 for alpha chain variable domain of TCR clone 315952 (TRAV2, TRAJ13)
CASGGYQKVAF

SEQ ID NO: 631904 - protein, 15 aa, Homo sapiens
  CDR3 for beta chain variable domain of TCR clone 315952 (TRBV10-2, TRBJ2-6)
CASSEQGTGANVLTF

SEQ ID NO: 631905 - protein, 14 aa, Homo sapiens
  CDR3 for alpha chain variable domain of TCR clone 315953 (TRAV12-1, TRAJ13)
CVVIDSGGYQKVTF

SEQ ID NO: 631906 - protein, 12 aa, Homo sapiens
  CDR3 for beta chain variable domain of TCR clone 315953 (TRBV29-1, TRBJ2-3)
CSVRGGADTQYF

SEQ ID NO: 631907 - protein, 14 aa, Homo sapiens
  CDR3 for alpha chain variable domain of TCR clone 315954 (TRAV2, TRAJ9)
CAVEDRSGGFKTIL

SEQ ID NO: 631908 - protein, 14 aa, Homo sapiens
  CDR3 for beta chain variable domain of TCR clone 315954 (TRBV7-2, TRBJ1-2)
CASSQTGSTYGYTF

SEQ ID NO: 631909 - protein, 16 aa, Homo sapiens
  CDR3 for alpha chain variable domain of TCR clone 315955 (TRAV12-3, TRAJ53)
CAMSPVSGGSNYKLIF

SEQ ID NO: 631910 - protein, 11 aa, Homo sapiens
  CDR3 for beta chain variable domain of TCR clone 315955 (TRBV29-1, TRBJ2-5)
CSEDRTGTQYF

SEQ ID NO: 631911 - protein, 15 aa, Homo sapiens
  CDR3 for alpha chain variable domain of TCR clone 315956 (TRAV8-3, TRAJ45)
CASSYSGGGADGLHF

SEQ ID NO: 631912 - protein, 17 aa, Homo sapiens
  CDR3 for beta chain variable domain of TCR clone 315956 (TRBV7-8, TRBJ1-2)
CASSLRPLQGHLYGYTF

SEQ ID NO: 631913 - protein, 15 aa, Homo sapiens
  CDR3 for alpha chain variable domain of TCR clone 315957 (TRAV26-2, TRAJ13)
CILRDLSGGYQKVTF

SEQ ID NO: 631914 - protein, 17 aa, Homo sapiens
  CDR3 for beta chain variable domain of TCR clone 315957 (TRBV7-8, TRBJ2-6)
CASSAGTGGAGANVLTF

SEQ ID NO: 631915 - protein, 13 aa, Homo sapiens
  CDR3 for alpha chain variable domain of TCR clone 315958 (TRAV20, TRAJ20)
CAVQAGSGYKLSF

SEQ ID NO: 631916 - protein, 15 aa, Homo sapiens
  CDR3 for beta chain variable domain of TCR clone 315958 (TRBV28, TRBJ2-1)
CASSIIAGGRSEQFF

SEQ ID NO: 631917 - protein, 15 aa, Homo sapiens
  CDR3 for alpha chain variable domain of TCR clone 315959 (TRAV14/DV4, TRAJ10)
CAMRELTGGGNKLTF

SEQ ID NO: 631918 - protein, 18 aa, Homo sapiens
  CDR3 for beta chain variable domain of TCR clone 315959 (TRBV11-2, TRBJ2-3)
CASSLGGASRGAPNTQYF

SEQ ID NO: 631919 - protein, 14 aa, Homo sapiens
  CDR3 for alpha chain variable domain of TCR clone 315960 (TRAV34, TRAJ44)
CGADGTGTARKLTF

SEQ ID NO: 631920 - protein, 20 aa, Homo sapiens
  CDR3 for beta chain variable domain of TCR clone 315960 (TRBV7-9, TRBJ1-5)
CISVSEAGQGAPYSNQPQHF

SEQ ID NO: 631921 - protein, 16 aa, Homo sapiens
  CDR3 for alpha chain variable domain of TCR clone 315961 (TRAV12-1, TRAJ48)
CVVNMVSNFGNEKLTF

SEQ ID NO: 631922 - protein, 18 aa, Homo sapiens
  CDR3 for beta chain variable domain of TCR clone 315961 (TRBV11-2, TRBJ2-6)
CASSLNPFMGTGANVLAF

SEQ ID NO: 631923 - protein, 12 aa, Homo sapiens
  CDR3 for alpha chain variable domain of TCR clone 315962 (TRAV8-3, TRAJ41)
CAVCALGYALNF

SEQ ID NO: 631924 - protein, 16 aa, Homo sapiens
  CDR3 for beta chain variable domain of TCR clone 315962 (TRBV7-6, TRBJ2-3)
CASSDSRGEGTDTQYF

SEQ ID NO: 631925 - protein, 14 aa, Homo sapiens
  CDR3 for alpha chain variable domain of TCR clone 315963 (TRAV12-2, TRAJ13)
CAVRKTGGYRKVTF

SEQ ID NO: 631926 - protein, 15 aa, Homo sapiens
  CDR3 for beta chain variable domain of TCR clone 315963 (TRBV27, TRBJ2-1)
CASSNGGGSSNEQFF

SEQ ID NO: 631927 - protein, 14 aa, Homo sapiens
  CDR3 for alpha chain variable domain of TCR clone 315964 (TRAV12-2, TRAJ45)
CAVNIGGGADGLTF

SEQ ID NO: 631928 - protein, 14 aa, Homo sapiens
  CDR3 for beta chain variable domain of TCR clone 315964 (TRBV20-1, TRBJ2-5)
CSAHRQGLWETQYF

SEQ ID NO: 631929 - protein, 11 aa, Homo sapiens
  CDR3 for alpha chain variable domain of TCR clone 315965 (TRAV1-2, TRAJ40)
CAVPGTSKYIF

SEQ ID NO: 631930 - protein, 16 aa, Homo sapiens
  CDR3 for beta chain variable domain of TCR clone 315965 (TRBV29-1, TRBJ2-7)
CSVDVVGTSGSYEQYF

SEQ ID NO: 631931 - protein, 14 aa, Homo sapiens
  CDR3 for alpha chain variable domain of TCR clone 315966 (TRAV13-1, TRAJ44)
CAAKATGTASKFTF

SEQ ID NO: 631932 - protein, 16 aa, Homo sapiens
  CDR3 for beta chain variable domain of TCR clone 315966 (TRBV15, TRBJ1-2)
CATSRGPRTGGGGYTF

SEQ ID NO: 631933 - protein, 14 aa, Homo sapiens
  CDR3 for alpha chain variable domain of TCR clone 315967 (TRAV35, TRAJ13)
CAGRSPGGYQKVTF

SEQ ID NO: 631934 - protein, 16 aa, Homo sapiens
  CDR3 for beta chain variable domain of TCR clone 315967 (TRBV11-2, TRBJ1-2)
CASSLDTGGADYGYTF

SEQ ID NO: 631935 - protein, 15 aa, Homo sapiens
  CDR3 for alpha chain variable domain of TCR clone 315968 (TRAV16, TRAJ57)
CALSGGQGGSEKLVF

SEQ ID NO: 631936 - protein, 17 aa, Homo sapiens
  CDR3 for beta chain variable domain of TCR clone 315968 (TRBV11-2, TRBJ2-1)
CASSLYPPGVEYNEQFF

SEQ ID NO: 631937 - protein, 13 aa, Homo sapiens
  CDR3 for alpha chain variable domain of TCR clone 315969 (TRAV13-1, TRAJ21)
CAASIYNFNKFYF

SEQ ID NO: 631938 - protein, 17 aa, Homo sapiens
  CDR3 for beta chain variable domain of TCR clone 315969 (TRBV20-1, TRBJ2-3)
CSASLLGRGGSADTQYF

SEQ ID NO: 631939 - protein, 12 aa, Homo sapiens
  CDR3 for alpha chain variable domain of TCR clone 315970 (TRAV36/DV7, TRAJ54)
CAVVRGAQKLVF

SEQ ID NO: 631940 - protein, 14 aa, Homo sapiens
  CDR3 for beta chain variable domain of TCR clone 315970 (TRBV7-3, TRBJ1-1)
CASSVKGGSTEAFF

SEQ ID NO: 631941 - protein, 13 aa, Homo sapiens
  CDR3 for alpha chain variable domain of TCR clone 315971 (TRAV3, TRAJ21)
CALREPDFNKFYF

SEQ ID NO: 631942 - protein, 13 aa, Homo sapiens
  CDR3 for beta chain variable domain of TCR clone 315971 (TRBV20-1, TRBJ1-1)
CSARGGGNTEAFF

SEQ ID NO: 631943 - protein, 14 aa, Homo sapiens
  CDR3 for alpha chain variable domain of TCR clone 315972 (TRAV1-2, TRAJ16)
CAVNRFSDCQKLLF

SEQ ID NO: 631944 - protein, 14 aa, Homo sapiens
  CDR3 for beta chain variable domain of TCR clone 315972 (TRBV7-3, TRBJ2-1)
CASSLAGGTNEQFF

SEQ ID NO: 631945 - protein, 12 aa, Homo sapiens
  CDR3 for alpha chain variable domain of TCR clone 315973 (TRAV13-1, TRAJ21)
CATKEGFNKFYF

SEQ ID NO: 631946 - protein, 13 aa, Homo sapiens
  CDR3 for beta chain variable domain of TCR clone 315973 (TRBV19, TRBJ1-2)
CASSVPGQDGYTF

SEQ ID NO: 631947 - protein, 11 aa, Homo sapiens
  CDR3 for alpha chain variable domain of TCR clone 315974 (TRAV21, TRAJ39)
LLVNAGNMLTF

SEQ ID NO: 631948 - protein, 15 aa, Homo sapiens
  CDR3 for beta chain variable domain of TCR clone 315974 (TRBV29-1, TRBJ2-1)
CSGRDRKSSYNKQFF

SEQ ID NO: 631949 - protein, 13 aa, Homo sapiens
  CDR3 for alpha chain variable domain of TCR clone 315975 (TRAV27, TRAJ49)
CAPRPYTGNQFYF

SEQ ID NO: 631950 - protein, 15 aa, Homo sapiens
  CDR3 for beta chain variable domain of TCR clone 315975 (TRBV4-1, TRBJ1-2)
CASSQDAGQVLWLDF

SEQ ID NO: 631951 - protein, 13 aa, Homo sapiens
  CDR3 for alpha chain variable domain of TCR clone 315976 (TRAV13-1, TRAJ37)
CAARSGNTGKLIF

SEQ ID NO: 631952 - protein, 14 aa, Homo sapiens
  CDR3 for beta chain variable domain of TCR clone 315976 (TRBV12-4, TRBJ2-3)
CASSVGQGTDTQYF

SEQ ID NO: 631953 - protein, 14 aa, Homo sapiens
  CDR3 for alpha chain variable domain of TCR clone 315977 (TRAV8-2, TRAJ6)
CVVISAGGSYIPTF

SEQ ID NO: 631954 - protein, 16 aa, Homo sapiens
  CDR3 for beta chain variable domain of TCR clone 315977 (TRBV7-6, TRBJ2-6)
WASSLPGLSGANVLTF

SEQ ID NO: 631955 - protein, 14 aa, Homo sapiens
  CDR3 for alpha chain variable domain of TCR clone 315978 (TRAV8-3, TRAJ9)
CAVGERTGGFKTIF

SEQ ID NO: 631956 - protein, 16 aa, Homo sapiens
  CDR3 for beta chain variable domain of TCR clone 315978 (TRBV12-5, TRBJ2-5)
CASGPRTSGNQETQYF

SEQ ID NO: 631957 - protein, 14 aa, Homo sapiens
  CDR3 for alpha chain variable domain of TCR clone 315979 (TRAV27, TRAJ40)
CAGSLLRGTYKYIL

SEQ ID NO: 631958 - protein, 15 aa, Homo sapiens
  CDR3 for beta chain variable domain of TCR clone 315979 (TRBV6-3, TRBJ1-4)
CASSSPGQENENLFF

SEQ ID NO: 631959 - protein, 12 aa, Homo sapiens
  CDR3 for alpha chain variable domain of TCR clone 315980 (TRAV2, TRAJ33)
CAVDDSNYQLIW

SEQ ID NO: 631960 - protein, 14 aa, Homo sapiens
  CDR3 for beta chain variable domain of TCR clone 315980 (TRBV19, TRBJ1-4)
CASSINRGGEKLFF

SEQ ID NO: 631961 - protein, 15 aa, Homo sapiens
  CDR3 for alpha chain variable domain of TCR clone 315981 (TRAV8-3, TRAJ27)
CAVGPPKTNAGKSTF

SEQ ID NO: 631962 - protein, 15 aa, Homo sapiens
  CDR3 for beta chain variable domain of TCR clone 315981 (TRBV7-2, TRBJ2-1)
CASSSGLAGGNEQFF

SEQ ID NO: 631963 - protein, 13 aa, Homo sapiens
  CDR3 for alpha chain variable domain of TCR clone 315982 (TRAV35, TRAJ36)
CAGPRIGANNLFF

SEQ ID NO: 631964 - protein, 16 aa, Homo sapiens
  CDR3 for beta chain variable domain of TCR clone 315982 (TRBV28, TRBJ2-6)
CASSNRRGSGANVLTF

SEQ ID NO: 631965 - protein, 15 aa, Homo sapiens
  CDR3 for alpha chain variable domain of TCR clone 315983 (TRAV8-4, TRAJ37)
CAVTYGSSNTGKLIF

SEQ ID NO: 631966 - protein, 13 aa, Homo sapiens
  CDR3 for beta chain variable domain of TCR clone 315983 (TRBV12-4, TRBJ2-5)
CAISLGGSRTQYF

SEQ ID NO: 631967 - protein, 15 aa, Homo sapiens
  CDR3 for alpha chain variable domain of TCR clone 315984 (TRAV21, TRAJ45)
CAVSYSGGGADGLTF

SEQ ID NO: 631968 - protein, 12 aa, Homo sapiens
  CDR3 for beta chain variable domain of TCR clone 315984 (TRBV28, TRBJ2-3)
CASSLYRDTQYF

SEQ ID NO: 631969 - protein, 16 aa, Homo sapiens
  CDR3 for alpha chain variable domain of TCR clone 315985 (TRAV8-3, TRAJ8)
CAVPRDGNTGFQKLVF

SEQ ID NO: 631970 - protein, 14 aa, Homo sapiens
  CDR3 for beta chain variable domain of TCR clone 315985 (TRBV4-1, TRBJ2-2)
CTSSQAVNTGELFF

SEQ ID NO: 631971 - protein, 13 aa, Homo sapiens
  CDR3 for alpha chain variable domain of TCR clone 315986 (TRAV2, TRAJ40)
CAVVTSGTYKYIF

SEQ ID NO: 631972 - protein, 16 aa, Homo sapiens
  CDR3 for beta chain variable domain of TCR clone 315986 (TRBV7-2, TRBJ1-4)
CASSLAPGRRDEKLFF

SEQ ID NO: 631973 - protein, 15 aa, Homo sapiens
  CDR3 for alpha chain variable domain of TCR clone 315987 (TRAV4, TRAJ39)
CLVGPNNSAGNMLTF

SEQ ID NO: 631974 - protein, 13 aa, Homo sapiens
  CDR3 for beta chain variable domain of TCR clone 315987 (TRBV11-2, TRBJ2-5)
CASSATGEETQYF

SEQ ID NO: 631975 - protein, 16 aa, Homo sapiens
  CDR3 for alpha chain variable domain of TCR clone 315988 (TRAV3, TRAJ37)
CAVRGKGSGNTSKLIF

SEQ ID NO: 631976 - protein, 14 aa, Homo sapiens
  CDR3 for beta chain variable domain of TCR clone 315988 (TRBV20-1, TRBJ2-3)
CSARGGTSTDTQYF

SEQ ID NO: 631977 - protein, 13 aa, Homo sapiens
  CDR3 for alpha chain variable domain of TCR clone 315989 (TRAV23/DV6, TRAJ22)
CAPWGGSSRQLTF

SEQ ID NO: 631978 - protein, 14 aa, Homo sapiens
  CDR3 for beta chain variable domain of TCR clone 315989 (TRBV18, TRBJ2-7)
CASSPTSGGYEQYF

SEQ ID NO: 631979 - protein, 15 aa, Homo sapiens
  CDR3 for alpha chain variable domain of TCR clone 315990 (TRAV3, TRAJ5)
CAVPPLDTGRRALTF

SEQ ID NO: 631980 - protein, 13 aa, Homo sapiens
  CDR3 for beta chain variable domain of TCR clone 315990 (TRBV12-4, TRBJ2-7)
CASSPTETYEQYF

SEQ ID NO: 631981 - protein, 16 aa, Homo sapiens
  CDR3 for alpha chain variable domain of TCR clone 315991 (TRAV1-2, TRAJ10)
CAVGGVLRGGGNKLTF

SEQ ID NO: 631982 - protein, 12 aa, Homo sapiens
  CDR3 for beta chain variable domain of TCR clone 315991 (TRBV7-8, TRBJ2-7)
CASSLGDREQYF

SEQ ID NO: 631983 - protein, 12 aa, Homo sapiens
  CDR3 for alpha chain variable domain of TCR clone 315992 (TRAV12-1, TRAJ29)
CVADSGNTPFVF

SEQ ID NO: 631984 - protein, 12 aa, Homo sapiens
  CDR3 for beta chain variable domain of TCR clone 315992 (TRBV2, TRBJ2-7)
CASKRGSYEQYF

SEQ ID NO: 631985 - protein, 15 aa, Homo sapiens
  CDR3 for alpha chain variable domain of TCR clone 315993 (TRAV8-2, TRAJ40)
CVVLGTTSGTYKYIF

SEQ ID NO: 631986 - protein, 16 aa, Homo sapiens
  CDR3 for beta chain variable domain of TCR clone 315993 (TRBV7-3, TRBJ2-1)
CASSLEGYRPYNEQFF

SEQ ID NO: 631987 - protein, 14 aa, Homo sapiens
  CDR3 for alpha chain variable domain of TCR clone 315994 (TRAV26-1, TRAJ34)
CIVRVAYNTDKLIF

SEQ ID NO: 631988 - protein, 15 aa, Homo sapiens
  CDR3 for beta chain variable domain of TCR clone 315994 (TRBV19, TRBJ1-1)
CASMGFRDVNTEAFF

SEQ ID NO: 631989 - protein, 13 aa, Homo sapiens
  CDR3 for alpha chain variable domain of TCR clone 315995 (TRAV27, TRAJ6)
CAGGTRGSYIPTF

SEQ ID NO: 631990 - protein, 14 aa, Homo sapiens
  CDR3 for beta chain variable domain of TCR clone 315995 (TRBV20-1, TRBJ2-4)
CSASGRVGENIRYF

SEQ ID NO: 631991 - protein, 22 aa, Homo sapiens
  CDR3 for alpha chain variable domain of TCR clone 315996 (TRAV16, TRAJ26)
CALSGSILSLVPEPDCPCCPIS

SEQ ID NO: 631992 - protein, 12 aa, Homo sapiens
  CDR3 for beta chain variable domain of TCR clone 315996 (TRBV11-2, TRBJ2-1)
CASSPGNNEQFF

SEQ ID NO: 631993 - protein, 14 aa, Homo sapiens
  CDR3 for alpha chain variable domain of TCR clone 315997 (TRAV23/DV6, TRAJ11)
CAASLESGYSTLTF

SEQ ID NO: 631994 - protein, 14 aa, Homo sapiens
  CDR3 for beta chain variable domain of TCR clone 315997 (TRBV20-1, TRBJ2-1)
CSAHPGLPYNEQFF

SEQ ID NO: 631995 - protein, 14 aa, Homo sapiens
  CDR3 for alpha chain variable domain of TCR clone 315998 (TRAV1-2, TRAJ8)
CAVREDTGFQKLVF

SEQ ID NO: 631996 - protein, 15 aa, Homo sapiens
  CDR3 for beta chain variable domain of TCR clone 315998 (TRBV5-1, TRBJ2-1)
CASSRTSGGVNEQFF

SEQ ID NO: 631997 - protein, 15 aa, Homo sapiens
  CDR3 for alpha chain variable domain of TCR clone 315999 (TRAV21, TRAJ24)
WAARFSTDSWGKLQF

SEQ ID NO: 631998 - protein, 13 aa, Homo sapiens
  CDR3 for beta chain variable domain of TCR clone 315999 (TRBV11-2, TRBJ2-5)
CASSSTGEETQYF

SEQ ID NO: 631999 - protein, 16 aa, Homo sapiens
  CDR3 for alpha chain variable domain of TCR clone 316000 (TRAV30, TRAJ24)
CGTEIVDADSWGKFQF

SEQ ID NO: 632000 - protein, 18 aa, Homo sapiens
  CDR3 for beta chain variable domain of TCR clone 316000 (TRBV15, TRBJ2-3)
CVPPAGLGLAGPTDTQYF

SEQ ID NO: 632001 - protein, 15 aa, Homo sapiens
  CDR3 for alpha chain variable domain of TCR clone 316001 (TRAV34, TRAJ38)
CGADFTPGNNRKLIG

SEQ ID NO: 632002 - protein, 15 aa, Homo sapiens
  CDR3 for beta chain variable domain of TCR clone 316001 (TRBV24-1, TRBJ1-1)
CATSDRRGVNTEAFF

SEQ ID NO: 632003 - protein, 11 aa, Homo sapiens
  CDR3 for alpha chain variable domain of TCR clone 316002 (TRAV2, TRAJ33)
CAVDSNYQLIW

SEQ ID NO: 632004 - protein, 17 aa, Homo sapiens
  CDR3 for beta chain variable domain of TCR clone 316002 (TRBV20-1, TRBJ2-3)
CSARDGWNAKDRDTQYC

SEQ ID NO: 632005 - protein, 13 aa, Homo sapiens
  CDR3 for alpha chain variable domain of TCR clone 316003 (TRAV2, TRAJ40)
CAVVTSGTYKYIF

SEQ ID NO: 632006 - protein, 14 aa, Homo sapiens
  CDR3 for beta chain variable domain of TCR clone 316003 (TRBV19, TRBJ2-1)
SASPTFVLSGDQFF

SEQ ID NO: 632007 - protein, 14 aa, Homo sapiens
  CDR3 for alpha chain variable domain of TCR clone 316004 (TRAV9-2, TRAJ39)
CALYIYNAGNMLTF

SEQ ID NO: 632008 - protein, 15 aa, Homo sapiens
  CDR3 for beta chain variable domain of TCR clone 316004 (TRBV5-1, TRBJ2-1)
CDSSPPRAPYNEQFF

SEQ ID NO: 632009 - protein, 13 aa, Homo sapiens
  CDR3 for alpha chain variable domain of TCR clone 316005 (TRAV38-2/DV8, TRAJ35)
CAQRRGFGNVLHC

SEQ ID NO: 632010 - protein, 17 aa, Homo sapiens
  CDR3 for beta chain variable domain of TCR clone 316005 (TRBV11-3, TRBJ2-5)
CASSLPGVRGGKETQYF

SEQ ID NO: 632011 - protein, 14 aa, Homo sapiens
  CDR3 for alpha chain variable domain of TCR clone 316006 (TRAV14/DV4, TRAJ54)
CAMREAPGAQKLVF

SEQ ID NO: 632012 - protein, 14 aa, Homo sapiens
  CDR3 for beta chain variable domain of TCR clone 316006 (TRBV12-5, TRBJ2-5)
CASGSRTHQETQYF

SEQ ID NO: 632013 - protein, 13 aa, Homo sapiens
  CDR3 for alpha chain variable domain of TCR clone 316007 (TRAV12-2, TRAJ7)
CAVNLYGNNRLAF

SEQ ID NO: 632014 - protein, 14 aa, Homo sapiens
  CDR3 for beta chain variable domain of TCR clone 316007 (TRBV25-1, TRBJ1-2)
CASSAATGPYGYTF

SEQ ID NO: 632015 - protein, 17 aa, Homo sapiens
  CDR3 for alpha chain variable domain of TCR clone 316008 (TRAV23/DV6, TRAJ57)
CAASSTLSQGGSEKLVF

SEQ ID NO: 632016 - protein, 12 aa, Homo sapiens
  CDR3 for beta chain variable domain of TCR clone 316008 (TRBV7-8, TRBJ2-7)
CASSLGDREQYF

SEQ ID NO: 632017 - protein, 12 aa, Homo sapiens
  CDR3 for alpha chain variable domain of TCR clone 316009 (TRAV16, TRAJ27)
CALNHQCRQINL

SEQ ID NO: 632018 - protein, 16 aa, Homo sapiens
  CDR3 for beta chain variable domain of TCR clone 316009 (TRBV4-3, TRBJ2-2)
CASSHLQGSGTGELFF

SEQ ID NO: 632019 - protein, 15 aa, Homo sapiens
  CDR3 for alpha chain variable domain of TCR clone 316010 (TRAV17, TRAJ57)
CATGPSQGGSEELVF

SEQ ID NO: 632020 - protein, 13 aa, Homo sapiens
  CDR3 for beta chain variable domain of TCR clone 316010 (TRBV27, TRBJ2-1)
CASRTLGVGEQFF

SEQ ID NO: 632021 - protein, 15 aa, Homo sapiens
  CDR3 for alpha chain variable domain of TCR clone 316011 (TRAV21, TRAJ10)
CAVPLLTGGGNKLTF

SEQ ID NO: 632022 - protein, 14 aa, Homo sapiens
  CDR3 for beta chain variable domain of TCR clone 316011 (TRBV12-4, TRBJ1-1)
CASSLGAGGTEAFF

SEQ ID NO: 632023 - protein, 15 aa, Homo sapiens
  CDR3 for alpha chain variable domain of TCR clone 316012 (TRAV23/DV6, TRAJ28)
CAASRTGAGSYQLTF

SEQ ID NO: 632024 - protein, 16 aa, Homo sapiens
  CDR3 for beta chain variable domain of TCR clone 316012 (TRBV7-3, TRBJ2-2)
CASSLKRGTLSGELFF

SEQ ID NO: 632025 - protein, 13 aa, Homo sapiens
  CDR3 for alpha chain variable domain of TCR clone 316013 (TRAV36/DV7, TRAJ49)
CAGDSNIGNQFYF

SEQ ID NO: 632026 - protein, 12 aa, Homo sapiens
  CDR3 for beta chain variable domain of TCR clone 316013 (TRBV11-2, TRBJ2-2)
CASSLGGGELFF

SEQ ID NO: 632027 - protein, 13 aa, Homo sapiens
  CDR3 for alpha chain variable domain of TCR clone 316014 (TRAV35, TRAJ42)
CAGFPGSQGNLIF

SEQ ID NO: 632028 - protein, 12 aa, Homo sapiens
  CDR3 for beta chain variable domain of TCR clone 316014 (TRBV7-2, TRBJ1-6)
CASCLSSSPLHF

SEQ ID NO: 632029 - protein, 13 aa, Homo sapiens
  CDR3 for alpha chain variable domain of TCR clone 316015 (TRAV2, TRAJ15)
CAVAAQAGTALIF

SEQ ID NO: 632030 - protein, 14 aa, Homo sapiens
  CDR3 for beta chain variable domain of TCR clone 316015 (TRBV7-2, TRBJ2-7)
CASRSQGAAYEQYF

SEQ ID NO: 632031 - protein, 12 aa, Homo sapiens
  CDR3 for alpha chain variable domain of TCR clone 316016 (TRAV12-3, TRAJ17)
CAMTLTGNKLSF

SEQ ID NO: 632032 - protein, 15 aa, Homo sapiens
  CDR3 for beta chain variable domain of TCR clone 316016 (TRBV11-2, TRBJ2-2)
CASSSDRVNAGELFF

SEQ ID NO: 632033 - protein, 12 aa, Homo sapiens
  CDR3 for alpha chain variable domain of TCR clone 316017 (TRAV27, TRAJ58)
CARARDTSRLTF

SEQ ID NO: 632034 - protein, 14 aa, Homo sapiens
  CDR3 for beta chain variable domain of TCR clone 316017 (TRBV7-3, TRBJ2-1)
CASSLGTSANEQFF

SEQ ID NO: 632035 - protein, 14 aa, Homo sapiens
  CDR3 for alpha chain variable domain of TCR clone 316018 (TRAV13-1, TRAJ40)
CAAHHTSGTYKYIF

SEQ ID NO: 632036 - protein, 15 aa, Homo sapiens
  CDR3 for beta chain variable domain of TCR clone 316018 (TRBV11-2, TRBJ2-2)
CASSPSGGGTGELFF

SEQ ID NO: 632037 - protein, 16 aa, Homo sapiens
  CDR3 for alpha chain variable domain of TCR clone 316019 (TRAV16, TRAJ37)
CSKWPDGASNTGELIF

SEQ ID NO: 632038 - protein, 13 aa, Homo sapiens
  CDR3 for beta chain variable domain of TCR clone 316019 (TRBV7-2, TRBJ2-2)
CASSLAVTGELFF

SEQ ID NO: 632039 - protein, 11 aa, Homo sapiens
  CDR3 for alpha chain variable domain of TCR clone 316020 (TRAV2, TRAJ33)
CAVDSNYLLIW

SEQ ID NO: 632040 - protein, 17 aa, Homo sapiens
  CDR3 for beta chain variable domain of TCR clone 316020 (TRBV20-1, TRBJ2-3)
CSARDGWNAKERDTQYF

SEQ ID NO: 632041 - protein, 18 aa, Homo sapiens
  CDR3 for alpha chain variable domain of TCR clone 316021 (TRAV21, TRAJ52)
CAGRPSPAGGTSYGKLTF

SEQ ID NO: 632042 - protein, 14 aa, Homo sapiens
  CDR3 for beta chain variable domain of TCR clone 316021 (TRBV25-1, TRBJ1-1)
CASTHLGGNTEAFF

SEQ ID NO: 632043 - protein, 13 aa, Homo sapiens
  CDR3 for alpha chain variable domain of TCR clone 316022 (TRAV17, TRAJ4)
CATKSGGYNKLIF

SEQ ID NO: 632044 - protein, 14 aa, Homo sapiens
  CDR3 for beta chain variable domain of TCR clone 316022 (TRBV20-1, TRBJ1-5)
CSARDDRGKQPQHF

SEQ ID NO: 632045 - protein, 17 aa, Homo sapiens
  CDR3 for alpha chain variable domain of TCR clone 316023 (TRAV3, TRAJ6)
CAVRDGPRAEGSYIPTF

SEQ ID NO: 632046 - protein, 15 aa, Homo sapiens
  CDR3 for beta chain variable domain of TCR clone 316023 (TRBV10-3, TRBJ2-3)
CAISLTSGGTETQYF

SEQ ID NO: 632047 - protein, 11 aa, Homo sapiens
  CDR3 for alpha chain variable domain of TCR clone 316024 (TRAV25, TRAJ34)
CASYNTDKLIF

SEQ ID NO: 632048 - protein, 17 aa, Homo sapiens
  CDR3 for beta chain variable domain of TCR clone 316024 (TRBV20-1, TRBJ2-2)
CSASGSGQGGLTGELFF

SEQ ID NO: 632049 - protein, 11 aa, Homo sapiens
  CDR3 for alpha chain variable domain of TCR clone 316025 (TRAV21, TRAJ34)
CAHYNTDKLIF

SEQ ID NO: 632050 - protein, 14 aa, Homo sapiens
  CDR3 for beta chain variable domain of TCR clone 316025 (TRBV7-9, TRBJ2-5)
CASSLVGGEETQYF

SEQ ID NO: 632051 - protein, 16 aa, Homo sapiens
  CDR3 for alpha chain variable domain of TCR clone 316026 (TRAV39, TRAJ32)
CAVDMGYGGATNKLIF

SEQ ID NO: 632052 - protein, 14 aa, Homo sapiens
  CDR3 for beta chain variable domain of TCR clone 316026 (TRBV9, TRBJ2-4)
CASSPSGTSGLRYF

SEQ ID NO: 632053 - protein, 17 aa, Homo sapiens
  CDR3 for alpha chain variable domain of TCR clone 316027 (TRAV2, TRAJ22)
ILQVREADAAEQRQLTY

SEQ ID NO: 632054 - protein, 16 aa, Homo sapiens
  CDR3 for beta chain variable domain of TCR clone 316027 (TRBV2, TRBJ2-5)
CASSETQGVGEETQYF

SEQ ID NO: 632055 - protein, 14 aa, Homo sapiens
  CDR3 for alpha chain variable domain of TCR clone 316028 (TRAV36/DV7, TRAJ44)
CCGANTGTASKLTF

SEQ ID NO: 632056 - protein, 14 aa, Homo sapiens
  CDR3 for beta chain variable domain of TCR clone 316028 (TRBV7-6, TRBJ2-7)
CASSFRQGADEQYF

SEQ ID NO: 632057 - protein, 12 aa, Homo sapiens
  CDR3 for alpha chain variable domain of TCR clone 316029 (TRAV35, TRAJ39)
LATNNAGNMLTF

SEQ ID NO: 632058 - protein, 16 aa, Homo sapiens
  CDR3 for beta chain variable domain of TCR clone 316029 (TRBV2, TRBJ2-3)
CASSTSVEGVTDTQYF

SEQ ID NO: 632059 - protein, 15 aa, Homo sapiens
  CDR3 for alpha chain variable domain of TCR clone 316030 (TRAV3, TRAJ5)
CAVRDPDTGRRALTF

SEQ ID NO: 632060 - protein, 13 aa, Homo sapiens
  CDR3 for beta chain variable domain of TCR clone 316030 (TRBV9, TRBJ2-7)
CASSASDSYEQYF

SEQ ID NO: 632061 - protein, 14 aa, Homo sapiens
  CDR3 for alpha chain variable domain of TCR clone 316031 (TRAV8-1, TRAJ32)
CAVNARGATNKLIF

SEQ ID NO: 632062 - protein, 14 aa, Homo sapiens
  CDR3 for beta chain variable domain of TCR clone 316031 (TRBV9, TRBJ2-7)
CPSSVGVGSYEQYF

SEQ ID NO: 632063 - protein, 11 aa, Homo sapiens
  CDR3 for alpha chain variable domain of TCR clone 316032 (TRAV2, TRAJ33)
CAVESNYQLVW

SEQ ID NO: 632064 - protein, 15 aa, Homo sapiens
  CDR3 for beta chain variable domain of TCR clone 316032 (TRBV19, TRBJ1-1)
CASTSGQIQNTEAFY

SEQ ID NO: 632065 - protein, 14 aa, Homo sapiens
  CDR3 for alpha chain variable domain of TCR clone 316033 (TRAV26-1, TRAJ40)
CIVRLLSGTYKYIF

SEQ ID NO: 632066 - protein, 14 aa, Homo sapiens
  CDR3 for beta chain variable domain of TCR clone 316033 (TRBV11-1, TRBJ2-4)
CASSPVIGKNIQYF

SEQ ID NO: 632067 - protein, 14 aa, Homo sapiens
  CDR3 for alpha chain variable domain of TCR clone 316034 (TRAV3, TRAJ5)
CAVRSDAGRRALTF

SEQ ID NO: 632068 - protein, 14 aa, Homo sapiens
  CDR3 for beta chain variable domain of TCR clone 316034 (TRBV7-2, TRBJ2-3)
CASSFVMPTDTQYF

SEQ ID NO: 632069 - protein, 13 aa, Homo sapiens
  CDR3 for alpha chain variable domain of TCR clone 316035 (TRAV21, TRAJ27)
CAARPGNAGKSTF

SEQ ID NO: 632070 - protein, 17 aa, Homo sapiens
  CDR3 for beta chain variable domain of TCR clone 316035 (TRBV7-6, TRBJ2-1)
HASLCQQLGGGAGEQFF

SEQ ID NO: 632071 - protein, 13 aa, Homo sapiens
  CDR3 for alpha chain variable domain of TCR clone 316036 (TRAV21, TRAJ27)
CAARPGNPGKSTF

SEQ ID NO: 632072 - protein, 15 aa, Homo sapiens
  CDR3 for beta chain variable domain of TCR clone 316036 (TRBV2, TRBJ2-3)
CASSDAGGPPDTQYF

SEQ ID NO: 632073 - protein, 15 aa, Homo sapiens
  CDR3 for alpha chain variable domain of TCR clone 316037 (TRAV8-3, TRAJ27)
CAVGPSMTYAGKSTF

SEQ ID NO: 632074 - protein, 15 aa, Homo sapiens
  CDR3 for beta chain variable domain of TCR clone 316037 (TRBV7-2, TRBJ2-1)
CASSSGLAGGNEQFF

SEQ ID NO: 632075 - protein, 17 aa, Homo sapiens
  CDR3 for alpha chain variable domain of TCR clone 316038 (TRAV2, TRAJ36)
SAVEDRGNWGKQPLLWD

SEQ ID NO: 632076 - protein, 14 aa, Homo sapiens
  CDR3 for beta chain variable domain of TCR clone 316038 (TRBV7-9, TRBJ2-5)
CASSLDTAQETQYF

SEQ ID NO: 632077 - protein, 17 aa, Homo sapiens
  CDR3 for alpha chain variable domain of TCR clone 316039 (TRAV1-1, TRAJ32)
CAVKVDELWWCYKQAHL

SEQ ID NO: 632078 - protein, 12 aa, Homo sapiens
  CDR3 for beta chain variable domain of TCR clone 316039 (TRBV19, TRBJ2-1)
CASSRQGAEQFF

SEQ ID NO: 632079 - protein, 16 aa, Homo sapiens
  CDR3 for alpha chain variable domain of TCR clone 316040 (TRAV3, TRAJ37)
CAVRPHGSGHTGKLIF

SEQ ID NO: 632080 - protein, 15 aa, Homo sapiens
  CDR3 for beta chain variable domain of TCR clone 316040 (TRBV20-1, TRBJ2-7)
CSARDRVSGMDEQYF

SEQ ID NO: 632081 - protein, 15 aa, Homo sapiens
  CDR3 for alpha chain variable domain of TCR clone 316041 (TRAV23/DV6, TRAJ33)
CAASNSGGGNYQLLW

SEQ ID NO: 632082 - protein, 14 aa, Homo sapiens
  CDR3 for beta chain variable domain of TCR clone 316041 (TRBV7-2, TRBJ2-7)
CASSLYPGRCEQYF

SEQ ID NO: 632083 - protein, 15 aa, Homo sapiens
  CDR3 for alpha chain variable domain of TCR clone 316042 (TRAV27, TRAJ38)
CAARRNAGNNRKLIW

SEQ ID NO: 632084 - protein, 12 aa, Homo sapiens
  CDR3 for beta chain variable domain of TCR clone 316042 (TRBV12-5, TRBJ2-3)
CCGDRQSDTQYF

SEQ ID NO: 632085 - protein, 13 aa, Homo sapiens
  CDR3 for alpha chain variable domain of TCR clone 316043 (TRAV2, TRAJ40)
CAVVTSGTYKYIF

SEQ ID NO: 632086 - protein, 16 aa, Homo sapiens
  CDR3 for beta chain variable domain of TCR clone 316043 (TRBV2, TRBJ2-1)
CASSVGGSLSYNEHFF

SEQ ID NO: 632087 - protein, 18 aa, Homo sapiens
  CDR3 for alpha chain variable domain of TCR clone 316044 (TRAV26-1, TRAJ52)
CIVRVEGAGGTSYGKLTF

SEQ ID NO: 632088 - protein, 14 aa, Homo sapiens
  CDR3 for beta chain variable domain of TCR clone 316044 (TRBV4-1, TRBJ2-2)
CASSQAVNTGELFF

SEQ ID NO: 632089 - protein, 14 aa, Homo sapiens
  CDR3 for alpha chain variable domain of TCR clone 316045 (TRAV12-3, TRAJ10)
SHLPLTGVGNKLTF

SEQ ID NO: 632090 - protein, 16 aa, Homo sapiens
  CDR3 for beta chain variable domain of TCR clone 316045 (TRBV20-1, TRBJ2-6)
CSASSQGYDGANVLTF

SEQ ID NO: 632091 - protein, 14 aa, Homo sapiens
  CDR3 for alpha chain variable domain of TCR clone 316046 (TRAV8-3, TRAJ47)
CAVGAQGYGNTLVF

SEQ ID NO: 632092 - protein, 14 aa, Homo sapiens
  CDR3 for beta chain variable domain of TCR clone 316046 (TRBV6-5, TRBJ2-7)
CASSSGVPPYEQYF

SEQ ID NO: 632093 - protein, 15 aa, Homo sapiens
  CDR3 for alpha chain variable domain of TCR clone 316047 (TRAV21, TRAJ57)
CAVIITQGGSEQLVF

SEQ ID NO: 632094 - protein, 14 aa, Homo sapiens
  CDR3 for beta chain variable domain of TCR clone 316047 (TRBV5-1, TRBJ2-2)
CASSLIWIPGELFF

SEQ ID NO: 632095 - protein, 11 aa, Homo sapiens
  CDR3 for alpha chain variable domain of TCR clone 316048 (TRAV13-2, TRAJ54)
RAVQGAQKLVF

SEQ ID NO: 632096 - protein, 15 aa, Homo sapiens
  CDR3 for beta chain variable domain of TCR clone 316048 (TRBV20-1, TRBJ2-7)
CIAESGTSGAYEQYF

SEQ ID NO: 632097 - protein, 16 aa, Homo sapiens
  CDR3 for alpha chain variable domain of TCR clone 316049 (TRAV4, TRAJ18)
CCVLLIGGSTLGRLYF

SEQ ID NO: 632098 - protein, 16 aa, Homo sapiens
  CDR3 for beta chain variable domain of TCR clone 316049 (TRBV5-7, TRBJ2-7)
CASSPTSGRELDEQYF

SEQ ID NO: 632099 - protein, 13 aa, Homo sapiens
  CDR3 for alpha chain variable domain of TCR clone 316050 (TRAV35, TRAJ42)
YAGFPGSQGNLIF

SEQ ID NO: 632100 - protein, 13 aa, Homo sapiens
  CDR3 for beta chain variable domain of TCR clone 316050 (TRBV29-1, TRBJ2-1)
CSVEGGRVNEQFF

SEQ ID NO: 632101 - protein, 14 aa, Homo sapiens
  CDR3 for alpha chain variable domain of TCR clone 316051 (TRAV1-2, TRAJ16)
CAVNRFSDGQKLLF

SEQ ID NO: 632102 - protein, 15 aa, Homo sapiens
  CDR3 for beta chain variable domain of TCR clone 316051 (TRBV7-3, TRBJ2-2)
CASSEMGQGTGELFF

SEQ ID NO: 632103 - protein, 12 aa, Homo sapiens
  CDR3 for alpha chain variable domain of TCR clone 316052 (TRAV13-1, TRAJ15)
CAASQAGTALIF

SEQ ID NO: 632104 - protein, 14 aa, Homo sapiens
  CDR3 for beta chain variable domain of TCR clone 316052 (TRBV19, TRBJ2-2)
CASSTLHRSGELFF

SEQ ID NO: 632105 - protein, 14 aa, Homo sapiens
  CDR3 for alpha chain variable domain of TCR clone 316053 (TRAV13-1, TRAJ9)
CAASALTGGFKTIF

SEQ ID NO: 632106 - protein, 13 aa, Homo sapiens
  CDR3 for beta chain variable domain of TCR clone 316053 (TRBV20-1, TRBJ1-1)
CSAGTVGKTEAFF

SEQ ID NO: 632107 - protein, 14 aa, Homo sapiens
  CDR3 for alpha chain variable domain of TCR clone 316054 (TRAV12-1, TRAJ24)
CVVRSTDSWGKFQF

SEQ ID NO: 632108 - protein, 15 aa, Homo sapiens
  CDR3 for beta chain variable domain of TCR clone 316054 (TRBV5-1, TRBJ2-1)
CASSPPRAPYNEQFF

SEQ ID NO: 632109 - protein, 15 aa, Homo sapiens
  CDR3 for alpha chain variable domain of TCR clone 316055 (TRAV38-2/DV8, TRAJ37)
CAYRVGSGNTGKLIF

SEQ ID NO: 632110 - protein, 15 aa, Homo sapiens
  CDR3 for beta chain variable domain of TCR clone 316055 (TRBV7-9, TRBJ1-6)
CASSSPGRGNSPLHF

SEQ ID NO: 632111 - protein, 12 aa, Homo sapiens
  CDR3 for alpha chain variable domain of TCR clone 316056 (TRAV12-3, TRAJ31)
CAMSVPNARLMF

SEQ ID NO: 632112 - protein, 12 aa, Homo sapiens
  CDR3 for beta chain variable domain of TCR clone 316056 (TRBV11-2, TRBJ2-1)
CASSIQREGQFF

SEQ ID NO: 632113 - protein, 18 aa, Homo sapiens
  CDR3 for alpha chain variable domain of TCR clone 316057 (TRAV26-2, TRAJ54)
CILRDVEGGIQGAQKLAF

SEQ ID NO: 632114 - protein, 12 aa, Homo sapiens
  CDR3 for beta chain variable domain of TCR clone 316057 (TRBV11-2, TRBJ2-2)
CASSLPTGELFF

SEQ ID NO: 632115 - protein, 17 aa, Homo sapiens
  CDR3 for alpha chain variable domain of TCR clone 316058 (TRAV23/DV6, TRAJ57)
CAASSTLSQGGSEKLVF

SEQ ID NO: 632116 - protein, 17 aa, Homo sapiens
  CDR3 for beta chain variable domain of TCR clone 316058 (TRBV4-1, TRBJ2-3)
CASSQGYVSGGTDTQYF

SEQ ID NO: 632117 - protein, 16 aa, Homo sapiens
  CDR3 for alpha chain variable domain of TCR clone 316059 (TRAV26-1, TRAJ11)
CIVRVVLGFRIQHPNL

SEQ ID NO: 632118 - protein, 15 aa, Homo sapiens
  CDR3 for beta chain variable domain of TCR clone 316059 (TRBV4-1, TRBJ1-4)
CASSDTGGTNEKLFF

SEQ ID NO: 632119 - protein, 14 aa, Homo sapiens
  CDR3 for alpha chain variable domain of TCR clone 316060 (TRAV2, TRAJ9)
CAVEDRSGGFKTNF

SEQ ID NO: 632120 - protein, 12 aa, Homo sapiens
  CDR3 for beta chain variable domain of TCR clone 316060 (TRBV7-9, TRBJ2-7)
CASSLEGYEQYF

SEQ ID NO: 632121 - protein, 16 aa, Homo sapiens
  CDR3 for alpha chain variable domain of TCR clone 316061 (TRAV1-2, TRAJ10)
CAVRGVLTVGGNKLTF

SEQ ID NO: 632122 - protein, 17 aa, Homo sapiens
  CDR3 for beta chain variable domain of TCR clone 316061 (TRBV15, TRBJ1-5)
CATSRAPPGTRNQPQHF

SEQ ID NO: 632123 - protein, 10 aa, Homo sapiens
  CDR3 for alpha chain variable domain of TCR clone 316062 (TRAV30, TRAJ24)
DADSWGKFQF

SEQ ID NO: 632124 - protein, 15 aa, Homo sapiens
  CDR3 for beta chain variable domain of TCR clone 316062 (TRBV20-1, TRBJ2-7)
CSARDRVSGMDEQYF

SEQ ID NO: 632125 - protein, 17 aa, Homo sapiens
  CDR3 for alpha chain variable domain of TCR clone 316063 (TRAV3, TRAJ6)
CAVRDGPRAGGSYIPTF

SEQ ID NO: 632126 - protein, 14 aa, Homo sapiens
  CDR3 for beta chain variable domain of TCR clone 316063 (TRBV4-2, TRBJ1-4)
CASSQGATNEKLFF

SEQ ID NO: 632127 - protein, 13 aa, Homo sapiens
  CDR3 for alpha chain variable domain of TCR clone 316064 (TRAV30, TRAJ34)
CGTVGYNTDKRIF

SEQ ID NO: 632128 - protein, 16 aa, Homo sapiens
  CDR3 for beta chain variable domain of TCR clone 316064 (TRBV7-9, TRBJ1-2)
CASSLGFSSGEDGYTF

SEQ ID NO: 632129 - protein, 14 aa, Homo sapiens
  CDR3 for alpha chain variable domain of TCR clone 316065 (TRAV1-2, TRAJ8)
CAVREDTGFQKLVF

SEQ ID NO: 632130 - protein, 10 aa, Homo sapiens
  CDR3 for beta chain variable domain of TCR clone 316065 (TRBV11-3, TRBJ2-7)
CSSRTYEQYF

SEQ ID NO: 632131 - protein, 16 aa, Homo sapiens
  CDR3 for alpha chain variable domain of TCR clone 316066 (TRAV30, TRAJ24)
CGTEIVDADSWGKFHF

SEQ ID NO: 632132 - protein, 13 aa, Homo sapiens
  CDR3 for beta chain variable domain of TCR clone 316066 (TRBV10-3, TRBJ2-7)
CASKLAVNYEQYF

SEQ ID NO: 632133 - protein, 16 aa, Homo sapiens
  CDR3 for alpha chain variable domain of TCR clone 316067 (TRAV30, TRAJ24)
CGTEIVDADSWGKFQV

SEQ ID NO: 632134 - protein, 14 aa, Homo sapiens
  CDR3 for beta chain variable domain of TCR clone 316067 (TRBV12-5, TRBJ2-5)
CASGPRTHQETQYF

SEQ ID NO: 632135 - protein, 14 aa, Homo sapiens
  CDR3 for alpha chain variable domain of TCR clone 316068 (TRAV1-2, TRAJ24)
CAVLTTDSWGKFQF

SEQ ID NO: 632136 - protein, 15 aa, Homo sapiens
  CDR3 for beta chain variable domain of TCR clone 316068 (TRBV19, TRBJ1-2)
CASSVGQVLNYGYTF

SEQ ID NO: 632137 - protein, 14 aa, Homo sapiens
  CDR3 for alpha chain variable domain of TCR clone 316069 (TRAV12-1, TRAJ9)
CVVNRRTGGFKTIF

SEQ ID NO: 632138 - protein, 14 aa, Homo sapiens
  CDR3 for beta chain variable domain of TCR clone 316069 (TRBV28, TRBJ2-7)
CASKPGPDLYEQYF

SEQ ID NO: 632139 - protein, 15 aa, Homo sapiens
  CDR3 for alpha chain variable domain of TCR clone 316070 (TRAV38-1, TRAJ28)
CAFRYSGAGSYQLTF

SEQ ID NO: 632140 - protein, 15 aa, Homo sapiens
  CDR3 for beta chain variable domain of TCR clone 316070 (TRBV5-1, TRBJ2-7)
CASSLMTSGSNEQYF

SEQ ID NO: 632141 - protein, 11 aa, Homo sapiens
  CDR3 for alpha chain variable domain of TCR clone 316071 (TRAV12-2, TRAJ36)
CAVDGANNLFL

SEQ ID NO: 632142 - protein, 13 aa, Homo sapiens
  CDR3 for beta chain variable domain of TCR clone 316071 (TRBV28, TRBJ2-5)
CAGVSRGEETQYF

SEQ ID NO: 632143 - protein, 12 aa, Homo sapiens
  CDR3 for alpha chain variable domain of TCR clone 316072 (TRAV25, TRAJ5)
CAGGGGRRALTF

SEQ ID NO: 632144 - protein, 18 aa, Homo sapiens
  CDR3 for beta chain variable domain of TCR clone 316072 (TRBV19, TRBJ1-1)
CASSIDGGDYTGNTEAFF

SEQ ID NO: 632145 - protein, 11 aa, Homo sapiens
  CDR3 for alpha chain variable domain of TCR clone 316073 (TRAV13-2, TRAJ36)
CAETGANNLFF

SEQ ID NO: 632146 - protein, 11 aa, Homo sapiens
  CDR3 for beta chain variable domain of TCR clone 316073 (TRBV18, TRBJ1-2)
CASSPLNGYTF

SEQ ID NO: 632147 - protein, 14 aa, Homo sapiens
  CDR3 for alpha chain variable domain of TCR clone 316074 (TRAV2, TRAJ37)
CAVAFTSDTGKLIF

SEQ ID NO: 632148 - protein, 15 aa, Homo sapiens
  CDR3 for beta chain variable domain of TCR clone 316074 (TRBV20-1, TRBJ1-1)
CSASRGVTGNTEAFF

SEQ ID NO: 632149 - protein, 14 aa, Homo sapiens
  CDR3 for alpha chain variable domain of TCR clone 316075 (TRAV8-3, TRAJ4)
CAAGAAGGYNKLIF

SEQ ID NO: 632150 - protein, 14 aa, Homo sapiens
  CDR3 for beta chain variable domain of TCR clone 316075 (TRBV7-9, TRBJ2-2)
CASSLVQDTGELFF

SEQ ID NO: 632151 - protein, 14 aa, Homo sapiens
  CDR3 for alpha chain variable domain of TCR clone 316076 (TRAV1-2, TRAJ8)
CAAREDIGFKKLVF

SEQ ID NO: 632152 - protein, 15 aa, Homo sapiens
  CDR3 for beta chain variable domain of TCR clone 316076 (TRBV6-3, TRBJ2-7)
CASSSPGTVFYEQYF

SEQ ID NO: 632153 - protein, 15 aa, Homo sapiens
  CDR3 for alpha chain variable domain of TCR clone 316077 (TRAV23/DV6, TRAJ21)
CSKQRGRDNLNKFYF

SEQ ID NO: 632154 - protein, 11 aa, Homo sapiens
  CDR3 for beta chain variable domain of TCR clone 316077 (TRBV7-8, TRBJ2-7)
CASSLSLEQYF

SEQ ID NO: 632155 - protein, 15 aa, Homo sapiens
  CDR3 for alpha chain variable domain of TCR clone 316078 (TRAV12-1, TRAJ42)
CVVKRDGGSQGNLIF

SEQ ID NO: 632156 - protein, 13 aa, Homo sapiens
  CDR3 for beta chain variable domain of TCR clone 316078 (TRBV27, TRBJ2-7)
CASSLTTGYEQYF

SEQ ID NO: 632157 - protein, 14 aa, Homo sapiens
  CDR3 for alpha chain variable domain of TCR clone 316079 (TRAV8-3, TRAJ6)
CAVGASGGSYIPTF

SEQ ID NO: 632158 - protein, 14 aa, Homo sapiens
  CDR3 for beta chain variable domain of TCR clone 316079 (TRBV2, TRBJ2-7)
CASSLTSGGYEQYF

SEQ ID NO: 632159 - protein, 15 aa, Homo sapiens
  CDR3 for alpha chain variable domain of TCR clone 316080 (TRAV26-1, TRAJ42)
FIVRVKGGSQGNLIF

SEQ ID NO: 632160 - protein, 14 aa, Homo sapiens
  CDR3 for beta chain variable domain of TCR clone 316080 (TRBV19, TRBJ2-2)
CATTGHANTGELFC

SEQ ID NO: 632161 - protein, 10 aa, Homo sapiens
  CDR3 for alpha chain variable domain of TCR clone 316081 (TRAV26-1, TRAJ37)
CIVRVITVSS

SEQ ID NO: 632162 - protein, 15 aa, Homo sapiens
  CDR3 for beta chain variable domain of TCR clone 316081 (TRBV10-1, TRBJ2-3)
CASSATSGGFDTQYF

SEQ ID NO: 632163 - protein, 15 aa, Homo sapiens
  CDR3 for alpha chain variable domain of TCR clone 316082 (TRAV38-1, TRAJ57)
CAFMKLQGGSEKLVF

SEQ ID NO: 632164 - protein, 15 aa, Homo sapiens
  CDR3 for beta chain variable domain of TCR clone 316082 (TRBV19, TRBJ2-7)
CASRPTPGLSIEKYF

SEQ ID NO: 632165 - protein, 17 aa, Homo sapiens
  CDR3 for alpha chain variable domain of TCR clone 316083 (TRAV3, TRAJ6)
CAVRYGPRAVGSSIPTF

SEQ ID NO: 632166 - protein, 14 aa, Homo sapiens
  CDR3 for beta chain variable domain of TCR clone 316083 (TRBV7-2, TRBJ2-7)
CASSPKTSFYEQYF

SEQ ID NO: 632167 - protein, 22 aa, Homo sapiens
  CDR3 for alpha chain variable domain of TCR clone 316084 (TRAV2, TRAJ10)
ILQVREADAAVYNTGGGNKLTF

SEQ ID NO: 632168 - protein, 16 aa, Homo sapiens
  CDR3 for beta chain variable domain of TCR clone 316084 (TRBV29-1, TRBJ2-5)
CSVEGLAGDYQETQYF

SEQ ID NO: 632169 - protein, 14 aa, Homo sapiens
  CDR3 for alpha chain variable domain of TCR clone 316085 (TRAV12-1, TRAJ9)
CVVNKGTGGFKTIF

SEQ ID NO: 632170 - protein, 19 aa, Homo sapiens
  CDR3 for beta chain variable domain of TCR clone 316085 (TRBV7-3, TRBJ1-2)
CASSFPQGNDGELWLHLRF

SEQ ID NO: 632171 - protein, 15 aa, Homo sapiens
  CDR3 for alpha chain variable domain of TCR clone 316086 (TRAV8-3, TRAJ20)
CAVEAKGSNDYKLSF

SEQ ID NO: 632172 - protein, 15 aa, Homo sapiens
  CDR3 for beta chain variable domain of TCR clone 316086 (TRBV6-1, TRBJ1-5)
CASSVWVADGQPQHF

SEQ ID NO: 632173 - protein, 14 aa, Homo sapiens
  CDR3 for alpha chain variable domain of TCR clone 316087 (TRAV17, TRAJ15)
CATGPNQAGTALIF

SEQ ID NO: 632174 - protein, 17 aa, Homo sapiens
  CDR3 for beta chain variable domain of TCR clone 316087 (TRBV5-1, TRBJ2-5)
CASSLLGLAANQETQYF

SEQ ID NO: 632175 - protein, 17 aa, Homo sapiens
  CDR3 for alpha chain variable domain of TCR clone 316088 (TRAV8-3, TRAJ42)
CCGAGMNYVGSQGNLIF

SEQ ID NO: 632176 - protein, 11 aa, Homo sapiens
  CDR3 for beta chain variable domain of TCR clone 316088 (TRBV7-2, TRBJ2-3)
CASSSSDTQYF

SEQ ID NO: 632177 - protein, 12 aa, Homo sapiens
  CDR3 for alpha chain variable domain of TCR clone 316089 (TRAV12-2, TRAJ10)
WGVTGGGNKLTF

SEQ ID NO: 632178 - protein, 14 aa, Homo sapiens
  CDR3 for beta chain variable domain of TCR clone 316089 (TRBV28, TRBJ2-7)
CASSLLRISYEQYF

SEQ ID NO: 632179 - protein, 13 aa, Homo sapiens
  CDR3 for alpha chain variable domain of TCR clone 316090 (TRAV29/DV5, TRAJ31)
CAASRNNNARLKF

SEQ ID NO: 632180 - protein, 14 aa, Homo sapiens
  CDR3 for beta chain variable domain of TCR clone 316090 (TRBV20-1, TRBJ1-5)
CSARDVTGFQPQHF

SEQ ID NO: 632181 - protein, 14 aa, Homo sapiens
  CDR3 for alpha chain variable domain of TCR clone 316091 (TRAV23/DV6, TRAJ8)
CAASKNTGFQKLVF

SEQ ID NO: 632182 - protein, 15 aa, Homo sapiens
  CDR3 for beta chain variable domain of TCR clone 316091 (TRBV5-1, TRBJ2-1)
CASSPPRAPYNEQFF

SEQ ID NO: 632183 - protein, 14 aa, Homo sapiens
  CDR3 for alpha chain variable domain of TCR clone 316092 (TRAV12-2, TRAJ40)
CAVKTPSGTYKYIF

SEQ ID NO: 632184 - protein, 12 aa, Homo sapiens
  CDR3 for beta chain variable domain of TCR clone 316092 (TRBV11-2, TRBJ2-2)
CASSLGGGELFF

SEQ ID NO: 632185 - protein, 15 aa, Homo sapiens
  CDR3 for alpha chain variable domain of TCR clone 316093 (TRAV3, TRAJ3)
CAVRDGHSSASKIIF

SEQ ID NO: 632186 - protein, 14 aa, Homo sapiens
  CDR3 for beta chain variable domain of TCR clone 316093 (TRBV28, TRBJ1-4)
CASSFGTFDEKLFF

SEQ ID NO: 632187 - protein, 13 aa, Homo sapiens
  CDR3 for alpha chain variable domain of TCR clone 316094 (TRAV27, TRAJ54)
CAGAGQGAQKLVF

SEQ ID NO: 632188 - protein, 15 aa, Homo sapiens
  CDR3 for beta chain variable domain of TCR clone 316094 (TRBV18, TRBJ2-6)
YASSPSYAGANVLTF

SEQ ID NO: 632189 - protein, 14 aa, Homo sapiens
  CDR3 for alpha chain variable domain of TCR clone 316095 (TRAV12-1, TRAJ12)
CVVTSGDSSYKLIF

SEQ ID NO: 632190 - protein, 17 aa, Homo sapiens
  CDR3 for beta chain variable domain of TCR clone 316095 (TRBV7-9, TRBJ2-1)
CASSLVASYPSYNEQFF

SEQ ID NO: 632191 - protein, 14 aa, Homo sapiens
  CDR3 for alpha chain variable domain of TCR clone 316096 (TRAV1-2, TRAJ16)
CAVNRFSGGQKLPF

SEQ ID NO: 632192 - protein, 16 aa, Homo sapiens
  CDR3 for beta chain variable domain of TCR clone 316096 (TRBV9, TRBJ2-1)
CASSVGGGGNYNEQFF

SEQ ID NO: 632193 - protein, 14 aa, Homo sapiens
  CDR3 for alpha chain variable domain of TCR clone 316097 (TRAV9-2, TRAJ39)
CALYIYNSGNMLTF

SEQ ID NO: 632194 - protein, 14 aa, Homo sapiens
  CDR3 for beta chain variable domain of TCR clone 316097 (TRBV7-2, TRBJ2-7)
CASRSQGAAYEQYF

SEQ ID NO: 632195 - protein, 12 aa, Homo sapiens
  CDR3 for alpha chain variable domain of TCR clone 316098 (TRAV1-2, TRAJ33)
CAALDSNYQLIW

SEQ ID NO: 632196 - protein, 13 aa, Homo sapiens
  CDR3 for beta chain variable domain of TCR clone 316098 (TRBV27, TRBJ1-4)
CASSLMGDEKLFF

SEQ ID NO: 632197 - protein, 13 aa, Homo sapiens
  CDR3 for alpha chain variable domain of TCR clone 316099 (TRAV13-1, TRAJ53)
QATSGGSNYKLTF

SEQ ID NO: 632198 - protein, 15 aa, Homo sapiens
  CDR3 for beta chain variable domain of TCR clone 316099 (TRBV5-1, TRBJ2-1)
CASSPPRAPYNEQFF

SEQ ID NO: 632199 - protein, 13 aa, Homo sapiens
  CDR3 for alpha chain variable domain of TCR clone 316100 (TRAV23/DV6, TRAJ22)
CASRAGSARQLTF

SEQ ID NO: 632200 - protein, 14 aa, Homo sapiens
  CDR3 for beta chain variable domain of TCR clone 316100 (TRBV7-2, TRBJ2-7)
CASSPTTSFYEQYF

SEQ ID NO: 632201 - protein, 12 aa, Homo sapiens
  CDR3 for alpha chain variable domain of TCR clone 316101 (TRAV17, TRAJ20)
CATQSNDYKLSF

SEQ ID NO: 632202 - protein, 14 aa, Homo sapiens
  CDR3 for beta chain variable domain of TCR clone 316101 (TRBV4-1, TRBJ2-2)
CASSQAVNTGELFF

SEQ ID NO: 632203 - protein, 15 aa, Homo sapiens
  CDR3 for alpha chain variable domain of TCR clone 316102 (TRAV12-1, TRAJ4)
CVVNPFSGGYHKLIF

SEQ ID NO: 632204 - protein, 16 aa, Homo sapiens
  CDR3 for beta chain variable domain of TCR clone 316102 (TRBV5-1, TRBJ1-1)
CASSKTGTEVGTEAFF

SEQ ID NO: 632205 - protein, 16 aa, Homo sapiens
  CDR3 for alpha chain variable domain of TCR clone 316103 (TRAV3, TRAJ21)
CAVRDIERGNFNKFYF

SEQ ID NO: 632206 - protein, 13 aa, Homo sapiens
  CDR3 for beta chain variable domain of TCR clone 316103 (TRBV4-2, TRBJ1-1)
CASSQAGNTKAFF

SEQ ID NO: 632207 - protein, 14 aa, Homo sapiens
  CDR3 for alpha chain variable domain of TCR clone 316104 (TRAV13-2, TRAJ23)
CAENIGPVGGKLIF

SEQ ID NO: 632208 - protein, 17 aa, Homo sapiens
  CDR3 for beta chain variable domain of TCR clone 316104 (TRBV5-1, TRBJ1-1)
CASSFMTGGKRDTEAFI

SEQ ID NO: 632209 - protein, 11 aa, Homo sapiens
  CDR3 for alpha chain variable domain of TCR clone 316105 (TRAV29/DV5, TRAJ37)
CATSNTGKLIF

SEQ ID NO: 632210 - protein, 13 aa, Homo sapiens
  CDR3 for beta chain variable domain of TCR clone 316105 (TRBV4-1, TRBJ1-1)
CASSQLGTGEAFF

SEQ ID NO: 632211 - protein, 14 aa, Homo sapiens
  CDR3 for alpha chain variable domain of TCR clone 316106 (TRAV1-2, TRAJ16)
CAVNRFSDGQKMLF

SEQ ID NO: 632212 - protein, 15 aa, Homo sapiens
  CDR3 for beta chain variable domain of TCR clone 316106 (TRBV20-1, TRBJ2-7)
CSARDRVSGMDEQYF

SEQ ID NO: 632213 - protein, 16 aa, Homo sapiens
  CDR3 for alpha chain variable domain of TCR clone 316107 (TRAV30, TRAJ24)
CGTEIVDADSWGKFQF

SEQ ID NO: 632214 - protein, 14 aa, Homo sapiens
  CDR3 for beta chain variable domain of TCR clone 316107 (TRBV7-2, TRBJ2-5)
CASSPRGSSETQYS

SEQ ID NO: 632215 - protein, 11 aa, Homo sapiens
  CDR3 for alpha chain variable domain of TCR clone 316108 (TRAV2, TRAJ13)
CASGGYQKVTF

SEQ ID NO: 632216 - protein, 15 aa, Homo sapiens
  CDR3 for beta chain variable domain of TCR clone 316108 (TRBV28, TRBJ2-7)
CASSPGGRGFYEQYF

SEQ ID NO: 632217 - protein, 13 aa, Homo sapiens
  CDR3 for alpha chain variable domain of TCR clone 316109 (TRAV3, TRAJ43)
CAVRDTRGGAMRF

SEQ ID NO: 632218 - protein, 15 aa, Homo sapiens
  CDR3 for beta chain variable domain of TCR clone 316109 (TRBV6-5, TRBJ1-5)
CAGSYSRRSNQPQHF

SEQ ID NO: 632219 - protein, 13 aa, Homo sapiens
  CDR3 for alpha chain variable domain of TCR clone 316110 (TRAV17, TRAJ29)
CATGPSGNTPLVF

SEQ ID NO: 632220 - protein, 14 aa, Homo sapiens
  CDR3 for beta chain variable domain of TCR clone 316110 (TRBV2, TRBJ1-6)
CGSEVSSYNSPLHF

SEQ ID NO: 632221 - protein, 14 aa, Homo sapiens
  CDR3 for alpha chain variable domain of TCR clone 316111 (TRAV29/DV5, TRAJ20)
CAASAPIEDYKLSF

SEQ ID NO: 632222 - protein, 14 aa, Homo sapiens
  CDR3 for beta chain variable domain of TCR clone 316111 (TRBV23-1, TRBJ2-5)
CASSFLRSQETQYF

SEQ ID NO: 632223 - protein, 18 aa, Homo sapiens
  CDR3 for alpha chain variable domain of TCR clone 316112 (TRAV21, TRAJ52)
CAVRPSPAGGTSYGKLTF

SEQ ID NO: 632224 - protein, 15 aa, Homo sapiens
  CDR3 for beta chain variable domain of TCR clone 316112 (TRBV7-2, TRBJ2-5)
CASSFLRGGEETQYF

SEQ ID NO: 632225 - protein, 13 aa, Homo sapiens
  CDR3 for alpha chain variable domain of TCR clone 316113 (TRAV12-3, TRAJ33)
CAMSVNSNYQLIW

SEQ ID NO: 632226 - protein, 14 aa, Homo sapiens
  CDR3 for beta chain variable domain of TCR clone 316113 (TRBV5-7, TRBJ1-6)
CASTPWPADSPLHF

SEQ ID NO: 632227 - protein, 14 aa, Homo sapiens
  CDR3 for alpha chain variable domain of TCR clone 316114 (TRAV8-6, TRAJ29)
CAVSRASGNTPLVF

SEQ ID NO: 632228 - protein, 13 aa, Homo sapiens
  CDR3 for beta chain variable domain of TCR clone 316114 (TRBV19, TRBJ1-5)
CASSEGSNEPQHF

SEQ ID NO: 632229 - protein, 10 aa, Homo sapiens
  CDR3 for alpha chain variable domain of TCR clone 316115 (TRAV23/DV6, TRAJ57)
CAASSTLSQG

SEQ ID NO: 632230 - protein, 14 aa, Homo sapiens
  CDR3 for beta chain variable domain of TCR clone 316115 (TRBV25-1, TRBJ1-1)
CASTHLGGNTEASF

SEQ ID NO: 632231 - protein, 15 aa, Homo sapiens
  CDR3 for alpha chain variable domain of TCR clone 316116 (TRAV8-3, TRAJ15)
CAVGAPNQAGTALIF

SEQ ID NO: 632232 - protein, 14 aa, Homo sapiens
  CDR3 for beta chain variable domain of TCR clone 316116 (TRBV5-1, TRBJ2-1)
CASSALWAGNEQFF

SEQ ID NO: 632233 - protein, 16 aa, Homo sapiens
  CDR3 for alpha chain variable domain of TCR clone 316117 (TRAV30, TRAJ24)
CGTEIVHADSWGKFQF

SEQ ID NO: 632234 - protein, 16 aa, Homo sapiens
  CDR3 for beta chain variable domain of TCR clone 316117 (TRBV2, TRBJ1-3)
CASSGGAGRSGNTIYF

SEQ ID NO: 632235 - protein, 14 aa, Homo sapiens
  CDR3 for alpha chain variable domain of TCR clone 316118 (TRAV17, TRAJ35)
CATDRPGFGNVLHC

SEQ ID NO: 632236 - protein, 19 aa, Homo sapiens
  CDR3 for beta chain variable domain of TCR clone 316118 (TRBV11-3, TRBJ2-2)
CASSTRPGAKTTNTGELFF

SEQ ID NO: 632237 - protein, 14 aa, Homo sapiens
  CDR3 for alpha chain variable domain of TCR clone 316119 (TRAV13-1, TRAJ35)
CAASKGGFGSVLQC

SEQ ID NO: 632238 - protein, 13 aa, Homo sapiens
  CDR3 for beta chain variable domain of TCR clone 316119 (TRBV7-3, TRBJ1-1)
CASSQDWRAEAFF

SEQ ID NO: 632239 - protein, 13 aa, Homo sapiens
  CDR3 for alpha chain variable domain of TCR clone 316120 (TRAV23/DV6, TRAJ20)
CAARTSNDSKLSF

SEQ ID NO: 632240 - protein, 14 aa, Homo sapiens
  CDR3 for beta chain variable domain of TCR clone 316120 (TRBV2, TRBJ2-5)
CQQPLWAAGETQYF

SEQ ID NO: 632241 - protein, 14 aa, Homo sapiens
  CDR3 for alpha chain variable domain of TCR clone 316121 (TRAV12-1, TRAJ17)
CVVNYKAAGNKLTF

SEQ ID NO: 632242 - protein, 17 aa, Homo sapiens
  CDR3 for beta chain variable domain of TCR clone 316121 (TRBV18, TRBJ2-1)
CASSKGLSGGADNEQFF

SEQ ID NO: 632243 - protein, 14 aa, Homo sapiens
  CDR3 for alpha chain variable domain of TCR clone 316122 (TRAV4, TRAJ26)
CLVGPHNYGQNFVF

SEQ ID NO: 632244 - protein, 17 aa, Homo sapiens
  CDR3 for beta chain variable domain of TCR clone 316122 (TRBV20-1, TRBJ2-1)
CGASSSGLAGSYNEQFF

SEQ ID NO: 632245 - protein, 14 aa, Homo sapiens
  CDR3 for alpha chain variable domain of TCR clone 316123 (TRAV29/DV5, TRAJ36)
CAARRKTGANNRVF

SEQ ID NO: 632246 - protein, 14 aa, Homo sapiens
  CDR3 for beta chain variable domain of TCR clone 316123 (TRBV12-5, TRBJ2-5)
CASGSRTHQETQYF

SEQ ID NO: 632247 - protein, 14 aa, Homo sapiens
  CDR3 for alpha chain variable domain of TCR clone 316124 (TRAV25, TRAJ27)
CAGKHLTNAGKSTF

SEQ ID NO: 632248 - protein, 15 aa, Homo sapiens
  CDR3 for beta chain variable domain of TCR clone 316124 (TRBV15, TRBJ1-1)
RATSLQGGRNTEAFF

SEQ ID NO: 632249 - protein, 14 aa, Homo sapiens
  CDR3 for alpha chain variable domain of TCR clone 316125 (TRAV12-1, TRAJ34)
CGEPASYNTDKLIF

SEQ ID NO: 632250 - protein, 15 aa, Homo sapiens
  CDR3 for beta chain variable domain of TCR clone 316125 (TRBV18, TRBJ2-2)
CASSTSGLHTGELFF

SEQ ID NO: 632251 - protein, 18 aa, Homo sapiens
  CDR3 for alpha chain variable domain of TCR clone 316126 (TRAV26-2, TRAJ45)
CILRVDKCSGGGADGLTF

SEQ ID NO: 632252 - protein, 16 aa, Homo sapiens
  CDR3 for beta chain variable domain of TCR clone 316126 (TRBV2, TRBJ1-4)
CASNLLQGATNEKLFF

SEQ ID NO: 632253 - protein, 17 aa, Homo sapiens
  CDR3 for alpha chain variable domain of TCR clone 316127 (TRAV3, TRAJ42)
CAVRDRDYGGSQGNLIF

SEQ ID NO: 632254 - protein, 17 aa, Homo sapiens
  CDR3 for beta chain variable domain of TCR clone 316127 (TRBV7-9, TRBJ2-3)
CASSPTVAGDLTDTRYF

SEQ ID NO: 632255 - protein, 12 aa, Homo sapiens
  CDR3 for alpha chain variable domain of TCR clone 316128 (TRAV27, TRAJ9)
CAGESGGFKTIF

SEQ ID NO: 632256 - protein, 13 aa, Homo sapiens
  CDR3 for beta chain variable domain of TCR clone 316128 (TRBV10-2, TRBJ2-7)
CASGASGGYEQYF

SEQ ID NO: 632257 - protein, 15 aa, Homo sapiens
  CDR3 for alpha chain variable domain of TCR clone 316129 (TRAV8-3, TRAJ27)
CAVGPSKTNAGKSTF

SEQ ID NO: 632258 - protein, 15 aa, Homo sapiens
  CDR3 for beta chain variable domain of TCR clone 316129 (TRBV9, TRBJ2-1)
CASSLAGSSYNEQFF

SEQ ID NO: 632259 - protein, 13 aa, Homo sapiens
  CDR3 for alpha chain variable domain of TCR clone 316130 (TRAV12-3, TRAJ13)
CAMTSGGYQKVTF

SEQ ID NO: 632260 - protein, 13 aa, Homo sapiens
  CDR3 for beta chain variable domain of TCR clone 316130 (TRBV20-1, TRBJ2-2)
CSALSGGAGELFF

SEQ ID NO: 632261 - protein, 13 aa, Homo sapiens
  CDR3 for alpha chain variable domain of TCR clone 316131 (TRAV12-3, TRAJ43)
CAMIRPNNNDMRF

SEQ ID NO: 632262 - protein, 12 aa, Homo sapiens
  CDR3 for beta chain variable domain of TCR clone 316131 (TRBV11-2, TRBJ2-5)
FASSLGQETQYF

SEQ ID NO: 632263 - protein, 18 aa, Homo sapiens
  CDR3 for alpha chain variable domain of TCR clone 316132 (TRAV29/DV5, TRAJ52)
CAAGFRGAGGTSYGKLTF

SEQ ID NO: 632264 - protein, 15 aa, Homo sapiens
  CDR3 for beta chain variable domain of TCR clone 316132 (TRBV28, TRBJ2-5)
CASSPPWSYQETQYF

SEQ ID NO: 632265 - protein, 13 aa, Homo sapiens
  CDR3 for alpha chain variable domain of TCR clone 316133 (TRAV13-1, TRAJ4)
CAASIGGYNKLIF

SEQ ID NO: 632266 - protein, 16 aa, Homo sapiens
  CDR3 for beta chain variable domain of TCR clone 316133 (TRBV20-1, TRBJ2-1)
CSAPGLAGSYSDEQFV

SEQ ID NO: 632267 - protein, 12 aa, Homo sapiens
  CDR3 for alpha chain variable domain of TCR clone 316134 (TRAV23/DV6, TRAJ30)
CAASNGDDKIIF

SEQ ID NO: 632268 - protein, 15 aa, Homo sapiens
  CDR3 for beta chain variable domain of TCR clone 316134 (TRBV20-1, TRBJ2-7)
CSARDRVSGMDEQYF

SEQ ID NO: 632269 - protein, 15 aa, Homo sapiens
  CDR3 for alpha chain variable domain of TCR clone 316135 (TRAV13-1, TRAJ5)
CAASPRGHGQESTYF

SEQ ID NO: 632270 - protein, 17 aa, Homo sapiens
  CDR3 for beta chain variable domain of TCR clone 316135 (TRBV3-1, TRBJ2-2)
CASSQFRDKVYTGELFF

SEQ ID NO: 632271 - protein, 15 aa, Homo sapiens
  CDR3 for alpha chain variable domain of TCR clone 316136 (TRAV14/DV4, TRAJ12)
CAMREERDSSYKFIF

SEQ ID NO: 632272 - protein, 16 aa, Homo sapiens
  CDR3 for beta chain variable domain of TCR clone 316136 (TRBV11-2, TRBJ1-2)
CASSLDRGGNNYGYTF

SEQ ID NO: 632273 - protein, 15 aa, Homo sapiens
  CDR3 for alpha chain variable domain of TCR clone 316137 (TRAV26-1, TRAJ39)
CIVRDGSNAGNMLTF

SEQ ID NO: 632274 - protein, 16 aa, Homo sapiens
  CDR3 for beta chain variable domain of TCR clone 316137 (TRBV7-2, TRBJ1-3)
CASSRLGASSGNTVYF

SEQ ID NO: 632275 - protein, 14 aa, Homo sapiens
  CDR3 for alpha chain variable domain of TCR clone 316138 (TRAV23/DV6, TRAJ57)
CAASNQGGSEKPVF

SEQ ID NO: 632276 - protein, 13 aa, Homo sapiens
  CDR3 for beta chain variable domain of TCR clone 316138 (TRBV11-2, TRBJ2-7)
CASGSYPSYEQYF

SEQ ID NO: 632277 - protein, 17 aa, Homo sapiens
  CDR3 for alpha chain variable domain of TCR clone 316139 (TRAV26-1, TRAJ37)
CIVRVITVSSNTGKLII

SEQ ID NO: 632278 - protein, 15 aa, Homo sapiens
  CDR3 for beta chain variable domain of TCR clone 316139 (TRBV9, TRBJ1-6)
CASSVAGTGDSPLHF

SEQ ID NO: 632279 - protein, 14 aa, Homo sapiens
  CDR3 for alpha chain variable domain of TCR clone 316140 (TRAV12-2, TRAJ11)
CAVEGWSGYSTLTF

SEQ ID NO: 632280 - protein, 11 aa, Homo sapiens
  CDR3 for beta chain variable domain of TCR clone 316140 (TRBV12-4, TRBJ2-3)
CASTATDTQYF

SEQ ID NO: 632281 - protein, 14 aa, Homo sapiens
  CDR3 for alpha chain variable domain of TCR clone 316141 (TRAV26-1, TRAJ39)
CIVRGSRAGNMLTF

SEQ ID NO: 632282 - protein, 15 aa, Homo sapiens
  CDR3 for beta chain variable domain of TCR clone 316141 (TRBV7-9, TRBJ1-5)
CASSEGHQPNQPQHF

SEQ ID NO: 632283 - protein, 12 aa, Homo sapiens
  CDR3 for alpha chain variable domain of TCR clone 316142 (TRAV21, TRAJ42)
CAVGGSQGNLIF

SEQ ID NO: 632284 - protein, 14 aa, Homo sapiens
  CDR3 for beta chain variable domain of TCR clone 316142 (TRBV12-4, TRBJ1-1)
CASSLGTGSTEAFF

SEQ ID NO: 632285 - protein, 14 aa, Homo sapiens
  CDR3 for alpha chain variable domain of TCR clone 316143 (TRAV26-1, TRAJ45)
CIEVTGGGADGLTF

SEQ ID NO: 632286 - protein, 13 aa, Homo sapiens
  CDR3 for beta chain variable domain of TCR clone 316143 (TRBV7-6, TRBJ1-2)
CASSLVADCGDTF

SEQ ID NO: 632287 - protein, 12 aa, Homo sapiens
  CDR3 for alpha chain variable domain of TCR clone 316144 (TRAV1-2, TRAJ26)
CAVSPHGQNFVF

SEQ ID NO: 632288 - protein, 14 aa, Homo sapiens
  CDR3 for beta chain variable domain of TCR clone 316144 (TRBV5-1, TRBJ2-7)
CASSFASGVNEQYF

SEQ ID NO: 632289 - protein, 15 aa, Homo sapiens
  CDR3 for alpha chain variable domain of TCR clone 316145 (TRAV17, TRAJ57)
CATGPSQGGSEKLVF

SEQ ID NO: 632290 - protein, 14 aa, Homo sapiens
  CDR3 for beta chain variable domain of TCR clone 316145 (TRBV12-5, TRBJ2-5)
CGSGSRTHQETQYF

SEQ ID NO: 632291 - protein, 13 aa, Homo sapiens
  CDR3 for alpha chain variable domain of TCR clone 316146 (TRAV26-1, TRAJ41)
CIVRINSGYALNF

SEQ ID NO: 632292 - protein, 14 aa, Homo sapiens
  CDR3 for beta chain variable domain of TCR clone 316146 (TRBV4-1, TRBJ2-2)
CASSQAVNSGELFF

SEQ ID NO: 632293 - protein, 16 aa, Homo sapiens
  CDR3 for alpha chain variable domain of TCR clone 316147 (TRAV26-2, TRAJ57)
CILRDVGAGGSEKLVF

SEQ ID NO: 632294 - protein, 13 aa, Homo sapiens
  CDR3 for beta chain variable domain of TCR clone 316147 (TRBV18, TRBJ2-3)
CASSPGVPDTQYF

SEQ ID NO: 632295 - protein, 13 aa, Homo sapiens
  CDR3 for alpha chain variable domain of TCR clone 316148 (TRAV21, TRAJ27)
CAQGGGNAGKSTF

SEQ ID NO: 632296 - protein, 14 aa, Homo sapiens
  CDR3 for beta chain variable domain of TCR clone 316148 (TRBV2, TRBJ2-3)
CAVGGTISTDTQYF

SEQ ID NO: 632297 - protein, 17 aa, Homo sapiens
  CDR3 for alpha chain variable domain of TCR clone 316149 (TRAV3, TRAJ6)
CAVRDGPRAGGSYIPTF

SEQ ID NO: 632298 - protein, 14 aa, Homo sapiens
  CDR3 for beta chain variable domain of TCR clone 316149 (TRBV28, TRBJ1-4)
CASSLSRTNEKLFF

SEQ ID NO: 632299 - protein, 13 aa, Homo sapiens
  CDR3 for alpha chain variable domain of TCR clone 316150 (TRAV17, TRAJ26)
CATVDNYGQNLVF

SEQ ID NO: 632300 - protein, 13 aa, Homo sapiens
  CDR3 for beta chain variable domain of TCR clone 316150 (TRBV14, TRBJ1-1)
CASSREFGTEAFF

SEQ ID NO: 632301 - protein, 13 aa, Homo sapiens
  CDR3 for alpha chain variable domain of TCR clone 316151 (TRAV13-2, TRAJ53)
CAENMGSNYKLTF

SEQ ID NO: 632302 - protein, 14 aa, Homo sapiens
  CDR3 for beta chain variable domain of TCR clone 316151 (TRBV27, TRBJ1-1)
CASTTIGGATEAFF

SEQ ID NO: 632303 - protein, 14 aa, Homo sapiens
  CDR3 for alpha chain variable domain of TCR clone 316152 (TRAV12-3, TRAJ9)
CAMSPNTGGSTTIF

SEQ ID NO: 632304 - protein, 12 aa, Homo sapiens
  CDR3 for beta chain variable domain of TCR clone 316152 (TRBV11-2, TRBJ2-2)
CASSLGGGELFF

SEQ ID NO: 632305 - protein, 14 aa, Homo sapiens
  CDR3 for alpha chain variable domain of TCR clone 316153 (TRAV26-1, TRAJ38)
CIADNAGNNSKLIW

SEQ ID NO: 632306 - protein, 15 aa, Homo sapiens
  CDR3 for beta chain variable domain of TCR clone 316153 (TRBV10-1, TRBJ2-3)
CASSATSGGFDTQYF

SEQ ID NO: 632307 - protein, 10 aa, Homo sapiens
  CDR3 for alpha chain variable domain of TCR clone 316154 (TRAV16, TRAJ22)
SAMYLRQLTF

SEQ ID NO: 632308 - protein, 13 aa, Homo sapiens
  CDR3 for beta chain variable domain of TCR clone 316154 (TRBV12-4, TRBJ2-5)
CASSPGTEETQYF

SEQ ID NO: 632309 - protein, 13 aa, Homo sapiens
  CDR3 for alpha chain variable domain of TCR clone 316155 (TRAV38-2/DV8, TRAJ34)
CAYRNYNTDKLIF

SEQ ID NO: 632310 - protein, 14 aa, Homo sapiens
  CDR3 for beta chain variable domain of TCR clone 316155 (TRBV20-1, TRBJ2-5)
QCRGTGGLQETQYF

SEQ ID NO: 632311 - protein, 14 aa, Homo sapiens
  CDR3 for alpha chain variable domain of TCR clone 316156 (TRAV1-2, TRAJ8)
CAVREDTGCQKLVF

SEQ ID NO: 632312 - protein, 13 aa, Homo sapiens
  CDR3 for beta chain variable domain of TCR clone 316156 (TRBV12-4, TRBJ1-5)
CASSPDRAQPQHF

SEQ ID NO: 632313 - protein, 14 aa, Homo sapiens
  CDR3 for alpha chain variable domain of TCR clone 316157 (TRAV35, TRAJ22)
CAGLRPGSARQLTF

SEQ ID NO: 632314 - protein, 13 aa, Homo sapiens
  CDR3 for beta chain variable domain of TCR clone 316157 (TRBV20-1, TRBJ1-1)
CSARGAGNTEAFF

SEQ ID NO: 632315 - protein, 13 aa, Homo sapiens
  CDR3 for alpha chain variable domain of TCR clone 316158 (TRAV8-3, TRAJ36)
CAVGATGANNLFF

SEQ ID NO: 632316 - protein, 15 aa, Homo sapiens
  CDR3 for beta chain variable domain of TCR clone 316158 (TRBV20-1, TRBJ2-7)
CSARDRVAGMDEQYF

SEQ ID NO: 632317 - protein, 16 aa, Homo sapiens
  CDR3 for alpha chain variable domain of TCR clone 316159 (TRAV12-3, TRAJ53)
CAMSPGSGGSTHKLTF

SEQ ID NO: 632318 - protein, 11 aa, Homo sapiens
  CDR3 for beta chain variable domain of TCR clone 316159 (TRBV29-1, TRBJ2-5)
CSEDRAGTQYF

SEQ ID NO: 632319 - protein, 15 aa, Homo sapiens
  CDR3 for alpha chain variable domain of TCR clone 316160 (TRAV8-3, TRAJ6)
CAVGPLGGGSYIPTF

SEQ ID NO: 632320 - protein, 18 aa, Homo sapiens
  CDR3 for beta chain variable domain of TCR clone 316160 (TRBV4-1, TRBJ1-5)
CASSQDPRGQGLNQPQHF

SEQ ID NO: 632321 - protein, 12 aa, Homo sapiens
  CDR3 for alpha chain variable domain of TCR clone 316161 (TRAV13-2, TRAJ54)
CGAHEGAQKLVF

SEQ ID NO: 632322 - protein, 16 aa, Homo sapiens
  CDR3 for beta chain variable domain of TCR clone 316161 (TRBV12-5, TRBJ2-5)
CASGTRTSGNQETQYF

SEQ ID NO: 632323 - protein, 12 aa, Homo sapiens
  CDR3 for alpha chain variable domain of TCR clone 316162 (TRAV12-3, TRAJ17)
CAMTLTGNKLTF

SEQ ID NO: 632324 - protein, 13 aa, Homo sapiens
  CDR3 for beta chain variable domain of TCR clone 316162 (TRBV7-3, TRBJ2-3)
CASRGQATDTQYF

SEQ ID NO: 632325 - protein, 13 aa, Homo sapiens
  CDR3 for alpha chain variable domain of TCR clone 316163 (TRAV8-6, TRAJ29)
CAVSDLEETHLLS

SEQ ID NO: 632326 - protein, 15 aa, Homo sapiens
  CDR3 for beta chain variable domain of TCR clone 316163 (TRBV3-1, TRBJ2-5)
CASSANLGGPETQYF

SEQ ID NO: 632327 - protein, 14 aa, Homo sapiens
  CDR3 for alpha chain variable domain of TCR clone 316164 (TRAV1-2, TRAJ16)
CAVNRFSGGQKLLF

SEQ ID NO: 632328 - protein, 14 aa, Homo sapiens
  CDR3 for beta chain variable domain of TCR clone 316164 (TRBV20-1, TRBJ2-1)
CSAQIGGSANEQFF

SEQ ID NO: 632329 - protein, 13 aa, Homo sapiens
  CDR3 for alpha chain variable domain of TCR clone 316165 (TRAV12-3, TRAJ9)
CAMRNTGGFKTIF

SEQ ID NO: 632330 - protein, 14 aa, Homo sapiens
  CDR3 for beta chain variable domain of TCR clone 316165 (TRBV11-2, TRBJ2-7)
CACSSTGEGYEQYF

SEQ ID NO: 632331 - protein, 18 aa, Homo sapiens
  CDR3 for alpha chain variable domain of TCR clone 316166 (TRAV21, TRAJ52)
CAVRPSPAGGTSYGKPTF

SEQ ID NO: 632332 - protein, 15 aa, Homo sapiens
  CDR3 for beta chain variable domain of TCR clone 316166 (TRBV7-9, TRBJ1-6)
CASSSPGRGNSPLHF

SEQ ID NO: 632333 - protein, 16 aa, Homo sapiens
  CDR3 for alpha chain variable domain of TCR clone 316167 (TRAV3, TRAJ10)
CAVRDMRAGGGNKLTF

SEQ ID NO: 632334 - protein, 15 aa, Homo sapiens
  CDR3 for beta chain variable domain of TCR clone 316167 (TRBV6-1, TRBJ2-1)
CASSEAAYSYNEQFF

SEQ ID NO: 632335 - protein, 16 aa, Homo sapiens
  CDR3 for alpha chain variable domain of TCR clone 316168 (TRAV3, TRAJ21)
CAVRDIERGNFNKFYF

SEQ ID NO: 632336 - protein, 17 aa, Homo sapiens
  CDR3 for beta chain variable domain of TCR clone 316168 (TRBV7-8, TRBJ2-6)
CASSAGTGGAGANDLTF

SEQ ID NO: 632337 - protein, 14 aa, Homo sapiens
  CDR3 for alpha chain variable domain of TCR clone 316169 (TRAV26-1, TRAJ39)
CIVRGSRAGNMLTV

SEQ ID NO: 632338 - protein, 13 aa, Homo sapiens
  CDR3 for beta chain variable domain of TCR clone 316169 (TRBV7-9, TRBJ2-1)
CAGSLDVGNEQFF

SEQ ID NO: 632339 - protein, 15 aa, Homo sapiens
  CDR3 for alpha chain variable domain of TCR clone 316170 (TRAV12-1, TRAJ8)
CVVNVETTGFQKLVF

SEQ ID NO: 632340 - protein, 14 aa, Homo sapiens
  CDR3 for beta chain variable domain of TCR clone 316170 (TRBV7-2, TRBJ2-7)
CASRSQGAAYEQYF

SEQ ID NO: 632341 - protein, 13 aa, Homo sapiens
  CDR3 for alpha chain variable domain of TCR clone 316171 (TRAV2, TRAJ40)
CAVVTSGTYKYIF

SEQ ID NO: 632342 - protein, 15 aa, Homo sapiens
  CDR3 for beta chain variable domain of TCR clone 316171 (TRBV6-5, TRBJ2-1)
CAISYDAGAGNEQFF

SEQ ID NO: 632343 - protein, 14 aa, Homo sapiens
  CDR3 for alpha chain variable domain of TCR clone 316172 (TRAV12-2, TRAJ13)
CAVTKTGGYQKVTF

SEQ ID NO: 632344 - protein, 15 aa, Homo sapiens
  CDR3 for beta chain variable domain of TCR clone 316172 (TRBV27, TRBJ2-1)
CASSNGEGPPMSSSS

SEQ ID NO: 632345 - protein, 14 aa, Homo sapiens
  CDR3 for alpha chain variable domain of TCR clone 316173 (TRAV2, TRAJ37)
CAVNFTSNTGKLIF

SEQ ID NO: 632346 - protein, 14 aa, Homo sapiens
  CDR3 for beta chain variable domain of TCR clone 316173 (TRBV7-7, TRBJ2-7)
CASSLGRGVGEQYF

SEQ ID NO: 632347 - protein, 11 aa, Homo sapiens
  CDR3 for alpha chain variable domain of TCR clone 316174 (TRAV1-1, TRAJ23)
CAVRQGGKLIF

SEQ ID NO: 632348 - protein, 11 aa, Homo sapiens
  CDR3 for beta chain variable domain of TCR clone 316174 (TRBV12-4, TRBJ2-3)
CASTATDTQHF

SEQ ID NO: 632349 - protein, 13 aa, Homo sapiens
  CDR3 for alpha chain variable domain of TCR clone 316175 (TRAV8-3, TRAJ36)
CAVGATGANNLFF

SEQ ID NO: 632350 - protein, 13 aa, Homo sapiens
  CDR3 for beta chain variable domain of TCR clone 316175 (TRBV12-4, TRBJ1-2)
CASSLRQGKGYIF

SEQ ID NO: 632351 - protein, 13 aa, Homo sapiens
  CDR3 for alpha chain variable domain of TCR clone 316176 (TRAV30, TRAJ6)
CGTEAGGSYIPTF

SEQ ID NO: 632352 - protein, 16 aa, Homo sapiens
  CDR3 for beta chain variable domain of TCR clone 316176 (TRBV20-1, TRBJ1-4)
CSAPGQGLLTNEKLFF

SEQ ID NO: 632353 - protein, 12 aa, Homo sapiens
  CDR3 for alpha chain variable domain of TCR clone 316177 (TRAV12-1, TRAJ40)
CVVYSGTYKYIF

SEQ ID NO: 632354 - protein, 17 aa, Homo sapiens
  CDR3 for beta chain variable domain of TCR clone 316177 (TRBV11-2, TRBJ2-3)
CASSLSRVAGGRNTQYF

SEQ ID NO: 632355 - protein, 13 aa, Homo sapiens
  CDR3 for alpha chain variable domain of TCR clone 316178 (TRAV25, TRAJ10)
FAGRTGGGNKLTF

SEQ ID NO: 632356 - protein, 15 aa, Homo sapiens
  CDR3 for beta chain variable domain of TCR clone 316178 (TRBV19, TRBJ2-1)
CASSSPGVPLDEQFL

SEQ ID NO: 632357 - protein, 14 aa, Homo sapiens
  CDR3 for alpha chain variable domain of TCR clone 316179 (TRAV12-2, TRAJ53)
CAVKGGGSNYKLTF

SEQ ID NO: 632358 - protein, 17 aa, Homo sapiens
  CDR3 for beta chain variable domain of TCR clone 316179 (TRBV7-2, TRBJ1-4)
CASSFKAGATTNEKLFF

SEQ ID NO: 632359 - protein, 14 aa, Homo sapiens
  CDR3 for alpha chain variable domain of TCR clone 316180 (TRAV4, TRAJ20)
CLVGRCSNDYKLSF

SEQ ID NO: 632360 - protein, 18 aa, Homo sapiens
  CDR3 for beta chain variable domain of TCR clone 316180 (TRBV2, TRBJ2-5)
CASSGGPQGRGAQETQYF

SEQ ID NO: 632361 - protein, 14 aa, Homo sapiens
  CDR3 for alpha chain variable domain of TCR clone 316181 (TRAV12-1, TRAJ43)
CVVNGRSNNTDMRF

SEQ ID NO: 632362 - protein, 13 aa, Homo sapiens
  CDR3 for beta chain variable domain of TCR clone 316181 (TRBV27, TRBJ1-1)
CASSLSIGAEAFF

SEQ ID NO: 632363 - protein, 12 aa, Homo sapiens
  CDR3 for alpha chain variable domain of TCR clone 316182 (TRAV27, TRAJ40)
CADRPGTYKYIF

SEQ ID NO: 632364 - protein, 15 aa, Homo sapiens
  CDR3 for beta chain variable domain of TCR clone 316182 (TRBV19, TRBJ1-2)
CASSVGQVLNYGYTF

SEQ ID NO: 632365 - protein, 18 aa, Homo sapiens
  CDR3 for alpha chain variable domain of TCR clone 316183 (TRAV26-1, TRAJ52)
CIVRVAGAGGTSYGKLTF

SEQ ID NO: 632366 - protein, 12 aa, Homo sapiens
  CDR3 for beta chain variable domain of TCR clone 316183 (TRBV29-1, TRBJ2-3)
GSVTGGADTQYF

SEQ ID NO: 632367 - protein, 12 aa, Homo sapiens
  CDR3 for alpha chain variable domain of TCR clone 316184 (TRAV2, TRAJ9)
CAVATGGFKTIF

SEQ ID NO: 632368 - protein, 15 aa, Homo sapiens
  CDR3 for beta chain variable domain of TCR clone 316184 (TRBV28, TRBJ2-1)
CASSIIAGGRSEQFF

SEQ ID NO: 632369 - protein, 12 aa, Homo sapiens
  CDR3 for alpha chain variable domain of TCR clone 316185 (TRAV1-2, TRAJ29)
CAVPSGNKPLVF

SEQ ID NO: 632370 - protein, 13 aa, Homo sapiens
  CDR3 for beta chain variable domain of TCR clone 316185 (TRBV5-4, TRBJ1-1)
CASSVDLGTEAFF

SEQ ID NO: 632371 - protein, 11 aa, Homo sapiens
  CDR3 for alpha chain variable domain of TCR clone 316186 (TRAV12-3, TRAJ5)
SWPTGRRALTF

SEQ ID NO: 632372 - protein, 14 aa, Homo sapiens
  CDR3 for beta chain variable domain of TCR clone 316186 (TRBV25-1, TRBJ1-1)
CASTHLGGNTEAFF

SEQ ID NO: 632373 - protein, 16 aa, Homo sapiens
  CDR3 for alpha chain variable domain of TCR clone 316187 (TRAV38-1, TRAJ32)
CAFMPFLGGATNKLIF

SEQ ID NO: 632374 - protein, 13 aa, Homo sapiens
  CDR3 for beta chain variable domain of TCR clone 316187 (TRBV10-3, TRBJ2-7)
CASKLAVNYEQYF

SEQ ID NO: 632375 - protein, 16 aa, Homo sapiens
  CDR3 for alpha chain variable domain of TCR clone 316188 (TRAV12-1, TRAJ42)
CVVTPYYGGSQGNLIF

SEQ ID NO: 632376 - protein, 15 aa, Homo sapiens
  CDR3 for beta chain variable domain of TCR clone 316188 (TRBV5-1, TRBJ1-1)
CASSSTTGTNTEAFF

SEQ ID NO: 632377 - protein, 18 aa, Homo sapiens
  CDR3 for alpha chain variable domain of TCR clone 316189 (TRAV26-1, TRAJ23)
CIVRVGLEVWNQGGKIIF

SEQ ID NO: 632378 - protein, 15 aa, Homo sapiens
  CDR3 for beta chain variable domain of TCR clone 316189 (TRBV10-3, TRBJ2-3)
CAISDWDRDTDTQYF

SEQ ID NO: 632379 - protein, 15 aa, Homo sapiens
  CDR3 for alpha chain variable domain of TCR clone 316190 (TRAV2, TRAJ37)
CAVGDGSSNTGKLIF

SEQ ID NO: 632380 - protein, 13 aa, Homo sapiens
  CDR3 for beta chain variable domain of TCR clone 316190 (TRBV20-1, TRBJ2-7)
SSAQTGLSYEQYF

SEQ ID NO: 632381 - protein, 16 aa, Homo sapiens
  CDR3 for alpha chain variable domain of TCR clone 316191 (TRAV30, TRAJ24)
CGTEIVDADSWGKFTF

SEQ ID NO: 632382 - protein, 15 aa, Homo sapiens
  CDR3 for beta chain variable domain of TCR clone 316191 (TRBV15, TRBJ1-5)
CATSRDPVSNQPQHF

SEQ ID NO: 632383 - protein, 14 aa, Homo sapiens
  CDR3 for alpha chain variable domain of TCR clone 316192 (TRAV8-1, TRAJ23)
FAVGTYNQGGKLIF

SEQ ID NO: 632384 - protein, 16 aa, Homo sapiens
  CDR3 for beta chain variable domain of TCR clone 316192 (TRBV18, TRBJ1-5)
CASSPSTGNSNQPQHF

SEQ ID NO: 632385 - protein, 13 aa, Homo sapiens
  CDR3 for alpha chain variable domain of TCR clone 316193 (TRAV38-2/DV8, TRAJ34)
CAYRTWNNDKLIF

SEQ ID NO: 632386 - protein, 15 aa, Homo sapiens
  CDR3 for beta chain variable domain of TCR clone 316193 (TRBV6-1, TRBJ2-1)
CASSELRGQYNEQFF

SEQ ID NO: 632387 - protein, 15 aa, Homo sapiens
  CDR3 for alpha chain variable domain of TCR clone 316194 (TRAV8-1, TRAJ37)
CAVKKGYGNTGKLIF

SEQ ID NO: 632388 - protein, 17 aa, Homo sapiens
  CDR3 for beta chain variable domain of TCR clone 316194 (TRBV12-4, TRBJ1-1)
CASSLSGFRTMNTEAFF

SEQ ID NO: 632389 - protein, 17 aa, Homo sapiens
  CDR3 for alpha chain variable domain of TCR clone 316195 (TRAV26-1, TRAJ10)
CIVSFRGLTGGGNKLTL

SEQ ID NO: 632390 - protein, 13 aa, Homo sapiens
  CDR3 for beta chain variable domain of TCR clone 316195 (TRBV20-1, TRBJ2-3)
CSASRQAADTQYF

SEQ ID NO: 632391 - protein, 13 aa, Homo sapiens
  CDR3 for alpha chain variable domain of TCR clone 316196 (TRAV3, TRAJ29)
CAVRDWGNTPLVF

SEQ ID NO: 632392 - protein, 15 aa, Homo sapiens
  CDR3 for beta chain variable domain of TCR clone 316196 (TRBV12-4, TRBJ2-5)
CASISRTGEGETQYF

SEQ ID NO: 632393 - protein, 15 aa, Homo sapiens
  CDR3 for alpha chain variable domain of TCR clone 316197 (TRAV8-6, TRAJ37)
CAVIFSSGNTGKLIF

SEQ ID NO: 632394 - protein, 17 aa, Homo sapiens
  CDR3 for beta chain variable domain of TCR clone 316197 (TRBV5-5, TRBJ1-2)
CASSLGSLDGQSEGYTF

SEQ ID NO: 632395 - protein, 12 aa, Homo sapiens
  CDR3 for alpha chain variable domain of TCR clone 316198 (TRAV20, TRAJ39)
CAVGNAGNMLTF

SEQ ID NO: 632396 - protein, 17 aa, Homo sapiens
  CDR3 for beta chain variable domain of TCR clone 316198 (TRBV4-1, TRBJ2-3)
CASSQGYVSWGTDTQYF

SEQ ID NO: 632397 - protein, 14 aa, Homo sapiens
  CDR3 for alpha chain variable domain of TCR clone 316199 (TRAV26-1, TRAJ30)
CIVRPRNRDDKIIF

SEQ ID NO: 632398 - protein, 20 aa, Homo sapiens
  CDR3 for beta chain variable domain of TCR clone 316199 (TRBV7-8, TRBJ2-2)
CASSHLFPGPTIHITGELFF

SEQ ID NO: 632399 - protein, 12 aa, Homo sapiens
  CDR3 for alpha chain variable domain of TCR clone 316200 (TRAV3, TRAJ27)
CAVRDKEGKSTF

SEQ ID NO: 632400 - protein, 14 aa, Homo sapiens
  CDR3 for beta chain variable domain of TCR clone 316200 (TRBV5-1, TRBJ1-2)
CASSVDSTNYGYTF

SEQ ID NO: 632401 - protein, 15 aa, Homo sapiens
  CDR3 for alpha chain variable domain of TCR clone 316201 (TRAV12-2, TRAJ53)
CAVNGRGGSNYKLTF

SEQ ID NO: 632402 - protein, 13 aa, Homo sapiens
  CDR3 for beta chain variable domain of TCR clone 316201 (TRBV3-1, TRBJ1-1)
CASSPGVITEAFF

SEQ ID NO: 632403 - protein, 13 aa, Homo sapiens
  CDR3 for alpha chain variable domain of TCR clone 316202 (TRAV13-1, TRAJ48)
SASRSFGNEKLTF

SEQ ID NO: 632404 - protein, 15 aa, Homo sapiens
  CDR3 for beta chain variable domain of TCR clone 316202 (TRBV11-3, TRBJ2-2)
CASSLGGRPTGELFF

SEQ ID NO: 632405 - protein, 18 aa, Homo sapiens
  CDR3 for alpha chain variable domain of TCR clone 316203 (TRAV29/DV5, TRAJ52)
CAAGFRGAGGTSYGKLTF

SEQ ID NO: 632406 - protein, 16 aa, Homo sapiens
  CDR3 for beta chain variable domain of TCR clone 316203 (TRBV7-3, TRBJ2-2)
CASSLKRGTLSGELCF

SEQ ID NO: 632407 - protein, 18 aa, Homo sapiens
  CDR3 for alpha chain variable domain of TCR clone 316204 (TRAV13-1, TRAJ52)
CAAKNPNAGGTSYGKLTF

SEQ ID NO: 632408 - protein, 14 aa, Homo sapiens
  CDR3 for beta chain variable domain of TCR clone 316204 (TRBV19, TRBJ2-1)
CASGKSTQYNEQFF

SEQ ID NO: 632409 - protein, 17 aa, Homo sapiens
  CDR3 for alpha chain variable domain of TCR clone 316205 (TRAV4, )
CLVDIQNPDPAVYQLRD

SEQ ID NO: 632410 - protein, 15 aa, Homo sapiens
  CDR3 for beta chain variable domain of TCR clone 316205 (TRBV20-1, TRBJ1-5)
RSASRRGDLGQPQHF

SEQ ID NO: 632411 - protein, 14 aa, Homo sapiens
  CDR3 for alpha chain variable domain of TCR clone 316206 (TRAV12-2, TRAJ45)
CAVNIGGGANGLAF

SEQ ID NO: 632412 - protein, 19 aa, Homo sapiens
  CDR3 for beta chain variable domain of TCR clone 316206 (TRBV13, TRBJ2-6)
CASSLVHRDRGAGANVLTF

SEQ ID NO: 632413 - protein, 16 aa, Homo sapiens
  CDR3 for alpha chain variable domain of TCR clone 316207 (TRAV12-3, TRAJ53)
CAMSPGSGGSNYKLTF

SEQ ID NO: 632414 - protein, 14 aa, Homo sapiens
  CDR3 for beta chain variable domain of TCR clone 316207 (TRBV7-2, TRBJ1-1)
CASSFLTGTTEAVF

SEQ ID NO: 632415 - protein, 16 aa, Homo sapiens
  CDR3 for alpha chain variable domain of TCR clone 316208 (TRAV16, TRAJ52)
CALSAAGGTSYGKLTF

SEQ ID NO: 632416 - protein, 12 aa, Homo sapiens
  CDR3 for beta chain variable domain of TCR clone 316208 (TRBV12-4, TRBJ1-3)
CASSFSGNTKYF

SEQ ID NO: 632417 - protein, 12 aa, Homo sapiens
  CDR3 for alpha chain variable domain of TCR clone 316209 (TRAV35, TRAJ54)
CADLQGAQKLVF

SEQ ID NO: 632418 - protein, 14 aa, Homo sapiens
  CDR3 for beta chain variable domain of TCR clone 316209 (TRBV18, TRBJ2-1)
CASSPQGRFNEQFF

SEQ ID NO: 632419 - protein, 17 aa, Homo sapiens
  CDR3 for alpha chain variable domain of TCR clone 316210 (TRAV2, TRAJ22)
ILQVREADAAEQRQLTF

SEQ ID NO: 632420 - protein, 16 aa, Homo sapiens
  CDR3 for beta chain variable domain of TCR clone 316210 (TRBV2, TRBJ2-5)
CASSETQVVGEETQYF

SEQ ID NO: 632421 - protein, 14 aa, Homo sapiens
  CDR3 for alpha chain variable domain of TCR clone 316211 (TRAV12-2, TRAJ33)
CAVKRARSNYQLIW

SEQ ID NO: 632422 - protein, 12 aa, Homo sapiens
  CDR3 for beta chain variable domain of TCR clone 316211 (TRBV7-8, TRBJ2-7)
CASSLGDREQYF

SEQ ID NO: 632423 - protein, 11 aa, Homo sapiens
  CDR3 for alpha chain variable domain of TCR clone 316212 (TRAV12-3, TRAJ27)
CAMANAGKSTF

SEQ ID NO: 632424 - protein, 18 aa, Homo sapiens
  CDR3 for beta chain variable domain of TCR clone 316212 (TRBV5-1, TRBJ2-1)
CASSLRASGGADYNEQFF

SEQ ID NO: 632425 - protein, 13 aa, Homo sapiens
  CDR3 for alpha chain variable domain of TCR clone 316213 (TRAV2, TRAJ13)
CAVESGGYQKVTF

SEQ ID NO: 632426 - protein, 13 aa, Homo sapiens
  CDR3 for beta chain variable domain of TCR clone 316213 (TRBV28, TRBJ2-5)
CARSFAGGETQYF

SEQ ID NO: 632427 - protein, 14 aa, Homo sapiens
  CDR3 for alpha chain variable domain of TCR clone 316214 (TRAV1-2, TRAJ29)
CAVRELTSATPLVF

SEQ ID NO: 632428 - protein, 13 aa, Homo sapiens
  CDR3 for beta chain variable domain of TCR clone 316214 (TRBV4-3, TRBJ1-1)
CASSQAGNTEAFF

SEQ ID NO: 632429 - protein, 13 aa, Homo sapiens
  CDR3 for alpha chain variable domain of TCR clone 316215 (TRAV27, TRAJ41)
CAGEGNSGYALNF

SEQ ID NO: 632430 - protein, 14 aa, Homo sapiens
  CDR3 for beta chain variable domain of TCR clone 316215 (TRBV25-1, TRBJ1-1)
CARTHLGGNTEAFF

SEQ ID NO: 632431 - protein, 14 aa, Homo sapiens
  CDR3 for alpha chain variable domain of TCR clone 316216 (TRAV12-3, TRAJ10)
SHLPLTGGRNKLTF

SEQ ID NO: 632432 - protein, 12 aa, Homo sapiens
  CDR3 for beta chain variable domain of TCR clone 316216 (TRBV11-2, TRBJ2-2)
CASSLGGGELFF

SEQ ID NO: 632433 - protein, 13 aa, Homo sapiens
  CDR3 for alpha chain variable domain of TCR clone 316217 (TRAV23/DV6, TRAJ24)
CAASTDSWGKFQF

SEQ ID NO: 632434 - protein, 15 aa, Homo sapiens
  CDR3 for beta chain variable domain of TCR clone 316217 (TRBV4-1, TRBJ1-2)
CASSQGQGAAYGYTF

SEQ ID NO: 632435 - protein, 13 aa, Homo sapiens
  CDR3 for alpha chain variable domain of TCR clone 316218 (TRAV3, TRAJ27)
CALRPLGAGKSTF

SEQ ID NO: 632436 - protein, 16 aa, Homo sapiens
  CDR3 for beta chain variable domain of TCR clone 316218 (TRBV12-5, TRBJ2-5)
CASGPRTSGNQETQYF

SEQ ID NO: 632437 - protein, 18 aa, Homo sapiens
  CDR3 for alpha chain variable domain of TCR clone 316219 (TRAV13-1, TRAJ52)
CAAKNPNAGGTSYGKLTF

SEQ ID NO: 632438 - protein, 18 aa, Homo sapiens
  CDR3 for beta chain variable domain of TCR clone 316219 (TRBV7-9, TRBJ2-7)
CASSLTTSGSRTWYEQYF

SEQ ID NO: 632439 - protein, 13 aa, Homo sapiens
  CDR3 for alpha chain variable domain of TCR clone 316220 (TRAV1-2, TRAJ9)
CAALNTGGFKTIF

SEQ ID NO: 632440 - protein, 16 aa, Homo sapiens
  CDR3 for beta chain variable domain of TCR clone 316220 (TRBV19, TRBJ2-1)
CASSIDGSFAYNEQFF

SEQ ID NO: 632441 - protein, 16 aa, Homo sapiens
  CDR3 for alpha chain variable domain of TCR clone 316221 (TRAV30, TRAJ24)
CGTEIVDADSWGKFKF

SEQ ID NO: 632442 - protein, 14 aa, Homo sapiens
  CDR3 for beta chain variable domain of TCR clone 316221 (TRBV5-1, TRBJ1-4)
CASSLDRTHEKLFF

SEQ ID NO: 632443 - protein, 11 aa, Homo sapiens
  CDR3 for alpha chain variable domain of TCR clone 316222 (TRAV8-6, TRAJ34)
CAVWNTDKLIF

SEQ ID NO: 632444 - protein, 16 aa, Homo sapiens
  CDR3 for beta chain variable domain of TCR clone 316222 (TRBV5-1, TRBJ2-7)
CASSYASTSSGGEQYL

SEQ ID NO: 632445 - protein, 10 aa, Homo sapiens
  CDR3 for alpha chain variable domain of TCR clone 316223 (TRAV23/DV6, TRAJ10)
CAASIGTHGR

SEQ ID NO: 632446 - protein, 13 aa, Homo sapiens
  CDR3 for beta chain variable domain of TCR clone 316223 (TRBV11-1, TRBJ1-2)
CASVGSRGYGYTF

SEQ ID NO: 632447 - protein, 11 aa, Homo sapiens
  CDR3 for alpha chain variable domain of TCR clone 316224 (TRAV12-1, TRAJ34)
CVVNKGRELIF

SEQ ID NO: 632448 - protein, 14 aa, Homo sapiens
  CDR3 for beta chain variable domain of TCR clone 316224 (TRBV18, TRBJ2-5)
CASSPGVSQETQYF

SEQ ID NO: 632449 - protein, 15 aa, Homo sapiens
  CDR3 for alpha chain variable domain of TCR clone 316225 (TRAV12-2, TRAJ56)
CAVNPFTGANSKLSF

SEQ ID NO: 632450 - protein, 13 aa, Homo sapiens
  CDR3 for beta chain variable domain of TCR clone 316225 (TRBV20-1, TRBJ1-2)
CSARDRVYGGYTF

SEQ ID NO: 632451 - protein, 11 aa, Homo sapiens
  CDR3 for alpha chain variable domain of TCR clone 316226 (TRAV12-1, TRAJ30)
CVVNGQDKIIF

SEQ ID NO: 632452 - protein, 12 aa, Homo sapiens
  CDR3 for beta chain variable domain of TCR clone 316226 (TRBV27, TRBJ2-2)
CASKFFTGELFF

SEQ ID NO: 632453 - protein, 15 aa, Homo sapiens
  CDR3 for alpha chain variable domain of TCR clone 316227 (TRAV13-2, TRAJ10)
CAEERDTGGGNKLTF

SEQ ID NO: 632454 - protein, 16 aa, Homo sapiens
  CDR3 for beta chain variable domain of TCR clone 316227 (TRBV2, TRBJ1-3)
CASSRTGGSTGNTIYF

SEQ ID NO: 632455 - protein, 11 aa, Homo sapiens
  CDR3 for alpha chain variable domain of TCR clone 316228 (TRAV12-1, TRAJ34)
CVVNKGRELIF

SEQ ID NO: 632456 - protein, 17 aa, Homo sapiens
  CDR3 for beta chain variable domain of TCR clone 316228 (TRBV28, TRBJ2-5)
CASSTPEGDALQETQYF

SEQ ID NO: 632457 - protein, 16 aa, Homo sapiens
  CDR3 for alpha chain variable domain of TCR clone 316229 (TRAV3, TRAJ37)
CAVRGKGSGNTGKLIF

SEQ ID NO: 632458 - protein, 12 aa, Homo sapiens
  CDR3 for beta chain variable domain of TCR clone 316229 (TRBV6-3, TRBJ2-7)
CASSLTPYEQYF

SEQ ID NO: 632459 - protein, 12 aa, Homo sapiens
  CDR3 for alpha chain variable domain of TCR clone 316230 (TRAV1-2, TRAJ26)
CAVRYYGQNFVF

SEQ ID NO: 632460 - protein, 14 aa, Homo sapiens
  CDR3 for beta chain variable domain of TCR clone 316230 (TRBV11-1, TRBJ2-7)
CASSFGQGSYEQYF

SEQ ID NO: 632461 - protein, 15 aa, Homo sapiens
  CDR3 for alpha chain variable domain of TCR clone 316231 (TRAV17, TRAJ23)
CATDAEDNQGGKLIF

SEQ ID NO: 632462 - protein, 16 aa, Homo sapiens
  CDR3 for beta chain variable domain of TCR clone 316231 (TRBV2, TRBJ2-3)
CASSTSVEGVTDTQYF

SEQ ID NO: 632463 - protein, 14 aa, Homo sapiens
  CDR3 for alpha chain variable domain of TCR clone 316232 (TRAV1-2, TRAJ16)
CAVNRFSDGQKLLF

SEQ ID NO: 632464 - protein, 15 aa, Homo sapiens
  CDR3 for beta chain variable domain of TCR clone 316232 (TRBV5-1, TRBJ2-2)
YASSLFGQNTGELFF

SEQ ID NO: 632465 - protein, 14 aa, Homo sapiens
  CDR3 for alpha chain variable domain of TCR clone 316233 (TRAV2, TRAJ9)
CAVEDRSGGFKTIF

SEQ ID NO: 632466 - protein, 13 aa, Homo sapiens
  CDR3 for beta chain variable domain of TCR clone 316233 (TRBV19, TRBJ1-2)
CASSVPGQDGYIF

SEQ ID NO: 632467 - protein, 15 aa, Homo sapiens
  CDR3 for alpha chain variable domain of TCR clone 316234 (TRAV8-4, TRAJ37)
CAVSRGSGNTGTLIF

SEQ ID NO: 632468 - protein, 16 aa, Homo sapiens
  CDR3 for beta chain variable domain of TCR clone 316234 (TRBV7-3, TRBJ2-3)
CASSLSGYRPEDTQYF

SEQ ID NO: 632469 - protein, 11 aa, Homo sapiens
  CDR3 for alpha chain variable domain of TCR clone 316235 (TRAV3, TRAJ21)
CAVGNFNKSYF

SEQ ID NO: 632470 - protein, 16 aa, Homo sapiens
  CDR3 for beta chain variable domain of TCR clone 316235 (TRBV2, TRBJ2-1)
CASSVGGSLSYNEQFF

SEQ ID NO: 632471 - protein, 17 aa, Homo sapiens
  CDR3 for alpha chain variable domain of TCR clone 316236 (TRAV12-1, TRAJ42)
CVVNMQRKGGSQGNLIF

SEQ ID NO: 632472 - protein, 12 aa, Homo sapiens
  CDR3 for beta chain variable domain of TCR clone 316236 (TRBV11-2, TRBJ2-2)
CASSLGGGELFF

SEQ ID NO: 632473 - protein, 16 aa, Homo sapiens
  CDR3 for alpha chain variable domain of TCR clone 316237 (TRAV1-2, TRAJ10)
CAVRGVLTGGGNKLTL

SEQ ID NO: 632474 - protein, 12 aa, Homo sapiens
  CDR3 for beta chain variable domain of TCR clone 316237 (TRBV7-8, TRBJ2-7)
CAISLGDREQYF

SEQ ID NO: 632475 - protein, 16 aa, Homo sapiens
  CDR3 for alpha chain variable domain of TCR clone 316238 (TRAV16, TRAJ57)
CAPYLITQGGSEKLVF

SEQ ID NO: 632476 - protein, 14 aa, Homo sapiens
  CDR3 for beta chain variable domain of TCR clone 316238 (TRBV4-2, TRBJ2-3)
CASSQERGTDTQYF

SEQ ID NO: 632477 - protein, 15 aa, Homo sapiens
  CDR3 for alpha chain variable domain of TCR clone 316239 (TRAV26-1, TRAJ44)
CIVGANTGTASKLTF

SEQ ID NO: 632478 - protein, 15 aa, Homo sapiens
  CDR3 for beta chain variable domain of TCR clone 316239 (TRBV15, TRBJ1-5)
CATSREQGGNQPQHF

SEQ ID NO: 632479 - protein, 12 aa, Homo sapiens
  CDR3 for alpha chain variable domain of TCR clone 316240 (TRAV8-3, TRAJ6)
CDVAGGSYIPTF

SEQ ID NO: 632480 - protein, 14 aa, Homo sapiens
  CDR3 for beta chain variable domain of TCR clone 316240 (TRBV27, TRBJ2-7)
CASATGTERREQYF

SEQ ID NO: 632481 - protein, 16 aa, Homo sapiens
  CDR3 for alpha chain variable domain of TCR clone 316241 (TRAV3, TRAJ21)
CAVRDIERGNFNKFYF

SEQ ID NO: 632482 - protein, 15 aa, Homo sapiens
  CDR3 for beta chain variable domain of TCR clone 316241 (TRBV7-6, TRBJ2-5)
CASSKPTGPQETQYF

SEQ ID NO: 632483 - protein, 14 aa, Homo sapiens
  CDR3 for alpha chain variable domain of TCR clone 316242 (TRAV8-6, TRAJ9)
CAVTRNTGGFKTIF

SEQ ID NO: 632484 - protein, 19 aa, Homo sapiens
  CDR3 for beta chain variable domain of TCR clone 316242 (TRBV25-1, TRBJ2-2)
CAILVYRVDRGRKTGELFF

SEQ ID NO: 632485 - protein, 14 aa, Homo sapiens
  CDR3 for alpha chain variable domain of TCR clone 316243 (TRAV8-2, TRAJ11)
CVVSEKSGYSTLTF

SEQ ID NO: 632486 - protein, 16 aa, Homo sapiens
  CDR3 for beta chain variable domain of TCR clone 316243 (TRBV28, TRBJ2-1)
CASSSAEYPRDNEQFF

SEQ ID NO: 632487 - protein, 16 aa, Homo sapiens
  CDR3 for alpha chain variable domain of TCR clone 316244 (TRAV12-3, TRAJ53)
CAMSPGSGGSNYKLTF

SEQ ID NO: 632488 - protein, 14 aa, Homo sapiens
  CDR3 for beta chain variable domain of TCR clone 316244 (TRBV2, TRBJ2-7)
CASSLTSGGYEQYL

SEQ ID NO: 632489 - protein, 11 aa, Homo sapiens
  CDR3 for alpha chain variable domain of TCR clone 316245 (TRAV35, TRAJ34)
CWSRNTDKLIF

SEQ ID NO: 632490 - protein, 12 aa, Homo sapiens
  CDR3 for beta chain variable domain of TCR clone 316245 (TRBV12-5, TRBJ2-5)
CASGQGVETQYF

SEQ ID NO: 632491 - protein, 12 aa, Homo sapiens
  CDR3 for alpha chain variable domain of TCR clone 316246 (TRAV12-3, TRAJ17)
CAMTLTGNKLTF

SEQ ID NO: 632492 - protein, 14 aa, Homo sapiens
  CDR3 for beta chain variable domain of TCR clone 316246 (TRBV4-1, TRBJ2-7)
CASSQDRENVEQYF

SEQ ID NO: 632493 - protein, 14 aa, Homo sapiens
  CDR3 for alpha chain variable domain of TCR clone 316247 (TRAV1-2, TRAJ16)
CAVNRFSDGQKLLF

SEQ ID NO: 632494 - protein, 20 aa, Homo sapiens
  CDR3 for beta chain variable domain of TCR clone 316247 (TRBV7-8, TRBJ2-2)
CASSHLFPGPTSHITGELFF

SEQ ID NO: 632495 - protein, 15 aa, Homo sapiens
  CDR3 for alpha chain variable domain of TCR clone 316248 (TRAV8-6, TRAJ38)
CAVSSNAGNNRKLIW

SEQ ID NO: 632496 - protein, 11 aa, Homo sapiens
  CDR3 for beta chain variable domain of TCR clone 316248 (TRBV29-1, TRBJ2-5)
CSEDRTGTQYF

SEQ ID NO: 632497 - protein, 16 aa, Homo sapiens
  CDR3 for alpha chain variable domain of TCR clone 316249 (TRAV20, TRAJ26)
CAVQHRRDNYGQNFVF

SEQ ID NO: 632498 - protein, 16 aa, Homo sapiens
  CDR3 for beta chain variable domain of TCR clone 316249 (TRBV13, TRBJ2-3)
CASSLSRVAGRNTQYF

SEQ ID NO: 632499 - protein, 16 aa, Homo sapiens
  CDR3 for alpha chain variable domain of TCR clone 316250 (TRAV3, TRAJ23)
CALEPLIYNQGGKLIF

SEQ ID NO: 632500 - protein, 15 aa, Homo sapiens
  CDR3 for beta chain variable domain of TCR clone 316250 (TRBV19, TRBJ1-5)
CASSPEGRPNQPQHF

SEQ ID NO: 632501 - protein, 16 aa, Homo sapiens
  CDR3 for alpha chain variable domain of TCR clone 316251 (TRAV3, TRAJ10)
CAVRDMRAGGGNKLTF

SEQ ID NO: 632502 - protein, 14 aa, Homo sapiens
  CDR3 for beta chain variable domain of TCR clone 316251 (TRBV7-2, TRBJ1-4)
CATSVVEGGEKLFF

SEQ ID NO: 632503 - protein, 15 aa, Homo sapiens
  CDR3 for alpha chain variable domain of TCR clone 316252 (TRAV17, TRAJ56)
CATEPFTGDNSKLTF

SEQ ID NO: 632504 - protein, 15 aa, Homo sapiens
  CDR3 for beta chain variable domain of TCR clone 316252 (TRBV28, TRBJ1-5)
CASSRTGGYVQPQHF

SEQ ID NO: 632505 - protein, 23 aa, Homo sapiens
  CDR3 for alpha chain variable domain of TCR clone 316253 (TRAV8-6, TRAJ38)
CAVRNAGNNHIQNPDPAVYPLTD

SEQ ID NO: 632506 - protein, 15 aa, Homo sapiens
  CDR3 for beta chain variable domain of TCR clone 316253 (TRBV4-1, TRBJ2-2)
CASSEGQGITGELFF

SEQ ID NO: 632507 - protein, 13 aa, Homo sapiens
  CDR3 for alpha chain variable domain of TCR clone 316254 (TRAV8-3, TRAJ43)
CAVVPYNNNDIRF

SEQ ID NO: 632508 - protein, 16 aa, Homo sapiens
  CDR3 for beta chain variable domain of TCR clone 316254 (TRBV2, TRBJ2-1)
CASSVGGSLSYNEQFF

SEQ ID NO: 632509 - protein, 12 aa, Homo sapiens
  CDR3 for alpha chain variable domain of TCR clone 316255 (TRAV38-2/DV8, TRAJ57)
CAWKGGSEKLVF

SEQ ID NO: 632510 - protein, 13 aa, Homo sapiens
  CDR3 for beta chain variable domain of TCR clone 316255 (TRBV5-1, TRBJ1-5)
CAGSLAQDQPQHF

SEQ ID NO: 632511 - protein, 14 aa, Homo sapiens
  CDR3 for alpha chain variable domain of TCR clone 316256 (TRAV13-1, TRAJ32)
CAAMGSGATNKLIF

SEQ ID NO: 632512 - protein, 15 aa, Homo sapiens
  CDR3 for beta chain variable domain of TCR clone 316256 (TRBV5-5, TRBJ1-1)
CASSLVGKDNTEAFF

SEQ ID NO: 632513 - protein, 17 aa, Homo sapiens
  CDR3 for alpha chain variable domain of TCR clone 316257 (TRAV3, TRAJ6)
CAVRDGPRAGGSYIPTF

SEQ ID NO: 632514 - protein, 12 aa, Homo sapiens
  CDR3 for beta chain variable domain of TCR clone 316257 (TRBV11-2, TRBJ2-1)
CASSVQREGQFF

SEQ ID NO: 632515 - protein, 14 aa, Homo sapiens
  CDR3 for alpha chain variable domain of TCR clone 316258 (TRAV26-1, TRAJ38)
CIADHAGNNRKLLW

SEQ ID NO: 632516 - protein, 15 aa, Homo sapiens
  CDR3 for beta chain variable domain of TCR clone 316258 (TRBV7-6, TRBJ1-4)
CASSLGAGAGEKLFF

SEQ ID NO: 632517 - protein, 14 aa, Homo sapiens
  CDR3 for alpha chain variable domain of TCR clone 316259 (TRAV8-1, TRAJ5)
CAVRTDTGRRALTF

SEQ ID NO: 632518 - protein, 13 aa, Homo sapiens
  CDR3 for beta chain variable domain of TCR clone 316259 (TRBV7-3, TRBJ1-1)
CASSQDWGAEAFF

SEQ ID NO: 632519 - protein, 10 aa, Homo sapiens
  CDR3 for alpha chain variable domain of TCR clone 316260 (TRAV26-1, TRAJ40)
CIAGTYKYIF

SEQ ID NO: 632520 - protein, 14 aa, Homo sapiens
  CDR3 for beta chain variable domain of TCR clone 316260 (TRBV7-3, TRBJ2-1)
CASSLGTSANEQFF

SEQ ID NO: 632521 - protein, 11 aa, Homo sapiens
  CDR3 for alpha chain variable domain of TCR clone 316261 (TRAV23/DV6, TRAJ9)
CAVSLSPPNTG

SEQ ID NO: 632522 - protein, 15 aa, Homo sapiens
  CDR3 for beta chain variable domain of TCR clone 316261 (TRBV2, TRBJ2-7)
CASSEGLARSYEQYF

SEQ ID NO: 632523 - protein, 15 aa, Homo sapiens
  CDR3 for alpha chain variable domain of TCR clone 316262 (TRAV21, TRAJ40)
CAVRPQTSGTYKYIF

SEQ ID NO: 632524 - protein, 13 aa, Homo sapiens
  CDR3 for beta chain variable domain of TCR clone 316262 (TRBV7-2, TRBJ2-2)
CASSSIRAGELFF

SEQ ID NO: 632525 - protein, 14 aa, Homo sapiens
  CDR3 for alpha chain variable domain of TCR clone 316263 (TRAV12-1, TRAJ17)
CVVNYKAAGNKLTF

SEQ ID NO: 632526 - protein, 13 aa, Homo sapiens
  CDR3 for beta chain variable domain of TCR clone 316263 (TRBV7-6, TRBJ2-3)
CASSHDTKDTQYF

SEQ ID NO: 632527 - protein, 14 aa, Homo sapiens
  CDR3 for alpha chain variable domain of TCR clone 316264 (TRAV1-2, TRAJ8)
CAVREDTGFKKLVF

SEQ ID NO: 632528 - protein, 13 aa, Homo sapiens
  CDR3 for beta chain variable domain of TCR clone 316264 (TRBV27, TRBJ2-7)
CASSLTTGYEQYF

SEQ ID NO: 632529 - protein, 15 aa, Homo sapiens
  CDR3 for alpha chain variable domain of TCR clone 316265 (TRAV29/DV5, TRAJ29)
FAASERSSGNTPLVF

SEQ ID NO: 632530 - protein, 13 aa, Homo sapiens
  CDR3 for beta chain variable domain of TCR clone 316265 (TRBV12-4, TRBJ2-2)
CASSITGSGELFF

SEQ ID NO: 632531 - protein, 16 aa, Homo sapiens
  CDR3 for alpha chain variable domain of TCR clone 316266 (TRAV12-3, TRAJ53)
CALSPGGGGSNYKLTF

SEQ ID NO: 632532 - protein, 13 aa, Homo sapiens
  CDR3 for beta chain variable domain of TCR clone 316266 (TRBV10-3, TRBJ2-7)
CASKRAVNYEQYF

SEQ ID NO: 632533 - protein, 14 aa, Homo sapiens
  CDR3 for alpha chain variable domain of TCR clone 316267 (TRAV16, TRAJ37)
CALDISGNTGKLIF

SEQ ID NO: 632534 - protein, 14 aa, Homo sapiens
  CDR3 for beta chain variable domain of TCR clone 316267 (TRBV7-6, TRBJ2-7)
CASSFGQGADEQYF

SEQ ID NO: 632535 - protein, 16 aa, Homo sapiens
  CDR3 for alpha chain variable domain of TCR clone 316268 (TRAV17, TRAJ9)
CATGEWGGTGGFKTIF

SEQ ID NO: 632536 - protein, 15 aa, Homo sapiens
  CDR3 for beta chain variable domain of TCR clone 316268 (TRBV20-1, TRBJ1-2)
CSASDSRGRNYGYTF

SEQ ID NO: 632537 - protein, 14 aa, Homo sapiens
  CDR3 for alpha chain variable domain of TCR clone 316269 (TRAV13-1, TRAJ48)
CAASTDFGNEKLTF

SEQ ID NO: 632538 - protein, 15 aa, Homo sapiens
  CDR3 for beta chain variable domain of TCR clone 316269 (TRBV10-3, TRBJ2-5)
CAISEFGRGQETQYF

SEQ ID NO: 632539 - protein, 12 aa, Homo sapiens
  CDR3 for alpha chain variable domain of TCR clone 316270 (TRAV17, TRAJ4)
CAVSGGYNKRIF

SEQ ID NO: 632540 - protein, 13 aa, Homo sapiens
  CDR3 for beta chain variable domain of TCR clone 316270 (TRBV6-1, TRBJ1-1)
CASSEGWGTEAFF

SEQ ID NO: 632541 - protein, 14 aa, Homo sapiens
  CDR3 for alpha chain variable domain of TCR clone 316271 (TRAV12-2, TRAJ13)
CAVKKTGGYQKVTF

SEQ ID NO: 632542 - protein, 18 aa, Homo sapiens
  CDR3 for beta chain variable domain of TCR clone 316271 (TRBV4-1, TRBJ2-3)
CASSHQLAGGRSTDTQYF

SEQ ID NO: 632543 - protein, 13 aa, Homo sapiens
  CDR3 for alpha chain variable domain of TCR clone 316272 (TRAV12-3, TRAJ13)
CAMSSGGYQKVTF

SEQ ID NO: 632544 - protein, 13 aa, Homo sapiens
  CDR3 for beta chain variable domain of TCR clone 316272 (TRBV20-1, TRBJ1-1)
CSAPPGAHTEAFF

SEQ ID NO: 632545 - protein, 13 aa, Homo sapiens
  CDR3 for alpha chain variable domain of TCR clone 316273 (TRAV12-3, TRAJ33)
CAMSVNSNYQLIW

SEQ ID NO: 632546 - protein, 13 aa, Homo sapiens
  CDR3 for beta chain variable domain of TCR clone 316273 (TRBV4-1, TRBJ2-2)
CVSSQVNTGELFF

SEQ ID NO: 632547 - protein, 13 aa, Homo sapiens
  CDR3 for alpha chain variable domain of TCR clone 316274 (TRAV21, TRAJ57)
CAVTQVGSEKLVF

SEQ ID NO: 632548 - protein, 16 aa, Homo sapiens
  CDR3 for beta chain variable domain of TCR clone 316274 (TRBV11-2, TRBJ2-1)
CASSVTADFSYNEQFF

SEQ ID NO: 632549 - protein, 16 aa, Homo sapiens
  CDR3 for alpha chain variable domain of TCR clone 316275 (TRAV38-1, TRAJ32)
CAFMKGGGGAQNKIFF

SEQ ID NO: 632550 - protein, 13 aa, Homo sapiens
  CDR3 for beta chain variable domain of TCR clone 316275 (TRBV20-1, TRBJ2-5)
CSAREAFQETQYF

SEQ ID NO: 632551 - protein, 14 aa, Homo sapiens
  CDR3 for alpha chain variable domain of TCR clone 316276 (TRAV2, TRAJ39)
CDVEGDNAGNMLTF

SEQ ID NO: 632552 - protein, 14 aa, Homo sapiens
  CDR3 for beta chain variable domain of TCR clone 316276 (TRBV28, TRBJ2-7)
CASSLRARGNEQYF

SEQ ID NO: 632553 - protein, 14 aa, Homo sapiens
  CDR3 for alpha chain variable domain of TCR clone 316277 (TRAV13-1, TRAJ9)
CAASALTGGFKTIF

SEQ ID NO: 632554 - protein, 16 aa, Homo sapiens
  CDR3 for beta chain variable domain of TCR clone 316277 (TRBV19, TRBJ2-1)
CASSKAGPSSYNEQFF

SEQ ID NO: 632555 - protein, 14 aa, Homo sapiens
  CDR3 for alpha chain variable domain of TCR clone 316278 (TRAV12-2, TRAJ40)
CAVKLPSGTYKYIF

SEQ ID NO: 632556 - protein, 20 aa, Homo sapiens
  CDR3 for beta chain variable domain of TCR clone 316278 (TRBV28, TRBJ2-1)
CASTPIGRSPGLAGGNEQFF

SEQ ID NO: 632557 - protein, 12 aa, Homo sapiens
  CDR3 for alpha chain variable domain of TCR clone 316279 (TRAV12-1, TRAJ40)
CVVYSGAYKDIF

SEQ ID NO: 632558 - protein, 18 aa, Homo sapiens
  CDR3 for beta chain variable domain of TCR clone 316279 (TRBV11-2, TRBJ2-3)
CASSLGGASRGAPNTQYF

SEQ ID NO: 632559 - protein, 17 aa, Homo sapiens
  CDR3 for alpha chain variable domain of TCR clone 316280 (TRAV13-1, TRAJ52)
CAASSGAGGTSYGKLTF

SEQ ID NO: 632560 - protein, 16 aa, Homo sapiens
  CDR3 for beta chain variable domain of TCR clone 316280 (TRBV5-5, TRBJ1-2)
CASSPTWGRGLYGYTF

SEQ ID NO: 632561 - protein, 16 aa, Homo sapiens
  CDR3 for alpha chain variable domain of TCR clone 316281 (TRAV2, TRAJ4)
CAVEDRFSGGYNKLIF

SEQ ID NO: 632562 - protein, 15 aa, Homo sapiens
  CDR3 for beta chain variable domain of TCR clone 316281 (TRBV4-1, TRBJ1-4)
CASSDTGGTNEKLFF

SEQ ID NO: 632563 - protein, 17 aa, Homo sapiens
  CDR3 for alpha chain variable domain of TCR clone 316282 (TRAV3, TRAJ6)
CAVRDGPRAGGGYIHTF

SEQ ID NO: 632564 - protein, 14 aa, Homo sapiens
  CDR3 for beta chain variable domain of TCR clone 316282 (TRBV7-2, TRBJ2-7)
CASSPKTSFYEQYF

SEQ ID NO: 632565 - protein, 15 aa, Homo sapiens
  CDR3 for alpha chain variable domain of TCR clone 316283 (TRAV12-2, TRAJ53)
CAVNGGGGSNYKLTF

SEQ ID NO: 632566 - protein, 16 aa, Homo sapiens
  CDR3 for beta chain variable domain of TCR clone 316283 (TRBV20-1, TRBJ2-1)
CSAPGLAGSYSDEQFF

SEQ ID NO: 632567 - protein, 15 aa, Homo sapiens
  CDR3 for alpha chain variable domain of TCR clone 316284 (TRAV10, TRAJ6)
CVVRPRTGGSYIPTF

SEQ ID NO: 632568 - protein, 15 aa, Homo sapiens
  CDR3 for beta chain variable domain of TCR clone 316284 (TRBV20-1, TRBJ2-7)
CSARDRVSGTDEQYF

SEQ ID NO: 632569 - protein, 14 aa, Homo sapiens
  CDR3 for alpha chain variable domain of TCR clone 316285 (TRAV1-2, TRAJ16)
CAVNRFSDGQKLHF

SEQ ID NO: 632570 - protein, 12 aa, Homo sapiens
  CDR3 for beta chain variable domain of TCR clone 316285 (TRBV6-5, TRBJ2-5)
CASSEGSETQYF

SEQ ID NO: 632571 - protein, 14 aa, Homo sapiens
  CDR3 for alpha chain variable domain of TCR clone 316286 (TRAV17, TRAJ12)
CAILPMDSSYKLIF

SEQ ID NO: 632572 - protein, 14 aa, Homo sapiens
  CDR3 for beta chain variable domain of TCR clone 316286 (TRBV7-9, TRBJ2-5)
CASSLDTAQETQYF

SEQ ID NO: 632573 - protein, 12 aa, Homo sapiens
  CDR3 for alpha chain variable domain of TCR clone 316287 (TRAV21, TRAJ33)
CAKMDSNYQLIW

SEQ ID NO: 632574 - protein, 14 aa, Homo sapiens
  CDR3 for beta chain variable domain of TCR clone 316287 (TRBV20-1, TRBJ2-5)
CSALVPGYQETQYF

SEQ ID NO: 632575 - protein, 14 aa, Homo sapiens
  CDR3 for alpha chain variable domain of TCR clone 316288 (TRAV35, TRAJ50)
CAGHRKTSYDKAIF

SEQ ID NO: 632576 - protein, 15 aa, Homo sapiens
  CDR3 for beta chain variable domain of TCR clone 316288 (TRBV6-3, TRBJ2-7)
CASSSPGTVFYEQYF

SEQ ID NO: 632577 - protein, 18 aa, Homo sapiens
  CDR3 for alpha chain variable domain of TCR clone 316289 (TRAV13-1, TRAJ52)
CAAKNPNAGGTSYGKLTF

SEQ ID NO: 632578 - protein, 11 aa, Homo sapiens
  CDR3 for beta chain variable domain of TCR clone 316289 (TRBV29-1, TRBJ2-5)
CSEDRTGTQCF

SEQ ID NO: 632579 - protein, 14 aa, Homo sapiens
  CDR3 for alpha chain variable domain of TCR clone 316290 (TRAV17, TRAJ42)
CAQNYGGSQGNLIF

SEQ ID NO: 632580 - protein, 13 aa, Homo sapiens
  CDR3 for beta chain variable domain of TCR clone 316290 (TRBV20-1, TRBJ1-2)
CSAPRSGRYGYSF

SEQ ID NO: 632581 - protein, 14 aa, Homo sapiens
  CDR3 for alpha chain variable domain of TCR clone 316291 (TRAV3, TRAJ40)
CAVRDRRGTYKYIF

SEQ ID NO: 632582 - protein, 13 aa, Homo sapiens
  CDR3 for beta chain variable domain of TCR clone 316291 (TRBV7-7, TRBJ2-5)
CASSRSGQETQYF

SEQ ID NO: 632583 - protein, 14 aa, Homo sapiens
  CDR3 for alpha chain variable domain of TCR clone 316292 (TRAV23/DV6, TRAJ37)
CAASTSSNTGKLIF

SEQ ID NO: 632584 - protein, 15 aa, Homo sapiens
  CDR3 for beta chain variable domain of TCR clone 316292 (TRBV7-9, TRBJ2-7)
CASSHGGGLTYEQYF

SEQ ID NO: 632585 - protein, 17 aa, Homo sapiens
  CDR3 for alpha chain variable domain of TCR clone 316293 (TRAV3, TRAJ6)
CAVRDGPRAGGSYIPTF

SEQ ID NO: 632586 - protein, 18 aa, Homo sapiens
  CDR3 for beta chain variable domain of TCR clone 316293 (TRBV7-9, TRBJ2-7)
SASSLTTSGSRTWYEQYF

SEQ ID NO: 632587 - protein, 16 aa, Homo sapiens
  CDR3 for alpha chain variable domain of TCR clone 316294 (TRAV13-1, TRAJ22)
CAAKGGRSGAARQLTF

SEQ ID NO: 632588 - protein, 15 aa, Homo sapiens
  CDR3 for beta chain variable domain of TCR clone 316294 (TRBV9, TRBJ1-6)
CASSVAGTGDSPLHF

SEQ ID NO: 632589 - protein, 14 aa, Homo sapiens
  CDR3 for alpha chain variable domain of TCR clone 316295 (TRAV12-2, TRAJ40)
CAVKIPSGTYKYIF

SEQ ID NO: 632590 - protein, 15 aa, Homo sapiens
  CDR3 for beta chain variable domain of TCR clone 316295 (TRBV20-1, TRBJ1-1)
CSASRGVTGNTEAFF

SEQ ID NO: 632591 - protein, 16 aa, Homo sapiens
  CDR3 for alpha chain variable domain of TCR clone 316296 (TRAV26-1, TRAJ36)
CIVRVSYQTGANNLFF

SEQ ID NO: 632592 - protein, 13 aa, Homo sapiens
  CDR3 for beta chain variable domain of TCR clone 316296 (TRBV2, TRBJ1-1)
CASSVSGYTEAFF

SEQ ID NO: 632593 - protein, 11 aa, Homo sapiens
  CDR3 for alpha chain variable domain of TCR clone 316297 (TRAV12-1, TRAJ31)
CVVNEQCQTHV

SEQ ID NO: 632594 - protein, 16 aa, Homo sapiens
  CDR3 for beta chain variable domain of TCR clone 316297 (TRBV20-1, TRBJ1-4)
CSAPGQGLLTNEKLFF

SEQ ID NO: 632595 - protein, 14 aa, Homo sapiens
  CDR3 for alpha chain variable domain of TCR clone 316298 (TRAV3, TRAJ9)
CAVSLNTGGFKTIF

SEQ ID NO: 632596 - protein, 15 aa, Homo sapiens
  CDR3 for beta chain variable domain of TCR clone 316298 (TRBV19, TRBJ1-2)
CASSVGQVLNYGYTF

SEQ ID NO: 632597 - protein, 13 aa, Homo sapiens
  CDR3 for alpha chain variable domain of TCR clone 316299 (TRAV35, TRAJ36)
CAGPRIGANNLFF

SEQ ID NO: 632598 - protein, 15 aa, Homo sapiens
  CDR3 for beta chain variable domain of TCR clone 316299 (TRBV28, TRBJ2-5)
CASSPPWSYHETQYF

SEQ ID NO: 632599 - protein, 15 aa, Homo sapiens
  CDR3 for alpha chain variable domain of TCR clone 316300 (TRAV12-2, TRAJ43)
CAFDMRFGAGTRLTV

SEQ ID NO: 632600 - protein, 14 aa, Homo sapiens
  CDR3 for beta chain variable domain of TCR clone 316300 (TRBV7-9, TRBJ2-7)
CASSLVAGPYEQYF

SEQ ID NO: 632601 - protein, 16 aa, Homo sapiens
  CDR3 for alpha chain variable domain of TCR clone 316301 (TRAV21, TRAJ37)
CAVRPRGSSNTGKLIF

SEQ ID NO: 632602 - protein, 15 aa, Homo sapiens
  CDR3 for beta chain variable domain of TCR clone 316301 (TRBV10-2, TRBJ2-6)
CASSEQGTGANVLTF

SEQ ID NO: 632603 - protein, 16 aa, Homo sapiens
  CDR3 for alpha chain variable domain of TCR clone 316302 (TRAV26-1, TRAJ38)
CIVRVSGSGNNRKLIW

SEQ ID NO: 632604 - protein, 13 aa, Homo sapiens
  CDR3 for beta chain variable domain of TCR clone 316302 (TRBV14, TRBJ1-2)
CASSQDRRRGYTF

SEQ ID NO: 632605 - protein, 15 aa, Homo sapiens
  CDR3 for alpha chain variable domain of TCR clone 316303 (TRAV27, TRAJ38)
CAARRNAGNNRTPIW

SEQ ID NO: 632606 - protein, 13 aa, Homo sapiens
  CDR3 for beta chain variable domain of TCR clone 316303 (TRBV12-5, TRBJ2-3)
CASGDRQSDTQYF

SEQ ID NO: 632607 - protein, 20 aa, Homo sapiens
  CDR3 for alpha chain variable domain of TCR clone 316304 (TRAV1-1, TRAJ4)
CLLLLRCEGFLSGGYNKLIF

SEQ ID NO: 632608 - protein, 12 aa, Homo sapiens
  CDR3 for beta chain variable domain of TCR clone 316304 (TRBV11-2, TRBJ2-2)
CASSLGGGELFF

SEQ ID NO: 632609 - protein, 12 aa, Homo sapiens
  CDR3 for alpha chain variable domain of TCR clone 316305 (TRAV27, TRAJ37)
CADSGSTGNLIF

SEQ ID NO: 632610 - protein, 18 aa, Homo sapiens
  CDR3 for beta chain variable domain of TCR clone 316305 (TRBV7-9, TRBJ1-1)
CASSKPWDTMGMNTEAFF

SEQ ID NO: 632611 - protein, 14 aa, Homo sapiens
  CDR3 for alpha chain variable domain of TCR clone 316306 (TRAV1-2, TRAJ16)
CAVNRFSDGQKLLF

SEQ ID NO: 632612 - protein, 15 aa, Homo sapiens
  CDR3 for beta chain variable domain of TCR clone 316306 (TRBV11-3, TRBJ2-3)
CASSAGTVVTNTQYF

SEQ ID NO: 632613 - protein, 16 aa, Homo sapiens
  CDR3 for alpha chain variable domain of TCR clone 316307 (TRAV30, TRAJ24)
CGTEIVDADSWGKLQF

SEQ ID NO: 632614 - protein, 15 aa, Homo sapiens
  CDR3 for beta chain variable domain of TCR clone 316307 (TRBV29-1, TRBJ2-7)
CSVEFFDRGSYEQYF

SEQ ID NO: 632615 - protein, 14 aa, Homo sapiens
  CDR3 for alpha chain variable domain of TCR clone 316308 (TRAV40, TRAJ31)
CLLGDQNNNARPMF

SEQ ID NO: 632616 - protein, 15 aa, Homo sapiens
  CDR3 for beta chain variable domain of TCR clone 316308 (TRBV20-1, TRBJ2-1)
CSATSSGTSGGEQFF

SEQ ID NO: 632617 - protein, 14 aa, Homo sapiens
  CDR3 for alpha chain variable domain of TCR clone 316309 (TRAV1-2, TRAJ16)
CAVNRFSDGQKRLF

SEQ ID NO: 632618 - protein, 13 aa, Homo sapiens
  CDR3 for beta chain variable domain of TCR clone 316309 (TRBV7-2, TRBJ1-1)
CASNLKGAKVAFF

SEQ ID NO: 632619 - protein, 13 aa, Homo sapiens
  CDR3 for alpha chain variable domain of TCR clone 316310 (TRAV12-2, TRAJ54)
CAVNRRGAQKLVF

SEQ ID NO: 632620 - protein, 18 aa, Homo sapiens
  CDR3 for beta chain variable domain of TCR clone 316310 (TRBV7-3, TRBJ2-5)
CASSVGGAAQGRWETQYF

SEQ ID NO: 632621 - protein, 11 aa, Homo sapiens
  CDR3 for alpha chain variable domain of TCR clone 316311 (TRAV8-4, TRAJ52)
AGGTSHGKLTF

SEQ ID NO: 632622 - protein, 13 aa, Homo sapiens
  CDR3 for beta chain variable domain of TCR clone 316311 (TRBV28, TRBJ2-2)
CASIGGLGGELFF

SEQ ID NO: 632623 - protein, 11 aa, Homo sapiens
  CDR3 for alpha chain variable domain of TCR clone 316312 (TRAV2, TRAJ33)
CAVESNYQLIW

SEQ ID NO: 632624 - protein, 12 aa, Homo sapiens
  CDR3 for beta chain variable domain of TCR clone 316312 (TRBV11-2, TRBJ2-2)
CASSLGGGELCF

SEQ ID NO: 632625 - protein, 17 aa, Homo sapiens
  CDR3 for alpha chain variable domain of TCR clone 316313 (TRAV3, TRAJ42)
CAVRDRDDGGSQGNLIF

SEQ ID NO: 632626 - protein, 17 aa, Homo sapiens
  CDR3 for beta chain variable domain of TCR clone 316313 (TRBV7-9, TRBJ2-3)
CASNPTVAGDLTDTQYF

SEQ ID NO: 632627 - protein, 12 aa, Homo sapiens
  CDR3 for alpha chain variable domain of TCR clone 316314 (TRAV12-2, TRAJ10)
WGVTGGGNKLTF

SEQ ID NO: 632628 - protein, 13 aa, Homo sapiens
  CDR3 for beta chain variable domain of TCR clone 316314 (TRBV12-4, TRBJ2-7)
CASSLSGVYEQYF

SEQ ID NO: 632629 - protein, 15 aa, Homo sapiens
  CDR3 for alpha chain variable domain of TCR clone 316315 (TRAV1-1, TRAJ4)
CAVRAFSGGYNKLIF

SEQ ID NO: 632630 - protein, 16 aa, Homo sapiens
  CDR3 for beta chain variable domain of TCR clone 316315 (TRBV7-2, TRBJ2-6)
CAILSGVSSGANGLTF

SEQ ID NO: 632631 - protein, 14 aa, Homo sapiens
  CDR3 for alpha chain variable domain of TCR clone 316316 (TRAV20, TRAJ32)
CCGRYGGSTNKLIF

SEQ ID NO: 632632 - protein, 16 aa, Homo sapiens
  CDR3 for beta chain variable domain of TCR clone 316316 (TRBV19, TRBJ2-2)
CASRSPGTGATGELFF

SEQ ID NO: 632633 - protein, 11 aa, Homo sapiens
  CDR3 for alpha chain variable domain of TCR clone 316317 (TRAV3, TRAJ21)
CAVGNFNKFYF

SEQ ID NO: 632634 - protein, 16 aa, Homo sapiens
  CDR3 for beta chain variable domain of TCR clone 316317 (TRBV19, TRBJ2-1)
CASSRAGPSSYNEQYF

SEQ ID NO: 632635 - protein, 11 aa, Homo sapiens
  CDR3 for alpha chain variable domain of TCR clone 316318 (TRAV12-3, TRAJ49)
CAANTGNQFYF

SEQ ID NO: 632636 - protein, 15 aa, Homo sapiens
  CDR3 for beta chain variable domain of TCR clone 316318 (TRBV7-3, TRBJ2-3)
CASSLTSGVGDTQYF

SEQ ID NO: 632637 - protein, 14 aa, Homo sapiens
  CDR3 for alpha chain variable domain of TCR clone 316319 (TRAV2, TRAJ37)
CAVDFTSYTGKLIF

SEQ ID NO: 632638 - protein, 14 aa, Homo sapiens
  CDR3 for beta chain variable domain of TCR clone 316319 (TRBV25-1, TRBJ1-1)
CASTHLGGNTEAFF

SEQ ID NO: 632639 - protein, 11 aa, Homo sapiens
  CDR3 for alpha chain variable domain of TCR clone 316320 (TRAV2, TRAJ13)
CASGGYQKVTF

SEQ ID NO: 632640 - protein, 16 aa, Homo sapiens
  CDR3 for beta chain variable domain of TCR clone 316320 (TRBV19, TRBJ2-1)
CASSIETGSPYNEQFF

SEQ ID NO: 632641 - protein, 14 aa, Homo sapiens
  CDR3 for alpha chain variable domain of TCR clone 316321 (TRAV4, TRAJ26)
CLVGPHNYGQNFVF

SEQ ID NO: 632642 - protein, 17 aa, Homo sapiens
  CDR3 for beta chain variable domain of TCR clone 316321 (TRBV24-1, TRBJ2-1)
YATSDVSTSGTYNEQFF

SEQ ID NO: 632643 - protein, 13 aa, Homo sapiens
  CDR3 for alpha chain variable domain of TCR clone 316322 (TRAV27, TRAJ45)
CRSSGGGADGLTF

SEQ ID NO: 632644 - protein, 13 aa, Homo sapiens
  CDR3 for beta chain variable domain of TCR clone 316322 (TRBV19, TRBJ2-5)
CASSIHSQETQYF

SEQ ID NO: 632645 - protein, 18 aa, Homo sapiens
  CDR3 for alpha chain variable domain of TCR clone 316323 (TRAV26-2, TRAJ45)
CILRVAKYSGGGADGLTF

SEQ ID NO: 632646 - protein, 17 aa, Homo sapiens
  CDR3 for beta chain variable domain of TCR clone 316323 (TRBV25-1, TRBJ2-1)
CASSAYGQGRGVYEQFF

SEQ ID NO: 632647 - protein, 13 aa, Homo sapiens
  CDR3 for alpha chain variable domain of TCR clone 316324 (TRAV12-2, TRAJ20)
CAVYPSNDYKLSF

SEQ ID NO: 632648 - protein, 14 aa, Homo sapiens
  CDR3 for beta chain variable domain of TCR clone 316324 (TRBV12-5, TRBJ2-1)
CASGLKGSNDEQFF

SEQ ID NO: 632649 - protein, 12 aa, Homo sapiens
  CDR3 for alpha chain variable domain of TCR clone 316325 (TRAV20, TRAJ24)
CAVYNNCGKLQF

SEQ ID NO: 632650 - protein, 15 aa, Homo sapiens
  CDR3 for beta chain variable domain of TCR clone 316325 (TRBV20-1, TRBJ2-5)
CSARVPPSGRETQYF

SEQ ID NO: 632651 - protein, 16 aa, Homo sapiens
  CDR3 for alpha chain variable domain of TCR clone 316326 (TRAV12-3, TRAJ53)
CAMSPGSGGSNYKLTF

SEQ ID NO: 632652 - protein, 15 aa, Homo sapiens
  CDR3 for beta chain variable domain of TCR clone 316326 (TRBV20-1, TRBJ2-7)
CSARERVSGMDEQYF

SEQ ID NO: 632653 - protein, 14 aa, Homo sapiens
  CDR3 for alpha chain variable domain of TCR clone 316327 (TRAV3, TRAJ28)
CAVRRGAGSHQLTF

SEQ ID NO: 632654 - protein, 16 aa, Homo sapiens
  CDR3 for beta chain variable domain of TCR clone 316327 (TRBV4-1, TRBJ2-7)
CASSQEWTSGPLEQHF

SEQ ID NO: 632655 - protein, 11 aa, Homo sapiens
  CDR3 for alpha chain variable domain of TCR clone 316328 (TRAV3, TRAJ21)
CAVANFKKFYF

SEQ ID NO: 632656 - protein, 16 aa, Homo sapiens
  CDR3 for beta chain variable domain of TCR clone 316328 (TRBV19, TRBJ2-1)
CASSKAGPSSYNEQFF

SEQ ID NO: 632657 - protein, 13 aa, Homo sapiens
  CDR3 for alpha chain variable domain of TCR clone 316329 (TRAV1-2, TRAJ9)
FAALNTLFFKTIF

SEQ ID NO: 632658 - protein, 13 aa, Homo sapiens
  CDR3 for beta chain variable domain of TCR clone 316329 (TRBV19, TRBJ1-2)
CASSVPGQDGYTF

SEQ ID NO: 632659 - protein, 12 aa, Homo sapiens
  CDR3 for alpha chain variable domain of TCR clone 316330 (TRAV27, TRAJ36)
CAGMTGANHLFF

SEQ ID NO: 632660 - protein, 14 aa, Homo sapiens
  CDR3 for beta chain variable domain of TCR clone 316330 (TRBV12-4, TRBJ2-3)
CASSLVPSTDTQYF

SEQ ID NO: 632661 - protein, 14 aa, Homo sapiens
  CDR3 for alpha chain variable domain of TCR clone 316331 (TRAV1-2, TRAJ16)
CAVNRFSDGQKLLF

SEQ ID NO: 632662 - protein, 14 aa, Homo sapiens
  CDR3 for beta chain variable domain of TCR clone 316331 (TRBV6-1, TRBJ1-6)
CAISGTAYNSPLHF

SEQ ID NO: 632663 - protein, 14 aa, Homo sapiens
  CDR3 for alpha chain variable domain of TCR clone 316332 (TRAV12-2, TRAJ5)
CAVNRSTGRRALTF

SEQ ID NO: 632664 - protein, 16 aa, Homo sapiens
  CDR3 for beta chain variable domain of TCR clone 316332 (TRBV5-4, TRBJ2-3)
CASQQPGAGGADTQYF

SEQ ID NO: 632665 - protein, 13 aa, Homo sapiens
  CDR3 for alpha chain variable domain of TCR clone 316333 (TRAV2, TRAJ23)
CAVMGNQGGKLIF

SEQ ID NO: 632666 - protein, 14 aa, Homo sapiens
  CDR3 for beta chain variable domain of TCR clone 316333 (TRBV27, TRBJ1-1)
CASSPQGKRAEAFF

SEQ ID NO: 632667 - protein, 15 aa, Homo sapiens
  CDR3 for alpha chain variable domain of TCR clone 316334 (TRAV3, TRAJ3)
CAVRDRDSSASKIIF

SEQ ID NO: 632668 - protein, 18 aa, Homo sapiens
  CDR3 for beta chain variable domain of TCR clone 316334 (TRBV25-1, TRBJ1-2)
CASSGLQNGQGLIFGDSF

SEQ ID NO: 632669 - protein, 17 aa, Homo sapiens
  CDR3 for alpha chain variable domain of TCR clone 316335 (TRAV4, TRAJ20)
CTTASWVKGNNDYKLSF

SEQ ID NO: 632670 - protein, 16 aa, Homo sapiens
  CDR3 for beta chain variable domain of TCR clone 316335 (TRBV11-2, TRBJ2-1)
CQQLYPPGVEYNEQFF

SEQ ID NO: 632671 - protein, 15 aa, Homo sapiens
  CDR3 for alpha chain variable domain of TCR clone 316336 (TRAV17, TRAJ57)
CATGPSQAGSEKLGF

SEQ ID NO: 632672 - protein, 16 aa, Homo sapiens
  CDR3 for beta chain variable domain of TCR clone 316336 (TRBV12-4, TRBJ1-5)
CASSRPVGGSNQRQHF

SEQ ID NO: 632673 - protein, 12 aa, Homo sapiens
  CDR3 for alpha chain variable domain of TCR clone 316337 (TRAV3, TRAJ43)
CAVRDPNNDMRF

SEQ ID NO: 632674 - protein, 14 aa, Homo sapiens
  CDR3 for beta chain variable domain of TCR clone 316337 (TRBV27, TRBJ1-5)
CASSLDPRNQPQHF

SEQ ID NO: 632675 - protein, 15 aa, Homo sapiens
  CDR3 for alpha chain variable domain of TCR clone 316338 (TRAV3, TRAJ22)
CAVRDRGGSARQLTF

SEQ ID NO: 632676 - protein, 14 aa, Homo sapiens
  CDR3 for beta chain variable domain of TCR clone 316338 (TRBV20-1, TRBJ2-7)
CSAISREASYEQYF

SEQ ID NO: 632677 - protein, 15 aa, Homo sapiens
  CDR3 for alpha chain variable domain of TCR clone 316339 (TRAV12-3, TRAJ6)
CAMNATTGGSYIPTS

SEQ ID NO: 632678 - protein, 16 aa, Homo sapiens
  CDR3 for beta chain variable domain of TCR clone 316339 (TRBV20-1, TRBJ1-2)
CSASMGQGVANYGYTF

SEQ ID NO: 632679 - protein, 14 aa, Homo sapiens
  CDR3 for alpha chain variable domain of TCR clone 316340 (TRAV12-2, TRAJ12)
CAVINRDSSYKLIF

SEQ ID NO: 632680 - protein, 15 aa, Homo sapiens
  CDR3 for beta chain variable domain of TCR clone 316340 (TRBV2, TRBJ2-5)
CASSGTVAAGETQYF

SEQ ID NO: 632681 - protein, 19 aa, Homo sapiens
  CDR3 for alpha chain variable domain of TCR clone 316341 (TRAV2, TRAJ20)
ILQVREADAAGYRDCKLSF

SEQ ID NO: 632682 - protein, 13 aa, Homo sapiens
  CDR3 for beta chain variable domain of TCR clone 316341 (TRBV15, TRBJ1-6)
CATSGGLNSPLHF

SEQ ID NO: 632683 - protein, 12 aa, Homo sapiens
  CDR3 for alpha chain variable domain of TCR clone 316342 (TRAV12-3, TRAJ17)
CAMTLTGNKLTF

SEQ ID NO: 632684 - protein, 15 aa, Homo sapiens
  CDR3 for beta chain variable domain of TCR clone 316342 (TRBV20-1, TRBJ2-7)
CSSRDQVSGMDEQYF

SEQ ID NO: 632685 - protein, 12 aa, Homo sapiens
  CDR3 for alpha chain variable domain of TCR clone 316343 (TRAV1-1, TRAJ8)
CAGGTGFQKLVF

SEQ ID NO: 632686 - protein, 16 aa, Homo sapiens
  CDR3 for beta chain variable domain of TCR clone 316343 (TRBV11-2, TRBJ2-7)
CASSPTTGGVSYEQYF

SEQ ID NO: 632687 - protein, 17 aa, Homo sapiens
  CDR3 for alpha chain variable domain of TCR clone 316344 (TRAV2, TRAJ22)
ILQVREADAAEQRQLTF

SEQ ID NO: 632688 - protein, 11 aa, Homo sapiens
  CDR3 for beta chain variable domain of TCR clone 316344 (TRBV11-2, TRBJ2-2)
CASSLPGELFF

SEQ ID NO: 632689 - protein, 13 aa, Homo sapiens
  CDR3 for alpha chain variable domain of TCR clone 316345 (TRAV2, TRAJ10)
CAVETGGGNKLTI

SEQ ID NO: 632690 - protein, 14 aa, Homo sapiens
  CDR3 for beta chain variable domain of TCR clone 316345 (TRBV20-1, TRBJ2-3)
CSAGGRRGTDTQYF

SEQ ID NO: 632691 - protein, 13 aa, Homo sapiens
  CDR3 for alpha chain variable domain of TCR clone 316346 (TRAV17, TRAJ54)
CATVIQGAQKLVV

SEQ ID NO: 632692 - protein, 15 aa, Homo sapiens
  CDR3 for beta chain variable domain of TCR clone 316346 (TRBV13, TRBJ2-1)
CASSLLSGLNNEQFF

SEQ ID NO: 632693 - protein, 14 aa, Homo sapiens
  CDR3 for alpha chain variable domain of TCR clone 316347 (TRAV35, TRAJ22)
CAGLMPGSARQLTF

SEQ ID NO: 632694 - protein, 17 aa, Homo sapiens
  CDR3 for beta chain variable domain of TCR clone 316347 (TRBV15, TRBJ1-4)
CATSRYGTGDPNEKLFF

SEQ ID NO: 632695 - protein, 15 aa, Homo sapiens
  CDR3 for alpha chain variable domain of TCR clone 316348 (TRAV21, TRAJ53)
CATLNSGGSNYKLTF

SEQ ID NO: 632696 - protein, 14 aa, Homo sapiens
  CDR3 for beta chain variable domain of TCR clone 316348 (TRBV19, TRBJ2-1)
CASPTFVLSGEQFL

SEQ ID NO: 632697 - protein, 12 aa, Homo sapiens
  CDR3 for alpha chain variable domain of TCR clone 316349 (TRAV21, TRAJ29)
CAVTSGNTPLVF

SEQ ID NO: 632698 - protein, 15 aa, Homo sapiens
  CDR3 for beta chain variable domain of TCR clone 316349 (TRBV18, TRBJ2-1)
CASSPPSASYNEQFF

SEQ ID NO: 632699 - protein, 13 aa, Homo sapiens
  CDR3 for alpha chain variable domain of TCR clone 316350 (TRAV2, TRAJ16)
CAVERSHGQKLLF

SEQ ID NO: 632700 - protein, 15 aa, Homo sapiens
  CDR3 for beta chain variable domain of TCR clone 316350 (TRBV20-1, TRBJ2-5)
CSAIKGQGSQETQYF

SEQ ID NO: 632701 - protein, 15 aa, Homo sapiens
  CDR3 for alpha chain variable domain of TCR clone 316351 (TRAV12-3, TRAJ10)
CVSYILTGGGNKLTF

SEQ ID NO: 632702 - protein, 15 aa, Homo sapiens
  CDR3 for beta chain variable domain of TCR clone 316351 (TRBV7-2, TRBJ1-6)
CASSLGPDRGMPLHF

SEQ ID NO: 632703 - protein, 16 aa, Homo sapiens
  CDR3 for alpha chain variable domain of TCR clone 316352 (TRAV3, TRAJ37)
CAVRVRGSGNTGKLIF

SEQ ID NO: 632704 - protein, 16 aa, Homo sapiens
  CDR3 for beta chain variable domain of TCR clone 316352 (TRBV5-1, TRBJ2-2)
CASSSYREGDTGELFF

SEQ ID NO: 632705 - protein, 11 aa, Homo sapiens
  CDR3 for alpha chain variable domain of TCR clone 316353 (TRAV12-1, TRAJ31)
CVVNGDARLMF

SEQ ID NO: 632706 - protein, 13 aa, Homo sapiens
  CDR3 for beta chain variable domain of TCR clone 316353 (TRBV20-1, TRBJ1-6)
CSAPLGVGSPLHF

SEQ ID NO: 632707 - protein, 14 aa, Homo sapiens
  CDR3 for alpha chain variable domain of TCR clone 316354 (TRAV16, TRAJ54)
CALSLIQGAQKLVS

SEQ ID NO: 632708 - protein, 13 aa, Homo sapiens
  CDR3 for beta chain variable domain of TCR clone 316354 (TRBV7-9, TRBJ2-3)
CASSPGSTDTQYF

SEQ ID NO: 632709 - protein, 13 aa, Homo sapiens
  CDR3 for alpha chain variable domain of TCR clone 316355 (TRAV12-2, TRAJ9)
CAVKWAGGFKTIF

SEQ ID NO: 632710 - protein, 16 aa, Homo sapiens
  CDR3 for beta chain variable domain of TCR clone 316355 (TRBV19, TRBJ2-2)
CASRSPGTGATGELFF

SEQ ID NO: 632711 - protein, 17 aa, Homo sapiens
  CDR3 for alpha chain variable domain of TCR clone 316356 (TRAV13-2, TRAJ42)
CAEKGKNYGGSQGNLIF

SEQ ID NO: 632712 - protein, 15 aa, Homo sapiens
  CDR3 for beta chain variable domain of TCR clone 316356 (TRBV7-9, TRBJ2-1)
CQQLRYRVDYNEQFF

SEQ ID NO: 632713 - protein, 16 aa, Homo sapiens
  CDR3 for alpha chain variable domain of TCR clone 316357 (TRAV30, TRAJ24)
CATEIVDADSWGKFQF

SEQ ID NO: 632714 - protein, 18 aa, Homo sapiens
  CDR3 for beta chain variable domain of TCR clone 316357 (TRBV7-9, TRBJ2-7)
CASSLTTSGSRTWYEQYF

SEQ ID NO: 632715 - protein, 19 aa, Homo sapiens
  CDR3 for alpha chain variable domain of TCR clone 316358 (TRAV29/DV5, TRAJ49)
CSVLLYSKLTVDTGNQFYF

SEQ ID NO: 632716 - protein, 16 aa, Homo sapiens
  CDR3 for beta chain variable domain of TCR clone 316358 (TRBV13, TRBJ2-2)
CASSPRTGEHTGELFF

SEQ ID NO: 632717 - protein, 18 aa, Homo sapiens
  CDR3 for alpha chain variable domain of TCR clone 316359 (TRAV21, TRAJ52)
CAVRPSPAGGTSYGKMTF

SEQ ID NO: 632718 - protein, 17 aa, Homo sapiens
  CDR3 for beta chain variable domain of TCR clone 316359 (TRBV13, TRBJ2-3)
CASSLSRVAGGRNTQYV

SEQ ID NO: 632719 - protein, 16 aa, Homo sapiens
  CDR3 for alpha chain variable domain of TCR clone 316360 (TRAV3, TRAJ21)
CAVRDRSASTNFTLDL

SEQ ID NO: 632720 - protein, 13 aa, Homo sapiens
  CDR3 for beta chain variable domain of TCR clone 316360 (TRBV7-2, TRBJ2-2)
CASSSVRAGELFF

SEQ ID NO: 632721 - protein, 14 aa, Homo sapiens
  CDR3 for alpha chain variable domain of TCR clone 316361 (TRAV35, TRAJ54)
CAGYLIQGAQKLVF

SEQ ID NO: 632722 - protein, 14 aa, Homo sapiens
  CDR3 for beta chain variable domain of TCR clone 316361 (TRBV7-2, TRBJ2-5)
CASSVGWADETQYF

SEQ ID NO: 632723 - protein, 16 aa, Homo sapiens
  CDR3 for alpha chain variable domain of TCR clone 316362 (TRAV8-3, TRAJ13)
CALGAYPSGGYQKVTF

SEQ ID NO: 632724 - protein, 13 aa, Homo sapiens
  CDR3 for beta chain variable domain of TCR clone 316362 (TRBV7-9, TRBJ1-2)
CASSLKQNYGYTF

SEQ ID NO: 632725 - protein, 12 aa, Homo sapiens
  CDR3 for alpha chain variable domain of TCR clone 316363 (TRAV12-2, TRAJ8)
CAVATGFQKLVF

SEQ ID NO: 632726 - protein, 17 aa, Homo sapiens
  CDR3 for beta chain variable domain of TCR clone 316363 (TRBV7-2, TRBJ1-2)
CTSSPSHRTNRGYGYTF

SEQ ID NO: 632727 - protein, 16 aa, Homo sapiens
  CDR3 for alpha chain variable domain of TCR clone 316364 (TRAV3, TRAJ10)
CAVRDMRAGGGNKLTF

SEQ ID NO: 632728 - protein, 12 aa, Homo sapiens
  CDR3 for beta chain variable domain of TCR clone 316364 (TRBV7-2, TRBJ1-2)
CASRDSIYGYTF

SEQ ID NO: 632729 - protein, 10 aa, Homo sapiens
  CDR3 for alpha chain variable domain of TCR clone 316365 (TRAV16, TRAJ22)
SAMYLRQLTF

SEQ ID NO: 632730 - protein, 15 aa, Homo sapiens
  CDR3 for beta chain variable domain of TCR clone 316365 (TRBV7-9, TRBJ1-6)
WASSSPGRGNSPLHF

SEQ ID NO: 632731 - protein, 13 aa, Homo sapiens
  CDR3 for alpha chain variable domain of TCR clone 316366 (TRAV21, TRAJ27)
CAARPGNAGKSPF

SEQ ID NO: 632732 - protein, 18 aa, Homo sapiens
  CDR3 for beta chain variable domain of TCR clone 316366 (TRBV12-4, TRBJ2-2)
CASSLVAGTRGRTGELLF

SEQ ID NO: 632733 - protein, 15 aa, Homo sapiens
  CDR3 for alpha chain variable domain of TCR clone 316367 (TRAV3, TRAJ9)
CAVRARNTGGFKTIF

SEQ ID NO: 632734 - protein, 13 aa, Homo sapiens
  CDR3 for beta chain variable domain of TCR clone 316367 (TRBV6-1, TRBJ1-1)
CASSRQGNTQAFF

SEQ ID NO: 632735 - protein, 18 aa, Homo sapiens
  CDR3 for alpha chain variable domain of TCR clone 316368 (TRAV21, TRAJ52)
CAVRPSPAGGTSYGKLTF

SEQ ID NO: 632736 - protein, 16 aa, Homo sapiens
  CDR3 for beta chain variable domain of TCR clone 316368 (TRBV4-1, TRBJ1-5)
CASSQGGHTTNQPQHF

SEQ ID NO: 632737 - protein, 12 aa, Homo sapiens
  CDR3 for alpha chain variable domain of TCR clone 316369 (TRAV13-1, TRAJ21)
CAAKEGFNKFYF

SEQ ID NO: 632738 - protein, 16 aa, Homo sapiens
  CDR3 for beta chain variable domain of TCR clone 316369 (TRBV5-1, TRBJ2-2)
CASSLWDTTNTGELFF

SEQ ID NO: 632739 - protein, 13 aa, Homo sapiens
  CDR3 for alpha chain variable domain of TCR clone 316370 (TRAV13-1, TRAJ21)
CAASIYNFNKFYF

SEQ ID NO: 632740 - protein, 13 aa, Homo sapiens
  CDR3 for beta chain variable domain of TCR clone 316370 (TRBV27, TRBJ1-4)
CASSLMGGEKLFF

SEQ ID NO: 632741 - protein, 12 aa, Homo sapiens
  CDR3 for alpha chain variable domain of TCR clone 316371 (TRAV12-3, TRAJ17)
CAMTRKGNKLTF

SEQ ID NO: 632742 - protein, 15 aa, Homo sapiens
  CDR3 for beta chain variable domain of TCR clone 316371 (TRBV20-1, TRBJ2-7)
CSARDRVSGMDEQYF

SEQ ID NO: 632743 - protein, 13 aa, Homo sapiens
  CDR3 for alpha chain variable domain of TCR clone 316372 (TRAV21, TRAJ3)
CAVTGSSASKIIF

SEQ ID NO: 632744 - protein, 15 aa, Homo sapiens
  CDR3 for beta chain variable domain of TCR clone 316372 (TRBV18, TRBJ2-1)
CASLPDRGRDNEQFF

SEQ ID NO: 632745 - protein, 13 aa, Homo sapiens
  CDR3 for alpha chain variable domain of TCR clone 316373 (TRAV8-3, TRAJ20)
CAVGRPNDYKLSF

SEQ ID NO: 632746 - protein, 15 aa, Homo sapiens
  CDR3 for beta chain variable domain of TCR clone 316373 (TRBV7-9, TRBJ1-1)
CASSPELGGGTEAFF

SEQ ID NO: 632747 - protein, 17 aa, Homo sapiens
  CDR3 for alpha chain variable domain of TCR clone 316374 (TRAV3, TRAJ6)
CAVRDGPRAGGCYIPTF

SEQ ID NO: 632748 - protein, 12 aa, Homo sapiens
  CDR3 for beta chain variable domain of TCR clone 316374 (TRBV11-2, TRBJ2-2)
CAGSLGGGELFF

SEQ ID NO: 632749 - protein, 18 aa, Homo sapiens
  CDR3 for alpha chain variable domain of TCR clone 316375 (TRAV26-2, TRAJ45)
CILRVDKYSGGGADGLTF

SEQ ID NO: 632750 - protein, 16 aa, Homo sapiens
  CDR3 for beta chain variable domain of TCR clone 316375 (TRBV2, TRBJ1-4)
CASNLLEGATNEKLFF

SEQ ID NO: 632751 - protein, 11 aa, Homo sapiens
  CDR3 for alpha chain variable domain of TCR clone 316376 (TRAV12-3, TRAJ41)
CAMNAREALNF

SEQ ID NO: 632752 - protein, 16 aa, Homo sapiens
  CDR3 for beta chain variable domain of TCR clone 316376 (TRBV7-8, TRBJ2-3)
YASSTEGQRETDTQYF

SEQ ID NO: 632753 - protein, 15 aa, Homo sapiens
  CDR3 for alpha chain variable domain of TCR clone 316377 (TRAV26-1, TRAJ29)
CIVRVEGAGNTPLVF

SEQ ID NO: 632754 - protein, 14 aa, Homo sapiens
  CDR3 for beta chain variable domain of TCR clone 316377 (TRBV18, TRBJ2-5)
CASPPGVSQETQYF

SEQ ID NO: 632755 - protein, 17 aa, Homo sapiens
  CDR3 for alpha chain variable domain of TCR clone 316378 (TRAV3, TRAJ6)
CAVRDGPRAGGSYIPTF

SEQ ID NO: 632756 - protein, 15 aa, Homo sapiens
  CDR3 for beta chain variable domain of TCR clone 316378 (TRBV9, TRBJ1-6)
CASSVAGTGDSLLHF

SEQ ID NO: 632757 - protein, 12 aa, Homo sapiens
  CDR3 for alpha chain variable domain of TCR clone 316379 (TRAV13-1, TRAJ9)
CASHTGSFKTLF

SEQ ID NO: 632758 - protein, 13 aa, Homo sapiens
  CDR3 for beta chain variable domain of TCR clone 316379 (TRBV12-4, TRBJ1-2)
CASSSGSKDGYTF

SEQ ID NO: 632759 - protein, 15 aa, Homo sapiens
  CDR3 for alpha chain variable domain of TCR clone 316380 (TRAV2, TRAJ9)
CAVGDRGTGGFKTIF

SEQ ID NO: 632760 - protein, 17 aa, Homo sapiens
  CDR3 for beta chain variable domain of TCR clone 316380 (TRBV28, TRBJ2-5)
CASSTPEGDALQETQYF

SEQ ID NO: 632761 - protein, 10 aa, Homo sapiens
  CDR3 for alpha chain variable domain of TCR clone 316381 (TRAV21, TRAJ31)
CAVDNARLMF

SEQ ID NO: 632762 - protein, 15 aa, Homo sapiens
  CDR3 for beta chain variable domain of TCR clone 316381 (TRBV9, TRBJ1-6)
CASSVAGTGDSPLHF

SEQ ID NO: 632763 - protein, 13 aa, Homo sapiens
  CDR3 for alpha chain variable domain of TCR clone 316382 (TRAV36/DV7, TRAJ37)
CAVSSSNTGKLIF

SEQ ID NO: 632764 - protein, 15 aa, Homo sapiens
  CDR3 for beta chain variable domain of TCR clone 316382 (TRBV5-1, TRBJ2-2)
CASSSRGGNTGELFF

SEQ ID NO: 632765 - protein, 23 aa, Homo sapiens
  CDR3 for alpha chain variable domain of TCR clone 316383 (TRAV26-1, )
CIADNAGNNNIQNPDPAVYQLRD

SEQ ID NO: 632766 - protein, 20 aa, Homo sapiens
  CDR3 for beta chain variable domain of TCR clone 316383 (TRBV28, TRBJ2-1)
CASTPIGRSPGLAGGNEQFF

SEQ ID NO: 632767 - protein, 13 aa, Homo sapiens
  CDR3 for alpha chain variable domain of TCR clone 316384 (TRAV13-1, TRAJ9)
CAASGTGGFTTIF

SEQ ID NO: 632768 - protein, 13 aa, Homo sapiens
  CDR3 for beta chain variable domain of TCR clone 316384 (TRBV12-4, TRBJ2-7)
CASSLERVREQYF

SEQ ID NO: 632769 - protein, 14 aa, Homo sapiens
  CDR3 for alpha chain variable domain of TCR clone 316385 (TRAV2, TRAJ9)
CAVEDRSRGFKTIF

SEQ ID NO: 632770 - protein, 14 aa, Homo sapiens
  CDR3 for beta chain variable domain of TCR clone 316385 (TRBV28, TRBJ2-7)
CASTFYGRAHEQYF

SEQ ID NO: 632771 - protein, 13 aa, Homo sapiens
  CDR3 for alpha chain variable domain of TCR clone 316386 (TRAV17, TRAJ40)
CATAPWGTYKYIF

SEQ ID NO: 632772 - protein, 12 aa, Homo sapiens
  CDR3 for beta chain variable domain of TCR clone 316386 (TRBV2, TRBJ1-5)
CASSENRTPQHF

SEQ ID NO: 632773 - protein, 15 aa, Homo sapiens
  CDR3 for alpha chain variable domain of TCR clone 316387 (TRAV35, TRAJ53)
CAGLTQDGSNYKLTF

SEQ ID NO: 632774 - protein, 11 aa, Homo sapiens
  CDR3 for beta chain variable domain of TCR clone 316387 (TRBV20-1, TRBJ1-2)
CSIWASYGYTF

SEQ ID NO: 632775 - protein, 14 aa, Homo sapiens
  CDR3 for alpha chain variable domain of TCR clone 316388 (TRAV1-2, TRAJ16)
CAVNRFSDGQKLLF

SEQ ID NO: 632776 - protein, 14 aa, Homo sapiens
  CDR3 for beta chain variable domain of TCR clone 316388 (TRBV5-5, TRBJ1-2)
CASSLDPYNYGYPF

SEQ ID NO: 632777 - protein, 15 aa, Homo sapiens
  CDR3 for alpha chain variable domain of TCR clone 316389 (TRAV21, TRAJ40)
CAVRPQPSGTYKYIF

SEQ ID NO: 632778 - protein, 16 aa, Homo sapiens
  CDR3 for beta chain variable domain of TCR clone 316389 (TRBV20-1, TRBJ1-4)
CSAPGQGLLTNEKLFF

SEQ ID NO: 632779 - protein, 13 aa, Homo sapiens
  CDR3 for alpha chain variable domain of TCR clone 316390 (TRAV27, TRAJ41)
CAGEGNSGYALNF

SEQ ID NO: 632780 - protein, 15 aa, Homo sapiens
  CDR3 for beta chain variable domain of TCR clone 316390 (TRBV5-1, TRBJ2-5)
CASSSGREMVETQYL

SEQ ID NO: 632781 - protein, 15 aa, Homo sapiens
  CDR3 for alpha chain variable domain of TCR clone 316391 (TRAV20, TRAJ39)
CAVQALLVAGNILTF

SEQ ID NO: 632782 - protein, 13 aa, Homo sapiens
  CDR3 for beta chain variable domain of TCR clone 316391 (TRBV10-3, TRBJ2-7)
CASKLAVNYEQYF

SEQ ID NO: 632783 - protein, 13 aa, Homo sapiens
  CDR3 for alpha chain variable domain of TCR clone 316392 (TRAV12-1, TRAJ29)
CVVNGPGNTPLVF

SEQ ID NO: 632784 - protein, 13 aa, Homo sapiens
  CDR3 for beta chain variable domain of TCR clone 316392 (TRBV7-2, TRBJ2-5)
CASSRGGLGTQYF

SEQ ID NO: 632785 - protein, 14 aa, Homo sapiens
  CDR3 for alpha chain variable domain of TCR clone 316393 (TRAV29/DV5, TRAJ47)
CAASSIEYGNKLVF

SEQ ID NO: 632786 - protein, 16 aa, Homo sapiens
  CDR3 for beta chain variable domain of TCR clone 316393 (TRBV2, TRBJ1-3)
CASSDRGQISGNTIYF

SEQ ID NO: 632787 - protein, 13 aa, Homo sapiens
  CDR3 for alpha chain variable domain of TCR clone 316394 (TRAV35, TRAJ37)
CAGSSGNTCKLIF

SEQ ID NO: 632788 - protein, 16 aa, Homo sapiens
  CDR3 for beta chain variable domain of TCR clone 316394 (TRBV10-3, TRBJ2-1)
CAISLTSGNSYNEQFF

SEQ ID NO: 632789 - protein, 13 aa, Homo sapiens
  CDR3 for alpha chain variable domain of TCR clone 316395 (TRAV8-1, TRAJ9)
CAVNSVGGFKTIF

SEQ ID NO: 632790 - protein, 15 aa, Homo sapiens
  CDR3 for beta chain variable domain of TCR clone 316395 (TRBV11-3, TRBJ2-3)
CASSGRDGLTDTQYF

SEQ ID NO: 632791 - protein, 14 aa, Homo sapiens
  CDR3 for alpha chain variable domain of TCR clone 316396 (TRAV21, TRAJ35)
CAVMPIGFCNVLHC

SEQ ID NO: 632792 - protein, 12 aa, Homo sapiens
  CDR3 for beta chain variable domain of TCR clone 316396 (TRBV7-9, TRBJ2-7)
CASSIKREEQYF

SEQ ID NO: 632793 - protein, 12 aa, Homo sapiens
  CDR3 for alpha chain variable domain of TCR clone 316397 (TRAV8-4, TRAJ43)
CAGSVNNNDIRF

SEQ ID NO: 632794 - protein, 13 aa, Homo sapiens
  CDR3 for beta chain variable domain of TCR clone 316397 (TRBV7-9, TRBJ1-2)
CASSLKQNYGYTF

SEQ ID NO: 632795 - protein, 16 aa, Homo sapiens
  CDR3 for alpha chain variable domain of TCR clone 316398 (TRAV12-3, TRAJ53)
CAMSPGSGGSNYKLTF

SEQ ID NO: 632796 - protein, 18 aa, Homo sapiens
  CDR3 for beta chain variable domain of TCR clone 316398 (TRBV10-2, TRBJ2-2)
CISAPGVHRQADAGELFF

SEQ ID NO: 632797 - protein, 11 aa, Homo sapiens
  CDR3 for alpha chain variable domain of TCR clone 316399 (TRAV21, TRAJ13)
GPSGGDQKVTF

SEQ ID NO: 632798 - protein, 13 aa, Homo sapiens
  CDR3 for beta chain variable domain of TCR clone 316399 (TRBV7-9, TRBJ1-2)
CASSLKQNYGYTF

SEQ ID NO: 632799 - protein, 14 aa, Homo sapiens
  CDR3 for alpha chain variable domain of TCR clone 316400 (TRAV1-2, TRAJ16)
CAVNRFSDCQKLLF

SEQ ID NO: 632800 - protein, 12 aa, Homo sapiens
  CDR3 for beta chain variable domain of TCR clone 316400 (TRBV12-4, TRBJ2-3)
CASSSTTDTQYF

SEQ ID NO: 632801 - protein, 17 aa, Homo sapiens
  CDR3 for alpha chain variable domain of TCR clone 316401 (TRAV2, TRAJ23)
CCLLLCWERGLEGKLIF

SEQ ID NO: 632802 - protein, 20 aa, Homo sapiens
  CDR3 for beta chain variable domain of TCR clone 316401 (TRBV3-1, TRBJ2-6)
CASSPRPGLEGGAGANVLTF

SEQ ID NO: 632803 - protein, 11 aa, Homo sapiens
  CDR3 for alpha chain variable domain of TCR clone 316402 (TRAV21, TRAJ34)
CAHYNTDKLIF

SEQ ID NO: 632804 - protein, 15 aa, Homo sapiens
  CDR3 for beta chain variable domain of TCR clone 316402 (TRBV10-3, TRBJ2-1)
CAISDVQDRAYEQFF

SEQ ID NO: 632805 - protein, 11 aa, Homo sapiens
  CDR3 for alpha chain variable domain of TCR clone 316403 (TRAV12-1, TRAJ47)
CVVNDGNKQVF

SEQ ID NO: 632806 - protein, 14 aa, Homo sapiens
  CDR3 for beta chain variable domain of TCR clone 316403 (TRBV19, TRBJ2-7)
CASSLRDRGYEQYF

SEQ ID NO: 632807 - protein, 12 aa, Homo sapiens
  CDR3 for alpha chain variable domain of TCR clone 316404 (TRAV12-3, TRAJ17)
CAMTLTGNKLTF

SEQ ID NO: 632808 - protein, 13 aa, Homo sapiens
  CDR3 for beta chain variable domain of TCR clone 316404 (TRBV7-9, TRBJ1-2)
CASSSKQNYGYTF

SEQ ID NO: 632809 - protein, 13 aa, Homo sapiens
  CDR3 for alpha chain variable domain of TCR clone 316405 (TRAV3, TRAJ15)
CAVRDQAGTALIF

SEQ ID NO: 632810 - protein, 15 aa, Homo sapiens
  CDR3 for beta chain variable domain of TCR clone 316405 (TRBV11-1, TRBJ2-7)
CSSSLNYGASYEQYF

SEQ ID NO: 632811 - protein, 13 aa, Homo sapiens
  CDR3 for alpha chain variable domain of TCR clone 316406 (TRAV1-1, TRAJ9)
CAAKTIGGFKTIF

SEQ ID NO: 632812 - protein, 14 aa, Homo sapiens
  CDR3 for beta chain variable domain of TCR clone 316406 (TRBV20-1, TRBJ2-1)
CSAQIGGSANEQFF

SEQ ID NO: 632813 - protein, 15 aa, Homo sapiens
  CDR3 for alpha chain variable domain of TCR clone 316407 (TRAV2, TRAJ9)
LAVEDRGTGGFKTIF

SEQ ID NO: 632814 - protein, 16 aa, Homo sapiens
  CDR3 for beta chain variable domain of TCR clone 316407 (TRBV24-1, TRBJ2-3)
CATSDPGTGATDTQYF

SEQ ID NO: 632815 - protein, 18 aa, Homo sapiens
  CDR3 for alpha chain variable domain of TCR clone 316408 (TRAV12-3, TRAJ52)
CAMSVGGAGGTSYGKLTF

SEQ ID NO: 632816 - protein, 19 aa, Homo sapiens
  CDR3 for beta chain variable domain of TCR clone 316408 (TRBV4-3, TRBJ2-7)
CISAPAAKQPSGTPYEQYF

SEQ ID NO: 632817 - protein, 11 aa, Homo sapiens
  CDR3 for alpha chain variable domain of TCR clone 316409 (TRAV20, TRAJ23)
CACNQGGKLIF

SEQ ID NO: 632818 - protein, 20 aa, Homo sapiens
  CDR3 for beta chain variable domain of TCR clone 316409 (TRBV7-8, TRBJ2-5)
CASSFGGQPPKRPSTSGQAR

SEQ ID NO: 632819 - protein, 10 aa, Homo sapiens
  CDR3 for alpha chain variable domain of TCR clone 316410 (TRAV23/DV6, TRAJ57)
CAASSTLSQG

SEQ ID NO: 632820 - protein, 14 aa, Homo sapiens
  CDR3 for beta chain variable domain of TCR clone 316410 (TRBV13, TRBJ2-5)
CASSLGQGRETQYF

SEQ ID NO: 632821 - protein, 14 aa, Homo sapiens
  CDR3 for alpha chain variable domain of TCR clone 316411 (TRAV13-1, TRAJ44)
CAAKATGTARKLTF

SEQ ID NO: 632822 - protein, 16 aa, Homo sapiens
  CDR3 for beta chain variable domain of TCR clone 316411 (TRBV7-9, TRBJ2-6)
CASSLKGPLRANVLTF

SEQ ID NO: 632823 - protein, 12 aa, Homo sapiens
  CDR3 for alpha chain variable domain of TCR clone 316412 (TRAV27, TRAJ35)
CAGADFGNVLHC

SEQ ID NO: 632824 - protein, 15 aa, Homo sapiens
  CDR3 for beta chain variable domain of TCR clone 316412 (TRBV7-2, TRBJ1-2)
CASSLVSVGDYGYTF

SEQ ID NO: 632825 - protein, 13 aa, Homo sapiens
  CDR3 for alpha chain variable domain of TCR clone 316413 (TRAV12-1, TRAJ7)
CVVNMRGNNRLAF

SEQ ID NO: 632826 - protein, 15 aa, Homo sapiens
  CDR3 for beta chain variable domain of TCR clone 316413 (TRBV18, TRBJ2-3)
CASSPLAGETDTQYF

SEQ ID NO: 632827 - protein, 19 aa, Homo sapiens
  CDR3 for alpha chain variable domain of TCR clone 316414 (TRAV13-1, TRAJ52)
CAASPYQNAGGTSYGKLTF

SEQ ID NO: 632828 - protein, 14 aa, Homo sapiens
  CDR3 for beta chain variable domain of TCR clone 316414 (TRBV19, TRBJ2-7)
CASTIQGRPYEQYF

SEQ ID NO: 632829 - protein, 16 aa, Homo sapiens
  CDR3 for alpha chain variable domain of TCR clone 316415 (TRAV26-1, TRAJ48)
CIVREPPNSGNEKLTF

SEQ ID NO: 632830 - protein, 12 aa, Homo sapiens
  CDR3 for beta chain variable domain of TCR clone 316415 (TRBV19, TRBJ2-1)
CASSRQGAEQFF

SEQ ID NO: 632831 - protein, 12 aa, Homo sapiens
  CDR3 for alpha chain variable domain of TCR clone 316416 (TRAV1-1, TRAJ24)
CAVRGSWGKFQF

SEQ ID NO: 632832 - protein, 13 aa, Homo sapiens
  CDR3 for beta chain variable domain of TCR clone 316416 (TRBV10-3, TRBJ2-7)
CASKLAVNYEQYF

SEQ ID NO: 632833 - protein, 10 aa, Homo sapiens
  CDR3 for alpha chain variable domain of TCR clone 316417 (TRAV1-2, TRAJ31)
CAFFDARLMF

SEQ ID NO: 632834 - protein, 14 aa, Homo sapiens
  CDR3 for beta chain variable domain of TCR clone 316417 (TRBV7-6, TRBJ2-3)
CASSLGTVTDTQYF

SEQ ID NO: 632835 - protein, 15 aa, Homo sapiens
  CDR3 for alpha chain variable domain of TCR clone 316418 (TRAV8-3, TRAJ45)
CASSYSGGGADGLTF

SEQ ID NO: 632836 - protein, 17 aa, Homo sapiens
  CDR3 for beta chain variable domain of TCR clone 316418 (TRBV11-2, TRBJ2-3)
CQQLRGASRGAPNTQYF

SEQ ID NO: 632837 - protein, 13 aa, Homo sapiens
  CDR3 for alpha chain variable domain of TCR clone 316419 (TRAV8-4, TRAJ10)
CAAFTGGGNKLTF

SEQ ID NO: 632838 - protein, 15 aa, Homo sapiens
  CDR3 for beta chain variable domain of TCR clone 316419 (TRBV2, TRBJ2-3)
CASSDVEKATDTQYF

SEQ ID NO: 632839 - protein, 14 aa, Homo sapiens
  CDR3 for alpha chain variable domain of TCR clone 316420 (TRAV1-2, TRAJ16)
CAVNRFSDGQKLLF

SEQ ID NO: 632840 - protein, 12 aa, Homo sapiens
  CDR3 for beta chain variable domain of TCR clone 316420 (TRBV6-3, TRBJ2-7)
CASSYNPLEQYF

SEQ ID NO: 632841 - protein, 12 aa, Homo sapiens
  CDR3 for alpha chain variable domain of TCR clone 316421 (TRAV12-3, TRAJ17)
CAMTLTGNKLTF

SEQ ID NO: 632842 - protein, 21 aa, Homo sapiens
  CDR3 for beta chain variable domain of TCR clone 316421 (TRBV24-1, TRBJ2-5)
ESAIPNQTALYFCATRETQYF

SEQ ID NO: 632843 - protein, 13 aa, Homo sapiens
  CDR3 for alpha chain variable domain of TCR clone 316422 (TRAV3, TRAJ16)
CAVRDRNGPKLLF

SEQ ID NO: 632844 - protein, 15 aa, Homo sapiens
  CDR3 for beta chain variable domain of TCR clone 316422 (TRBV5-1, TRBJ2-1)
CASSPPRAPYNKQFF

SEQ ID NO: 632845 - protein, 11 aa, Homo sapiens
  CDR3 for alpha chain variable domain of TCR clone 316423 (TRAV3, TRAJ21)
CAVVNFNKFYF

SEQ ID NO: 632846 - protein, 13 aa, Homo sapiens
  CDR3 for beta chain variable domain of TCR clone 316423 (TRBV12-4, TRBJ1-2)
CASSLRQGKGYTF

SEQ ID NO: 632847 - protein, 11 aa, Homo sapiens
  CDR3 for alpha chain variable domain of TCR clone 316424 (TRAV3, TRAJ21)
CAVGNFNKFYF

SEQ ID NO: 632848 - protein, 14 aa, Homo sapiens
  CDR3 for beta chain variable domain of TCR clone 316424 (TRBV3-1, TRBJ2-2)
CASSQDWVHGELFF

SEQ ID NO: 632849 - protein, 16 aa, Homo sapiens
  CDR3 for alpha chain variable domain of TCR clone 316425 (TRAV12-3, TRAJ28)
CAMRANSGAGSYQLTF

SEQ ID NO: 632850 - protein, 16 aa, Homo sapiens
  CDR3 for beta chain variable domain of TCR clone 316425 (TRBV7-2, TRBJ1-3)
CASSRLEASSGNTIDF

SEQ ID NO: 632851 - protein, 13 aa, Homo sapiens
  CDR3 for alpha chain variable domain of TCR clone 316426 (TRAV1-1, TRAJ9)
CAAKNTGGFKTIF

SEQ ID NO: 632852 - protein, 14 aa, Homo sapiens
  CDR3 for beta chain variable domain of TCR clone 316426 (TRBV20-1, TRBJ2-1)
CSAQIGGSVNEQFF

SEQ ID NO: 632853 - protein, 12 aa, Homo sapiens
  CDR3 for alpha chain variable domain of TCR clone 316427 (TRAV1-1, TRAJ20)
CAVREVDYKLSF

SEQ ID NO: 632854 - protein, 18 aa, Homo sapiens
  CDR3 for beta chain variable domain of TCR clone 316427 (TRBV20-1, TRBJ2-3)
CSASGLAGGPGTTDTQYF

SEQ ID NO: 632855 - protein, 14 aa, Homo sapiens
  CDR3 for alpha chain variable domain of TCR clone 316428 (TRAV13-1, TRAJ27)
CAASYNTNAGKSTF

SEQ ID NO: 632856 - protein, 16 aa, Homo sapiens
  CDR3 for beta chain variable domain of TCR clone 316428 (TRBV28, TRBJ2-3)
CASSSPGGDGTDTQYF

SEQ ID NO: 632857 - protein, 12 aa, Homo sapiens
  CDR3 for alpha chain variable domain of TCR clone 316429 (TRAV12-3, TRAJ21)
CAMFNNFNKFYF

SEQ ID NO: 632858 - protein, 14 aa, Homo sapiens
  CDR3 for beta chain variable domain of TCR clone 316429 (TRBV28, TRBJ2-1)
CASSIQGTVGEQFC

SEQ ID NO: 632859 - protein, 14 aa, Homo sapiens
  CDR3 for alpha chain variable domain of TCR clone 316430 (TRAV23/DV6, TRAJ8)
CAASKNTGFQKLVV

SEQ ID NO: 632860 - protein, 16 aa, Homo sapiens
  CDR3 for beta chain variable domain of TCR clone 316430 (TRBV4-1, TRBJ2-6)
CASSQVGDPEANVLTF

SEQ ID NO: 632861 - protein, 14 aa, Homo sapiens
  CDR3 for alpha chain variable domain of TCR clone 316431 (TRAV2, TRAJ9)
CAVEDRSGGFKTIF

SEQ ID NO: 632862 - protein, 15 aa, Homo sapiens
  CDR3 for beta chain variable domain of TCR clone 316431 (TRBV7-3, TRBJ2-7)
CASSLTPTGYDEQYF

SEQ ID NO: 632863 - protein, 16 aa, Homo sapiens
  CDR3 for alpha chain variable domain of TCR clone 316432 (TRAV38-1, TRAJ32)
CALMKGGGGATNKLIF

SEQ ID NO: 632864 - protein, 13 aa, Homo sapiens
  CDR3 for beta chain variable domain of TCR clone 316432 (TRBV20-1, TRBJ2-5)
CSAREAFQETQYF

SEQ ID NO: 632865 - protein, 13 aa, Homo sapiens
  CDR3 for alpha chain variable domain of TCR clone 316433 (TRAV13-1, TRAJ39)
CSTYSNAGNMLTF

SEQ ID NO: 632866 - protein, 16 aa, Homo sapiens
  CDR3 for beta chain variable domain of TCR clone 316433 (TRBV20-1, TRBJ1-4)
CSAPGQGLLTNGKLFF

SEQ ID NO: 632867 - protein, 12 aa, Homo sapiens
  CDR3 for alpha chain variable domain of TCR clone 316434 (TRAV13-2, TRAJ23)
CAERHRGGKLIF

SEQ ID NO: 632868 - protein, 13 aa, Homo sapiens
  CDR3 for beta chain variable domain of TCR clone 316434 (TRBV7-7, TRBJ2-3)
CASSLSRADTQYF

SEQ ID NO: 632869 - protein, 16 aa, Homo sapiens
  CDR3 for alpha chain variable domain of TCR clone 316435 (TRAV3, TRAJ37)
CAVRGKGFGNTGKLIF

SEQ ID NO: 632870 - protein, 13 aa, Homo sapiens
  CDR3 for beta chain variable domain of TCR clone 316435 (TRBV12-4, TRBJ1-2)
CASSSGLTVISTF

SEQ ID NO: 632871 - protein, 12 aa, Homo sapiens
  CDR3 for alpha chain variable domain of TCR clone 316436 (TRAV27, TRAJ20)
CAGASNDYKLSF

SEQ ID NO: 632872 - protein, 13 aa, Homo sapiens
  CDR3 for beta chain variable domain of TCR clone 316436 (TRBV4-2, TRBJ1-1)
CASSQAGNTEAFF

SEQ ID NO: 632873 - protein, 22 aa, Homo sapiens
  CDR3 for alpha chain variable domain of TCR clone 316437 (TRAV12-2, TRAJ45)
SPVIQPPTSAVNKGGGADGLTF

SEQ ID NO: 632874 - protein, 15 aa, Homo sapiens
  CDR3 for beta chain variable domain of TCR clone 316437 (TRBV9, TRBJ1-6)
CASSVAGTGDSPLHF

SEQ ID NO: 632875 - protein, 15 aa, Homo sapiens
  CDR3 for alpha chain variable domain of TCR clone 316438 (TRAV2, TRAJ42)
CAVEGYGGSQGNLIF

SEQ ID NO: 632876 - protein, 16 aa, Homo sapiens
  CDR3 for beta chain variable domain of TCR clone 316438 (TRBV7-9, TRBJ1-2)
CASSLGFSSGEDGYTF

SEQ ID NO: 632877 - protein, 13 aa, Homo sapiens
  CDR3 for alpha chain variable domain of TCR clone 316439 (TRAV17, TRAJ35)
CATDYPFGNVLHC

SEQ ID NO: 632878 - protein, 15 aa, Homo sapiens
  CDR3 for beta chain variable domain of TCR clone 316439 (TRBV18, TRBJ2-5)
CASTDRGPRQETQYF

SEQ ID NO: 632879 - protein, 14 aa, Homo sapiens
  CDR3 for alpha chain variable domain of TCR clone 316440 (TRAV1-2, TRAJ8)
CAVREGTGFQTLVF

SEQ ID NO: 632880 - protein, 14 aa, Homo sapiens
  CDR3 for beta chain variable domain of TCR clone 316440 (TRBV28, TRBJ2-1)
CASSFDSVSDEQFF

SEQ ID NO: 632881 - protein, 11 aa, Homo sapiens
  CDR3 for alpha chain variable domain of TCR clone 316441 (TRAV25, TRAJ47)
CAVEYGNKLVF

SEQ ID NO: 632882 - protein, 17 aa, Homo sapiens
  CDR3 for beta chain variable domain of TCR clone 316441 (TRBV5-1, TRBJ2-5)
CASSPVALGQNQETQYF

SEQ ID NO: 632883 - protein, 13 aa, Homo sapiens
  CDR3 for alpha chain variable domain of TCR clone 316442 (TRAV27, TRAJ6)
CAGGTRGSYIPTF

SEQ ID NO: 632884 - protein, 14 aa, Homo sapiens
  CDR3 for beta chain variable domain of TCR clone 316442 (TRBV7-2, TRBJ1-5)
CASSTQGAGQPQHF

SEQ ID NO: 632885 - protein, 13 aa, Homo sapiens
  CDR3 for alpha chain variable domain of TCR clone 316443 (TRAV12-2, TRAJ17)
CAVLFKAAQQANF

SEQ ID NO: 632886 - protein, 17 aa, Homo sapiens
  CDR3 for beta chain variable domain of TCR clone 316443 (TRBV20-1, TRBJ2-2)
CSASGSGQGGLTGELFF

SEQ ID NO: 632887 - protein, 15 aa, Homo sapiens
  CDR3 for alpha chain variable domain of TCR clone 316444 (TRAV23/DV6, TRAJ44)
CAASGVTGTASKLTF

SEQ ID NO: 632888 - protein, 15 aa, Homo sapiens
  CDR3 for beta chain variable domain of TCR clone 316444 (TRBV6-3, TRBJ2-7)
CASSSPGTVFYEQYF

SEQ ID NO: 632889 - protein, 14 aa, Homo sapiens
  CDR3 for alpha chain variable domain of TCR clone 316445 (TRAV1-2, TRAJ8)
CAVREDTGFQKLVC

SEQ ID NO: 632890 - protein, 13 aa, Homo sapiens
  CDR3 for beta chain variable domain of TCR clone 316445 (TRBV12-4, TRBJ1-5)
CASSPDRAQPQHF

SEQ ID NO: 632891 - protein, 14 aa, Homo sapiens
  CDR3 for alpha chain variable domain of TCR clone 316446 (TRAV27, TRAJ21)
CAGVRQLQQILLWM

SEQ ID NO: 632892 - protein, 14 aa, Homo sapiens
  CDR3 for beta chain variable domain of TCR clone 316446 (TRBV7-9, TRBJ1-4)
CASSLEGQSEKLFF

SEQ ID NO: 632893 - protein, 12 aa, Homo sapiens
  CDR3 for alpha chain variable domain of TCR clone 316447 (TRAV23/DV6, TRAJ16)
CAATGTGQKLLF

SEQ ID NO: 632894 - protein, 15 aa, Homo sapiens
  CDR3 for beta chain variable domain of TCR clone 316447 (TRBV4-1, TRBJ1-4)
CASSDTGGTNEKLFF

SEQ ID NO: 632895 - protein, 13 aa, Homo sapiens
  CDR3 for alpha chain variable domain of TCR clone 316448 (TRAV3, TRAJ3)
CVVADSSASKIIF

SEQ ID NO: 632896 - protein, 16 aa, Homo sapiens
  CDR3 for beta chain variable domain of TCR clone 316448 (TRBV5-1, TRBJ2-3)
CASSLGLAVYTDTQYF

SEQ ID NO: 632897 - protein, 14 aa, Homo sapiens
  CDR3 for alpha chain variable domain of TCR clone 316449 (TRAV12-2, TRAJ13)
CAVKKTGGYQKVTF

SEQ ID NO: 632898 - protein, 14 aa, Homo sapiens
  CDR3 for beta chain variable domain of TCR clone 316449 (TRBV19, TRBJ2-1)
CASPTFVLSSEQFV

SEQ ID NO: 632899 - protein, 13 aa, Homo sapiens
  CDR3 for alpha chain variable domain of TCR clone 316450 (TRAV8-1, TRAJ41)
CAVNPGSGYALNF

SEQ ID NO: 632900 - protein, 15 aa, Homo sapiens
  CDR3 for beta chain variable domain of TCR clone 316450 (TRBV20-1, TRBJ2-7)
CSARDRVSGMDEQYF

SEQ ID NO: 632901 - protein, 12 aa, Homo sapiens
  CDR3 for alpha chain variable domain of TCR clone 316451 (TRAV36/DV7, TRAJ54)
CAVVRGAQKLVF

SEQ ID NO: 632902 - protein, 14 aa, Homo sapiens
  CDR3 for beta chain variable domain of TCR clone 316451 (TRBV7-3, TRBJ1-1)
CSSSLKGGYTEAFF

SEQ ID NO: 632903 - protein, 14 aa, Homo sapiens
  CDR3 for alpha chain variable domain of TCR clone 316452 (TRAV12-3, TRAJ10)
SHLPLTGGGNKLTF

SEQ ID NO: 632904 - protein, 15 aa, Homo sapiens
  CDR3 for beta chain variable domain of TCR clone 316452 (TRBV28, TRBJ2-7)
CASSPGGRGSYEQYF

SEQ ID NO: 632905 - protein, 15 aa, Homo sapiens
  CDR3 for alpha chain variable domain of TCR clone 316453 (TRAV16, TRAJ48)
CALFISNFGNEKLTF

SEQ ID NO: 632906 - protein, 15 aa, Homo sapiens
  CDR3 for beta chain variable domain of TCR clone 316453 (TRBV19, TRBJ1-2)
CASSVGQVLNYGYTF

SEQ ID NO: 632907 - protein, 12 aa, Homo sapiens
  CDR3 for alpha chain variable domain of TCR clone 316454 (TRAV13-2, TRAJ23)
CAERHRGGKLIF

SEQ ID NO: 632908 - protein, 12 aa, Homo sapiens
  CDR3 for beta chain variable domain of TCR clone 316454 (TRBV6-6, TRBJ2-5)
CASNRQSGTQYF

SEQ ID NO: 632909 - protein, 15 aa, Homo sapiens
  CDR3 for alpha chain variable domain of TCR clone 316455 (TRAV13-1, TRAJ16)
CAARYQMARSCSLQG

SEQ ID NO: 632910 - protein, 13 aa, Homo sapiens
  CDR3 for beta chain variable domain of TCR clone 316455 (TRBV4-1, TRBJ2-1)
CASSQGGGDEQFF

SEQ ID NO: 632911 - protein, 10 aa, Homo sapiens
  CDR3 for alpha chain variable domain of TCR clone 316456 (TRAV12-1, TRAJ43)
CVVHNNDMRF

SEQ ID NO: 632912 - protein, 13 aa, Homo sapiens
  CDR3 for beta chain variable domain of TCR clone 316456 (TRBV12-4, TRBJ1-2)
CASSSGLTVISIF

SEQ ID NO: 632913 - protein, 10 aa, Homo sapiens
  CDR3 for alpha chain variable domain of TCR clone 316457 (TRAV30, TRAJ48)
CGIGNEKLTF

SEQ ID NO: 632914 - protein, 14 aa, Homo sapiens
  CDR3 for beta chain variable domain of TCR clone 316457 (TRBV7-6, TRBJ2-3)
CASSVAGVTDTQYF

SEQ ID NO: 632915 - protein, 13 aa, Homo sapiens
  CDR3 for alpha chain variable domain of TCR clone 316458 (TRAV27, TRAJ56)
CAGKPGANSKLTF

SEQ ID NO: 632916 - protein, 16 aa, Homo sapiens
  CDR3 for beta chain variable domain of TCR clone 316458 (TRBV12-5, TRBJ2-5)
CASGPRTSGNQDTQYF

SEQ ID NO: 632917 - protein, 11 aa, Homo sapiens
  CDR3 for alpha chain variable domain of TCR clone 316459 (TRAV12-3, TRAJ43)
CAMSVSNDIRF

SEQ ID NO: 632918 - protein, 20 aa, Homo sapiens
  CDR3 for beta chain variable domain of TCR clone 316459 (TRBV28, TRBJ2-1)
WASTPIGRSPGLAGGNEQFF

SEQ ID NO: 632919 - protein, 15 aa, Homo sapiens
  CDR3 for alpha chain variable domain of TCR clone 316460 (TRAV35, TRAJ50)
CAGQLRKSSYDKVIF

SEQ ID NO: 632920 - protein, 12 aa, Homo sapiens
  CDR3 for beta chain variable domain of TCR clone 316460 (TRBV5-1, TRBJ2-5)
CASSLGLETQYF

SEQ ID NO: 632921 - protein, 13 aa, Homo sapiens
  CDR3 for alpha chain variable domain of TCR clone 316461 (TRAV12-2, TRAJ12)
CAVNEDGSYKLIF

SEQ ID NO: 632922 - protein, 17 aa, Homo sapiens
  CDR3 for beta chain variable domain of TCR clone 316461 (TRBV20-1, TRBJ2-7)
CSATRAGGVAGVEEQYF

SEQ ID NO: 632923 - protein, 13 aa, Homo sapiens
  CDR3 for alpha chain variable domain of TCR clone 316462 (TRAV12-1, TRAJ17)
CVVNKAAGNKLTF

SEQ ID NO: 632924 - protein, 15 aa, Homo sapiens
  CDR3 for beta chain variable domain of TCR clone 316462 (TRBV11-2, TRBJ2-2)
CSSLRTGNLIGELFF

SEQ ID NO: 632925 - protein, 16 aa, Homo sapiens
  CDR3 for alpha chain variable domain of TCR clone 316463 (TRAV4, TRAJ22)
CLVGDLYSGSARQLTF

SEQ ID NO: 632926 - protein, 16 aa, Homo sapiens
  CDR3 for beta chain variable domain of TCR clone 316463 (TRBV7-9, TRBJ2-1)
CASSDVAGGSYKEQFF

SEQ ID NO: 632927 - protein, 10 aa, Homo sapiens
  CDR3 for alpha chain variable domain of TCR clone 316464 (TRAV23/DV6, TRAJ57)
CAASSTLSQG

SEQ ID NO: 632928 - protein, 15 aa, Homo sapiens
  CDR3 for beta chain variable domain of TCR clone 316464 (TRBV28, TRBJ2-4)
CASRGLAGVKNIQYF

SEQ ID NO: 632929 - protein, 14 aa, Homo sapiens
  CDR3 for alpha chain variable domain of TCR clone 316465 (TRAV26-1, TRAJ49)
CIVRPSNTGNPFYF

SEQ ID NO: 632930 - protein, 15 aa, Homo sapiens
  CDR3 for beta chain variable domain of TCR clone 316465 (TRBV19, TRBJ1-1)
CASMGFRDVNTEAFF

SEQ ID NO: 632931 - protein, 10 aa, Homo sapiens
  CDR3 for alpha chain variable domain of TCR clone 316466 (TRAV13-1, TRAJ15)
INQAGTDLIF

SEQ ID NO: 632932 - protein, 14 aa, Homo sapiens
  CDR3 for beta chain variable domain of TCR clone 316466 (TRBV7-9, TRBJ2-1)
CASSDNSGYNEQFF

SEQ ID NO: 632933 - protein, 13 aa, Homo sapiens
  CDR3 for alpha chain variable domain of TCR clone 316467 (TRAV2, TRAJ15)
CAVASQAGTALIF

SEQ ID NO: 632934 - protein, 17 aa, Homo sapiens
  CDR3 for beta chain variable domain of TCR clone 316467 (TRBV20-1, TRBJ2-2)
CSASGSGQGGLTGELSF

SEQ ID NO: 632935 - protein, 14 aa, Homo sapiens
  CDR3 for alpha chain variable domain of TCR clone 316468 (TRAV13-2, TRAJ43)
CAEVPTYNNNDMRF

SEQ ID NO: 632936 - protein, 15 aa, Homo sapiens
  CDR3 for beta chain variable domain of TCR clone 316468 (TRBV7-9, TRBJ2-2)
CASGPLDTFPGELSF

SEQ ID NO: 632937 - protein, 15 aa, Homo sapiens
  CDR3 for alpha chain variable domain of TCR clone 316469 (TRAV2, TRAJ9)
CAVEDRGTGGFKTIF

SEQ ID NO: 632938 - protein, 15 aa, Homo sapiens
  CDR3 for beta chain variable domain of TCR clone 316469 (TRBV3-1, TRBJ2-5)
CASSRGLALRETQYF

SEQ ID NO: 632939 - protein, 20 aa, Homo sapiens
  CDR3 for alpha chain variable domain of TCR clone 316470 (TRAV4, TRAJ22)
CCVLLPRGSLISGSARQLTF

SEQ ID NO: 632940 - protein, 15 aa, Homo sapiens
  CDR3 for beta chain variable domain of TCR clone 316470 (TRBV4-1, TRBJ2-3)
CASSNLAGGRDTQYF

SEQ ID NO: 632941 - protein, 15 aa, Homo sapiens
  CDR3 for alpha chain variable domain of TCR clone 316471 (TRAV26-1, TRAJ22)
CIVRVSFWFCKATDL

SEQ ID NO: 632942 - protein, 14 aa, Homo sapiens
  CDR3 for beta chain variable domain of TCR clone 316471 (TRBV7-9, TRBJ2-3)
CASSLEAGTDTQYF

SEQ ID NO: 632943 - protein, 14 aa, Homo sapiens
  CDR3 for alpha chain variable domain of TCR clone 316472 (TRAV8-3, TRAJ31)
CAVGRGLNNARLMF

SEQ ID NO: 632944 - protein, 15 aa, Homo sapiens
  CDR3 for beta chain variable domain of TCR clone 316472 (TRBV7-2, TRBJ2-2)
CASSLSGGLTGELFF

SEQ ID NO: 632945 - protein, 15 aa, Homo sapiens
  CDR3 for alpha chain variable domain of TCR clone 316473 (TRAV23/DV6, TRAJ44)
CAARTLTGTASKLPF

SEQ ID NO: 632946 - protein, 17 aa, Homo sapiens
  CDR3 for beta chain variable domain of TCR clone 316473 (TRBV24-1, TRBJ2-1)
CATSDVSTSGTYNEQFF

SEQ ID NO: 632947 - protein, 19 aa, Homo sapiens
  CDR3 for alpha chain variable domain of TCR clone 316474 (TRAV8-3, TRAJ8)
LSTSVLWDSMNTGFQKLVF

SEQ ID NO: 632948 - protein, 13 aa, Homo sapiens
  CDR3 for beta chain variable domain of TCR clone 316474 (TRBV10-2, TRBJ2-3)
CASSESGDHTQYF

SEQ ID NO: 632949 - protein, 14 aa, Homo sapiens
  CDR3 for alpha chain variable domain of TCR clone 316475 (TRAV4, TRAJ26)
CLVGPHNYGQNFVF

SEQ ID NO: 632950 - protein, 17 aa, Homo sapiens
  CDR3 for beta chain variable domain of TCR clone 316475 (TRBV24-1, TRBJ2-1)
SATSDVSTSGTYNEQFF

SEQ ID NO: 632951 - protein, 14 aa, Homo sapiens
  CDR3 for alpha chain variable domain of TCR clone 316476 (TRAV1-1, TRAJ27)
CAVIYNTNAGKSNF

SEQ ID NO: 632952 - protein, 12 aa, Homo sapiens
  CDR3 for beta chain variable domain of TCR clone 316476 (TRBV11-2, TRBJ2-1)
CASSPGNNEQFF

SEQ ID NO: 632953 - protein, 14 aa, Homo sapiens
  CDR3 for alpha chain variable domain of TCR clone 316477 (TRAV23/DV6, TRAJ40)
CAASLTSGTYKYIF

SEQ ID NO: 632954 - protein, 14 aa, Homo sapiens
  CDR3 for beta chain variable domain of TCR clone 316477 (TRBV5-1, TRBJ2-3)
CASSRGQGGGTQYL

SEQ ID NO: 632955 - protein, 17 aa, Homo sapiens
  CDR3 for alpha chain variable domain of TCR clone 316478 (TRAV3, TRAJ6)
CAVRDGPRAGGSYIPSF

SEQ ID NO: 632956 - protein, 15 aa, Homo sapiens
  CDR3 for beta chain variable domain of TCR clone 316478 (TRBV28, TRBJ2-1)
CASSIIAGGRSEQFF

SEQ ID NO: 632957 - protein, 17 aa, Homo sapiens
  CDR3 for alpha chain variable domain of TCR clone 316479 (TRAV3, TRAJ6)
CAVRDGPRAGGSYIPTF

SEQ ID NO: 632958 - protein, 16 aa, Homo sapiens
  CDR3 for beta chain variable domain of TCR clone 316479 (TRBV4-2, TRBJ1-1)
CASSPSPGRAAPEAFF

SEQ ID NO: 632959 - protein, 11 aa, Homo sapiens
  CDR3 for alpha chain variable domain of TCR clone 316480 (TRAV1-2, TRAJ31)
CAVNNNARLMF

SEQ ID NO: 632960 - protein, 14 aa, Homo sapiens
  CDR3 for beta chain variable domain of TCR clone 316480 (TRBV7-3, TRBJ2-1)
CASSLAGGTNEQFF

SEQ ID NO: 632961 - protein, 14 aa, Homo sapiens
  CDR3 for alpha chain variable domain of TCR clone 316481 (TRAV1-2, TRAJ16)
CAVNRFSDGQKLLF

SEQ ID NO: 632962 - protein, 15 aa, Homo sapiens
  CDR3 for beta chain variable domain of TCR clone 316481 (TRBV11-2, TRBJ1-6)
CASTGFGTAVSPLHF

SEQ ID NO: 632963 - protein, 16 aa, Homo sapiens
  CDR3 for alpha chain variable domain of TCR clone 316482 (TRAV12-2, TRAJ28)
CAVITDSGAGSYQLTF

SEQ ID NO: 632964 - protein, 12 aa, Homo sapiens
  CDR3 for beta chain variable domain of TCR clone 316482 (TRBV9, TRBJ2-2)
CASSLVSGELFF

SEQ ID NO: 632965 - protein, 13 aa, Homo sapiens
  CDR3 for alpha chain variable domain of TCR clone 316483 (TRAV30, TRAJ6)
CGFIEGGSYIPTF

SEQ ID NO: 632966 - protein, 13 aa, Homo sapiens
  CDR3 for beta chain variable domain of TCR clone 316483 (TRBV5-8, TRBJ2-5)
CASSPVSQETQYF

SEQ ID NO: 632967 - protein, 14 aa, Homo sapiens
  CDR3 for alpha chain variable domain of TCR clone 316484 (TRAV8-4, TRAJ13)
CPVTLSGGYQKVTF

SEQ ID NO: 632968 - protein, 14 aa, Homo sapiens
  CDR3 for beta chain variable domain of TCR clone 316484 (TRBV7-9, TRBJ2-1)
CANSPRDSLYEQFF

SEQ ID NO: 632969 - protein, 14 aa, Homo sapiens
  CDR3 for alpha chain variable domain of TCR clone 316485 (TRAV39, TRAJ33)
CAVPDMDSNYQLIW

SEQ ID NO: 632970 - protein, 12 aa, Homo sapiens
  CDR3 for beta chain variable domain of TCR clone 316485 (TRBV19, TRBJ1-1)
CASSLSDTEAFF

SEQ ID NO: 632971 - protein, 15 aa, Homo sapiens
  CDR3 for alpha chain variable domain of TCR clone 316486 (TRAV12-2, TRAJ43)
CAFDMRFGAGTRLTV

SEQ ID NO: 632972 - protein, 18 aa, Homo sapiens
  CDR3 for beta chain variable domain of TCR clone 316486 (TRBV20-1, TRBJ2-3)
CSASGLAGEPGTTDTQYF

SEQ ID NO: 632973 - protein, 12 aa, Homo sapiens
  CDR3 for alpha chain variable domain of TCR clone 316487 (TRAV21, TRAJ13)
PGPSGGYQKVTF

SEQ ID NO: 632974 - protein, 15 aa, Homo sapiens
  CDR3 for beta chain variable domain of TCR clone 316487 (TRBV7-9, TRBJ1-6)
CASNSPGRGNSPLHF

SEQ ID NO: 632975 - protein, 14 aa, Homo sapiens
  CDR3 for alpha chain variable domain of TCR clone 316488 (TRAV8-3, TRAJ4)
CAVGAAGGYNKLIF

SEQ ID NO: 632976 - protein, 13 aa, Homo sapiens
  CDR3 for beta chain variable domain of TCR clone 316488 (TRBV4-1, TRBJ1-1)
CASSRKMNTEAFF

SEQ ID NO: 632977 - protein, 16 aa, Homo sapiens
  CDR3 for alpha chain variable domain of TCR clone 316489 (TRAV30, TRAJ24)
CGTEIVDADSWGRFQF

SEQ ID NO: 632978 - protein, 15 aa, Homo sapiens
  CDR3 for beta chain variable domain of TCR clone 316489 (TRBV7-9, TRBJ1-4)
CASSSRTGGNEKLFF

SEQ ID NO: 632979 - protein, 18 aa, Homo sapiens
  CDR3 for alpha chain variable domain of TCR clone 316490 (TRAV8-3, TRAJ6)
CAVGAEHQEEARYLHLEE

SEQ ID NO: 632980 - protein, 14 aa, Homo sapiens
  CDR3 for beta chain variable domain of TCR clone 316490 (TRBV6-6, TRBJ2-7)
CASSDSGAGYEQYF

SEQ ID NO: 632981 - protein, 17 aa, Homo sapiens
  CDR3 for alpha chain variable domain of TCR clone 316491 (TRAV1-1, TRAJ15)
CLLLLRCPNQAGTALIF

SEQ ID NO: 632982 - protein, 16 aa, Homo sapiens
  CDR3 for beta chain variable domain of TCR clone 316491 (TRBV4-1, TRBJ1-1)
CASSQDAGMGNTEAFF

SEQ ID NO: 632983 - protein, 10 aa, Homo sapiens
  CDR3 for alpha chain variable domain of TCR clone 316492 (TRAV8-4, TRAJ11)
CAVSLHTLTF

SEQ ID NO: 632984 - protein, 13 aa, Homo sapiens
  CDR3 for beta chain variable domain of TCR clone 316492 (TRBV12-4, TRBJ1-2)
CASSLRQGKGYTF

SEQ ID NO: 632985 - protein, 14 aa, Homo sapiens
  CDR3 for alpha chain variable domain of TCR clone 316493 (TRAV30, TRAJ33)
CGTVAPRSNYQLIW

SEQ ID NO: 632986 - protein, 16 aa, Homo sapiens
  CDR3 for beta chain variable domain of TCR clone 316493 (TRBV3-1, TRBJ2-5)
CASSPGQFNGFGTLYF

SEQ ID NO: 632987 - protein, 15 aa, Homo sapiens
  CDR3 for alpha chain variable domain of TCR clone 316494 (TRAV35, TRAJ23)
CAGTLGNNQGGKLIF

SEQ ID NO: 632988 - protein, 14 aa, Homo sapiens
  CDR3 for beta chain variable domain of TCR clone 316494 (TRBV7-9, TRBJ1-1)
CASTPLQSYTEAFF

SEQ ID NO: 632989 - protein, 14 aa, Homo sapiens
  CDR3 for alpha chain variable domain of TCR clone 316495 (TRAV3, TRAJ21)
CAVRDPYNFNKFYF

SEQ ID NO: 632990 - protein, 15 aa, Homo sapiens
  CDR3 for beta chain variable domain of TCR clone 316495 (TRBV19, TRBJ2-7)
CASSPAGSGEALRYF

SEQ ID NO: 632991 - protein, 15 aa, Homo sapiens
  CDR3 for alpha chain variable domain of TCR clone 316496 (TRAV8-6, TRAJ10)
CAVSSKGGGGNKPNF

SEQ ID NO: 632992 - protein, 15 aa, Homo sapiens
  CDR3 for beta chain variable domain of TCR clone 316496 (TRBV28, TRBJ1-2)
CASSSHSIANYGYTF

SEQ ID NO: 632993 - protein, 11 aa, Homo sapiens
  CDR3 for alpha chain variable domain of TCR clone 316497 (TRAV12-1, TRAJ34)
CVVNKGRELIF

SEQ ID NO: 632994 - protein, 16 aa, Homo sapiens
  CDR3 for beta chain variable domain of TCR clone 316497 (TRBV9, TRBJ2-5)
CASSPRTGYDEETQYF

SEQ ID NO: 632995 - protein, 13 aa, Homo sapiens
  CDR3 for alpha chain variable domain of TCR clone 316498 (TRAV6, TRAJ40)
CALVTSGTYKYIF

SEQ ID NO: 632996 - protein, 13 aa, Homo sapiens
  CDR3 for beta chain variable domain of TCR clone 316498 (TRBV20-1, TRBJ2-5)
CSARGDYQETQYF

SEQ ID NO: 632997 - protein, 10 aa, Homo sapiens
  CDR3 for alpha chain variable domain of TCR clone 316499 (TRAV16, TRAJ22)
SAMYLRQLTF

SEQ ID NO: 632998 - protein, 15 aa, Homo sapiens
  CDR3 for beta chain variable domain of TCR clone 316499 (TRBV7-9, TRBJ1-6)
CASSSPGRGNSQLHF

SEQ ID NO: 632999 - protein, 17 aa, Homo sapiens
  CDR3 for alpha chain variable domain of TCR clone 316500 (TRAV8-4, TRAJ11)
CAVSDRGENSGYSSLTF

SEQ ID NO: 633000 - protein, 14 aa, Homo sapiens
  CDR3 for beta chain variable domain of TCR clone 316500 (TRBV20-1, TRBJ2-1)
CSPNDEASYNEQFF

SEQ ID NO: 633001 - protein, 16 aa, Homo sapiens
  CDR3 for alpha chain variable domain of TCR clone 316501 (TRAV3, TRAJ10)
CAVSDMRAGGGNKLTF

SEQ ID NO: 633002 - protein, 15 aa, Homo sapiens
  CDR3 for beta chain variable domain of TCR clone 316501 (TRBV11-3, TRBJ2-7)
CASSPGPASSYEQYF

SEQ ID NO: 633003 - protein, 16 aa, Homo sapiens
  CDR3 for alpha chain variable domain of TCR clone 316502 (TRAV30, TRAJ24)
CGTEIVDADSWGKFQF

SEQ ID NO: 633004 - protein, 15 aa, Homo sapiens
  CDR3 for beta chain variable domain of TCR clone 316502 (TRBV20-1, TRBJ2-1)
CSARDPAGGLDEQFF

SEQ ID NO: 633005 - protein, 12 aa, Homo sapiens
  CDR3 for alpha chain variable domain of TCR clone 316503 (TRAV13-1, TRAJ15)
CAESQAGTAMIF

SEQ ID NO: 633006 - protein, 14 aa, Homo sapiens
  CDR3 for beta chain variable domain of TCR clone 316503 (TRBV19, TRBJ2-2)
CASSTLHRSGELFF

SEQ ID NO: 633007 - protein, 12 aa, Homo sapiens
  CDR3 for alpha chain variable domain of TCR clone 316504 (TRAV13-2, TRAJ23)
CAERHRGGKLIF

SEQ ID NO: 633008 - protein, 12 aa, Homo sapiens
  CDR3 for beta chain variable domain of TCR clone 316504 (TRBV20-1, TRBJ2-1)
CSAQYTYNEQFF

SEQ ID NO: 633009 - protein, 13 aa, Homo sapiens
  CDR3 for alpha chain variable domain of TCR clone 316505 (TRAV12-3, TRAJ7)
CAMTPYGNNRLAF

SEQ ID NO: 633010 - protein, 15 aa, Homo sapiens
  CDR3 for beta chain variable domain of TCR clone 316505 (TRBV20-1, TRBJ2-7)
CSAESGTSGAYEQYF

SEQ ID NO: 633011 - protein, 14 aa, Homo sapiens
  CDR3 for alpha chain variable domain of TCR clone 316506 (TRAV1-2, TRAJ16)
CAVNRFSVGQKLLF

SEQ ID NO: 633012 - protein, 12 aa, Homo sapiens
  CDR3 for beta chain variable domain of TCR clone 316506 (TRBV24-1, TRBJ1-1)
CATLYPDTEAFF

SEQ ID NO: 633013 - protein, 17 aa, Homo sapiens
  CDR3 for alpha chain variable domain of TCR clone 316507 (TRAV26-1, TRAJ53)
CIVRVDDSGGSNYKLTF

SEQ ID NO: 633014 - protein, 15 aa, Homo sapiens
  CDR3 for beta chain variable domain of TCR clone 316507 (TRBV4-1, TRBJ1-4)
FASSDTGGTNEKLFF

SEQ ID NO: 633015 - protein, 14 aa, Homo sapiens
  CDR3 for alpha chain variable domain of TCR clone 316508 (TRAV20, TRAJ42)
CAVQAGGSQGNLIF

SEQ ID NO: 633016 - protein, 15 aa, Homo sapiens
  CDR3 for beta chain variable domain of TCR clone 316508 (TRBV4-2, TRBJ2-7)
CASSQDDRSSYEQYF

SEQ ID NO: 633017 - protein, 11 aa, Homo sapiens
  CDR3 for alpha chain variable domain of TCR clone 316509 (TRAV10, TRAJ6)
CGPGGSYLPTF

SEQ ID NO: 633018 - protein, 13 aa, Homo sapiens
  CDR3 for beta chain variable domain of TCR clone 316509 (TRBV12-4, TRBJ2-5)
CASRLAVQETQYF

SEQ ID NO: 633019 - protein, 14 aa, Homo sapiens
  CDR3 for alpha chain variable domain of TCR clone 316510 (TRAV29/DV5, TRAJ37)
CAASGSGNTGKLIF

SEQ ID NO: 633020 - protein, 17 aa, Homo sapiens
  CDR3 for beta chain variable domain of TCR clone 316510 (TRBV4-1, TRBJ2-7)
CASSPFLTSGGVVEHYF

SEQ ID NO: 633021 - protein, 18 aa, Homo sapiens
  CDR3 for alpha chain variable domain of TCR clone 316511 (TRAV21, TRAJ52)
CAVRPSPAGGTSYGKLTF

SEQ ID NO: 633022 - protein, 15 aa, Homo sapiens
  CDR3 for beta chain variable domain of TCR clone 316511 (TRBV4-2, TRBJ2-7)
CASSQEGRGQSEQYF

SEQ ID NO: 633023 - protein, 16 aa, Homo sapiens
  CDR3 for alpha chain variable domain of TCR clone 316512 (TRAV3, TRAJ3)
CAVRDRAKSSASKIIF

SEQ ID NO: 633024 - protein, 11 aa, Homo sapiens
  CDR3 for beta chain variable domain of TCR clone 316512 (TRBV29-1, TRBJ2-5)
CSEDRTGTQYF

SEQ ID NO: 633025 - protein, 13 aa, Homo sapiens
  CDR3 for alpha chain variable domain of TCR clone 316513 (TRAV12-1, TRAJ21)
CVVIGDNFKKFYF

SEQ ID NO: 633026 - protein, 14 aa, Homo sapiens
  CDR3 for beta chain variable domain of TCR clone 316513 (TRBV7-3, TRBJ2-2)
CASSLYPLTGELFF

SEQ ID NO: 633027 - protein, 12 aa, Homo sapiens
  CDR3 for alpha chain variable domain of TCR clone 316514 (TRAV26-1, TRAJ35)
CIGLSFGNVLHC

SEQ ID NO: 633028 - protein, 17 aa, Homo sapiens
  CDR3 for beta chain variable domain of TCR clone 316514 (TRBV11-3, TRBJ2-5)
CASSLPGVRGGKETQYV

SEQ ID NO: 633029 - protein, 12 aa, Homo sapiens
  CDR3 for alpha chain variable domain of TCR clone 316515 (TRAV12-3, TRAJ17)
CAMTLTCNKLTF

SEQ ID NO: 633030 - protein, 15 aa, Homo sapiens
  CDR3 for beta chain variable domain of TCR clone 316515 (TRBV20-1, TRBJ2-7)
CSARERVSGMDEQYF

SEQ ID NO: 633031 - protein, 13 aa, Homo sapiens
  CDR3 for alpha chain variable domain of TCR clone 316516 (TRAV12-3, TRAJ7)
CAITPYGNNRLAF

SEQ ID NO: 633032 - protein, 13 aa, Homo sapiens
  CDR3 for beta chain variable domain of TCR clone 316516 (TRBV10-3, TRBJ1-2)
CAINADLNYGYTF

SEQ ID NO: 633033 - protein, 21 aa, Homo sapiens
  CDR3 for alpha chain variable domain of TCR clone 316517 (TRAV9-2, )
CALIQIGDIQNPDPAVYHLID

SEQ ID NO: 633034 - protein, 14 aa, Homo sapiens
  CDR3 for beta chain variable domain of TCR clone 316517 (TRBV7-3, TRBJ1-1)
CASSLKGGNTEAFF

SEQ ID NO: 633035 - protein, 16 aa, Homo sapiens
  CDR3 for alpha chain variable domain of TCR clone 316518 (TRAV12-1, TRAJ45)
CVVIRYSGGGADGLTF

SEQ ID NO: 633036 - protein, 13 aa, Homo sapiens
  CDR3 for beta chain variable domain of TCR clone 316518 (TRBV7-2, TRBJ2-4)
WASSREHANIQYF

SEQ ID NO: 633037 - protein, 13 aa, Homo sapiens
  CDR3 for alpha chain variable domain of TCR clone 316519 (TRAV17, TRAJ9)
CATAINGGFKTIV

SEQ ID NO: 633038 - protein, 16 aa, Homo sapiens
  CDR3 for beta chain variable domain of TCR clone 316519 (TRBV15, TRBJ2-1)
CATSRNLAGGYNEQFF

SEQ ID NO: 633039 - protein, 14 aa, Homo sapiens
  CDR3 for alpha chain variable domain of TCR clone 316520 (TRAV26-1, TRAJ39)
CIVFTNNAGNMLTF

SEQ ID NO: 633040 - protein, 14 aa, Homo sapiens
  CDR3 for beta chain variable domain of TCR clone 316520 (TRBV19, TRBJ2-2)
CASTVTANTGELFF

SEQ ID NO: 633041 - protein, 14 aa, Homo sapiens
  CDR3 for alpha chain variable domain of TCR clone 316521 (TRAV1-2, TRAJ8)
CSVREDTGFQKLVF

SEQ ID NO: 633042 - protein, 15 aa, Homo sapiens
  CDR3 for beta chain variable domain of TCR clone 316521 (TRBV10-2, TRBJ2-6)
CASSEQGTGANVLTF

SEQ ID NO: 633043 - protein, 18 aa, Homo sapiens
  CDR3 for alpha chain variable domain of TCR clone 316522 (TRAV26-1, TRAJ52)
FIVRVEGAGGNSYGKLTF

SEQ ID NO: 633044 - protein, 13 aa, Homo sapiens
  CDR3 for beta chain variable domain of TCR clone 316522 (TRBV7-3, TRBJ1-2)
CASSLKRGYGYTF

SEQ ID NO: 633045 - protein, 13 aa, Homo sapiens
  CDR3 for alpha chain variable domain of TCR clone 316523 (TRAV36/DV7, TRAJ33)
CAVDMDSNYQSIW

SEQ ID NO: 633046 - protein, 16 aa, Homo sapiens
  CDR3 for beta chain variable domain of TCR clone 316523 (TRBV15, TRBJ2-3)
CATRLSGGRAPDTQYF

SEQ ID NO: 633047 - protein, 15 aa, Homo sapiens
  CDR3 for alpha chain variable domain of TCR clone 316524 (TRAV17, TRAJ54)
CATEKLGQGAQKLVF

SEQ ID NO: 633048 - protein, 14 aa, Homo sapiens
  CDR3 for beta chain variable domain of TCR clone 316524 (TRBV7-3, TRBJ1-1)
CQQLRGQMKTEAFC

SEQ ID NO: 633049 - protein, 16 aa, Homo sapiens
  CDR3 for alpha chain variable domain of TCR clone 316525 (TRAV26-1, )
CIDIQNPDPAVYQLRD

SEQ ID NO: 633050 - protein, 17 aa, Homo sapiens
  CDR3 for beta chain variable domain of TCR clone 316525 (TRBV13, TRBJ2-3)
CASSLSRVAGGRNTQYF

SEQ ID NO: 633051 - protein, 14 aa, Homo sapiens
  CDR3 for alpha chain variable domain of TCR clone 316526 (TRAV35, TRAJ22)
CPGLRPGSARQLTF

SEQ ID NO: 633052 - protein, 13 aa, Homo sapiens
  CDR3 for beta chain variable domain of TCR clone 316526 (TRBV20-1, TRBJ1-1)
CSARGGGNTEAFF

SEQ ID NO: 633053 - protein, 14 aa, Homo sapiens
  CDR3 for alpha chain variable domain of TCR clone 316527 (TRAV1-2, TRAJ8)
CAVREDTGFQRLVF

SEQ ID NO: 633054 - protein, 15 aa, Homo sapiens
  CDR3 for beta chain variable domain of TCR clone 316527 (TRBV20-1, TRBJ1-1)
CSASRGVTGNTEAFF

SEQ ID NO: 633055 - protein, 16 aa, Homo sapiens
  CDR3 for alpha chain variable domain of TCR clone 316528 (TRAV30, TRAJ24)
CGTEIVMLTAGGNSSL

SEQ ID NO: 633056 - protein, 14 aa, Homo sapiens
  CDR3 for beta chain variable domain of TCR clone 316528 (TRBV12-5, TRBJ2-5)
CASGSRTHQETQYF

SEQ ID NO: 633057 - protein, 12 aa, Homo sapiens
  CDR3 for alpha chain variable domain of TCR clone 316529 (TRAV25, TRAJ11)
CAGASGYSTLTF

SEQ ID NO: 633058 - protein, 15 aa, Homo sapiens
  CDR3 for beta chain variable domain of TCR clone 316529 (TRBV28, TRBJ2-5)
CASSPPWSYQETQYF

SEQ ID NO: 633059 - protein, 14 aa, Homo sapiens
  CDR3 for alpha chain variable domain of TCR clone 316530 (TRAV26-1, TRAJ40)
CIVRVARGTYKYIF

SEQ ID NO: 633060 - protein, 15 aa, Homo sapiens
  CDR3 for beta chain variable domain of TCR clone 316530 (TRBV18, TRBJ2-3)
CASSPGLAGGDTQYF

SEQ ID NO: 633061 - protein, 16 aa, Homo sapiens
  CDR3 for alpha chain variable domain of TCR clone 316531 (TRAV26-1, TRAJ30)
CCVLLHRQSRDDKIIF

SEQ ID NO: 633062 - protein, 15 aa, Homo sapiens
  CDR3 for beta chain variable domain of TCR clone 316531 (TRBV7-2, TRBJ2-1)
CASTHGTGIYNEQFF

SEQ ID NO: 633063 - protein, 16 aa, Homo sapiens
  CDR3 for alpha chain variable domain of TCR clone 316532 (TRAV4, TRAJ22)
CLVGDLYSGSARQLTP

SEQ ID NO: 633064 - protein, 16 aa, Homo sapiens
  CDR3 for beta chain variable domain of TCR clone 316532 (TRBV7-9, TRBJ2-1)
CASSDIAGGSYNEQFF

SEQ ID NO: 633065 - protein, 14 aa, Homo sapiens
  CDR3 for alpha chain variable domain of TCR clone 316533 (TRAV12-2, TRAJ17)
CAVLFKAAGNKLIF

SEQ ID NO: 633066 - protein, 14 aa, Homo sapiens
  CDR3 for beta chain variable domain of TCR clone 316533 (TRBV7-8, TRBJ2-5)
CASSATGGQETQYF

SEQ ID NO: 633067 - protein, 16 aa, Homo sapiens
  CDR3 for alpha chain variable domain of TCR clone 316534 (TRAV30, TRAJ24)
CGTGIVDADSWGKFQF

SEQ ID NO: 633068 - protein, 13 aa, Homo sapiens
  CDR3 for beta chain variable domain of TCR clone 316534 (TRBV7-2, TRBJ1-4)
CASSLAGLEKLFF

SEQ ID NO: 633069 - protein, 14 aa, Homo sapiens
  CDR3 for alpha chain variable domain of TCR clone 316535 (TRAV35, TRAJ44)
CAGRNTGTASKITF

SEQ ID NO: 633070 - protein, 15 aa, Homo sapiens
  CDR3 for beta chain variable domain of TCR clone 316535 (TRBV4-1, TRBJ1-4)
CASSDTGGTNEKLFF

SEQ ID NO: 633071 - protein, 13 aa, Homo sapiens
  CDR3 for alpha chain variable domain of TCR clone 316536 (TRAV13-2, TRAJ48)
CAEMGFGNEKLTF

SEQ ID NO: 633072 - protein, 15 aa, Homo sapiens
  CDR3 for beta chain variable domain of TCR clone 316536 (TRBV7-9, TRBJ1-6)
CASSSPGRGNSPRHF

SEQ ID NO: 633073 - protein, 14 aa, Homo sapiens
  CDR3 for alpha chain variable domain of TCR clone 316537 (TRAV8-1, TRAJ24)
CAVNAADSWGKLQL

SEQ ID NO: 633074 - protein, 16 aa, Homo sapiens
  CDR3 for beta chain variable domain of TCR clone 316537 (TRBV20-1, TRBJ1-2)
CSASMGQGVANYGYTF

SEQ ID NO: 633075 - protein, 12 aa, Homo sapiens
  CDR3 for alpha chain variable domain of TCR clone 316538 (TRAV12-2, TRAJ45)
CASGGGADGLTF

SEQ ID NO: 633076 - protein, 16 aa, Homo sapiens
  CDR3 for beta chain variable domain of TCR clone 316538 (TRBV19, TRBJ2-3)
FASSPGLLASTDTQYF

SEQ ID NO: 633077 - protein, 18 aa, Homo sapiens
  CDR3 for alpha chain variable domain of TCR clone 316539 (TRAV21, TRAJ52)
CAVRPSPAGGTSYGKLTF

SEQ ID NO: 633078 - protein, 16 aa, Homo sapiens
  CDR3 for beta chain variable domain of TCR clone 316539 (TRBV19, TRBJ2-1)
CASSRAGPSSYNEQFF

SEQ ID NO: 633079 - protein, 14 aa, Homo sapiens
  CDR3 for alpha chain variable domain of TCR clone 316540 (TRAV8-4, TRAJ5)
CAVSTDTGRRALTL

SEQ ID NO: 633080 - protein, 14 aa, Homo sapiens
  CDR3 for beta chain variable domain of TCR clone 316540 (TRBV19, TRBJ2-1)
CASPTFVLSGEQFF

SEQ ID NO: 633081 - protein, 12 aa, Homo sapiens
  CDR3 for alpha chain variable domain of TCR clone 316541 (TRAV30, TRAJ43)
CGTEERGNDMRF

SEQ ID NO: 633082 - protein, 16 aa, Homo sapiens
  CDR3 for beta chain variable domain of TCR clone 316541 (TRBV9, TRBJ1-2)
CASSVEEKVSPYGYTF

SEQ ID NO: 633083 - protein, 10 aa, Homo sapiens
  CDR3 for alpha chain variable domain of TCR clone 316542 (TRAV12-3, TRAJ49)
CAMNDDQFYF

SEQ ID NO: 633084 - protein, 12 aa, Homo sapiens
  CDR3 for beta chain variable domain of TCR clone 316542 (TRBV24-1, TRBJ2-2)
CATSDPGLTGLQ

SEQ ID NO: 633085 - protein, 13 aa, Homo sapiens
  CDR3 for alpha chain variable domain of TCR clone 316543 (TRAV21, TRAJ27)
CAARPGNAGKSPF

SEQ ID NO: 633086 - protein, 14 aa, Homo sapiens
  CDR3 for beta chain variable domain of TCR clone 316543 (TRBV7-6, TRBJ2-3)
CTSSLGTVTDTQYF

SEQ ID NO: 633087 - protein, 16 aa, Homo sapiens
  CDR3 for alpha chain variable domain of TCR clone 316544 (TRAV12-3, TRAJ53)
CAMSPGSGGSNYKLTF

SEQ ID NO: 633088 - protein, 14 aa, Homo sapiens
  CDR3 for beta chain variable domain of TCR clone 316544 (TRBV19, TRBJ2-3)
CASSVGRGSDTQYF

SEQ ID NO: 633089 - protein, 15 aa, Homo sapiens
  CDR3 for alpha chain variable domain of TCR clone 316545 (TRAV16, TRAJ20)
YALKGGLRADYKLSF

SEQ ID NO: 633090 - protein, 16 aa, Homo sapiens
  CDR3 for beta chain variable domain of TCR clone 316545 (TRBV11-3, TRBJ2-2)
CASSSRTSPGTGELFF

SEQ ID NO: 633091 - protein, 14 aa, Homo sapiens
  CDR3 for alpha chain variable domain of TCR clone 316546 (TRAV17, TRAJ56)
CATVPAGANSKLTF

SEQ ID NO: 633092 - protein, 15 aa, Homo sapiens
  CDR3 for beta chain variable domain of TCR clone 316546 (TRBV6-6, TRBJ2-5)
CASSYGKIIQETQYF

SEQ ID NO: 633093 - protein, 15 aa, Homo sapiens
  CDR3 for alpha chain variable domain of TCR clone 316547 (TRAV12-1, TRAJ44)
CVVDTPQGTASKLTF

SEQ ID NO: 633094 - protein, 11 aa, Homo sapiens
  CDR3 for beta chain variable domain of TCR clone 316547 (TRBV6-3, TRBJ2-3)
CATGQADTQYF

SEQ ID NO: 633095 - protein, 11 aa, Homo sapiens
  CDR3 for alpha chain variable domain of TCR clone 316548 (TRAV12-3, TRAJ43)
CAMSVSNDMRF

SEQ ID NO: 633096 - protein, 14 aa, Homo sapiens
  CDR3 for beta chain variable domain of TCR clone 316548 (TRBV12-5, TRBJ2-5)
CASGSRTHQETQDF

SEQ ID NO: 633097 - protein, 16 aa, Homo sapiens
  CDR3 for alpha chain variable domain of TCR clone 316549 (TRAV12-3, TRAJ53)
CAMSVGSGGSNYKLTF

SEQ ID NO: 633098 - protein, 12 aa, Homo sapiens
  CDR3 for beta chain variable domain of TCR clone 316549 (TRBV11-2, TRBJ2-2)
CASSLGGGELFF

SEQ ID NO: 633099 - protein, 13 aa, Homo sapiens
  CDR3 for alpha chain variable domain of TCR clone 316550 (TRAV21, TRAJ20)
CAVGLRVDYKLSL

SEQ ID NO: 633100 - protein, 12 aa, Homo sapiens
  CDR3 for beta chain variable domain of TCR clone 316550 (TRBV7-2, TRBJ2-5)
CASSQYQETQYF

SEQ ID NO: 633101 - protein, 13 aa, Homo sapiens
  CDR3 for alpha chain variable domain of TCR clone 316551 (TRAV35, TRAJ42)
CAGFPGSKGNLIF

SEQ ID NO: 633102 - protein, 14 aa, Homo sapiens
  CDR3 for beta chain variable domain of TCR clone 316551 (TRBV19, TRBJ2-1)
CASPTFVSSGEQFF

SEQ ID NO: 633103 - protein, 14 aa, Homo sapiens
  CDR3 for alpha chain variable domain of TCR clone 316552 (TRAV8-3, TRAJ4)
CAVGAAGGYNKLNF

SEQ ID NO: 633104 - protein, 15 aa, Homo sapiens
  CDR3 for beta chain variable domain of TCR clone 316552 (TRBV6-5, TRBJ2-1)
CASSYDAGAGNEQFF

SEQ ID NO: 633105 - protein, 16 aa, Homo sapiens
  CDR3 for alpha chain variable domain of TCR clone 316553 (TRAV27, TRAJ45)
CPPRGRRGGGADGLTF

SEQ ID NO: 633106 - protein, 13 aa, Homo sapiens
  CDR3 for beta chain variable domain of TCR clone 316553 (TRBV7-7, TRBJ2-3)
CASSLSRADTQYF

SEQ ID NO: 633107 - protein, 13 aa, Homo sapiens
  CDR3 for alpha chain variable domain of TCR clone 316554 (TRAV21, TRAJ15)
CAVANQAGTALIF

SEQ ID NO: 633108 - protein, 13 aa, Homo sapiens
  CDR3 for beta chain variable domain of TCR clone 316554 (TRBV7-3, TRBJ1-1)
CTSSQDWGAEAFF

SEQ ID NO: 633109 - protein, 14 aa, Homo sapiens
  CDR3 for alpha chain variable domain of TCR clone 316555 (TRAV9-2, TRAJ39)
CALYIYNAVNMPTF

SEQ ID NO: 633110 - protein, 15 aa, Homo sapiens
  CDR3 for beta chain variable domain of TCR clone 316555 (TRBV29-1, TRBJ2-1)
CSAPTGLALYNEQFF

SEQ ID NO: 633111 - protein, 14 aa, Homo sapiens
  CDR3 for alpha chain variable domain of TCR clone 316556 (TRAV12-3, TRAJ15)
CAMIPPQAGTALIF

SEQ ID NO: 633112 - protein, 14 aa, Homo sapiens
  CDR3 for beta chain variable domain of TCR clone 316556 (TRBV19, TRBJ2-2)
CASSGQGIAGELFF

SEQ ID NO: 633113 - protein, 15 aa, Homo sapiens
  CDR3 for alpha chain variable domain of TCR clone 316557 (TRAV8-3, TRAJ23)
CAVGDRYNQGGKLIF

SEQ ID NO: 633114 - protein, 13 aa, Homo sapiens
  CDR3 for beta chain variable domain of TCR clone 316557 (TRBV12-4, TRBJ2-7)
CASSFVPTAEQYF

SEQ ID NO: 633115 - protein, 16 aa, Homo sapiens
  CDR3 for alpha chain variable domain of TCR clone 316558 (TRAV8-3, TRAJ44)
CAVGDSNTGTASKLTF

SEQ ID NO: 633116 - protein, 15 aa, Homo sapiens
  CDR3 for beta chain variable domain of TCR clone 316558 (TRBV27, TRBJ1-5)
CASTFNRGSNQPQHF

SEQ ID NO: 633117 - protein, 13 aa, Homo sapiens
  CDR3 for alpha chain variable domain of TCR clone 316559 (TRAV12-2, TRAJ39)
CAVNNNTGNMLTF

SEQ ID NO: 633118 - protein, 12 aa, Homo sapiens
  CDR3 for beta chain variable domain of TCR clone 316559 (TRBV5-1, TRBJ2-7)
CASSFRGYEQYF

SEQ ID NO: 633119 - protein, 14 aa, Homo sapiens
  CDR3 for alpha chain variable domain of TCR clone 316560 (TRAV8-4, TRAJ43)
CAVSDPRNNNDMRS

SEQ ID NO: 633120 - protein, 15 aa, Homo sapiens
  CDR3 for beta chain variable domain of TCR clone 316560 (TRBV4-2, TRBJ1-2)
CASSQRTGGRDGYTF

SEQ ID NO: 633121 - protein, 23 aa, Homo sapiens
  CDR3 for alpha chain variable domain of TCR clone 316561 (TRAV26-1, TRAJ38)
CIADNAGNNHIQNPDPAVYQLRD

SEQ ID NO: 633122 - protein, 19 aa, Homo sapiens
  CDR3 for beta chain variable domain of TCR clone 316561 (TRBV28, TRBJ2-5)
CASSLYLRLAGELQETQYF

SEQ ID NO: 633123 - protein, 13 aa, Homo sapiens
  CDR3 for alpha chain variable domain of TCR clone 316562 (TRAV13-1, TRAJ12)
CASSPDSSYKLIF

SEQ ID NO: 633124 - protein, 16 aa, Homo sapiens
  CDR3 for beta chain variable domain of TCR clone 316562 (TRBV15, TRBJ2-1)
CATSRERLAGAYEQFF

SEQ ID NO: 633125 - protein, 13 aa, Homo sapiens
  CDR3 for alpha chain variable domain of TCR clone 316563 (TRAV35, TRAJ21)
CAGQLSNFHKFYF

SEQ ID NO: 633126 - protein, 11 aa, Homo sapiens
  CDR3 for beta chain variable domain of TCR clone 316563 (TRBV7-6, TRBJ2-5)
CASSSQETQYF

SEQ ID NO: 633127 - protein, 11 aa, Homo sapiens
  CDR3 for alpha chain variable domain of TCR clone 316564 (TRAV21, TRAJ31)
CAVRNNARLMF

SEQ ID NO: 633128 - protein, 16 aa, Homo sapiens
  CDR3 for beta chain variable domain of TCR clone 316564 (TRBV4-1, TRBJ1-1)
CASSQDAGMGNTEAFF

SEQ ID NO: 633129 - protein, 12 aa, Homo sapiens
  CDR3 for alpha chain variable domain of TCR clone 316565 (TRAV21, TRAJ33)
CAKMDSNYQLIW

SEQ ID NO: 633130 - protein, 17 aa, Homo sapiens
  CDR3 for beta chain variable domain of TCR clone 316565 (TRBV6-5, TRBJ2-5)
CASSYGARGKTSETQYF

SEQ ID NO: 633131 - protein, 15 aa, Homo sapiens
  CDR3 for alpha chain variable domain of TCR clone 316566 (TRAV21, TRAJ37)
CAVRPTLSNTGKLIF

SEQ ID NO: 633132 - protein, 12 aa, Homo sapiens
  CDR3 for beta chain variable domain of TCR clone 316566 (TRBV5-1, TRBJ2-3)
CASSLAADTQYF

SEQ ID NO: 633133 - protein, 14 aa, Homo sapiens
  CDR3 for alpha chain variable domain of TCR clone 316567 (TRAV17, TRAJ22)
CATSPSGSARQVTF

SEQ ID NO: 633134 - protein, 15 aa, Homo sapiens
  CDR3 for beta chain variable domain of TCR clone 316567 (TRBV4-1, TRBJ2-5)
CASSQWDLYQETQYF

SEQ ID NO: 633135 - protein, 12 aa, Homo sapiens
  CDR3 for alpha chain variable domain of TCR clone 316568 (TRAV8-3, TRAJ20)
CAVGANDYKPSF

SEQ ID NO: 633136 - protein, 14 aa, Homo sapiens
  CDR3 for beta chain variable domain of TCR clone 316568 (TRBV4-2, TRBJ2-7)
CASSRAVTSYEQYF

SEQ ID NO: 633137 - protein, 12 aa, Homo sapiens
  CDR3 for alpha chain variable domain of TCR clone 316569 (TRAV13-1, TRAJ34)
CAASKGTDKLIF

SEQ ID NO: 633138 - protein, 12 aa, Homo sapiens
  CDR3 for beta chain variable domain of TCR clone 316569 (TRBV11-2, TRBJ2-2)
CASSLGGGELFF

SEQ ID NO: 633139 - protein, 11 aa, Homo sapiens
  CDR3 for alpha chain variable domain of TCR clone 316570 (TRAV3, TRAJ21)
CAVANFNKFYF

SEQ ID NO: 633140 - protein, 18 aa, Homo sapiens
  CDR3 for beta chain variable domain of TCR clone 316570 (TRBV3-1, TRBJ2-5)
CASSQAGTSGGGRETQYF

SEQ ID NO: 633141 - protein, 13 aa, Homo sapiens
  CDR3 for alpha chain variable domain of TCR clone 316571 (TRAV21, TRAJ15)
CAVANQAGTSLIF

SEQ ID NO: 633142 - protein, 14 aa, Homo sapiens
  CDR3 for beta chain variable domain of TCR clone 316571 (TRBV27, TRBJ2-2)
CASSLGAATGGLFF

SEQ ID NO: 633143 - protein, 15 aa, Homo sapiens
  CDR3 for alpha chain variable domain of TCR clone 316572 (TRAV3, TRAJ3)
CAMRDMSSSASKIIF

SEQ ID NO: 633144 - protein, 14 aa, Homo sapiens
  CDR3 for beta chain variable domain of TCR clone 316572 (TRBV19, TRBJ2-1)
CASPTFVLSGEQFF

SEQ ID NO: 633145 - protein, 14 aa, Homo sapiens
  CDR3 for alpha chain variable domain of TCR clone 316573 (TRAV12-2, TRAJ13)
CAVKKTGGYQKVTF

SEQ ID NO: 633146 - protein, 15 aa, Homo sapiens
  CDR3 for beta chain variable domain of TCR clone 316573 (TRBV27, TRBJ2-1)
CASSNGGGSANEQFL

SEQ ID NO: 633147 - protein, 15 aa, Homo sapiens
  CDR3 for alpha chain variable domain of TCR clone 316574 (TRAV25, TRAJ52)
CAGTSGGTSYGKLTF

SEQ ID NO: 633148 - protein, 13 aa, Homo sapiens
  CDR3 for beta chain variable domain of TCR clone 316574 (TRBV7-2, TRBJ2-4)
CASSREHANIQYF

SEQ ID NO: 633149 - protein, 15 aa, Homo sapiens
  CDR3 for alpha chain variable domain of TCR clone 316575 (TRAV23/DV6, TRAJ18)
CAARYRGSTLGRPYF

SEQ ID NO: 633150 - protein, 13 aa, Homo sapiens
  CDR3 for beta chain variable domain of TCR clone 316575 (TRBV7-2, TRBJ2-7)
CASSSPSGSEQYF

SEQ ID NO: 633151 - protein, 15 aa, Homo sapiens
  CDR3 for alpha chain variable domain of TCR clone 316576 (TRAV21, TRAJ24)
CAARSSTDSWGKLQF

SEQ ID NO: 633152 - protein, 15 aa, Homo sapiens
  CDR3 for beta chain variable domain of TCR clone 316576 (TRBV10-2, TRBJ2-6)
CASSEQGTGANDLTF

SEQ ID NO: 633153 - protein, 14 aa, Homo sapiens
  CDR3 for alpha chain variable domain of TCR clone 316577 (TRAV1-2, TRAJ16)
CAVNRCSDGQKLLF

SEQ ID NO: 633154 - protein, 14 aa, Homo sapiens
  CDR3 for beta chain variable domain of TCR clone 316577 (TRBV19, TRBJ2-7)
CASSVDSESYEQYF

SEQ ID NO: 633155 - protein, 13 aa, Homo sapiens
  CDR3 for alpha chain variable domain of TCR clone 316578 (TRAV3, TRAJ21)
CAVREPDFNKFYF

SEQ ID NO: 633156 - protein, 13 aa, Homo sapiens
  CDR3 for beta chain variable domain of TCR clone 316578 (TRBV9, TRBJ2-1)
CASSPAGGNEKFF

SEQ ID NO: 633157 - protein, 15 aa, Homo sapiens
  CDR3 for alpha chain variable domain of TCR clone 316579 (TRAV23/DV6, TRAJ13)
CAAWPGGGGYQKVTF

SEQ ID NO: 633158 - protein, 14 aa, Homo sapiens
  CDR3 for beta chain variable domain of TCR clone 316579 (TRBV12-5, TRBJ2-5)
CASGSRTHQETQYF

SEQ ID NO: 633159 - protein, 15 aa, Homo sapiens
  CDR3 for alpha chain variable domain of TCR clone 316580 (TRAV8-6, TRAJ6)
CAVSGESGGSYIPTF

SEQ ID NO: 633160 - protein, 12 aa, Homo sapiens
  CDR3 for beta chain variable domain of TCR clone 316580 (TRBV7-9, TRBJ2-7)
CASSQGVYEQYF

SEQ ID NO: 633161 - protein, 17 aa, Homo sapiens
  CDR3 for alpha chain variable domain of TCR clone 316581 (TRAV26-1, TRAJ33)
CCVLLHVRVEGNYQLIW

SEQ ID NO: 633162 - protein, 13 aa, Homo sapiens
  CDR3 for beta chain variable domain of TCR clone 316581 (TRBV6-3, TRBJ2-7)
CARTWGSSYEQYF

SEQ ID NO: 633163 - protein, 14 aa, Homo sapiens
  CDR3 for alpha chain variable domain of TCR clone 316582 (TRAV1-2, TRAJ16)
CAVNRFSDGQKLLF

SEQ ID NO: 633164 - protein, 15 aa, Homo sapiens
  CDR3 for beta chain variable domain of TCR clone 316582 (TRBV5-1, TRBJ2-2)
SASSSQGGNTGELFF

SEQ ID NO: 633165 - protein, 13 aa, Homo sapiens
  CDR3 for alpha chain variable domain of TCR clone 316583 (TRAV8-6, TRAJ40)
CAVSVTGTYKYIF

SEQ ID NO: 633166 - protein, 12 aa, Homo sapiens
  CDR3 for beta chain variable domain of TCR clone 316583 (TRBV4-2, TRBJ1-4)
CASSKLGEKLFF

SEQ ID NO: 633167 - protein, 10 aa, Homo sapiens
  CDR3 for alpha chain variable domain of TCR clone 316584 (TRAV16, TRAJ22)
SAMYLRQLTF

SEQ ID NO: 633168 - protein, 15 aa, Homo sapiens
  CDR3 for beta chain variable domain of TCR clone 316584 (TRBV7-9, TRBJ1-6)
CASSSPGPGNSPLHF

SEQ ID NO: 633169 - protein, 14 aa, Homo sapiens
  CDR3 for alpha chain variable domain of TCR clone 316585 (TRAV1-2, TRAJ8)
CAVREETGFQKLVF

SEQ ID NO: 633170 - protein, 15 aa, Homo sapiens
  CDR3 for beta chain variable domain of TCR clone 316585 (TRBV6-3, TRBJ2-7)
CASSSQGTVFYEQYF

SEQ ID NO: 633171 - protein, 16 aa, Homo sapiens
  CDR3 for alpha chain variable domain of TCR clone 316586 (TRAV30, TRAJ24)
CGTEIVDADSWGKFQF

SEQ ID NO: 633172 - protein, 13 aa, Homo sapiens
  CDR3 for beta chain variable domain of TCR clone 316586 (TRBV20-1, TRBJ2-3)
CSARLAGTDTQYF

SEQ ID NO: 633173 - protein, 13 aa, Homo sapiens
  CDR3 for alpha chain variable domain of TCR clone 316587 (TRAV3, TRAJ40)
CAVRGSGTYKYIF

SEQ ID NO: 633174 - protein, 15 aa, Homo sapiens
  CDR3 for beta chain variable domain of TCR clone 316587 (TRBV27, TRBJ1-5)
CASSSSGTGNQPQHF

SEQ ID NO: 633175 - protein, 10 aa, Homo sapiens
  CDR3 for alpha chain variable domain of TCR clone 316588 (TRAV2, TRAJ34)
CAVVNDKLIF

SEQ ID NO: 633176 - protein, 15 aa, Homo sapiens
  CDR3 for beta chain variable domain of TCR clone 316588 (TRBV3-1, TRBJ2-2)
YASSQDWTRAGELFF

SEQ ID NO: 633177 - protein, 14 aa, Homo sapiens
  CDR3 for alpha chain variable domain of TCR clone 316589 (TRAV21, TRAJ23)
CAIMIYNQGGKLIF

SEQ ID NO: 633178 - protein, 18 aa, Homo sapiens
  CDR3 for beta chain variable domain of TCR clone 316589 (TRBV20-1, TRBJ2-6)
CSAETTPTHGAGANVLTF

SEQ ID NO: 633179 - protein, 16 aa, Homo sapiens
  CDR3 for alpha chain variable domain of TCR clone 316590 (TRAV12-3, TRAJ53)
CAMSPGSGGSNYKLTF

SEQ ID NO: 633180 - protein, 15 aa, Homo sapiens
  CDR3 for beta chain variable domain of TCR clone 316590 (TRBV7-9, TRBJ2-2)
CASGPLDTFPGELFF

SEQ ID NO: 633181 - protein, 14 aa, Homo sapiens
  CDR3 for alpha chain variable domain of TCR clone 316591 (TRAV26-1, TRAJ38)
CIADNAGNNRKLIW

SEQ ID NO: 633182 - protein, 14 aa, Homo sapiens
  CDR3 for beta chain variable domain of TCR clone 316591 (TRBV7-9, TRBJ2-7)
CASSLGGSSYEQYF

SEQ ID NO: 633183 - protein, 11 aa, Homo sapiens
  CDR3 for alpha chain variable domain of TCR clone 316592 (TRAV21, TRAJ34)
CAHYNTDKLIF

SEQ ID NO: 633184 - protein, 13 aa, Homo sapiens
  CDR3 for beta chain variable domain of TCR clone 316592 (TRBV7-6, TRBJ1-2)
CASSLVANYGYTF

SEQ ID NO: 633185 - protein, 13 aa, Homo sapiens
  CDR3 for alpha chain variable domain of TCR clone 316593 (TRAV12-1, TRAJ11)
CVVTRGGYSTLTF

SEQ ID NO: 633186 - protein, 13 aa, Homo sapiens
  CDR3 for beta chain variable domain of TCR clone 316593 (TRBV20-1, TRBJ1-2)
CSARDQGAHGYTF

SEQ ID NO: 633187 - protein, 16 aa, Homo sapiens
  CDR3 for alpha chain variable domain of TCR clone 316594 (TRAV3, TRAJ18)
CAVRDGRGSTLGRLYF

SEQ ID NO: 633188 - protein, 17 aa, Homo sapiens
  CDR3 for beta chain variable domain of TCR clone 316594 (TRBV28, TRBJ2-5)
CASSTPEGDALQETQYF

SEQ ID NO: 633189 - protein, 14 aa, Homo sapiens
  CDR3 for alpha chain variable domain of TCR clone 316595 (TRAV13-1, TRAJ13)
CAASRVGGYQKVTF

SEQ ID NO: 633190 - protein, 17 aa, Homo sapiens
  CDR3 for beta chain variable domain of TCR clone 316595 (TRBV15, TRBJ1-5)
CATSRAPPGKRNQPQHF

SEQ ID NO: 633191 - protein, 16 aa, Homo sapiens
  CDR3 for alpha chain variable domain of TCR clone 316596 (TRAV29/DV5, TRAJ36)
CAASVGVETGANNLFF

SEQ ID NO: 633192 - protein, 16 aa, Homo sapiens
  CDR3 for beta chain variable domain of TCR clone 316596 (TRBV5-1, TRBJ2-3)
CASSLGLAVYTDTQYF

SEQ ID NO: 633193 - protein, 18 aa, Homo sapiens
  CDR3 for alpha chain variable domain of TCR clone 316597 (TRAV26-2, TRAJ54)
CILRDVEVGIQGAKKLVF

SEQ ID NO: 633194 - protein, 16 aa, Homo sapiens
  CDR3 for beta chain variable domain of TCR clone 316597 (TRBV6-1, TRBJ2-5)
CASSETLDRGAETQYF

SEQ ID NO: 633195 - protein, 14 aa, Homo sapiens
  CDR3 for alpha chain variable domain of TCR clone 316598 (TRAV1-1, TRAJ27)
CAVIYNTNAGKSTF

SEQ ID NO: 633196 - protein, 12 aa, Homo sapiens
  CDR3 for beta chain variable domain of TCR clone 316598 (TRBV5-1, TRBJ1-2)
CASSQDTYGYTF

SEQ ID NO: 633197 - protein, 14 aa, Homo sapiens
  CDR3 for alpha chain variable domain of TCR clone 316599 (TRAV16, TRAJ33)
CALSSMDSNYQLIW

SEQ ID NO: 633198 - protein, 16 aa, Homo sapiens
  CDR3 for beta chain variable domain of TCR clone 316599 (TRBV25-1, TRBJ2-7)
CASSELTGGGIYEQYF

SEQ ID NO: 633199 - protein, 12 aa, Homo sapiens
  CDR3 for alpha chain variable domain of TCR clone 316600 (TRAV12-2, TRAJ9)
CAVNTGGFKTTF

SEQ ID NO: 633200 - protein, 14 aa, Homo sapiens
  CDR3 for beta chain variable domain of TCR clone 316600 (TRBV25-1, TRBJ1-1)
CASTHLGGNTEAFF

SEQ ID NO: 633201 - protein, 14 aa, Homo sapiens
  CDR3 for alpha chain variable domain of TCR clone 316601 (TRAV27, TRAJ12)
CAGARMDSSYKLIF

SEQ ID NO: 633202 - protein, 18 aa, Homo sapiens
  CDR3 for beta chain variable domain of TCR clone 316601 (TRBV10-3, TRBJ2-7)
CAISESGRPSGGRAEQYF

SEQ ID NO: 633203 - protein, 20 aa, Homo sapiens
  CDR3 for alpha chain variable domain of TCR clone 316602 (TRAV12-3, TRAJ52)
CAMTQSYQNAGGTSYGKLTF

SEQ ID NO: 633204 - protein, 12 aa, Homo sapiens
  CDR3 for beta chain variable domain of TCR clone 316602 (TRBV12-4, TRBJ2-7)
CASSLGGYEQYF

SEQ ID NO: 633205 - protein, 13 aa, Homo sapiens
  CDR3 for alpha chain variable domain of TCR clone 316603 (TRAV2, TRAJ15)
CAVASQAGTALIF

SEQ ID NO: 633206 - protein, 12 aa, Homo sapiens
  CDR3 for beta chain variable domain of TCR clone 316603 (TRBV28, TRBJ2-7)
CASSFSSYEQYF

SEQ ID NO: 633207 - protein, 16 aa, Homo sapiens
  CDR3 for alpha chain variable domain of TCR clone 316604 (TRAV23/DV6, TRAJ48)
CAASGVVNFGNEKLPF

SEQ ID NO: 633208 - protein, 15 aa, Homo sapiens
  CDR3 for beta chain variable domain of TCR clone 316604 (TRBV7-9, TRBJ2-1)
CASSLGWGRANEQFF

SEQ ID NO: 633209 - protein, 12 aa, Homo sapiens
  CDR3 for alpha chain variable domain of TCR clone 316605 (TRAV12-3, TRAJ17)
CAMTLTGNKLTF

SEQ ID NO: 633210 - protein, 14 aa, Homo sapiens
  CDR3 for beta chain variable domain of TCR clone 316605 (TRBV18, TRBJ2-7)
CASSPRGGSYEQYF

SEQ ID NO: 633211 - protein, 15 aa, Homo sapiens
  CDR3 for alpha chain variable domain of TCR clone 316606 (TRAV29/DV5, TRAJ29)
CAASERSSGNTPLVF

SEQ ID NO: 633212 - protein, 14 aa, Homo sapiens
  CDR3 for beta chain variable domain of TCR clone 316606 (TRBV20-1, TRBJ2-1)
CSPNDEASYNEQFF

SEQ ID NO: 633213 - protein, 12 aa, Homo sapiens
  CDR3 for alpha chain variable domain of TCR clone 316607 (TRAV12-3, TRAJ17)
CAMTLTGNKLPF

SEQ ID NO: 633214 - protein, 16 aa, Homo sapiens
  CDR3 for beta chain variable domain of TCR clone 316607 (TRBV5-1, TRBJ2-3)
CASSLGLAVYTDTQYF

SEQ ID NO: 633215 - protein, 14 aa, Homo sapiens
  CDR3 for alpha chain variable domain of TCR clone 316608 (TRAV1-2, TRAJ8)
CAVREETGFQKLVF

SEQ ID NO: 633216 - protein, 17 aa, Homo sapiens
  CDR3 for beta chain variable domain of TCR clone 316608 (TRBV13, TRBJ2-3)
CASSLSRVAGGRNTQYF

SEQ ID NO: 633217 - protein, 13 aa, Homo sapiens
  CDR3 for alpha chain variable domain of TCR clone 316609 (TRAV13-2, TRAJ48)
CAAMDFGNEKLTF

SEQ ID NO: 633218 - protein, 14 aa, Homo sapiens
  CDR3 for beta chain variable domain of TCR clone 316609 (TRBV19, TRBJ2-7)
CASSMGQGAIEQYF

SEQ ID NO: 633219 - protein, 13 aa, Homo sapiens
  CDR3 for alpha chain variable domain of TCR clone 316610 (TRAV21, TRAJ57)
CAVTQGGSEKLVF

SEQ ID NO: 633220 - protein, 17 aa, Homo sapiens
  CDR3 for beta chain variable domain of TCR clone 316610 (TRBV10-3, TRBJ2-6)
CAISGLAESSGANVLTF

SEQ ID NO: 633221 - protein, 11 aa, Homo sapiens
  CDR3 for alpha chain variable domain of TCR clone 316611 (TRAV3, TRAJ21)
CAVGNFNKFYF

SEQ ID NO: 633222 - protein, 14 aa, Homo sapiens
  CDR3 for beta chain variable domain of TCR clone 316611 (TRBV7-9, TRBJ2-1)
CASSSMVGFGKQFF

SEQ ID NO: 633223 - protein, 14 aa, Homo sapiens
  CDR3 for alpha chain variable domain of TCR clone 316612 (TRAV8-4, TRAJ9)
CAVVGNTGGFKTIF

SEQ ID NO: 633224 - protein, 13 aa, Homo sapiens
  CDR3 for beta chain variable domain of TCR clone 316612 (TRBV7-3, TRBJ2-5)
CASSFRGGETQYF

SEQ ID NO: 633225 - protein, 11 aa, Homo sapiens
  CDR3 for alpha chain variable domain of TCR clone 316613 (TRAV1-2, TRAJ20)
CAVANDYKLSF

SEQ ID NO: 633226 - protein, 13 aa, Homo sapiens
  CDR3 for beta chain variable domain of TCR clone 316613 (TRBV15, TRBJ1-2)
CATSMTANYGDTF

SEQ ID NO: 633227 - protein, 14 aa, Homo sapiens
  CDR3 for alpha chain variable domain of TCR clone 316614 (TRAV13-1, TRAJ3)
CAASKSSSASKVIF

SEQ ID NO: 633228 - protein, 16 aa, Homo sapiens
  CDR3 for beta chain variable domain of TCR clone 316614 (TRBV15, TRBJ2-3)
CATSRGLGIVTDTQYF

SEQ ID NO: 633229 - protein, 13 aa, Homo sapiens
  CDR3 for alpha chain variable domain of TCR clone 316615 (TRAV17, TRAJ39)
CATDYNAGNMLTF

SEQ ID NO: 633230 - protein, 14 aa, Homo sapiens
  CDR3 for beta chain variable domain of TCR clone 316615 (TRBV12-5, TRBJ2-5)
CASGSRTHQETQYF

SEQ ID NO: 633231 - protein, 14 aa, Homo sapiens
  CDR3 for alpha chain variable domain of TCR clone 316616 (TRAV1-1, TRAJ27)
CAVIYNTNAGKSTF

SEQ ID NO: 633232 - protein, 14 aa, Homo sapiens
  CDR3 for beta chain variable domain of TCR clone 316616 (TRBV25-1, TRBJ1-1)
CTSTHLGGNTEAFF

SEQ ID NO: 633233 - protein, 13 aa, Homo sapiens
  CDR3 for alpha chain variable domain of TCR clone 316617 (TRAV23/DV6, TRAJ26)
CAASPLSGQNFVF

SEQ ID NO: 633234 - protein, 16 aa, Homo sapiens
  CDR3 for beta chain variable domain of TCR clone 316617 (TRBV9, TRBJ2-7)
CASSAGPDRSPYEQYF

SEQ ID NO: 633235 - protein, 15 aa, Homo sapiens
  CDR3 for alpha chain variable domain of TCR clone 316618 (TRAV6, TRAJ13)
CALGGASGGYQKVTF

SEQ ID NO: 633236 - protein, 12 aa, Homo sapiens
  CDR3 for beta chain variable domain of TCR clone 316618 (TRBV5-7, TRBJ1-2)
CASSDRIHGYTF

SEQ ID NO: 633237 - protein, 13 aa, Homo sapiens
  CDR3 for alpha chain variable domain of TCR clone 316619 (TRAV13-1, TRAJ9)
CAASGNGGFKTIF

SEQ ID NO: 633238 - protein, 13 aa, Homo sapiens
  CDR3 for beta chain variable domain of TCR clone 316619 (TRBV12-4, TRBJ2-7)
CASSLERVREQYF

SEQ ID NO: 633239 - protein, 15 aa, Homo sapiens
  CDR3 for alpha chain variable domain of TCR clone 316620 (TRAV16, TRAJ52)
CALNAGGTSYGKLTF

SEQ ID NO: 633240 - protein, 14 aa, Homo sapiens
  CDR3 for beta chain variable domain of TCR clone 316620 (TRBV12-4, TRBJ1-1)
CASSLGTGGTEAFF

SEQ ID NO: 633241 - protein, 12 aa, Homo sapiens
  CDR3 for alpha chain variable domain of TCR clone 316621 (TRAV2, TRAJ33)
CAVPDSNYQLIW

SEQ ID NO: 633242 - protein, 16 aa, Homo sapiens
  CDR3 for beta chain variable domain of TCR clone 316621 (TRBV20-1, TRBJ2-2)
CSASASGIPGAGELFF

SEQ ID NO: 633243 - protein, 14 aa, Homo sapiens
  CDR3 for alpha chain variable domain of TCR clone 316622 (TRAV2, TRAJ20)
CAVEDGTNDYKLSF

SEQ ID NO: 633244 - protein, 13 aa, Homo sapiens
  CDR3 for beta chain variable domain of TCR clone 316622 (TRBV20-1, TRBJ2-1)
CSASTGTSNEQFF

SEQ ID NO: 633245 - protein, 16 aa, Homo sapiens
  CDR3 for alpha chain variable domain of TCR clone 316623 (TRAV14/DV4, TRAJ53)
CAMSEGGGGSNYKLTF

SEQ ID NO: 633246 - protein, 12 aa, Homo sapiens
  CDR3 for beta chain variable domain of TCR clone 316623 (TRBV12-4, TRBJ1-5)
CASSLGRQPQHF

SEQ ID NO: 633247 - protein, 14 aa, Homo sapiens
  CDR3 for alpha chain variable domain of TCR clone 316624 (TRAV29/DV5, TRAJ54)
CAVRSRGGAQKLVF

SEQ ID NO: 633248 - protein, 13 aa, Homo sapiens
  CDR3 for beta chain variable domain of TCR clone 316624 (TRBV27, TRBJ1-1)
CASSLSIGAEAFF

SEQ ID NO: 633249 - protein, 14 aa, Homo sapiens
  CDR3 for alpha chain variable domain of TCR clone 316625 (TRAV1-2, TRAJ8)
CAVREDTGFQKLVF

SEQ ID NO: 633250 - protein, 15 aa, Homo sapiens
  CDR3 for beta chain variable domain of TCR clone 316625 (TRBV6-3, TRBJ2-7)
CTSSSPGTVFYEQYL

SEQ ID NO: 633251 - protein, 12 aa, Homo sapiens
  CDR3 for alpha chain variable domain of TCR clone 316626 (TRAV3, TRAJ20)
CAVRDTDYKLSF

SEQ ID NO: 633252 - protein, 14 aa, Homo sapiens
  CDR3 for beta chain variable domain of TCR clone 316626 (TRBV4-2, TRBJ2-1)
CASGLDRAYNEQFF

SEQ ID NO: 633253 - protein, 15 aa, Homo sapiens
  CDR3 for alpha chain variable domain of TCR clone 316627 (TRAV8-3, TRAJ11)
CAVGLLNSGYRTLPF

SEQ ID NO: 633254 - protein, 16 aa, Homo sapiens
  CDR3 for beta chain variable domain of TCR clone 316627 (TRBV7-3, TRBJ2-2)
CASSLKRGTLSGELFF

SEQ ID NO: 633255 - protein, 14 aa, Homo sapiens
  CDR3 for alpha chain variable domain of TCR clone 316628 (TRAV12-2, TRAJ13)
CAVKKTGGYQKVTF

SEQ ID NO: 633256 - protein, 14 aa, Homo sapiens
  CDR3 for beta chain variable domain of TCR clone 316628 (TRBV10-3, TRBJ2-1)
CAISSDRAYNEQFF

SEQ ID NO: 633257 - protein, 15 aa, Homo sapiens
  CDR3 for alpha chain variable domain of TCR clone 316629 (TRAV35, TRAJ58)
CAGRRQETSGSRLTF

SEQ ID NO: 633258 - protein, 14 aa, Homo sapiens
  CDR3 for beta chain variable domain of TCR clone 316629 (TRBV7-9, TRBJ2-2)
CASSLGHRAGELFF

SEQ ID NO: 633259 - protein, 12 aa, Homo sapiens
  CDR3 for alpha chain variable domain of TCR clone 316630 (TRAV5, TRAJ27)
CAEITNAGKSTF

SEQ ID NO: 633260 - protein, 13 aa, Homo sapiens
  CDR3 for beta chain variable domain of TCR clone 316630 (TRBV7-9, TRBJ1-2)
CASSLKQNYGYTF

SEQ ID NO: 633261 - protein, 13 aa, Homo sapiens
  CDR3 for alpha chain variable domain of TCR clone 316631 (TRAV29/DV5, TRAJ47)
CAASAEYGNKLVF

SEQ ID NO: 633262 - protein, 12 aa, Homo sapiens
  CDR3 for beta chain variable domain of TCR clone 316631 (TRBV7-9, TRBJ1-5)
CASSPQGQPQHF

SEQ ID NO: 633263 - protein, 14 aa, Homo sapiens
  CDR3 for alpha chain variable domain of TCR clone 316632 (TRAV1-2, TRAJ16)
CAVNLFSDGQELLF

SEQ ID NO: 633264 - protein, 16 aa, Homo sapiens
  CDR3 for beta chain variable domain of TCR clone 316632 (TRBV11-2, TRBJ1-2)
CASSLDTGGADYGYTF

SEQ ID NO: 633265 - protein, 13 aa, Homo sapiens
  CDR3 for alpha chain variable domain of TCR clone 316633 (TRAV12-3, TRAJ54)
CAMTLQGAQKLVF

SEQ ID NO: 633266 - protein, 14 aa, Homo sapiens
  CDR3 for beta chain variable domain of TCR clone 316633 (TRBV4-1, TRBJ2-2)
CASSQAVDTGELFF

SEQ ID NO: 633267 - protein, 16 aa, Homo sapiens
  CDR3 for alpha chain variable domain of TCR clone 316634 (TRAV26-1, TRAJ45)
CIVEKYSGGGADGLTF

SEQ ID NO: 633268 - protein, 15 aa, Homo sapiens
  CDR3 for beta chain variable domain of TCR clone 316634 (TRBV11-3, TRBJ2-3)
CASLKDGREGDTQYF

SEQ ID NO: 633269 - protein, 14 aa, Homo sapiens
  CDR3 for alpha chain variable domain of TCR clone 316635 (TRAV23/DV6, TRAJ17)
CAASIGAAGNKLTF

SEQ ID NO: 633270 - protein, 12 aa, Homo sapiens
  CDR3 for beta chain variable domain of TCR clone 316635 (TRBV20-1, TRBJ2-5)
CSAGGAGETQYL

SEQ ID NO: 633271 - protein, 10 aa, Homo sapiens
  CDR3 for alpha chain variable domain of TCR clone 316636 (TRAV1-2, TRAJ31)
CAFFDARLMF

SEQ ID NO: 633272 - protein, 11 aa, Homo sapiens
  CDR3 for beta chain variable domain of TCR clone 316636 (TRBV6-3, TRBJ2-3)
CATGQADTQYF

SEQ ID NO: 633273 - protein, 22 aa, Homo sapiens
  CDR3 for alpha chain variable domain of TCR clone 316637 (TRAV8-3, TRAJ32)
CAVEVVLQTSSSLELALCVLSS

SEQ ID NO: 633274 - protein, 12 aa, Homo sapiens
  CDR3 for beta chain variable domain of TCR clone 316637 (TRBV7-8, TRBJ2-7)
CASSLGDREQYF

SEQ ID NO: 633275 - protein, 11 aa, Homo sapiens
  CDR3 for alpha chain variable domain of TCR clone 316638 (TRAV26-1, TRAJ37)
CIVRVGRKLIF

SEQ ID NO: 633276 - protein, 13 aa, Homo sapiens
  CDR3 for beta chain variable domain of TCR clone 316638 (TRBV12-4, TRBJ2-2)
CASSPLPPGELFF

SEQ ID NO: 633277 - protein, 14 aa, Homo sapiens
  CDR3 for alpha chain variable domain of TCR clone 316639 (TRAV13-1, TRAJ9)
CAASAFTGGFKTIF

SEQ ID NO: 633278 - protein, 16 aa, Homo sapiens
  CDR3 for beta chain variable domain of TCR clone 316639 (TRBV12-4, TRBJ2-3)
CASSFGTGGISDTQYF

SEQ ID NO: 633279 - protein, 14 aa, Homo sapiens
  CDR3 for alpha chain variable domain of TCR clone 316640 (TRAV8-1, TRAJ4)
CAVKFSGGYNKLIF

SEQ ID NO: 633280 - protein, 15 aa, Homo sapiens
  CDR3 for beta chain variable domain of TCR clone 316640 (TRBV27, TRBJ1-5)
CASSSSGTGNQPQHF

SEQ ID NO: 633281 - protein, 14 aa, Homo sapiens
  CDR3 for alpha chain variable domain of TCR clone 316641 (TRAV17, TRAJ22)
CATSPSGSARQLTF

SEQ ID NO: 633282 - protein, 20 aa, Homo sapiens
  CDR3 for beta chain variable domain of TCR clone 316641 (TRBV6-4, TRBJ2-7)
CASSDSSVSGQVPTSYEQYF

SEQ ID NO: 633283 - protein, 15 aa, Homo sapiens
  CDR3 for alpha chain variable domain of TCR clone 316642 (TRAV8-3, TRAJ45)
CASSYSGGGADGLTF

SEQ ID NO: 633284 - protein, 15 aa, Homo sapiens
  CDR3 for beta chain variable domain of TCR clone 316642 (TRBV4-1, TRBJ2-3)
CASSRGQGIPDTQYF

SEQ ID NO: 633285 - protein, 15 aa, Homo sapiens
  CDR3 for alpha chain variable domain of TCR clone 316643 (TRAV2, TRAJ9)
CAVEYRGTGGFKTIF

SEQ ID NO: 633286 - protein, 13 aa, Homo sapiens
  CDR3 for beta chain variable domain of TCR clone 316643 (TRBV20-1, TRBJ1-1)
CSARGGGNTEAFF

SEQ ID NO: 633287 - protein, 12 aa, Homo sapiens
  CDR3 for alpha chain variable domain of TCR clone 316644 (TRAV38-1, TRAJ57)
CAFMKLPPTLVF

SEQ ID NO: 633288 - protein, 15 aa, Homo sapiens
  CDR3 for beta chain variable domain of TCR clone 316644 (TRBV7-2, TRBJ2-1)
CASSSGLAGGNEQFF

SEQ ID NO: 633289 - protein, 14 aa, Homo sapiens
  CDR3 for alpha chain variable domain of TCR clone 316645 (TRAV1-2, TRAJ16)
CAVNRFSDGQKLLF

SEQ ID NO: 633290 - protein, 15 aa, Homo sapiens
  CDR3 for beta chain variable domain of TCR clone 316645 (TRBV12-4, TRBJ2-5)
CASSPLTGLQETQYF

SEQ ID NO: 633291 - protein, 14 aa, Homo sapiens
  CDR3 for alpha chain variable domain of TCR clone 316646 (TRAV1-2, TRAJ16)
CAVNRFTDGQKLLF

SEQ ID NO: 633292 - protein, 14 aa, Homo sapiens
  CDR3 for beta chain variable domain of TCR clone 316646 (TRBV7-9, TRBJ2-3)
CASSLEDGTDTQYF

SEQ ID NO: 633293 - protein, 16 aa, Homo sapiens
  CDR3 for alpha chain variable domain of TCR clone 316647 (TRAV30, TRAJ24)
CGTEIVDAYSWGKFQF

SEQ ID NO: 633294 - protein, 15 aa, Homo sapiens
  CDR3 for beta chain variable domain of TCR clone 316647 (TRBV28, TRBJ2-1)
CASSIIAGGRSEQFF

SEQ ID NO: 633295 - protein, 17 aa, Homo sapiens
  CDR3 for alpha chain variable domain of TCR clone 316648 (TRAV3, TRAJ12)
CAVRDGGRVDSSYKLSF

SEQ ID NO: 633296 - protein, 15 aa, Homo sapiens
  CDR3 for beta chain variable domain of TCR clone 316648 (TRBV20-1, TRBJ2-5)
CSAEGTGGLQETQYF

SEQ ID NO: 633297 - protein, 14 aa, Homo sapiens
  CDR3 for alpha chain variable domain of TCR clone 316649 (TRAV2, TRAJ9)
CAVEGRSGGFKTIF

SEQ ID NO: 633298 - protein, 14 aa, Homo sapiens
  CDR3 for beta chain variable domain of TCR clone 316649 (TRBV7-3, TRBJ2-1)
CASSLAGGTNEQFF

SEQ ID NO: 633299 - protein, 16 aa, Homo sapiens
  CDR3 for alpha chain variable domain of TCR clone 316650 (TRAV3, TRAJ10)
CAVRDMNAGGGNKLTF

SEQ ID NO: 633300 - protein, 14 aa, Homo sapiens
  CDR3 for beta chain variable domain of TCR clone 316650 (TRBV4-1, TRBJ2-7)
CASSPVAGGDEQYF

SEQ ID NO: 633301 - protein, 14 aa, Homo sapiens
  CDR3 for alpha chain variable domain of TCR clone 316651 (TRAV16, TRAJ33)
CALSAMDSNYQLIW

SEQ ID NO: 633302 - protein, 15 aa, Homo sapiens
  CDR3 for beta chain variable domain of TCR clone 316651 (TRBV7-9, TRBJ2-2)
CASGPLDTFPGELFF

SEQ ID NO: 633303 - protein, 13 aa, Homo sapiens
  CDR3 for alpha chain variable domain of TCR clone 316652 (TRAV21, TRAJ20)
CAVGLRVDYKLSF

SEQ ID NO: 633304 - protein, 17 aa, Homo sapiens
  CDR3 for beta chain variable domain of TCR clone 316652 (TRBV28, TRBJ2-5)
CASSTPEGDALQETQYF

SEQ ID NO: 633305 - protein, 14 aa, Homo sapiens
  CDR3 for alpha chain variable domain of TCR clone 316653 (TRAV13-1, TRAJ44)
CAAKATGTASKLTC

SEQ ID NO: 633306 - protein, 14 aa, Homo sapiens
  CDR3 for beta chain variable domain of TCR clone 316653 (TRBV25-1, TRBJ1-1)
CASTHLGGNTEAFF

SEQ ID NO: 633307 - protein, 15 aa, Homo sapiens
  CDR3 for alpha chain variable domain of TCR clone 316654 (TRAV12-2, TRAJ23)
CAVKPIYNQGGKIIF

SEQ ID NO: 633308 - protein, 15 aa, Homo sapiens
  CDR3 for beta chain variable domain of TCR clone 316654 (TRBV5-1, TRBJ1-2)
CASSLVGGQSQGYTF

SEQ ID NO: 633309 - protein, 16 aa, Homo sapiens
  CDR3 for alpha chain variable domain of TCR clone 316655 (TRAV8-3, TRAJ44)
CAVGASNTGTASILTF

SEQ ID NO: 633310 - protein, 15 aa, Homo sapiens
  CDR3 for beta chain variable domain of TCR clone 316655 (TRBV27, TRBJ1-5)
CASTFNRGSNQPQHF

SEQ ID NO: 633311 - protein, 14 aa, Homo sapiens
  CDR3 for alpha chain variable domain of TCR clone 316656 (TRAV12-1, TRAJ13)
CVVIDSGGYQKITF

SEQ ID NO: 633312 - protein, 12 aa, Homo sapiens
  CDR3 for beta chain variable domain of TCR clone 316656 (TRBV29-1, TRBJ2-3)
CSVTGGADTQYF

SEQ ID NO: 633313 - protein, 14 aa, Homo sapiens
  CDR3 for alpha chain variable domain of TCR clone 316657 (TRAV27, TRAJ22)
CAGLPSGSARQLTF

SEQ ID NO: 633314 - protein, 13 aa, Homo sapiens
  CDR3 for beta chain variable domain of TCR clone 316657 (TRBV7-9, TRBJ2-1)
CASSLVWAGEQFF

SEQ ID NO: 633315 - protein, 15 aa, Homo sapiens
  CDR3 for alpha chain variable domain of TCR clone 316658 (TRAV21, TRAJ24)
CAARSSTDSWGKLQF

SEQ ID NO: 633316 - protein, 14 aa, Homo sapiens
  CDR3 for beta chain variable domain of TCR clone 316658 (TRBV23-1, TRBJ2-5)
CASSFLRSQETQYF

SEQ ID NO: 633317 - protein, 14 aa, Homo sapiens
  CDR3 for alpha chain variable domain of TCR clone 316659 (TRAV12-2, TRAJ13)
CAVQKTGGYQKVTF

SEQ ID NO: 633318 - protein, 14 aa, Homo sapiens
  CDR3 for beta chain variable domain of TCR clone 316659 (TRBV19, TRBJ2-1)
CASPTFVLSSEQFF

SEQ ID NO: 633319 - protein, 15 aa, Homo sapiens
  CDR3 for alpha chain variable domain of TCR clone 316660 (TRAV3, TRAJ36)
CAVRASQTGANNLFF

SEQ ID NO: 633320 - protein, 16 aa, Homo sapiens
  CDR3 for beta chain variable domain of TCR clone 316660 (TRBV5-1, TRBJ2-2)
CASSSYREGDTGELFF

SEQ ID NO: 633321 - protein, 13 aa, Homo sapiens
  CDR3 for alpha chain variable domain of TCR clone 316661 (TRAV5, TRAJ30)
CAEIANRDDKIIF

SEQ ID NO: 633322 - protein, 13 aa, Homo sapiens
  CDR3 for beta chain variable domain of TCR clone 316661 (TRBV20-1, TRBJ1-1)
CSARGGGNTEAFF

SEQ ID NO: 633323 - protein, 16 aa, Homo sapiens
  CDR3 for alpha chain variable domain of TCR clone 316662 (TRAV12-3, TRAJ53)
CAMSPGSGGSNYKLTF

SEQ ID NO: 633324 - protein, 20 aa, Homo sapiens
  CDR3 for beta chain variable domain of TCR clone 316662 (TRBV7-8, TRBJ2-2)
CASSHLFPVPTIHITGELFF

SEQ ID NO: 633325 - protein, 15 aa, Homo sapiens
  CDR3 for alpha chain variable domain of TCR clone 316663 (TRAV4, TRAJ32)
CLVGEDGGATNKLIF

SEQ ID NO: 633326 - protein, 16 aa, Homo sapiens
  CDR3 for beta chain variable domain of TCR clone 316663 (TRBV12-5, TRBJ2-5)
CASGPRTSGNQETQYF

SEQ ID NO: 633327 - protein, 14 aa, Homo sapiens
  CDR3 for alpha chain variable domain of TCR clone 316664 (TRAV26-1, TRAJ38)
CIADNARNNRKLIW

SEQ ID NO: 633328 - protein, 12 aa, Homo sapiens
  CDR3 for beta chain variable domain of TCR clone 316664 (TRBV11-2, TRBJ2-2)
CASSLPTGELFF

SEQ ID NO: 633329 - protein, 15 aa, Homo sapiens
  CDR3 for alpha chain variable domain of TCR clone 316665 (TRAV3, TRAJ29)
CAVRDLYSGNTPLVF

SEQ ID NO: 633330 - protein, 17 aa, Homo sapiens
  CDR3 for beta chain variable domain of TCR clone 316665 (TRBV20-1, TRBJ2-1)
CSARDPLAGVWDKEQFF

SEQ ID NO: 633331 - protein, 13 aa, Homo sapiens
  CDR3 for alpha chain variable domain of TCR clone 316666 (TRAV13-1, TRAJ39)
CSKYSNAGNMLTF

SEQ ID NO: 633332 - protein, 13 aa, Homo sapiens
  CDR3 for beta chain variable domain of TCR clone 316666 (TRBV20-1, TRBJ1-1)
CSARCGGNTEAFF

SEQ ID NO: 633333 - protein, 14 aa, Homo sapiens
  CDR3 for alpha chain variable domain of TCR clone 316667 (TRAV12-3, TRAJ10)
SHLPLTGGGNKLNF

SEQ ID NO: 633334 - protein, 13 aa, Homo sapiens
  CDR3 for beta chain variable domain of TCR clone 316667 (TRBV12-4, TRBJ1-1)
CASSPGTGFEAFF

SEQ ID NO: 633335 - protein, 13 aa, Homo sapiens
  CDR3 for alpha chain variable domain of TCR clone 316668 (TRAV1-2, TRAJ9)
CAVLNTGGFKTIF

SEQ ID NO: 633336 - protein, 14 aa, Homo sapiens
  CDR3 for beta chain variable domain of TCR clone 316668 (TRBV18, TRBJ1-1)
CASSPGFQGVEAFF

SEQ ID NO: 633337 - protein, 10 aa, Homo sapiens
  CDR3 for alpha chain variable domain of TCR clone 316669 (TRAV23/DV6, TRAJ43)
CAAAVAALEQ

SEQ ID NO: 633338 - protein, 13 aa, Homo sapiens
  CDR3 for beta chain variable domain of TCR clone 316669 (TRBV7-9, TRBJ1-2)
CASSLKQNYGYTF

SEQ ID NO: 633339 - protein, 15 aa, Homo sapiens
  CDR3 for alpha chain variable domain of TCR clone 316670 (TRAV16, TRAJ4)
CALEDPSGGYNKLIF

SEQ ID NO: 633340 - protein, 12 aa, Homo sapiens
  CDR3 for beta chain variable domain of TCR clone 316670 (TRBV11-2, TRBJ2-2)
CASSLGGGELFF

SEQ ID NO: 633341 - protein, 14 aa, Homo sapiens
  CDR3 for alpha chain variable domain of TCR clone 316671 (TRAV23/DV6, TRAJ11)
CAALIGGGYSTLTF

SEQ ID NO: 633342 - protein, 15 aa, Homo sapiens
  CDR3 for beta chain variable domain of TCR clone 316671 (TRBV11-2, TRBJ2-2)
CASRGLAANTGELFF

SEQ ID NO: 633343 - protein, 15 aa, Homo sapiens
  CDR3 for alpha chain variable domain of TCR clone 316672 (TRAV12-2, TRAJ8)
CAVREESTGFQKLVF

SEQ ID NO: 633344 - protein, 15 aa, Homo sapiens
  CDR3 for beta chain variable domain of TCR clone 316672 (TRBV28, TRBJ2-4)
CAAGSGTLLMGIQYF

SEQ ID NO: 633345 - protein, 16 aa, Homo sapiens
  CDR3 for alpha chain variable domain of TCR clone 316673 (TRAV8-2, TRAJ50)
CVVSDHMKPSYDKVIF

SEQ ID NO: 633346 - protein, 15 aa, Homo sapiens
  CDR3 for beta chain variable domain of TCR clone 316673 (TRBV7-2, TRBJ2-1)
CASSFQADEYNEQFF

SEQ ID NO: 633347 - protein, 16 aa, Homo sapiens
  CDR3 for alpha chain variable domain of TCR clone 316674 (TRAV26-1, TRAJ36)
CIVSVSYQTGANNLFF

SEQ ID NO: 633348 - protein, 13 aa, Homo sapiens
  CDR3 for beta chain variable domain of TCR clone 316674 (TRBV5-5, TRBJ1-5)
CASSLGIGGDQHF

SEQ ID NO: 633349 - protein, 13 aa, Homo sapiens
  CDR3 for alpha chain variable domain of TCR clone 316675 (TRAV12-1, TRAJ26)
SATYLYYGQNFVF

SEQ ID NO: 633350 - protein, 21 aa, Homo sapiens
  CDR3 for beta chain variable domain of TCR clone 316675 (TRBV15, TRBJ2-1)
AWGTQPCTCVPPAEVDTARFF

SEQ ID NO: 633351 - protein, 13 aa, Homo sapiens
  CDR3 for alpha chain variable domain of TCR clone 316676 (TRAV38-2/DV8, TRAJ45)
WAYVGGGADGLTF

SEQ ID NO: 633352 - protein, 14 aa, Homo sapiens
  CDR3 for beta chain variable domain of TCR clone 316676 (TRBV9, TRBJ2-7)
CASSPLRAVGEQYF

SEQ ID NO: 633353 - protein, 14 aa, Homo sapiens
  CDR3 for alpha chain variable domain of TCR clone 316677 (TRAV26-1, TRAJ29)
CLVRVEPGNTPLVF

SEQ ID NO: 633354 - protein, 14 aa, Homo sapiens
  CDR3 for beta chain variable domain of TCR clone 316677 (TRBV25-1, TRBJ1-1)
CASTHLGGNTEAFF

SEQ ID NO: 633355 - protein, 13 aa, Homo sapiens
  CDR3 for alpha chain variable domain of TCR clone 316678 (TRAV17, TRAJ40)
CAGALGGTYKYIF

SEQ ID NO: 633356 - protein, 16 aa, Homo sapiens
  CDR3 for beta chain variable domain of TCR clone 316678 (TRBV11-2, TRBJ1-2)
CASSLDTGGADYGYTF

SEQ ID NO: 633357 - protein, 11 aa, Homo sapiens
  CDR3 for alpha chain variable domain of TCR clone 316679 (TRAV12-3, TRAJ27)
CAMANAGNSTF

SEQ ID NO: 633358 - protein, 14 aa, Homo sapiens
  CDR3 for beta chain variable domain of TCR clone 316679 (TRBV4-1, TRBJ2-2)
CASSQAVNTGELFF

SEQ ID NO: 633359 - protein, 11 aa, Homo sapiens
  CDR3 for alpha chain variable domain of TCR clone 316680 (TRAV12-3, TRAJ43)
CAMSVSNDMRF

SEQ ID NO: 633360 - protein, 15 aa, Homo sapiens
  CDR3 for beta chain variable domain of TCR clone 316680 (TRBV7-2, TRBJ2-2)
CASSLVAGSAGELFF

SEQ ID NO: 633361 - protein, 12 aa, Homo sapiens
  CDR3 for alpha chain variable domain of TCR clone 316681 (TRAV12-1, TRAJ23)
CVVNWGGGKLIF

SEQ ID NO: 633362 - protein, 14 aa, Homo sapiens
  CDR3 for beta chain variable domain of TCR clone 316681 (TRBV20-1, TRBJ2-1)
CSARGGSSYNEQFF

SEQ ID NO: 633363 - protein, 13 aa, Homo sapiens
  CDR3 for alpha chain variable domain of TCR clone 316682 (TRAV9-2, TRAJ53)
CALSGGSNYKLTF

SEQ ID NO: 633364 - protein, 11 aa, Homo sapiens
  CDR3 for beta chain variable domain of TCR clone 316682 (TRBV6-3, TRBJ2-3)
CATGQADTQYF

SEQ ID NO: 633365 - protein, 20 aa, Homo sapiens
  CDR3 for alpha chain variable domain of TCR clone 316683 (TRAV12-1, TRAJ42)
SSVIQPPTSVTGGSQGNLIF

SEQ ID NO: 633366 - protein, 14 aa, Homo sapiens
  CDR3 for beta chain variable domain of TCR clone 316683 (TRBV25-1, TRBJ1-2)
CASSDTTGVVGYSF

SEQ ID NO: 633367 - protein, 13 aa, Homo sapiens
  CDR3 for alpha chain variable domain of TCR clone 316684 (TRAV21, TRAJ56)
CAGWVGANSKLTF

SEQ ID NO: 633368 - protein, 11 aa, Homo sapiens
  CDR3 for beta chain variable domain of TCR clone 316684 (TRBV7-9, TRBJ2-3)
CASSGPDTQYF

SEQ ID NO: 633369 - protein, 12 aa, Homo sapiens
  CDR3 for alpha chain variable domain of TCR clone 316685 (TRAV12-1, TRAJ20)
CVVNPDDYKLSF

SEQ ID NO: 633370 - protein, 13 aa, Homo sapiens
  CDR3 for beta chain variable domain of TCR clone 316685 (TRBV3-1, TRBJ1-5)
CASSQDLDQPQHF

SEQ ID NO: 633371 - protein, 16 aa, Homo sapiens
  CDR3 for alpha chain variable domain of TCR clone 316686 (TRAV16, TRAJ52)
CALSGVGGTSYGKLTF

SEQ ID NO: 633372 - protein, 13 aa, Homo sapiens
  CDR3 for beta chain variable domain of TCR clone 316686 (TRBV7-9, TRBJ2-3)
CASSPGSTDTQYF

SEQ ID NO: 633373 - protein, 11 aa, Homo sapiens
  CDR3 for alpha chain variable domain of TCR clone 316687 (TRAV12-2, TRAJ6)
CAVEGSYIPTF

SEQ ID NO: 633374 - protein, 15 aa, Homo sapiens
  CDR3 for beta chain variable domain of TCR clone 316687 (TRBV7-2, TRBJ2-1)
CASSLVAGRYNEQFF

SEQ ID NO: 633375 - protein, 13 aa, Homo sapiens
  CDR3 for alpha chain variable domain of TCR clone 316688 (TRAV36/DV7, TRAJ41)
CAVEANSGYALNF

SEQ ID NO: 633376 - protein, 15 aa, Homo sapiens
  CDR3 for beta chain variable domain of TCR clone 316688 (TRBV5-4, TRBJ2-2)
CASSLTSRGTGELFF

SEQ ID NO: 633377 - protein, 12 aa, Homo sapiens
  CDR3 for alpha chain variable domain of TCR clone 316689 (TRAV13-1, TRAJ43)
CAASIGDNDMRF

SEQ ID NO: 633378 - protein, 13 aa, Homo sapiens
  CDR3 for beta chain variable domain of TCR clone 316689 (TRBV7-3, TRBJ1-2)
CASSLKRGYGYTF

SEQ ID NO: 633379 - protein, 12 aa, Homo sapiens
  CDR3 for alpha chain variable domain of TCR clone 316690 (TRAV21, TRAJ29)
CAVTSGNTPLVF

SEQ ID NO: 633380 - protein, 16 aa, Homo sapiens
  CDR3 for beta chain variable domain of TCR clone 316690 (TRBV5-7, TRBJ2-7)
CASSSPGGRTPYEQYF

SEQ ID NO: 633381 - protein, 15 aa, Homo sapiens
  CDR3 for alpha chain variable domain of TCR clone 316691 (TRAV26-2, TRAJ39)
CSLRGNNNAGNMLTF

SEQ ID NO: 633382 - protein, 13 aa, Homo sapiens
  CDR3 for beta chain variable domain of TCR clone 316691 (TRBV20-1, TRBJ2-2)
FSALSGGAGELFF

SEQ ID NO: 633383 - protein, 12 aa, Homo sapiens
  CDR3 for alpha chain variable domain of TCR clone 316692 (TRAV20, TRAJ39)
FAVGNAGNMLTF

SEQ ID NO: 633384 - protein, 15 aa, Homo sapiens
  CDR3 for beta chain variable domain of TCR clone 316692 (TRBV5-1, TRBJ2-1)
CASSPPRAPYNEQFF

SEQ ID NO: 633385 - protein, 12 aa, Homo sapiens
  CDR3 for alpha chain variable domain of TCR clone 316693 (TRAV12-3, TRAJ17)
CAMTLTGNKLTF

SEQ ID NO: 633386 - protein, 15 aa, Homo sapiens
  CDR3 for beta chain variable domain of TCR clone 316693 (TRBV5-1, TRBJ2-1)
CASSPPGAPYNEQFF

SEQ ID NO: 633387 - protein, 15 aa, Homo sapiens
  CDR3 for alpha chain variable domain of TCR clone 316694 (TRAV26-1, TRAJ29)
CIVRVEGPGNTPLVF

SEQ ID NO: 633388 - protein, 15 aa, Homo sapiens
  CDR3 for beta chain variable domain of TCR clone 316694 (TRBV28, TRBJ2-5)
CASSPGQGSIETQYF

SEQ ID NO: 633389 - protein, 13 aa, Homo sapiens
  CDR3 for alpha chain variable domain of TCR clone 316695 (TRAV21, TRAJ27)
CPARPGNAGKSTF

SEQ ID NO: 633390 - protein, 13 aa, Homo sapiens
  CDR3 for beta chain variable domain of TCR clone 316695 (TRBV18, TRBJ2-7)
CASQSGGGYEQYF

SEQ ID NO: 633391 - protein, 15 aa, Homo sapiens
  CDR3 for alpha chain variable domain of TCR clone 316696 (TRAV26-1, TRAJ17)
CIVRVVKAAGNKLTF

SEQ ID NO: 633392 - protein, 15 aa, Homo sapiens
  CDR3 for beta chain variable domain of TCR clone 316696 (TRBV29-1, TRBJ2-1)
CSVGRHALFYNEQFF

SEQ ID NO: 633393 - protein, 15 aa, Homo sapiens
  CDR3 for alpha chain variable domain of TCR clone 316697 (TRAV17, TRAJ56)
CATEPFTGANSKLTF

SEQ ID NO: 633394 - protein, 15 aa, Homo sapiens
  CDR3 for beta chain variable domain of TCR clone 316697 (TRBV28, TRBJ1-5)
CASSRTGGYVQSQHF

SEQ ID NO: 633395 - protein, 16 aa, Homo sapiens
  CDR3 for alpha chain variable domain of TCR clone 316698 (TRAV30, TRAJ24)
CGTEIVDADSWRKFQF

SEQ ID NO: 633396 - protein, 16 aa, Homo sapiens
  CDR3 for beta chain variable domain of TCR clone 316698 (TRBV4-1, TRBJ2-7)
CASSQEWTSGPLEQYF

SEQ ID NO: 633397 - protein, 14 aa, Homo sapiens
  CDR3 for alpha chain variable domain of TCR clone 316699 (TRAV13-1, TRAJ29)
CAARAGSGNTPLVF

SEQ ID NO: 633398 - protein, 16 aa, Homo sapiens
  CDR3 for beta chain variable domain of TCR clone 316699 (TRBV2, TRBJ2-1)
CASSVGGSLSYNEQFF

SEQ ID NO: 633399 - protein, 13 aa, Homo sapiens
  CDR3 for alpha chain variable domain of TCR clone 316700 (TRAV3, TRAJ15)
CAVRDQAGTALLF

SEQ ID NO: 633400 - protein, 20 aa, Homo sapiens
  CDR3 for beta chain variable domain of TCR clone 316700 (TRBV23-1, TRBJ2-5)
CISAPAVPERVLLIQETQYF

SEQ ID NO: 633401 - protein, 10 aa, Homo sapiens
  CDR3 for alpha chain variable domain of TCR clone 316701 (TRAV1-2, TRAJ23)
CAGQGGKLIL

SEQ ID NO: 633402 - protein, 14 aa, Homo sapiens
  CDR3 for beta chain variable domain of TCR clone 316701 (TRBV7-8, TRBJ2-3)
CASSLEAGTDTQYF

SEQ ID NO: 633403 - protein, 14 aa, Homo sapiens
  CDR3 for alpha chain variable domain of TCR clone 316702 (TRAV1-1, TRAJ28)
CAAPSGAGSYQLTF

SEQ ID NO: 633404 - protein, 15 aa, Homo sapiens
  CDR3 for beta chain variable domain of TCR clone 316702 (TRBV7-2, TRBJ1-2)
CASSLVPGGDYGYTF

SEQ ID NO: 633405 - protein, 15 aa, Homo sapiens
  CDR3 for alpha chain variable domain of TCR clone 316703 (TRAV38-1, TRAJ57)
CAFMDSQGGSEKLVF

SEQ ID NO: 633406 - protein, 16 aa, Homo sapiens
  CDR3 for beta chain variable domain of TCR clone 316703 (TRBV10-3, TRBJ2-1)
CAIRGGGRGDYNKQFF

SEQ ID NO: 633407 - protein, 14 aa, Homo sapiens
  CDR3 for alpha chain variable domain of TCR clone 316704 (TRAV12-3, TRAJ58)
CPMSTETSGSRLTF

SEQ ID NO: 633408 - protein, 13 aa, Homo sapiens
  CDR3 for beta chain variable domain of TCR clone 316704 (TRBV27, TRBJ2-3)
CASSWGRTDTQYF

SEQ ID NO: 633409 - protein, 16 aa, Homo sapiens
  CDR3 for alpha chain variable domain of TCR clone 316705 (TRAV3, TRAJ18)
CAVRDGRGSTLGWLYF

SEQ ID NO: 633410 - protein, 15 aa, Homo sapiens
  CDR3 for beta chain variable domain of TCR clone 316705 (TRBV7-9, TRBJ1-6)
CASSSPGRVNSPLHF

SEQ ID NO: 633411 - protein, 14 aa, Homo sapiens
  CDR3 for alpha chain variable domain of TCR clone 316706 (TRAV17, TRAJ34)
CATDSLEGTDKLIF

SEQ ID NO: 633412 - protein, 12 aa, Homo sapiens
  CDR3 for beta chain variable domain of TCR clone 316706 (TRBV12-5, TRBJ2-5)
CASGQGVETQYF

SEQ ID NO: 633413 - protein, 15 aa, Homo sapiens
  CDR3 for alpha chain variable domain of TCR clone 316707 (TRAV29/DV5, TRAJ42)
CSAKTDGGSQGNLLF

SEQ ID NO: 633414 - protein, 15 aa, Homo sapiens
  CDR3 for beta chain variable domain of TCR clone 316707 (TRBV5-1, TRBJ2-2)
CASSSQGGNTGELFF

SEQ ID NO: 633415 - protein, 15 aa, Homo sapiens
  CDR3 for alpha chain variable domain of TCR clone 316708 (TRAV26-1, TRAJ44)
CIVRANTGTASKLTF

SEQ ID NO: 633416 - protein, 17 aa, Homo sapiens
  CDR3 for beta chain variable domain of TCR clone 316708 (TRBV11-2, TRBJ2-1)
CASSLYPPGVEYNEQFF

SEQ ID NO: 633417 - protein, 14 aa, Homo sapiens
  CDR3 for alpha chain variable domain of TCR clone 316709 (TRAV8-2, TRAJ37)
CVVSISGNTGKLIF

SEQ ID NO: 633418 - protein, 14 aa, Homo sapiens
  CDR3 for beta chain variable domain of TCR clone 316709 (TRBV11-2, TRBJ2-3)
CASSRLARTDTQYF

SEQ ID NO: 633419 - protein, 17 aa, Homo sapiens
  CDR3 for alpha chain variable domain of TCR clone 316710 (TRAV13-1, TRAJ52)
CAASSGAGGTSYGKLTF

SEQ ID NO: 633420 - protein, 15 aa, Homo sapiens
  CDR3 for beta chain variable domain of TCR clone 316710 (TRBV2, TRBJ2-1)
CASSELAGSYHEQFF

SEQ ID NO: 633421 - protein, 14 aa, Homo sapiens
  CDR3 for alpha chain variable domain of TCR clone 316711 (TRAV2, TRAJ9)
CAVEDRSGGFKTIF

SEQ ID NO: 633422 - protein, 15 aa, Homo sapiens
  CDR3 for beta chain variable domain of TCR clone 316711 (TRBV5-1, TRBJ2-1)
CASSPPWAPYNEQFF

SEQ ID NO: 633423 - protein, 13 aa, Homo sapiens
  CDR3 for alpha chain variable domain of TCR clone 316712 (TRAV2, TRAJ40)
CAVFTSGAYKYIF

SEQ ID NO: 633424 - protein, 14 aa, Homo sapiens
  CDR3 for beta chain variable domain of TCR clone 316712 (TRBV19, TRBJ2-1)
CASPTFVLSGEQFF

SEQ ID NO: 633425 - protein, 13 aa, Homo sapiens
  CDR3 for alpha chain variable domain of TCR clone 316713 (TRAV21, TRAJ20)
CAVGLRVDYKLSF

SEQ ID NO: 633426 - protein, 16 aa, Homo sapiens
  CDR3 for beta chain variable domain of TCR clone 316713 (TRBV7-3, TRBJ2-1)
CASSLEGYRSYNEQFF

SEQ ID NO: 633427 - protein, 15 aa, Homo sapiens
  CDR3 for alpha chain variable domain of TCR clone 316714 (TRAV27, TRAJ38)
CAARRNAGNNRKLIW

SEQ ID NO: 633428 - protein, 14 aa, Homo sapiens
  CDR3 for beta chain variable domain of TCR clone 316714 (TRBV7-3, TRBJ2-1)
CASSLGTSANEQFF

SEQ ID NO: 633429 - protein, 15 aa, Homo sapiens
  CDR3 for alpha chain variable domain of TCR clone 316715 (TRAV3, TRAJ22)
CAVRDRGGSARQLTF

SEQ ID NO: 633430 - protein, 13 aa, Homo sapiens
  CDR3 for beta chain variable domain of TCR clone 316715 (TRBV6-5, TRBJ2-5)
CATAPSPQETQYF

SEQ ID NO: 633431 - protein, 16 aa, Homo sapiens
  CDR3 for alpha chain variable domain of TCR clone 316716 (TRAV30, TRAJ24)
CRTEIVDADSWGKFQF

SEQ ID NO: 633432 - protein, 16 aa, Homo sapiens
  CDR3 for beta chain variable domain of TCR clone 316716 (TRBV12-5, TRBJ2-5)
CASGPRTSGNQETQYF

SEQ ID NO: 633433 - protein, 13 aa, Homo sapiens
  CDR3 for alpha chain variable domain of TCR clone 316717 (TRAV27, TRAJ41)
CAGEGNSGYALNF

SEQ ID NO: 633434 - protein, 13 aa, Homo sapiens
  CDR3 for beta chain variable domain of TCR clone 316717 (TRBV19, TRBJ1-2)
YASSVPGQDGYTF

SEQ ID NO: 633435 - protein, 14 aa, Homo sapiens
  CDR3 for alpha chain variable domain of TCR clone 316718 (TRAV17, TRAJ5)
CATVALTGRRALTF

SEQ ID NO: 633436 - protein, 14 aa, Homo sapiens
  CDR3 for beta chain variable domain of TCR clone 316718 (TRBV28, TRBJ2-7)
CASSTYGMAYEQYF

SEQ ID NO: 633437 - protein, 14 aa, Homo sapiens
  CDR3 for alpha chain variable domain of TCR clone 316719 (TRAV2, TRAJ38)
CAVLNAGTNRKLIW

SEQ ID NO: 633438 - protein, 12 aa, Homo sapiens
  CDR3 for beta chain variable domain of TCR clone 316719 (TRBV28, TRBJ2-7)
CASRWDSYEQYF

SEQ ID NO: 633439 - protein, 12 aa, Homo sapiens
  CDR3 for alpha chain variable domain of TCR clone 316720 (TRAV27, TRAJ33)
CAGDGSNYQLIW

SEQ ID NO: 633440 - protein, 17 aa, Homo sapiens
  CDR3 for beta chain variable domain of TCR clone 316720 (TRBV11-2, TRBJ2-1)
CASSLYPPGVEYNEQFF

SEQ ID NO: 633441 - protein, 13 aa, Homo sapiens
  CDR3 for alpha chain variable domain of TCR clone 316721 (TRAV17, TRAJ9)
CATDYTGGFKTIF

SEQ ID NO: 633442 - protein, 16 aa, Homo sapiens
  CDR3 for beta chain variable domain of TCR clone 316721 (TRBV24-1, TRBJ2-3)
CATSDPGTGATDTQYF

SEQ ID NO: 633443 - protein, 11 aa, Homo sapiens
  CDR3 for alpha chain variable domain of TCR clone 316722 (TRAV35, TRAJ30)
CAPGGDDKIIF

SEQ ID NO: 633444 - protein, 13 aa, Homo sapiens
  CDR3 for beta chain variable domain of TCR clone 316722 (TRBV7-9, TRBJ2-5)
CASLSPGQETQYF

SEQ ID NO: 633445 - protein, 15 aa, Homo sapiens
  CDR3 for alpha chain variable domain of TCR clone 316723 (TRAV26-1, TRAJ22)
CIVRVSFWFRKATDL

SEQ ID NO: 633446 - protein, 13 aa, Homo sapiens
  CDR3 for beta chain variable domain of TCR clone 316723 (TRBV7-9, TRBJ1-2)
RASSLKQNYGYTF

SEQ ID NO: 633447 - protein, 12 aa, Homo sapiens
  CDR3 for alpha chain variable domain of TCR clone 316724 (TRAV8-3, TRAJ26)
CAGDNYGQNFVF

SEQ ID NO: 633448 - protein, 18 aa, Homo sapiens
  CDR3 for beta chain variable domain of TCR clone 316724 (TRBV12-4, TRBJ2-2)
CASSLVVGTRGRTGELFF

SEQ ID NO: 633449 - protein, 22 aa, Homo sapiens
  CDR3 for alpha chain variable domain of TCR clone 316725 (TRAV13-2, TRAJ32)
ETQLSTFVQRRVYGGATNKLIF

SEQ ID NO: 633450 - protein, 16 aa, Homo sapiens
  CDR3 for beta chain variable domain of TCR clone 316725 (TRBV7-9, TRBJ1-2)
CASSISLDRGGYGYTF

SEQ ID NO: 633451 - protein, 14 aa, Homo sapiens
  CDR3 for alpha chain variable domain of TCR clone 316726 (TRAV12-2, TRAJ44)
FAVNKAGTASKLTF

SEQ ID NO: 633452 - protein, 16 aa, Homo sapiens
  CDR3 for beta chain variable domain of TCR clone 316726 (TRBV6-1, TRBJ1-3)
CASSEGGVTSGNTIYF

SEQ ID NO: 633453 - protein, 15 aa, Homo sapiens
  CDR3 for alpha chain variable domain of TCR clone 316727 (TRAV14/DV4, TRAJ33)
CAMREGRDSYYQLIW

SEQ ID NO: 633454 - protein, 16 aa, Homo sapiens
  CDR3 for beta chain variable domain of TCR clone 316727 (TRBV12-5, TRBJ2-5)
CASGPRTSGNQETQYF

SEQ ID NO: 633455 - protein, 11 aa, Homo sapiens
  CDR3 for alpha chain variable domain of TCR clone 316728 (TRAV26-1, TRAJ37)
CIVRVGRKLIF

SEQ ID NO: 633456 - protein, 15 aa, Homo sapiens
  CDR3 for beta chain variable domain of TCR clone 316728 (TRBV20-1, TRBJ2-7)
CSARDRVSGMDEQYF

SEQ ID NO: 633457 - protein, 10 aa, Homo sapiens
  CDR3 for alpha chain variable domain of TCR clone 316729 (TRAV8-3, TRAJ20)
CAVGYYKLSF

SEQ ID NO: 633458 - protein, 14 aa, Homo sapiens
  CDR3 for beta chain variable domain of TCR clone 316729 (TRBV11-2, TRBJ2-7)
CASSSTGEGYEQYF

SEQ ID NO: 633459 - protein, 13 aa, Homo sapiens
  CDR3 for alpha chain variable domain of TCR clone 316730 (TRAV26-2, TRAJ43)
CILRAVNNNDMRL

SEQ ID NO: 633460 - protein, 15 aa, Homo sapiens
  CDR3 for beta chain variable domain of TCR clone 316730 (TRBV7-2, TRBJ2-1)
CASTHGTGIYNEQFF

SEQ ID NO: 633461 - protein, 17 aa, Homo sapiens
  CDR3 for alpha chain variable domain of TCR clone 316731 (TRAV4, TRAJ18)
CLGGERSVGSTLGRLYF

SEQ ID NO: 633462 - protein, 18 aa, Homo sapiens
  CDR3 for beta chain variable domain of TCR clone 316731 (TRBV11-2, TRBJ2-3)
CASSLGGASRGAPNTQYF

SEQ ID NO: 633463 - protein, 15 aa, Homo sapiens
  CDR3 for alpha chain variable domain of TCR clone 316732 (TRAV13-1, TRAJ32)
CAASIYGGATNKPIF

SEQ ID NO: 633464 - protein, 15 aa, Homo sapiens
  CDR3 for beta chain variable domain of TCR clone 316732 (TRBV12-4, TRBJ2-5)
CASSPPTGLQETQYF

SEQ ID NO: 633465 - protein, 15 aa, Homo sapiens
  CDR3 for alpha chain variable domain of TCR clone 316733 (TRAV8-4, TRAJ3)
CAMTGENLVQQCFQD

SEQ ID NO: 633466 - protein, 16 aa, Homo sapiens
  CDR3 for beta chain variable domain of TCR clone 316733 (TRBV4-2, TRBJ1-1)
CASSQAGFGMNTEAFF

SEQ ID NO: 633467 - protein, 12 aa, Homo sapiens
  CDR3 for alpha chain variable domain of TCR clone 316734 (TRAV13-1, TRAJ43)
CAAGRFNNDMRF

SEQ ID NO: 633468 - protein, 11 aa, Homo sapiens
  CDR3 for beta chain variable domain of TCR clone 316734 (TRBV29-1, TRBJ2-5)
CSEDRTATQYF

SEQ ID NO: 633469 - protein, 14 aa, Homo sapiens
  CDR3 for alpha chain variable domain of TCR clone 316735 (TRAV1-2, TRAJ8)
CAVREDTGFQKLVF

SEQ ID NO: 633470 - protein, 16 aa, Homo sapiens
  CDR3 for beta chain variable domain of TCR clone 316735 (TRBV5-7, TRBJ2-7)
CASSPTSGRELDEQYF

SEQ ID NO: 633471 - protein, 21 aa, Homo sapiens
  CDR3 for alpha chain variable domain of TCR clone 316736 (TRAV29/DV5, TRAJ52)
CSVLLCSKRDAGGTSYGKLTF

SEQ ID NO: 633472 - protein, 13 aa, Homo sapiens
  CDR3 for beta chain variable domain of TCR clone 316736 (TRBV27, TRBJ1-4)
CASSLMGDEKLFF

SEQ ID NO: 633473 - protein, 15 aa, Homo sapiens
  CDR3 for alpha chain variable domain of TCR clone 316737 (TRAV26-1, TRAJ3)
CIVRSGYSSASKIIF

SEQ ID NO: 633474 - protein, 13 aa, Homo sapiens
  CDR3 for beta chain variable domain of TCR clone 316737 (TRBV13, TRBJ2-5)
CQLPSTSGETQYF

SEQ ID NO: 633475 - protein, 13 aa, Homo sapiens
  CDR3 for alpha chain variable domain of TCR clone 316738 (TRAV23/DV6, TRAJ16)
CAASGSDGQKLLF

SEQ ID NO: 633476 - protein, 15 aa, Homo sapiens
  CDR3 for beta chain variable domain of TCR clone 316738 (TRBV10-2, TRBJ2-6)
CASSEQGTGANVLTF

SEQ ID NO: 633477 - protein, 11 aa, Homo sapiens
  CDR3 for alpha chain variable domain of TCR clone 316739 (TRAV21, TRAJ20)
CAVRDDYNLSF

SEQ ID NO: 633478 - protein, 14 aa, Homo sapiens
  CDR3 for beta chain variable domain of TCR clone 316739 (TRBV7-2, TRBJ2-7)
CASSPKTSFYEQYF

SEQ ID NO: 633479 - protein, 14 aa, Homo sapiens
  CDR3 for alpha chain variable domain of TCR clone 316740 (TRAV8-4, TRAJ13)
CAVTLSGGYQKVTF

SEQ ID NO: 633480 - protein, 14 aa, Homo sapiens
  CDR3 for beta chain variable domain of TCR clone 316740 (TRBV7-2, TRBJ2-7)
RASRSQGAAYEQYF

SEQ ID NO: 633481 - protein, 11 aa, Homo sapiens
  CDR3 for alpha chain variable domain of TCR clone 316741 (TRAV1-2, TRAJ40)
CAVPGTYKYIF

SEQ ID NO: 633482 - protein, 13 aa, Homo sapiens
  CDR3 for beta chain variable domain of TCR clone 316741 (TRBV12-4, TRBJ1-2)
CASSLRQGKGYTF

SEQ ID NO: 633483 - protein, 16 aa, Homo sapiens
  CDR3 for alpha chain variable domain of TCR clone 316742 (TRAV21, TRAJ52)
CAVTNAGGTSYGKLTF

SEQ ID NO: 633484 - protein, 16 aa, Homo sapiens
  CDR3 for beta chain variable domain of TCR clone 316742 (TRBV24-1, TRBJ2-3)
CATSDPGTGATDTQYF

SEQ ID NO: 633485 - protein, 15 aa, Homo sapiens
  CDR3 for alpha chain variable domain of TCR clone 316743 (TRAV13-1, TRAJ39)
CAASPLNNAGNMLTF

SEQ ID NO: 633486 - protein, 13 aa, Homo sapiens
  CDR3 for beta chain variable domain of TCR clone 316743 (TRBV20-1, TRBJ2-5)
CSAATELQETQYF

SEQ ID NO: 633487 - protein, 14 aa, Homo sapiens
  CDR3 for alpha chain variable domain of TCR clone 316744 (TRAV23/DV6, TRAJ9)
CAASKDTGGFKTIF

SEQ ID NO: 633488 - protein, 12 aa, Homo sapiens
  CDR3 for beta chain variable domain of TCR clone 316744 (TRBV20-1, TRBJ2-1)
CSASGRANEQFF

SEQ ID NO: 633489 - protein, 12 aa, Homo sapiens
  CDR3 for alpha chain variable domain of TCR clone 316745 (TRAV12-1, TRAJ40)
CVVYSGTYKYIF

SEQ ID NO: 633490 - protein, 17 aa, Homo sapiens
  CDR3 for beta chain variable domain of TCR clone 316745 (TRBV15, TRBJ1-4)
CATSRYGTGDPNEKLFF

SEQ ID NO: 633491 - protein, 11 aa, Homo sapiens
  CDR3 for alpha chain variable domain of TCR clone 316746 (TRAV29/DV5, TRAJ30)
CAVREVDKIIF

SEQ ID NO: 633492 - protein, 14 aa, Homo sapiens
  CDR3 for beta chain variable domain of TCR clone 316746 (TRBV11-2, TRBJ2-5)
CASSRTGGIETQYF

SEQ ID NO: 633493 - protein, 14 aa, Homo sapiens
  CDR3 for alpha chain variable domain of TCR clone 316747 (TRAV17, TRAJ45)
CATASGGGADGLPF

SEQ ID NO: 633494 - protein, 13 aa, Homo sapiens
  CDR3 for beta chain variable domain of TCR clone 316747 (TRBV15, TRBJ2-7)
CATSTTGHYEQYF

SEQ ID NO: 633495 - protein, 14 aa, Homo sapiens
  CDR3 for alpha chain variable domain of TCR clone 316748 (TRAV1-1, TRAJ27)
CAVVYNTNAGKSTF

SEQ ID NO: 633496 - protein, 14 aa, Homo sapiens
  CDR3 for beta chain variable domain of TCR clone 316748 (TRBV7-2, TRBJ1-2)
CASSQTGSTYGYTF

SEQ ID NO: 633497 - protein, 14 aa, Homo sapiens
  CDR3 for alpha chain variable domain of TCR clone 316749 (TRAV12-2, TRAJ17)
CAVLFKAAGNKLTF

SEQ ID NO: 633498 - protein, 13 aa, Homo sapiens
  CDR3 for beta chain variable domain of TCR clone 316749 (TRBV28, TRBJ1-1)
CASSKQGWTEAFF

SEQ ID NO: 633499 - protein, 13 aa, Homo sapiens
  CDR3 for alpha chain variable domain of TCR clone 316750 (TRAV8-3, TRAJ28)
CAVVAVGSYQLTF

SEQ ID NO: 633500 - protein, 15 aa, Homo sapiens
  CDR3 for beta chain variable domain of TCR clone 316750 (TRBV28, TRBJ2-5)
CASSPGQGSIETQYF

SEQ ID NO: 633501 - protein, 14 aa, Homo sapiens
  CDR3 for alpha chain variable domain of TCR clone 316751 (TRAV26-1, TRAJ39)
CIVRGSRAGNMLTF

SEQ ID NO: 633502 - protein, 15 aa, Homo sapiens
  CDR3 for beta chain variable domain of TCR clone 316751 (TRBV5-5, TRBJ1-5)
CASSSTPGSKQPQHF

SEQ ID NO: 633503 - protein, 15 aa, Homo sapiens
  CDR3 for alpha chain variable domain of TCR clone 316752 (TRAV16, TRAJ17)
CALSGNKAAGNKLTF

SEQ ID NO: 633504 - protein, 16 aa, Homo sapiens
  CDR3 for beta chain variable domain of TCR clone 316752 (TRBV7-6, TRBJ1-6)
CASSSLPAGEHSPLHF

SEQ ID NO: 633505 - protein, 13 aa, Homo sapiens
  CDR3 for alpha chain variable domain of TCR clone 316753 (TRAV13-1, TRAJ9)
CAARGTGGFKTIF

SEQ ID NO: 633506 - protein, 13 aa, Homo sapiens
  CDR3 for beta chain variable domain of TCR clone 316753 (TRBV11-3, TRBJ1-2)
CASSLPGDVGYTF

SEQ ID NO: 633507 - protein, 16 aa, Homo sapiens
  CDR3 for alpha chain variable domain of TCR clone 316754 (TRAV12-3, TRAJ53)
CAMSVGSGGSNYKLTF

SEQ ID NO: 633508 - protein, 13 aa, Homo sapiens
  CDR3 for beta chain variable domain of TCR clone 316754 (TRBV7-6, TRBJ1-2)
CASSLVAAYGYTF

SEQ ID NO: 633509 - protein, 15 aa, Homo sapiens
  CDR3 for alpha chain variable domain of TCR clone 316755 (TRAV26-1, TRAJ22)
CIVRGSFWFCKATDL

SEQ ID NO: 633510 - protein, 13 aa, Homo sapiens
  CDR3 for beta chain variable domain of TCR clone 316755 (TRBV7-9, TRBJ1-2)
CASSLKQNYGYSF

SEQ ID NO: 633511 - protein, 18 aa, Homo sapiens
  CDR3 for alpha chain variable domain of TCR clone 316756 (TRAV1-1, TRAJ42)
CAVSPSAFYGGSQGNHIF

SEQ ID NO: 633512 - protein, 14 aa, Homo sapiens
  CDR3 for beta chain variable domain of TCR clone 316756 (TRBV6-3, TRBJ2-7)
CASSYSTGGDEQYF

SEQ ID NO: 633513 - protein, 14 aa, Homo sapiens
  CDR3 for alpha chain variable domain of TCR clone 316757 (TRAV13-1, TRAJ44)
CAAKATGTASKLTF

SEQ ID NO: 633514 - protein, 12 aa, Homo sapiens
  CDR3 for beta chain variable domain of TCR clone 316757 (TRBV27, TRBJ2-1)
CASRGFYNEQFF

SEQ ID NO: 633515 - protein, 16 aa, Homo sapiens
  CDR3 for alpha chain variable domain of TCR clone 316758 (TRAV30, TRAJ24)
CGTEIVDADSWGKFQF

SEQ ID NO: 633516 - protein, 17 aa, Homo sapiens
  CDR3 for beta chain variable domain of TCR clone 316758 (TRBV7-2, TRBJ2-4)
CASSLEPYPLAKNIQYF

SEQ ID NO: 633517 - protein, 14 aa, Homo sapiens
  CDR3 for alpha chain variable domain of TCR clone 316759 (TRAV12-2, TRAJ24)
CAVTPADSWGKLQF

SEQ ID NO: 633518 - protein, 14 aa, Homo sapiens
  CDR3 for beta chain variable domain of TCR clone 316759 (TRBV19, TRBJ2-7)
CASSMGQGAIEQYF

SEQ ID NO: 633519 - protein, 11 aa, Homo sapiens
  CDR3 for alpha chain variable domain of TCR clone 316760 (TRAV26-1, TRAJ37)
CIVRVGRKLFF

SEQ ID NO: 633520 - protein, 13 aa, Homo sapiens
  CDR3 for beta chain variable domain of TCR clone 316760 (TRBV14, TRBJ1-2)
CASSEDRRYGYTF

SEQ ID NO: 633521 - protein, 13 aa, Homo sapiens
  CDR3 for alpha chain variable domain of TCR clone 316761 (TRAV13-2, TRAJ45)
FAERRGGADGLPF

SEQ ID NO: 633522 - protein, 15 aa, Homo sapiens
  CDR3 for beta chain variable domain of TCR clone 316761 (TRBV7-2, TRBJ2-3)
CASSLAGAFIDTQYF

SEQ ID NO: 633523 - protein, 15 aa, Homo sapiens
  CDR3 for alpha chain variable domain of TCR clone 316762 (TRAV3, TRAJ5)
CAVRYRKTGRRALTF

SEQ ID NO: 633524 - protein, 14 aa, Homo sapiens
  CDR3 for beta chain variable domain of TCR clone 316762 (TRBV19, TRBJ2-1)
CASPTFVLSGEQFF

SEQ ID NO: 633525 - protein, 14 aa, Homo sapiens
  CDR3 for alpha chain variable domain of TCR clone 316763 (TRAV36/DV7, TRAJ40)
CAVETTSGTYKYIF

SEQ ID NO: 633526 - protein, 17 aa, Homo sapiens
  CDR3 for beta chain variable domain of TCR clone 316763 (TRBV10-3, TRBJ2-5)
CAMTSGPGRPSTSGQAR

SEQ ID NO: 633527 - protein, 15 aa, Homo sapiens
  CDR3 for alpha chain variable domain of TCR clone 316764 (TRAV25, TRAJ53)
CAATGGGGSNYKLTF

SEQ ID NO: 633528 - protein, 19 aa, Homo sapiens
  CDR3 for beta chain variable domain of TCR clone 316764 (TRBV7-2, TRBJ2-3)
CTSSFLSRNWGGGTDTQYF

SEQ ID NO: 633529 - protein, 13 aa, Homo sapiens
  CDR3 for alpha chain variable domain of TCR clone 316765 (TRAV13-1, TRAJ5)
CAASDTGRRALTF

SEQ ID NO: 633530 - protein, 19 aa, Homo sapiens
  CDR3 for beta chain variable domain of TCR clone 316765 (TRBV19, TRBJ2-5)
CASSIGQVTDFFLGETQYF

SEQ ID NO: 633531 - protein, 14 aa, Homo sapiens
  CDR3 for alpha chain variable domain of TCR clone 316766 (TRAV17, TRAJ34)
CATVHTYNTDKLIF

SEQ ID NO: 633532 - protein, 18 aa, Homo sapiens
  CDR3 for beta chain variable domain of TCR clone 316766 (TRBV23-1, TRBJ2-1)
TVSLRQRSEKWLKNEQFF

SEQ ID NO: 633533 - protein, 13 aa, Homo sapiens
  CDR3 for alpha chain variable domain of TCR clone 316767 (TRAV1-1, TRAJ9)
CAAKNTGGFKTIF

SEQ ID NO: 633534 - protein, 16 aa, Homo sapiens
  CDR3 for beta chain variable domain of TCR clone 316767 (TRBV6-6, TRBJ2-1)
CASSYSFSGSYNEQFF

SEQ ID NO: 633535 - protein, 14 aa, Homo sapiens
  CDR3 for alpha chain variable domain of TCR clone 316768 (TRAV13-1, TRAJ35)
CAASKGGFGNVLHC

SEQ ID NO: 633536 - protein, 15 aa, Homo sapiens
  CDR3 for beta chain variable domain of TCR clone 316768 (TRBV7-3, TRBJ1-1)
CASSQHWGAEAFLDK

SEQ ID NO: 633537 - protein, 13 aa, Homo sapiens
  CDR3 for alpha chain variable domain of TCR clone 316769 (TRAV21, TRAJ27)
CAARPGNAGKSTV

SEQ ID NO: 633538 - protein, 14 aa, Homo sapiens
  CDR3 for beta chain variable domain of TCR clone 316769 (TRBV7-6, TRBJ2-3)
CASSLGTVTDTQYF

SEQ ID NO: 633539 - protein, 11 aa, Homo sapiens
  CDR3 for alpha chain variable domain of TCR clone 316770 (TRAV16, TRAJ20)
CALSEGFKAAL

SEQ ID NO: 633540 - protein, 14 aa, Homo sapiens
  CDR3 for beta chain variable domain of TCR clone 316770 (TRBV7-3, TRBJ2-5)
CASSATGGQETQYF

SEQ ID NO: 633541 - protein, 12 aa, Homo sapiens
  CDR3 for alpha chain variable domain of TCR clone 316771 (TRAV2, TRAJ30)
TTVLSQDDKIIF

SEQ ID NO: 633542 - protein, 14 aa, Homo sapiens
  CDR3 for beta chain variable domain of TCR clone 316771 (TRBV12-4, TRBJ2-7)
CASSRQGRSYEQYF

SEQ ID NO: 633543 - protein, 13 aa, Homo sapiens
  CDR3 for alpha chain variable domain of TCR clone 316772 (TRAV8-3, TRAJ6)
CAVEKGGSYIPTF

SEQ ID NO: 633544 - protein, 13 aa, Homo sapiens
  CDR3 for beta chain variable domain of TCR clone 316772 (TRBV2, TRBJ1-5)
CATAGPGNQPQHF

SEQ ID NO: 633545 - protein, 15 aa, Homo sapiens
  CDR3 for alpha chain variable domain of TCR clone 316773 (TRAV12-3, TRAJ6)
CAMSATTGGSYIPTF

SEQ ID NO: 633546 - protein, 13 aa, Homo sapiens
  CDR3 for beta chain variable domain of TCR clone 316773 (TRBV7-9, TRBJ1-2)
CASSLNQNYGYTF

SEQ ID NO: 633547 - protein, 16 aa, Homo sapiens
  CDR3 for alpha chain variable domain of TCR clone 316774 (TRAV27, TRAJ52)
CAGAPAGGTSYGQLTF

SEQ ID NO: 633548 - protein, 12 aa, Homo sapiens
  CDR3 for beta chain variable domain of TCR clone 316774 (TRBV27, TRBJ2-1)
CASRGFCNEQFF

SEQ ID NO: 633549 - protein, 17 aa, Homo sapiens
  CDR3 for alpha chain variable domain of TCR clone 316775 (TRAV19, TRAJ32)
CALSERPYGGCTNKLIF

SEQ ID NO: 633550 - protein, 15 aa, Homo sapiens
  CDR3 for beta chain variable domain of TCR clone 316775 (TRBV28, TRBJ1-3)
CASSMGWASGNTIYF

SEQ ID NO: 633551 - protein, 12 aa, Homo sapiens
  CDR3 for alpha chain variable domain of TCR clone 316776 (TRAV12-2, TRAJ17)
CAMTLTGNKLTF

SEQ ID NO: 633552 - protein, 15 aa, Homo sapiens
  CDR3 for beta chain variable domain of TCR clone 316776 (TRBV20-1, TRBJ2-7)
CSARDRVSGMDEQCF

SEQ ID NO: 633553 - protein, 14 aa, Homo sapiens
  CDR3 for alpha chain variable domain of TCR clone 316777 (TRAV12-2, TRAJ40)
CAVKIPSGTYKYIF

SEQ ID NO: 633554 - protein, 20 aa, Homo sapiens
  CDR3 for beta chain variable domain of TCR clone 316777 (TRBV28, TRBJ2-1)
CASTPIVRSPGLAGGNEQFF

SEQ ID NO: 633555 - protein, 14 aa, Homo sapiens
  CDR3 for alpha chain variable domain of TCR clone 316778 (TRAV6, TRAJ37)
CALGSQGNTGKLLF

SEQ ID NO: 633556 - protein, 15 aa, Homo sapiens
  CDR3 for beta chain variable domain of TCR clone 316778 (TRBV2, TRBJ2-1)
CASSEEREGDNEQFF

SEQ ID NO: 633557 - protein, 18 aa, Homo sapiens
  CDR3 for alpha chain variable domain of TCR clone 316779 (TRAV21, TRAJ52)
CAVRPSPAGGTSYGNLTF

SEQ ID NO: 633558 - protein, 14 aa, Homo sapiens
  CDR3 for beta chain variable domain of TCR clone 316779 (TRBV4-2, TRBJ2-1)
CASGLDRAYNEQFF

SEQ ID NO: 633559 - protein, 14 aa, Homo sapiens
  CDR3 for alpha chain variable domain of TCR clone 316780 (TRAV12-2, TRAJ45)
CAVNIGGGADGLTF

SEQ ID NO: 633560 - protein, 14 aa, Homo sapiens
  CDR3 for beta chain variable domain of TCR clone 316780 (TRBV4-2, TRBJ1-5)
CASSRDRGNQPQHF

SEQ ID NO: 633561 - protein, 12 aa, Homo sapiens
  CDR3 for alpha chain variable domain of TCR clone 316781 (TRAV12-3, TRAJ17)
CAMTLTGNKRTV

SEQ ID NO: 633562 - protein, 15 aa, Homo sapiens
  CDR3 for beta chain variable domain of TCR clone 316781 (TRBV20-1, TRBJ2-7)
CSARDRVSGMDEQYF

SEQ ID NO: 633563 - protein, 12 aa, Homo sapiens
  CDR3 for alpha chain variable domain of TCR clone 316782 (TRAV12-3, TRAJ17)
CAMTLTGNKLTF

SEQ ID NO: 633564 - protein, 16 aa, Homo sapiens
  CDR3 for beta chain variable domain of TCR clone 316782 (TRBV12-3, TRBJ2-1)
CASSPGGNRWSHEQFF

SEQ ID NO: 633565 - protein, 15 aa, Homo sapiens
  CDR3 for alpha chain variable domain of TCR clone 316783 (TRAV26-1, TRAJ37)
CIVRVADGKTGKLIF

SEQ ID NO: 633566 - protein, 14 aa, Homo sapiens
  CDR3 for beta chain variable domain of TCR clone 316783 (TRBV10-3, TRBJ2-2)
CATFGQLNTGELFF

SEQ ID NO: 633567 - protein, 14 aa, Homo sapiens
  CDR3 for alpha chain variable domain of TCR clone 316784 (TRAV4, TRAJ12)
CLVGDADSSYKLIF

SEQ ID NO: 633568 - protein, 17 aa, Homo sapiens
  CDR3 for beta chain variable domain of TCR clone 316784 (TRBV13, TRBJ2-3)
CASSLYRVAGGRNTQYF

SEQ ID NO: 633569 - protein, 12 aa, Homo sapiens
  CDR3 for alpha chain variable domain of TCR clone 316785 (TRAV16, TRAJ27)
CALNHQCRQINL

SEQ ID NO: 633570 - protein, 16 aa, Homo sapiens
  CDR3 for beta chain variable domain of TCR clone 316785 (TRBV7-9, TRBJ2-1)
CASSDVAGGSYNEQFF

SEQ ID NO: 633571 - protein, 15 aa, Homo sapiens
  CDR3 for alpha chain variable domain of TCR clone 316786 (TRAV30, TRAJ57)
CGTAIPQGGSEKLVF

SEQ ID NO: 633572 - protein, 13 aa, Homo sapiens
  CDR3 for beta chain variable domain of TCR clone 316786 (TRBV19, TRBJ1-5)
CASSMRGYQPQHF

SEQ ID NO: 633573 - protein, 10 aa, Homo sapiens
  CDR3 for alpha chain variable domain of TCR clone 316787 (TRAV5, TRAJ34)
CAEDTDKPIF

SEQ ID NO: 633574 - protein, 15 aa, Homo sapiens
  CDR3 for beta chain variable domain of TCR clone 316787 (TRBV11-2, TRBJ2-1)
CASSSPSTRYNEQFF

SEQ ID NO: 633575 - protein, 16 aa, Homo sapiens
  CDR3 for alpha chain variable domain of TCR clone 316788 (TRAV17, TRAJ53)
CATDALSGGSNYKLTF

SEQ ID NO: 633576 - protein, 17 aa, Homo sapiens
  CDR3 for beta chain variable domain of TCR clone 316788 (TRBV18, TRBJ2-6)
CASSPRQGAVGANVLTF

SEQ ID NO: 633577 - protein, 16 aa, Homo sapiens
  CDR3 for alpha chain variable domain of TCR clone 316789 (TRAV20, TRAJ53)
CAVRRGSGGSNYKLTF

SEQ ID NO: 633578 - protein, 12 aa, Homo sapiens
  CDR3 for beta chain variable domain of TCR clone 316789 (TRBV29-1, TRBJ2-3)
CSVVLGSDTQYF

SEQ ID NO: 633579 - protein, 14 aa, Homo sapiens
  CDR3 for alpha chain variable domain of TCR clone 316790 (TRAV3, TRAJ7)
CAVREEEREQQTRF

SEQ ID NO: 633580 - protein, 12 aa, Homo sapiens
  CDR3 for beta chain variable domain of TCR clone 316790 (TRBV7-8, TRBJ2-7)
CASRLGDREQYF

SEQ ID NO: 633581 - protein, 12 aa, Homo sapiens
  CDR3 for alpha chain variable domain of TCR clone 316791 (TRAV2, TRAJ45)
CAEEEVLTDSPL

SEQ ID NO: 633582 - protein, 14 aa, Homo sapiens
  CDR3 for beta chain variable domain of TCR clone 316791 (TRBV27, TRBJ2-5)
CASSWRGGLETQYF

SEQ ID NO: 633583 - protein, 12 aa, Homo sapiens
  CDR3 for alpha chain variable domain of TCR clone 316792 (TRAV12-3, TRAJ17)
CAMTLTGNKLTF

SEQ ID NO: 633584 - protein, 15 aa, Homo sapiens
  CDR3 for beta chain variable domain of TCR clone 316792 (TRBV20-1, TRBJ2-7)
CSVRDRVSGMDEQYL

SEQ ID NO: 633585 - protein, 15 aa, Homo sapiens
  CDR3 for alpha chain variable domain of TCR clone 316793 (TRAV1-2, TRAJ10)
CAVRGFTGGGNKLTF

SEQ ID NO: 633586 - protein, 14 aa, Homo sapiens
  CDR3 for beta chain variable domain of TCR clone 316793 (TRBV7-9, TRBJ2-1)
CASSPRDSLYEQFF

SEQ ID NO: 633587 - protein, 14 aa, Homo sapiens
  CDR3 for alpha chain variable domain of TCR clone 316794 (TRAV20, TRAJ40)
CAVSLTSGTYKYIF

SEQ ID NO: 633588 - protein, 21 aa, Homo sapiens
  CDR3 for beta chain variable domain of TCR clone 316794 (TRBV27, TRBJ1-1)
CASSFLETARLEFSLKLSLDK

SEQ ID NO: 633589 - protein, 16 aa, Homo sapiens
  CDR3 for alpha chain variable domain of TCR clone 316795 (TRAV8-3, TRAJ8)
CAAPRDGNTGFQKLVL

SEQ ID NO: 633590 - protein, 15 aa, Homo sapiens
  CDR3 for beta chain variable domain of TCR clone 316795 (TRBV6-1, TRBJ2-6)
CASSSRPSGANVLTF

SEQ ID NO: 633591 - protein, 18 aa, Homo sapiens
  CDR3 for alpha chain variable domain of TCR clone 316796 (TRAV26-2, TRAJ45)
CILRVDKYSGGGADGLTF

SEQ ID NO: 633592 - protein, 17 aa, Homo sapiens
  CDR3 for beta chain variable domain of TCR clone 316796 (TRBV25-1, TRBJ2-1)
CASIAYGQGHGVYEQFF

SEQ ID NO: 633593 - protein, 14 aa, Homo sapiens
  CDR3 for alpha chain variable domain of TCR clone 316797 (TRAV17, TRAJ6)
CATNPAGGSYIPTF

SEQ ID NO: 633594 - protein, 13 aa, Homo sapiens
  CDR3 for beta chain variable domain of TCR clone 316797 (TRBV5-1, TRBJ2-5)
CASSWEGEETQYF

SEQ ID NO: 633595 - protein, 10 aa, Homo sapiens
  CDR3 for alpha chain variable domain of TCR clone 316798 (TRAV1-2, TRAJ20)
CACNDYKLSF

SEQ ID NO: 633596 - protein, 16 aa, Homo sapiens
  CDR3 for beta chain variable domain of TCR clone 316798 (TRBV20-1, TRBJ2-1)
CSSRDLKQGMNNEQFF

SEQ ID NO: 633597 - protein, 14 aa, Homo sapiens
  CDR3 for alpha chain variable domain of TCR clone 316799 (TRAV12-3, TRAJ10)
SHLPLTGGGNKLTF

SEQ ID NO: 633598 - protein, 15 aa, Homo sapiens
  CDR3 for beta chain variable domain of TCR clone 316799 (TRBV5-8, TRBJ2-2)
CASSLDRGATGELFF

SEQ ID NO: 633599 - protein, 14 aa, Homo sapiens
  CDR3 for alpha chain variable domain of TCR clone 316800 (TRAV1-2, TRAJ16)
CAVNRFSDGQKLLF

SEQ ID NO: 633600 - protein, 16 aa, Homo sapiens
  CDR3 for beta chain variable domain of TCR clone 316800 (TRBV4-2, TRBJ2-7)
CASSQDRGTSSYEQYF

SEQ ID NO: 633601 - protein, 13 aa, Homo sapiens
  CDR3 for alpha chain variable domain of TCR clone 316801 (TRAV27, TRAJ29)
CAGAHSGNTPLVF

SEQ ID NO: 633602 - protein, 15 aa, Homo sapiens
  CDR3 for beta chain variable domain of TCR clone 316801 (TRBV15, IGHJ2)
CATSRDMGSYEKLFF

SEQ ID NO: 633603 - protein, 16 aa, Homo sapiens
  CDR3 for alpha chain variable domain of TCR clone 316802 (TRAV36/DV7, TRAJ33)
WRPGNKVQDSNYQLTW

SEQ ID NO: 633604 - protein, 15 aa, Homo sapiens
  CDR3 for beta chain variable domain of TCR clone 316802 (TRBV29-1, TRBJ2-1)
CSVGRHALFYNEQFF

SEQ ID NO: 633605 - protein, 14 aa, Homo sapiens
  CDR3 for alpha chain variable domain of TCR clone 316803 (TRAV2, TRAJ9)
CAVEDRSGGFKTIL

SEQ ID NO: 633606 - protein, 16 aa, Homo sapiens
  CDR3 for beta chain variable domain of TCR clone 316803 (TRBV20-1, TRBJ1-4)
CSAPGQGLLTNEKLFF

SEQ ID NO: 633607 - protein, 12 aa, Homo sapiens
  CDR3 for alpha chain variable domain of TCR clone 316804 (TRAV8-3, TRAJ20)
CAVGANDYKLSF

SEQ ID NO: 633608 - protein, 12 aa, Homo sapiens
  CDR3 for beta chain variable domain of TCR clone 316804 (TRBV11-2, TRBJ2-5)
CASSLVGETQYF

SEQ ID NO: 633609 - protein, 13 aa, Homo sapiens
  CDR3 for alpha chain variable domain of TCR clone 316805 (TRAV1-2, TRAJ9)
CSALTTGGFKTIF

SEQ ID NO: 633610 - protein, 13 aa, Homo sapiens
  CDR3 for beta chain variable domain of TCR clone 316805 (TRBV19, TRBJ1-2)
CASSVPGQDGYTF

SEQ ID NO: 633611 - protein, 14 aa, Homo sapiens
  CDR3 for alpha chain variable domain of TCR clone 316806 (TRAV1-2, TRAJ8)
CAVREDTGFQKLVF

SEQ ID NO: 633612 - protein, 17 aa, Homo sapiens
  CDR3 for beta chain variable domain of TCR clone 316806 (TRBV11-2, TRBJ2-1)
CASSLYPPGVEYNELFF

SEQ ID NO: 633613 - protein, 15 aa, Homo sapiens
  CDR3 for alpha chain variable domain of TCR clone 316807 (TRAV21, TRAJ53)
CATLNSGGSNYKLKF

SEQ ID NO: 633614 - protein, 14 aa, Homo sapiens
  CDR3 for beta chain variable domain of TCR clone 316807 (TRBV11-2, TRBJ2-5)
CASSRTGGIETQYF

SEQ ID NO: 633615 - protein, 13 aa, Homo sapiens
  CDR3 for alpha chain variable domain of TCR clone 316808 (TRAV8-1, TRAJ30)
CAVIMNRDDKIIF

SEQ ID NO: 633616 - protein, 11 aa, Homo sapiens
  CDR3 for beta chain variable domain of TCR clone 316808 (TRBV12-4, TRBJ2-3)
CASTAPDTQYF

SEQ ID NO: 633617 - protein, 16 aa, Homo sapiens
  CDR3 for alpha chain variable domain of TCR clone 316809 (TRAV1-1, TRAJ29)
CAVRSTRNSGNTPLVF

SEQ ID NO: 633618 - protein, 14 aa, Homo sapiens
  CDR3 for beta chain variable domain of TCR clone 316809 (TRBV6-1, TRBJ1-3)
CASVQEGGGNTIYF

SEQ ID NO: 633619 - protein, 15 aa, Homo sapiens
  CDR3 for alpha chain variable domain of TCR clone 316810 (TRAV1-2, TRAJ10)
CAVRGFTGGGNKLTF

SEQ ID NO: 633620 - protein, 16 aa, Homo sapiens
  CDR3 for beta chain variable domain of TCR clone 316810 (TRBV4-1, TRBJ2-1)
CASSPEAGQGSDEQFF

SEQ ID NO: 633621 - protein, 15 aa, Homo sapiens
  CDR3 for alpha chain variable domain of TCR clone 316811 (TRAV8-6, TRAJ38)
CAVSSNAGNNRKLIW

SEQ ID NO: 633622 - protein, 15 aa, Homo sapiens
  CDR3 for beta chain variable domain of TCR clone 316811 (TRBV6-4, TRBJ2-1)
CASSSGTSGFNEQFF

SEQ ID NO: 633623 - protein, 14 aa, Homo sapiens
  CDR3 for alpha chain variable domain of TCR clone 316812 (TRAV1-2, TRAJ16)
CAVNRFSDGQKLLL

SEQ ID NO: 633624 - protein, 15 aa, Homo sapiens
  CDR3 for beta chain variable domain of TCR clone 316812 (TRBV7-9, TRBJ1-6)
CASSSTGRGNSPLHF

SEQ ID NO: 633625 - protein, 16 aa, Homo sapiens
  CDR3 for alpha chain variable domain of TCR clone 316813 (TRAV27, TRAJ53)
CADPEGSGGSNYKLTF

SEQ ID NO: 633626 - protein, 15 aa, Homo sapiens
  CDR3 for beta chain variable domain of TCR clone 316813 (TRBV20-1, TRBJ1-1)
CSASRGVTGNTEAFF

SEQ ID NO: 633627 - protein, 15 aa, Homo sapiens
  CDR3 for alpha chain variable domain of TCR clone 316814 (TRAV8-3, TRAJ20)
CAVEAKGSNDYKLSF

SEQ ID NO: 633628 - protein, 12 aa, Homo sapiens
  CDR3 for beta chain variable domain of TCR clone 316814 (TRBV7-2, TRBJ1-2)
CASRDSIYGDTF

SEQ ID NO: 633629 - protein, 13 aa, Homo sapiens
  CDR3 for alpha chain variable domain of TCR clone 316815 (TRAV2, TRAJ40)
CAVVTSGTYKYIF

SEQ ID NO: 633630 - protein, 16 aa, Homo sapiens
  CDR3 for beta chain variable domain of TCR clone 316815 (TRBV7-9, TRBJ1-3)
CASSLRAGSSGNTIYF

SEQ ID NO: 633631 - protein, 13 aa, Homo sapiens
  CDR3 for alpha chain variable domain of TCR clone 316816 (TRAV17, TRAJ40)
CAGALGGTYKYIF

SEQ ID NO: 633632 - protein, 18 aa, Homo sapiens
  CDR3 for beta chain variable domain of TCR clone 316816 (TRBV7-2, TRBJ1-4)
CASSLAPGGGMKTCFLAV

SEQ ID NO: 633633 - protein, 16 aa, Homo sapiens
  CDR3 for alpha chain variable domain of TCR clone 316817 (TRAV30, TRAJ24)
CGTEIVDADSWGKFQF

SEQ ID NO: 633634 - protein, 18 aa, Homo sapiens
  CDR3 for beta chain variable domain of TCR clone 316817 (TRBV11-2, TRBJ2-3)
RASSLGGASRGAPNTQYF

SEQ ID NO: 633635 - protein, 11 aa, Homo sapiens
  CDR3 for alpha chain variable domain of TCR clone 316818 (TRAV23/DV6, TRAJ4)
APAGDYNKLIF

SEQ ID NO: 633636 - protein, 17 aa, Homo sapiens
  CDR3 for beta chain variable domain of TCR clone 316818 (TRBV20-1, TRBJ2-1)
CSAPDRGAGVAYNEQFF

SEQ ID NO: 633637 - protein, 12 aa, Homo sapiens
  CDR3 for alpha chain variable domain of TCR clone 316819 (TRAV13-1, TRAJ52)
HAGGTSYGKLTF

SEQ ID NO: 633638 - protein, 13 aa, Homo sapiens
  CDR3 for beta chain variable domain of TCR clone 316819 (TRBV19, TRBJ1-2)
CASSVPGQDGYTF

SEQ ID NO: 633639 - protein, 11 aa, Homo sapiens
  CDR3 for alpha chain variable domain of TCR clone 316820 (TRAV12-1, TRAJ34)
CVVNKGRELIF

SEQ ID NO: 633640 - protein, 15 aa, Homo sapiens
  CDR3 for beta chain variable domain of TCR clone 316820 (TRBV7-9, TRBJ1-1)
CASSLLEQGGTETFF

SEQ ID NO: 633641 - protein, 13 aa, Homo sapiens
  CDR3 for alpha chain variable domain of TCR clone 316821 (TRAV8-6, TRAJ32)
CSVSDRATNKLIF

SEQ ID NO: 633642 - protein, 13 aa, Homo sapiens
  CDR3 for beta chain variable domain of TCR clone 316821 (TRBV11-2, TRBJ2-7)
CASSLDLGYEQYF

SEQ ID NO: 633643 - protein, 14 aa, Homo sapiens
  CDR3 for alpha chain variable domain of TCR clone 316822 (TRAV13-1, TRAJ23)
CAASRLGRGGKLSF

SEQ ID NO: 633644 - protein, 13 aa, Homo sapiens
  CDR3 for beta chain variable domain of TCR clone 316822 (TRBV7-7, TRBJ2-5)
CASSRSGQETQYF

SEQ ID NO: 633645 - protein, 17 aa, Homo sapiens
  CDR3 for alpha chain variable domain of TCR clone 316823 (TRAV27, TRAJ18)
CAGLHRGRGSTLGRLYF

SEQ ID NO: 633646 - protein, 14 aa, Homo sapiens
  CDR3 for beta chain variable domain of TCR clone 316823 (TRBV7-8, TRBJ2-3)
CASSLEAGTDTQYF

SEQ ID NO: 633647 - protein, 11 aa, Homo sapiens
  CDR3 for alpha chain variable domain of TCR clone 316824 (TRAV2, TRAJ33)
CAVDSNYQLIW

SEQ ID NO: 633648 - protein, 14 aa, Homo sapiens
  CDR3 for beta chain variable domain of TCR clone 316824 (TRBV5-1, TRBJ2-2)
CARSLIWIPGELFF

SEQ ID NO: 633649 - protein, 14 aa, Homo sapiens
  CDR3 for alpha chain variable domain of TCR clone 316825 (TRAV12-2, TRAJ17)
CAVLFKAARNKLTF

SEQ ID NO: 633650 - protein, 14 aa, Homo sapiens
  CDR3 for beta chain variable domain of TCR clone 316825 (TRBV12-5, TRBJ2-5)
CASGSRTHQETQYF

SEQ ID NO: 633651 - protein, 13 aa, Homo sapiens
  CDR3 for alpha chain variable domain of TCR clone 316826 (TRAV8-6, TRAJ34)
CAVSDQGTDKLIF

SEQ ID NO: 633652 - protein, 14 aa, Homo sapiens
  CDR3 for beta chain variable domain of TCR clone 316826 (TRBV12-4, TRBJ1-1)
CASSWTGHDTEAFF

SEQ ID NO: 633653 - protein, 14 aa, Homo sapiens
  CDR3 for alpha chain variable domain of TCR clone 316827 (TRAV1-2, TRAJ8)
CAVREGTGFQKLVF

SEQ ID NO: 633654 - protein, 12 aa, Homo sapiens
  CDR3 for beta chain variable domain of TCR clone 316827 (TRBV2, TRBJ2-1)
CAYGPPGNEQFF

SEQ ID NO: 633655 - protein, 12 aa, Homo sapiens
  CDR3 for alpha chain variable domain of TCR clone 316828 (TRAV38-1, TRAJ34)
CAFMKEADKLIF

SEQ ID NO: 633656 - protein, 17 aa, Homo sapiens
  CDR3 for beta chain variable domain of TCR clone 316828 (TRBV7-8, TRBJ2-6)
CASSAGTGGAGANVLTF

SEQ ID NO: 633657 - protein, 15 aa, Homo sapiens
  CDR3 for alpha chain variable domain of TCR clone 316829 (TRAV17, TRAJ45)
TSVLRTGGGADGLTF

SEQ ID NO: 633658 - protein, 15 aa, Homo sapiens
  CDR3 for beta chain variable domain of TCR clone 316829 (TRBV5-7, TRBJ1-5)
CDSSYGKLWDQPQHF

SEQ ID NO: 633659 - protein, 11 aa, Homo sapiens
  CDR3 for alpha chain variable domain of TCR clone 316830 (TRAV21, TRAJ34)
CAVTNTDKLIF

SEQ ID NO: 633660 - protein, 14 aa, Homo sapiens
  CDR3 for beta chain variable domain of TCR clone 316830 (TRBV19, TRBJ1-2)
CASSIGAGSYGYTF

SEQ ID NO: 633661 - protein, 14 aa, Homo sapiens
  CDR3 for alpha chain variable domain of TCR clone 316831 (TRAV1-2, TRAJ16)
CAVNRFSDGQKLLF

SEQ ID NO: 633662 - protein, 13 aa, Homo sapiens
  CDR3 for beta chain variable domain of TCR clone 316831 (TRBV20-1, TRBJ1-1)
CSARGGGNTEGFF

SEQ ID NO: 633663 - protein, 12 aa, Homo sapiens
  CDR3 for alpha chain variable domain of TCR clone 316832 (TRAV27, TRAJ35)
CAGADVGNVLHV

SEQ ID NO: 633664 - protein, 16 aa, Homo sapiens
  CDR3 for beta chain variable domain of TCR clone 316832 (TRBV6-1, TRBJ2-1)
CASILRQGSSYNAQFF

SEQ ID NO: 633665 - protein, 12 aa, Homo sapiens
  CDR3 for alpha chain variable domain of TCR clone 316833 (TRAV13-1, TRAJ21)
GAAKEGFNKFYF

SEQ ID NO: 633666 - protein, 14 aa, Homo sapiens
  CDR3 for beta chain variable domain of TCR clone 316833 (TRBV5-4, TRBJ1-1)
CASSLDSRRDEAFF

SEQ ID NO: 633667 - protein, 11 aa, Homo sapiens
  CDR3 for alpha chain variable domain of TCR clone 316834 (TRAV26-1, TRAJ37)
CIVRVGRKLIF

SEQ ID NO: 633668 - protein, 16 aa, Homo sapiens
  CDR3 for beta chain variable domain of TCR clone 316834 (TRBV6-6, TRBJ2-3)
CASSYSHGGATDTQYF

SEQ ID NO: 633669 - protein, 15 aa, Homo sapiens
  CDR3 for alpha chain variable domain of TCR clone 316835 (TRAV2, TRAJ11)
CAVGGRNSGYRTLTF

SEQ ID NO: 633670 - protein, 12 aa, Homo sapiens
  CDR3 for beta chain variable domain of TCR clone 316835 (TRBV5-4, TRBJ2-7)
CASSLEAYEQYF

SEQ ID NO: 633671 - protein, 15 aa, Homo sapiens
  CDR3 for alpha chain variable domain of TCR clone 316836 (TRAV2, TRAJ9)
CAVEDRGTVGFKTIF

SEQ ID NO: 633672 - protein, 14 aa, Homo sapiens
  CDR3 for beta chain variable domain of TCR clone 316836 (TRBV12-5, TRBJ2-5)
CASGSRTHQETQYF

SEQ ID NO: 633673 - protein, 13 aa, Homo sapiens
  CDR3 for alpha chain variable domain of TCR clone 316837 (TRAV27, TRAJ6)
CAGGTRGSYIPTF

SEQ ID NO: 633674 - protein, 15 aa, Homo sapiens
  CDR3 for beta chain variable domain of TCR clone 316837 (TRBV27, TRBJ1-1)
CASSPYADPYTEAFF

SEQ ID NO: 633675 - protein, 12 aa, Homo sapiens
  CDR3 for alpha chain variable domain of TCR clone 316838 (TRAV21, TRAJ33)
CAKMDSNYQLIW

SEQ ID NO: 633676 - protein, 14 aa, Homo sapiens
  CDR3 for beta chain variable domain of TCR clone 316838 (TRBV18, TRBJ2-7)
CASSPRGGAYEQYF

SEQ ID NO: 633677 - protein, 13 aa, Homo sapiens
  CDR3 for alpha chain variable domain of TCR clone 316839 (TRAV3, TRAJ3)
CAVIALGASKIIF

SEQ ID NO: 633678 - protein, 18 aa, Homo sapiens
  CDR3 for beta chain variable domain of TCR clone 316839 (TRBV12-4, TRBJ2-5)
CASSPSGGRDPVLRARHA

SEQ ID NO: 633679 - protein, 18 aa, Homo sapiens
  CDR3 for alpha chain variable domain of TCR clone 316840 (TRAV38-2/DV8, TRAJ42)
CAYRSADLTGGSQGKLIF

SEQ ID NO: 633680 - protein, 12 aa, Homo sapiens
  CDR3 for beta chain variable domain of TCR clone 316840 (TRBV11-2, TRBJ2-2)
CASSLGGGELFF

SEQ ID NO: 633681 - protein, 14 aa, Homo sapiens
  CDR3 for alpha chain variable domain of TCR clone 316841 (TRAV26-1, TRAJ38)
CIADNAGNNRKLIW

SEQ ID NO: 633682 - protein, 22 aa, Homo sapiens
  CDR3 for beta chain variable domain of TCR clone 316841 (TRBV6-1, TRBJ1-3)
CASVQGGGWKHHIFWRGKLAHC

SEQ ID NO: 633683 - protein, 13 aa, Homo sapiens
  CDR3 for alpha chain variable domain of TCR clone 316842 (TRAV12-3, TRAJ41)
CAIAPNSEYALNF

SEQ ID NO: 633684 - protein, 14 aa, Homo sapiens
  CDR3 for beta chain variable domain of TCR clone 316842 (TRBV7-2, TRBJ1-3)
CASSLGTAGNTMYF

SEQ ID NO: 633685 - protein, 16 aa, Homo sapiens
  CDR3 for alpha chain variable domain of TCR clone 316843 (TRAV8-6, TRAJ28)
CAVTSKPGAGSYQLTF

SEQ ID NO: 633686 - protein, 16 aa, Homo sapiens
  CDR3 for beta chain variable domain of TCR clone 316843 (TRBV12-4, TRBJ2-5)
CANSWRPSGDLETQYF

SEQ ID NO: 633687 - protein, 12 aa, Homo sapiens
  CDR3 for alpha chain variable domain of TCR clone 316844 (TRAV8-3, TRAJ26)
CAGDNYGQNFVF

SEQ ID NO: 633688 - protein, 12 aa, Homo sapiens
  CDR3 for beta chain variable domain of TCR clone 316844 (TRBV11-2, TRBJ2-1)
RASRPGNNEQFF

SEQ ID NO: 633689 - protein, 13 aa, Homo sapiens
  CDR3 for alpha chain variable domain of TCR clone 316845 (TRAV26-1, TRAJ34)
CIVRPWITDKLIF

SEQ ID NO: 633690 - protein, 14 aa, Homo sapiens
  CDR3 for beta chain variable domain of TCR clone 316845 (TRBV12-4, IGLJ4)
CASSRQGANEKLFF

SEQ ID NO: 633691 - protein, 16 aa, Homo sapiens
  CDR3 for alpha chain variable domain of TCR clone 316846 (TRAV1-2, TRAJ10)
CAVRGVLTGGGNKLTF

SEQ ID NO: 633692 - protein, 12 aa, Homo sapiens
  CDR3 for beta chain variable domain of TCR clone 316846 (TRBV11-2, TRBJ2-2)
CASSLGGGGLFF

SEQ ID NO: 633693 - protein, 13 aa, Homo sapiens
  CDR3 for alpha chain variable domain of TCR clone 316847 (TRAV20, TRAJ20)
CAVRWVRDYKLSF

SEQ ID NO: 633694 - protein, 15 aa, Homo sapiens
  CDR3 for beta chain variable domain of TCR clone 316847 (TRBV7-9, TRBJ1-5)
CASSQGHQPNQPQHF

SEQ ID NO: 633695 - protein, 12 aa, Homo sapiens
  CDR3 for alpha chain variable domain of TCR clone 316848 (TRAV20, TRAJ54)
GAVQEGAQKLVF

SEQ ID NO: 633696 - protein, 17 aa, Homo sapiens
  CDR3 for beta chain variable domain of TCR clone 316848 (TRBV13, TRBJ2-3)
CASSLSRVAGGRNTQYF

SEQ ID NO: 633697 - protein, 13 aa, Homo sapiens
  CDR3 for alpha chain variable domain of TCR clone 316849 (TRAV26-1, TRAJ30)
CIVNMNRDDKNIF

SEQ ID NO: 633698 - protein, 16 aa, Homo sapiens
  CDR3 for beta chain variable domain of TCR clone 316849 (TRBV16, TRBJ2-7)
CASSRPAGGSSYEQYF

SEQ ID NO: 633699 - protein, 14 aa, Homo sapiens
  CDR3 for alpha chain variable domain of TCR clone 316850 (TRAV9-2, TRAJ39)
CALYIYNAGNMLTF

SEQ ID NO: 633700 - protein, 16 aa, Homo sapiens
  CDR3 for beta chain variable domain of TCR clone 316850 (TRBV7-2, TRBJ2-7)
CASSRPGTGLVHEQYF

SEQ ID NO: 633701 - protein, 12 aa, Homo sapiens
  CDR3 for alpha chain variable domain of TCR clone 316851 (TRAV1-1, TRAJ39)
CAVPVVGNMLTF

SEQ ID NO: 633702 - protein, 15 aa, Homo sapiens
  CDR3 for beta chain variable domain of TCR clone 316851 (TRBV7-3, TRBJ2-2)
CASSETGQGTGELFF

SEQ ID NO: 633703 - protein, 17 aa, Homo sapiens
  CDR3 for alpha chain variable domain of TCR clone 316852 (TRAV26-1, TRAJ53)
CIVRVDDSGGSNYKLTF

SEQ ID NO: 633704 - protein, 15 aa, Homo sapiens
  CDR3 for beta chain variable domain of TCR clone 316852 (TRBV20-1, TRBJ2-7)
CSARVPEAYFYEQYF

SEQ ID NO: 633705 - protein, 12 aa, Homo sapiens
  CDR3 for alpha chain variable domain of TCR clone 316853 (TRAV17, TRAJ49)
CATVTTGNQFYF

SEQ ID NO: 633706 - protein, 18 aa, Homo sapiens
  CDR3 for beta chain variable domain of TCR clone 316853 (TRBV11-2, TRBJ2-6)
CASSLNPFRGTGANVLTF

SEQ ID NO: 633707 - protein, 14 aa, Homo sapiens
  CDR3 for alpha chain variable domain of TCR clone 316854 (TRAV13-1, TRAJ26)
GAASSAHYGQNFVF

SEQ ID NO: 633708 - protein, 17 aa, Homo sapiens
  CDR3 for beta chain variable domain of TCR clone 316854 (TRBV25-1, TRBJ2-5)
CASSRRGGRGGQETQYF

SEQ ID NO: 633709 - protein, 14 aa, Homo sapiens
  CDR3 for alpha chain variable domain of TCR clone 316855 (TRAV12-2, TRAJ40)
CAVKIPSETYKYIF

SEQ ID NO: 633710 - protein, 13 aa, Homo sapiens
  CDR3 for beta chain variable domain of TCR clone 316855 (TRBV20-1, TRBJ1-2)
CSARVGSGKGYTF

SEQ ID NO: 633711 - protein, 13 aa, Homo sapiens
  CDR3 for alpha chain variable domain of TCR clone 316856 (TRAV8-6, TRAJ34)
CAVSDQGTDKLIF

SEQ ID NO: 633712 - protein, 14 aa, Homo sapiens
  CDR3 for beta chain variable domain of TCR clone 316856 (TRBV12-4, TRBJ1-1)
CASTWTEHDTEAFF

SEQ ID NO: 633713 - protein, 16 aa, Homo sapiens
  CDR3 for alpha chain variable domain of TCR clone 316857 (TRAV26-1, TRAJ53)
CIVRVAMGGSNYKLTF

SEQ ID NO: 633714 - protein, 16 aa, Homo sapiens
  CDR3 for beta chain variable domain of TCR clone 316857 (TRBV19, TRBJ2-2)
CASRSPGTGATGELFF

SEQ ID NO: 633715 - protein, 15 aa, Homo sapiens
  CDR3 for alpha chain variable domain of TCR clone 316858 (TRAV12-2, TRAJ5)
CAVNGKDTGRRALTF

SEQ ID NO: 633716 - protein, 14 aa, Homo sapiens
  CDR3 for beta chain variable domain of TCR clone 316858 (TRBV9, TRBJ1-1)
CASSVEGGGTEAFF

SEQ ID NO: 633717 - protein, 13 aa, Homo sapiens
  CDR3 for alpha chain variable domain of TCR clone 316859 (TRAV1-2, TRAJ9)
CAALNTGGFKTIF

SEQ ID NO: 633718 - protein, 12 aa, Homo sapiens
  CDR3 for beta chain variable domain of TCR clone 316859 (TRBV11-3, TRBJ1-1)
CASSHLQGEAFF

SEQ ID NO: 633719 - protein, 19 aa, Homo sapiens
  CDR3 for alpha chain variable domain of TCR clone 316860 (TRAV3, TRAJ6)
CAVRDRNHSRSGGSYILTF

SEQ ID NO: 633720 - protein, 15 aa, Homo sapiens
  CDR3 for beta chain variable domain of TCR clone 316860 (TRBV18, TRBJ2-7)
CASSPTFMDSYEQYF

SEQ ID NO: 633721 - protein, 12 aa, Homo sapiens
  CDR3 for alpha chain variable domain of TCR clone 316861 (TRAV3, TRAJ31)
CAVRDGNARLMF

SEQ ID NO: 633722 - protein, 13 aa, Homo sapiens
  CDR3 for beta chain variable domain of TCR clone 316861 (TRBV12-4, TRBJ2-7)
CASSFVPTAEQYF

SEQ ID NO: 633723 - protein, 14 aa, Homo sapiens
  CDR3 for alpha chain variable domain of TCR clone 316862 (TRAV12-3, TRAJ10)
SHLPLTGGGNKLTF

SEQ ID NO: 633724 - protein, 14 aa, Homo sapiens
  CDR3 for beta chain variable domain of TCR clone 316862 (TRBV6-1, TRBJ1-3)
CASVQGGGGNTINF

SEQ ID NO: 633725 - protein, 13 aa, Homo sapiens
  CDR3 for alpha chain variable domain of TCR clone 316863 (TRAV17, TRAJ22)
CANHSGSARQLTF

SEQ ID NO: 633726 - protein, 14 aa, Homo sapiens
  CDR3 for beta chain variable domain of TCR clone 316863 (TRBV16, TRBJ1-1)
CASSQAGTNTEAFF

SEQ ID NO: 633727 - protein, 13 aa, Homo sapiens
  CDR3 for alpha chain variable domain of TCR clone 316864 (TRAV13-1, TRAJ21)
CAASIYNFNKFYF

SEQ ID NO: 633728 - protein, 14 aa, Homo sapiens
  CDR3 for beta chain variable domain of TCR clone 316864 (TRBV5-5, TRBJ2-7)
CASSPKTSFYEQYF

SEQ ID NO: 633729 - protein, 14 aa, Homo sapiens
  CDR3 for alpha chain variable domain of TCR clone 316865 (TRAV12-2, TRAJ44)
CAVNPAGTASKLTF

SEQ ID NO: 633730 - protein, 15 aa, Homo sapiens
  CDR3 for beta chain variable domain of TCR clone 316865 (TRBV2, TRBJ2-1)
CASEGRVSAYNEQFF

SEQ ID NO: 633731 - protein, 13 aa, Homo sapiens
  CDR3 for alpha chain variable domain of TCR clone 316866 (TRAV26-1, TRAJ48)
CIVLRVRNEKLTL

SEQ ID NO: 633732 - protein, 14 aa, Homo sapiens
  CDR3 for beta chain variable domain of TCR clone 316866 (TRBV20-1, TRBJ1-5)
CSARDISKNQPQHF

SEQ ID NO: 633733 - protein, 20 aa, Homo sapiens
  CDR3 for alpha chain variable domain of TCR clone 316867 (TRAV26-1, TRAJ42)
CCVLLHRQTYYGGSQGNLIF

SEQ ID NO: 633734 - protein, 15 aa, Homo sapiens
  CDR3 for beta chain variable domain of TCR clone 316867 (TRBV7-3, TRBJ2-2)
CQQLKRGTLSGELFF

SEQ ID NO: 633735 - protein, 14 aa, Homo sapiens
  CDR3 for alpha chain variable domain of TCR clone 316868 (TRAV26-1, TRAJ22)
CIVRVYGSARQLTF

SEQ ID NO: 633736 - protein, 14 aa, Homo sapiens
  CDR3 for beta chain variable domain of TCR clone 316868 (TRBV7-2, TRBJ2-5)
CASSPRGSSETQYF

SEQ ID NO: 633737 - protein, 16 aa, Homo sapiens
  CDR3 for alpha chain variable domain of TCR clone 316869 (TRAV16, TRAJ4)
CALSRMFSGGYNKLIF

SEQ ID NO: 633738 - protein, 14 aa, Homo sapiens
  CDR3 for beta chain variable domain of TCR clone 316869 (TRBV4-2, TRBJ1-2)
CASSPGGSNYGHTF

SEQ ID NO: 633739 - protein, 11 aa, Homo sapiens
  CDR3 for alpha chain variable domain of TCR clone 316870 (TRAV13-1, TRAJ43)
CAAHNNNDMRI

SEQ ID NO: 633740 - protein, 15 aa, Homo sapiens
  CDR3 for beta chain variable domain of TCR clone 316870 (TRBV6-1, TRBJ2-2)
CASSRLRGDTGELFF

SEQ ID NO: 633741 - protein, 13 aa, Homo sapiens
  CDR3 for alpha chain variable domain of TCR clone 316871 (TRAV8-3, TRAJ43)
CAVGPDNNNDMRF

SEQ ID NO: 633742 - protein, 15 aa, Homo sapiens
  CDR3 for beta chain variable domain of TCR clone 316871 (TRBV4-1, TRBJ2-2)
CASSEGQGITGELFF

SEQ ID NO: 633743 - protein, 13 aa, Homo sapiens
  CDR3 for alpha chain variable domain of TCR clone 316872 (TRAV38-1, TRAJ42)
CARWGGSQGNLIF

SEQ ID NO: 633744 - protein, 17 aa, Homo sapiens
  CDR3 for beta chain variable domain of TCR clone 316872 (TRBV20-1, TRBJ2-1)
CSARNPLAGVWDNEQFF

SEQ ID NO: 633745 - protein, 12 aa, Homo sapiens
  CDR3 for alpha chain variable domain of TCR clone 316873 (TRAV1-1, TRAJ43)
CAPRVSSNDMRF

SEQ ID NO: 633746 - protein, 17 aa, Homo sapiens
  CDR3 for beta chain variable domain of TCR clone 316873 (TRBV13, TRBJ2-3)
CASSLSRVAGGRNTQYF

SEQ ID NO: 633747 - protein, 15 aa, Homo sapiens
  CDR3 for alpha chain variable domain of TCR clone 316874 (TRAV25, TRAJ53)
CPTSNSGGSNYKLTF

SEQ ID NO: 633748 - protein, 15 aa, Homo sapiens
  CDR3 for beta chain variable domain of TCR clone 316874 (TRBV11-3, TRBJ2-3)
CASLKDGREGDTQYF

SEQ ID NO: 633749 - protein, 16 aa, Homo sapiens
  CDR3 for alpha chain variable domain of TCR clone 316875 (TRAV1-1, TRAJ29)
CAVRSTRNSGNTPLVF

SEQ ID NO: 633750 - protein, 15 aa, Homo sapiens
  CDR3 for beta chain variable domain of TCR clone 316875 (TRBV29-1, TRBJ2-1)
CSVGRHDLFYNEQFF

SEQ ID NO: 633751 - protein, 16 aa, Homo sapiens
  CDR3 for alpha chain variable domain of TCR clone 316876 (TRAV13-2, TRAJ53)
CAENANIGGSNYKPTF

SEQ ID NO: 633752 - protein, 19 aa, Homo sapiens
  CDR3 for beta chain variable domain of TCR clone 316876 (TRBV28, TRBJ2-7)
CASSYSGTSRLGWVYEQYF

SEQ ID NO: 633753 - protein, 16 aa, Homo sapiens
  CDR3 for alpha chain variable domain of TCR clone 316877 (TRAV30, TRAJ24)
CGTEIVDADSWGKFKF

SEQ ID NO: 633754 - protein, 14 aa, Homo sapiens
  CDR3 for beta chain variable domain of TCR clone 316877 (TRBV12-5, TRBJ2-5)
CASGSQTHQETQYF

SEQ ID NO: 633755 - protein, 14 aa, Homo sapiens
  CDR3 for alpha chain variable domain of TCR clone 316878 (TRAV1-1, TRAJ27)
CALIYNTNSVKSTF

SEQ ID NO: 633756 - protein, 15 aa, Homo sapiens
  CDR3 for beta chain variable domain of TCR clone 316878 (TRBV7-2, TRBJ2-1)
CASSSGLAGGNEQFF

SEQ ID NO: 633757 - protein, 14 aa, Homo sapiens
  CDR3 for alpha chain variable domain of TCR clone 316879 (TRAV38-1, TRAJ45)
CASHSGGGADGLTF

SEQ ID NO: 633758 - protein, 13 aa, Homo sapiens
  CDR3 for beta chain variable domain of TCR clone 316879 (TRBV12-4, TRBJ1-2)
CASSSGPNYGYTF

SEQ ID NO: 633759 - protein, 11 aa, Homo sapiens
  CDR3 for alpha chain variable domain of TCR clone 316880 (TRAV3, TRAJ21)
CALGNFNKFYF

SEQ ID NO: 633760 - protein, 14 aa, Homo sapiens
  CDR3 for beta chain variable domain of TCR clone 316880 (TRBV11-2, TRBJ1-5)
CASSLDRGRQPQHF

SEQ ID NO: 633761 - protein, 16 aa, Homo sapiens
  CDR3 for alpha chain variable domain of TCR clone 316881 (TRAV12-2, TRAJ45)
CAVIFLSGGGADGLTF

SEQ ID NO: 633762 - protein, 21 aa, Homo sapiens
  CDR3 for beta chain variable domain of TCR clone 316881 (TRBV28, TRBJ2-4)
CASSFQPEGQPIPKTFSTSAP

SEQ ID NO: 633763 - protein, 15 aa, Homo sapiens
  CDR3 for alpha chain variable domain of TCR clone 316882 (TRAV12-3, TRAJ6)
CAMSAASGGSYIPTF

SEQ ID NO: 633764 - protein, 13 aa, Homo sapiens
  CDR3 for beta chain variable domain of TCR clone 316882 (TRBV15, TRBJ2-7)
CATSTTGHYEQYF

SEQ ID NO: 633765 - protein, 15 aa, Homo sapiens
  CDR3 for alpha chain variable domain of TCR clone 316883 (TRAV26-1, TRAJ29)
CIVRVEGSGNKPLVF

SEQ ID NO: 633766 - protein, 15 aa, Homo sapiens
  CDR3 for beta chain variable domain of TCR clone 316883 (TRBV7-9, TRBJ1-5)
CASRQGHQPNQPQHF

SEQ ID NO: 633767 - protein, 14 aa, Homo sapiens
  CDR3 for alpha chain variable domain of TCR clone 316884 (TRAV1-2, TRAJ8)
CAGREDTGFQKLVF

SEQ ID NO: 633768 - protein, 15 aa, Homo sapiens
  CDR3 for beta chain variable domain of TCR clone 316884 (TRBV6-3, TRBJ2-7)
CASSSPGTAFYEQYF

SEQ ID NO: 633769 - protein, 13 aa, Homo sapiens
  CDR3 for alpha chain variable domain of TCR clone 316885 (TRAV13-2, TRAJ22)
CRDPSGSARQLTW

SEQ ID NO: 633770 - protein, 15 aa, Homo sapiens
  CDR3 for beta chain variable domain of TCR clone 316885 (TRBV11-3, TRBJ2-1)
CASSLAGQTYNEQFF

SEQ ID NO: 633771 - protein, 13 aa, Homo sapiens
  CDR3 for alpha chain variable domain of TCR clone 316886 (TRAV20, TRAJ31)
CAVQAWNNARLMF

SEQ ID NO: 633772 - protein, 15 aa, Homo sapiens
  CDR3 for beta chain variable domain of TCR clone 316886 (TRBV5-7, TRBJ2-7)
CASSLGPGRGHEQYF

SEQ ID NO: 633773 - protein, 14 aa, Homo sapiens
  CDR3 for alpha chain variable domain of TCR clone 316887 (TRAV1-2, TRAJ16)
CAVNRFSDGQKLLF

SEQ ID NO: 633774 - protein, 15 aa, Homo sapiens
  CDR3 for beta chain variable domain of TCR clone 316887 (TRBV27, TRBJ1-1)
CASSRYADPYTEAFF

SEQ ID NO: 633775 - protein, 16 aa, Homo sapiens
  CDR3 for alpha chain variable domain of TCR clone 316888 (TRAV12-2, TRAJ45)
CAVIFLSGGGADGLTF

SEQ ID NO: 633776 - protein, 19 aa, Homo sapiens
  CDR3 for beta chain variable domain of TCR clone 316888 (TRBV28, TRBJ2-4)
CARSSQPGGPAHSKNIQYF

SEQ ID NO: 633777 - protein, 15 aa, Homo sapiens
  CDR3 for alpha chain variable domain of TCR clone 316889 (TRAV12-2, TRAJ53)
CAGNGGGGSNSKLTF

SEQ ID NO: 633778 - protein, 17 aa, Homo sapiens
  CDR3 for beta chain variable domain of TCR clone 316889 (TRBV7-3, TRBJ2-3)
CASSLMKRMRGADTQYF

SEQ ID NO: 633779 - protein, 14 aa, Homo sapiens
  CDR3 for alpha chain variable domain of TCR clone 316890 (TRAV4, TRAJ17)
CLVGDMAAGNMLTF

SEQ ID NO: 633780 - protein, 14 aa, Homo sapiens
  CDR3 for beta chain variable domain of TCR clone 316890 (TRBV4-1, TRBJ2-7)
CASSPVAGGDEQYF

SEQ ID NO: 633781 - protein, 13 aa, Homo sapiens
  CDR3 for alpha chain variable domain of TCR clone 316891 (TRAV17, TRAJ9)
CATFLTGGFKTIF

SEQ ID NO: 633782 - protein, 14 aa, Homo sapiens
  CDR3 for beta chain variable domain of TCR clone 316891 (TRBV5-1, TRBJ2-7)
CASSRGESLYEQYF

SEQ ID NO: 633783 - protein, 17 aa, Homo sapiens
  CDR3 for alpha chain variable domain of TCR clone 316892 (TRAV3, TRAJ6)
CAVRDGPRAGGSYIPTF

SEQ ID NO: 633784 - protein, 14 aa, Homo sapiens
  CDR3 for beta chain variable domain of TCR clone 316892 (TRBV6-1, TRBJ1-3)
CASVQGGGGKTIYF

SEQ ID NO: 633785 - protein, 13 aa, Homo sapiens
  CDR3 for alpha chain variable domain of TCR clone 316893 (TRAV17, TRAJ4)
CAMKSGGYNKLIF

SEQ ID NO: 633786 - protein, 14 aa, Homo sapiens
  CDR3 for beta chain variable domain of TCR clone 316893 (TRBV20-1, TRBJ1-5)
CSARDDRGNQPQHF

SEQ ID NO: 633787 - protein, 14 aa, Homo sapiens
  CDR3 for alpha chain variable domain of TCR clone 316894 (TRAV12-1, TRAJ30)
CVVNIGNRDDKTIF

SEQ ID NO: 633788 - protein, 14 aa, Homo sapiens
  CDR3 for beta chain variable domain of TCR clone 316894 (TRBV7-9, TRBJ2-5)
CASSPRPSGETQYF

SEQ ID NO: 633789 - protein, 11 aa, Homo sapiens
  CDR3 for alpha chain variable domain of TCR clone 316895 (TRAV21, TRAJ34)
CAHYNTDKLIF

SEQ ID NO: 633790 - protein, 15 aa, Homo sapiens
  CDR3 for beta chain variable domain of TCR clone 316895 (TRBV5-1, TRBJ2-2)
CASSSQGGNTGELFF

SEQ ID NO: 633791 - protein, 13 aa, Homo sapiens
  CDR3 for alpha chain variable domain of TCR clone 316896 (TRAV13-1, TRAJ21)
CAASIYNFNKFSF

SEQ ID NO: 633792 - protein, 13 aa, Homo sapiens
  CDR3 for beta chain variable domain of TCR clone 316896 (TRBV27, TRBJ1-4)
CASSLMGNEKLFF

SEQ ID NO: 633793 - protein, 15 aa, Homo sapiens
  CDR3 for alpha chain variable domain of TCR clone 316897 (TRAV1-1, TRAJ36)
CAGHLNWGKQPLLWD

SEQ ID NO: 633794 - protein, 13 aa, Homo sapiens
  CDR3 for beta chain variable domain of TCR clone 316897 (TRBV7-2, TRBJ2-7)
CASSSPSGSEQYF

SEQ ID NO: 633795 - protein, 16 aa, Homo sapiens
  CDR3 for alpha chain variable domain of TCR clone 316898 (TRAV16, TRAJ52)
CALSAAGGTSYGKLNF

SEQ ID NO: 633796 - protein, 12 aa, Homo sapiens
  CDR3 for beta chain variable domain of TCR clone 316898 (TRBV12-4, TRBJ1-3)
CASSFSGNTIYF

SEQ ID NO: 633797 - protein, 17 aa, Homo sapiens
  CDR3 for alpha chain variable domain of TCR clone 316899 (TRAV12-1, TRAJ52)
CVVTPNAGGTSYGKLTF

SEQ ID NO: 633798 - protein, 14 aa, Homo sapiens
  CDR3 for beta chain variable domain of TCR clone 316899 (TRBV25-1, TRBJ1-1)
CASTHLGGNTEAFF

SEQ ID NO: 633799 - protein, 14 aa, Homo sapiens
  CDR3 for alpha chain variable domain of TCR clone 316900 (TRAV12-2, TRAJ13)
CAVKKAGCYQKVTF

SEQ ID NO: 633800 - protein, 15 aa, Homo sapiens
  CDR3 for beta chain variable domain of TCR clone 316900 (TRBV27, TRBJ2-1)
CASSNGGGSSNEQFF

SEQ ID NO: 633801 - protein, 13 aa, Homo sapiens
  CDR3 for alpha chain variable domain of TCR clone 316901 (TRAV3, TRAJ21)
CSVREPDFNKFYF

SEQ ID NO: 633802 - protein, 16 aa, Homo sapiens
  CDR3 for beta chain variable domain of TCR clone 316901 (TRBV27, TRBJ2-2)
CASSFRGLVRTGELFF

SEQ ID NO: 633803 - protein, 18 aa, Homo sapiens
  CDR3 for alpha chain variable domain of TCR clone 316902 (TRAV29/DV5, TRAJ53)
CSVLLRSKRGGSNYKLTF

SEQ ID NO: 633804 - protein, 17 aa, Homo sapiens
  CDR3 for beta chain variable domain of TCR clone 316902 (TRBV7-8, TRBJ2-6)
CASSAGTGGAGANVLTF

SEQ ID NO: 633805 - protein, 11 aa, Homo sapiens
  CDR3 for alpha chain variable domain of TCR clone 316903 (TRAV23/DV6, TRAJ48)
CAPRWGEKLTF

SEQ ID NO: 633806 - protein, 20 aa, Homo sapiens
  CDR3 for beta chain variable domain of TCR clone 316903 (TRBV7-8, TRBJ2-2)
CASSHLFPGPTIHITGELFF

SEQ ID NO: 633807 - protein, 17 aa, Homo sapiens
  CDR3 for alpha chain variable domain of TCR clone 316904 (TRAV13-2, TRAJ42)
CAEKGKNYVGSQGNLIF

SEQ ID NO: 633808 - protein, 16 aa, Homo sapiens
  CDR3 for beta chain variable domain of TCR clone 316904 (TRBV7-9, TRBJ2-1)
CASSLGTGWDYNEQFF

SEQ ID NO: 633809 - protein, 11 aa, Homo sapiens
  CDR3 for alpha chain variable domain of TCR clone 316905 (TRAV2, TRAJ21)
CAVFNFNKFYF

SEQ ID NO: 633810 - protein, 15 aa, Homo sapiens
  CDR3 for beta chain variable domain of TCR clone 316905 (TRBV29-1, TRBJ2-7)
CSVEFFDRGSYEQYF

SEQ ID NO: 633811 - protein, 17 aa, Homo sapiens
  CDR3 for alpha chain variable domain of TCR clone 316906 (TRAV23/DV6, TRAJ57)
CAASSTLPQGGSEKLVL

SEQ ID NO: 633812 - protein, 13 aa, Homo sapiens
  CDR3 for beta chain variable domain of TCR clone 316906 (TRBV15, TRBJ1-6)
CATSGGLNSPLHF

SEQ ID NO: 633813 - protein, 12 aa, Homo sapiens
  CDR3 for alpha chain variable domain of TCR clone 316907 (TRAV13-1, TRAJ40)
CAAGKGTYKYIF

SEQ ID NO: 633814 - protein, 15 aa, Homo sapiens
  CDR3 for beta chain variable domain of TCR clone 316907 (TRBV6-3, TRBJ2-7)
CASSSPGTVFYEQYF

SEQ ID NO: 633815 - protein, 16 aa, Homo sapiens
  CDR3 for alpha chain variable domain of TCR clone 316908 (TRAV38-2/DV8, TRAJ57)
CAYRRRAQGGSEKLVF

SEQ ID NO: 633816 - protein, 20 aa, Homo sapiens
  CDR3 for beta chain variable domain of TCR clone 316908 (TRBV11-2, TRBJ1-6)
CASSLVFATGGSVHPSTLGT

SEQ ID NO: 633817 - protein, 14 aa, Homo sapiens
  CDR3 for alpha chain variable domain of TCR clone 316909 (TRAV27, TRAJ23)
CAGLSYNQGGKLIF

SEQ ID NO: 633818 - protein, 15 aa, Homo sapiens
  CDR3 for beta chain variable domain of TCR clone 316909 (TRBV20-1, TRBJ2-7)
CSARDRVSGMDEQCF

SEQ ID NO: 633819 - protein, 15 aa, Homo sapiens
  CDR3 for alpha chain variable domain of TCR clone 316910 (TRAV3, TRAJ5)
CAVRDLDTGRSALTF

SEQ ID NO: 633820 - protein, 13 aa, Homo sapiens
  CDR3 for beta chain variable domain of TCR clone 316910 (TRBV12-4, TRBJ2-7)
CASSPTETYEQYV

SEQ ID NO: 633821 - protein, 12 aa, Homo sapiens
  CDR3 for alpha chain variable domain of TCR clone 316911 (TRAV8-3, TRAJ20)
CAVGADDYKLSF

SEQ ID NO: 633822 - protein, 12 aa, Homo sapiens
  CDR3 for beta chain variable domain of TCR clone 316911 (TRBV2, TRBJ2-1)
CAYGPPGNEQFF

SEQ ID NO: 633823 - protein, 13 aa, Homo sapiens
  CDR3 for alpha chain variable domain of TCR clone 316912 (TRAV8-3, TRAJ20)
CAVGRPNDYKLSF

SEQ ID NO: 633824 - protein, 14 aa, Homo sapiens
  CDR3 for beta chain variable domain of TCR clone 316912 (TRBV12-5, TRBJ2-5)
CASGSRTNQETQYF

SEQ ID NO: 633825 - protein, 17 aa, Homo sapiens
  CDR3 for alpha chain variable domain of TCR clone 316913 (TRAV3, TRAJ38)
CAVRDCLNAGNNRKLIW

SEQ ID NO: 633826 - protein, 15 aa, Homo sapiens
  CDR3 for beta chain variable domain of TCR clone 316913 (TRBV27, TRBJ2-1)
CASSNGGGSSSEQFF

SEQ ID NO: 633827 - protein, 13 aa, Homo sapiens
  CDR3 for alpha chain variable domain of TCR clone 316914 (TRAV3, TRAJ20)
CCEAFCNDHKLSF

SEQ ID NO: 633828 - protein, 15 aa, Homo sapiens
  CDR3 for beta chain variable domain of TCR clone 316914 (TRBV19, TRBJ2-6)
CASVRRDSGAHVLTF

SEQ ID NO: 633829 - protein, 14 aa, Homo sapiens
  CDR3 for alpha chain variable domain of TCR clone 316915 (TRAV8-6, TRAJ9)
CAVSSYTGGFNTIF

SEQ ID NO: 633830 - protein, 15 aa, Homo sapiens
  CDR3 for beta chain variable domain of TCR clone 316915 (TRBV2, TRBJ1-2)
CASSESRTVNYGYTF

SEQ ID NO: 633831 - protein, 12 aa, Homo sapiens
  CDR3 for alpha chain variable domain of TCR clone 316916 (TRAV12-1, TRAJ40)
CMFYSGTYKYIF

SEQ ID NO: 633832 - protein, 18 aa, Homo sapiens
  CDR3 for beta chain variable domain of TCR clone 316916 (TRBV12-4, TRBJ2-2)
CASSLVAGTRGRTGELFF

SEQ ID NO: 633833 - protein, 13 aa, Homo sapiens
  CDR3 for alpha chain variable domain of TCR clone 316917 (TRAV20, TRAJ42)
CAVQGGSQGNLIF

SEQ ID NO: 633834 - protein, 12 aa, Homo sapiens
  CDR3 for beta chain variable domain of TCR clone 316917 (TRBV11-2, TRBJ2-2)
CASSLGGGELFF

SEQ ID NO: 633835 - protein, 14 aa, Homo sapiens
  CDR3 for alpha chain variable domain of TCR clone 316918 (TRAV1-2, TRAJ27)
CAVRSGTNAGKSTF

SEQ ID NO: 633836 - protein, 13 aa, Homo sapiens
  CDR3 for beta chain variable domain of TCR clone 316918 (TRBV12-4, TRBJ2-7)
CASSPTETYEQYF

SEQ ID NO: 633837 - protein, 16 aa, Homo sapiens
  CDR3 for alpha chain variable domain of TCR clone 316919 (TRAV20, TRAJ10)
CAVLRGLTGGGNKLTF

SEQ ID NO: 633838 - protein, 14 aa, Homo sapiens
  CDR3 for beta chain variable domain of TCR clone 316919 (TRBV19, TRBJ1-5)
CASIAPDSFLSQHF

SEQ ID NO: 633839 - protein, 13 aa, Homo sapiens
  CDR3 for alpha chain variable domain of TCR clone 316920 (TRAV12-1, TRAJ26)
CVVRRDYGQNFVF

SEQ ID NO: 633840 - protein, 14 aa, Homo sapiens
  CDR3 for beta chain variable domain of TCR clone 316920 (TRBV6-3, TRBJ1-1)
CASRYTGESTDAFF

SEQ ID NO: 633841 - protein, 16 aa, Homo sapiens
  CDR3 for alpha chain variable domain of TCR clone 316921 (TRAV12-1, TRAJ45)
CVVIRYSGGGADGLTF

SEQ ID NO: 633842 - protein, 12 aa, Homo sapiens
  CDR3 for beta chain variable domain of TCR clone 316921 (TRBV6-5, TRBJ2-2)
CASRQITWELFF

SEQ ID NO: 633843 - protein, 14 aa, Homo sapiens
  CDR3 for alpha chain variable domain of TCR clone 316922 (TRAV26-1, TRAJ45)
CIEVTGGGADGLTF

SEQ ID NO: 633844 - protein, 13 aa, Homo sapiens
  CDR3 for beta chain variable domain of TCR clone 316922 (TRBV7-6, TRBJ1-2)
CASSLVADSGYTF

SEQ ID NO: 633845 - protein, 15 aa, Homo sapiens
  CDR3 for alpha chain variable domain of TCR clone 316923 (TRAV34, TRAJ38)
CGADFTPGNNRKLIW

SEQ ID NO: 633846 - protein, 17 aa, Homo sapiens
  CDR3 for beta chain variable domain of TCR clone 316923 (TRBV7-3, TRBJ2-3)
CASSLMKRMRGADTQYF

SEQ ID NO: 633847 - protein, 13 aa, Homo sapiens
  CDR3 for alpha chain variable domain of TCR clone 316924 (TRAV26-2, TRAJ43)
CILRAVNNNDMRS

SEQ ID NO: 633848 - protein, 13 aa, Homo sapiens
  CDR3 for beta chain variable domain of TCR clone 316924 (TRBV20-1, TRBJ1-2)
CSATGIQGSGYTF

SEQ ID NO: 633849 - protein, 13 aa, Homo sapiens
  CDR3 for alpha chain variable domain of TCR clone 316925 (TRAV17, TRAJ15)
CATDARAGTALIF

SEQ ID NO: 633850 - protein, 15 aa, Homo sapiens
  CDR3 for beta chain variable domain of TCR clone 316925 (TRBV20-1, TRBJ2-7)
CSARDRVSGMDEQCF

SEQ ID NO: 633851 - protein, 13 aa, Homo sapiens
  CDR3 for alpha chain variable domain of TCR clone 316926 (TRAV35, TRAJ48)
CAGHEFGNEKLTF

SEQ ID NO: 633852 - protein, 15 aa, Homo sapiens
  CDR3 for beta chain variable domain of TCR clone 316926 (TRBV27, TRBJ2-7)
CDSSPQREGQREQYF

SEQ ID NO: 633853 - protein, 13 aa, Homo sapiens
  CDR3 for alpha chain variable domain of TCR clone 316927 (TRAV27, TRAJ6)
CAGGTRGSYIPTF

SEQ ID NO: 633854 - protein, 15 aa, Homo sapiens
  CDR3 for beta chain variable domain of TCR clone 316927 (TRBV7-2, TRBJ2-3)
CASSSTGLETDTQYF

SEQ ID NO: 633855 - protein, 14 aa, Homo sapiens
  CDR3 for alpha chain variable domain of TCR clone 316928 (TRAV13-1, TRAJ35)
CAASKGGFGNVLHC

SEQ ID NO: 633856 - protein, 20 aa, Homo sapiens
  CDR3 for beta chain variable domain of TCR clone 316928 (TRBV12-4, TRBJ2-3)
CASSLPITIERVPSTDTQYF

SEQ ID NO: 633857 - protein, 15 aa, Homo sapiens
  CDR3 for alpha chain variable domain of TCR clone 316929 (TRAV8-4, TRAJ7)
CAVSGGNYGNNRLAC

SEQ ID NO: 633858 - protein, 11 aa, Homo sapiens
  CDR3 for beta chain variable domain of TCR clone 316929 (TRBV20-1, TRBJ2-1)
CSLSSGSEQFF

SEQ ID NO: 633859 - protein, 17 aa, Homo sapiens
  CDR3 for alpha chain variable domain of TCR clone 316930 (TRAV13-1, TRAJ28)
CAASPPYSGAGSYQLTF

SEQ ID NO: 633860 - protein, 16 aa, Homo sapiens
  CDR3 for beta chain variable domain of TCR clone 316930 (TRBV20-1, TRBJ1-5)
CSASRGTGYSNQPQHF

SEQ ID NO: 633861 - protein, 14 aa, Homo sapiens
  CDR3 for alpha chain variable domain of TCR clone 316931 (TRAV8-3, TRAJ9)
CAVVYNTGGFKTIF

SEQ ID NO: 633862 - protein, 13 aa, Homo sapiens
  CDR3 for beta chain variable domain of TCR clone 316931 (TRBV7-9, TRBJ2-3)
CASSPGSTDTQYF

SEQ ID NO: 633863 - protein, 14 aa, Homo sapiens
  CDR3 for alpha chain variable domain of TCR clone 316932 (TRAV3, TRAJ21)
CAVESQANFNKFYF

SEQ ID NO: 633864 - protein, 12 aa, Homo sapiens
  CDR3 for beta chain variable domain of TCR clone 316932 (TRBV6-3, TRBJ2-7)
CASSRAPYEQYF

SEQ ID NO: 633865 - protein, 14 aa, Homo sapiens
  CDR3 for alpha chain variable domain of TCR clone 316933 (TRAV8-4, TRAJ9)
CAVSDRPGGFKTIF

SEQ ID NO: 633866 - protein, 13 aa, Homo sapiens
  CDR3 for beta chain variable domain of TCR clone 316933 (TRBV11-2, TRBJ2-7)
CASSLGDSYEQYF

SEQ ID NO: 633867 - protein, 15 aa, Homo sapiens
  CDR3 for alpha chain variable domain of TCR clone 316934 (TRAV17, TRAJ22)
CATAALLGSARKLTF

SEQ ID NO: 633868 - protein, 13 aa, Homo sapiens
  CDR3 for beta chain variable domain of TCR clone 316934 (TRBV29-1, TRBJ2-3)
CSVVPQGGDTQYF

SEQ ID NO: 633869 - protein, 14 aa, Homo sapiens
  CDR3 for alpha chain variable domain of TCR clone 316935 (TRAV12-1, TRAJ30)
CVVNIGGRDDKIIF

SEQ ID NO: 633870 - protein, 14 aa, Homo sapiens
  CDR3 for beta chain variable domain of TCR clone 316935 (TRBV19, TRBJ2-1)
CASPTFVLSGEQFF

SEQ ID NO: 633871 - protein, 14 aa, Homo sapiens
  CDR3 for alpha chain variable domain of TCR clone 316936 (TRAV12-2, TRAJ3)
CAVSLYSSSSKIIF

SEQ ID NO: 633872 - protein, 14 aa, Homo sapiens
  CDR3 for beta chain variable domain of TCR clone 316936 (TRBV27, TRBJ2-1)
CAGSIAETYNEQFF

SEQ ID NO: 633873 - protein, 14 aa, Homo sapiens
  CDR3 for alpha chain variable domain of TCR clone 316937 (TRAV1-2, TRAJ8)
CAVRENTGFQKLVF

SEQ ID NO: 633874 - protein, 16 aa, Homo sapiens
  CDR3 for beta chain variable domain of TCR clone 316937 (TRBV7-6, TRBJ2-6)
CASSLPGLSGANVLTF

SEQ ID NO: 633875 - protein, 14 aa, Homo sapiens
  CDR3 for alpha chain variable domain of TCR clone 316938 (TRAV12-2, TRAJ6)
RASKWGGGSYIPTF

SEQ ID NO: 633876 - protein, 16 aa, Homo sapiens
  CDR3 for beta chain variable domain of TCR clone 316938 (TRBV7-3, TRBJ2-2)
CASSLKRGTLSGELFF

SEQ ID NO: 633877 - protein, 14 aa, Homo sapiens
  CDR3 for alpha chain variable domain of TCR clone 316939 (TRAV8-3, TRAJ6)
CAVGASGGSYIPTF

SEQ ID NO: 633878 - protein, 17 aa, Homo sapiens
  CDR3 for beta chain variable domain of TCR clone 316939 (TRBV18, TRBJ2-2)
CASSSTDPWQNTGELFF

SEQ ID NO: 633879 - protein, 15 aa, Homo sapiens
  CDR3 for alpha chain variable domain of TCR clone 316940 (TRAV38-2/DV8, TRAJ45)
CAYWDLGGGVDGLTF

SEQ ID NO: 633880 - protein, 14 aa, Homo sapiens
  CDR3 for beta chain variable domain of TCR clone 316940 (TRBV7-2, TRBJ2-7)
CASRSQGAAYEQYF
